United States Patent Application Publication US 2019/0290729 A1 - sequence listing, part 5

SEQ ID NO: 52818 - protein, 36 aa, Artificial Sequence; identical to SEQ ID NO: 11523
  Cyclic GFR-binding peptide
  MOD_RES (5)..(6): Xaa is C or S

SEQ ID NO: 52819 - protein, 33 aa, Artificial Sequence; identical to SEQ ID NO: 11524
  Cyclic GFR-binding peptide
  MOD_RES (32)..(32): Xaa is C or S

SEQ ID NO: 52820 - protein, 35 aa, Artificial Sequence
  Cyclic GFR-binding peptide
  MOD_RES (5)..(6): Xaa is C or S
IPKAXXVPTELSPISMLFIDENEKVVYKQYEDMVV

SEQ ID NO: 52821 - protein, 32 aa, Artificial Sequence
  Cyclic GFR-binding peptide
  MOD_RES (3)..(4): Xaa is C or S
PTXXVPTRLEPLPIVYYDSANNVVEQLSNDMV

SEQ ID NO: 52822 - protein, 29 aa, Artificial Sequence
  Cyclic GFR-binding peptide
  MOD_RES (3)..(4): Xaa is C or S
KPXXAPTKLEPLTVLYYDDSSNVIEQLSN

SEQ ID NO: 52823 - protein, 34 aa, Artificial Sequence; identical to SEQ ID NO: 11525
  Cyclic GFR-binding peptide
  MOD_RES (1)..(2)..(34): Xaa is C or S

SEQ ID NO: 52824 - protein, 27 aa, Artificial Sequence
  Cyclic GFR-binding peptide
  MOD_RES (1)..(1): Xaa is C or S
XVPTELSPISMLFIDEYDKVVYKQYEE

SEQ ID NO: 52825 - protein, 26 aa, Artificial Sequence
  Cyclic GFR-binding peptide
ALEPLTILYYVGRKPKVEQLSNMIVR

SEQ ID NO: 52826 - protein, 37 aa, Artificial Sequence; identical to SEQ ID NO: 11526
  Cyclic GFR-binding peptide
  MOD_RES (4)..(36): Xaa is C or S

SEQ ID NO: 52827 - protein, 35 aa, Artificial Sequence
  Cyclic GFR-binding peptide
  MOD_RES (5)..(6): Xaa is C or S
VPKPXXAPTQLSPISVLFIDDSSNVIYKQYENMVV

SEQ ID NO: 52828 - protein, 37 aa, Artificial Sequence; identical to SEQ ID NO: 11528
  Cyclic GFR-binding peptide
  MOD_RES (5)..(6): Xaa is C or S

SEQ ID NO: 52829 - protein, 26 aa, Artificial Sequence
  Cyclic GFR-binding peptide
PTRLEPLPIVYYDSANNVVEQLSNDM

SEQ ID NO: 52830 - protein, 31 aa, Artificial Sequence
  Cyclic GFR-binding peptide
  MOD_RES (1)..(2): Xaa is C or S
XXVPQDLEPLPIVYYVGRTPKVEQLSNMVVK

SEQ ID NO: 52831 - protein, 29 aa, Artificial Sequence
  Cyclic GFR-binding peptide
  MOD_RES (27)..(29): Xaa is C or S
EPLPMVYYDEYDKVVEQLSNEMVVEGXGX

SEQ ID NO: 52832 - protein, 35 aa, Artificial Sequence; identical to SEQ ID NO: 11532
  Cyclic GFR-binding peptide
  MOD_RES (1)..(33)..(35): Xaa is C or S

SEQ ID NO: 52833 - protein, 29 aa, Artificial Sequence
  Cyclic GFR-binding peptide
TRLSAISILYLDSANNVVLKNYQDMVVES

SEQ ID NO: 52834 - protein, 35 aa, Artificial Sequence; identical to SEQ ID NO: 11534
  Cyclic GFR-binding peptide
  MOD_RES (32)..(34): Xaa is C or S

SEQ ID NO: 52835 - protein, 27 aa, Artificial Sequence
  Cyclic GFR-binding peptide
VPTRLEPLPIVYYDSANNVVEQLSNDM

SEQ ID NO: 52836 - protein, 27 aa, Artificial Sequence
  Cyclic GFR-binding peptide
  MOD_RES (27)..(27): Xaa is C or S
EPLPVVYYDDSSNVIEQLSNNMVVRSX

SEQ ID NO: 52837 - protein, 25 aa, Artificial Sequence
  Cyclic GFR-binding peptide
QLSPISVLFIDDSSNVIYKQYENMV

SEQ ID NO: 52838 - protein, 39 aa, Artificial Sequence; identical to SEQ ID NO: 11541
  Cyclic GFR-binding peptide
  MOD_RES (5)..(6)..(37)..(39): Xaa is C or S

SEQ ID NO: 52839 - protein, 33 aa, Artificial Sequence
  Cyclic GFR-binding peptide
  MOD_RES (31)..(33): Xaa is C or S
PTKLSPISVLFIDDSSNVIYKQYENMVVRSXGX

SEQ ID NO: 52840 - protein, 30 aa, Artificial Sequence
  Cyclic GFR-binding peptide
  MOD_RES (2)..(3): Xaa is C or S
PXXVPQDLSPISILFIVGRTPKVYKQYEMV

SEQ ID NO: 52841 - protein, 33 aa, Artificial Sequence; identical to SEQ ID NO: 11543
  Cyclic GFR-binding peptide
  MOD_RES (2)..(3): Xaa is C or S

SEQ ID NO: 52842 - protein, 31 aa, Artificial Sequence
  Cyclic GFR-binding peptide
  MOD_RES (2)..(3): Xaa is C or S
AXXVPTELSPISMLFIDENEKVVYKQYEDMV

SEQ ID NO: 52843 - protein, 32 aa, Artificial Sequence
  Cyclic GFR-binding peptide
  MOD_RES (29)..(31): Xaa is C or S
KLSPISVLFIDDSSNVIYKQYENMVVRSXGXH

SEQ ID NO: 52844 - protein, 31 aa, Artificial Sequence
  Cyclic GFR-binding peptide
  MOD_RES (4)..(5): Xaa is C or S
PKPXXAPTQLSPISVLFIDDSSNVIYKQYEN

SEQ ID NO: 52845 - protein, 26 aa, Artificial Sequence
  Cyclic GFR-binding peptide
APTKLSPISVLFIDDSSNVIYKQYEN

SEQ ID NO: 52846 - protein, 32 aa, Artificial Sequence; identical to SEQ ID NO: 11551
  Cyclic GFR-binding peptide
  MOD_RES (1)..(2): Xaa is C or S

SEQ ID NO: 52847 - protein, 29 aa, Artificial Sequence
  Cyclic GFR-binding peptide
  MOD_RES (3)..(4): Xaa is C or S
APXXVPQALSPISILFIVGRKPKVYKQYE

SEQ ID NO: 52848 - protein, 30 aa, Artificial Sequence
  Cyclic GFR-binding peptide
  MOD_RES (28)..(30): Xaa is C or S
DLSPISILFIIGKTPKIYKQYEMIVKSXKX

SEQ ID NO: 52849 - protein, 31 aa, Artificial Sequence
  Cyclic GFR-binding peptide
  MOD_RES (1)..(2): Xaa is C or S
XXVPTELSPISMLFIDEYDKVVYKQYEEMVV

SEQ ID NO: 52850 - protein, 34 aa, Artificial Sequence; identical to SEQ ID NO: 11555
  Cyclic GFR-binding peptide
  MOD_RES (3)..(4): Xaa is C or S

SEQ ID NO: 52851 - protein, 32 aa, Artificial Sequence
  Cyclic GFR-binding peptide
  MOD_RES (6)..(6): Xaa is C or S
VTKPTXAPTKLEPLPVVYYDDSSNVIEQLSNN

SEQ ID NO: 52852 - protein, 25 aa, Artificial Sequence
  Cyclic GFR-binding peptide
EPLTILYYVGRKPKVEQLSNMIVRS

SEQ ID NO: 52853 - protein, 36 aa, Artificial Sequence; identical to SEQ ID NO: 11557
  Cyclic GFR-binding peptide
  MOD_RES (5)..(6): Xaa is C or S

SEQ ID NO: 52854 - protein, 24 aa, Artificial Sequence
  Cyclic GFR-binding peptide
LSPISILFIVGRKPKVYKQYEMIV

SEQ ID NO: 52855 - protein, 32 aa, Artificial Sequence; identical to SEQ ID NO: 11558
  Cyclic GFR-binding peptide
  MOD_RES (1)..(32): Xaa is C or S

SEQ ID NO: 52856 - protein, 32 aa, Artificial Sequence
  Cyclic GFR-binding peptide
  MOD_RES (29)..(31): Xaa is C or S
RLNAISILYFDSANNVVLKKYRDMVVESXGXR

SEQ ID NO: 52857 - protein, 28 aa, Artificial Sequence
  Cyclic GFR-binding peptide
  MOD_RES (2)..(3): Xaa is C or S
AXXVPTELSPISMLFIDENEKVVYKQYE

SEQ ID NO: 52858 - protein, 37 aa, Artificial Sequence; identical to SEQ ID NO: 11560
  Cyclic GFR-binding peptide
  MOD_RES (6)..(7): Xaa is C or S

SEQ ID NO: 52859 - protein, 31 aa, Artificial Sequence
  Cyclic GFR-binding peptide
  MOD_RES (5)..(6): Xaa is C or S
VPKPXXAPTQLSPISVLFIDDSSNVIYKQYE

SEQ ID NO: 52860 - protein, 33 aa, Artificial Sequence; identical to SEQ ID NO: 11561
  Cyclic GFR-binding peptide
  MOD_RES (2)..(2): Xaa is C or S

SEQ ID NO: 52861 - protein, 32 aa, Artificial Sequence; identical to SEQ ID NO: 11562
  Cyclic GFR-binding peptide
  MOD_RES (32)..(32): Xaa is C or S

SEQ ID NO: 52862 - protein, 35 aa, Artificial Sequence; identical to SEQ ID NO: 11563
  Cyclic GFR-binding peptide
  MOD_RES (2)..(34): Xaa is C or S

SEQ ID NO: 52863 - protein, 32 aa, Artificial Sequence
  Cyclic GFR-binding peptide
  MOD_RES (4)..(5): Xaa is C or S
PKAXXVPTELSPISMLFIDENEKVVYKQYEDM

SEQ ID NO: 52864 - protein, 28 aa, Artificial Sequence
  Cyclic GFR-binding peptide
APTQLEPLPVVYYDDSSNVIEQLSNNMV

SEQ ID NO: 52865 - protein, 35 aa, Artificial Sequence; identical to SEQ ID NO: 11565
  Cyclic GFR-binding peptide
  MOD_RES (32)..(34): Xaa is C or S

SEQ ID NO: 52866 - protein, 30 aa, Artificial Sequence
  Cyclic GFR-binding peptide
PTKLSPISVLFIDDSSNVIYKQYENMVVRS

SEQ ID NO: 52867 - protein, 26 aa, Artificial Sequence
  Cyclic GFR-binding peptide
VPTRLSAISILYLDSANNVVLKNYQD

SEQ ID NO: 52868 - protein, 29 aa, Artificial Sequence
  Cyclic GFR-binding peptide
  MOD_RES (29)..(29): Xaa is C or S
QALSPISILFIVGRKPKVYKQYEMIVRSX

SEQ ID NO: 52869 - protein, 37 aa, Artificial Sequence; identical to SEQ ID NO: 11571
  Cyclic GFR-binding peptide
  MOD_RES (5)..(6)..(37): Xaa is C or S

SEQ ID NO: 52870 - protein, 35 aa, Artificial Sequence; identical to SEQ ID NO: 11572
  Cyclic GFR-binding peptide
  MOD_RES (1)..(2)..(33)..(35): Xaa is C or S

SEQ ID NO: 52871 - protein, 24 aa, Artificial Sequence
  Cyclic GFR-binding peptide
ALEPLTILYYVGRKPKVEQLSNMI

SEQ ID NO: 52872 - protein, 30 aa, Artificial Sequence
  Cyclic GFR-binding peptide
  MOD_RES (4)..(5): Xaa is C or S
PKAXXVPTELEPLPMVYYDEYDKVVEQLSN

SEQ ID NO: 52873 - protein, 36 aa, Artificial Sequence; identical to SEQ ID NO: 11574
  Cyclic GFR-binding peptide
  MOD_RES (1)..(33)..(35): Xaa is C or S

SEQ ID NO: 52874 - protein, 31 aa, Artificial Sequence
  Cyclic GFR-binding peptide
  MOD_RES (28)..(30): Xaa is C or S
DLEPLPIVYYIGKTPKIEQLSNMIVKSXKXS

SEQ ID NO: 52875 - protein, 35 aa, Artificial Sequence; identical to SEQ ID NO: 11577
  Cyclic GFR-binding peptide
  MOD_RES (1)..(2)..(34): Xaa is C or S

SEQ ID NO: 52876 - protein, 31 aa, Artificial Sequence
  Cyclic GFR-binding peptide
  MOD_RES (29)..(31): Xaa is C or S
QDLEPLPIVYYVGRTPKVEQLSNMVVKSXKX

SEQ ID NO: 52877 - protein, 39 aa, Artificial Sequence; identical to SEQ ID NO: 11579
  Cyclic GFR-binding peptide
  MOD_RES (5)..(6)..(37)..(39): Xaa is C or S

SEQ ID NO: 52878 - protein, 34 aa, Artificial Sequence
  Cyclic GFR-binding peptide
  MOD_RES (6)..(7): Xaa is C or S
ASAAPXXVPQALEPLTILYYVGRKPKVEQLSNMI

SEQ ID NO: 52879 - protein, 29 aa, Artificial Sequence
  Cyclic GFR-binding peptide
  MOD_RES (1)..(2): Xaa is C or S
XXAPTKLEPLTVLYYDDSSNVIEQLSNNM

SEQ ID NO: 52880 - protein, 29 aa, Artificial Sequence
  Cyclic GFR-binding peptide
  MOD_RES (2)..(3): Xaa is C or S
PXXAPTQLEPLPVVYYDDSSNVIEQLSNN

SEQ ID NO: 52881 - protein, 24 aa, Artificial Sequence
  Cyclic GFR-binding peptide
TKLSPISVLFIDDSSNVIYKQYEN

SEQ ID NO: 52882 - protein, 30 aa, Artificial Sequence; identical to SEQ ID NO: 1078
  Cyclic GFR-binding peptide

SEQ ID NO: 52883 - protein, 20 aa, Artificial Sequence
  Cyclic GFR-binding peptide
EPLPIVYYVGRKPKVEQLSN

SEQ ID NO: 52884 - protein, 31 aa, Artificial Sequence
  Cyclic GFR-binding peptide
  MOD_RES (5)..(5): Xaa is C or S
TKPTXAPTKLEPLTVLYYDDSSNVIEQLSNN

SEQ ID NO: 52885 - protein, 26 aa, Artificial Sequence
  Cyclic GFR-binding peptide
LEPLPMVYYDENEKVVEQLSNDMVVE

SEQ ID NO: 52886 - protein, 26 aa, Artificial Sequence
  Cyclic GFR-binding peptide
PTELSPISMLFIDEYDKVVYKQYEEM

SEQ ID NO: 52887 - protein, 33 aa, Artificial Sequence
  Cyclic GFR-binding peptide
  MOD_RES (30)..(32): Xaa is C or S
TELEPLTMLYYDENEKVVEQLSNDMVVEGXGXR

SEQ ID NO: 52888 - protein, 23 aa, Artificial Sequence
  Cyclic GFR-binding peptide
LSPISMLFIDEYDKVVYKQYEEM

SEQ ID NO: 52889 - protein, 33 aa, Artificial Sequence
  Cyclic GFR-binding peptide
  MOD_RES (31)..(33): Xaa is C or S
PTRLNAISILYFDSANNVVLKKYRDMVVESXGX

SEQ ID NO: 52890 - protein, 26 aa, Artificial Sequence
  Cyclic GFR-binding peptide
ELSPISMLFIDEYDKVVYKQYEEMVV

SEQ ID NO: 52891 - protein, 23 aa, Artificial Sequence
  Cyclic GFR-binding peptide
ALSPISILFIVGRKPKVYKQYEM

SEQ ID NO: 52892 - protein, 21 aa, Artificial Sequence
  Cyclic GFR-binding peptide
LEPLTILYYVGRKPKVEQLSN

SEQ ID NO: 52893 - protein, 32 aa, Artificial Sequence; identical to SEQ ID NO: 11583
  Cyclic GFR-binding peptide
  MOD_RES (1)..(1): Xaa is C or S

SEQ ID NO: 52894 - protein, 41 aa, Artificial Sequence; identical to SEQ ID NO: 11585
  Cyclic GFR-binding peptide
  MOD_RES (5)..(6)..(38)..(40): Xaa is C or S

SEQ ID NO: 52895 - protein, 28 aa, Artificial Sequence
  Cyclic GFR-binding peptide
  MOD_RES (1)..(1): Xaa is C or S
XAPTKLSPISVLFIDDSSNVIYKQYENM

SEQ ID NO: 52896 - protein, 29 aa, Artificial Sequence
  Cyclic GFR-binding peptide
  MOD_RES (29)..(29): Xaa is C or S
RLEPLPIVYYDSANNVVEQLSNDMVVESX

SEQ ID NO: 52897 - protein, 30 aa, Artificial Sequence
  Cyclic GFR-binding peptide
  MOD_RES (2)..(3): Xaa is C or S
AXXVPTELSPISMLFIDEYDKVVYKQYEEM

SEQ ID NO: 52898 - protein, 33 aa, Artificial Sequence; identical to SEQ ID NO: 11588
  Cyclic GFR-binding peptide
  MOD_RES (1)..(33): Xaa is C or S

SEQ ID NO: 52899 - protein, 28 aa, Artificial Sequence
  Cyclic GFR-binding peptide
KLSPISVLFIDDSSNVIYKQYENMVVRS

SEQ ID NO: 52900 - protein, 32 aa, Artificial Sequence
  Cyclic GFR-binding peptide
  MOD_RES (4)..(5): Xaa is C or S
PKPXXAPTKLEPLPVVYYDDSSNVIEQLSNNM

SEQ ID NO: 52901 - protein, 39 aa, Artificial Sequence; identical to SEQ ID NO: 11591
  Cyclic GFR-binding peptide
  MOD_RES (3)..(4)..(36)..(38): Xaa is C or S

SEQ ID NO: 52902 - protein, 24 aa, Artificial Sequence
  Cyclic GFR-binding peptide
EPLTILYYVGRKPKVEQLSNMIVR

SEQ ID NO: 52903 - protein, 27 aa, Artificial Sequence
  Cyclic GFR-binding peptide
  MOD_RES (1)..(2): Xaa is C or S
XXVPQALSPISILFIVGRKPKVYKQYE

SEQ ID NO: 52904 - protein, 35 aa, Artificial Sequence; identical to SEQ ID NO: 11594
  Cyclic GFR-binding peptide
  MOD_RES (5)..(5): Xaa is C or S

SEQ ID NO: 52905 - protein, 42 aa, Artificial Sequence; identical to SEQ ID NO: 11595
  Cyclic GFR-binding peptide
  MOD_RES (6)..(7)..(39)..(41): Xaa is C or S

SEQ ID NO: 52906 - protein, 27 aa, Artificial Sequence
  Cyclic GFR-binding peptide
VPTELEPLTMLYYDEYDKVVEQLSNEM

SEQ ID NO: 52907 - protein, 31 aa, Artificial Sequence
  Cyclic GFR-binding peptide
  MOD_RES (5)..(5): Xaa is C or S
TKPTXAPTKLSPISVLFIDDSSNVIYKQYEN

SEQ ID NO: 52908 - protein, 42 aa, Artificial Sequence; identical to SEQ ID NO: 11596
  Cyclic GFR-binding peptide
  MOD_RES (6)..(7)..(39)..(41): Xaa is C or S

SEQ ID NO: 52909 - protein, 29 aa, Artificial Sequence
  Cyclic GFR-binding peptide
  MOD_RES (26)..(28): Xaa is C or S
EPLPIVYYVGRTPKVEQLSNMVVKSXKXS

SEQ ID NO: 52910 - protein, 36 aa, Artificial Sequence
  Cyclic GFR-binding peptide
  MOD_RES (6)..(7): Xaa is C or S
YVPKPXXAPTKLEPLTVLYYDDSSNVIEQLSNNMVV

SEQ ID NO: 52911 - protein, 23 aa, Artificial Sequence
  Cyclic GFR-binding peptide
QDLEPLPIVYYVGRTPKVEQLSN

SEQ ID NO: 52912 - protein, 34 aa, Artificial Sequence
  Cyclic GFR-binding peptide
  MOD_RES (4)..(5): Xaa is C or S
ASPXXVPQDLSPISILFIVGRTPKVYKQYEMVVK

SEQ ID NO: 52913 - protein, 30 aa, Artificial Sequence
  Cyclic GFR-binding peptide
  MOD_RES (1)..(2): Xaa is C or S
XXVPTRLNAISILYFDSANNVVLKKYRDMV

SEQ ID NO: 52914 - protein, 31 aa, Artificial Sequence
  Cyclic GFR-binding peptide
  MOD_RES (30)..(30): Xaa is C or S
TQLEPLTVLYYDDSSNVIEQLSNNMVVRAXG

SEQ ID NO: 52915 - protein, 28 aa, Artificial Sequence
  Cyclic GFR-binding peptide
TELEPLPMVYYDEYDKVVEQLSNEMVVE

SEQ ID NO: 52916 - protein, 38 aa, Artificial Sequence; identical to SEQ ID NO: 11599
  Cyclic GFR-binding peptide
  MOD_RES (4)..(5)..(37): Xaa is C or S

SEQ ID NO: 52917 - protein, 30 aa, Artificial Sequence
  Cyclic GFR-binding peptide
  MOD_RES (27)..(29): Xaa is C or S
EPLTVLYYDDSSNVIEQLSNNMVVRAXGXH

SEQ ID NO: 52918 - protein, 29 aa, Artificial Sequence
  Cyclic GFR-binding peptide
VPQDLEPLPIVYYVGRTPKVEQLSNMVVK

SEQ ID NO: 52919 - protein, 28 aa, Artificial Sequence
  Cyclic GFR-binding peptide
  MOD_RES (27)..(27): Xaa is C or S
EPLPIVYYDSANNVVEQLSNDMVVESXG

SEQ ID NO: 52920 - protein, 35 aa, Artificial Sequence; identical to SEQ ID NO: 11600
  Cyclic GFR-binding peptide
  MOD_RES (1)..(33)..(35): Xaa is C or S

SEQ ID NO: 52921 - protein, 35 aa, Artificial Sequence; identical to SEQ ID NO: 11601
  Cyclic GFR-binding peptide
  MOD_RES (2)..(3)..(35): Xaa is C or S

SEQ ID NO: 52922 - protein, 38 aa, Artificial Sequence; identical to SEQ ID NO: 11602
  Cyclic GFR-binding peptide
  MOD_RES (4)..(36)..(38): Xaa is C or S

SEQ ID NO: 52923 - protein, 40 aa, Artificial Sequence; identical to SEQ ID NO: 11603
  Cyclic GFR-binding peptide
  MOD_RES (6)..(7)..(39): Xaa is C or S

SEQ ID NO: 52924 - protein, 34 aa, Artificial Sequence
  Cyclic GFR-binding peptide
  MOD_RES (5)..(6): Xaa is C or S
VPKPXXAPTKLEPLPVVYYDDSSNVIEQLSNNMV

SEQ ID NO: 52925 - protein, 27 aa, Artificial Sequence
  Cyclic GFR-binding peptide
PTRLSAISILYLDSANNVVLKNYQDMV

SEQ ID NO: 52926 - protein, 37 aa, Artificial Sequence; identical to SEQ ID NO: 11606
  Cyclic GFR-binding peptide
  MOD_RES (4)..(5)..(37): Xaa is C or S

SEQ ID NO: 52927 - protein, 27 aa, Artificial Sequence
  Cyclic GFR-binding peptide
PTELEPLTMLYYDENEKVVEQLSNDMV

SEQ ID NO: 52928 - protein, 40 aa, Artificial Sequence; identical to SEQ ID NO: 11607
  Cyclic GFR-binding peptide
  MOD_RES (6)..(7)..(38)..(40): Xaa is C or S

SEQ ID NO: 52929 - protein, 33 aa, Artificial Sequence
  Cyclic GFR-binding peptide
  MOD_RES (5)..(6): Xaa is C or S
IPKAXXVPTELSPISMLFIDENEKVVYKQYEDM

SEQ ID NO: 52930 - protein, 35 aa, Artificial Sequence; identical to SEQ ID NO: 11608
  Cyclic GFR-binding peptide
  MOD_RES (1)..(33)..(35): Xaa is C or S

SEQ ID NO: 52931 - protein, 32 aa, Artificial Sequence; identical to SEQ ID NO: 11609
  Cyclic GFR-binding peptide
  MOD_RES (1)..(2): Xaa is C or S

SEQ ID NO: 52932 - protein, 31 aa, Artificial Sequence
  Cyclic GFR-binding peptide
  MOD_RES (5)..(6): Xaa is C or S
SASPXXVPQDLEPLPIVYYVGRTPKVEQLSN

SEQ ID NO: 52933 - protein, 24 aa, Artificial Sequence
  Cyclic GFR-binding peptide
SQDLEPLPIVYYIGKTPKIEQLSN

SEQ ID NO: 52934 - protein, 29 aa, Artificial Sequence
  Cyclic GFR-binding peptide
  MOD_RES (28)..(28): Xaa is C or S
LEPLTMLYYDEYDKVVEQLSNEMVVEGXG

SEQ ID NO: 52935 - protein, 29 aa, Artificial Sequence
  Cyclic GFR-binding peptide
  MOD_RES (27)..(29): Xaa is C or S
LSPISILFIVGRTPKVYKQYEMVVKSXKX

SEQ ID NO: 52936 - protein, 26 aa, Artificial Sequence
  Cyclic GFR-binding peptide
  MOD_RES (26)..(26): Xaa is C or S
SPISILFIVGRTPKVYKQYEMVVKSX

SEQ ID NO: 52937 - protein, 38 aa, Artificial Sequence; identical to SEQ ID NO: 11611
  Cyclic GFR-binding peptide
  MOD_RES (5)..(6)..(37): Xaa is C or S

SEQ ID NO: 52938 - protein, 25 aa, Artificial Sequence
  Cyclic GFR-binding peptide
EPLPMVYYDEYDKVVEQLSNEMVVE

SEQ ID NO: 52939 - protein, 31 aa, Artificial Sequence
  Cyclic GFR-binding peptide
  MOD_RES (3)..(4): Xaa is C or S
KAXXVPTELEPLTMLYYDEYDKVVEQLSNEM

SEQ ID NO: 52940 - protein, 33 aa, Artificial Sequence
  Cyclic GFR-binding peptide
  MOD_RES (4)..(5): Xaa is C or S
PPTXXVPTRLNAISILYFDSANNVVLKKYRDMV

SEQ ID NO: 52941 - protein, 29 aa, Artificial Sequence
  Cyclic GFR-binding peptide
  MOD_RES (27)..(29): Xaa is C or S
EPLTMLYYDENEKVVEQLSNDMVVEGXGX

SEQ ID NO: 52942 - protein, 25 aa, Artificial Sequence
  Cyclic GFR-binding peptide
EPLTILYYDSANNVVEQLSNDMVVE

SEQ ID NO: 52943 - protein, 35 aa, Artificial Sequence; identical to SEQ ID NO: 11613
  Cyclic GFR-binding peptide
  MOD_RES (1)..(33)..(35): Xaa is C or S

SEQ ID NO: 52944 - protein, 21 aa, Artificial Sequence
  Cyclic GFR-binding peptide
EPLPIVYYIGKTPKIEQLSNM

SEQ ID NO: 52945 - protein, 26 aa, Artificial Sequence
  Cyclic GFR-binding peptide
  MOD_RES (1)..(1): Xaa is C or S
XVPTELEPLPMVYYDEYDKVVEQLSN

SEQ ID NO: 52946 - protein, 26 aa, Artificial Sequence
  Cyclic GFR-binding peptide
TELSPISMLFIDENEKVVYKQYEDMV

SEQ ID NO: 52947 - protein, 24 aa, Artificial Sequence
  Cyclic GFR-binding peptide
SPISMLFIDEYDKVVYKQYEEMVV

SEQ ID NO: 52948 - protein, 31 aa, Artificial Sequence; identical to SEQ ID NO: 11618
  Cyclic GFR-binding peptide
  MOD_RES (31)..(31): Xaa is C or S

SEQ ID NO: 52949 - protein, 24 aa, Artificial Sequence
  Cyclic GFR-binding peptide
EPLPIVYYIGKTPKIEQLSNMIVK

SEQ ID NO: 52950 - protein, 33 aa, Artificial Sequence
  Cyclic GFR-binding peptide
  MOD_RES (3)..(4): Xaa is C or S
KAXXVPTELSPISMLFIDEYDKVVYKQYEEMVV

SEQ ID NO: 52951 - protein, 23 aa, Artificial Sequence
  Cyclic GFR-binding peptide
QALEPLTILYYVGRKPKVEQLSN

SEQ ID NO: 52952 - protein, 22 aa, Artificial Sequence
  Cyclic GFR-binding peptide
ALSPISILFIVGRKPKVYKQYE

SEQ ID NO: 52953 - protein, 37 aa, Artificial Sequence; identical to SEQ ID NO: 11620
  Cyclic GFR-binding peptide
  MOD_RES (5)..(6): Xaa is C or S

SEQ ID NO: 52954 - protein, 27 aa, Artificial Sequence
  Cyclic GFR-binding peptide
  MOD_RES (1)..(1): Xaa is C or S
XAPTKLSPISVLFIDDSSNVIYKQYEN

SEQ ID NO: 52955 - protein, 33 aa, Artificial Sequence
  Cyclic GFR-binding peptide
  MOD_RES (3)..(4): Xaa is C or S
APXXVPQALEPLTILYYVGRKPKVEQLSNMIVR

SEQ ID NO: 52956 - protein, 24 aa, Artificial Sequence
  Cyclic GFR-binding peptide
RLNAISILYFDSANNVVLKKYRDM

SEQ ID NO: 52957 - protein, 36 aa, Artificial Sequence; identical to SEQ ID NO: 11622
  Cyclic GFR-binding peptide
  MOD_RES (2)..(3)..(35): Xaa is C or S

SEQ ID NO: 52958 - protein, 37 aa, Artificial Sequence; identical to SEQ ID NO: 11623
  Cyclic GFR-binding peptide
  MOD_RES (4)..(5)..(36): Xaa is C or S

SEQ ID NO: 52959 - protein, 31 aa, Artificial Sequence
  Cyclic GFR-binding peptide
  MOD_RES (1)..(2): Xaa is C or S
XXVPQALEPLTILYYVGRKPKVEQLSNMIVR

SEQ ID NO: 52960 - protein, 24 aa, Artificial Sequence
  Cyclic GFR-binding peptide
LEPLPIVYYDSANNVVEQLSNDMV

SEQ ID NO: 52961 - protein, 24 aa, Artificial Sequence
  Cyclic GFR-binding peptide
LEPLPMVYYDEYDKVVEQLSNEMV

SEQ ID NO: 52962 - protein, 24 aa, Artificial Sequence
  Cyclic GFR-binding peptide
TKLEPLPVVYYDDSSNVIEQLSNN

SEQ ID NO: 52963 - protein, 34 aa, Artificial Sequence
  Cyclic GFR-binding peptide
  MOD_RES (4)..(5): Xaa is C or S
PKPXXAPTQLEPLPVVYYDDSSNVIEQLSNNMVV

SEQ ID NO: 52964 - protein, 34 aa, Artificial Sequence; identical to SEQ ID NO: 11626
  Cyclic GFR-binding peptide
  MOD_RES (3)..(4): Xaa is C or S

SEQ ID NO: 52965 - protein, 37 aa, Artificial Sequence; identical to SEQ ID NO: 11628
  Cyclic GFR-binding peptide
  MOD_RES (4)..(5)..(37): Xaa is C or S

SEQ ID NO: 52966 - protein, 31 aa, Artificial Sequence
  Cyclic GFR-binding peptide
  MOD_RES (5)..(6): Xaa is C or S
IPKAXXVPTELEPLPMVYYDEYDKVVEQLSN

SEQ ID NO: 52967 - protein, 27 aa, Artificial Sequence
  Cyclic GFR-binding peptide
  MOD_RES (1)..(1): Xaa is C or S
XAPTKLEPLPVVYYDDSSNVIEQLSNN

SEQ ID NO: 52968 - protein, 31 aa, Artificial Sequence
  Cyclic GFR-binding peptide
  MOD_RES (28)..(30): Xaa is C or S
DLSPISILFIIGKTPKIYKQYEMIVKSXKXS

SEQ ID NO: 52969 - protein, 36 aa, Artificial Sequence; identical to SEQ ID NO: 11631
  Cyclic GFR-binding peptide
  MOD_RES (3)..(4)..(36): Xaa is C or S

SEQ ID NO: 52970 - protein, 39 aa, Artificial Sequence; identical to SEQ ID NO: 11632
  Cyclic GFR-binding peptide
  MOD_RES (6)..(7)..(39): Xaa is C or S

SEQ ID NO: 52971 - protein, 29 aa, Artificial Sequence
  Cyclic GFR-binding peptide
  MOD_RES (28)..(28): Xaa is C or S
LEPLTVLYYDDSSNVIEQLSNNMVVRSXG

SEQ ID NO: 52972 - protein, 25 aa, Artificial Sequence
  Cyclic GFR-binding peptide
EPLTMLYYDENEKVVEQLSNDMVVE

SEQ ID NO: 52973 - protein, 25 aa, Artificial Sequence
  Cyclic GFR-binding peptide
EPLTVLYYDDSSNVIEQLSNNMVVR

SEQ ID NO: 52974 - protein, 22 aa, Artificial Sequence
  Cyclic GFR-binding peptide
SPISILFIVGRTPKVYKQYEMV

SEQ ID NO: 52975 - protein, 31 aa, Artificial Sequence
  Cyclic GFR-binding peptide
  MOD_RES (28)..(30): Xaa is C or S
LEPLTILYYDSANNVVEQLSNDMVVESXGXR

SEQ ID NO: 52976 - protein, 35 aa, Artificial Sequence
  Cyclic GFR-binding peptide
  MOD_RES (6)..(7): Xaa is C or S
TVPKPXXAPTQLEPLPVVYYDDSSNVIEQLSNNMV

SEQ ID NO: 52977 - protein, 32 aa, Artificial Sequence
  Cyclic GFR-binding peptide
  MOD_RES (6)..(6): Xaa is C or S
VTKPTXAPTKLEPLTVLYYDDSSNVIEQLSNN

SEQ ID NO: 52978 - protein, 25 aa, Artificial Sequence
  Cyclic GFR-binding peptide
APTQLSPISVLFIDDSSNVIYKQYE

SEQ ID NO: 52979 - protein, 39 aa, Artificial Sequence; identical to SEQ ID NO: 11635
  Cyclic GFR-binding peptide
  MOD_RES (5)..(6)..(38): Xaa is C or S

SEQ ID NO: 52980 - protein, 32 aa, Artificial Sequence
  Cyclic GFR-binding peptide
  MOD_RES (2)..(3): Xaa is C or S
PXXAPTKLEPLTVLYYDDSSNVIEQLSNNMVV

SEQ ID NO: 52981 - protein, 30 aa, Artificial Sequence
  Cyclic GFR-binding peptide
  MOD_RES (1)..(1): Xaa is C or S
XVPTRLEPLPIVYYDSANNVVEQLSNDMVV

SEQ ID NO: 52982 - protein, 31 aa, Artificial Sequence
  Cyclic GFR-binding peptide
  MOD_RES (2)..(3): Xaa is C or S
PXXAPTKLSPISVLFIDDSSNVIYKQYENMV

SEQ ID NO: 52983 - protein, 29 aa, Artificial Sequence
  Cyclic GFR-binding peptide
  MOD_RES (2)..(3): Xaa is C or S
PXXAPTQLSPISVLFIDDSSNVIYKQYEN

SEQ ID NO: 52984 - protein, 37 aa, Artificial Sequence; identical to SEQ ID NO: 11638
  Cyclic GFR-binding peptide
  MOD_RES (1)..(2)..(34)..(36): Xaa is C or S

SEQ ID NO: 52985 - protein, 40 aa, Artificial Sequence; identical to SEQ ID NO: 11639
  Cyclic GFR-binding peptide
  MOD_RES (5)..(6)..(38)..(40): Xaa is C or S

SEQ ID NO: 52986 - protein, 32 aa, Artificial Sequence
  Cyclic GFR-binding peptide
  MOD_RES (29)..(31): Xaa is C or S
ELSPISMLFIDEYDKVVYKQYEEMVVEGXGXR

SEQ ID NO: 52987 - protein, 30 aa, Artificial Sequence
  Cyclic GFR-binding peptide
  MOD_RES (27)..(29): Xaa is C or S
LEPLTILYYVGRKPKVEQLSNMIVRSXKXS

SEQ ID NO: 52988 - protein, 34 aa, Artificial Sequence
  Cyclic GFR-binding peptide
  MOD_RES (6)..(7): Xaa is C or S
SIPKAXXVPTELSPISMLFIDEYDKVVYKQYEEM

SEQ ID NO: 52989 - protein, 34 aa, Artificial Sequence
  Cyclic GFR-binding peptide
  MOD_RES (31)..(33): Xaa is C or S
PTELEPLPMVYYDENEKVVEQLSNDMVVEGXGXR

SEQ ID NO: 52990 - protein, 34 aa, Artificial Sequence
  Cyclic GFR-binding peptide
  MOD_RES (6)..(6): Xaa is C or S
VTKPTXAPTKLEPLPVVYYDDSSNVIEQLSNNMV

SEQ ID NO: 52991 - protein, 31 aa, Artificial Sequence
  Cyclic GFR-binding peptide
  MOD_RES (28)..(30): Xaa is C or S
ALEPLTILYYVGRKPKVEQLSNMIVRSXKXS

SEQ ID NO: 52992 - protein, 35 aa, Artificial Sequence; identical to SEQ ID NO: 11641
  Cyclic GFR-binding peptide
  MOD_RES (1)..(33)..(35): Xaa is C or S

SEQ ID NO: 52993 - protein, 36 aa, Artificial Sequence; identical to SEQ ID NO: 11644
  Cyclic GFR-binding peptide
  MOD_RES (5)..(6): Xaa is C or S

SEQ ID NO: 52994 - protein, 33 aa, Artificial Sequence
  Cyclic GFR-binding peptide
  MOD_RES (4)..(5): Xaa is C or S
PKAXXVPTELEPLPMVYYDEYDKVVEQLSNEMV

SEQ ID NO: 52995 - protein, 25 aa, Artificial Sequence
  Cyclic GFR-binding peptide
VPTRLEPLPIVYYDSANNVVEQLSN

SEQ ID NO: 52996 - protein, 41 aa, Artificial Sequence; identical to SEQ ID NO: 11645
  Cyclic GFR-binding peptide
  MOD_RES (5)..(6)..(38)..(40): Xaa is C or S

SEQ ID NO: 52997 - protein, 22 aa, Artificial Sequence
  Cyclic GFR-binding peptide
EPLTMLYYDENEKVVEQLSNDM

SEQ ID NO: 52998 - protein, 40 aa, Artificial Sequence; identical to SEQ ID NO: 11646
  Cyclic GFR-binding peptide
  MOD_RES (6)..(7)..(38)..(40): Xaa is C or S

SEQ ID NO: 52999 - protein, 40 aa, Artificial Sequence; identical to SEQ ID NO: 11650
  Cyclic GFR-binding peptide
  MOD_RES (6)..(7)..(38)..(40): Xaa is C or S

SEQ ID NO: 53000 - protein, 25 aa, Artificial Sequence
  Cyclic GFR-binding peptide
RLNAISILYFDSANNVVLKKYRDMV

SEQ ID NO: 53001 - protein, 30 aa, Artificial Sequence
  Cyclic GFR-binding peptide
  MOD_RES (1)..(1): Xaa is C or S
XVSQDLSPISILFIIGKTPKIYKQYEMIVK

SEQ ID NO: 53002 - protein, 35 aa, Artificial Sequence; identical to SEQ ID NO: 11653
  Cyclic GFR-binding peptide
  MOD_RES (3)..(4): Xaa is C or S

SEQ ID NO: 53003 - protein, 35 aa, Artificial Sequence; identical to SEQ ID NO: 11655
  Cyclic GFR-binding peptide
  MOD_RES (1)..(32)..(34): Xaa is C or S

SEQ ID NO: 53004 - protein, 22 aa, Artificial Sequence
  Cyclic GFR-binding peptide
LEPLTILYYVGRKPKVEQLSNM

SEQ ID NO: 53005 - protein, 33 aa, Artificial Sequence; identical to SEQ ID NO: 11657
  Cyclic GFR-binding peptide
  MOD_RES (31)..(33): Xaa is C or S

SEQ ID NO: 53006 - protein, 35 aa, Artificial Sequence; identical to SEQ ID NO: 11658
  Cyclic GFR-binding peptide
  MOD_RES (4)..(5): Xaa is C or S

SEQ ID NO: 53007 - protein, 32 aa, Artificial Sequence
  Cyclic GFR-binding peptide
  MOD_RES (3)..(3): Xaa is C or S
PTXAPTKLSPISVLFIDDSSNVIYKQYENMVV

SEQ ID NO: 53008 - protein, 32 aa, Artificial Sequence
  Cyclic GFR-binding peptide
  MOD_RES (31)..(31): Xaa is C or S
PTELSPISMLFIDENEKVVYKQYEDMVVEGXG

SEQ ID NO: 53009 - protein, 21 aa, Artificial Sequence
  Cyclic GFR-binding peptide
SPISILFIIGKTPKIYKQYEM

SEQ ID NO: 53010 - protein, 20 aa, Artificial Sequence
  Cyclic GFR-binding peptide
EPLPIVYYDSANNVVEQLSN

SEQ ID NO: 53011 - protein, 23 aa, Artificial Sequence
  Cyclic GFR-binding peptide
SPISMLFIDEYDKVVYKQYEEMV

SEQ ID NO: 53012 - protein, 35 aa, Artificial Sequence; identical to SEQ ID NO: 11662
  Cyclic GFR-binding peptide
  MOD_RES (32)..(34): Xaa is C or S

SEQ ID NO: 53013 - protein, 24 aa, Artificial Sequence
  Cyclic GFR-binding peptide
PQALSPISILFIVGRKPKVYKQYE

SEQ ID NO: 53014 - protein, 32 aa, Artificial Sequence
  Cyclic GFR-binding peptide
  MOD_RES (4)..(5): Xaa is C or S
ASPXXVPQDLSPISILFIVGRTPKVYKQYEMV

SEQ ID NO: 53015 - protein, 29 aa, Artificial Sequence
  Cyclic GFR-binding peptide
  MOD_RES (27)..(29): Xaa is C or S
SPISVLFIDDSSNVIYKQYENMVVRSXGX

SEQ ID NO: 53016 - protein, 24 aa, Artificial Sequence
  Cyclic GFR-binding peptide
SQDLSPISILFIIGKTPKIYKQYE

SEQ ID NO: 53017 - protein, 28 aa, Artificial Sequence
  Cyclic GFR-binding peptide
APTKLEPLTVLYYDDSSNVIEQLSNNMV

SEQ ID NO: 53018 - protein, 33 aa, Artificial Sequence
  Cyclic GFR-binding peptide
  MOD_RES (5)..(6): Xaa is C or S
VPKPXXAPTKLSPISVLFIDDSSNVIYKQYENM

SEQ ID NO: 53019 - protein, 29 aa, Artificial Sequence
  Cyclic GFR-binding peptide
  MOD_RES (28)..(28): Xaa is C or S
DLSPISILFIIGKTPKIYKQYEMIVKSXK

SEQ ID NO: 53020 - protein, 36 aa, Artificial Sequence; identical to SEQ ID NO: 11664
  Cyclic GFR-binding peptide
  MOD_RES (4)..(5)..(36): Xaa is C or S

SEQ ID NO: 53021 - protein, 23 aa, Artificial Sequence
  Cyclic GFR-binding peptide
TELEPLTMLYYDEYDKVVEQLSN

SEQ ID NO: 53022 - protein, 29 aa, Artificial Sequence
  Cyclic GFR-binding peptide
  MOD_RES (1)..(1): Xaa is C or S
XVPTRLEPLTILYYDSANNVVEQLSNDMV

SEQ ID NO: 53023 - protein, 33 aa, Artificial Sequence
  Cyclic GFR-binding peptide
  MOD_RES (30)..(32): Xaa is C or S
TQLEPLPVVYYDDSSNVIEQLSNNMVVRAXGXH

SEQ ID NO: 53024 - protein, 27 aa, Artificial Sequence
  Cyclic GFR-binding peptide
LNAISILYFDSANNVVLKKYRDMVVES

SEQ ID NO: 53025 - protein, 27 aa, Artificial Sequence
  Cyclic GFR-binding peptide
  MOD_RES (1)..(1): Xaa is C or S
XVPTRLSAISILYLDSANNVVLKNYQD

SEQ ID NO: 53026 - protein, 30 aa, Artificial Sequence
  Cyclic GFR-binding peptide
  MOD_RES (3)..(4): Xaa is C or S
KAXXVPTELEPLPMVYYDEYDKVVEQLSNE

SEQ ID NO: 53027 - protein, 38 aa, Artificial Sequence; identical to SEQ ID NO: 11668
  Cyclic GFR-binding peptide
  MOD_RES (4)..(5)..(37): Xaa is C or S

SEQ ID NO: 53028 - protein, 34 aa, Artificial Sequence
  Cyclic GFR-binding peptide
  MOD_RES (4)..(5): Xaa is C or S
PKAXXVPTELEPLTMLYYDEYDKVVEQLSNEMVV

SEQ ID NO: 53029 - protein, 39 aa, Artificial Sequence; identical to SEQ ID NO: 11672
  Cyclic GFR-binding peptide
  MOD_RES (7)..(39): Xaa is C or S

SEQ ID NO: 53030 - protein, 26 aa, Artificial Sequence
  Cyclic GFR-binding peptide
  MOD_RES (1)..(1): Xaa is C or S
XAPTKLEPLPVVYYDDSSNVIEQLSN

SEQ ID NO: 53031 - protein, 36 aa, Artificial Sequence; identical to SEQ ID NO: 11674
  Cyclic GFR-binding peptide
  MOD_RES (1)..(33)..(35): Xaa is C or S

SEQ ID NO: 53032 - protein, 42 aa, Artificial Sequence; identical to SEQ ID NO: 11675
  Cyclic GFR-binding peptide
  MOD_RES (6)..(7)..(39)..(41): Xaa is C or S

SEQ ID NO: 53033 - protein, 39 aa, Artificial Sequence; identical to SEQ ID NO: 11676
  Cyclic GFR-binding peptide
  MOD_RES (4)..(5)..(36)..(38): Xaa is C or S

SEQ ID NO: 53034 - protein, 31 aa, Artificial Sequence
  Cyclic GFR-binding peptide
  MOD_RES (31)..(31): Xaa is C or S
PTQLEPLTVLYYDDSSNVIEQLSNNMVVRAX

SEQ ID NO: 53035 - protein, 30 aa, Artificial Sequence
  Cyclic GFR-binding peptide
  MOD_RES (30)..(30): Xaa is C or S
TELSPISMLFIDENEKVVYKQYEDMVVEGX

SEQ ID NO: 53036 - protein, 22 aa, Artificial Sequence
  Cyclic GFR-binding peptide
KLEPLPVVYYDDSSNVIEQLSN

SEQ ID NO: 53037 - protein, 30 aa, Artificial Sequence
  Cyclic GFR-binding peptide
  MOD_RES (27)..(29): Xaa is C or S
SAISILYLDSANNVVLKNYQDMVVESXGXR

SEQ ID NO: 53038 - protein, 32 aa, Artificial Sequence
  Cyclic GFR-binding peptide
  MOD_RES (5)..(6): Xaa is C or S
IPKAXXVPTELEPLPMVYYDENEKVVEQLSND

SEQ ID NO: 53039 - protein, 38 aa, Artificial Sequence; identical to SEQ ID NO: 11679
  Cyclic GFR-binding peptide
  MOD_RES (5)..(6)..(38): Xaa is C or S

SEQ ID NO: 53040 - protein, 33 aa, Artificial Sequence; identical to SEQ ID NO: 11681
  Cyclic GFR-binding peptide
  MOD_RES (1)..(2): Xaa is C or S

SEQ ID NO: 53041 - protein, 28 aa, Artificial Sequence
  Cyclic GFR-binding peptide
  MOD_RES (28)..(28): Xaa is C or S
DLEPLPIVYYVGRTPKVEQLSNMVVKSX

SEQ ID NO: 53042 - protein, 37 aa, Artificial Sequence; identical to SEQ ID NO: 11682
  Cyclic GFR-binding peptide
  MOD_RES (2)..(3)..(35)..(37): Xaa is C or S

SEQ ID NO: 53043 - protein, 32 aa, Artificial Sequence; identical to SEQ ID NO: 11683
  Cyclic GFR-binding peptide
  MOD_RES (1)..(1): Xaa is C or S

SEQ ID NO: 53044 - protein, 31 aa, Artificial Sequence
  Cyclic GFR-binding peptide
  MOD_RES (4)..(5): Xaa is C or S
ASPXXVSQDLEPLPIVYYIGKTPKIEQLSNM

SEQ ID NO: 53045 - protein, 37 aa, Artificial Sequence; identical to SEQ ID NO: 11684
  Cyclic GFR-binding peptide
  MOD_RES (5)..(6): Xaa is C or S

SEQ ID NO: 53046 - protein, 35 aa, Artificial Sequence; identical to SEQ ID NO: 11687
  Cyclic GFR-binding peptide
  MOD_RES (1)..(2)..(34): Xaa is C or S

SEQ ID NO: 53047 - protein, 37 aa, Artificial Sequence; identical to SEQ ID NO: 11688
  Cyclic GFR-binding peptide
  MOD_RES (4)..(5)..(37): Xaa is C or S

SEQ ID NO: 53048 - protein, 39 aa, Artificial Sequence; identical to SEQ ID NO: 11689
  Cyclic GFR-binding peptide
  MOD_RES (6)..(7)..(39): Xaa is C or S

SEQ ID NO: 53049 - protein, 36 aa, Artificial Sequence; identical to SEQ ID NO: 11690
  Cyclic GFR-binding peptide
  MOD_RES (2)..(3)..(34)..(36): Xaa is C or S

SEQ ID NO: 53050 - protein, 29 aa, Artificial Sequence
  Cyclic GFR-binding peptide
  MOD_RES (2)..(3): Xaa is C or S
AXXVPTELEPLPMVYYDEYDKVVEQLSNE

SEQ ID NO: 53051 - protein, 32 aa, Artificial Sequence
  Cyclic GFR-binding peptide
  MOD_RES (6)..(7): Xaa is C or S
ASAAPXXVPQALEPLTILYYVGRKPKVEQLSN

SEQ ID NO: 53052 - protein, 31 aa, Artificial Sequence
  Cyclic GFR-binding peptide
  MOD_RES (29)..(31): Xaa is C or S
ELSPISMLFIDENEKVVYKQYEDMVVEGXGX

SEQ ID NO: 53053 - protein, 30 aa, Artificial Sequence
  Cyclic GFR-binding peptide
  MOD_RES (29)..(29): Xaa is C or S
QLEPLTVLYYDDSSNVIEQLSNNMVVRAXG

SEQ ID NO: 53054 - protein, 31 aa, Artificial Sequence
  Cyclic GFR-binding peptide
  MOD_RES (2)..(3): Xaa is C or S
AXXVPTELSPISMLFIDEYDKVVYKQYEEMV

SEQ ID NO: 53055 - protein, 31 aa, Artificial Sequence
  Cyclic GFR-binding peptide
  MOD_RES (29)..(31): Xaa is C or S
KLEPLPVVYYDDSSNVIEQLSNNMVVRSXGX

SEQ ID NO: 53056 - protein, 30 aa, Artificial Sequence; identical to SEQ ID NO: 11693
  Cyclic GFR-binding peptide

SEQ ID NO: 53057 - protein, 38 aa, Artificial Sequence; identical to SEQ ID NO: 11694
  Cyclic GFR-binding peptide
  MOD_RES (4)..(5)..(37): Xaa is C or S

SEQ ID NO: 53058 - protein, 34 aa, Artificial Sequence
  Cyclic GFR-binding peptide
  MOD_RES (6)..(7): Xaa is C or S
STPPTXXVPTRLSAISILYLDSANNVVLKNYQDM

SEQ ID NO: 53059 - protein, 33 aa, Artificial Sequence
  Cyclic GFR-binding peptide
  MOD_RES (3)..(4): Xaa is C or S
PTXXVPTRLNAISILYFDSANNVVLKKYRDMVV

SEQ ID NO: 53060 - protein, 28 aa, Artificial Sequence
  Cyclic GFR-binding peptide
  MOD_RES (1)..(2): Xaa is C or S
XXVPQDLEPLPIVYYVGRTPKVEQLSNM

SEQ ID NO: 53061 - protein, 29 aa, Artificial Sequence
  Cyclic GFR-binding peptide
  MOD_RES (29)..(29): Xaa is C or S
RLNAISILYFDSANNVVLKKYRDMVVESX

SEQ ID NO: 53062 - protein, 35 aa, Artificial Sequence
  Cyclic GFR-binding peptide
  MOD_RES (7)..(7): Xaa is C or S
HVTKPTXAPTKLEPLTVLYYDDSSNVIEQLSNNMV

SEQ ID NO: 53063 - protein, 20 aa, Artificial Sequence
  Cyclic GFR-binding peptide
SPISMLFIDENEKVVYKQYE

SEQ ID NO: 53064 - protein, 32 aa, Artificial Sequence
  Cyclic GFR-binding peptide
  MOD_RES (5)..(5): Xaa is C or S
TKPTXAPTKLSPISVLFIDDSSNVIYKQYENM

SEQ ID NO: 53065 - protein, 37 aa, Artificial Sequence; identical to SEQ ID NO: 11696
  Cyclic GFR-binding peptide
  MOD_RES (3)..(4)..(36): Xaa is C or S

SEQ ID NO: 53066 - protein, 31 aa, Artificial Sequence
  Cyclic GFR-binding peptide
  MOD_RES (29)..(31): Xaa is C or S
ELEPLTMLYYDENEKVVEQLSNDMVVEGXGX

SEQ ID NO: 53067 - protein, 33 aa, Artificial Sequence; identical to SEQ ID NO: 11697
  Cyclic GFR-binding peptide
  MOD_RES (3)..(3): Xaa is C or S

SEQ ID NO: 53068 - protein, 30 aa, Artificial Sequence
  Cyclic GFR-binding peptide
  MOD_RES (2)..(3): Xaa is C or S
TXXVPTRLSAISILYLDSANNVVLKNYQDM

SEQ ID NO: 53069 - protein, 33 aa, Artificial Sequence
  Cyclic GFR-binding peptide
  MOD_RES (4)..(5): Xaa is C or S
ASPXXVPQDLSPISILFIVGRTPKVYKQYEMVV

SEQ ID NO: 53070 - protein, 25 aa, Artificial Sequence
  Cyclic GFR-binding peptide
LSPISMLFIDENEKVVYKQYEDMVV

SEQ ID NO: 53071 - protein, 41 aa, Artificial Sequence; identical to SEQ ID NO: 11698
  Cyclic GFR-binding peptide
  MOD_RES (6)..(7)..(39)..(41): Xaa is C or S

SEQ ID NO: 53072 - protein, 24 aa, Artificial Sequence
  Cyclic GFR-binding peptide
PTQLEPLTVLYYDDSSNVIEQLSN

SEQ ID NO: 53073 - protein, 29 aa, Artificial Sequence
  Cyclic GFR-binding peptide
  MOD_RES (1)..(2): Xaa is C or S
XXAPTQLEPLPVVYYDDSSNVIEQLSNNM

SEQ ID NO: 53074 - protein, 21 aa, Artificial Sequence
  Cyclic GFR-binding peptide
LSAISILYLDSANNVVLKNYQ

SEQ ID NO: 53075 - protein, 33 aa, Artificial Sequence
  Cyclic GFR-binding peptide
  MOD_RES (6)..(7): Xaa is C or S
TVPKPXXAPTQLEPLTVLYYDDSSNVIEQLSNN

SEQ ID NO: 53076 - protein, 27 aa, Artificial Sequence
  Cyclic GFR-binding peptide
APTKLEPLTVLYYDDSSNVIEQLSNNM

SEQ ID NO: 53077 - protein, 22 aa, Artificial Sequence
  Cyclic GFR-binding peptide
SPISMLFIDENEKVVYKQYEDM

SEQ ID NO: 53078 - protein, 33 aa, Artificial Sequence
  Cyclic GFR-binding peptide
  MOD_RES (7)..(7): Xaa is C or S
HVTKPTXAPTKLEPLTVLYYDDSSNVIEQLSNN

SEQ ID NO: 53079 - protein, 40 aa, Artificial Sequence; identical to SEQ ID NO: 11702
  Cyclic GFR-binding peptide
  MOD_RES (6)..(7)..(39): Xaa is C or S

SEQ ID NO: 53080 - protein, 32 aa, Artificial Sequence; identical to SEQ ID NO: 11703
  Cyclic GFR-binding peptide
  MOD_RES (31)..(31): Xaa is C or S

SEQ ID NO: 53081 - protein, 34 aa, Artificial Sequence
  Cyclic GFR-binding peptide
  MOD_RES (6)..(7): Xaa is C or S
TVPKPXXAPTQLEPLTVLYYDDSSNVIEQLSNNM

SEQ ID NO: 53082 - protein, 38 aa, Artificial Sequence; identical to SEQ ID NO: 11704
  Cyclic GFR-binding peptide
  MOD_RES (6)..(7): Xaa is C or S

SEQ ID NO: 53083 - protein, 25 aa, Artificial Sequence
  Cyclic GFR-binding peptide
TELEPLTMLYYDEYDKVVEQLSNEM

SEQ ID NO: 53084 - protein, 28 aa, Artificial Sequence
  Cyclic GFR-binding peptide
  MOD_RES (1)..(1): Xaa is C or S
XAPTKLEPLPVVYYDDSSNVIEQLSNNM

SEQ ID NO: 53085 - protein, 34 aa, Artificial Sequence; identical to SEQ ID NO: 11705
  Cyclic GFR-binding peptide
  MOD_RES (1)..(32)..(34): Xaa is C or S

SEQ ID NO: 53086 - protein, 35 aa, Artificial Sequence; identical to SEQ ID NO: 11706
  Cyclic GFR-binding peptide
  MOD_RES (4)..(4): Xaa is C or S

SEQ ID NO: 53087 - protein, 35 aa, Artificial Sequence; identical to SEQ ID NO: 11707
  Cyclic GFR-binding peptide
  MOD_RES (4)..(5): Xaa is C or S

SEQ ID NO: 53088 - protein, 24 aa, Artificial Sequence
  Cyclic GFR-binding peptide
TRLEPLTILYYDSANNVVEQLSND

SEQ ID NO: 53089 - protein, 21 aa, Artificial Sequence
  Cyclic GFR-binding peptide
SPISILFIVGRTPKVYKQYEM

SEQ ID NO: 53090 - protein, 31 aa, Artificial Sequence; identical to SEQ ID NO: 11710
  Cyclic GFR-binding peptide

SEQ ID NO: 53091 - protein, 33 aa, Artificial Sequence
  Cyclic GFR-binding peptide
  MOD_RES (3)..(4): Xaa is C or S
KAXXVPTELSPISMLFIDENEKVVYKQYEDMVV

SEQ ID NO: 53092 - protein, 26 aa, Artificial Sequence
  Cyclic GFR-binding peptide
QLSPISVLFIDDSSNVIYKQYENMVV

SEQ ID NO: 53093 - protein, 40 aa, Artificial Sequence; identical to SEQ ID NO: 11712
  Cyclic GFR-binding peptide
  MOD_RES (6)..(7)..(39): Xaa is C or S

SEQ ID NO: 53094 - protein, 28 aa, Artificial Sequence
  Cyclic GFR-binding peptide
  MOD_RES (27)..(27): Xaa is C or S
EPLPMVYYDENEKVVEQLSNDMVVEGXG

SEQ ID NO: 53095 - protein, 29 aa, Artificial Sequence
  Cyclic GFR-binding peptide
  MOD_RES (3)..(4): Xaa is C or S
PTXXVPTRLEPLPIVYYDSANNVVEQLSN

SEQ ID NO: 53096 - protein, 32 aa, Artificial Sequence
  Cyclic GFR-binding peptide
  MOD_RES (30)..(32): Xaa is C or S
TRLEPLTILYYDSANNVVEQLSNDMVVESXGX

SEQ ID NO: 53097 - protein, 32 aa, Artificial Sequence
  Cyclic GFR-binding peptide
  MOD_RES (5)..(6): Xaa is C or S
TPPTXXVPTRLSAISILYLDSANNVVLKNYQD

SEQ ID NO: 53098 - protein, 31 aa, Artificial Sequence
  Cyclic GFR-binding peptide
  MOD_RES (28)..(30): Xaa is C or S
LNAISILYFDSANNVVLKKYRDMVVESXGXR

SEQ ID NO: 53099 - protein, 26 aa, Artificial Sequence
  Cyclic GFR-binding peptide
LSAISILYLDSANNVVLKNYQDMVVE

SEQ ID NO: 53100 - protein, 39 aa, Artificial Sequence; identical to SEQ ID NO: 11715
  Cyclic GFR-binding peptide
  MOD_RES (5)..(6)..(38): Xaa is C or S

SEQ ID NO: 53101 - protein, 32 aa, Artificial Sequence
  Cyclic GFR-binding peptide
  MOD_RES (5)..(6): Xaa is C or S
TPPTXXVPTRLEPLPIVYYDSANNVVEQLSND

SEQ ID NO: 53102 - protein, 29 aa, Artificial Sequence
  Cyclic GFR-binding peptide
VPTRLSAISILYLDSANNVVLKNYQDMVV

SEQ ID NO: 53103 - protein, 26 aa, Artificial Sequence
  Cyclic GFR-binding peptide
APTQLEPLPVVYYDDSSNVIEQLSNN

SEQ ID NO: 53104 - protein, 29 aa, Artificial Sequence
  Cyclic GFR-binding peptide
  MOD_RES (1)..(1): Xaa is C or S
XVPTELSPISMLFIDEYDKVVYKQYEEMV

SEQ ID NO: 53105 - protein, 38 aa, Artificial Sequence; identical to SEQ ID NO: 11717
  Cyclic GFR-binding peptide
  MOD_RES (4)..(5)..(37): Xaa is C or S

SEQ ID NO: 53106 - protein, 40 aa, Artificial Sequence; identical to SEQ ID NO: 11718
  Cyclic GFR-binding peptide
  MOD_RES (5)..(6)..(38)..(40): Xaa is C or S

SEQ ID NO: 53107 - protein, 28 aa, Artificial Sequence
  Cyclic GFR-binding peptide
PTRLEPLTILYYDSANNVVEQLSNDMVV

SEQ ID NO: 53108 - protein, 28 aa, Artificial Sequence
  Cyclic GFR-binding peptide
  MOD_RES (2)..(3): Xaa is C or S
PXXVPQDLEPLPIVYYVGRTPKVEQLSN

SEQ ID NO: 53109 - protein, 26 aa, Artificial Sequence
  Cyclic GFR-binding peptide
EPLTMLYYDEYDKVVEQLSNEMVVEG

SEQ ID NO: 53110 - protein, 25 aa, Artificial Sequence
  Cyclic GFR-binding peptide
SAISILYLDSANNVVLKNYQDMVVE

SEQ ID NO: 53111 - protein, 26 aa, Artificial Sequence
  Cyclic GFR-binding peptide
  MOD_RES (1)..(1): Xaa is C or S
XVPQDLSPISILFIVGRTPKVYKQYE

SEQ ID NO: 53112 - protein, 32 aa, Artificial Sequence
  Cyclic GFR-binding peptide
  MOD_RES (4)..(5): Xaa is C or S
AAPXXVPQALEPLTILYYVGRKPKVEQLSNMI

SEQ ID NO: 53113 - protein, 34 aa, Artificial Sequence
  Cyclic GFR-binding peptide
  MOD_RES (31)..(33): Xaa is C or S
PTQLSPISVLFIDDSSNVIYKQYENMVVRAXGXH

SEQ ID NO: 53114 - protein, 24 aa, Artificial Sequence
  Cyclic GFR-binding peptide
LEPLPVVYYDDSSNVIEQLSNNMV

SEQ ID NO: 53115 - protein, 26 aa, Artificial Sequence
  Cyclic GFR-binding peptide
  MOD_RES (1)..(1): Xaa is C or S
XVPQALEPLTILYYVGRKPKVEQLSN

SEQ ID NO: 53116 - protein, 35 aa, Artificial Sequence
  Cyclic GFR-binding peptide
  MOD_RES (1)..(32)..(34): Xaa is C or S
XVSQDLEPLPIVYYIGKTPKIEQLSNMIVKSXKXS

SEQ ID NO: 53117 - protein, 24 aa, Artificial Sequence
  Cyclic GFR-binding peptide
QDLEPLPIVYYIGKTPKIEQLSNM

SEQ ID NO: 53118 - protein, 30 aa, Artificial Sequence
  Cyclic GFR-binding peptide
  MOD_RES (1)..(1): Xaa is C or S
XVPQALSPISILFIVGRKPKVYKQYEMIVR

SEQ ID NO: 53119 - protein, 38 aa, Artificial Sequence; identical to SEQ ID NO: 11724
  Cyclic GFR-binding peptide
  MOD_RES (3)..(35)..(37): Xaa is C or S

SEQ ID NO: 53120 - protein, 33 aa, Artificial Sequence
  Cyclic GFR-binding peptide
  MOD_RES (5)..(6): Xaa is C or S
TPPTXXVPTRLNAISILYFDSANNVVLKKYRDM

SEQ ID NO: 53121 - protein, 32 aa, Artificial Sequence
  Cyclic GFR-binding peptide
  MOD_RES (30)..(32): Xaa is C or S
TELEPLPMVYYDEYDKVVEQLSNEMVVEGXGX

SEQ ID NO: 53122 - protein, 25 aa, Artificial Sequence
  Cyclic GFR-binding peptide
LSPISILFIIGKTPKIYKQYEMIVK

SEQ ID NO: 53123 - protein, 40 aa, Artificial Sequence; identical to SEQ ID NO: 11727
  Cyclic GFR-binding peptide
  MOD_RES (4)..(5)..(37)..(39): Xaa is C or S

SEQ ID NO: 53124 - protein, 36 aa, Artificial Sequence; identical to SEQ ID NO: 11728
  Cyclic GFR-binding peptide
  MOD_RES (4)..(36): Xaa is C or S

SEQ ID NO: 53125 - protein, 30 aa, Artificial Sequence
  Cyclic GFR-binding peptide
  MOD_RES (27)..(29): Xaa is C or S
SPISVLFIDDSSNVIYKQYENMVVRAXGXH

SEQ ID NO: 53126 - protein, 32 aa, Artificial Sequence
  Cyclic GFR-binding peptide
  MOD_RES (5)..(6): Xaa is C or S
VPKPXXAPTKLSPISVLFIDDSSNVIYKQYEN

SEQ ID NO: 53127 - protein, 26 aa, Artificial Sequence
  Cyclic GFR-binding peptide
LSPISILFIVGRKPKVYKQYEMIVRS

SEQ ID NO: 53128 - protein, 24 aa, Artificial Sequence
  Cyclic GFR-binding peptide
LNAISILYFDSANNVVLKKYRDMV

SEQ ID NO: 53129 - protein, 27 aa, Artificial Sequence
  Cyclic GFR-binding peptide
  MOD_RES (27)..(27): Xaa is C or S
SPISMLFIDENEKVVYKQYEDMVVEGX

SEQ ID NO: 53130 - protein, 37 aa, Artificial Sequence; identical to SEQ ID NO: 11729
  Cyclic GFR-binding peptide
  MOD_RES (4)..(5)..(37): Xaa is C or S

SEQ ID NO: 53131 - protein, 30 aa, Artificial Sequence
  Cyclic GFR-binding peptide
  MOD_RES (28)..(30): Xaa is C or S
LEPLPMVYYDENEKVVEQLSNDMVVEGXGX

SEQ ID NO: 53132 - protein, 33 aa, Artificial Sequence; identical to SEQ ID NO: 11731
  Cyclic GFR-binding peptide
  MOD_RES (1)..(2): Xaa is C or S

SEQ ID NO: 53133 - protein, 28 aa, Artificial Sequence
  Cyclic GFR-binding peptide
  MOD_RES (28)..(28): Xaa is C or S
ALSPISILFIVGRKPKVYKQYEMIVRSX

SEQ ID NO: 53134 - protein, 25 aa, Artificial Sequence
  Cyclic GFR-binding peptide
PTRLEPLTILYYDSANNVVEQLSND

SEQ ID NO: 53135 - protein, 31 aa, Artificial Sequence
  Cyclic GFR-binding peptide
  MOD_RES (4)..(5): Xaa is C or S
PKAXXVPTELEPLPMVYYDENEKVVEQLSND

SEQ ID NO: 53136 - protein, 37 aa, Artificial Sequence; identical to SEQ ID NO: 11734
  Cyclic GFR-binding peptide
  MOD_RES (5)..(37): Xaa is C or S

SEQ ID NO: 53137 - protein, 33 aa, Artificial Sequence
  Cyclic GFR-binding peptide
  MOD_RES (30)..(32): Xaa is C or S
PQDLEPLPIVYYVGRTPKVEQLSNMVVKSXKXS

SEQ ID NO: 53138 - protein, 36 aa, Artificial Sequence; identical to SEQ ID NO: 11735
  Cyclic GFR-binding peptide
  MOD_RES (5)..(6): Xaa is C or S

SEQ ID NO: 53139 - protein, 32 aa, Artificial Sequence
  Cyclic GFR-binding peptide
  MOD_RES (6)..(6): Xaa is C or S
VTKPTXAPTKLSPISVLFIDDSSNVIYKQYEN

SEQ ID NO: 53140 - protein, 30 aa, Artificial Sequence
  Cyclic GFR-binding peptide
  MOD_RES (29)..(29): Xaa is C or S
QDLSPISILFIIGKTPKIYKQYEMIVKSXK

SEQ ID NO: 53141 - protein, 35 aa, Artificial Sequence; identical to SEQ ID NO: 11737
  Cyclic GFR-binding peptide
  MOD_RES (4)..(5): Xaa is C or S

SEQ ID NO: 53142 - protein, 32 aa, Artificial Sequence
  Cyclic GFR-binding peptide
  MOD_RES (6)..(7): Xaa is C or S
TVPKPXXAPTQLEPLTVLYYDDSSNVIEQLSN

SEQ ID NO: 53143 - protein, 30 aa, Artificial Sequence
  Cyclic GFR-binding peptide
PTRLNAISILYFDSANNVVLKKYRDMVVES

SEQ ID NO: 53144 - protein, 34 aa, Artificial Sequence
  Cyclic GFR-binding peptide
  MOD_RES (6)..(7): Xaa is C or S
STPPTXXVPTRLEPLPIVYYDSANNVVEQLSNDM

SEQ ID NO: 53145 - protein, 27 aa, Artificial Sequence
  Cyclic GFR-binding peptide
LEPLTVLYYDDSSNVIEQLSNNMVVRS

SEQ ID NO: 53146 - protein, 27 aa, Artificial Sequence
  Cyclic GFR-binding peptide
VPQALEPLTILYYVGRKPKVEQLSNMI

SEQ ID NO: 53147 - protein, 31 aa, Artificial Sequence
  Cyclic GFR-binding peptide
  MOD_RES (2)..(3): Xaa is C or S
PXXVPQALSPISILFIVGRKPKVYKQYEMIV

SEQ ID NO: 53148 - protein, 33 aa, Artificial Sequence
  Cyclic GFR-binding peptide
  MOD_RES (5)..(6): Xaa is C or S
VPKPXXAPTQLSPISVLFIDDSSNVIYKQYENM

SEQ ID NO: 53149 - protein, 33 aa, Artificial Sequence
  Cyclic GFR-binding peptide
  MOD_RES (31)..(33): Xaa is C or S
PTRLSAISILYLDSANNVVLKNYQDMVVESXGX

SEQ ID NO: 53150 - protein, 28 aa, Artificial Sequence
  Cyclic GFR-binding peptide
PTKLEPLPVVYYDDSSNVIEQLSNNMVV

SEQ ID NO: 53151 - protein, 29 aa, Artificial Sequence
  Cyclic GFR-binding peptide
  MOD_RES (1)..(1): Xaa is C or S
XVPTELSPISMLFIDENEKVVYKQYEDMV

SEQ ID NO: 53152 - protein, 27 aa, Artificial Sequence
  Cyclic GFR-binding peptide
  MOD_RES (1)..(2): Xaa is C or S
XXVPTELEPLPMVYYDEYDKVVEQLSN

SEQ ID NO: 53153 - protein, 31 aa, Artificial Sequence
  Cyclic GFR-binding peptide
  MOD_RES (4)..(5): Xaa is C or S
ASPXXVPQDLEPLPIVYYVGRTPKVEQLSNM

SEQ ID NO: 53154 - protein, 28 aa, Artificial Sequence
  Cyclic GFR-binding peptide
  MOD_RES (27)..(27): Xaa is C or S
EPLTVLYYDDSSNVIEQLSNNMVVRAXG

SEQ ID NO: 53155 - protein, 32 aa, Artificial Sequence
  Cyclic GFR-binding peptide
  MOD_RES (6)..(7): Xaa is C or S
KIPKAXXVPTELEPLTMLYYDENEKVVEQLSN

SEQ ID NO: 53156 - protein, 33 aa, Artificial Sequence
  Cyclic GFR-binding peptide
  MOD_RES (30)..(32): Xaa is C or S
TELEPLPMVYYDENEKVVEQLSNDMVVEGXGXR

SEQ ID NO: 53157 - protein, 37 aa, Artificial Sequence; identical to SEQ ID NO: 11741
  Cyclic GFR-binding peptide
  MOD_RES (1)..(2)..(34)..(36): Xaa is C or S

SEQ ID NO: 53158 - protein, 30 aa, Artificial Sequence
  Cyclic GFR-binding peptide
  MOD_RES (30)..(30): Xaa is C or S
PQALSPISILFIVGRKPKVYKQYEMIVRSX

SEQ ID NO: 53159 - protein, 41 aa, Artificial Sequence; identical to SEQ ID NO: 11744
  Cyclic GFR-binding peptide
  MOD_RES (6)..(7)..(39)..(41): Xaa is C or S

SEQ ID NO: 53160 - protein, 28 aa, Artificial Sequence
  Cyclic GFR-binding peptide
  MOD_RES (1)..(2): Xaa is C or S
XXAPTKLSPISVLFIDDSSNVIYKQYEN

SEQ ID NO: 53161 - protein, 38 aa, Artificial Sequence; identical to SEQ ID NO: 11745
  Cyclic GFR-binding peptide
  MOD_RES (3)..(4)..(35)..(37): Xaa is C or S

SEQ ID NO: 53162 - protein, 32 aa, Artificial Sequence; identical to SEQ ID NO: 11746
  Cyclic GFR-binding peptide
  MOD_RES (1)..(2): Xaa is C or S

SEQ ID NO: 53163 - protein, 37 aa, Artificial Sequence; identical to SEQ ID NO: 11747
  Cyclic GFR-binding peptide
  MOD_RES (6)..(7): Xaa is C or S

SEQ ID NO: 53164 - protein, 34 aa, Artificial Sequence; identical to SEQ ID NO: 11749
  Cyclic GFR-binding peptide
  MOD_RES (1)..(2)..(34): Xaa is C or S

SEQ ID NO: 53165 - protein, 38 aa, Artificial Sequence; identical to SEQ ID NO: 11750
  Cyclic GFR-binding peptide
  MOD_RES (2)..(3)..(35)..(37): Xaa is C or S

SEQ ID NO: 53166 - protein, 33 aa, Artificial Sequence; identical to SEQ ID NO: 11751
  Cyclic GFR-binding peptide
  MOD_RES (3)..(3): Xaa is C or S

SEQ ID NO: 53167 - protein, 38 aa, Artificial Sequence; identical to SEQ ID NO: 11752
  Cyclic GFR-binding peptide
  MOD_RES (2)..(3)..(35)..(37): Xaa is C or S

SEQ ID NO: 53168 - protein, 36 aa, Artificial Sequence; identical to SEQ ID NO: 11754
  Cyclic GFR-binding peptide
  MOD_RES (3)..(4)..(35): Xaa is C or S

SEQ ID NO: 53169 - protein, 30 aa, Artificial Sequence
  Cyclic GFR-binding peptide
PTRLEPLTILYYDSANNVVEQLSNDMVVES

SEQ ID NO: 53170 - protein, 29 aa, Artificial Sequence
  Cyclic GFR-binding peptide
  MOD_RES (29)..(29): Xaa is C or S
QLEPLTVLYYDDSSNVIEQLSNNMVVRAX

SEQ ID NO: 53171 - protein, 23 aa, Artificial Sequence
  Cyclic GFR-binding peptide
QLSPISVLFIDDSSNVIYKQYEN

SEQ ID NO: 53172 - protein, 28 aa, Artificial Sequence
  Cyclic GFR-binding peptide
QALEPLTILYYVGRKPKVEQLSNMIVRS

SEQ ID NO: 53173 - protein, 31 aa, Artificial Sequence
  Cyclic GFR-binding peptide
  MOD_RES (1)..(2): Xaa is C or S
XXAPTQLEPLTVLYYDDSSNVIEQLSNNMVV

SEQ ID NO: 53174 - protein, 31 aa, Artificial Sequence
  Cyclic GFR-binding peptide
  MOD_RES (4)..(5): Xaa is C or S
AAPXXVPQALEPLTILYYVGRKPKVEQLSNM

SEQ ID NO: 53175 - protein, 41 aa, Artificial Sequence; identical to SEQ ID NO: 11756
  Cyclic GFR-binding peptide
  MOD_RES (6)..(7)..(39)..(41): Xaa is C or S

SEQ ID NO: 53176 - protein, 28 aa, Artificial Sequence
  Cyclic GFR-binding peptide
  MOD_RES (2)..(3): Xaa is C or S
PXXAPTQLEPLPVVYYDDSSNVIEQLSN

SEQ ID NO: 53177 - protein, 26 aa, Artificial Sequence
  Cyclic GFR-binding peptide
LSPISILFIIGKTPKIYKQYEMIVKS

SEQ ID NO: 53178 - protein, 27 aa, Artificial Sequence
  Cyclic GFR-binding peptide
  MOD_RES (27)..(27): Xaa is C or S
LSPISILFIVGRTPKVYKQYEMVVKSX

SEQ ID NO: 53179 - protein, 31 aa, Artificial Sequence
  Cyclic GFR-binding peptide
  MOD_RES (2)..(3): Xaa is C or S
AXXVPTELEPLPMVYYDEYDKVVEQLSNEMV

SEQ ID NO: 53180 - protein, 39 aa, Artificial Sequence; identical to SEQ ID NO: 11758
  Cyclic GFR-binding peptide
  MOD_RES (4)..(5)..(36)..(38): Xaa is C or S

SEQ ID NO: 53181 - protein, 34 aa, Artificial Sequence; identical to SEQ ID NO: 11759
  Cyclic GFR-binding peptide
  MOD_RES (3)..(4): Xaa is C or S

SEQ ID NO: 53182 - protein, 30 aa, Artificial Sequence
  Cyclic GFR-binding peptide
  MOD_RES (1)..(1): Xaa is C or S
XVPTRLSAISILYLDSANNVVLKNYQDMVV

SEQ ID NO: 53183 - protein, 29 aa, Artificial Sequence
  Cyclic GFR-binding peptide
  MOD_RES (27)..(29): Xaa is C or S
EPLTVLYYDDSSNVIEQLSNNMVVRSXGX

SEQ ID NO: 53184 - protein, 34 aa, Artificial Sequence; identical to SEQ ID NO: 11760
  Cyclic GFR-binding peptide
  MOD_RES (3)..(4): Xaa is C or S

SEQ ID NO: 53185 - protein, 33 aa, Artificial Sequence
  Cyclic GFR-binding peptide
  MOD_RES (3)..(4): Xaa is C or S
KPXXAPTQLEPLPVVYYDDSSNVIEQLSNNMVV

SEQ ID NO: 53186 - protein, 26 aa, Artificial Sequence
  Cyclic GFR-binding peptide
TKLEPLPVVYYDDSSNVIEQLSNNMV

SEQ ID NO: 53187 - protein, 38 aa, Artificial Sequence; identical to SEQ ID NO: 11764
  Cyclic GFR-binding peptide
  MOD_RES (2)..(3)..(35)..(37): Xaa is C or S

SEQ ID NO: 53188 - protein, 29 aa, Artificial Sequence
  Cyclic GFR-binding peptide
  MOD_RES (1)..(2): Xaa is C or S
XXVPTRLNAISILYFDSANNVVLKKYRDM

SEQ ID NO: 53189 - protein, 21 aa, Artificial Sequence
  Cyclic GFR-binding peptide
LSPISVLFIDDSSNVIYKQYE

SEQ ID NO: 53190 - protein, 20 aa, Artificial Sequence
  Cyclic GFR-binding peptide
EPLTILYYVGRTPKVEQLSN

SEQ ID NO: 53191 - protein, 25 aa, Artificial Sequence
  Cyclic GFR-binding peptide
LSPISMLFIDEYDKVVYKQYEEMVV

SEQ ID NO: 53192 - protein, 36 aa, Artificial Sequence; identical to SEQ ID NO: 11768
  Cyclic GFR-binding peptide
  MOD_RES (3)..(4)..(36): Xaa is C or S

SEQ ID NO: 53193 - protein, 31 aa, Artificial Sequence
  Cyclic GFR-binding peptide
  MOD_RES (30)..(30): Xaa is C or S
TELEPLTMLYYDEYDKVVEQLSNEMVVEGXG

SEQ ID NO: 53194 - protein, 29 aa, Artificial Sequence
  Cyclic GFR-binding peptide
  MOD_RES (28)..(28): Xaa is C or S
ALSPISILFIVGRKPKVYKQYEMIVRSXK

SEQ ID NO: 53195 - protein, 25 aa, Artificial Sequence
  Cyclic GFR-binding peptide
QDLEPLPIVYYIGKTPKIEQLSNMI

SEQ ID NO: 53196 - protein, 25 aa, Artificial Sequence
  Cyclic GFR-binding peptide
LEPLPIVYYDSANNVVEQLSNDMVV

SEQ ID NO: 53197 - protein, 28 aa, Artificial Sequence
  Cyclic GFR-binding peptide
  MOD_RES (1)..(2): Xaa is C or S
XXVPTRLNAISILYFDSANNVVLKKYRD

SEQ ID NO: 53198 - protein, 31 aa, Artificial Sequence
  Cyclic GFR-binding peptide
  MOD_RES (28)..(30): Xaa is C or S
LEPLPMVYYDENEKVVEQLSNDMVVEGXGXR

SEQ ID NO: 53199 - protein, 36 aa, Artificial Sequence; identical to SEQ ID NO: 11770
  Cyclic GFR-binding peptide
  MOD_RES (2)..(3)..(35): Xaa is C or S

SEQ ID NO: 53200 - protein, 42 aa, Artificial Sequence; identical to SEQ ID NO: 11771
  Cyclic GFR-binding peptide
  MOD_RES (6)..(7)..(39)..(41): Xaa is C or S

SEQ ID NO: 53201 - protein, 32 aa, Artificial Sequence; identical to SEQ ID NO: 11772
  Cyclic GFR-binding peptide
  MOD_RES (32)..(32): Xaa is C or S

SEQ ID NO: 53202 - protein, 27 aa, Artificial Sequence
  Cyclic GFR-binding peptide
  MOD_RES (1)..(1): Xaa is C or S
XVPTELEPLPMVYYDEYDKVVEQLSNE

SEQ ID NO: 53203 - protein, 24 aa, Artificial Sequence
  Cyclic GFR-binding peptide
LSPISVLFIDDSSNVIYKQYENMV

SEQ ID NO: 53204 - protein, 33 aa, Artificial Sequence; identical to SEQ ID NO: 11773
  Cyclic GFR-binding peptide
  MOD_RES (32)..(32): Xaa is C or S

SEQ ID NO: 53205 - protein, 21 aa, Artificial Sequence
  Cyclic GFR-binding peptide
SPISMLFIDEYDKVVYKQYEE

SEQ ID NO: 53206 - protein, 27 aa, Artificial Sequence
  Cyclic GFR-binding peptide
VSQDLSPISILFIIGKTPKIYKQYEMI

SEQ ID NO: 53207 - protein, 32 aa, Artificial Sequence; identical to SEQ ID NO: 11774
  Cyclic GFR-binding peptide
  MOD_RES (1)..(1): Xaa is C or S

SEQ ID NO: 53208 - protein, 29 aa, Artificial Sequence
  Cyclic GFR-binding peptide
  MOD_RES (3)..(4): Xaa is C or S
KPXXAPTKLEPLPVVYYDDSSNVIEQLSN

SEQ ID NO: 53209 - protein, 23 aa, Artificial Sequence
  Cyclic GFR-binding peptide
EPLTMLYYDEYDKVVEQLSNEMV

SEQ ID NO: 53210 - protein, 40 aa, Artificial Sequence; identical to SEQ ID NO: 11776
  Cyclic GFR-binding peptide
  MOD_RES (6)..(7)..(39): Xaa is C or S

SEQ ID NO: 53211 - protein, 27 aa, Artificial Sequence
  Cyclic GFR-binding peptide
LEPLTVLYYDDSSNVIEQLSNNMVVRA

SEQ ID NO: 53212 - protein, 32 aa, Artificial Sequence
  Cyclic GFR-binding peptide
  MOD_RES (3)..(4): Xaa is C or S
KAXXVPTELEPLPMVYYDENEKVVEQLSNDMV

SEQ ID NO: 53213 - protein, 37 aa, Artificial Sequence; identical to SEQ ID NO: 11777
  Cyclic GFR-binding peptide
  MOD_RES (6)..(6): Xaa is C or S

SEQ ID NO: 53214 - protein, 30 aa, Artificial Sequence
  Cyclic GFR-binding peptide
  MOD_RES (1)..(2): Xaa is C or S
XXAPTKLEPLTVLYYDDSSNVIEQLSNNMV

SEQ ID NO: 53215 - protein, 23 aa, Artificial Sequence
  Cyclic GFR-binding peptide
LSPISILFIVGRTPKVYKQYEMV

SEQ ID NO: 53216 - protein, 32 aa, Artificial Sequence; identical to SEQ ID NO: 11779
  Cyclic GFR-binding peptide
  MOD_RES (2)..(2): Xaa is C or S

SEQ ID NO: 53217 - protein, 33 aa, Artificial Sequence
  Cyclic GFR-binding peptide
  MOD_RES (30)..(32): Xaa is C or S
TELEPLPMVYYDEYDKVVEQLSNEMVVEGXGXR

SEQ ID NO: 53218 - protein, 25 aa, Artificial Sequence
  Cyclic GFR-binding peptide
LSPISILFIVGRTPKVYKQYEMVVK

SEQ ID NO: 53219 - protein, 28 aa, Artificial Sequence
  Cyclic GFR-binding peptide
PQALSPISILFIVGRKPKVYKQYEMIVR

SEQ ID NO: 53220 - protein, 35 aa, Artificial Sequence; identical to SEQ ID NO: 11781
  Cyclic GFR-binding peptide
  MOD_RES (4)..(5): Xaa is C or S

SEQ ID NO: 53221 - protein, 22 aa, Artificial Sequence
  Cyclic GFR-binding peptide
ELEPLTMLYYDEYDKVVEQLSN

SEQ ID NO: 53222 - protein, 33 aa, Artificial Sequence; identical to SEQ ID NO: 11782
  Cyclic GFR-binding peptide
  MOD_RES (2)..(3): Xaa is C or S

SEQ ID NO: 53223 - protein, 28 aa, Artificial Sequence
  Cyclic GFR-binding peptide
APTQLSPISVLFIDDSSNVIYKQYENMV

SEQ ID NO: 53224 - protein, 34 aa, Artificial Sequence
  Cyclic GFR-binding peptide
  MOD_RES (4)..(5): Xaa is C or S
PKPXXAPTKLEPLPVVYYDDSSNVIEQLSNNMVV

SEQ ID NO: 53225 - protein, 32 aa, Artificial Sequence; identical to SEQ ID NO: 11786
  Cyclic GFR-binding peptide
  MOD_RES (31)..(31): Xaa is C or S

SEQ ID NO: 53226 - protein, 41 aa, Artificial Sequence; identical to SEQ ID NO: 11788
  Cyclic GFR-binding peptide
  MOD_RES (6)..(7)..(39)..(41): Xaa is C or S

SEQ ID NO: 53227 - protein, 37 aa, Artificial Sequence; identical to SEQ ID NO: 11789
  Cyclic GFR-binding peptide
  MOD_RES (3)..(4)..(36): Xaa is C or S

SEQ ID NO: 53228 - protein, 29 aa, Artificial Sequence
  Cyclic GFR-binding peptide
PTELEPLPMVYYDEYDKVVEQLSNEMVVE

SEQ ID NO: 53229 - protein, 23 aa, Artificial Sequence
  Cyclic GFR-binding peptide
KLEPLPVVYYDDSSNVIEQLSNN

SEQ ID NO: 53230 - protein, 39 aa, Artificial Sequence; identical to SEQ ID NO: 11790
  Cyclic GFR-binding peptide
  MOD_RES (3)..(4)..(36)..(38): Xaa is C or S

SEQ ID NO: 53231 - protein, 26 aa, Artificial Sequence
  Cyclic GFR-binding peptide
VPQDLSPISILFIVGRTPKVYKQYEM

SEQ ID NO: 53232 - protein, 31 aa, Artificial Sequence
  Cyclic GFR-binding peptide
  MOD_RES (1)..(2): Xaa is C or S
XXVPTRLEPLPIVYYDSANNVVEQLSNDMVV

SEQ ID NO: 53233 - protein, 28 aa, Artificial Sequence
  Cyclic GFR-binding peptide
  MOD_RES (28)..(28): Xaa is C or S
LEPLTMLYYDEYDKVVEQLSNEMVVEGX

SEQ ID NO: 53234 - protein, 20 aa, Artificial Sequence
  Cyclic GFR-binding peptide
EPLPIVYYIGKTPKIEQLSN

SEQ ID NO: 53235 - protein, 41 aa, Artificial Sequence; identical to SEQ ID NO: 11791
  Cyclic GFR-binding peptide
  MOD_RES (6)..(7)..(39)..(41): Xaa is C or S

SEQ ID NO: 53236 - protein, 32 aa, Artificial Sequence
  Cyclic GFR-binding peptide
  MOD_RES (4)..(5): Xaa is C or S
PKPXXAPTKLSPISVLFIDDSSNVIYKQYENM

SEQ ID NO: 53237 - protein, 31 aa, Artificial Sequence
  Cyclic GFR-binding peptide
  MOD_RES (2)..(3): Xaa is C or S
PXXAPTQLEPLPVVYYDDSSNVIEQLSNNMV

SEQ ID NO: 53238 - protein, 23 aa, Artificial Sequence
  Cyclic GFR-binding peptide
EPLPIVYYIGKTPKIEQLSNMIV

SEQ ID NO: 53239 - protein, 36 aa, Artificial Sequence; identical to SEQ ID NO: 11793
  Cyclic GFR-binding peptide
  MOD_RES (1)..(33)..(35): Xaa is C or S

SEQ ID NO: 53240 - protein, 30 aa, Artificial Sequence; identical to SEQ ID NO: 981
  Cyclic GFR-binding peptide

SEQ ID NO: 53241 - protein, 29 aa, Artificial Sequence
  Cyclic GFR-binding peptide
  MOD_RES (3)..(4): Xaa is C or S
KAXXVPTELEPLTMLYYDENEKVVEQLSN

SEQ ID NO: 53242 - protein, 32 aa, Artificial Sequence
  Cyclic GFR-binding peptide
  MOD_RES (30)..(32): Xaa is C or S
TELEPLPMVYYDENEKVVEQLSNDMVVEGXGX

SEQ ID NO: 53243 - protein, 23 aa, Artificial Sequence
  Cyclic GFR-binding peptide
SPISMLFIDENEKVVYKQYEDMV

SEQ ID NO: 53244 - protein, 31 aa, Artificial Sequence
  Cyclic GFR-binding peptide
  MOD_RES (3)..(4): Xaa is C or S
SPXXVPQDLEPLPIVYYVGRTPKVEQLSNMV

SEQ ID NO: 53245 - protein, 30 aa, Artificial Sequence
  Cyclic GFR-binding peptide
  MOD_RES (28)..(30): Xaa is C or S
LEPLPMVYYDEYDKVVEQLSNEMVVEGXGX

SEQ ID NO: 53246 - protein, 35 aa, Artificial Sequence; identical to SEQ ID NO: 11795
  Cyclic GFR-binding peptide
  MOD_RES (1)..(33)..(35): Xaa is C or S

SEQ ID NO: 53247 - protein, 38 aa, Artificial Sequence; identical to SEQ ID NO: 11797
  Cyclic GFR-binding peptide
  MOD_RES (4)..(5)..(36)..(38): Xaa is C or S

SEQ ID NO: 53248 - protein, 29 aa, Artificial Sequence
  Cyclic GFR-binding peptide
VPQALSPISILFIVGRKPKVYKQYEMIVR

SEQ ID NO: 53249 - protein, 31 aa, Artificial Sequence
  Cyclic GFR-binding peptide
  MOD_RES (28)..(30): Xaa is C or S
LEPLPMVYYDEYDKVVEQLSNEMVVEGXGXR

SEQ ID NO: 53250 - protein, 29 aa, Artificial Sequence
  Cyclic GFR-binding peptide
  MOD_RES (3)..(4): Xaa is C or S
KPXXAPTQLSPISVLFIDDSSNVIYKQYE

SEQ ID NO: 53251 - protein, 27 aa, Artificial Sequence
  Cyclic GFR-binding peptide
  MOD_RES (1)..(1): Xaa is C or S
XAPTQLEPLPVVYYDDSSNVIEQLSNN

SEQ ID NO: 53252 - protein, 29 aa, Artificial Sequence
  Cyclic GFR-binding peptide
PTELSPISMLFIDENEKVVYKQYEDMVVE

SEQ ID NO: 53253 - protein, 36 aa, Artificial Sequence; identical to SEQ ID NO: 11801
  Cyclic GFR-binding peptide
  MOD_RES (1)..(33)..(35): Xaa is C or S

SEQ ID NO: 53254 - protein, 35 aa, Artificial Sequence; identical to SEQ ID NO: 11803
  Cyclic GFR-binding peptide
  MOD_RES (1)..(2)..(34): Xaa is C or S

SEQ ID NO: 53255 - protein, 34 aa, Artificial Sequence; identical to SEQ ID NO: 11808
  Cyclic GFR-binding peptide
  MOD_RES (32)..(34): Xaa is C or S

SEQ ID NO: 53256 - protein, 24 aa, Artificial Sequence
  Cyclic GFR-binding peptide
TELEPLTMLYYDENEKVVEQLSND

SEQ ID NO: 53257 - protein, 32 aa, Artificial Sequence
  Cyclic GFR-binding peptide
  MOD_RES (2)..(3): Xaa is C or S
PXXAPTQLEPLTVLYYDDSSNVIEQLSNNMVV

SEQ ID NO: 53258 - protein, 27 aa, Artificial Sequence
  Cyclic GFR-binding peptide
  MOD_RES (26)..(26): Xaa is C or S
EPLTILYYVGRKPKVEQLSNMIVRSXK

SEQ ID NO: 53259 - protein, 32 aa, Artificial Sequence; identical to SEQ ID NO: 11810
  Cyclic GFR-binding peptide
  MOD_RES (32)..(32): Xaa is C or S

SEQ ID NO: 53260 - protein, 37 aa, Artificial Sequence; identical to SEQ ID NO: 11811
  Cyclic GFR-binding peptide
  MOD_RES (2)..(3)..(35)..(37): Xaa is C or S

SEQ ID NO: 53261 - protein, 36 aa, Artificial Sequence; identical to SEQ ID NO: 11812
  Cyclic GFR-binding peptide
  MOD_RES (1)..(33)..(35): Xaa is C or S

SEQ ID NO: 53262 - protein, 22 aa, Artificial Sequence
  Cyclic GFR-binding peptide
DLSPISILFIIGKTPKIYKQYE

SEQ ID NO: 53263 - protein, 29 aa, Artificial Sequence
  Cyclic GFR-binding peptide
PTRLEPLPIVYYDSANNVVEQLSNDMVVE

SEQ ID NO: 53264 - protein, 34 aa, Artificial Sequence
  Cyclic GFR-binding peptide
  MOD_RES (4)..(5): Xaa is C or S
PKAXXVPTELEPLTMLYYDENEKVVEQLSNDMVV

SEQ ID NO: 53265 - protein, 38 aa, Artificial Sequence; identical to SEQ ID NO: 11813
  Cyclic GFR-binding peptide
  MOD_RES (6)..(7): Xaa is C or S

SEQ ID NO: 53266 - protein, 32 aa, Artificial Sequence
  Cyclic GFR-binding peptide
  MOD_RES (2)..(3): Xaa is C or S
TXXVPTRLSAISILYLDSANNVVLKNYQDMVV

SEQ ID NO: 53267 - protein, 23 aa, Artificial Sequence
  Cyclic GFR-binding peptide
QDLSPISILFIIGKTPKIYKQYE

SEQ ID NO: 53268 - protein, 37 aa, Artificial Sequence; identical to SEQ ID NO: 11815
  Cyclic GFR-binding peptide
  MOD_RES (2)..(34)..(36): Xaa is C or S

SEQ ID NO: 53269 - protein, 31 aa, Artificial Sequence; identical to SEQ ID NO: 11818
  Cyclic GFR-binding peptide
  MOD_RES (1)..(1): Xaa is C or S

SEQ ID NO: 53270 - protein, 28 aa, Artificial Sequence
  Cyclic GFR-binding peptide
QLEPLTVLYYDDSSNVIEQLSNNMVVRA

SEQ ID NO: 53271 - protein, 29 aa, Artificial Sequence
  Cyclic GFR-binding peptide
APTQLEPLPVVYYDDSSNVIEQLSNNMVV

SEQ ID NO: 53272 - protein, 34 aa, Artificial Sequence; identical to SEQ ID NO: 11820
  Cyclic GFR-binding peptide
  MOD_RES (32)..(34): Xaa is C or S

SEQ ID NO: 53273 - protein, 41 aa, Artificial Sequence; identical to SEQ ID NO: 11821
  Cyclic GFR-binding peptide
  MOD_RES (6)..(7)..(39)..(41): Xaa is C or S

SEQ ID NO: 53274 - protein, 32 aa, Artificial Sequence
  Cyclic GFR-binding peptide
  MOD_RES (30)..(32): Xaa is C or S
TQLEPLTVLYYDDSSNVIEQLSNNMVVRAXGX

SEQ ID NO: 53275 - protein, 30 aa, Artificial Sequence; identical to SEQ ID NO: 11822
  Cyclic GFR-binding peptide

SEQ ID NO: 53276 - protein, 33 aa, Artificial Sequence; identical to SEQ ID NO: 11823
  Cyclic GFR-binding peptide
  MOD_RES (1)..(2): Xaa is C or S

SEQ ID NO: 53277 - protein, 27 aa, Artificial Sequence
  Cyclic GFR-binding peptide
QDLSPISILFIIGKTPKIYKQYEMIVK

SEQ ID NO: 53278 - protein, 36 aa, Artificial Sequence; identical to SEQ ID NO: 11824
  Cyclic GFR-binding peptide
  MOD_RES (3)..(35): Xaa is C or S

SEQ ID NO: 53279 - protein, 29 aa, Artificial Sequence
  Cyclic GFR-binding peptide
  MOD_RES (2)..(3): Xaa is C or S
PXXAPTKLEPLTVLYYDDSSNVIEQLSNN

SEQ ID NO: 53280 - protein, 32 aa, Artificial Sequence
  Cyclic GFR-binding peptide
  MOD_RES (30)..(32): Xaa is C or S
TQLSPISVLFIDDSSNVIYKQYENMVVRAXGX

SEQ ID NO: 53281 - protein, 23 aa, Artificial Sequence
  Cyclic GFR-binding peptide
TQLSPISVLFIDDSSNVIYKQYE

SEQ ID NO: 53282 - protein, 32 aa, Artificial Sequence
  Cyclic GFR-binding peptide
  MOD_RES (29)..(31): Xaa is C or S
KLEPLTVLYYDDSSNVIEQLSNNMVVRSXGXH

SEQ ID NO: 53283 - protein, 36 aa, Artificial Sequence
  Cyclic GFR-binding peptide
  MOD_RES (6)..(7): Xaa is C or S
KIPKAXXVPTELSPISMLFIDENEKVVYKQYEDMVV

SEQ ID NO: 53284 - protein, 32 aa, Artificial Sequence
  Cyclic GFR-binding peptide
  MOD_RES (30)..(32): Xaa is C or S
PQDLEPLPIVYYVGRTPKVEQLSNMVVKSXKX

SEQ ID NO: 53285 - protein, 35 aa, Artificial Sequence; identical to SEQ ID NO: 11826
  Cyclic GFR-binding peptide
  MOD_RES (1)..(33)..(35): Xaa is C or S

SEQ ID NO: 53286 - protein, 24 aa, Artificial Sequence
  Cyclic GFR-binding peptide
DLSPISILFIIGKTPKIYKQYEMI

SEQ ID NO: 53287 - protein, 33 aa, Artificial Sequence
  Cyclic GFR-binding peptide
  MOD_RES (5)..(6): Xaa is C or S
IPKAXXVPTELEPLPMVYYDENEKVVEQLSNDM

SEQ ID NO: 53288 - protein, 36 aa, Artificial Sequence; identical to SEQ ID NO: 11828
  Cyclic GFR-binding peptide
  MOD_RES (2)..(3)..(35): Xaa is C or S

SEQ ID NO: 53289 - protein, 26 aa, Artificial Sequence
  Cyclic GFR-binding peptide
  MOD_RES (26)..(26): Xaa is C or S
EPLTILYYVGRKPKVEQLSNMIVRSX

SEQ ID NO: 53290 - protein, 27 aa, Artificial Sequence
  Cyclic GFR-binding peptide
TELEPLPMVYYDENEKVVEQLSNDMVV

SEQ ID NO: 53291 - protein, 30 aa, Artificial Sequence
  Cyclic GFR-binding peptide
  MOD_RES (27)..(29): Xaa is C or S
EPLTVLYYDDSSNVIEQLSNNMVVRSXGXH

SEQ ID NO: 53292 - protein, 31 aa, Artificial Sequence
  Cyclic GFR-binding peptide
  MOD_RES (6)..(6): Xaa is C or S
VTKPTXAPTKLSPISVLFIDDSSNVIYKQYE

SEQ ID NO: 53293 - protein, 40 aa, Artificial Sequence; identical to SEQ ID NO: 11829
  Cyclic GFR-binding peptide
  MOD_RES (6)..(7)..(39): Xaa is C or S

SEQ ID NO: 53294 - protein, 32 aa, Artificial Sequence; identical to SEQ ID NO: 11831
  Cyclic GFR-binding peptide
  MOD_RES (31)..(31): Xaa is C or S

SEQ ID NO: 53295 - protein, 24 aa, Artificial Sequence
  Cyclic GFR-binding peptide
PTRLEPLTILYYDSANNVVEQLSN

SEQ ID NO: 53296 - protein, 20 aa, Artificial Sequence
  Cyclic GFR-binding peptide
SPISMLFIDEYDKVVYKQYE

SEQ ID NO: 53297 - protein, 37 aa, Artificial Sequence; identical to SEQ ID NO: 11832
  Cyclic GFR-binding peptide
  MOD_RES (7)..(7): Xaa is C or S

SEQ ID NO: 53298 - protein, 37 aa, Artificial Sequence; identical to SEQ ID NO: 11833
  Cyclic GFR-binding peptide
  MOD_RES (3)..(4)..(36): Xaa is C or S

SEQ ID NO: 53299 - protein, 30 aa, Artificial Sequence
  Cyclic GFR-binding peptide
  MOD_RES (27)..(29): Xaa is C or S
SPISVLFIDDSSNVIYKQYENMVVRSXGXH

SEQ ID NO: 53300 - protein, 27 aa, Artificial Sequence
  Cyclic GFR-binding peptide
TKLEPLTVLYYDDSSNVIEQLSNNMVV

SEQ ID NO: 53301 - protein, 30 aa, Artificial Sequence
  Cyclic GFR-binding peptide
  MOD_RES (4)..(5): Xaa is C or S
ASPXXVSQDLSPISILFIIGKTPKIYKQYE

SEQ ID NO: 53302 - protein, 37 aa, Artificial Sequence; identical to SEQ ID NO: 11835
  Cyclic GFR-binding peptide
  MOD_RES (3)..(4)..(36): Xaa is C or S

SEQ ID NO: 53303 - protein, 31 aa, Artificial Sequence
  Cyclic GFR-binding peptide
  MOD_RES (2)..(3): Xaa is C or S
TXXVPTRLEPLTILYYDSANNVVEQLSNDMV

SEQ ID NO: 53304 - protein, 32 aa, Artificial Sequence
  Cyclic GFR-binding peptide
  MOD_RES (29)..(31): Xaa is C or S
QDLSPISILFIIGKTPKIYKQYEMIVKSXKXS

SEQ ID NO: 53305 - protein, 37 aa, Artificial Sequence; identical to SEQ ID NO: 11837
  Cyclic GFR-binding peptide
  MOD_RES (2)..(3)..(34)..(36): Xaa is C or S

SEQ ID NO: 53306 - protein, 29 aa, Artificial Sequence
  Cyclic GFR-binding peptide
  MOD_RES (1)..(1): Xaa is C or S
XVPTELEPLTMLYYDEYDKVVEQLSNEMV

SEQ ID NO: 53307 - protein, 35 aa, Artificial Sequence; identical to SEQ ID NO: 11839
  Cyclic GFR-binding peptide
  MOD_RES (4)..(5): Xaa is C or S

SEQ ID NO: 53308 - protein, 37 aa, Artificial Sequence; identical to SEQ ID NO: 11840
  Cyclic GFR-binding peptide
  MOD_RES (2)..(34)..(36): Xaa is C or S

SEQ ID NO: 53309 - protein, 25 aa, Artificial Sequence
  Cyclic GFR-binding peptide
LNAISILYFDSANNVVLKKYRDMVV

SEQ ID NO: 53310 - protein, 34 aa, Artificial Sequence; identical to SEQ ID NO: 11845
  Cyclic GFR-binding peptide
  MOD_RES (1)..(33): Xaa is C or S

SEQ ID NO: 53311 - protein, 30 aa, Artificial Sequence
  Cyclic GFR-binding peptide
  MOD_RES (1)..(2): Xaa is C or S
XXAPTQLSPISVLFIDDSSNVIYKQYENMV

SEQ ID NO: 53312 - protein, 33 aa, Artificial Sequence
  Cyclic GFR-binding peptide
  MOD_RES (5)..(6): Xaa is C or S
SAAPXXVPQALEPLTILYYVGRKPKVEQLSNMI

SEQ ID NO: 53313 - protein, 32 aa, Artificial Sequence
  Cyclic GFR-binding peptide
  MOD_RES (4)..(5): Xaa is C or S
ASPXXVSQDLSPISILFIIGKTPKIYKQYEMI

SEQ ID NO: 53314 - protein, 21 aa, Artificial Sequence
  Cyclic GFR-binding peptide
LEPLPIVYYIGKTPKIEQLSN

SEQ ID NO: 53315 - protein, 40 aa, Artificial Sequence; identical to SEQ ID NO: 11848
  Cyclic GFR-binding peptide
  MOD_RES (7)..(39): Xaa is C or S

SEQ ID NO: 53316 - protein, 29 aa, Artificial Sequence
  Cyclic GFR-binding peptide
  MOD_RES (1)..(2): Xaa is C or S
XXVPTELSPISMLFIDENEKVVYKQYEDM

SEQ ID NO: 53317 - protein, 39 aa, Artificial Sequence; identical to SEQ ID NO: 11850
  Cyclic GFR-binding peptide
  MOD_RES (6)..(7)..(39): Xaa is C or S

SEQ ID NO: 53318 - protein, 21 aa, Artificial Sequence
  Cyclic GFR-binding peptide
LEPLTMLYYDENEKVVEQLSN

SEQ ID NO: 53319 - protein, 37 aa, Artificial Sequence; identical to SEQ ID NO: 11853
  Cyclic GFR-binding peptide
  MOD_RES (3)..(4)..(36): Xaa is C or S

SEQ ID NO: 53320 - protein, 38 aa, Artificial Sequence; identical to SEQ ID NO: 11852
  Cyclic GFR-binding peptide
  MOD_RES (4)..(5)..(37): Xaa is C or S

SEQ ID NO: 53321 - protein, 22 aa, Artificial Sequence
  Cyclic GFR-binding peptide
QLSPISVLFIDDSSNVIYKQYE

SEQ ID NO: 53322 - protein, 27 aa, Artificial Sequence
  Cyclic GFR-binding peptide
LSPISVLFIDDSSNVIYKQYENMVVRA

SEQ ID NO: 53323 - protein, 36 aa, Artificial Sequence; identical to SEQ ID NO: 11855
  Cyclic GFR-binding peptide
  MOD_RES (5)..(6): Xaa is C or S

SEQ ID NO: 53324 - protein, 31 aa, Artificial Sequence
  Cyclic GFR-binding peptide
  MOD_RES (30)..(30): Xaa is C or S
PQALEPLTILYYVGRKPKVEQLSNMIVRSXK

SEQ ID NO: 53325 - protein, 37 aa, Artificial Sequence; identical to SEQ ID NO: 11856
  Cyclic GFR-binding peptide
  MOD_RES (1)..(2)..(34)..(36): Xaa is C or S

SEQ ID NO: 53326 - protein, 30 aa, Artificial Sequence
  Cyclic GFR-binding peptide
  MOD_RES (1)..(1): Xaa is C or S
XAPTQLSPISVLFIDDSSNVIYKQYENMVV

SEQ ID NO: 53327 - protein, 24 aa, Artificial Sequence
  Cyclic GFR-binding peptide
KLEPLTVLYYDDSSNVIEQLSNNM

SEQ ID NO: 53328 - protein, 29 aa, Artificial Sequence
  Cyclic GFR-binding peptide
  MOD_RES (2)..(3): Xaa is C or S
PXXVPQALSPISILFIVGRKPKVYKQYEM

SEQ ID NO: 53329 - protein, 28 aa, Artificial Sequence
  Cyclic GFR-binding peptide
  MOD_RES (1)..(2): Xaa is C or S
XXVPQDLSPISILFIVGRTPKVYKQYEM

SEQ ID NO: 53330 - protein, 27 aa, Artificial Sequence
  Cyclic GFR-binding peptide
LSPISVLFIDDSSNVIYKQYENMVVRS

SEQ ID NO: 53331 - protein, 30 aa, Artificial Sequence
  Cyclic GFR-binding peptide
  MOD_RES (2)..(3): Xaa is C or S
AXXVPTELEPLPMVYYDENEKVVEQLSNDM

SEQ ID NO: 53332 - protein, 30 aa, Artificial Sequence; identical to SEQ ID NO: 11858
  Cyclic GFR-binding peptide

SEQ ID NO: 53333 - protein, 39 aa, Artificial Sequence; identical to SEQ ID NO: 11860
  Cyclic GFR-binding peptide
  MOD_RES (3)..(4)..(36)..(38): Xaa is C or S

SEQ ID NO: 53334 - protein, 26 aa, Artificial Sequence
  Cyclic GFR-binding peptide
VPQALSPISILFIVGRKPKVYKQYEM

SEQ ID NO: 53335 - protein, 22 aa, Artificial Sequence
  Cyclic GFR-binding peptide
LEPLTMLYYDENEKVVEQLSND

SEQ ID NO: 53336 - protein, 32 aa, Artificial Sequence
  Cyclic GFR-binding peptide
  MOD_RES (3)..(4): Xaa is C or S
KAXXVPTELSPISMLFIDENEKVVYKQYEDMV

SEQ ID NO: 53337 - protein, 29 aa, Artificial Sequence
  Cyclic GFR-binding peptide
  MOD_RES (28)..(28): Xaa is C or S
LSAISILYLDSANNVVLKNYQDMVVESXG

SEQ ID NO: 53338 - protein, 42 aa, Artificial Sequence; identical to SEQ ID NO: 11863
  Cyclic GFR-binding peptide
  MOD_RES (6)..(7)..(39)..(41): Xaa is C or S

SEQ ID NO: 53339 - protein, 32 aa, Artificial Sequence
  Cyclic GFR-binding peptide
  MOD_RES (31)..(31): Xaa is C or S
PTKLSPISVLFIDDSSNVIYKQYENMVVRSXG

SEQ ID NO: 53340 - protein, 34 aa, Artificial Sequence; identical to SEQ ID NO: 11865
  Cyclic GFR-binding peptide
  MOD_RES (1)..(2)..(33): Xaa is C or S

SEQ ID NO: 53341 - protein, 37 aa, Artificial Sequence; identical to SEQ ID NO: 11864
  Cyclic GFR-binding peptide
  MOD_RES (3)..(4)..(36): Xaa is C or S

SEQ ID NO: 53342 - protein, 38 aa, Artificial Sequence; identical to SEQ ID NO: 11866
  Cyclic GFR-binding peptide
  MOD_RES (5)..(6)..(37): Xaa is C or S

SEQ ID NO: 53343 - protein, 34 aa, Artificial Sequence; identical to SEQ ID NO: 11868
  Cyclic GFR-binding peptide
  MOD_RES (2)..(3): Xaa is C or S

SEQ ID NO: 53344 - protein, 32 aa, Artificial Sequence
  Cyclic GFR-binding peptide
  MOD_RES (29)..(31): Xaa is C or S
ELEPLPMVYYDENEKVVEQLSNDMVVEGXGXR

SEQ ID NO: 53345 - protein, 37 aa, Artificial Sequence; identical to SEQ ID NO: 11869
  Cyclic GFR-binding peptide
  MOD_RES (4)..(5)..(37): Xaa is C or S

SEQ ID NO: 53346 - protein, 32 aa, Artificial Sequence
  Cyclic GFR-binding peptide
  MOD_RES (4)..(5): Xaa is C or S
PPTXXVPTRLSAISILYLDSANNVVLKNYQDM

SEQ ID NO: 53347 - protein, 29 aa, Artificial Sequence
  Cyclic GFR-binding peptide
  MOD_RES (2)..(3): Xaa is C or S
TXXVPTRLEPLPIVYYDSANNVVEQLSND

SEQ ID NO: 53348 - protein, 23 aa, Artificial Sequence
  Cyclic GFR-binding peptide
TKLEPLPVVYYDDSSNVIEQLSN

SEQ ID NO: 53349 - protein, 42 aa, Artificial Sequence; identical to SEQ ID NO: 11870
  Cyclic GFR-binding peptide
  MOD_RES (7)..(39)..(41): Xaa is C or S

SEQ ID NO: 53350 - protein, 33 aa, Artificial Sequence; identical to SEQ ID NO: 11871
  Cyclic GFR-binding peptide
  MOD_RES (1)..(2): Xaa is C or S

SEQ ID NO: 53351 - protein, 40 aa, Artificial Sequence; identical to SEQ ID NO: 11872
  Cyclic GFR-binding peptide
  MOD_RES (5)..(6)..(38)..(40): Xaa is C or S

SEQ ID NO: 53352 - protein, 33 aa, Artificial Sequence
  Cyclic GFR-binding peptide
  MOD_RES (6)..(7): Xaa is C or S
STPPTXXVPTRLSAISILYLDSANNVVLKNYQD

SEQ ID NO: 53353 - protein, 26 aa, Artificial Sequence
  Cyclic GFR-binding peptide
RLSAISILYLDSANNVVLKNYQDMVV

SEQ ID NO: 53354 - protein, 31 aa, Artificial Sequence; identical to SEQ ID NO: 11873
  Cyclic GFR-binding peptide
  MOD_RES (1)..(1): Xaa is C or S

SEQ ID NO: 53355 - protein, 30 aa, Artificial Sequence
  Cyclic GFR-binding peptide
  MOD_RES (3)..(4): Xaa is C or S
KAXXVPTELSPISMLFIDEYDKVVYKQYEE

SEQ ID NO: 53356 - protein, 27 aa, Artificial Sequence
  Cyclic GFR-binding peptide
VPQALSPISILFIVGRKPKVYKQYEMI

SEQ ID NO: 53357 - protein, 27 aa, Artificial Sequence
  Cyclic GFR-binding peptide
KLEPLTVLYYDDSSNVIEQLSNNMVVR

SEQ ID NO: 53358 - protein, 30 aa, Artificial Sequence
  Cyclic GFR-binding peptide
  MOD_RES (29)..(29): Xaa is C or S
KLSPISVLFIDDSSNVIYKQYENMVVRSXG

SEQ ID NO: 53359 - protein, 37 aa, Artificial Sequence; identical to SEQ ID NO: 11877
  Cyclic GFR-binding peptide
  MOD_RES (1)..(2)..(34)..(36): Xaa is C or S

SEQ ID NO: 53360 - protein, 30 aa, Artificial Sequence
  Cyclic GFR-binding peptide
PTKLEPLPVVYYDDSSNVIEQLSNNMVVRS

SEQ ID NO: 53361 - protein, 31 aa, Artificial Sequence
  Cyclic GFR-binding peptide
  MOD_RES (29)..(31): Xaa is C or S
ELEPLTMLYYDEYDKVVEQLSNEMVVEGXGX

SEQ ID NO: 53362 - protein, 26 aa, Artificial Sequence
  Cyclic GFR-binding peptide
PTRLSAISILYLDSANNVVLKNYQDM

SEQ ID NO: 53363 - protein, 24 aa, Artificial Sequence
  Cyclic GFR-binding peptide
EPLPIVYYDSANNVVEQLSNDMVV

SEQ ID NO: 53364 - protein, 40 aa, Artificial Sequence; identical to SEQ ID NO: 11881
  Cyclic GFR-binding peptide
  MOD_RES (5)..(6)..(37)..(39): Xaa is C or S

SEQ ID NO: 53365 - protein, 28 aa, Artificial Sequence
  Cyclic GFR-binding peptide
  MOD_RES (1)..(1): Xaa is C or S
XAPTQLEPLPVVYYDDSSNVIEQLSNNM

SEQ ID NO: 53366 - protein, 34 aa, Artificial Sequence
  Cyclic GFR-binding peptide
  MOD_RES (6)..(7): Xaa is C or S
YVPKPXXAPTKLEPLTVLYYDDSSNVIEQLSNNM

SEQ ID NO: 53367 - protein, 33 aa, Artificial Sequence
  Cyclic GFR-binding peptide
  MOD_RES (31)..(33): Xaa is C or S
PTQLEPLPVVYYDDSSNVIEQLSNNMVVRAXGX

SEQ ID NO: 53368 - protein, 20 aa, Artificial Sequence
  Cyclic GFR-binding peptide
SPISILFIIGKTPKIYKQYE

SEQ ID NO: 53369 - protein, 31 aa, Artificial Sequence
  Cyclic GFR-binding peptide
  MOD_RES (28)..(30): Xaa is C or S
LEPLTVLYYDDSSNVIEQLSNNMVVRAXGXH

SEQ ID NO: 53370 - protein, 30 aa, Artificial Sequence
  Cyclic GFR-binding peptide
  MOD_RES (4)..(5): Xaa is C or S
PKPXXAPTQLEPLTVLYYDDSSNVIEQLSN

SEQ ID NO: 53371 - protein, 28 aa, Artificial Sequence
  Cyclic GFR-binding peptide
  MOD_RES (28)..(28): Xaa is C or S
LEPLPVVYYDDSSNVIEQLSNNMVVRSX

SEQ ID NO: 53372 - protein, 32 aa, Artificial Sequence; identical to SEQ ID NO: 11884
  Cyclic GFR-binding peptide
  MOD_RES (32)..(32): Xaa is C or S

SEQ ID NO: 53373 - protein, 36 aa, Artificial Sequence; identical to SEQ ID NO: 11887
  Cyclic GFR-binding peptide
  MOD_RES (5)..(6): Xaa is C or S

SEQ ID NO: 53374 - protein, 21 aa, Artificial Sequence
  Cyclic GFR-binding peptide
LSPISILFIVGRTPKVYKQYE

SEQ ID NO: 53375 - protein, 32 aa, Artificial Sequence; identical to SEQ ID NO: 11888
  Cyclic GFR-binding peptide
  MOD_RES (1)..(2): Xaa is C or S

SEQ ID NO: 53376 - protein, 38 aa, Artificial Sequence; identical to SEQ ID NO: 11889
  Cyclic GFR-binding peptide
  MOD_RES (4)..(5)..(36)..(38): Xaa is C or S

SEQ ID NO: 53377 - protein, 35 aa, Artificial Sequence
  Cyclic GFR-binding peptide
  MOD_RES (7)..(7): Xaa is C or S
HVTKPTXAPTKLEPLPVVYYDDSSNVIEQLSNNMV

SEQ ID NO: 53378 - protein, 27 aa, Artificial Sequence
  Cyclic GFR-binding peptide
  MOD_RES (1)..(2): Xaa is C or S
XXVPTRLEPLTILYYDSANNVVEQLSN

SEQ ID NO: 53379 - protein, 31 aa, Artificial Sequence
  Cyclic GFR-binding peptide
  MOD_RES (2)..(3): Xaa is C or S
AXXVPTELEPLPMVYYDENEKVVEQLSNDMV

SEQ ID NO: 53380 - protein, 33 aa, Artificial Sequence; identical to SEQ ID NO: 11891
  Cyclic GFR-binding peptide
  MOD_RES (31)..(33): Xaa is C or S

SEQ ID NO: 53381 - protein, 34 aa, Artificial Sequence; identical to SEQ ID NO: 11895
  Cyclic GFR-binding peptide
  MOD_RES (2)..(3): Xaa is C or S

SEQ ID NO: 53382 - protein, 32 aa, Artificial Sequence; identical to SEQ ID NO: 11896
  Cyclic GFR-binding peptide
  MOD_RES (1)..(32): Xaa is C or S

SEQ ID NO: 53383 - protein, 37 aa, Artificial Sequence; identical to SEQ ID NO: 11898
  Cyclic GFR-binding peptide
  MOD_RES (3)..(4)..(36): Xaa is C or S

SEQ ID NO: 53384 - protein, 28 aa, Artificial Sequence
  Cyclic GFR-binding peptide
ELSPISMLFIDEYDKVVYKQYEEMVVEG

SEQ ID NO: 53385 - protein, 32 aa, Artificial Sequence
  Cyclic GFR-binding peptide
  MOD_RES (30)..(32): Xaa is C or S
SQDLEPLPIVYYIGKTPKIEQLSNMIVKSXKX

SEQ ID NO: 53386 - protein, 32 aa, Artificial Sequence; identical to SEQ ID NO: 11905
  Cyclic GFR-binding peptide
  MOD_RES (2)..(2): Xaa is C or S

SEQ ID NO: 53387 - protein, 33 aa, Artificial Sequence
  Cyclic GFR-binding peptide
  MOD_RES (4)..(5): Xaa is C or S
PKPXXAPTQLSPISVLFIDDSSNVIYKQYENMV

SEQ ID NO: 53388 - protein, 30 aa, Artificial Sequence
  Cyclic GFR-binding peptide
  MOD_RES (30)..(30): Xaa is C or S
TKLSPISVLFIDDSSNVIYKQYENMVVRSX

SEQ ID NO: 53389 - protein, 37 aa, Artificial Sequence; identical to SEQ ID NO: 11907
  Cyclic GFR-binding peptide
  MOD_RES (3)..(35)..(37): Xaa is C or S

SEQ ID NO: 53390 - protein, 32 aa, Artificial Sequence
  Cyclic GFR-binding peptide
  MOD_RES (31)..(31): Xaa is C or S
PTKLEPLTVLYYDDSSNVIEQLSNNMVVRSXG

SEQ ID NO: 53391 - protein, 26 aa, Artificial Sequence
  Cyclic GFR-binding peptide
VPTELEPLTMLYYDEYDKVVEQLSNE

SEQ ID NO: 53392 - protein, 30 aa, Artificial Sequence
  Cyclic GFR-binding peptide
  MOD_RES (29)..(29): Xaa is C or S
RLSAISILYLDSANNVVLKNYQDMVVESXG

SEQ ID NO: 53393 - protein, 31 aa, Artificial Sequence
  Cyclic GFR-binding peptide
  MOD_RES (29)..(31): Xaa is C or S
ELSPISMLFIDEYDKVVYKQYEEMVVEGXGX

SEQ ID NO: 53394 - protein, 28 aa, Artificial Sequence
  Cyclic GFR-binding peptide
  MOD_RES (28)..(28): Xaa is C or S
LEPLPMVYYDEYDKVVEQLSNEMVVEGX

SEQ ID NO: 53395 - protein, 37 aa, Artificial Sequence; identical to SEQ ID NO: 11911
  Cyclic GFR-binding peptide
  MOD_RES (4)..(5)..(36): Xaa is C or S

SEQ ID NO: 53396 - protein, 34 aa, Artificial Sequence
  Cyclic GFR-binding peptide
  MOD_RES (31)..(33): Xaa is C or S
PTELSPISMLFIDEYDKVVYKQYEEMVVEGXGXR

SEQ ID NO: 53397 - protein, 25 aa, Artificial Sequence
  Cyclic GFR-binding peptide
DLEPLPIVYYVGRTPKVEQLSNMVV

SEQ ID NO: 53398 - protein, 32 aa, Artificial Sequence
  Cyclic GFR-binding peptide
  MOD_RES (5)..(5): Xaa is C or S
TKPTXAPTKLEPLTVLYYDDSSNVIEQLSNNM

SEQ ID NO: 53399 - protein, 26 aa, Artificial Sequence
  Cyclic GFR-binding peptide
VPTELEPLPMVYYDEYDKVVEQLSNE

SEQ ID NO: 53400 - protein, 26 aa, Artificial Sequence
  Cyclic GFR-binding peptide
SAISILYLDSANNVVLKNYQDMVVES

SEQ ID NO: 53401 - protein, 27 aa, Artificial Sequence
  Cyclic GFR-binding peptide
VPTRLEPLTILYYDSANNVVEQLSNDM

SEQ ID NO: 53402 - protein, 26 aa, Artificial Sequence
  Cyclic GFR-binding peptide
EPLPMVYYDEYDKVVEQLSNEMVVEG

SEQ ID NO: 53403 - protein, 31 aa, Artificial Sequence
  Cyclic GFR-binding peptide
  MOD_RES (2)..(2): Xaa is C or S
TXAPTKLSPISVLFIDDSSNVIYKQYENMVV

SEQ ID NO: 53404 - protein, 39 aa, Artificial Sequence; identical to SEQ ID NO: 11917
  Cyclic GFR-binding peptide
  MOD_RES (4)..(5)..(36)..(38): Xaa is C or S

SEQ ID NO: 53405 - protein, 22 aa, Artificial Sequence
  Cyclic GFR-binding peptide
LEPLTVLYYDDSSNVIEQLSNN

SEQ ID NO: 53406 - protein, 40 aa, Artificial Sequence; identical to SEQ ID NO: 11918
  Cyclic GFR-binding peptide
  MOD_RES (5)..(6)..(38)..(40): Xaa is C or S

SEQ ID NO: 53407 - protein, 27 aa, Artificial Sequence
  Cyclic GFR-binding peptide
  MOD_RES (27)..(27): Xaa is C or S
EPLTMLYYDENEKVVEQLSNDMVVEGX

SEQ ID NO: 53408 - protein, 32 aa, Artificial Sequence; identical to SEQ ID NO: 11921
  Cyclic GFR-binding peptide
  MOD_RES (1)..(2): Xaa is C or S

SEQ ID NO: 53409 - protein, 34 aa, Artificial Sequence
  Cyclic GFR-binding peptide
  MOD_RES (5)..(6): Xaa is C or S
TPPTXXVPTRLSAISILYLDSANNVVLKNYQDMV

SEQ ID NO: 53410 - protein, 32 aa, Artificial Sequence
  Cyclic GFR-binding peptide
  MOD_RES (5)..(6): Xaa is C or S
IPKAXXVPTELSPISMLFIDENEKVVYKQYED

SEQ ID NO: 53411 - protein, 34 aa, Artificial Sequence; identical to SEQ ID NO: 11923
  Cyclic GFR-binding peptide
  MOD_RES (2)..(3): Xaa is C or S

SEQ ID NO: 53412 - protein, 25 aa, Artificial Sequence
  Cyclic GFR-binding peptide
LEPLPVVYYDDSSNVIEQLSNNMVV

SEQ ID NO: 53413 - protein, 40 aa, Artificial Sequence; identical to SEQ ID NO: 11924
  Cyclic GFR-binding peptide
  MOD_RES (7)..(39): Xaa is C or S

SEQ ID NO: 53414 - protein, 23 aa, Artificial Sequence
  Cyclic GFR-binding peptide
EPLTMLYYDENEKVVEQLSNDMV

SEQ ID NO: 53415 - protein, 32 aa, Artificial Sequence
  Cyclic GFR-binding peptide
  MOD_RES (4)..(5): Xaa is C or S
PKAXXVPTELEPLTMLYYDENEKVVEQLSNDM

SEQ ID NO: 53416 - protein, 38 aa, Artificial Sequence; identical to SEQ ID NO: 11925
  Cyclic GFR-binding peptide
  MOD_RES (6)..(7)..(38): Xaa is C or S

SEQ ID NO: 53417 - protein, 27 aa, Artificial Sequence
  Cyclic GFR-binding peptide
QDLSPISILFIVGRTPKVYKQYEMVVK

SEQ ID NO: 53418 - protein, 41 aa, Artificial Sequence; identical to SEQ ID NO: 11926
  Cyclic GFR-binding peptide
  MOD_RES (6)..(7)..(39)..(41): Xaa is C or S

SEQ ID NO: 53419 - protein, 35 aa, Artificial Sequence; identical to SEQ ID NO: 11927
  Cyclic GFR-binding peptide
  MOD_RES (1)..(33)..(35): Xaa is C or S

SEQ ID NO: 53420 - protein, 27 aa, Artificial Sequence
  Cyclic GFR-binding peptide
  MOD_RES (1)..(1): Xaa is C or S
XAPTQLSPISVLFIDDSSNVIYKQYEN

SEQ ID NO: 53421 - protein, 31 aa, Artificial Sequence
  Cyclic GFR-binding peptide
  MOD_RES (3)..(4): Xaa is C or S
SPXXVSQDLEPLPIVYYIGKTPKIEQLSNMI

SEQ ID NO: 53422 - protein, 27 aa, Artificial Sequence
  Cyclic GFR-binding peptide
PTELSPISMLFIDEYDKVVYKQYEEMV

SEQ ID NO: 53423 - protein, 34 aa, Artificial Sequence; identical to SEQ ID NO: 11928
  Cyclic GFR-binding peptide
  MOD_RES (31)..(33): Xaa is C or S

SEQ ID NO: 53424 - protein, 33 aa, Artificial Sequence
  Cyclic GFR-binding peptide
  MOD_RES (6)..(6): Xaa is C or S
VTKPTXAPTKLEPLPVVYYDDSSNVIEQLSNNM

SEQ ID NO: 53425 - protein, 29 aa, Artificial Sequence
  Cyclic GFR-binding peptide
  MOD_RES (1)..(2): Xaa is C or S
XXAPTKLEPLPVVYYDDSSNVIEQLSNNM

SEQ ID NO: 53426 - protein, 28 aa, Artificial Sequence
  Cyclic GFR-binding peptide
  MOD_RES (1)..(2): Xaa is C or S
XXAPTQLEPLTVLYYDDSSNVIEQLSNN

SEQ ID NO: 53427 - protein, 36 aa, Artificial Sequence; identical to SEQ ID NO: 11932
  Cyclic GFR-binding peptide
  MOD_RES (1)..(2)..(34)..(36): Xaa is C or S

SEQ ID NO: 53428 - protein, 36 aa, Artificial Sequence; identical to SEQ ID NO: 11933
  Cyclic GFR-binding peptide
  MOD_RES (3)..(35): Xaa is C or S

SEQ ID NO: 53429 - protein, 39 aa, Artificial Sequence; identical to SEQ ID NO: 11934
  Cyclic GFR-binding peptide
  MOD_RES (6)..(7)..(39): Xaa is C or S

SEQ ID NO: 53430 - protein, 32 aa, Artificial Sequence
  Cyclic GFR-binding peptide
  MOD_RES (31)..(31): Xaa is C or S
PTQLEPLTVLYYDDSSNVIEQLSNNMVVRAXG

SEQ ID NO: 53431 - protein, 28 aa, Artificial Sequence
  Cyclic GFR-binding peptide
  MOD_RES (1)..(1): Xaa is C or S
XVPTELSPISMLFIDENEKVVYKQYEDM

SEQ ID NO: 53432 - protein, 29 aa, Artificial Sequence
  Cyclic GFR-binding peptide
TKLEPLPVVYYDDSSNVIEQLSNNMVVRS

SEQ ID NO: 53433 - protein, 27 aa, Artificial Sequence
  Cyclic GFR-binding peptide
  MOD_RES (1)..(2): Xaa is C or S
XXAPTKLSPISVLFIDDSSNVIYKQYE

SEQ ID NO: 53434 - protein, 29 aa, Artificial Sequence
  Cyclic GFR-binding peptide
VPTELEPLTMLYYDENEKVVEQLSNDMVV

SEQ ID NO: 53435 - protein, 39 aa, Artificial Sequence; identical to SEQ ID NO: 11936
  Cyclic GFR-binding peptide
  MOD_RES (4)..(5)..(37)..(39): Xaa is C or S

SEQ ID NO: 53436 - protein, 29 aa, Artificial Sequence
  Cyclic GFR-binding peptide
  MOD_RES (28)..(28): Xaa is C or S
ALEPLTILYYVGRKPKVEQLSNMIVRSXK

SEQ ID NO: 53437 - protein, 33 aa, Artificial Sequence; identical to SEQ ID NO: 11940
  Cyclic GFR-binding peptide
  MOD_RES (31)..(33): Xaa is C or S

SEQ ID NO: 53438 - protein, 35 aa, Artificial Sequence; identical to SEQ ID NO: 11941
  Cyclic GFR-binding peptide
  MOD_RES (1)..(33)..(35): Xaa is C or S

SEQ ID NO: 53439 - protein, 37 aa, Artificial Sequence; identical to SEQ ID NO: 11942
  Cyclic GFR-binding peptide
  MOD_RES (3)..(35)..(37): Xaa is C or S

SEQ ID NO: 53440 - protein, 26 aa, Artificial Sequence
  Cyclic GFR-binding peptide
RLEPLTILYYDSANNVVEQLSNDMVV

SEQ ID NO: 53441 - protein, 30 aa, Artificial Sequence
  Cyclic GFR-binding peptide
  MOD_RES (27)..(29): Xaa is C or S
EPLTMLYYDEYDKVVEQLSNEMVVEGXGXR

SEQ ID NO: 53442 - protein, 29 aa, Artificial Sequence
  Cyclic GFR-binding peptide
  MOD_RES (3)..(4): Xaa is C or S
KAXXVPTELEPLPMVYYDEYDKVVEQLSN

SEQ ID NO: 53443 - protein, 30 aa, Artificial Sequence
  Cyclic GFR-binding peptide
  MOD_RES (29)..(29): Xaa is C or S
KLEPLPVVYYDDSSNVIEQLSNNMVVRSXG

SEQ ID NO: 53444 - protein, 24 aa, Artificial Sequence
  Cyclic GFR-binding peptide
ALSPISILFIVGRKPKVYKQYEMI

SEQ ID NO: 53445 - protein, 29 aa, Artificial Sequence
  Cyclic GFR-binding peptide
PTELSPISMLFIDEYDKVVYKQYEEMVVE

SEQ ID NO: 53446 - protein, 29 aa, Artificial Sequence
  Cyclic GFR-binding peptide
  MOD_RES (29)..(29): Xaa is C or S
QLEPLPVVYYDDSSNVIEQLSNNMVVRAX

SEQ ID NO: 53447 - protein, 31 aa, Artificial Sequence
  Cyclic GFR-binding peptide
  MOD_RES (2)..(3): Xaa is C or S
PXXVPQALEPLTILYYVGRKPKVEQLSNMIV

SEQ ID NO: 53448 - protein, 32 aa, Artificial Sequence
  Cyclic GFR-binding peptide
  MOD_RES (4)..(5): Xaa is C or S
PKAXXVPTELEPLPMVYYDEYDKVVEQLSNEM

SEQ ID NO: 53449 - protein, 35 aa, Artificial Sequence
  Cyclic GFR-binding peptide
  MOD_RES (6)..(7): Xaa is C or S
ASASPXXVPQDLSPISILFIVGRTPKVYKQYEMVV

SEQ ID NO: 53450 - protein, 33 aa, Artificial Sequence
  Cyclic GFR-binding peptide
  MOD_RES (31)..(33): Xaa is C or S
PTELEPLTMLYYDENEKVVEQLSNDMVVEGXGX

SEQ ID NO: 53451 - protein, 24 aa, Artificial Sequence
  Cyclic GFR-binding peptide
LEPLTILYYDSANNVVEQLSNDMV

SEQ ID NO: 53452 - protein, 23 aa, Artificial Sequence
  Cyclic GFR-binding peptide
DLEPLPIVYYVGRTPKVEQLSNM

SEQ ID NO: 53453 - protein, 31 aa, Artificial Sequence
  Cyclic GFR-binding peptide
  MOD_RES (4)..(5): Xaa is C or S
PPTXXVPTRLNAISILYFDSANNVVLKKYRD

SEQ ID NO: 53454 - protein, 36 aa, Artificial Sequence; identical to SEQ ID NO: 11947
  Cyclic GFR-binding peptide
  MOD_RES (1)..(33)..(35): Xaa is C or S

SEQ ID NO: 53455 - protein, 28 aa, Artificial Sequence
  Cyclic GFR-binding peptide
  MOD_RES (2)..(3): Xaa is C or S
PXXVSQDLEPLPIVYYIGKTPKIEQLSN

SEQ ID NO: 53456 - protein, 38 aa, Artificial Sequence; identical to SEQ ID NO: 11949
  Cyclic GFR-binding peptide
  MOD_RES (3)..(4)..(36)..(38): Xaa is C or S

SEQ ID NO: 53457 - protein, 24 aa, Artificial Sequence
  Cyclic GFR-binding peptide
TRLSAISILYLDSANNVVLKNYQD

SEQ ID NO: 53458 - protein, 29 aa, Artificial Sequence
  Cyclic GFR-binding peptide
APTQLSPISVLFIDDSSNVIYKQYENMVV

SEQ ID NO: 53459 - protein, 32 aa, Artificial Sequence; identical to SEQ ID NO: 11953
  Cyclic GFR-binding peptide
  MOD_RES (1)..(2): Xaa is C or S

SEQ ID NO: 53460 - protein, 26 aa, Artificial Sequence
  Cyclic GFR-binding peptide
APTQLEPLTVLYYDDSSNVIEQLSNN

SEQ ID NO: 53461 - protein, 32 aa, Artificial Sequence
  Cyclic GFR-binding peptide
  MOD_RES (30)..(32): Xaa is C or S
PQALEPLTILYYVGRKPKVEQLSNMIVRSXKX

SEQ ID NO: 53462 - protein, 27 aa, Artificial Sequence
  Cyclic GFR-binding peptide
  MOD_RES (1)..(2): Xaa is C or S
XXVPTRLSAISILYLDSANNVVLKNYQ

SEQ ID NO: 53463 - protein, 26 aa, Artificial Sequence
  Cyclic GFR-binding peptide
APTQLSPISVLFIDDSSNVIYKQYEN

SEQ ID NO: 53464 - protein, 29 aa, Artificial Sequence
  Cyclic GFR-binding peptide
  MOD_RES (2)..(3): Xaa is C or S
TXXVPTRLEPLTILYYDSANNVVEQLSND

SEQ ID NO: 53465 - protein, 26 aa, Artificial Sequence
  Cyclic GFR-binding peptide
SPISMLFIDEYDKVVYKQYEEMVVEG

SEQ ID NO: 53466 - protein, 36 aa, Artificial Sequence; identical to SEQ ID NO: 11957
  Cyclic GFR-binding peptide
  MOD_RES (2)..(3)..(35): Xaa is C or S

SEQ ID NO: 53467 - protein, 30 aa, Artificial Sequence
  Cyclic GFR-binding peptide
  MOD_RES (4)..(5): Xaa is C or S
PKPXXAPTKLSPISVLFIDDSSNVIYKQYE

SEQ ID NO: 53468 - protein, 27 aa, Artificial Sequence
  Cyclic GFR-binding peptide
TELEPLPMVYYDEYDKVVEQLSNEMVV

SEQ ID NO: 53469 - protein, 31 aa, Artificial Sequence
  Cyclic GFR-binding peptide
  MOD_RES (1)..(2): Xaa is C or S
XXVPQDLSPISILFIVGRTPKVYKQYEMVVK

SEQ ID NO: 53470 - protein, 38 aa, Artificial Sequence; identical to SEQ ID NO: 11958
  Cyclic GFR-binding peptide
  MOD_RES (6)..(7)..(38): Xaa is C or S

SEQ ID NO: 53471 - protein, 29 aa, Artificial Sequence
  Cyclic GFR-binding peptide
  MOD_RES (27)..(29): Xaa is C or S
SAISILYLDSANNVVLKNYQDMVVESXGX

SEQ ID NO: 53472 - protein, 35 aa, Artificial Sequence; identical to SEQ ID NO: 11959
  Cyclic GFR-binding peptide
  MOD_RES (32)..(34): Xaa is C or S

SEQ ID NO: 53473 - protein, 40 aa, Artificial Sequence; identical to SEQ ID NO: 11960
  Cyclic GFR-binding peptide
  MOD_RES (5)..(6)..(38)..(40): Xaa is C or S

SEQ ID NO: 53474 - protein, 30 aa, Artificial Sequence
  Cyclic GFR-binding peptide
  MOD_RES (28)..(30): Xaa is C or S
LSAISILYLDSANNVVLKNYQDMVVESXGX

SEQ ID NO: 53475 - protein, 31 aa, Artificial Sequence
  Cyclic GFR-binding peptide
  MOD_RES (2)..(3): Xaa is C or S
PXXVSQDLEPLPIVYYIGKTPKIEQLSNMIV

SEQ ID NO: 53476 - protein, 31 aa, Artificial Sequence
  Cyclic GFR-binding peptide
  MOD_RES (3)..(4): Xaa is C or S
KAXXVPTELEPLPMVYYDEYDKVVEQLSNEM

SEQ ID NO: 53477 - protein, 31 aa, Artificial Sequence
  Cyclic GFR-binding peptide
  MOD_RES (5)..(6): Xaa is C or S
SASPXXVSQDLEPLPIVYYIGKTPKIEQLSN

SEQ ID NO: 53478 - protein, 28 aa, Artificial Sequence
  Cyclic GFR-binding peptide
TRLNAISILYFDSANNVVLKKYRDMVVE

SEQ ID NO: 53479 - protein, 28 aa, Artificial Sequence
  Cyclic GFR-binding peptide
SQDLEPLPIVYYIGKTPKIEQLSNMIVK

SEQ ID NO: 53480 - protein, 33 aa, Artificial Sequence
  Cyclic GFR-binding peptide
  MOD_RES (6)..(7): Xaa is C or S
TVPKPXXAPTQLEPLPVVYYDDSSNVIEQLSNN

SEQ ID NO: 53481 - protein, 29 aa, Artificial Sequence
  Cyclic GFR-binding peptide
TELSPISMLFIDENEKVVYKQYEDMVVEG

SEQ ID NO: 53482 - protein, 33 aa, Artificial Sequence; identical to SEQ ID NO: 11962
  Cyclic GFR-binding peptide
  MOD_RES (1)..(2)..(33): Xaa is C or S

SEQ ID NO: 53483 - protein, 25 aa, Artificial Sequence
  Cyclic GFR-binding peptide
VPTELSPISMLFIDENEKVVYKQYE

SEQ ID NO: 53484 - protein, 26 aa, Artificial Sequence
  Cyclic GFR-binding peptide
  MOD_RES (1)..(1): Xaa is C or S
XVPTELEPLPMVYYDENEKVVEQLSN

SEQ ID NO: 53485 - protein, 30 aa, Artificial Sequence
  Cyclic GFR-binding peptide
  MOD_RES (30)..(30): Xaa is C or S
TQLSPISVLFIDDSSNVIYKQYENMVVRAX

SEQ ID NO: 53486 - protein, 34 aa, Artificial Sequence
  Cyclic GFR-binding peptide
  MOD_RES (6)..(7): Xaa is C or S
TVPKPXXAPTQLSPISVLFIDDSSNVIYKQYENM

SEQ ID NO: 53487 - protein, 27 aa, Artificial Sequence
  Cyclic GFR-binding peptide
SQDLSPISILFIIGKTPKIYKQYEMIV

SEQ ID NO: 53488 - protein, 28 aa, Artificial Sequence
  Cyclic GFR-binding peptide
  MOD_RES (1)..(1): Xaa is C or S
XVPTELEPLPMVYYDEYDKVVEQLSNEM

SEQ ID NO: 53489 - protein, 26 aa, Artificial Sequence
  Cyclic GFR-binding peptide
TELEPLTMLYYDEYDKVVEQLSNEMV

SEQ ID NO: 53490 - protein, 32 aa, Artificial Sequence
  Cyclic GFR-binding peptide
  MOD_RES (3)..(4): Xaa is C or S
SPXXVPQDLEPLPIVYYVGRTPKVEQLSNMVV

SEQ ID NO: 53491 - protein, 29 aa, Artificial Sequence
  Cyclic GFR-binding peptide
  MOD_RES (27)..(29): Xaa is C or S
LEPLPIVYYIGKTPKIEQLSNMIVKSXKX

SEQ ID NO: 53492 - protein, 36 aa, Artificial Sequence; identical to SEQ ID NO: 11970
  Cyclic GFR-binding peptide
  MOD_RES (5)..(6): Xaa is C or S

SEQ ID NO: 53493 - protein, 35 aa, Artificial Sequence
  Cyclic GFR-binding peptide
  MOD_RES (5)..(6): Xaa is C or S
VPKPXXAPTQLEPLPVVYYDDSSNVIEQLSNNMVV

SEQ ID NO: 53494 - protein, 22 aa, Artificial Sequence
  Cyclic GFR-binding peptide
EPLPIVYYDSANNVVEQLSNDM

SEQ ID NO: 53495 - protein, 34 aa, Artificial Sequence; identical to SEQ ID NO: 11971
  Cyclic GFR-binding peptide
  MOD_RES (32)..(34): Xaa is C or S

SEQ ID NO: 53496 - protein, 30 aa, Artificial Sequence
  Cyclic GFR-binding peptide
  MOD_RES (1)..(1): Xaa is C or S
XVPTELEPLTMLYYDEYDKVVEQLSNEMVV

SEQ ID NO: 53497 - protein, 34 aa, Artificial Sequence
  Cyclic GFR-binding peptide
  MOD_RES (7)..(7): Xaa is C or S
HVTKPTXAPTKLEPLPVVYYDDSSNVIEQLSNNM

SEQ ID NO: 53498 - protein, 26 aa, Artificial Sequence
  Cyclic GFR-binding peptide
  MOD_RES (1)..(1): Xaa is C or S
XVPTRLEPLTILYYDSANNVVEQLSN

SEQ ID NO: 53499 - protein, 32 aa, Artificial Sequence; identical to SEQ ID NO: 11975
  Cyclic GFR-binding peptide
  MOD_RES (1)..(2): Xaa is C or S

SEQ ID NO: 53500 - protein, 26 aa, Artificial Sequence
  Cyclic GFR-binding peptide
ELEPLTMLYYDENEKVVEQLSNDMVV

SEQ ID NO: 53501 - protein, 30 aa, Artificial Sequence
  Cyclic GFR-binding peptide
  MOD_RES (30)..(30): Xaa is C or S
TRLEPLTILYYDSANNVVEQLSNDMVVESX

SEQ ID NO: 53502 - protein, 32 aa, Artificial Sequence
  Cyclic GFR-binding peptide
  MOD_RES (5)..(6): Xaa is C or S
TPPTXXVPTRLEPLTILYYDSANNVVEQLSND

SEQ ID NO: 53503 - protein, 29 aa, Artificial Sequence
  Cyclic GFR-binding peptide
  MOD_RES (29)..(29): Xaa is C or S
ELSPISMLFIDEYDKVVYKQYEEMVVEGX

SEQ ID NO: 53504 - protein, 33 aa, Artificial Sequence
  Cyclic GFR-binding peptide
  MOD_RES (4)..(4): Xaa is C or S
KPTXAPTKLEPLPVVYYDDSSNVIEQLSNNMVV

SEQ ID NO: 53505 - protein, 32 aa, Artificial Sequence
  Cyclic GFR-binding peptide
  MOD_RES (3)..(4): Xaa is C or S
KAXXVPTELSPISMLFIDEYDKVVYKQYEEMV

SEQ ID NO: 53506 - protein, 28 aa, Artificial Sequence
  Cyclic GFR-binding peptide
  MOD_RES (28)..(28): Xaa is C or S
LSPISMLFIDENEKVVYKQYEDMVVEGX

SEQ ID NO: 53507 - protein, 37 aa, Artificial Sequence; identical to SEQ ID NO: 11977
  Cyclic GFR-binding peptide
  MOD_RES (3)..(4)..(36): Xaa is C or S

SEQ ID NO: 53508 - protein, 20 aa, Artificial Sequence
  Cyclic GFR-binding peptide
EPLPIVYYVGRTPKVEQLSN

SEQ ID NO: 53509 - protein, 30 aa, Artificial Sequence
  Cyclic GFR-binding peptide
  MOD_RES (2)..(3): Xaa is C or S
PXXVPQALSPISILFIVGRKPKVYKQYEMI

SEQ ID NO: 53510 - protein, 40 aa, Artificial Sequence; identical to SEQ ID NO: 11978
  Cyclic GFR-binding peptide
  MOD_RES (6)..(7)..(39): Xaa is C or S

SEQ ID NO: 53511 - protein, 29 aa, Artificial Sequence
  Cyclic GFR-binding peptide
PQALSPISILFIVGRKPKVYKQYEMIVRS

SEQ ID NO: 53512 - protein, 22 aa, Artificial Sequence
  Cyclic GFR-binding peptide
LSPISVLFIDDSSNVIYKQYEN

SEQ ID NO: 53513 - protein, 21 aa, Artificial Sequence
  Cyclic GFR-binding peptide
EPLPIVYYVGRTPKVEQLSNM

SEQ ID NO: 53514 - protein, 28 aa, Artificial Sequence
  Cyclic GFR-binding peptide
  MOD_RES (1)..(1): Xaa is C or S
XVPTRLSAISILYLDSANNVVLKNYQDM

SEQ ID NO: 53515 - protein, 36 aa, Artificial Sequence; identical to SEQ ID NO: 11979
  Cyclic GFR-binding peptide
  MOD_RES (4)..(5)..(36): Xaa is C or S

SEQ ID NO: 53516 - protein, 24 aa, Artificial Sequence
  Cyclic GFR-binding peptide
PQALEPLTILYYVGRKPKVEQLSN

SEQ ID NO: 53517 - protein, 34 aa, Artificial Sequence
  Cyclic GFR-binding peptide
  MOD_RES (31)..(33): Xaa is C or S
PTKLEPLTVLYYDDSSNVIEQLSNNMVVRSXGXH

SEQ ID NO: 53518 - protein, 33 aa, Artificial Sequence
  Cyclic GFR-binding peptide
  MOD_RES (6)..(7): Xaa is C or S
STPPTXXVPTRLEPLPIVYYDSANNVVEQLSND

SEQ ID NO: 53519 - protein, 33 aa, Artificial Sequence; identical to SEQ ID NO: 11982
  Cyclic GFR-binding peptide
  MOD_RES (1)..(2): Xaa is C or S

SEQ ID NO: 53520 - protein, 33 aa, Artificial Sequence; identical to SEQ ID NO: 11983
  Cyclic GFR-binding peptide
  MOD_RES (1)..(2): Xaa is C or S

SEQ ID NO: 53521 - protein, 31 aa, Artificial Sequence
  Cyclic GFR-binding peptide
  MOD_RES (30)..(30): Xaa is C or S
TQLEPLPVVYYDDSSNVIEQLSNNMVVRAXG

SEQ ID NO: 53522 - protein, 22 aa, Artificial Sequence
  Cyclic GFR-binding peptide
ALEPLTILYYVGRKPKVEQLSN

SEQ ID NO: 53523 - protein, 29 aa, Artificial Sequence
  Cyclic GFR-binding peptide
PTELEPLPMVYYDENEKVVEQLSNDMVVE

SEQ ID NO: 53524 - protein, 28 aa, Artificial Sequence
  Cyclic GFR-binding peptide
  MOD_RES (1)..(1): Xaa is C or S
XVPQDLSPISILFIVGRTPKVYKQYEMV

SEQ ID NO: 53525 - protein, 31 aa, Artificial Sequence
  Cyclic GFR-binding peptide
  MOD_RES (4)..(5): Xaa is C or S
PKAXXVPTELSPISMLFIDENEKVVYKQYED

SEQ ID NO: 53526 - protein, 37 aa, Artificial Sequence; identical to SEQ ID NO: 11986
  Cyclic GFR-binding peptide
  MOD_RES (5)..(6): Xaa is C or S

SEQ ID NO: 53527 - protein, 39 aa, Artificial Sequence; identical to SEQ ID NO: 11988
  Cyclic GFR-binding peptide
  MOD_RES (4)..(5)..(37)..(39): Xaa is C or S

SEQ ID NO: 53528 - protein, 32 aa, Artificial Sequence
  Cyclic GFR-binding peptide
  MOD_RES (2)..(3): Xaa is C or S
PXXVPQDLSPISILFIVGRTPKVYKQYEMVVK

SEQ ID NO: 53529 - protein, 33 aa, Artificial Sequence; identical to SEQ ID NO: 11990
  Cyclic GFR-binding peptide
  MOD_RES (32)..(32): Xaa is C or S

SEQ ID NO: 53530 - protein, 35 aa, Artificial Sequence
  Cyclic GFR-binding peptide
  MOD_RES (6)..(7): Xaa is C or S
TVPKPXXAPTQLEPLTVLYYDDSSNVIEQLSNNMV

SEQ ID NO: 53531 - protein, 25 aa, Artificial Sequence
  Cyclic GFR-binding peptide
LEPLPIVYYIGKTPKIEQLSNMIVK

SEQ ID NO: 53532 - protein, 29 aa, Artificial Sequence
  Cyclic GFR-binding peptide
PTRLEPLTILYYDSANNVVEQLSNDMVVE

SEQ ID NO: 53533 - protein, 22 aa, Artificial Sequence
  Cyclic GFR-binding peptide
LSPISILFIIGKTPKIYKQYEM

SEQ ID NO: 53534 - protein, 31 aa, Artificial Sequence
  Cyclic GFR-binding peptide
  MOD_RES (31)..(31): Xaa is C or S
PTELEPLTMLYYDENEKVVEQLSNDMVVEGX

SEQ ID NO: 53535 - protein, 34 aa, Artificial Sequence
  Cyclic GFR-binding peptide
  MOD_RES (31)..(33): Xaa is C or S
PTRLNAISILYFDSANNVVLKKYRDMVVESXGXR

SEQ ID NO: 53536 - protein, 34 aa, Artificial Sequence
  Cyclic GFR-binding peptide
  MOD_RES (4)..(5): Xaa is C or S
PPTXXVPTRLSAISILYLDSANNVVLKNYQDMVV

SEQ ID NO: 53537 - protein, 34 aa, Artificial Sequence; identical to SEQ ID NO: 11993
  Cyclic GFR-binding peptide
  MOD_RES (3)..(4): Xaa is C or S

SEQ ID NO: 53538 - protein, 25 aa, Artificial Sequence
  Cyclic GFR-binding peptide
ELEPLTMLYYDENEKVVEQLSNDMV

SEQ ID NO: 53539 - protein, 42 aa, Artificial Sequence; identical to SEQ ID NO: 11994
  Cyclic GFR-binding peptide
  MOD_RES (6)..(7)..(39)..(41): Xaa is C or S

SEQ ID NO: 53540 - protein, 39 aa, Artificial Sequence; identical to SEQ ID NO: 11996
  Cyclic GFR-binding peptide
  MOD_RES (3)..(4)..(36)..(38): Xaa is C or S

SEQ ID NO: 53541 - protein, 34 aa, Artificial Sequence
  Cyclic GFR-binding peptide
  MOD_RES (5)..(6): Xaa is C or S
IPKAXXVPTELEPLPMVYYDENEKVVEQLSNDMV

SEQ ID NO: 53542 - protein, 23 aa, Artificial Sequence
  Cyclic GFR-binding peptide
TRLEPLTILYYDSANNVVEQLSN

SEQ ID NO: 53543 - protein, 32 aa, Artificial Sequence
  Cyclic GFR-binding peptide
  MOD_RES (5)..(6): Xaa is C or S
IPKAXXVPTELEPLTMLYYDENEKVVEQLSND

SEQ ID NO: 53544 - protein, 38 aa, Artificial Sequence; identical to SEQ ID NO: 11997
  Cyclic GFR-binding peptide
  MOD_RES (5)..(6)..(37): Xaa is C or S

SEQ ID NO: 53545 - protein, 38 aa, Artificial Sequence; identical to SEQ ID NO: 11998
  Cyclic GFR-binding peptide
  MOD_RES (3)..(4)..(36)..(38): Xaa is C or S

SEQ ID NO: 53546 - protein, 31 aa, Artificial Sequence
  Cyclic GFR-binding peptide
  MOD_RES (31)..(31): Xaa is C or S
PTKLSPISVLFIDDSSNVIYKQYENMVVRSX

SEQ ID NO: 53547 - protein, 23 aa, Artificial Sequence
  Cyclic GFR-binding peptide
SPISILFIVGRTPKVYKQYEMVV

SEQ ID NO: 53548 - protein, 35 aa, Artificial Sequence; identical to SEQ ID NO: 12000
  Cyclic GFR-binding peptide
  MOD_RES (3)..(4): Xaa is C or S

SEQ ID NO: 53549 - protein, 25 aa, Artificial Sequence
  Cyclic GFR-binding peptide
PTELSPISMLFIDENEKVVYKQYED

SEQ ID NO: 53550 - protein, 35 aa, Artificial Sequence; identical to SEQ ID NO: 12005
  Cyclic GFR-binding peptide
  MOD_RES (1)..(2)..(34): Xaa is C or S

SEQ ID NO: 53551 - protein, 35 aa, Artificial Sequence; identical to SEQ ID NO: 12006
  Cyclic GFR-binding peptide
  MOD_RES (4)..(5): Xaa is C or S

SEQ ID NO: 53552 - protein, 34 aa, Artificial Sequence
  Cyclic GFR-binding peptide
  MOD_RES (6)..(6): Xaa is C or S
VTKPTXAPTKLSPISVLFIDDSSNVIYKQYENMV

SEQ ID NO: 53553 - protein, 37 aa, Artificial Sequence; identical to SEQ ID NO: 12008
  Cyclic GFR-binding peptide
  MOD_RES (3)..(4)..(35)..(37): Xaa is C or S

SEQ ID NO: 53554 - protein, 36 aa, Artificial Sequence
  Cyclic GFR-binding peptide
  MOD_RES (6)..(7): Xaa is C or S
TVPKPXXAPTQLEPLTVLYYDDSSNVIEQLSNNMVV

SEQ ID NO: 53555 - protein, 26 aa, Artificial Sequence
  Cyclic GFR-binding peptide
  MOD_RES (26)..(26): Xaa is C or S
SPISILFIIGKTPKIYKQYEMIVKSX

SEQ ID NO: 53556 - protein, 20 aa, Artificial Sequence
  Cyclic GFR-binding peptide
SPISILFIDSANNVVYKQYE

SEQ ID NO: 53557 - protein, 24 aa, Artificial Sequence
  Cyclic GFR-binding peptide
LEPLTMLYYDENEKVVEQLSNDMV

SEQ ID NO: 53558 - protein, 34 aa, Artificial Sequence; identical to SEQ ID NO: 12009
  Cyclic GFR-binding peptide
  MOD_RES (32)..(34): Xaa is C or S

SEQ ID NO: 53559 - protein, 30 aa, Artificial Sequence
  Cyclic GFR-binding peptide
  MOD_RES (3)..(4): Xaa is C or S
KAXXVPTELEPLTMLYYDEYDKVVEQLSNE

SEQ ID NO: 53560 - protein, 28 aa, Artificial Sequence
  Cyclic GFR-binding peptide
  MOD_RES (1)..(1): Xaa is C or S
XVPTRLNAISILYFDSANNVVLKKYRDM

SEQ ID NO: 53561 - protein, 29 aa, Artificial Sequence
  Cyclic GFR-binding peptide
  MOD_RES (1)..(2): Xaa is C or S
XXVPTELEPLTMLYYDENEKVVEQLSNDM

SEQ ID NO: 53562 - protein, 27 aa, Artificial Sequence
  Cyclic GFR-binding peptide
  MOD_RES (26)..(26): Xaa is C or S
SPISILFIVGRTPKVYKQYEMVVKSXK

SEQ ID NO: 53563 - protein, 39 aa, Artificial Sequence; identical to SEQ ID NO: 12012
  Cyclic GFR-binding peptide
  MOD_RES (4)..(5)..(37)..(39): Xaa is C or S

SEQ ID NO: 53564 - protein, 21 aa, Artificial Sequence
  Cyclic GFR-binding peptide
LSPISMLFIDENEKVVYKQYE

SEQ ID NO: 53565 - protein, 34 aa, Artificial Sequence
  Cyclic GFR-binding peptide
  MOD_RES (5)..(6): Xaa is C or S
TPPTXXVPTRLEPLPIVYYDSANNVVEQLSNDMV

SEQ ID NO: 53566 - protein, 31 aa, Artificial Sequence
  Cyclic GFR-binding peptide
  MOD_RES (4)..(4): Xaa is C or S
KPTXAPTKLEPLPVVYYDDSSNVIEQLSNNM

SEQ ID NO: 53567 - protein, 29 aa, Artificial Sequence
  Cyclic GFR-binding peptide
  MOD_RES (29)..(29): Xaa is C or S
QDLSPISILFIIGKTPKIYKQYEMIVKSX

SEQ ID NO: 53568 - protein, 23 aa, Artificial Sequence
  Cyclic GFR-binding peptide
TQLEPLTVLYYDDSSNVIEQLSN

SEQ ID NO: 53569 - protein, 40 aa, Artificial Sequence; identical to SEQ ID NO: 12014
  Cyclic GFR-binding peptide
  MOD_RES (5)..(37)..(39): Xaa is C or S

SEQ ID NO: 53570 - protein, 29 aa, Artificial Sequence
  Cyclic GFR-binding peptide
  MOD_RES (27)..(29): Xaa is C or S
EPLPIVYYDSANNVVEQLSNDMVVESXGX

SEQ ID NO: 53571 - protein, 32 aa, Artificial Sequence
  Cyclic GFR-binding peptide
  MOD_RES (3)..(4): Xaa is C or S
KPXXAPTQLEPLPVVYYDDSSNVIEQLSNNMV

SEQ ID NO: 53572 - protein, 29 aa, Artificial Sequence
  Cyclic GFR-binding peptide
  MOD_RES (28)..(28): Xaa is C or S
LEPLPIVYYDSANNVVEQLSNDMVVESXG

SEQ ID NO: 53573 - protein, 26 aa, Artificial Sequence
  Cyclic GFR-binding peptide
  MOD_RES (1)..(1): Xaa is C or S
XVSQDLSPISILFIIGKTPKIYKQYE

SEQ ID NO: 53574 - protein, 35 aa, Artificial Sequence; identical to SEQ ID NO: 12016
  Cyclic GFR-binding peptide
  MOD_RES (3)..(4): Xaa is C or S

SEQ ID NO: 53575 - protein, 27 aa, Artificial Sequence
  Cyclic GFR-binding peptide
  MOD_RES (1)..(2): Xaa is C or S
XXVSQDLSPISILFIIGKTPKIYKQYE

SEQ ID NO: 53576 - protein, 31 aa, Artificial Sequence
  Cyclic GFR-binding peptide
  MOD_RES (30)..(30): Xaa is C or S
TRLEPLTILYYDSANNVVEQLSNDMVVESXG

SEQ ID NO: 53577 - protein, 26 aa, Artificial Sequence
  Cyclic GFR-binding peptide
PTRLEPLTILYYDSANNVVEQLSNDM

SEQ ID NO: 53578 - protein, 39 aa, Artificial Sequence; identical to SEQ ID NO: 12017
  Cyclic GFR-binding peptide
  MOD_RES (4)..(5)..(37)..(39): Xaa is C or S

SEQ ID NO: 53579 - protein, 30 aa, Artificial Sequence
  Cyclic GFR-binding peptide
  MOD_RES (28)..(30): Xaa is C or S
LEPLPIVYYDSANNVVEQLSNDMVVESXGX

SEQ ID NO: 53580 - protein, 39 aa, Artificial Sequence; identical to SEQ ID NO: 12018
  Cyclic GFR-binding peptide
  MOD_RES (5)..(6)..(38): Xaa is C or S

SEQ ID NO: 53581 - protein, 33 aa, Artificial Sequence
  Cyclic GFR-binding peptide
  MOD_RES (3)..(4): Xaa is C or S
KAXXVPTELEPLPMVYYDEYDKVVEQLSNEMVV

SEQ ID NO: 53582 - protein, 35 aa, Artificial Sequence
  Cyclic GFR-binding peptide
  MOD_RES (5)..(6): Xaa is C or S
VPKPXXAPTKLEPLPVVYYDDSSNVIEQLSNNMVV

SEQ ID NO: 53583 - protein, 33 aa, Artificial Sequence
  Cyclic GFR-binding peptide
  MOD_RES (5)..(6): Xaa is C or S
SASPXXVPQDLSPISILFIVGRTPKVYKQYEMV

SEQ ID NO: 53584 - protein, 32 aa, Artificial Sequence
  Cyclic GFR-binding peptide
  MOD_RES (6)..(7): Xaa is C or S
YVPKPXXAPTKLSPISVLFIDDSSNVIYKQYE

SEQ ID NO: 53585 - protein, 27 aa, Artificial Sequence
  Cyclic GFR-binding peptide
LEPLPMVYYDEYDKVVEQLSNEMVVEG

SEQ ID NO: 53586 - protein, 37 aa, Artificial Sequence; identical to SEQ ID NO: 12021
  Cyclic GFR-binding peptide
  MOD_RES (5)..(6)..(37): Xaa is C or S

SEQ ID NO: 53587 - protein, 21 aa, Artificial Sequence
  Cyclic GFR-binding peptide
LEPLPMVYYDEYDKVVEQLSN

SEQ ID NO: 53588 - protein, 21 aa, Artificial Sequence
  Cyclic GFR-binding peptide
LEPLTILYYDSANNVVEQLSN

SEQ ID NO: 53589 - protein, 27 aa, Artificial Sequence
  Cyclic GFR-binding peptide
TQLEPLTVLYYDDSSNVIEQLSNNMVV

SEQ ID NO: 53590 - protein, 41 aa, Artificial Sequence; identical to SEQ ID NO: 12023
  Cyclic GFR-binding peptide
  MOD_RES (7)..(39)..(41): Xaa is C or S

SEQ ID NO: 53591 - protein, 27 aa, Artificial Sequence
  Cyclic GFR-binding peptide
  MOD_RES (27)..(27): Xaa is C or S
LEPLPIVYYIGKTPKIEQLSNMIVKSX

SEQ ID NO: 53592 - protein, 35 aa, Artificial Sequence; identical to SEQ ID NO: 12024
  Cyclic GFR-binding peptide
  MOD_RES (4)..(5): Xaa is C or S

SEQ ID NO: 53593 - protein, 29 aa, Artificial Sequence
  Cyclic GFR-binding peptide
  MOD_RES (3)..(4): Xaa is C or S
KPXXAPTQLEPLTVLYYDDSSNVIEQLSN

SEQ ID NO: 53594 - protein, 26 aa, Artificial Sequence
  Cyclic GFR-binding peptide
VPQDLEPLPIVYYVGRTPKVEQLSNM

SEQ ID NO: 53595 - protein, 38 aa, Artificial Sequence; identical to SEQ ID NO: 12026
  Cyclic GFR-binding peptide
  MOD_RES (4)..(5)..(37): Xaa is C or S

SEQ ID NO: 53596 - protein, 30 aa, Artificial Sequence; identical to SEQ ID NO: 12027
  Cyclic GFR-binding peptide

SEQ ID NO: 53597 - protein, 31 aa, Artificial Sequence
  Cyclic GFR-binding peptide
  MOD_RES (3)..(4): Xaa is C or S
KPXXAPTQLSPISVLFIDDSSNVIYKQYENM

SEQ ID NO: 53598 - protein, 29 aa, Artificial Sequence
  Cyclic GFR-binding peptide
  MOD_RES (4)..(4): Xaa is C or S
KPTXAPTKLEPLPVVYYDDSSNVIEQLSN

SEQ ID NO: 53599 - protein, 28 aa, Artificial Sequence
  Cyclic GFR-binding peptide
PTELEPLTMLYYDEYDKVVEQLSNEMVV

SEQ ID NO: 53600 - protein, 24 aa, Artificial Sequence
  Cyclic GFR-binding peptide
DLSPISILFIVGRTPKVYKQYEMV

SEQ ID NO: 53601 - protein, 21 aa, Artificial Sequence
  Cyclic GFR-binding peptide
LSPISILFIVGRKPKVYKQYE

SEQ ID NO: 53602 - protein, 35 aa, Artificial Sequence; identical to SEQ ID NO: 12030
  Cyclic GFR-binding peptide
  MOD_RES (1)..(2)..(34): Xaa is C or S

SEQ ID NO: 53603 - protein, 26 aa, Artificial Sequence
  Cyclic GFR-binding peptide
  MOD_RES (1)..(1): Xaa is C or S
XAPTQLSPISVLFIDDSSNVIYKQYE

SEQ ID NO: 53604 - protein, 37 aa, Artificial Sequence; identical to SEQ ID NO: 12033
  Cyclic GFR-binding peptide
  MOD_RES (5)..(6): Xaa is C or S

SEQ ID NO: 53605 - protein, 30 aa, Artificial Sequence
  Cyclic GFR-binding peptide
  MOD_RES (1)..(1): Xaa is C or S
XVPTRLNAISILYFDSANNVVLKKYRDMVV

SEQ ID NO: 53606 - protein, 23 aa, Artificial Sequence
  Cyclic GFR-binding peptide
QDLEPLPIVYYIGKTPKIEQLSN

SEQ ID NO: 53607 - protein, 30 aa, Artificial Sequence
  Cyclic GFR-binding peptide
  MOD_RES (1)..(2): Xaa is C or S
XXVPTELEPLTMLYYDENEKVVEQLSNDMV

SEQ ID NO: 53608 - protein, 24 aa, Artificial Sequence
  Cyclic GFR-binding peptide
TELSPISMLFIDENEKVVYKQYED

SEQ ID NO: 53609 - protein, 27 aa, Artificial Sequence
  Cyclic GFR-binding peptide
  MOD_RES (1)..(1): Xaa is C or S
XVPQALEPLTILYYVGRKPKVEQLSNM

SEQ ID NO: 53610 - protein, 31 aa, Artificial Sequence; identical to SEQ ID NO: 12035
  Cyclic GFR-binding peptide
  MOD_RES (1)..(1): Xaa is C or S

SEQ ID NO: 53611 - protein, 29 aa, Artificial Sequence
  Cyclic GFR-binding peptide
APTKLSPISVLFIDDSSNVIYKQYENMVV

SEQ ID NO: 53612 - protein, 34 aa, Artificial Sequence
  Cyclic GFR-binding peptide
  MOD_RES (31)..(33): Xaa is C or S
PTELEPLTMLYYDEYDKVVEQLSNEMVVEGXGXR

SEQ ID NO: 53613 - protein, 26 aa, Artificial Sequence
  Cyclic GFR-binding peptide
LEPLTILYYDSANNVVEQLSNDMVVE

SEQ ID NO: 53614 - protein, 24 aa, Artificial Sequence
  Cyclic GFR-binding peptide
TRLEPLPIVYYDSANNVVEQLSND

SEQ ID NO: 53615 - protein, 27 aa, Artificial Sequence
  Cyclic GFR-binding peptide
VPTRLSAISILYLDSANNVVLKNYQDM

SEQ ID NO: 53616 - protein, 34 aa, Artificial Sequence; identical to SEQ ID NO: 12038
  Cyclic GFR-binding peptide
  MOD_RES (2)..(3)..(34): Xaa is C or S

SEQ ID NO: 53617 - protein, 26 aa, Artificial Sequence
  Cyclic GFR-binding peptide
PTELEPLTMLYYDENEKVVEQLSNDM

SEQ ID NO: 53618 - protein, 32 aa, Artificial Sequence
  Cyclic GFR-binding peptide
  MOD_RES (3)..(4): Xaa is C or S
PTXXVPTRLEPLTILYYDSANNVVEQLSNDMV

SEQ ID NO: 53619 - protein, 31 aa, Artificial Sequence
  Cyclic GFR-binding peptide
  MOD_RES (4)..(5): Xaa is C or S
PKAXXVPTELEPLTMLYYDENEKVVEQLSND

SEQ ID NO: 53620 - protein, 32 aa, Artificial Sequence; identical to SEQ ID NO: 12040
  Cyclic GFR-binding peptide
  MOD_RES (1)..(1): Xaa is C or S

SEQ ID NO: 53621 - protein, 27 aa, Artificial Sequence
  Cyclic GFR-binding peptide
VPQDLSPISILFIVGRTPKVYKQYEMV

SEQ ID NO: 53622 - protein, 35 aa, Artificial Sequence; identical to SEQ ID NO: 12041
  Cyclic GFR-binding peptide
  MOD_RES (3)..(4): Xaa is C or S

SEQ ID NO: 53623 - protein, 33 aa, Artificial Sequence
  Cyclic GFR-binding peptide
  MOD_RES (31)..(33): Xaa is C or S
PTRLEPLPIVYYDSANNVVEQLSNDMVVESXGX

SEQ ID NO: 53624 - protein, 32 aa, Artificial Sequence
  Cyclic GFR-binding peptide
  MOD_RES (29)..(31): Xaa is C or S
QDLSPISILFIVGRTPKVYKQYEMVVKSXKXS

SEQ ID NO: 53625 - protein, 39 aa, Artificial Sequence; identical to SEQ ID NO: 12042
  Cyclic GFR-binding peptide
  MOD_RES (4)..(36)..(38): Xaa is C or S

SEQ ID NO: 53626 - protein, 29 aa, Artificial Sequence
  Cyclic GFR-binding peptide
PTQLEPLTVLYYDDSSNVIEQLSNNMVVR

SEQ ID NO: 53627 - protein, 35 aa, Artificial Sequence
  Cyclic GFR-binding peptide
  MOD_RES (6)..(7): Xaa is C or S
SIPKAXXVPTELSPISMLFIDEYDKVVYKQYEEMV

SEQ ID NO: 53628 - protein, 34 aa, Artificial Sequence; identical to SEQ ID NO: 12044
  Cyclic GFR-binding peptide
  MOD_RES (31)..(33): Xaa is C or S

SEQ ID NO: 53629 - protein, 25 aa, Artificial Sequence
  Cyclic GFR-binding peptide
PTRLEPLPIVYYDSANNVVEQLSND

SEQ ID NO: 53630 - protein, 25 aa, Artificial Sequence
  Cyclic GFR-binding peptide
PTRLSAISILYLDSANNVVLKNYQD

SEQ ID NO: 53631 - protein, 32 aa, Artificial Sequence
  Cyclic GFR-binding peptide
  MOD_RES (4)..(5): Xaa is C or S
PKPXXAPTKLEPLTVLYYDDSSNVIEQLSNNM

SEQ ID NO: 53632 - protein, 29 aa, Artificial Sequence
  Cyclic GFR-binding peptide
  MOD_RES (29)..(29): Xaa is C or S
KLEPLPVVYYDDSSNVIEQLSNNMVVRSX

SEQ ID NO: 53633 - protein, 33 aa, Artificial Sequence
  Cyclic GFR-binding peptide
  MOD_RES (3)..(4): Xaa is C or S
PTXXVPTRLEPLPIVYYDSANNVVEQLSNDMVV

SEQ ID NO: 53634 - protein, 20 aa, Artificial Sequence
  Cyclic GFR-binding peptide
EPLPMVYYDEYDKVVEQLSN

SEQ ID NO: 53635 - protein, 38 aa, Artificial Sequence; identical to SEQ ID NO: 12046
  Cyclic GFR-binding peptide
  MOD_RES (5)..(6)..(38): Xaa is C or S

SEQ ID NO: 53636 - protein, 29 aa, Artificial Sequence
  Cyclic GFR-binding peptide
  MOD_RES (1)..(2): Xaa is C or S
XXVPQALSPISILFIVGRKPKVYKQYEMI

SEQ ID NO: 53637 - protein, 23 aa, Artificial Sequence
  Cyclic GFR-binding peptide
LEPLTMLYYDENEKVVEQLSNDM

SEQ ID NO: 53638 - protein, 40 aa, Artificial Sequence; identical to SEQ ID NO: 12047
  Cyclic GFR-binding peptide
  MOD_RES (4)..(5)..(37)..(39): Xaa is C or S

SEQ ID NO: 53639 - protein, 33 aa, Artificial Sequence; identical to SEQ ID NO: 12048
  Cyclic GFR-binding peptide
  MOD_RES (1)..(2): Xaa is C or S

SEQ ID NO: 53640 - protein, 38 aa, Artificial Sequence; identical to SEQ ID NO: 12049
  Cyclic GFR-binding peptide
  MOD_RES (6)..(38): Xaa is C or S

SEQ ID NO: 53641 - protein, 25 aa, Artificial Sequence
  Cyclic GFR-binding peptide
TKLEPLPVVYYDDSSNVIEQLSNNM

SEQ ID NO: 53642 - protein, 38 aa, Artificial Sequence; identical to SEQ ID NO: 12050
  Cyclic GFR-binding peptide
  MOD_RES (3)..(4)..(36)..(38): Xaa is C or S

SEQ ID NO: 53643 - protein, 34 aa, Artificial Sequence
  Cyclic GFR-binding peptide
  MOD_RES (4)..(5): Xaa is C or S
ASPXXVPQDLEPLPIVYYVGRTPKVEQLSNMVVK

SEQ ID NO: 53644 - protein, 33 aa, Artificial Sequence
  Cyclic GFR-binding peptide
  MOD_RES (4)..(5): Xaa is C or S
ASPXXVSQDLSPISILFIIGKTPKIYKQYEMIV

SEQ ID NO: 53645 - protein, 30 aa, Artificial Sequence
  Cyclic GFR-binding peptide
  MOD_RES (4)..(5): Xaa is C or S
ASPXXVSQDLEPLPIVYYIGKTPKIEQLSN

SEQ ID NO: 53646 - protein, 39 aa, Artificial Sequence; identical to SEQ ID NO: 12056
  Cyclic GFR-binding peptide
  MOD_RES (6)..(38): Xaa is C or S

SEQ ID NO: 53647 - protein, 27 aa, Artificial Sequence
  Cyclic GFR-binding peptide
LEPLTILYYDSANNVVEQLSNDMVVES

SEQ ID NO: 53648 - protein, 22 aa, Artificial Sequence
  Cyclic GFR-binding peptide
LSPISMLFIDENEKVVYKQYED

SEQ ID NO: 53649 - protein, 27 aa, Artificial Sequence
  Cyclic GFR-binding peptide
  MOD_RES (26)..(26): Xaa is C or S
SPISILFIIGKTPKIYKQYEMIVKSXK

SEQ ID NO: 53650 - protein, 29 aa, Artificial Sequence
  Cyclic GFR-binding peptide
  MOD_RES (2)..(3): Xaa is C or S
PXXVPQALEPLTILYYVGRKPKVEQLSNM

SEQ ID NO: 53651 - protein, 20 aa, Artificial Sequence
  Cyclic GFR-binding peptide
EPLPVVYYDDSSNVIEQLSN

SEQ ID NO: 53652 - protein, 33 aa, Artificial Sequence; identical to SEQ ID NO: 12057
  Cyclic GFR-binding peptide
  MOD_RES (3)..(3): Xaa is C or S

SEQ ID NO: 53653 - protein, 28 aa, Artificial Sequence
  Cyclic GFR-binding peptide
TKLSPISVLFIDDSSNVIYKQYENMVVR

SEQ ID NO: 53654 - protein, 36 aa, Artificial Sequence; identical to SEQ ID NO: 12058
  Cyclic GFR-binding peptide
  MOD_RES (3)..(4)..(36): Xaa is C or S

SEQ ID NO: 53655 - protein, 24 aa, Artificial Sequence
  Cyclic GFR-binding peptide
LEPLPIVYYIGKTPKIEQLSNMIV

SEQ ID NO: 53656 - protein, 32 aa, Artificial Sequence
  Cyclic GFR-binding peptide
  MOD_RES (6)..(7): Xaa is C or S
TVPKPXXAPTQLSPISVLFIDDSSNVIYKQYE

SEQ ID NO: 53657 - protein, 25 aa, Artificial Sequence
  Cyclic GFR-binding peptide
PTELEPLTMLYYDENEKVVEQLSND

SEQ ID NO: 53658 - protein, 39 aa, Artificial Sequence; identical to SEQ ID NO: 12062
  Cyclic GFR-binding peptide
  MOD_RES (5)..(6)..(37)..(39): Xaa is C or S

SEQ ID NO: 53659 - protein, 34 aa, Artificial Sequence; identical to SEQ ID NO: 12063
  Cyclic GFR-binding peptide
  MOD_RES (1)..(2)..(34): Xaa is C or S

SEQ ID NO: 53660 - protein, 31 aa, Artificial Sequence
  Cyclic GFR-binding peptide
  MOD_RES (3)..(4): Xaa is C or S
KPXXAPTKLEPLTVLYYDDSSNVIEQLSNNM

SEQ ID NO: 53661 - protein, 21 aa, Artificial Sequence
  Cyclic GFR-binding peptide
LEPLTVLYYDDSSNVIEQLSN

SEQ ID NO: 53662 - protein, 31 aa, Artificial Sequence
  Cyclic GFR-binding peptide
  MOD_RES (5)..(6): Xaa is C or S
SASPXXVPQDLSPISILFIVGRTPKVYKQYE

SEQ ID NO: 53663 - protein, 30 aa, Artificial Sequence
  Cyclic GFR-binding peptide
PTELEPLTMLYYDEYDKVVEQLSNEMVVEG

SEQ ID NO: 53664 - protein, 28 aa, Artificial Sequence
  Cyclic GFR-binding peptide
ELEPLTMLYYDEYDKVVEQLSNEMVVEG

SEQ ID NO: 53665 - protein, 27 aa, Artificial Sequence
  Cyclic GFR-binding peptide
PTKLEPLTVLYYDDSSNVIEQLSNNMV

SEQ ID NO: 53666 - protein, 28 aa, Artificial Sequence
  Cyclic GFR-binding peptide
  MOD_RES (1)..(2): Xaa is C or S
XXVPQALEPLTILYYVGRKPKVEQLSNM

SEQ ID NO: 53667 - protein, 32 aa, Artificial Sequence
  Cyclic GFR-binding peptide
  MOD_RES (2)..(3): Xaa is C or S
AXXVPTELEPLTMLYYDEYDKVVEQLSNEMVV

SEQ ID NO: 53668 - protein, 31 aa, Artificial Sequence
  Cyclic GFR-binding peptide
  MOD_RES (30)..(30): Xaa is C or S
TRLSAISILYLDSANNVVLKNYQDMVVESXG

SEQ ID NO: 53669 - protein, 31 aa, Artificial Sequence
  Cyclic GFR-binding peptide
  MOD_RES (31)..(31): Xaa is C or S
PTRLEPLTILYYDSANNVVEQLSNDMVVESX

SEQ ID NO: 53670 - protein, 39 aa, Artificial Sequence; identical to SEQ ID NO: 12072
  Cyclic GFR-binding peptide
  MOD_RES (4)..(5)..(37)..(39): Xaa is C or S

SEQ ID NO: 53671 - protein, 28 aa, Artificial Sequence
  Cyclic GFR-binding peptide
TELEPLTMLYYDEYDKVVEQLSNEMVVE

SEQ ID NO: 53672 - protein, 20 aa, Artificial Sequence
  Cyclic GFR-binding peptide
EPLPMVYYDEYDKVVEQLSN

SEQ ID NO: 53673 - protein, 25 aa, Artificial Sequence
  Cyclic GFR-binding peptide
VPTELEPLPMVYYDEYDKVVEQLSN

SEQ ID NO: 53674 - protein, 28 aa, Artificial Sequence
  Cyclic GFR-binding peptide
  MOD_RES (26)..(28): Xaa is C or S
EPLPIVYYVGRTPKVEQLSNMVVKSXKX

SEQ ID NO: 53675 - protein, 23 aa, Artificial Sequence
  Cyclic GFR-binding peptide
ELEPLPMVYYDEYDKVVEQLSNE

SEQ ID NO: 53676 - protein, 27 aa, Artificial Sequence
  Cyclic GFR-binding peptide
PTELSPISMLFIDENEKVVYKQYEDMV

SEQ ID NO: 53677 - protein, 34 aa, Artificial Sequence; identical to SEQ ID NO: 12075
  Cyclic GFR-binding peptide
  MOD_RES (2)..(3): Xaa is C or S

SEQ ID NO: 53678 - protein, 23 aa, Artificial Sequence
  Cyclic GFR-binding peptide
EPLPVVYYDDSSNVIEQLSNNMV

SEQ ID NO: 53679 - protein, 33 aa, Artificial Sequence
  Cyclic GFR-binding peptide
  MOD_RES (4)..(5): Xaa is C or S
PKPXXAPTKLEPLTVLYYDDSSNVIEQLSNNMV

SEQ ID NO: 53680 - protein, 34 aa, Artificial Sequence; identical to SEQ ID NO: 12077
  Cyclic GFR-binding peptide
  MOD_RES (3)..(4): Xaa is C or S

SEQ ID NO: 53681 - protein, 30 aa, Artificial Sequence
  Cyclic GFR-binding peptide
PTRLSAISILYLDSANNVVLKNYQDMVVES

SEQ ID NO: 53682 - protein, 29 aa, Artificial Sequence
  Cyclic GFR-binding peptide
  MOD_RES (27)..(29): Xaa is C or S
LEPLTILYYVGRKPKVEQLSNMIVRSXKX

SEQ ID NO: 53683 - protein, 25 aa, Artificial Sequence
  Cyclic GFR-binding peptide
SPISILFIVGRKPKVYKQYEMIVRS

SEQ ID NO: 53684 - protein, 29 aa, Artificial Sequence
  Cyclic GFR-binding peptide
VPTELEPLTMLYYDEYDKVVEQLSNEMVV

SEQ ID NO: 53685 - protein, 31 aa, Artificial Sequence; identical to SEQ ID NO: 12078
  Cyclic GFR-binding peptide
  MOD_RES (1)..(1): Xaa is C or S

SEQ ID NO: 53686 - protein, 33 aa, Artificial Sequence; identical to SEQ ID NO: 12079
  Cyclic GFR-binding peptide
  MOD_RES (1)..(2): Xaa is C or S

SEQ ID NO: 53687 - protein, 34 aa, Artificial Sequence; identical to SEQ ID NO: 12080
  Cyclic GFR-binding peptide
  MOD_RES (32)..(34): Xaa is C or S

SEQ ID NO: 53688 - protein, 27 aa, Artificial Sequence
  Cyclic GFR-binding peptide
  MOD_RES (1)..(2): Xaa is C or S
XXVPTELEPLPMVYYDENEKVVEQLSN

SEQ ID NO: 53689 - protein, 38 aa, Artificial Sequence; identical to SEQ ID NO: 12081
  Cyclic GFR-binding peptide
  MOD_RES (3)..(4)..(36)..(38): Xaa is C or S

SEQ ID NO: 53690 - protein, 34 aa, Artificial Sequence; identical to SEQ ID NO: 12084
  Cyclic GFR-binding peptide
  MOD_RES (2)..(3): Xaa is C or S

SEQ ID NO: 53691 - protein, 40 aa, Artificial Sequence; identical to SEQ ID NO: 12085
  Cyclic GFR-binding peptide
  MOD_RES (4)..(5)..(37)..(39): Xaa is C or S

SEQ ID NO: 53692 - protein, 32 aa, Artificial Sequence
  Cyclic GFR-binding peptide
  MOD_RES (5)..(6): Xaa is C or S
VPKPXXAPTKLEPLPVVYYDDSSNVIEQLSNN

SEQ ID NO: 53693 - protein, 33 aa, Artificial Sequence
  Cyclic GFR-binding peptide
  MOD_RES (4)..(5): Xaa is C or S
AAPXXVPQALEPLTILYYVGRKPKVEQLSNMIV

SEQ ID NO: 53694 - protein, 28 aa, Artificial Sequence
  Cyclic GFR-binding peptide
  MOD_RES (2)..(3): Xaa is C or S
AXXVPTELEPLPMVYYDENEKVVEQLSN

SEQ ID NO: 53695 - protein, 26 aa, Artificial Sequence
  Cyclic GFR-binding peptide
TRLEPLTILYYDSANNVVEQLSNDMV

SEQ ID NO: 53696 - protein, 31 aa, Artificial Sequence
  Cyclic GFR-binding peptide
  MOD_RES (5)..(6): Xaa is C or S
VPKPXXAPTQLEPLPVVYYDDSSNVIEQLSN

SEQ ID NO: 53697 - protein, 26 aa, Artificial Sequence
  Cyclic GFR-binding peptide
LEPLTMLYYDENEKVVEQLSNDMVVE

SEQ ID NO: 53698 - protein, 37 aa, Artificial Sequence; identical to SEQ ID NO: 12089
  Cyclic GFR-binding peptide
  MOD_RES (3)..(4)..(35)..(37): Xaa is C or S

SEQ ID NO: 53699 - protein, 38 aa, Artificial Sequence; identical to SEQ ID NO: 12088
  Cyclic GFR-binding peptide
  MOD_RES (4)..(5)..(37): Xaa is C or S

SEQ ID NO: 53700 - protein, 28 aa, Artificial Sequence
  Cyclic GFR-binding peptide
PTRLSAISILYLDSANNVVLKNYQDMVV

SEQ ID NO: 53701 - protein, 28 aa, Artificial Sequence
  Cyclic GFR-binding peptide
  MOD_RES (27)..(27): Xaa is C or S
SAISILYLDSANNVVLKNYQDMVVESXG

SEQ ID NO: 53702 - protein, 34 aa, Artificial Sequence; identical to SEQ ID NO: 12090
  Cyclic GFR-binding peptide
  MOD_RES (1)..(2)..(33): Xaa is C or S

SEQ ID NO: 53703 - protein, 36 aa, Artificial Sequence
  Cyclic GFR-binding peptide
  MOD_RES (7)..(7): Xaa is C or S
HVTKPTXAPTKLSPISVLFIDDSSNVIYKQYENMVV

SEQ ID NO: 53704 - protein, 29 aa, Artificial Sequence
  Cyclic GFR-binding peptide
TKLSPISVLFIDDSSNVIYKQYENMVVRS

SEQ ID NO: 53705 - protein, 39 aa, Artificial Sequence; identical to SEQ ID NO: 12091
  Cyclic GFR-binding peptide
  MOD_RES (3)..(4)..(36)..(38): Xaa is C or S

SEQ ID NO: 53706 - protein, 26 aa, Artificial Sequence
  Cyclic GFR-binding peptide
ELEPLTMLYYDEYDKVVEQLSNEMVV

SEQ ID NO: 53707 - protein, 35 aa, Artificial Sequence; identical to SEQ ID NO: 12094
  Cyclic GFR-binding peptide
  MOD_RES (3)..(4)..(35): Xaa is C or S

SEQ ID NO: 53708 - protein, 30 aa, Artificial Sequence
  Cyclic GFR-binding peptide
  MOD_RES (4)..(5): Xaa is C or S
PKAXXVPTELSPISMLFIDEYDKVVYKQYE

SEQ ID NO: 53709 - protein, 30 aa, Artificial Sequence
  Cyclic GFR-binding peptide
  MOD_RES (1)..(2): Xaa is C or S
XXVPTELEPLTMLYYDEYDKVVEQLSNEMV

SEQ ID NO: 53710 - protein, 30 aa, Artificial Sequence
  Cyclic GFR-binding peptide
  MOD_RES (30)..(30): Xaa is C or S
PQDLEPLPIVYYVGRTPKVEQLSNMVVKSX

SEQ ID NO: 53711 - protein, 24 aa, Artificial Sequence
  Cyclic GFR-binding peptide
PTRLNAISILYFDSANNVVLKKYR

SEQ ID NO: 53712 - protein, 34 aa, Artificial Sequence; identical to SEQ ID NO: 12098
  Cyclic GFR-binding peptide
  MOD_RES (1)..(33): Xaa is C or S

SEQ ID NO: 53713 - protein, 35 aa, Artificial Sequence; identical to SEQ ID NO: 12099
  Cyclic GFR-binding peptide
  MOD_RES (4)..(5): Xaa is C or S

SEQ ID NO: 53714 - protein, 36 aa, Artificial Sequence; identical to SEQ ID NO: 12100
  Cyclic GFR-binding peptide
  MOD_RES (1)..(2)..(34)..(36): Xaa is C or S

SEQ ID NO: 53715 - protein, 32 aa, Artificial Sequence
  Cyclic GFR-binding peptide
  MOD_RES (6)..(7): Xaa is C or S
SIPKAXXVPTELEPLTMLYYDEYDKVVEQLSN

SEQ ID NO: 53716 - protein, 29 aa, Artificial Sequence
  Cyclic GFR-binding peptide
  MOD_RES (3)..(4): Xaa is C or S
KPXXAPTKLSPISVLFIDDSSNVIYKQYE

SEQ ID NO: 53717 - protein, 38 aa, Artificial Sequence; identical to SEQ ID NO: 12103
  Cyclic GFR-binding peptide
  MOD_RES (2)..(3)..(35)..(37): Xaa is C or S

SEQ ID NO: 53718 - protein, 33 aa, Artificial Sequence; identical to SEQ ID NO: 12105
  Cyclic GFR-binding peptide
  MOD_RES (1)..(2)..(33): Xaa is C or S

SEQ ID NO: 53719 - protein, 27 aa, Artificial Sequence
  Cyclic GFR-binding peptide
QLEPLTVLYYDDSSNVIEQLSNNMVVR

SEQ ID NO: 53720 - protein, 31 aa, Artificial Sequence
  Cyclic GFR-binding peptide
  MOD_RES (31)..(31): Xaa is C or S
PTRLEPLPIVYYDSANNVVEQLSNDMVVESX

SEQ ID NO: 53721 - protein, 27 aa, Artificial Sequence
  Cyclic GFR-binding peptide
  MOD_RES (1)..(1): Xaa is C or S
XVPQALSPISILFIVGRKPKVYKQYEM

SEQ ID NO: 53722 - protein, 30 aa, Artificial Sequence
  Cyclic GFR-binding peptide
  MOD_RES (1)..(1): Xaa is C or S
XVSQDLEPLPIVYYIGKTPKIEQLSNMIVK

SEQ ID NO: 53723 - protein, 26 aa, Artificial Sequence
  Cyclic GFR-binding peptide
EPLTVLYYDDSSNVIEQLSNNMVVRA

SEQ ID NO: 53724 - protein, 36 aa, Artificial Sequence
  Cyclic GFR-binding peptide
  MOD_RES (6)..(7): Xaa is C or S
SIPKAXXVPTELEPLTMLYYDEYDKVVEQLSNEMVV

SEQ ID NO: 53725 - protein, 28 aa, Artificial Sequence
  Cyclic GFR-binding peptide
  MOD_RES (27)..(27): Xaa is C or S
EPLTILYYDSANNVVEQLSNDMVVESXG

SEQ ID NO: 53726 - protein, 35 aa, Artificial Sequence; identical to SEQ ID NO: 12112
  Cyclic GFR-binding peptide
  MOD_RES (2)..(34): Xaa is C or S

SEQ ID NO: 53727 - protein, 25 aa, Artificial Sequence
  Cyclic GFR-binding peptide
TQLEPLPVVYYDDSSNVIEQLSNNM

SEQ ID NO: 53728 - protein, 30 aa, Artificial Sequence
  Cyclic GFR-binding peptide
  MOD_RES (5)..(5): Xaa is C or S
TKPTXAPTKLEPLTVLYYDDSSNVIEQLSN

SEQ ID NO: 53729 - protein, 33 aa, Artificial Sequence
  Cyclic GFR-binding peptide
  MOD_RES (3)..(4): Xaa is C or S
KPXXAPTKLSPISVLFIDDSSNVIYKQYENMVV

SEQ ID NO: 53730 - protein, 25 aa, Artificial Sequence
  Cyclic GFR-binding peptide
EPLPVVYYDDSSNVIEQLSNNMVVR

SEQ ID NO: 53731 - protein, 27 aa, Artificial Sequence
  Cyclic GFR-binding peptide
ALEPLTILYYVGRKPKVEQLSNMIVRS

SEQ ID NO: 53732 - protein, 23 aa, Artificial Sequence
  Cyclic GFR-binding peptide
ELSPISMLFIDEYDKVVYKQYEE

SEQ ID NO: 53733 - protein, 35 aa, Artificial Sequence; identical to SEQ ID NO: 12115
  Cyclic GFR-binding peptide
  MOD_RES (3)..(4): Xaa is C or S

SEQ ID NO: 53734 - protein, 40 aa, Artificial Sequence; identical to SEQ ID NO: 12117
  Cyclic GFR-binding peptide
  MOD_RES (5)..(6)..(37)..(39): Xaa is C or S

SEQ ID NO: 53735 - protein, 27 aa, Artificial Sequence
  Cyclic GFR-binding peptide
  MOD_RES (27)..(27): Xaa is C or S
EPLPIVYYDSANNVVEQLSNDMVVESX

SEQ ID NO: 53736 - protein, 28 aa, Artificial Sequence
  Cyclic GFR-binding peptide
  MOD_RES (1)..(1): Xaa is C or S
XVPTELEPLTMLYYDENEKVVEQLSNDM

SEQ ID NO: 53737 - protein, 33 aa, Artificial Sequence
  Cyclic GFR-binding peptide
  MOD_RES (5)..(6): Xaa is C or S
SASPXXVSQDLSPISILFIIGKTPKIYKQYEMI

SEQ ID NO: 53738 - protein, 23 aa, Artificial Sequence
  Cyclic GFR-binding peptide
LSPISILFIIGKTPKIYKQYEMI

SEQ ID NO: 53739 - protein, 30 aa, Artificial Sequence
  Cyclic GFR-binding peptide
  MOD_RES (3)..(4): Xaa is C or S
KPXXAPTKLEPLTVLYYDDSSNVIEQLSNN

SEQ ID NO: 53740 - protein, 33 aa, Artificial Sequence
  Cyclic GFR-binding peptide
  MOD_RES (4)..(5): Xaa is C or S
PKAXXVPTELEPLTMLYYDENEKVVEQLSNDMV

SEQ ID NO: 53741 - protein, 33 aa, Artificial Sequence
  Cyclic GFR-binding peptide
  MOD_RES (6)..(7): Xaa is C or S
STPPTXXVPTRLEPLTILYYDSANNVVEQLSND

SEQ ID NO: 53742 - protein, 38 aa, Artificial Sequence; identical to SEQ ID NO: 12121
  Cyclic GFR-binding peptide
  MOD_RES (4)..(5)..(37): Xaa is C or S

SEQ ID NO: 53743 - protein, 33 aa, Artificial Sequence; identical to SEQ ID NO: 12123
  Cyclic GFR-binding peptide
  MOD_RES (1)..(33): Xaa is C or S

SEQ ID NO: 53744 - protein, 29 aa, Artificial Sequence
  Cyclic GFR-binding peptide
TELEPLPMVYYDENEKVVEQLSNDMVVEG

SEQ ID NO: 53745 - protein, 26 aa, Artificial Sequence
  Cyclic GFR-binding peptide
  MOD_RES (1)..(1): Xaa is C or S
XVPTRLSAISILYLDSANNVVLKNYQ

SEQ ID NO: 53746 - protein, 30 aa, Artificial Sequence
  Cyclic GFR-binding peptide
  MOD_RES (3)..(3): Xaa is C or S
PTXAPTKLEPLPVVYYDDSSNVIEQLSNNM

SEQ ID NO: 53747 - protein, 32 aa, Artificial Sequence
  Cyclic GFR-binding peptide
  MOD_RES (5)..(6): Xaa is C or S
SAAPXXVPQALEPLTILYYVGRKPKVEQLSNM

SEQ ID NO: 53748 - protein, 33 aa, Artificial Sequence
  Cyclic GFR-binding peptide
  MOD_RES (3)..(4): Xaa is C or S
APXXVPQALSPISILFIVGRKPKVYKQYEMIVR

SEQ ID NO: 53749 - protein, 31 aa, Artificial Sequence
  Cyclic GFR-binding peptide
  MOD_RES (3)..(4): Xaa is C or S
KPXXAPTKLSPISVLFIDDSSNVIYKQYENM

SEQ ID NO: 53750 - protein, 25 aa, Artificial Sequence
  Cyclic GFR-binding peptide
EPLTMLYYDEYDKVVEQLSNEMVVE

SEQ ID NO: 53751 - protein, 27 aa, Artificial Sequence
  Cyclic GFR-binding peptide
LSPISMLFIDEYDKVVYKQYEEMVVEG

SEQ ID NO: 53752 - protein, 41 aa, Artificial Sequence; identical to SEQ ID NO: 12126
  Cyclic GFR-binding peptide
  MOD_RES (5)..(6)..(38)..(40): Xaa is C or S

SEQ ID NO: 53753 - protein, 25 aa, Artificial Sequence
  Cyclic GFR-binding peptide
RLEPLTILYYDSANNVVEQLSNDMV

SEQ ID NO: 53754 - protein, 35 aa, Artificial Sequence
  Cyclic GFR-binding peptide
  MOD_RES (5)..(6): Xaa is C or S
SAAPXXVPQALEPLTILYYVGRKPKVEQLSNMIVR

SEQ ID NO: 53755 - protein, 39 aa, Artificial Sequence; identical to SEQ ID NO: 12129
  Cyclic GFR-binding peptide
  MOD_RES (5)..(6)..(38): Xaa is C or S

SEQ ID NO: 53756 - protein, 26 aa, Artificial Sequence
  Cyclic GFR-binding peptide
EPLTVLYYDDSSNVIEQLSNNMVVRS

SEQ ID NO: 53757 - protein, 29 aa, Artificial Sequence
  Cyclic GFR-binding peptide
  MOD_RES (1)..(1): Xaa is C or S
XAPTQLSPISVLFIDDSSNVIYKQYENMV

SEQ ID NO: 53758 - protein, 34 aa, Artificial Sequence
  Cyclic GFR-binding peptide
  MOD_RES (5)..(6): Xaa is C or S
IPKAXXVPTELEPLPMVYYDEYDKVVEQLSNEMV

SEQ ID NO: 53759 - protein, 24 aa, Artificial Sequence
  Cyclic GFR-binding peptide
PTRLSAISILYLDSANNVVLKNYQ

SEQ ID NO: 53760 - protein, 33 aa, Artificial Sequence
  Cyclic GFR-binding peptide
  MOD_RES (30)..(32): Xaa is C or S
SQDLSPISILFIIGKTPKIYKQYEMIVKSXKXS

SEQ ID NO: 53761 - protein, 32 aa, Artificial Sequence; identical to SEQ ID NO: 12130
  Cyclic GFR-binding peptide
  MOD_RES (32)..(32): Xaa is C or S

SEQ ID NO: 53762 - protein, 21 aa, Artificial Sequence
  Cyclic GFR-binding peptide
EPLPIVYYDSANNVVEQLSND

SEQ ID NO: 53763 - protein, 28 aa, Artificial Sequence
  Cyclic GFR-binding peptide
RLSAISILYLDSANNVVLKNYQDMVVES

SEQ ID NO: 53764 - protein, 31 aa, Artificial Sequence
  Cyclic GFR-binding peptide
  MOD_RES (5)..(6): Xaa is C or S
IPKAXXVPTELEPLTMLYYDENEKVVEQLSN

SEQ ID NO: 53765 - protein, 30 aa, Artificial Sequence
  Cyclic GFR-binding peptide
  MOD_RES (3)..(4): Xaa is C or S
PTXXVPTRLEPLTILYYDSANNVVEQLSND

SEQ ID NO: 53766 - protein, 25 aa, Artificial Sequence
  Cyclic GFR-binding peptide
APTQLEPLTVLYYDDSSNVIEQLSN

SEQ ID NO: 53767 - protein, 25 aa, Artificial Sequence
  Cyclic GFR-binding peptide
ELEPLTMLYYDEYDKVVEQLSNEMV

SEQ ID NO: 53768 - protein, 33 aa, Artificial Sequence
  Cyclic GFR-binding peptide
  MOD_RES (7)..(7): Xaa is C or S
HVTKPTXAPTKLEPLPVVYYDDSSNVIEQLSNN

SEQ ID NO: 53769 - protein, 27 aa, Artificial Sequence
  Cyclic GFR-binding peptide
  MOD_RES (27)..(27): Xaa is C or S
EPLTILYYDSANNVVEQLSNDMVVESX

SEQ ID NO: 53770 - protein, 34 aa, Artificial Sequence; identical to SEQ ID NO: 12135
  Cyclic GFR-binding peptide
  MOD_RES (2)..(3): Xaa is C or S

SEQ ID NO: 53771 - protein, 37 aa, Artificial Sequence; identical to SEQ ID NO: 12136
  Cyclic GFR-binding peptide
  MOD_RES (4)..(5)..(37): Xaa is C or S

SEQ ID NO: 53772 - protein, 29 aa, Artificial Sequence
  Cyclic GFR-binding peptide
  MOD_RES (2)..(3): Xaa is C or S
AXXVPTELSPISMLFIDEYDKVVYKQYEE

SEQ ID NO: 53773 - protein, 23 aa, Artificial Sequence
  Cyclic GFR-binding peptide
LSPISMLFIDENEKVVYKQYEDM

SEQ ID NO: 53774 - protein, 35 aa, Artificial Sequence
  Cyclic GFR-binding peptide
  MOD_RES (6)..(7): Xaa is C or S
ASAAPXXVPQALSPISILFIVGRKPKVYKQYEMIV

SEQ ID NO: 53775 - protein, 30 aa, Artificial Sequence
  Cyclic GFR-binding peptide
  MOD_RES (3)..(4): Xaa is C or S
KPXXAPTKLEPLPVVYYDDSSNVIEQLSNN

SEQ ID NO: 53776 - protein, 27 aa, Artificial Sequence
  Cyclic GFR-binding peptide
  MOD_RES (1)..(2): Xaa is C or S
XXVPTRLNAISILYFDSANNVVLKKYR

SEQ ID NO: 53777 - protein, 30 aa, Artificial Sequence
  Cyclic GFR-binding peptide
  MOD_RES (2)..(3): Xaa is C or S
PXXAPTKLEPLPVVYYDDSSNVIEQLSNNM

SEQ ID NO: 53778 - protein, 31 aa, Artificial Sequence; identical to SEQ ID NO: 12143
  Cyclic GFR-binding peptide

SEQ ID NO: 53779 - protein, 25 aa, Artificial Sequence
  Cyclic GFR-binding peptide
QLEPLTVLYYDDSSNVIEQLSNNMV

SEQ ID NO: 53780 - protein, 40 aa, Artificial Sequence; identical to SEQ ID NO: 12144
  Cyclic GFR-binding peptide
  MOD_RES (6)..(7)..(39): Xaa is C or S

SEQ ID NO: 53781 - protein, 29 aa, Artificial Sequence
  Cyclic GFR-binding peptide
  MOD_RES (2)..(3): Xaa is C or S
AXXVPTELEPLTMLYYDEYDKVVEQLSNE

SEQ ID NO: 53782 - protein, 35 aa, Artificial Sequence; identical to SEQ ID NO: 12146
  Cyclic GFR-binding peptide
  MOD_RES (32)..(34): Xaa is C or S

SEQ ID NO: 53783 - protein, 40 aa, Artificial Sequence; identical to SEQ ID NO: 12147
  Cyclic GFR-binding peptide
  MOD_RES (6)..(7)..(38)..(40): Xaa is C or S

SEQ ID NO: 53784 - protein, 32 aa, Artificial Sequence
  Cyclic GFR-binding peptide
  MOD_RES (5)..(6): Xaa is C or S
VPKPXXAPTKLEPLTVLYYDDSSNVIEQLSNN

SEQ ID NO: 53785 - protein, 33 aa, Artificial Sequence; identical to SEQ ID NO: 12148
  Cyclic GFR-binding peptide
  MOD_RES (1)..(32): Xaa is C or S

SEQ ID NO: 53786 - protein, 31 aa, Artificial Sequence
  Cyclic GFR-binding peptide
  MOD_RES (3)..(4): Xaa is C or S
KPXXAPTQLEPLTVLYYDDSSNVIEQLSNNM

SEQ ID NO: 53787 - protein, 26 aa, Artificial Sequence
  Cyclic GFR-binding peptide
  MOD_RES (1)..(1): Xaa is C or S
XVPTRLNAISILYFDSANNVVLKKYR

SEQ ID NO: 53788 - protein, 32 aa, Artificial Sequence; identical to SEQ ID NO: 12149
  Cyclic GFR-binding peptide
  MOD_RES (1)..(1): Xaa is C or S

SEQ ID NO: 53789 - protein, 29 aa, Artificial Sequence
  Cyclic GFR-binding peptide
  MOD_RES (1)..(1): Xaa is C or S
XVSQDLSPISILFIIGKTPKIYKQYEMIV

SEQ ID NO: 53790 - protein, 30 aa, Artificial Sequence
  Cyclic GFR-binding peptide
  MOD_RES (1)..(1): Xaa is C or S
XAPTKLSPISVLFIDDSSNVIYKQYENMVV

SEQ ID NO: 53791 - protein, 34 aa, Artificial Sequence; identical to SEQ ID NO: 12150
  Cyclic GFR-binding peptide
  MOD_RES (2)..(3)..(34): Xaa is C or S

SEQ ID NO: 53792 - protein, 26 aa, Artificial Sequence
  Cyclic GFR-binding peptide
PQDLSPISILFIVGRTPKVYKQYEMV

SEQ ID NO: 53793 - protein, 29 aa, Artificial Sequence
  Cyclic GFR-binding peptide
  MOD_RES (1)..(2): Xaa is C or S
XXVPTELEPLPMVYYDEYDKVVEQLSNEM

SEQ ID NO: 53794 - protein, 30 aa, Artificial Sequence
  Cyclic GFR-binding peptide
  MOD_RES (28)..(30): Xaa is C or S
ALSPISILFIVGRKPKVYKQYEMIVRSXKX

SEQ ID NO: 53795 - protein, 37 aa, Artificial Sequence; identical to SEQ ID NO: 12151
  Cyclic GFR-binding peptide
  MOD_RES (6)..(7): Xaa is C or S

SEQ ID NO: 53796 - protein, 24 aa, Artificial Sequence
  Cyclic GFR-binding peptide
SPISILFIIGKTPKIYKQYEMIVK

SEQ ID NO: 53797 - protein, 37 aa, Artificial Sequence; identical to SEQ ID NO: 12152
  Cyclic GFR-binding peptide
  MOD_RES (5)..(6): Xaa is C or S

SEQ ID NO: 53798 - protein, 26 aa, Artificial Sequence
  Cyclic GFR-binding peptide
ALSPISILFIVGRKPKVYKQYEMIVR

SEQ ID NO: 53799 - protein, 23 aa, Artificial Sequence
  Cyclic GFR-binding peptide
QALSPISILFIVGRKPKVYKQYE

SEQ ID NO: 53800 - protein, 31 aa, Artificial Sequence; identical to SEQ ID NO: 12156
  Cyclic GFR-binding peptide

SEQ ID NO: 53801 - protein, 32 aa, Artificial Sequence; identical to SEQ ID NO: 12155
  Cyclic GFR-binding peptide
  MOD_RES (1)..(1): Xaa is C or S

SEQ ID NO: 53802 - protein, 29 aa, Artificial Sequence
  Cyclic GFR-binding peptide
  MOD_RES (27)..(29): Xaa is C or S
EPLTVLYYDDSSNVIEQLSNNMVVRAXGX

SEQ ID NO: 53803 - protein, 30 aa, Artificial Sequence
  Cyclic GFR-binding peptide
  MOD_RES (2)..(2): Xaa is C or S
TXAPTKLEPLPVVYYDDSSNVIEQLSNNMV

SEQ ID NO: 53804 - protein, 29 aa, Artificial Sequence
  Cyclic GFR-binding peptide
  MOD_RES (3)..(4): Xaa is C or S
APXXVPQALEPLTILYYVGRKPKVEQLSN

SEQ ID NO: 53805 - protein, 38 aa, Artificial Sequence; identical to SEQ ID NO: 12159
  Cyclic GFR-binding peptide
  MOD_RES (4)..(5)..(37): Xaa is C or S

SEQ ID NO: 53806 - protein, 37 aa, Artificial Sequence; identical to SEQ ID NO: 12160
  Cyclic GFR-binding peptide
  MOD_RES (2)..(3)..(35)..(37): Xaa is C or S

SEQ ID NO: 53807 - protein, 37 aa, Artificial Sequence; identical to SEQ ID NO: 12162
  Cyclic GFR-binding peptide
  MOD_RES (4)..(5)..(36): Xaa is C or S

SEQ ID NO: 53808 - protein, 20 aa, Artificial Sequence
  Cyclic GFR-binding peptide
EPLTVLYYDDSSNVIEQLSN

SEQ ID NO: 53809 - protein, 23 aa, Artificial Sequence
  Cyclic GFR-binding peptide
ELEPLTMLYYDEYDKVVEQLSNE

SEQ ID NO: 53810 - protein, 33 aa, Artificial Sequence
  Cyclic GFR-binding peptide
  MOD_RES (7)..(7): Xaa is C or S
HVTKPTXAPTKLSPISVLFIDDSSNVIYKQYEN

SEQ ID NO: 53811 - protein, 24 aa, Artificial Sequence
  Cyclic GFR-binding peptide
SPISILFIVGRTPKVYKQYEMVVK

SEQ ID NO: 53812 - protein, 21 aa, Artificial Sequence
  Cyclic GFR-binding peptide
EPLTILYYDSANNVVEQLSND

SEQ ID NO: 53813 - protein, 34 aa, Artificial Sequence
  Cyclic GFR-binding peptide
  MOD_RES (6)..(7): Xaa is C or S
YVPKPXXAPTKLSPISVLFIDDSSNVIYKQYENM

SEQ ID NO: 53814 - protein, 34 aa, Artificial Sequence; identical to SEQ ID NO: 12167
  Cyclic GFR-binding peptide
  MOD_RES (2)..(3): Xaa is C or S

SEQ ID NO: 53815 - protein, 29 aa, Artificial Sequence
  Cyclic GFR-binding peptide
VSQDLEPLPIVYYIGKTPKIEQLSNMIVK

SEQ ID NO: 53816 - protein, 29 aa, Artificial Sequence
  Cyclic GFR-binding peptide
  MOD_RES (1)..(2): Xaa is C or S
XXVPTRLSAISILYLDSANNVVLKNYQDM

SEQ ID NO: 53817 - protein, 30 aa, Artificial Sequence
  Cyclic GFR-binding peptide
  MOD_RES (29)..(29): Xaa is C or S
QALSPISILFIVGRKPKVYKQYEMIVRSXK

SEQ ID NO: 53818 - protein, 31 aa, Artificial Sequence
  Cyclic GFR-binding peptide
  MOD_RES (3)..(4): Xaa is C or S
KAXXVPTELEPLTMLYYDENEKVVEQLSNDM

SEQ ID NO: 53819 - protein, 38 aa, Artificial Sequence; identical to SEQ ID NO: 12170
  Cyclic GFR-binding peptide
  MOD_RES (2)..(3)..(35)..(37): Xaa is C or S

SEQ ID NO: 53820 - protein, 37 aa, Artificial Sequence; identical to SEQ ID NO: 12171
  Cyclic GFR-binding peptide
  MOD_RES (4)..(5)..(36): Xaa is C or S

SEQ ID NO: 53821 - protein, 39 aa, Artificial Sequence; identical to SEQ ID NO: 12172
  Cyclic GFR-binding peptide
  MOD_RES (4)..(36)..(38): Xaa is C or S

SEQ ID NO: 53822 - protein, 27 aa, Artificial Sequence
  Cyclic GFR-binding peptide
ELEPLPMVYYDENEKVVEQLSNDMVVE

SEQ ID NO: 53823 - protein, 31 aa, Artificial Sequence
  Cyclic GFR-binding peptide
  MOD_RES (4)..(5): Xaa is C or S
ASPXXVSQDLSPISILFIIGKTPKIYKQYEM

SEQ ID NO: 53824 - protein, 30 aa, Artificial Sequence
  Cyclic GFR-binding peptide
  MOD_RES (4)..(5): Xaa is C or S
ASPXXVPQDLSPISILFIVGRTPKVYKQYE

SEQ ID NO: 53825 - protein, 36 aa, Artificial Sequence; identical to SEQ ID NO: 12175
  Cyclic GFR-binding peptide
  MOD_RES (1)..(2)..(33)..(35): Xaa is C or S

SEQ ID NO: 53826 - protein, 41 aa, Artificial Sequence; identical to SEQ ID NO: 12176
  Cyclic GFR-binding peptide
  MOD_RES (6)..(38)..(40): Xaa is C or S

SEQ ID NO: 53827 - protein, 28 aa, Artificial Sequence
  Cyclic GFR-binding peptide
  MOD_RES (2)..(3): Xaa is C or S
PXXVPQDLSPISILFIVGRTPKVYKQYE

SEQ ID NO: 53828 - protein, 36 aa, Artificial Sequence; identical to SEQ ID NO: 12178
  Cyclic GFR-binding peptide
  MOD_RES (4)..(5): Xaa is C or S

SEQ ID NO: 53829 - protein, 33 aa, Artificial Sequence; identical to SEQ ID NO: 12180
  Cyclic GFR-binding peptide
  MOD_RES (32)..(32): Xaa is C or S

SEQ ID NO: 53830 - protein, 34 aa, Artificial Sequence
  Cyclic GFR-binding peptide
  MOD_RES (5)..(5): Xaa is C or S
TKPTXAPTKLSPISVLFIDDSSNVIYKQYENMVV

SEQ ID NO: 53831 - protein, 29 aa, Artificial Sequence
  Cyclic GFR-binding peptide
  MOD_RES (27)..(29): Xaa is C or S
SPISVLFIDDSSNVIYKQYENMVVRAXGX

SEQ ID NO: 53832 - protein, 23 aa, Artificial Sequence
  Cyclic GFR-binding peptide
RLNAISILYFDSANNVVLKKYRD

SEQ ID NO: 53833 - protein, 28 aa, Artificial Sequence
  Cyclic GFR-binding peptide
PTELEPLTMLYYDENEKVVEQLSNDMVV

SEQ ID NO: 53834 - protein, 31 aa, Artificial Sequence
  Cyclic GFR-binding peptide
  MOD_RES (29)..(31): Xaa is C or S
RLNAISILYFDSANNVVLKKYRDMVVESXGX

SEQ ID NO: 53835 - protein, 33 aa, Artificial Sequence
  Cyclic GFR-binding peptide
  MOD_RES (5)..(5): Xaa is C or S
TKPTXAPTKLEPLPVVYYDDSSNVIEQLSNNMV

SEQ ID NO: 53836 - protein, 32 aa, Artificial Sequence
  Cyclic GFR-binding peptide
  MOD_RES (5)..(6): Xaa is C or S
SAAPXXVPQALSPISILFIVGRKPKVYKQYEM

SEQ ID NO: 53837 - protein, 27 aa, Artificial Sequence
  Cyclic GFR-binding peptide
VPTELEPLTMLYYDENEKVVEQLSNDM

SEQ ID NO: 53838 - protein, 32 aa, Artificial Sequence
  Cyclic GFR-binding peptide
  MOD_RES (31)..(31): Xaa is C or S
PTELEPLPMVYYDENEKVVEQLSNDMVVEGXG

SEQ ID NO: 53839 - protein, 36 aa, Artificial Sequence; identical to SEQ ID NO: 12182
  Cyclic GFR-binding peptide
  MOD_RES (1)..(2)..(34)..(36): Xaa is C or S

SEQ ID NO: 53840 - protein, 34 aa, Artificial Sequence; identical to SEQ ID NO: 12183
  Cyclic GFR-binding peptide
  MOD_RES (1)..(33): Xaa is C or S

SEQ ID NO: 53841 - protein, 24 aa, Artificial Sequence
  Cyclic GFR-binding peptide
PTELEPLPMVYYDENEKVVEQLSN

SEQ ID NO: 53842 - protein, 26 aa, Artificial Sequence
  Cyclic GFR-binding peptide
LEPLPIVYYIGKTPKIEQLSNMIVKS

SEQ ID NO: 53843 - protein, 28 aa, Artificial Sequence
  Cyclic GFR-binding peptide
  MOD_RES (1)..(2): Xaa is C or S
XXVPQALSPISILFIVGRKPKVYKQYEM

SEQ ID NO: 53844 - protein, 30 aa, Artificial Sequence
  Cyclic GFR-binding peptide
  MOD_RES (2)..(3): Xaa is C or S
TXXVPTRLEPLPIVYYDSANNVVEQLSNDM

SEQ ID NO: 53845 - protein, 33 aa, Artificial Sequence
  Cyclic GFR-binding peptide
  MOD_RES (4)..(5): Xaa is C or S
PPTXXVPTRLSAISILYLDSANNVVLKNYQDMV

SEQ ID NO: 53846 - protein, 32 aa, Artificial Sequence; identical to SEQ ID NO: 12192
  Cyclic GFR-binding peptide
  MOD_RES (1)..(2): Xaa is C or S

SEQ ID NO: 53847 - protein, 35 aa, Artificial Sequence; identical to SEQ ID NO: 12194
  Cyclic GFR-binding peptide
  MOD_RES (1)..(33)..(35): Xaa is C or S

SEQ ID NO: 53848 - protein, 30 aa, Artificial Sequence
  Cyclic GFR-binding peptide
  MOD_RES (2)..(3): Xaa is C or S
PXXVPQALEPLTILYYVGRKPKVEQLSNMI

SEQ ID NO: 53849 - protein, 22 aa, Artificial Sequence
  Cyclic GFR-binding peptide
EPLTMLYYDEYDKVVEQLSNEM

SEQ ID NO: 53850 - protein, 32 aa, Artificial Sequence
  Cyclic GFR-binding peptide
  MOD_RES (6)..(7): Xaa is C or S
STPPTXXVPTRLEPLPIVYYDSANNVVEQLSN

SEQ ID NO: 53851 - protein, 27 aa, Artificial Sequence
  Cyclic GFR-binding peptide
  MOD_RES (1)..(2): Xaa is C or S
XXVPQALEPLTILYYVGRKPKVEQLSN

SEQ ID NO: 53852 - protein, 30 aa, Artificial Sequence
  Cyclic GFR-binding peptide
  MOD_RES (3)..(4): Xaa is C or S
KPXXAPTKLSPISVLFIDDSSNVIYKQYEN

SEQ ID NO: 53853 - protein, 29 aa, Artificial Sequence
  Cyclic GFR-binding peptide
  MOD_RES (29)..(29): Xaa is C or S
KLEPLTVLYYDDSSNVIEQLSNNMVVRSX

SEQ ID NO: 53854 - protein, 35 aa, Artificial Sequence
  Cyclic GFR-binding peptide
  MOD_RES (5)..(6): Xaa is C or S
IPKAXXVPTELEPLPMVYYDENEKVVEQLSNDMVV

SEQ ID NO: 53855 - protein, 28 aa, Artificial Sequence
  Cyclic GFR-binding peptide
  MOD_RES (28)..(28): Xaa is C or S
LEPLPVVYYDDSSNVIEQLSNNMVVRAX

SEQ ID NO: 53856 - protein, 31 aa, Artificial Sequence; identical to SEQ ID NO: 12197
  Cyclic GFR-binding peptide
  MOD_RES (1)..(1): Xaa is C or S

SEQ ID NO: 53857 - protein, 24 aa, Artificial Sequence
  Cyclic GFR-binding peptide
SPISVLFIDDSSNVIYKQYENMVV

SEQ ID NO: 53858 - protein, 35 aa, Artificial Sequence; identical to SEQ ID NO: 12199
  Cyclic GFR-binding peptide
  MOD_RES (2)..(34): Xaa is C or S

SEQ ID NO: 53859 - protein, 26 aa, Artificial Sequence
  Cyclic GFR-binding peptide
SQDLSPISILFIIGKTPKIYKQYEMI

SEQ ID NO: 53860 - protein, 30 aa, Artificial Sequence
  Cyclic GFR-binding peptide
  MOD_RES (27)..(29): Xaa is C or S
EPLPIVYYDSANNVVEQLSNDMVVESXGXR

SEQ ID NO: 53861 - protein, 24 aa, Artificial Sequence
  Cyclic GFR-binding peptide
TQLEPLTVLYYDDSSNVIEQLSNN

SEQ ID NO: 53862 - protein, 25 aa, Artificial Sequence
  Cyclic GFR-binding peptide
ELSPISMLFIDENEKVVYKQYEDMV

SEQ ID NO: 53863 - protein, 34 aa, Artificial Sequence; identical to SEQ ID NO: 12207
  Cyclic GFR-binding peptide
  MOD_RES (2)..(3)..(34): Xaa is C or S

SEQ ID NO: 53864 - protein, 28 aa, Artificial Sequence
  Cyclic GFR-binding peptide
  MOD_RES (1)..(1): Xaa is C or S
XAPTQLSPISVLFIDDSSNVIYKQYENM

SEQ ID NO: 53865 - protein, 31 aa, Artificial Sequence
  Cyclic GFR-binding peptide
  MOD_RES (4)..(5): Xaa is C or S
PKAXXVPTELEPLTMLYYDEYDKVVEQLSNE

SEQ ID NO: 53866 - protein, 29 aa, Artificial Sequence
  Cyclic GFR-binding peptide
  MOD_RES (29)..(29): Xaa is C or S
ELEPLPMVYYDENEKVVEQLSNDMVVEGX

SEQ ID NO: 53867 - protein, 39 aa, Artificial Sequence; identical to SEQ ID NO: 12209
  Cyclic GFR-binding peptide
  MOD_RES (6)..(7)..(38): Xaa is C or S

SEQ ID NO: 53868 - protein, 27 aa, Artificial Sequence
  Cyclic GFR-binding peptide
LEPLTMLYYDENEKVVEQLSNDMVVEG

SEQ ID NO: 53869 - protein, 36 aa, Artificial Sequence; identical to SEQ ID NO: 12210
  Cyclic GFR-binding peptide
  MOD_RES (6)..(6): Xaa is C or S

SEQ ID NO: 53870 - protein, 32 aa, Artificial Sequence
  Cyclic GFR-binding peptide
  MOD_RES (5)..(6): Xaa is C or S
VPKPXXAPTQLEPLPVVYYDDSSNVIEQLSNN

SEQ ID NO: 53871 - protein, 26 aa, Artificial Sequence
  Cyclic GFR-binding peptide
  MOD_RES (1)..(1): Xaa is C or S
XVPTELEPLTMLYYDEYDKVVEQLSN

SEQ ID NO: 53872 - protein, 28 aa, Artificial Sequence
  Cyclic GFR-binding peptide
  MOD_RES (27)..(27): Xaa is C or S
SPISMLFIDEYDKVVYKQYEEMVVEGXG

SEQ ID NO: 53873 - protein, 29 aa, Artificial Sequence
  Cyclic GFR-binding peptide
  MOD_RES (28)..(28): Xaa is C or S
LSPISMLFIDEYDKVVYKQYEEMVVEGXG

SEQ ID NO: 53874 - protein, 35 aa, Artificial Sequence
  Cyclic GFR-binding peptide
  MOD_RES (6)..(7): Xaa is C or S
ASASPXXVSQDLEPLPIVYYIGKTPKIEQLSNMIV

SEQ ID NO: 53875 - protein, 27 aa, Artificial Sequence
  Cyclic GFR-binding peptide
TRLNAISILYFDSANNVVLKKYRDMVV

SEQ ID NO: 53876 - protein, 34 aa, Artificial Sequence
  Cyclic GFR-binding peptide
  MOD_RES (6)..(7): Xaa is C or S
YVPKPXXAPTKLEPLPVVYYDDSSNVIEQLSNNM

SEQ ID NO: 53877 - protein, 35 aa, Artificial Sequence; identical to SEQ ID NO: 12212
  Cyclic GFR-binding peptide
  MOD_RES (1)..(33)..(35): Xaa is C or S

SEQ ID NO: 53878 - protein, 34 aa, Artificial Sequence; identical to SEQ ID NO: 12213
  Cyclic GFR-binding peptide
  MOD_RES (2)..(3): Xaa is C or S

SEQ ID NO: 53879 - protein, 33 aa, Artificial Sequence; identical to SEQ ID NO: 12214
  Cyclic GFR-binding peptide
  MOD_RES (2)..(3): Xaa is C or S

SEQ ID NO: 53880 - protein, 34 aa, Artificial Sequence; identical to SEQ ID NO: 12215
  Cyclic GFR-binding peptide
  MOD_RES (2)..(3)..(34): Xaa is C or S

SEQ ID NO: 53881 - protein, 30 aa, Artificial Sequence
  Cyclic GFR-binding peptide
  MOD_RES (28)..(30): Xaa is C or S
LSPISVLFIDDSSNVIYKQYENMVVRSXGX

SEQ ID NO: 53882 - protein, 29 aa, Artificial Sequence
  Cyclic GFR-binding peptide
  MOD_RES (3)..(4): Xaa is C or S
KAXXVPTELSPISMLFIDEYDKVVYKQYE

SEQ ID NO: 53883 - protein, 35 aa, Artificial Sequence
  Cyclic GFR-binding peptide
  MOD_RES (6)..(7): Xaa is C or S
ASASPXXVSQDLSPISILFIIGKTPKIYKQYEMIV

SEQ ID NO: 53884 - protein, 32 aa, Artificial Sequence
  Cyclic GFR-binding peptide
  MOD_RES (3)..(4): Xaa is C or S
PTXXVPTRLNAISILYFDSANNVVLKKYRDMV

SEQ ID NO: 53885 - protein, 32 aa, Artificial Sequence; identical to SEQ ID NO: 12217
  Cyclic GFR-binding peptide
  MOD_RES (32)..(32): Xaa is C or S

SEQ ID NO: 53886 - protein, 27 aa, Artificial Sequence
  Cyclic GFR-binding peptide
QALEPLTILYYVGRKPKVEQLSNMIVR

SEQ ID NO: 53887 - protein, 32 aa, Artificial Sequence
  Cyclic GFR-binding peptide
  MOD_RES (5)..(6): Xaa is C or S
TPPTXXVPTRLNAISILYFDSANNVVLKKYRD

SEQ ID NO: 53888 - protein, 39 aa, Artificial Sequence; identical to SEQ ID NO: 12218
  Cyclic GFR-binding peptide
  MOD_RES (3)..(4)..(36)..(38): Xaa is C or S

SEQ ID NO: 53889 - protein, 38 aa, Artificial Sequence; identical to SEQ ID NO: 12219
  Cyclic GFR-binding peptide
  MOD_RES (4)..(5)..(37): Xaa is C or S

SEQ ID NO: 53890 - protein, 36 aa, Artificial Sequence; identical to SEQ ID NO: 12222
  Cyclic GFR-binding peptide
  MOD_RES (2)..(3)..(34)..(36): Xaa is C or S

SEQ ID NO: 53891 - protein, 37 aa, Artificial Sequence; identical to SEQ ID NO: 12224
  Cyclic GFR-binding peptide
  MOD_RES (6)..(6): Xaa is C or S

SEQ ID NO: 53892 - protein, 31 aa, Artificial Sequence
  Cyclic GFR-binding peptide
  MOD_RES (5)..(6): Xaa is C or S
IPKAXXVPTELSPISMLFIDEYDKVVYKQYE

SEQ ID NO: 53893 - protein, 36 aa, Artificial Sequence; identical to SEQ ID NO: 12225
  Cyclic GFR-binding peptide
  MOD_RES (1)..(2)..(34)..(36): Xaa is C or S

SEQ ID NO: 53894 - protein, 33 aa, Artificial Sequence; identical to SEQ ID NO: 12226
  Cyclic GFR-binding peptide
  MOD_RES (1)..(33): Xaa is C or S

SEQ ID NO: 53895 - protein, 23 aa, Artificial Sequence
  Cyclic GFR-binding peptide
QDLSPISILFIVGRTPKVYKQYE

SEQ ID NO: 53896 - protein, 29 aa, Artificial Sequence
  Cyclic GFR-binding peptide
  MOD_RES (27)..(29): Xaa is C or S
EPLTMLYYDEYDKVVEQLSNEMVVEGXGX

SEQ ID NO: 53897 - protein, 32 aa, Artificial Sequence
  Cyclic GFR-binding peptide
  MOD_RES (2)..(3): Xaa is C or S
TXXVPTRLNAISILYFDSANNVVLKKYRDMVV

SEQ ID NO: 53898 - protein, 35 aa, Artificial Sequence; identical to SEQ ID NO: 12228
  Cyclic GFR-binding peptide
  MOD_RES (2)..(3)..(35): Xaa is C or S

SEQ ID NO: 53899 - protein, 33 aa, Artificial Sequence
  Cyclic GFR-binding peptide
  MOD_RES (3)..(4): Xaa is C or S
KPXXAPTKLEPLPVVYYDDSSNVIEQLSNNMVV

SEQ ID NO: 53900 - protein, 22 aa, Artificial Sequence
  Cyclic GFR-binding peptide
LEPLPIVYYIGKTPKIEQLSNM

SEQ ID NO: 53901 - protein, 40 aa, Artificial Sequence; identical to SEQ ID NO: 12231
  Cyclic GFR-binding peptide
  MOD_RES (4)..(5)..(37)..(39): Xaa is C or S

SEQ ID NO: 53902 - protein, 27 aa, Artificial Sequence
  Cyclic GFR-binding peptide
  MOD_RES (1)..(1): Xaa is C or S
XVPQDLEPLPIVYYVGRTPKVEQLSNM

SEQ ID NO: 53903 - protein, 26 aa, Artificial Sequence
  Cyclic GFR-binding peptide
KLSPISVLFIDDSSNVIYKQYENMVV

SEQ ID NO: 53904 - protein, 36 aa, Artificial Sequence; identical to SEQ ID NO: 12233
  Cyclic GFR-binding peptide
  MOD_RES (1)..(2)..(34)..(36): Xaa is C or S

SEQ ID NO: 53905 - protein, 28 aa, Artificial Sequence
  Cyclic GFR-binding peptide
  MOD_RES (27)..(27): Xaa is C or S
EPLPVVYYDDSSNVIEQLSNNMVVRAXG

SEQ ID NO: 53906 - protein, 23 aa, Artificial Sequence
  Cyclic GFR-binding peptide
LEPLTILYYDSANNVVEQLSNDM

SEQ ID NO: 53907 - protein, 22 aa, Artificial Sequence
  Cyclic GFR-binding peptide
LNAISILYFDSANNVVLKKYRD

SEQ ID NO: 53908 - protein, 36 aa, Artificial Sequence
  Cyclic GFR-binding peptide
  MOD_RES (6)..(7): Xaa is C or S
YVPKPXXAPTKLSPISVLFIDDSSNVIYKQYENMVV

SEQ ID NO: 53909 - protein, 24 aa, Artificial Sequence
  Cyclic GFR-binding peptide
SPISILFIVGRKPKVYKQYEMIVR

SEQ ID NO: 53910 - protein, 27 aa, Artificial Sequence
  Cyclic GFR-binding peptide
ELEPLTMLYYDEYDKVVEQLSNEMVVE

SEQ ID NO: 53911 - protein, 38 aa, Artificial Sequence; identical to SEQ ID NO: 12235
  Cyclic GFR-binding peptide
  MOD_RES (4)..(5)..(37): Xaa is C or S

SEQ ID NO: 53912 - protein, 39 aa, Artificial Sequence; identical to SEQ ID NO: 12236
  Cyclic GFR-binding peptide
  MOD_RES (6)..(7)..(38): Xaa is C or S

SEQ ID NO: 53913 - protein, 28 aa, Artificial Sequence
  Cyclic GFR-binding peptide
QDLEPLPIVYYVGRTPKVEQLSNMVVKS

SEQ ID NO: 53914 - protein, 24 aa, Artificial Sequence
  Cyclic GFR-binding peptide
RLEPLPIVYYDSANNVVEQLSNDM

SEQ ID NO: 53915 - protein, 25 aa, Artificial Sequence
  Cyclic GFR-binding peptide
PQALEPLTILYYVGRKPKVEQLSNM

SEQ ID NO: 53916 - protein, 30 aa, Artificial Sequence
  Cyclic GFR-binding peptide
  MOD_RES (1)..(1): Xaa is C or S
XAPTQLEPLTVLYYDDSSNVIEQLSNNMVV

SEQ ID NO: 53917 - protein, 36 aa, Artificial Sequence; identical to SEQ ID NO: 12238
  Cyclic GFR-binding peptide
  MOD_RES (3)..(4)..(35): Xaa is C or S

SEQ ID NO: 53918 - protein, 36 aa, Artificial Sequence; identical to SEQ ID NO: 12239
  Cyclic GFR-binding peptide
  MOD_RES (3)..(4)..(36): Xaa is C or S

SEQ ID NO: 53919 - protein, 25 aa, Artificial Sequence
  Cyclic GFR-binding peptide
QDLSPISILFIIGKTPKIYKQYEMI

SEQ ID NO: 53920 - protein, 31 aa, Artificial Sequence; identical to SEQ ID NO: 12240
  Cyclic GFR-binding peptide
  MOD_RES (1)..(1): Xaa is C or S

SEQ ID NO: 53921 - protein, 36 aa, Artificial Sequence; identical to SEQ ID NO: 12241
  Cyclic GFR-binding peptide
  MOD_RES (3)..(4)..(35): Xaa is C or S

SEQ ID NO: 53922 - protein, 26 aa, Artificial Sequence
  Cyclic GFR-binding peptide
ELSPISMLFIDENEKVVYKQYEDMVV

SEQ ID NO: 53923 - protein, 40 aa, Artificial Sequence; identical to SEQ ID NO: 12242
  Cyclic GFR-binding peptide
  MOD_RES (4)..(5)..(37)..(39): Xaa is C or S

SEQ ID NO: 53924 - protein, 31 aa, Artificial Sequence
  Cyclic GFR-binding peptide
  MOD_RES (31)..(31): Xaa is C or S
PTELEPLPMVYYDENEKVVEQLSNDMVVEGX

SEQ ID NO: 53925 - protein, 29 aa, Artificial Sequence
  Cyclic GFR-binding peptide
  MOD_RES (2)..(3): Xaa is C or S
TXXVPTRLNAISILYFDSANNVVLKKYRD

SEQ ID NO: 53926 - protein, 35 aa, Artificial Sequence; identical to SEQ ID NO: 12245
  Cyclic GFR-binding peptide
  MOD_RES (1)..(33)..(35): Xaa is C or S

SEQ ID NO: 53927 - protein, 35 aa, Artificial Sequence; identical to SEQ ID NO: 12247
  Cyclic GFR-binding peptide
  MOD_RES (1)..(2)..(34): Xaa is C or S

SEQ ID NO: 53928 - protein, 37 aa, Artificial Sequence; identical to SEQ ID NO: 12246
  Cyclic GFR-binding peptide
  MOD_RES (3)..(4)..(36): Xaa is C or S

SEQ ID NO: 53929 - protein, 24 aa, Artificial Sequence
  Cyclic GFR-binding peptide
ELSPISMLFIDEYDKVVYKQYEEM

SEQ ID NO: 53930 - protein, 42 aa, Artificial Sequence; identical to SEQ ID NO: 12248
  Cyclic GFR-binding peptide
  MOD_RES (6)..(7)..(39)..(41): Xaa is C or S

SEQ ID NO: 53931 - protein, 40 aa, Artificial Sequence; identical to SEQ ID NO: 12250
  Cyclic GFR-binding peptide
  MOD_RES (5)..(6)..(37)..(39): Xaa is C or S

SEQ ID NO: 53932 - protein, 39 aa, Artificial Sequence; identical to SEQ ID NO: 12253
  Cyclic GFR-binding peptide
  MOD_RES (3)..(4)..(36)..(38): Xaa is C or S

SEQ ID NO: 53933 - protein, 32 aa, Artificial Sequence
  Cyclic GFR-binding peptide
  MOD_RES (5)..(5): Xaa is C or S
TKPTXAPTKLEPLPVVYYDDSSNVIEQLSNNM

SEQ ID NO: 53934 - protein, 28 aa, Artificial Sequence
  Cyclic GFR-binding peptide
VSQDLSPISILFIIGKTPKIYKQYEMIV

SEQ ID NO: 53935 - protein, 33 aa, Artificial Sequence
  Cyclic GFR-binding peptide
  MOD_RES (30)..(32): Xaa is C or S
TRLEPLTILYYDSANNVVEQLSNDMVVESXGXR

SEQ ID NO: 53936 - protein, 28 aa, Artificial Sequence
  Cyclic GFR-binding peptide
  MOD_RES (2)..(3): Xaa is C or S
AXXVPTELEPLPMVYYDEYDKVVEQLSN

SEQ ID NO: 53937 - protein, 32 aa, Artificial Sequence
  Cyclic GFR-binding peptide
  MOD_RES (2)..(3): Xaa is C or S
AXXVPTELEPLTMLYYDENEKVVEQLSNDMVV

SEQ ID NO: 53938 - protein, 24 aa, Artificial Sequence
  Cyclic GFR-binding peptide
LSPISMLFIDENEKVVYKQYEDMV

SEQ ID NO: 53939 - protein, 39 aa, Artificial Sequence; identical to SEQ ID NO: 12258
  Cyclic GFR-binding peptide
  MOD_RES (5)..(6)..(38): Xaa is C or S

SEQ ID NO: 53940 - protein, 36 aa, Artificial Sequence; identical to SEQ ID NO: 12260
  Cyclic GFR-binding peptide
  MOD_RES (1)..(2)..(34)..(36): Xaa is C or S

SEQ ID NO: 53941 - protein, 32 aa, Artificial Sequence
  Cyclic GFR-binding peptide
  MOD_RES (5)..(6): Xaa is C or S
SASPXXVSQDLSPISILFIIGKTPKIYKQYEM

SEQ ID NO: 53942 - protein, 33 aa, Artificial Sequence
  Cyclic GFR-binding peptide
  MOD_RES (4)..(5): Xaa is C or S
PKAXXVPTELEPLTMLYYDEYDKVVEQLSNEMV

SEQ ID NO: 53943 - protein, 28 aa, Artificial Sequence
  Cyclic GFR-binding peptide
VPTELEPLPMVYYDEYDKVVEQLSNEMV

SEQ ID NO: 53944 - protein, 28 aa, Artificial Sequence
  Cyclic GFR-binding peptide
  MOD_RES (2)..(3): Xaa is C or S
PXXVPQALSPISILFIVGRKPKVYKQYE

SEQ ID NO: 53945 - protein, 26 aa, Artificial Sequence
  Cyclic GFR-binding peptide
LSPISVLFIDDSSNVIYKQYENMVVR

SEQ ID NO: 53946 - protein, 35 aa, Artificial Sequence
  Cyclic GFR-binding peptide
  MOD_RES (6)..(7): Xaa is C or S
KIPKAXXVPTELSPISMLFIDENEKVVYKQYEDMV

SEQ ID NO: 53947 - protein, 36 aa, Artificial Sequence; identical to SEQ ID NO: 12265
  Cyclic GFR-binding peptide
  MOD_RES (3)..(4)..(35): Xaa is C or S

SEQ ID NO: 53948 - protein, 29 aa, Artificial Sequence
  Cyclic GFR-binding peptide
  MOD_RES (2)..(3): Xaa is C or S
AXXVPTELSPISMLFIDENEKVVYKQYED

SEQ ID NO: 53949 - protein, 30 aa, Artificial Sequence
  Cyclic GFR-binding peptide
  MOD_RES (2)..(3): Xaa is C or S
PXXVSQDLEPLPIVYYIGKTPKIEQLSNMI

SEQ ID NO: 53950 - protein, 34 aa, Artificial Sequence
  Cyclic GFR-binding peptide
  MOD_RES (6)..(6): Xaa is C or S
VTKPTXAPTKLEPLTVLYYDDSSNVIEQLSNNMV

SEQ ID NO: 53951 - protein, 27 aa, Artificial Sequence
  Cyclic GFR-binding peptide
PQDLSPISILFIVGRTPKVYKQYEMVV

SEQ ID NO: 53952 - protein, 32 aa, Artificial Sequence
  Cyclic GFR-binding peptide
  MOD_RES (3)..(4): Xaa is C or S
SPXXVSQDLSPISILFIIGKTPKIYKQYEMIV

SEQ ID NO: 53953 - protein, 33 aa, Artificial Sequence; identical to SEQ ID NO: 12267
  Cyclic GFR-binding peptide
  MOD_RES (32)..(32): Xaa is C or S

SEQ ID NO: 53954 - protein, 24 aa, Artificial Sequence
  Cyclic GFR-binding peptide
EPLTMLYYDEYDKVVEQLSNEMVV

SEQ ID NO: 53955 - protein, 28 aa, Artificial Sequence
  Cyclic GFR-binding peptide
  MOD_RES (28)..(28): Xaa is C or S
LEPLTILYYDSANNVVEQLSNDMVVESX

SEQ ID NO: 53956 - protein, 26 aa, Artificial Sequence
  Cyclic GFR-binding peptide
PTELSPISMLFIDENEKVVYKQYEDM

SEQ ID NO: 53957 - protein, 27 aa, Artificial Sequence
  Cyclic GFR-binding peptide
VPTELSPISMLFIDENEKVVYKQYEDM

SEQ ID NO: 53958 - protein, 30 aa, Artificial Sequence
  Cyclic GFR-binding peptide
  MOD_RES (4)..(5): Xaa is C or S
PKPXXAPTKLEPLPVVYYDDSSNVIEQLSN

SEQ ID NO: 53959 - protein, 31 aa, Artificial Sequence
  Cyclic GFR-binding peptide
  MOD_RES (30)..(30): Xaa is C or S
TKLEPLPVVYYDDSSNVIEQLSNNMVVRSXG

SEQ ID NO: 53960 - protein, 33 aa, Artificial Sequence
  Cyclic GFR-binding peptide
  MOD_RES (4)..(5): Xaa is C or S
PKAXXVPTELSPISMLFIDENEKVVYKQYEDMV

SEQ ID NO: 53961 - protein, 37 aa, Artificial Sequence; identical to SEQ ID NO: 12271
  Cyclic GFR-binding peptide
  MOD_RES (3)..(4)..(36): Xaa is C or S

SEQ ID NO: 53962 - protein, 31 aa, Artificial Sequence
  Cyclic GFR-binding peptide
  MOD_RES (30)..(30): Xaa is C or S
TELEPLPMVYYDEYDKVVEQLSNEMVVEGXG

SEQ ID NO: 53963 - protein, 27 aa, Artificial Sequence
  Cyclic GFR-binding peptide
PTELEPLTMLYYDEYDKVVEQLSNEMV

SEQ ID NO: 53964 - protein, 29 aa, Artificial Sequence
  Cyclic GFR-binding peptide
  MOD_RES (3)..(4): Xaa is C or S
PTXXVPTRLSAISILYLDSANNVVLKNYQ

SEQ ID NO: 53965 - protein, 26 aa, Artificial Sequence
  Cyclic GFR-binding peptide
  MOD_RES (1)..(1): Xaa is C or S
XVPTELSPISMLFIDENEKVVYKQYE

SEQ ID NO: 53966 - protein, 23 aa, Artificial Sequence
  Cyclic GFR-binding peptide
LEPLTILYYVGRKPKVEQLSNMI

SEQ ID NO: 53967 - protein, 25 aa, Artificial Sequence
  Cyclic GFR-binding peptide
SPISVLFIDDSSNVIYKQYENMVVR

SEQ ID NO: 53968 - protein, 32 aa, Artificial Sequence; identical to SEQ ID NO: 12277
  Cyclic GFR-binding peptide
  MOD_RES (1)..(2): Xaa is C or S

SEQ ID NO: 53969 - protein, 36 aa, Artificial Sequence; identical to SEQ ID NO: 12278
  Cyclic GFR-binding peptide
  MOD_RES (2)..(3)..(35): Xaa is C or S

SEQ ID NO: 53970 - protein, 34 aa, Artificial Sequence; identical to SEQ ID NO: 12280
  Cyclic GFR-binding peptide
  MOD_RES (32)..(34): Xaa is C or S

SEQ ID NO: 53971 - protein, 37 aa, Artificial Sequence; identical to SEQ ID NO: 12282
  Cyclic GFR-binding peptide
  MOD_RES (6)..(7): Xaa is C or S

SEQ ID NO: 53972 - protein, 28 aa, Artificial Sequence
  Cyclic GFR-binding peptide
RLEPLTILYYDSANNVVEQLSNDMVVES

SEQ ID NO: 53973 - protein, 33 aa, Artificial Sequence; identical to SEQ ID NO: 12284
  Cyclic GFR-binding peptide
  MOD_RES (2)..(3): Xaa is C or S

SEQ ID NO: 53974 - protein, 34 aa, Artificial Sequence
  Cyclic GFR-binding peptide
  MOD_RES (4)..(5): Xaa is C or S
ASPXXVSQDLSPISILFIIGKTPKIYKQYEMIVK

SEQ ID NO: 53975 - protein, 28 aa, Artificial Sequence
  Cyclic GFR-binding peptide
VSQDLEPLPIVYYIGKTPKIEQLSNMIV

SEQ ID NO: 53976 - protein, 26 aa, Artificial Sequence
  Cyclic GFR-binding peptide
LSPISMLFIDENEKVVYKQYEDMVVE

SEQ ID NO: 53977 - protein, 38 aa, Artificial Sequence; identical to SEQ ID NO: 12286
  Cyclic GFR-binding peptide
  MOD_RES (3)..(4)..(35)..(37): Xaa is C or S

SEQ ID NO: 53978 - protein, 31 aa, Artificial Sequence
  Cyclic GFR-binding peptide
  MOD_RES (5)..(6): Xaa is C or S
VPKPXXAPTKLEPLPVVYYDDSSNVIEQLSN

SEQ ID NO: 53979 - protein, 28 aa, Artificial Sequence
  Cyclic GFR-binding peptide
  MOD_RES (1)..(1): Xaa is C or S
XVPQALSPISILFIVGRKPKVYKQYEMI

SEQ ID NO: 53980 - protein, 35 aa, Artificial Sequence
  Cyclic GFR-binding peptide
  MOD_RES (5)..(6): Xaa is C or S
VPKPXXAPTQLEPLTVLYYDDSSNVIEQLSNNMVV

SEQ ID NO: 53981 - protein, 34 aa, Artificial Sequence; identical to SEQ ID NO: 12290
  Cyclic GFR-binding peptide
  MOD_RES (3)..(4): Xaa is C or S

SEQ ID NO: 53982 - protein, 23 aa, Artificial Sequence
  Cyclic GFR-binding peptide
EPLTVLYYDDSSNVIEQLSNNMV

SEQ ID NO: 53983 - protein, 26 aa, Artificial Sequence
  Cyclic GFR-binding peptide
PTRLNAISILYFDSANNVVLKKYRDM

SEQ ID NO: 53984 - protein, 36 aa, Artificial Sequence
  Cyclic GFR-binding peptide
  MOD_RES (6)..(7): Xaa is C or S
TVPKPXXAPTQLSPISVLFIDDSSNVIYKQYENMVV

SEQ ID NO: 53985 - protein, 36 aa, Artificial Sequence; identical to SEQ ID NO: 12293
  Cyclic GFR-binding peptide
  MOD_RES (5)..(6): Xaa is C or S

SEQ ID NO: 53986 - protein, 28 aa, Artificial Sequence
  Cyclic GFR-binding peptide
  MOD_RES (1)..(1): Xaa is C or S
XVPTRLEPLTILYYDSANNVVEQLSNDM

SEQ ID NO: 53987 - protein, 37 aa, Artificial Sequence; identical to SEQ ID NO: 12294
  Cyclic GFR-binding peptide
  MOD_RES (3)..(4)..(36): Xaa is C or S

SEQ ID NO: 53988 - protein, 33 aa, Artificial Sequence
  Cyclic GFR-binding peptide
  MOD_RES (5)..(6): Xaa is C or S
TPPTXXVPTRLSAISILYLDSANNVVLKNYQDM

SEQ ID NO: 53989 - protein, 34 aa, Artificial Sequence; identical to SEQ ID NO: 12296
  Cyclic GFR-binding peptide
  MOD_RES (32)..(34): Xaa is C or S

SEQ ID NO: 53990 - protein, 27 aa, Artificial Sequence
  Cyclic GFR-binding peptide
DLSPISILFIIGKTPKIYKQYEMIVKS

SEQ ID NO: 53991 - protein, 35 aa, Artificial Sequence; identical to SEQ ID NO: 12300
  Cyclic GFR-binding peptide
  MOD_RES (5)..(5): Xaa is C or S

SEQ ID NO: 53992 - protein, 30 aa, Artificial Sequence; identical to SEQ ID NO: 1076
  Cyclic GFR-binding peptide

SEQ ID NO: 53993 - protein, 35 aa, Artificial Sequence; identical to SEQ ID NO: 12302
  Cyclic GFR-binding peptide
  MOD_RES (32)..(34): Xaa is C or S

SEQ ID NO: 53994 - protein, 33 aa, Artificial Sequence
  Cyclic GFR-binding peptide
  MOD_RES (5)..(5): Xaa is C or S
TKPTXAPTKLEPLTVLYYDDSSNVIEQLSNNMV

SEQ ID NO: 53995 - protein, 30 aa, Artificial Sequence
  Cyclic GFR-binding peptide
  MOD_RES (4)..(5): Xaa is C or S
PPTXXVPTRLEPLPIVYYDSANNVVEQLSN

SEQ ID NO: 53996 - protein, 31 aa, Artificial Sequence
  Cyclic GFR-binding peptide
  MOD_RES (28)..(30): Xaa is C or S
LSPISMLFIDENEKVVYKQYEDMVVEGXGXR

SEQ ID NO: 53997 - protein, 32 aa, Artificial Sequence
  Cyclic GFR-binding peptide
  MOD_RES (4)..(5): Xaa is C or S
PPTXXVPTRLEPLTILYYDSANNVVEQLSNDM

SEQ ID NO: 53998 - protein, 39 aa, Artificial Sequence; identical to SEQ ID NO: 12310
  Cyclic GFR-binding peptide
  MOD_RES (6)..(7)..(38): Xaa is C or S

SEQ ID NO: 53999 - protein, 28 aa, Artificial Sequence
  Cyclic GFR-binding peptide
VPQALEPLTILYYVGRKPKVEQLSNMIV

SEQ ID NO: 54000 - protein, 37 aa, Artificial Sequence; identical to SEQ ID NO: 12311
  Cyclic GFR-binding peptide
  MOD_RES (4)..(5)..(36): Xaa is C or S

SEQ ID NO: 54001 - protein, 25 aa, Artificial Sequence
  Cyclic GFR-binding peptide
TQLEPLTVLYYDDSSNVIEQLSNNM

SEQ ID NO: 54002 - protein, 29 aa, Artificial Sequence
  Cyclic GFR-binding peptide
  MOD_RES (3)..(4): Xaa is C or S
SPXXVSQDLEPLPIVYYIGKTPKIEQLSN

SEQ ID NO: 54003 - protein, 24 aa, Artificial Sequence
  Cyclic GFR-binding peptide
RLSAISILYLDSANNVVLKNYQDM

SEQ ID NO: 54004 - protein, 35 aa, Artificial Sequence; identical to SEQ ID NO: 12316
  Cyclic GFR-binding peptide
  MOD_RES (3)..(4): Xaa is C or S

SEQ ID NO: 54005 - protein, 36 aa, Artificial Sequence
  Cyclic GFR-binding peptide
  MOD_RES (7)..(7): Xaa is C or S
HVTKPTXAPTKLEPLPVVYYDDSSNVIEQLSNNMVV

SEQ ID NO: 54006 - protein, 33 aa, Artificial Sequence
  Cyclic GFR-binding peptide
  MOD_RES (30)..(32): Xaa is C or S
TELSPISMLFIDEYDKVVYKQYEEMVVEGXGXR

SEQ ID NO: 54007 - protein, 28 aa, Artificial Sequence
  Cyclic GFR-binding peptide
  MOD_RES (1)..(2): Xaa is C or S
XXVPTRLSAISILYLDSANNVVLKNYQD

SEQ ID NO: 54008 - protein, 36 aa, Artificial Sequence; identical to SEQ ID NO: 12317
  Cyclic GFR-binding peptide
  MOD_RES (5)..(6): Xaa is C or S

SEQ ID NO: 54009 - protein, 36 aa, Artificial Sequence
  Cyclic GFR-binding peptide
  MOD_RES (6)..(7): Xaa is C or S
SIPKAXXVPTELSPISMLFIDEYDKVVYKQYEEMVV

SEQ ID NO: 54010 - protein, 34 aa, Artificial Sequence
  Cyclic GFR-binding peptide
  MOD_RES (31)..(33): Xaa is C or S
PTKLSPISVLFIDDSSNVIYKQYENMVVRSXGXH

SEQ ID NO: 54011 - protein, 33 aa, Artificial Sequence
  Cyclic GFR-binding peptide
  MOD_RES (6)..(6): Xaa is C or S
VTKPTXAPTKLSPISVLFIDDSSNVIYKQYENM

SEQ ID NO: 54012 - protein, 38 aa, Artificial Sequence; identical to SEQ ID NO: 12318
  Cyclic GFR-binding peptide
  MOD_RES (6)..(7): Xaa is C or S

SEQ ID NO: 54013 - protein, 25 aa, Artificial Sequence
  Cyclic GFR-binding peptide
LEPLTMLYYDEYDKVVEQLSNEMVV

SEQ ID NO: 54014 - protein, 41 aa, Artificial Sequence; identical to SEQ ID NO: 12319
  Cyclic GFR-binding peptide
  MOD_RES (6)..(7)..(38)..(40): Xaa is C or S

SEQ ID NO: 54015 - protein, 28 aa, Artificial Sequence
  Cyclic GFR-binding peptide
VPTRLEPLTILYYDSANNVVEQLSNDMV

SEQ ID NO: 54016 - protein, 22 aa, Artificial Sequence
  Cyclic GFR-binding peptide
QLEPLPVVYYDDSSNVIEQLSN

SEQ ID NO: 54017 - protein, 32 aa, Artificial Sequence; identical to SEQ ID NO: 12321
  Cyclic GFR-binding peptide
  MOD_RES (32)..(32): Xaa is C or S

SEQ ID NO: 54018 - protein, 32 aa, Artificial Sequence; identical to SEQ ID NO: 12322
  Cyclic GFR-binding peptide
  MOD_RES (1)..(1): Xaa is C or S

SEQ ID NO: 54019 - protein, 29 aa, Artificial Sequence
  Cyclic GFR-binding peptide
PTQLEPLPVVYYDDSSNVIEQLSNNMVVR

SEQ ID NO: 54020 - protein, 39 aa, Artificial Sequence; identical to SEQ ID NO: 12324
  Cyclic GFR-binding peptide
  MOD_RES (3)..(4)..(36)..(38): Xaa is C or S

SEQ ID NO: 54021 - protein, 31 aa, Artificial Sequence
  Cyclic GFR-binding peptide
  MOD_RES (3)..(3): Xaa is C or S
PTXAPTKLEPLTVLYYDDSSNVIEQLSNNMV

SEQ ID NO: 54022 - protein, 24 aa, Artificial Sequence
  Cyclic GFR-binding peptide
LEPLPMVYYDENEKVVEQLSNDMV

SEQ ID NO: 54023 - protein, 25 aa, Artificial Sequence
  Cyclic GFR-binding peptide
VPTRLEPLTILYYDSANNVVEQLSN

SEQ ID NO: 54024 - protein, 32 aa, Artificial Sequence
  Cyclic GFR-binding peptide
  MOD_RES (2)..(3): Xaa is C or S
TXXVPTRLEPLPIVYYDSANNVVEQLSNDMVV

SEQ ID NO: 54025 - protein, 38 aa, Artificial Sequence; identical to SEQ ID NO: 12325
  Cyclic GFR-binding peptide
  MOD_RES (2)..(3)..(35)..(37): Xaa is C or S

SEQ ID NO: 54026 - protein, 40 aa, Artificial Sequence; identical to SEQ ID NO: 12326
  Cyclic GFR-binding peptide
  MOD_RES (4)..(5)..(37)..(39): Xaa is C or S

SEQ ID NO: 54027 - protein, 20 aa, Artificial Sequence
  Cyclic GFR-binding peptide
SPISMLFIDENEKVVYKQYE

SEQ ID NO: 54028 - protein, 36 aa, Artificial Sequence
  Cyclic GFR-binding peptide
  MOD_RES (6)..(7): Xaa is C or S
STPPTXXVPTRLEPLPIVYYDSANNVVEQLSNDMVV

SEQ ID NO: 54029 - protein, 34 aa, Artificial Sequence; identical to SEQ ID NO: 12329
  Cyclic GFR-binding peptide
  MOD_RES (32)..(34): Xaa is C or S

SEQ ID NO: 54030 - protein, 34 aa, Artificial Sequence; identical to SEQ ID NO: 12330
  Cyclic GFR-binding peptide
  MOD_RES (2)..(3)..(34): Xaa is C or S

SEQ ID NO: 54031 - protein, 36 aa, Artificial Sequence; identical to SEQ ID NO: 12331
  Cyclic GFR-binding peptide
  MOD_RES (2)..(3)..(34)..(36): Xaa is C or S

SEQ ID NO: 54032 - protein, 42 aa, Artificial Sequence; identical to SEQ ID NO: 12332
  Cyclic GFR-binding peptide
  MOD_RES (6)..(7)..(39)..(41): Xaa is C or S

SEQ ID NO: 54033 - protein, 27 aa, Artificial Sequence
  Cyclic GFR-binding peptide
  MOD_RES (1)..(1): Xaa is C or S
XVPTELEPLTMLYYDEYDKVVEQLSNE

SEQ ID NO: 54034 - protein, 33 aa, Artificial Sequence
  Cyclic GFR-binding peptide
  MOD_RES (30)..(32): Xaa is C or S
TRLEPLPIVYYDSANNVVEQLSNDMVVESXGXR

SEQ ID NO: 54035 - protein, 37 aa, Artificial Sequence; identical to SEQ ID NO: 12335
  Cyclic GFR-binding peptide
  MOD_RES (7)..(7): Xaa is C or S

SEQ ID NO: 54036 - protein, 20 aa, Artificial Sequence
  Cyclic GFR-binding peptide
EPLPVVYYDDSSNVIEQLSN

SEQ ID NO: 54037 - protein, 38 aa, Artificial Sequence; identical to SEQ ID NO: 12336
  Cyclic GFR-binding peptide
  MOD_RES (2)..(3)..(35)..(37): Xaa is C or S

SEQ ID NO: 54038 - protein, 29 aa, Artificial Sequence
  Cyclic GFR-binding peptide
  MOD_RES (1)..(1): Xaa is C or S
XAPTQLEPLPVVYYDDSSNVIEQLSNNMV

SEQ ID NO: 54039 - protein, 23 aa, Artificial Sequence
  Cyclic GFR-binding peptide
DLSPISILFIVGRTPKVYKQYEM

SEQ ID NO: 54040 - protein, 38 aa, Artificial Sequence; identical to SEQ ID NO: 12337
  Cyclic GFR-binding peptide
  MOD_RES (6)..(7): Xaa is C or S

SEQ ID NO: 54041 - protein, 27 aa, Artificial Sequence
  Cyclic GFR-binding peptide
  MOD_RES (2)..(2): Xaa is C or S
TXAPTKLEPLPVVYYDDSSNVIEQLSN

SEQ ID NO: 54042 - protein, 31 aa, Artificial Sequence; identical to SEQ ID NO: 12338
  Cyclic GFR-binding peptide

SEQ ID NO: 54043 - protein, 32 aa, Artificial Sequence
  Cyclic GFR-binding peptide
  MOD_RES (6)..(7): Xaa is C or S
YVPKPXXAPTKLEPLTVLYYDDSSNVIEQLSN

SEQ ID NO: 54044 - protein, 32 aa, Artificial Sequence
  Cyclic GFR-binding peptide
  MOD_RES (2)..(3): Xaa is C or S
PXXAPTQLSPISVLFIDDSSNVIYKQYENMVV

SEQ ID NO: 54045 - protein, 20 aa, Artificial Sequence
  Cyclic GFR-binding peptide
EPLTILYYDSANNVVEQLSN

SEQ ID NO: 54046 - protein, 36 aa, Artificial Sequence; identical to SEQ ID NO: 12340
  Cyclic GFR-binding peptide
  MOD_RES (3)..(4)..(36): Xaa is C or S

SEQ ID NO: 54047 - protein, 25 aa, Artificial Sequence
  Cyclic GFR-binding peptide
ALEPLTILYYVGRKPKVEQLSNMIV

SEQ ID NO: 54048 - protein, 30 aa, Artificial Sequence
  Cyclic GFR-binding peptide
  MOD_RES (4)..(5): Xaa is C or S
PKAXXVPTELEPLTMLYYDENEKVVEQLSN

SEQ ID NO: 54049 - protein, 36 aa, Artificial Sequence; identical to SEQ ID NO: 12344
  Cyclic GFR-binding peptide
  MOD_RES (2)..(34)..(36): Xaa is C or S

SEQ ID NO: 54050 - protein, 24 aa, Artificial Sequence
  Cyclic GFR-binding peptide
KLEPLPVVYYDDSSNVIEQLSNNM

SEQ ID NO: 54051 - protein, 33 aa, Artificial Sequence
  Cyclic GFR-binding peptide
  MOD_RES (4)..(5): Xaa is C or S
PKAXXVPTELEPLPMVYYDENEKVVEQLSNDMV

SEQ ID NO: 54052 - protein, 29 aa, Artificial Sequence
  Cyclic GFR-binding peptide
  MOD_RES (28)..(28): Xaa is C or S
LEPLPVVYYDDSSNVIEQLSNNMVVRAXG

SEQ ID NO: 54053 - protein, 23 aa, Artificial Sequence
  Cyclic GFR-binding peptide
DLEPLPIVYYIGKTPKIEQLSNM

SEQ ID NO: 54054 - protein, 33 aa, Artificial Sequence
  Cyclic GFR-binding peptide
  MOD_RES (5)..(6): Xaa is C or S
TPPTXXVPTRLEPLPIVYYDSANNVVEQLSNDM

SEQ ID NO: 54055 - protein, 32 aa, Artificial Sequence
  Cyclic GFR-binding peptide
  MOD_RES (31)..(31): Xaa is C or S
PTRLEPLTILYYDSANNVVEQLSNDMVVESXG

SEQ ID NO: 54056 - protein, 32 aa, Artificial Sequence
  Cyclic GFR-binding peptide
  MOD_RES (3)..(4): Xaa is C or S
SPXXVSQDLEPLPIVYYIGKTPKIEQLSNMIV

SEQ ID NO: 54057 - protein, 32 aa, Artificial Sequence
  Cyclic GFR-binding peptide
  MOD_RES (29)..(31): Xaa is C or S
QLSPISVLFIDDSSNVIYKQYENMVVRAXGXH

SEQ ID NO: 54058 - protein, 37 aa, Artificial Sequence; identical to SEQ ID NO: 12346
  Cyclic GFR-binding peptide
  MOD_RES (1)..(2)..(34)..(36): Xaa is C or S

SEQ ID NO: 54059 - protein, 31 aa, Artificial Sequence; identical to SEQ ID NO: 12347
  Cyclic GFR-binding peptide
  MOD_RES (1)..(1): Xaa is C or S

SEQ ID NO: 54060 - protein, 37 aa, Artificial Sequence; identical to SEQ ID NO: 12348
  Cyclic GFR-binding peptide
  MOD_RES (2)..(3)..(34)..(36): Xaa is C or S

SEQ ID NO: 54061 - protein, 24 aa, Artificial Sequence
  Cyclic GFR-binding peptide
LEPLPIVYYVGRTPKVEQLSNMVV

SEQ ID NO: 54062 - protein, 27 aa, Artificial Sequence
  Cyclic GFR-binding peptide
VPTELEPLPMVYYDEYDKVVEQLSNEM

SEQ ID NO: 54063 - protein, 37 aa, Artificial Sequence; identical to SEQ ID NO: 12349
  Cyclic GFR-binding peptide
  MOD_RES (3)..(4)..(36): Xaa is C or S

SEQ ID NO: 54064 - protein, 31 aa, Artificial Sequence
  Cyclic GFR-binding peptide
  MOD_RES (1)..(2): Xaa is C or S
XXVPTRLSAISILYLDSANNVVLKNYQDMVV

SEQ ID NO: 54065 - protein, 30 aa, Artificial Sequence; identical to SEQ ID NO: 12350
  Cyclic GFR-binding peptide

SEQ ID NO: 54066 - protein, 36 aa, Artificial Sequence; identical to SEQ ID NO: 12351
  Cyclic GFR-binding peptide
  MOD_RES (1)..(2)..(34)..(36): Xaa is C or S

SEQ ID NO: 54067 - protein, 32 aa, Artificial Sequence
  Cyclic GFR-binding peptide
  MOD_RES (5)..(6): Xaa is C or S
SASPXXVPQDLEPLPIVYYVGRTPKVEQLSNM

SEQ ID NO: 54068 - protein, 37 aa, Artificial Sequence; identical to SEQ ID NO: 12353
  Cyclic GFR-binding peptide
  MOD_RES (3)..(4)..(36): Xaa is C or S

SEQ ID NO: 54069 - protein, 38 aa, Artificial Sequence; identical to SEQ ID NO: 12356
  Cyclic GFR-binding peptide
  MOD_RES (6)..(7)..(38): Xaa is C or S

SEQ ID NO: 54070 - protein, 26 aa, Artificial Sequence
  Cyclic GFR-binding peptide
TELEPLTMLYYDENEKVVEQLSNDMV

SEQ ID NO: 54071 - protein, 28 aa, Artificial Sequence
  Cyclic GFR-binding peptide
  MOD_RES (3)..(3): Xaa is C or S
PTXAPTKLEPLPVVYYDDSSNVIEQLSN

SEQ ID NO: 54072 - protein, 32 aa, Artificial Sequence
  Cyclic GFR-binding peptide
  MOD_RES (3)..(4): Xaa is C or S
KPXXAPTKLSPISVLFIDDSSNVIYKQYENMV

SEQ ID NO: 54073 - protein, 29 aa, Artificial Sequence
  Cyclic GFR-binding peptide
  MOD_RES (26)..(28): Xaa is C or S
EPLTILYYVGRKPKVEQLSNMIVRSXKXS

SEQ ID NO: 54074 - protein, 32 aa, Artificial Sequence
  Cyclic GFR-binding peptide
  MOD_RES (4)..(4): Xaa is C or S
KPTXAPTKLSPISVLFIDDSSNVIYKQYENMV

SEQ ID NO: 54075 - protein, 30 aa, Artificial Sequence
  Cyclic GFR-binding peptide
  MOD_RES (2)..(3): Xaa is C or S
PXXAPTQLEPLPVVYYDDSSNVIEQLSNNM

SEQ ID NO: 54076 - protein, 31 aa, Artificial Sequence; identical to SEQ ID NO: 12358
  Cyclic GFR-binding peptide
  MOD_RES (1)..(1): Xaa is C or S

SEQ ID NO: 54077 - protein, 38 aa, Artificial Sequence; identical to SEQ ID NO: 12359
  Cyclic GFR-binding peptide
  MOD_RES (6)..(7): Xaa is C or S

SEQ ID NO: 54078 - protein, 31 aa, Artificial Sequence
  Cyclic GFR-binding peptide
  MOD_RES (29)..(31): Xaa is C or S
QALSPISILFIVGRKPKVYKQYEMIVRSXKX

SEQ ID NO: 54079 - protein, 27 aa, Artificial Sequence
  Cyclic GFR-binding peptide
  MOD_RES (1)..(2): Xaa is C or S
XXAPTKLEPLPVVYYDDSSNVIEQLSN

SEQ ID NO: 54080 - protein, 36 aa, Artificial Sequence; identical to SEQ ID NO: 12361
  Cyclic GFR-binding peptide
  MOD_RES (3)..(4)..(36): Xaa is C or S

SEQ ID NO: 54081 - protein, 25 aa, Artificial Sequence
  Cyclic GFR-binding peptide
LSPISILFIVGRKPKVYKQYEMIVR

SEQ ID NO: 54082 - protein, 30 aa, Artificial Sequence
  Cyclic GFR-binding peptide
  MOD_RES (29)..(29): Xaa is C or S
ELEPLTMLYYDEYDKVVEQLSNEMVVEGXG

SEQ ID NO: 54083 - protein, 28 aa, Artificial Sequence
  Cyclic GFR-binding peptide
  MOD_RES (2)..(3): Xaa is C or S
TXXVPTRLEPLTILYYDSANNVVEQLSN

SEQ ID NO: 54084 - protein, 35 aa, Artificial Sequence
  Cyclic GFR-binding peptide
  MOD_RES (5)..(6): Xaa is C or S
IPKAXXVPTELEPLPMVYYDEYDKVVEQLSNEMVV

SEQ ID NO: 54085 - protein, 26 aa, Artificial Sequence
  Cyclic GFR-binding peptide
  MOD_RES (1)..(1): Xaa is C or S
XAPTQLEPLTVLYYDDSSNVIEQLSN

SEQ ID NO: 54086 - protein, 24 aa, Artificial Sequence
  Cyclic GFR-binding peptide
LSPISILFIVGRTPKVYKQYEMVV

SEQ ID NO: 54087 - protein, 34 aa, Artificial Sequence
  Cyclic GFR-binding peptide
  MOD_RES (6)..(7): Xaa is C or S
STPPTXXVPTRLEPLTILYYDSANNVVEQLSNDM

SEQ ID NO: 54088 - protein, 31 aa, Artificial Sequence
  Cyclic GFR-binding peptide
  MOD_RES (30)..(30): Xaa is C or S
TELSPISMLFIDENEKVVYKQYEDMVVEGXG

SEQ ID NO: 54089 - protein, 35 aa, Artificial Sequence; identical to SEQ ID NO: 12366
  Cyclic GFR-binding peptide
  MOD_RES (2)..(3)..(34): Xaa is C or S

SEQ ID NO: 54090 - protein, 38 aa, Artificial Sequence; identical to SEQ ID NO: 12365
  Cyclic GFR-binding peptide
  MOD_RES (3)..(4)..(36)..(38): Xaa is C or S

SEQ ID NO: 54091 - protein, 33 aa, Artificial Sequence
  Cyclic GFR-binding peptide
  MOD_RES (3)..(4): Xaa is C or S
KPXXAPTQLEPLTVLYYDDSSNVIEQLSNNMVV

SEQ ID NO: 54092 - protein, 36 aa, Artificial Sequence; identical to SEQ ID NO: 12367
  Cyclic GFR-binding peptide
  MOD_RES (1)..(33)..(35): Xaa is C or S

SEQ ID NO: 54093 - protein, 27 aa, Artificial Sequence
  Cyclic GFR-binding peptide
TRLEPLPIVYYDSANNVVEQLSNDMVV

SEQ ID NO: 54094 - protein, 35 aa, Artificial Sequence
  Cyclic GFR-binding peptide
  MOD_RES (2)..(3)..(35): Xaa is C or S
PXXAPTKLEPLTVLYYDDSSNVIEQLSNNMVVRSX

SEQ ID NO: 54095 - protein, 27 aa, Artificial Sequence
  Cyclic GFR-binding peptide
  MOD_RES (1)..(1): Xaa is C or S
XVPTELSPISMLFIDENEKVVYKQYED

SEQ ID NO: 54096 - protein, 33 aa, Artificial Sequence
  Cyclic GFR-binding peptide
  MOD_RES (4)..(4): Xaa is C or S
KPTXAPTKLSPISVLFIDDSSNVIYKQYENMVV

SEQ ID NO: 54097 - protein, 33 aa, Artificial Sequence; identical to SEQ ID NO: 12372
  Cyclic GFR-binding peptide
  MOD_RES (1)..(2): Xaa is C or S

SEQ ID NO: 54098 - protein, 30 aa, Artificial Sequence
  Cyclic GFR-binding peptide
  MOD_RES (1)..(1): Xaa is C or S
XVPTELSPISMLFIDENEKVVYKQYEDMVV

SEQ ID NO: 54099 - protein, 23 aa, Artificial Sequence
  Cyclic GFR-binding peptide
EPLTILYYDSANNVVEQLSNDMV

SEQ ID NO: 54100 - protein, 30 aa, Artificial Sequence
  Cyclic GFR-binding peptide
  MOD_RES (28)..(30): Xaa is C or S
DLSPISILFIVGRTPKVYKQYEMVVKSXKX

SEQ ID NO: 54101 - protein, 31 aa, Artificial Sequence
  Cyclic GFR-binding peptide
  MOD_RES (4)..(4): Xaa is C or S
KPTXAPTKLSPISVLFIDDSSNVIYKQYENM

SEQ ID NO: 54102 - protein, 31 aa, Artificial Sequence
  Cyclic GFR-binding peptide
  MOD_RES (2)..(3): Xaa is C or S
TXXVPTRLEPLPIVYYDSANNVVEQLSNDMV

SEQ ID NO: 54103 - protein, 36 aa, Artificial Sequence; identical to SEQ ID NO: 12376
  Cyclic GFR-binding peptide
  MOD_RES (3)..(4)..(35): Xaa is C or S

SEQ ID NO: 54104 - protein, 36 aa, Artificial Sequence; identical to SEQ ID NO: 12377
  Cyclic GFR-binding peptide
  MOD_RES (4)..(5): Xaa is C or S

SEQ ID NO: 54105 - protein, 29 aa, Artificial Sequence
  Cyclic GFR-binding peptide
  MOD_RES (2)..(3): Xaa is C or S
PXXVSQDLEPLPIVYYIGKTPKIEQLSNM

SEQ ID NO: 54106 - protein, 27 aa, Artificial Sequence
  Cyclic GFR-binding peptide
LEPLTMLYYDEYDKVVEQLSNEMVVEG

SEQ ID NO: 54107 - protein, 41 aa, Artificial Sequence; identical to SEQ ID NO: 12380
  Cyclic GFR-binding peptide
  MOD_RES (6)..(7)..(38)..(40): Xaa is C or S

SEQ ID NO: 54108 - protein, 29 aa, Artificial Sequence
  Cyclic GFR-binding peptide
  MOD_RES (3)..(4): Xaa is C or S
SPXXVPQDLEPLPIVYYVGRTPKVEQLSN

SEQ ID NO: 54109 - protein, 34 aa, Artificial Sequence; identical to SEQ ID NO: 12383
  Cyclic GFR-binding peptide
  MOD_RES (1)..(2)..(34): Xaa is C or S

SEQ ID NO: 54110 - protein, 41 aa, Artificial Sequence; identical to SEQ ID NO: 12384
  Cyclic GFR-binding peptide
  MOD_RES (5)..(6)..(38)..(40): Xaa is C or S

SEQ ID NO: 54111 - protein, 23 aa, Artificial Sequence
  Cyclic GFR-binding peptide
LEPLPMVYYDEYDKVVEQLSNEM

SEQ ID NO: 54112 - protein, 33 aa, Artificial Sequence
  Cyclic GFR-binding peptide
  MOD_RES (31)..(33): Xaa is C or S
PTELEPLPMVYYDENEKVVEQLSNDMVVEGXGX

SEQ ID NO: 54113 - protein, 29 aa, Artificial Sequence
  Cyclic GFR-binding peptide
  MOD_RES (1)..(2): Xaa is C or S
XXVPQALEPLTILYYVGRKPKVEQLSNMI

SEQ ID NO: 54114 - protein, 37 aa, Artificial Sequence; identical to SEQ ID NO: 12386
  Cyclic GFR-binding peptide
  MOD_RES (1)..(2)..(34)..(36): Xaa is C or S

SEQ ID NO: 54115 - protein, 29 aa, Artificial Sequence
  Cyclic GFR-binding peptide
TRLNAISILYFDSANNVVLKKYRDMVVES

SEQ ID NO: 54116 - protein, 36 aa, Artificial Sequence; identical to SEQ ID NO: 12387
  Cyclic GFR-binding peptide
  MOD_RES (4)..(5): Xaa is C or S

SEQ ID NO: 54117 - protein, 30 aa, Artificial Sequence
  Cyclic GFR-binding peptide
  MOD_RES (2)..(3): Xaa is C or S
PXXVPQDLEPLPIVYYVGRTPKVEQLSNMV

SEQ ID NO: 54118 - protein, 29 aa, Artificial Sequence
  Cyclic GFR-binding peptide
TKLEPLTVLYYDDSSNVIEQLSNNMVVRS

SEQ ID NO: 54119 - protein, 38 aa, Artificial Sequence; identical to SEQ ID NO: 12390
  Cyclic GFR-binding peptide
  MOD_RES (6)..(7): Xaa is C or S

SEQ ID NO: 54120 - protein, 35 aa, Artificial Sequence
  Cyclic GFR-binding peptide
  MOD_RES (5)..(6): Xaa is C or S
SASPXXVPQDLSPISILFIVGRTPKVYKQYEMVVK

SEQ ID NO: 54121 - protein, 32 aa, Artificial Sequence; identical to SEQ ID NO: 12391
  Cyclic GFR-binding peptide
  MOD_RES (1)..(1): Xaa is C or S

SEQ ID NO: 54122 - protein, 29 aa, Artificial Sequence
  Cyclic GFR-binding peptide
TELSPISMLFIDEYDKVVYKQYEEMVVEG

SEQ ID NO: 54123 - protein, 26 aa, Artificial Sequence
  Cyclic GFR-binding peptide
PTELEPLPMVYYDEYDKVVEQLSNEM

SEQ ID NO: 54124 - protein, 38 aa, Artificial Sequence; identical to SEQ ID NO: 12393
  Cyclic GFR-binding peptide
  MOD_RES (3)..(35)..(37): Xaa is C or S

SEQ ID NO: 54125 - protein, 27 aa, Artificial Sequence
  Cyclic GFR-binding peptide
PTELEPLPMVYYDENEKVVEQLSNDMV

SEQ ID NO: 54126 - protein, 36 aa, Artificial Sequence; identical to SEQ ID NO: 12397
  Cyclic GFR-binding peptide
  MOD_RES (5)..(6): Xaa is C or S

SEQ ID NO: 54127 - protein, 29 aa, Artificial Sequence
  Cyclic GFR-binding peptide
TQLEPLPVVYYDDSSNVIEQLSNNMVVRA

SEQ ID NO: 54128 - protein, 21 aa, Artificial Sequence
  Cyclic GFR-binding peptide
EPLTMLYYDEYDKVVEQLSNE

SEQ ID NO: 54129 - protein, 28 aa, Artificial Sequence
  Cyclic GFR-binding peptide
  MOD_RES (27)..(27): Xaa is C or S
SPISVLFIDDSSNVIYKQYENMVVRAXG

SEQ ID NO: 54130 - protein, 26 aa, Artificial Sequence
  Cyclic GFR-binding peptide
PTQLSPISVLFIDDSSNVIYKQYENM

SEQ ID NO: 54131 - protein, 29 aa, Artificial Sequence
  Cyclic GFR-binding peptide
  MOD_RES (29)..(29): Xaa is C or S
RLEPLTILYYDSANNVVEQLSNDMVVESX

SEQ ID NO: 54132 - protein, 40 aa, Artificial Sequence; identical to SEQ ID NO: 12400
  Cyclic GFR-binding peptide
  MOD_RES (6)..(7)..(38)..(40): Xaa is C or S

SEQ ID NO: 54133 - protein, 34 aa, Artificial Sequence
  Cyclic GFR-binding peptide
  MOD_RES (5)..(6): Xaa is C or S
SASPXXVPQDLEPLPIVYYVGRTPKVEQLSNMVV

SEQ ID NO: 54134 - protein, 31 aa, Artificial Sequence; identical to SEQ ID NO: 12401
  Cyclic GFR-binding peptide

SEQ ID NO: 54135 - protein, 26 aa, Artificial Sequence
  Cyclic GFR-binding peptide
NAISILYFDSANNVVLKKYRDMVVES

SEQ ID NO: 54136 - protein, 33 aa, Artificial Sequence; identical to SEQ ID NO: 12402
  Cyclic GFR-binding peptide
  MOD_RES (1)..(32): Xaa is C or S

SEQ ID NO: 54137 - protein, 30 aa, Artificial Sequence
  Cyclic GFR-binding peptide
  MOD_RES (2)..(3): Xaa is C or S
TXXVPTRLEPLTILYYDSANNVVEQLSNDM

SEQ ID NO: 54138 - protein, 36 aa, Artificial Sequence; identical to SEQ ID NO: 12404
  Cyclic GFR-binding peptide
  MOD_RES (2)..(34)..(36): Xaa is C or S

SEQ ID NO: 54139 - protein, 33 aa, Artificial Sequence
  Cyclic GFR-binding peptide
  MOD_RES (30)..(32): Xaa is C or S
PQALSPISILFIVGRKPKVYKQYEMIVRSXKXS

SEQ ID NO: 54140 - protein, 38 aa, Artificial Sequence; identical to SEQ ID NO: 12406
  Cyclic GFR-binding peptide
  MOD_RES (3)..(4)..(36)..(38): Xaa is C or S

SEQ ID NO: 54141 - protein, 26 aa, Artificial Sequence
  Cyclic GFR-binding peptide
  MOD_RES (26)..(26): Xaa is C or S
SPISILFIVGRKPKVYKQYEMIVRSX

SEQ ID NO: 54142 - protein, 32 aa, Artificial Sequence; identical to SEQ ID NO: 12407
  Cyclic GFR-binding peptide
  MOD_RES (1)..(2): Xaa is C or S

SEQ ID NO: 54143 - protein, 29 aa, Artificial Sequence
  Cyclic GFR-binding peptide
  MOD_RES (1)..(2): Xaa is C or S
XXAPTQLSPISVLFIDDSSNVIYKQYENM

SEQ ID NO: 54144 - protein, 24 aa, Artificial Sequence
  Cyclic GFR-binding peptide
PTKLEPLPVVYYDDSSNVIEQLSN

SEQ ID NO: 54145 - protein, 26 aa, Artificial Sequence
  Cyclic GFR-binding peptide
VPTELEPLPMVYYDENEKVVEQLSND

SEQ ID NO: 54146 - protein, 28 aa, Artificial Sequence
  Cyclic GFR-binding peptide
  MOD_RES (28)..(28): Xaa is C or S
DLSPISILFIIGKTPKIYKQYEMIVKSX

SEQ ID NO: 54147 - protein, 28 aa, Artificial Sequence
  Cyclic GFR-binding peptide
  MOD_RES (1)..(1): Xaa is C or S
XVSQDLSPISILFIIGKTPKIYKQYEMI

SEQ ID NO: 54148 - protein, 38 aa, Artificial Sequence; identical to SEQ ID NO: 12408
  Cyclic GFR-binding peptide
  MOD_RES (3)..(4)..(35)..(37): Xaa is C or S

SEQ ID NO: 54149 - protein, 38 aa, Artificial Sequence; identical to SEQ ID NO: 12409
  Cyclic GFR-binding peptide
  MOD_RES (6)..(7): Xaa is C or S

SEQ ID NO: 54150 - protein, 35 aa, Artificial Sequence; identical to SEQ ID NO: 12410
  Cyclic GFR-binding peptide
  MOD_RES (2)..(3)..(34): Xaa is C or S

SEQ ID NO: 54151 - protein, 22 aa, Artificial Sequence
  Cyclic GFR-binding peptide
EPLPMVYYDENEKVVEQLSNDM

SEQ ID NO: 54152 - protein, 30 aa, Artificial Sequence
  Cyclic GFR-binding peptide
  MOD_RES (29)..(29): Xaa is C or S
KLEPLTVLYYDDSSNVIEQLSNNMVVRSXG

SEQ ID NO: 54153 - protein, 27 aa, Artificial Sequence
  Cyclic GFR-binding peptide
  MOD_RES (1)..(1): Xaa is C or S
XAPTQLEPLTVLYYDDSSNVIEQLSNN

SEQ ID NO: 54154 - protein, 34 aa, Artificial Sequence
  Cyclic GFR-binding peptide
  MOD_RES (7)..(7): Xaa is C or S
HVTKPTXAPTKLSPISVLFIDDSSNVIYKQYENM

SEQ ID NO: 54155 - protein, 37 aa, Artificial Sequence; identical to SEQ ID NO: 12411
  Cyclic GFR-binding peptide
  MOD_RES (6)..(6): Xaa is C or S

SEQ ID NO: 54156 - protein, 35 aa, Artificial Sequence; identical to SEQ ID NO: 12412
  Cyclic GFR-binding peptide
  MOD_RES (4)..(5): Xaa is C or S

SEQ ID NO: 54157 - protein, 34 aa, Artificial Sequence
  Cyclic GFR-binding peptide
  MOD_RES (6)..(7): Xaa is C or S
KIPKAXXVPTELSPISMLFIDENEKVVYKQYEDM

SEQ ID NO: 54158 - protein, 41 aa, Artificial Sequence; identical to SEQ ID NO: 12413
  Cyclic GFR-binding peptide
  MOD_RES (5)..(6)..(38)..(40): Xaa is C or S

SEQ ID NO: 54159 - protein, 28 aa, Artificial Sequence
  Cyclic GFR-binding peptide
  MOD_RES (26)..(28): Xaa is C or S
EPLPIVYYIGKTPKIEQLSNMIVKSXKX

SEQ ID NO: 54160 - protein, 22 aa, Artificial Sequence
  Cyclic GFR-binding peptide
SPISILFIVGRKPKVYKQYEMI

SEQ ID NO: 54161 - protein, 33 aa, Artificial Sequence
  Cyclic GFR-binding peptide
  MOD_RES (31)..(33): Xaa is C or S
PTELEPLTMLYYDEYDKVVEQLSNEMVVEGXGX

SEQ ID NO: 54162 - protein, 28 aa, Artificial Sequence
  Cyclic GFR-binding peptide
  MOD_RES (26)..(28): Xaa is C or S
SPISILFIIGKTPKIYKQYEMIVKSXKX

SEQ ID NO: 54163 - protein, 28 aa, Artificial Sequence
  Cyclic GFR-binding peptide
  MOD_RES (27)..(27): Xaa is C or S
EPLPMVYYDEYDKVVEQLSNEMVVEGXG

SEQ ID NO: 54164 - protein, 40 aa, Artificial Sequence; identical to SEQ ID NO: 12415
  Cyclic GFR-binding peptide
  MOD_RES (6)..(7)..(39): Xaa is C or S

SEQ ID NO: 54165 - protein, 27 aa, Artificial Sequence
  Cyclic GFR-binding peptide
QDLEPLPIVYYVGRTPKVEQLSNMVVK

SEQ ID NO: 54166 - protein, 28 aa, Artificial Sequence
  Cyclic GFR-binding peptide
  MOD_RES (1)..(1): Xaa is C or S
XVPQDLEPLPIVYYVGRTPKVEQLSNMV

SEQ ID NO: 54167 - protein, 40 aa, Artificial Sequence; identical to SEQ ID NO: 12418
  Cyclic GFR-binding peptide
  MOD_RES (6)..(7)..(39): Xaa is C or S

SEQ ID NO: 54168 - protein, 28 aa, Artificial Sequence
  Cyclic GFR-binding peptide
PTKLSPISVLFIDDSSNVIYKQYENMVV

SEQ ID NO: 54169 - protein, 33 aa, Artificial Sequence; identical to SEQ ID NO: 12419
  Cyclic GFR-binding peptide
  MOD_RES (1)..(2): Xaa is C or S

SEQ ID NO: 54170 - protein, 31 aa, Artificial Sequence
  Cyclic GFR-binding peptide
  MOD_RES (3)..(4): Xaa is C or S
KPXXAPTKLEPLPVVYYDDSSNVIEQLSNNM

SEQ ID NO: 54171 - protein, 28 aa, Artificial Sequence
  Cyclic GFR-binding peptide
  MOD_RES (1)..(2): Xaa is C or S
XXAPTQLSPISVLFIDDSSNVIYKQYEN

SEQ ID NO: 54172 - protein, 33 aa, Artificial Sequence
  Cyclic GFR-binding peptide
  MOD_RES (3)..(4): Xaa is C or S
SPXXVPQDLSPISILFIVGRTPKVYKQYEMVVK

SEQ ID NO: 54173 - protein, 24 aa, Artificial Sequence
  Cyclic GFR-binding peptide
LEPLTMLYYDEYDKVVEQLSNEMV

SEQ ID NO: 54174 - protein, 39 aa, Artificial Sequence; identical to SEQ ID NO: 12422
  Cyclic GFR-binding peptide
  MOD_RES (6)..(7)..(38): Xaa is C or S

SEQ ID NO: 54175 - protein, 21 aa, Artificial Sequence
  Cyclic GFR-binding peptide
SAISILYLDSANNVVLKNYQD

SEQ ID NO: 54176 - protein, 31 aa, Artificial Sequence
  Cyclic GFR-binding peptide
  MOD_RES (5)..(6): Xaa is C or S
SASPXXVSQDLSPISILFIIGKTPKIYKQYE

SEQ ID NO: 54177 - protein, 28 aa, Artificial Sequence
  Cyclic GFR-binding peptide
PTQLEPLPVVYYDDSSNVIEQLSNNMVV

SEQ ID NO: 54178 - protein, 35 aa, Artificial Sequence; identical to SEQ ID NO: 12427
  Cyclic GFR-binding peptide
  MOD_RES (3)..(4): Xaa is C or S

SEQ ID NO: 54179 - protein, 29 aa, Artificial Sequence
  Cyclic GFR-binding peptide
  MOD_RES (2)..(2): Xaa is C or S
TXAPTKLEPLPVVYYDDSSNVIEQLSNNM

SEQ ID NO: 54180 - protein, 25 aa, Artificial Sequence
  Cyclic GFR-binding peptide
LEPLPIVYYVGRTPKVEQLSNMVVK

SEQ ID NO: 54181 - protein, 30 aa, Artificial Sequence
  Cyclic GFR-binding peptide
  MOD_RES (3)..(4): Xaa is C or S
PTXXVPTRLSAISILYLDSANNVVLKNYQD

SEQ ID NO: 54182 - protein, 27 aa, Artificial Sequence
  Cyclic GFR-binding peptide
VPTRLNAISILYFDSANNVVLKKYRDM

SEQ ID NO: 54183 - protein, 36 aa, Artificial Sequence; identical to SEQ ID NO: 12429
  Cyclic GFR-binding peptide
  MOD_RES (1)..(33)..(35): Xaa is C or S

SEQ ID NO: 54184 - protein, 29 aa, Artificial Sequence
  Cyclic GFR-binding peptide
APTQLEPLTVLYYDDSSNVIEQLSNNMVV

SEQ ID NO: 54185 - protein, 37 aa, Artificial Sequence; identical to SEQ ID NO: 12430
  Cyclic GFR-binding peptide
  MOD_RES (2)..(3)..(35)..(37): Xaa is C or S

SEQ ID NO: 54186 - protein, 29 aa, Artificial Sequence
  Cyclic GFR-binding peptide
PQDLEPLPIVYYVGRTPKVEQLSNMVVKS

SEQ ID NO: 54187 - protein, 34 aa, Artificial Sequence
  Cyclic GFR-binding peptide
  MOD_RES (4)..(5): Xaa is C or S
PKAXXVPTELSPISMLFIDENEKVVYKQYEDMVV

SEQ ID NO: 54188 - protein, 32 aa, Artificial Sequence
  Cyclic GFR-binding peptide
  MOD_RES (4)..(5): Xaa is C or S
PKAXXVPTELEPLTMLYYDEYDKVVEQLSNEM

SEQ ID NO: 54189 - protein, 35 aa, Artificial Sequence; identical to SEQ ID NO: 12432
  Cyclic GFR-binding peptide
  MOD_RES (4)..(4): Xaa is C or S

SEQ ID NO: 54190 - protein, 36 aa, Artificial Sequence; identical to SEQ ID NO: 12434
  Cyclic GFR-binding peptide
  MOD_RES (1)..(33)..(35): Xaa is C or S

SEQ ID NO: 54191 - protein, 30 aa, Artificial Sequence
  Cyclic GFR-binding peptide
  MOD_RES (29)..(29): Xaa is C or S
QLEPLPVVYYDDSSNVIEQLSNNMVVRAXG

SEQ ID NO: 54192 - protein, 31 aa, Artificial Sequence
  Cyclic GFR-binding peptide
  MOD_RES (3)..(4): Xaa is C or S
KAXXVPTELSPISMLFIDENEKVVYKQYEDM

SEQ ID NO: 54193 - protein, 30 aa, Artificial Sequence
  Cyclic GFR-binding peptide
  MOD_RES (3)..(4): Xaa is C or S
KPXXAPTQLSPISVLFIDDSSNVIYKQYEN

SEQ ID NO: 54194 - protein, 34 aa, Artificial Sequence
  Cyclic GFR-binding peptide
  MOD_RES (4)..(5): Xaa is C or S
AAPXXVPQALEPLTILYYVGRKPKVEQLSNMIVR

SEQ ID NO: 54195 - protein, 34 aa, Artificial Sequence
  Cyclic GFR-binding peptide
  MOD_RES (5)..(6): Xaa is C or S
TPPTXXVPTRLNAISILYFDSANNVVLKKYRDMV

SEQ ID NO: 54196 - protein, 29 aa, Artificial Sequence
  Cyclic GFR-binding peptide
  MOD_RES (1)..(2): Xaa is C or S
XXVPQDLSPISILFIVGRTPKVYKQYEMV

SEQ ID NO: 54197 - protein, 23 aa, Artificial Sequence
  Cyclic GFR-binding peptide
NAISILYFDSANNVVLKKYRDMV

SEQ ID NO: 54198 - protein, 32 aa, Artificial Sequence
  Cyclic GFR-binding peptide
  MOD_RES (3)..(4): Xaa is C or S
APXXVPQALEPLTILYYVGRKPKVEQLSNMIV

SEQ ID NO: 54199 - protein, 31 aa, Artificial Sequence
  Cyclic GFR-binding peptide
  MOD_RES (6)..(6): Xaa is C or S
VTKPTXAPTKLEPLPVVYYDDSSNVIEQLSN

SEQ ID NO: 54200 - protein, 25 aa, Artificial Sequence
  Cyclic GFR-binding peptide
KLEPLPVVYYDDSSNVIEQLSNNMV

SEQ ID NO: 54201 - protein, 30 aa, Artificial Sequence
  Cyclic GFR-binding peptide
  MOD_RES (28)..(30): Xaa is C or S
DLEPLPIVYYVGRTPKVEQLSNMVVKSXKX

SEQ ID NO: 54202 - protein, 36 aa, Artificial Sequence; identical to SEQ ID NO: 12438
  Cyclic GFR-binding peptide
  MOD_RES (3)..(35): Xaa is C or S

SEQ ID NO: 54203 - protein, 39 aa, Artificial Sequence; identical to SEQ ID NO: 12439
  Cyclic GFR-binding peptide
  MOD_RES (5)..(37)..(39): Xaa is C or S

SEQ ID NO: 54204 - protein, 34 aa, Artificial Sequence; identical to SEQ ID NO: 12440
  Cyclic GFR-binding peptide
  MOD_RES (3)..(4): Xaa is C or S

SEQ ID NO: 54205 - protein, 24 aa, Artificial Sequence
  Cyclic GFR-binding peptide
ELEPLTMLYYDEYDKVVEQLSNEM

SEQ ID NO: 54206 - protein, 30 aa, Artificial Sequence
  Cyclic GFR-binding peptide
  MOD_RES (4)..(5): Xaa is C or S
PPTXXVPTRLNAISILYFDSANNVVLKKYR

SEQ ID NO: 54207 - protein, 36 aa, Artificial Sequence
  Cyclic GFR-binding peptide
  MOD_RES (6)..(7): Xaa is C or S
STPPTXXVPTRLNAISILYFDSANNVVLKKYRDMVV

SEQ ID NO: 54208 - protein, 32 aa, Artificial Sequence
  Cyclic GFR-binding peptide
  MOD_RES (5)..(6): Xaa is C or S
VPKPXXAPTQLSPISVLFIDDSSNVIYKQYEN

SEQ ID NO: 54209 - protein, 29 aa, Artificial Sequence
  Cyclic GFR-binding peptide
  MOD_RES (3)..(4): Xaa is C or S
KAXXVPTELSPISMLFIDENEKVVYKQYE

SEQ ID NO: 54210 - protein, 29 aa, Artificial Sequence
  Cyclic GFR-binding peptide
  MOD_RES (27)..(29): Xaa is C or S
LSPISILFIIGKTPKIYKQYEMIVKSXKX

SEQ ID NO: 54211 - protein, 33 aa, Artificial Sequence; identical to SEQ ID NO: 12444
  Cyclic GFR-binding peptide
  MOD_RES (1)..(2)..(33): Xaa is C or S

SEQ ID NO: 54212 - protein, 33 aa, Artificial Sequence; identical to SEQ ID NO: 12445
  Cyclic GFR-binding peptide
  MOD_RES (2)..(3): Xaa is C or S

SEQ ID NO: 54213 - protein, 26 aa, Artificial Sequence
  Cyclic GFR-binding peptide
VPTELSPISMLFIDENEKVVYKQYED

SEQ ID NO: 54214 - protein, 28 aa, Artificial Sequence
  Cyclic GFR-binding peptide
  MOD_RES (2)..(3): Xaa is C or S
PXXAPTKLEPLTVLYYDDSSNVIEQLSN

SEQ ID NO: 54215 - protein, 29 aa, Artificial Sequence
  Cyclic GFR-binding peptide
VPTELSPISMLFIDENEKVVYKQYEDMVV

SEQ ID NO: 54216 - protein, 30 aa, Artificial Sequence
  Cyclic GFR-binding peptide
  MOD_RES (1)..(2): Xaa is C or S
XXVPTELEPLPMVYYDENEKVVEQLSNDMV

SEQ ID NO: 54217 - protein, 40 aa, Artificial Sequence; identical to SEQ ID NO: 12446
  Cyclic GFR-binding peptide
  MOD_RES (6)..(38)..(40): Xaa is C or S

SEQ ID NO: 54218 - protein, 38 aa, Artificial Sequence; identical to SEQ ID NO: 12447
  Cyclic GFR-binding peptide
  MOD_RES (5)..(6)..(38): Xaa is C or S

SEQ ID NO: 54219 - protein, 35 aa, Artificial Sequence
  Cyclic GFR-binding peptide
  MOD_RES (6)..(7): Xaa is C or S
KIPKAXXVPTELEPLPMVYYDENEKVVEQLSNDMV

SEQ ID NO: 54220 - protein, 28 aa, Artificial Sequence
  Cyclic GFR-binding peptide
VPTELSPISMLFIDEYDKVVYKQYEEMV

SEQ ID NO: 54221 - protein, 29 aa, Artificial Sequence
  Cyclic GFR-binding peptide
  MOD_RES (1)..(2): Xaa is C or S
XXVSQDLSPISILFIIGKTPKIYKQYEMI

SEQ ID NO: 54222 - protein, 36 aa, Artificial Sequence; identical to SEQ ID NO: 12449
  Cyclic GFR-binding peptide
  MOD_RES (4)..(5): Xaa is C or S

SEQ ID NO: 54223 - protein, 31 aa, Artificial Sequence
  Cyclic GFR-binding peptide
  MOD_RES (2)..(2): Xaa is C or S
TXAPTKLEPLTVLYYDDSSNVIEQLSNNMVV

SEQ ID NO: 54224 - protein, 25 aa, Artificial Sequence
  Cyclic GFR-binding peptide
LEPLTILYYDSANNVVEQLSNDMVV

SEQ ID NO: 54225 - protein, 30 aa, Artificial Sequence
  Cyclic GFR-binding peptide
  MOD_RES (28)..(30): Xaa is C or S
LSPISVLFIDDSSNVIYKQYENMVVRAXGX

SEQ ID NO: 54226 - protein, 27 aa, Artificial Sequence
  Cyclic GFR-binding peptide
  MOD_RES (27)..(27): Xaa is C or S
EPLTMLYYDEYDKVVEQLSNEMVVEGX

SEQ ID NO: 54227 - protein, 38 aa, Artificial Sequence; identical to SEQ ID NO: 12452
  Cyclic GFR-binding peptide
  MOD_RES (4)..(5)..(37): Xaa is C or S

SEQ ID NO: 54228 - protein, 22 aa, Artificial Sequence
  Cyclic GFR-binding peptide
EPLPVVYYDDSSNVIEQLSNNM

SEQ ID NO: 54229 - protein, 41 aa, Artificial Sequence; identical to SEQ ID NO: 12453
  Cyclic GFR-binding peptide
  MOD_RES (6)..(7)..(38)..(40): Xaa is C or S

SEQ ID NO: 54230 - protein, 34 aa, Artificial Sequence
  Cyclic GFR-binding peptide
  MOD_RES (6)..(7): Xaa is C or S
TVPKPXXAPTQLEPLPVVYYDDSSNVIEQLSNNM

SEQ ID NO: 54231 - protein, 33 aa, Artificial Sequence; identical to SEQ ID NO: 12454
  Cyclic GFR-binding peptide
  MOD_RES (1)..(32): Xaa is C or S

SEQ ID NO: 54232 - protein, 31 aa, Artificial Sequence
  Cyclic GFR-binding peptide
  MOD_RES (4)..(5): Xaa is C or S
PPTXXVPTRLEPLPIVYYDSANNVVEQLSND

SEQ ID NO: 54233 - protein, 30 aa, Artificial Sequence
  Cyclic GFR-binding peptide
  MOD_RES (27)..(29): Xaa is C or S
EPLTILYYDSANNVVEQLSNDMVVESXGXR

SEQ ID NO: 54234 - protein, 30 aa, Artificial Sequence; identical to SEQ ID NO: 12456
  Cyclic GFR-binding peptide

SEQ ID NO: 54235 - protein, 39 aa, Artificial Sequence; identical to SEQ ID NO: 12457
  Cyclic GFR-binding peptide
  MOD_RES (5)..(6)..(37)..(39): Xaa is C or S

SEQ ID NO: 54236 - protein, 41 aa, Artificial Sequence; identical to SEQ ID NO: 12459
  Cyclic GFR-binding peptide
  MOD_RES (5)..(6)..(38)..(40): Xaa is C or S

SEQ ID NO: 54237 - protein, 34 aa, Artificial Sequence
  Cyclic GFR-binding peptide
  MOD_RES (5)..(6): Xaa is C or S
VPKPXXAPTKLEPLTVLYYDDSSNVIEQLSNNMV

SEQ ID NO: 54238 - protein, 33 aa, Artificial Sequence
  Cyclic GFR-binding peptide
  MOD_RES (31)..(33): Xaa is C or S
PTELSPISMLFIDENEKVVYKQYEDMVVEGXGX

SEQ ID NO: 54239 - protein, 32 aa, Artificial Sequence
  Cyclic GFR-binding peptide
  MOD_RES (5)..(6): Xaa is C or S
SASPXXVPQDLSPISILFIVGRTPKVYKQYEM

SEQ ID NO: 54240 - protein, 36 aa, Artificial Sequence; identical to SEQ ID NO: 12463
  Cyclic GFR-binding peptide
  MOD_RES (1)..(2)..(34)..(36): Xaa is C or S

SEQ ID NO: 54241 - protein, 36 aa, Artificial Sequence; identical to SEQ ID NO: 12464
  Cyclic GFR-binding peptide
  MOD_RES (5)..(6): Xaa is C or S

SEQ ID NO: 54242 - protein, 28 aa, Artificial Sequence
  Cyclic GFR-binding peptide
  MOD_RES (1)..(2): Xaa is C or S
XXAPTQLEPLPVVYYDDSSNVIEQLSNN

SEQ ID NO: 54243 - protein, 28 aa, Artificial Sequence
  Cyclic GFR-binding peptide
  MOD_RES (2)..(3): Xaa is C or S
PXXAPTKLSPISVLFIDDSSNVIYKQYE

SEQ ID NO: 54244 - protein, 32 aa, Artificial Sequence
  Cyclic GFR-binding peptide
  MOD_RES (30)..(32): Xaa is C or S
TELEPLTMLYYDENEKVVEQLSNDMVVEGXGX

SEQ ID NO: 54245 - protein, 27 aa, Artificial Sequence
  Cyclic GFR-binding peptide
DLEPLPIVYYVGRTPKVEQLSNMVVKS

SEQ ID NO: 54246 - protein, 23 aa, Artificial Sequence
  Cyclic GFR-binding peptide
SAISILYLDSANNVVLKNYQDMV

SEQ ID NO: 54247 - protein, 36 aa, Artificial Sequence; identical to SEQ ID NO: 12465
  Cyclic GFR-binding peptide
  MOD_RES (5)..(6): Xaa is C or S

SEQ ID NO: 54248 - protein, 34 aa, Artificial Sequence; identical to SEQ ID NO: 12467
  Cyclic GFR-binding peptide
  MOD_RES (1)..(33): Xaa is C or S

SEQ ID NO: 54249 - protein, 31 aa, Artificial Sequence
  Cyclic GFR-binding peptide
  MOD_RES (31)..(31): Xaa is C or S
PTKLEPLPVVYYDDSSNVIEQLSNNMVVRSX

SEQ ID NO: 54250 - protein, 34 aa, Artificial Sequence; identical to SEQ ID NO: 12468
  Cyclic GFR-binding peptide
  MOD_RES (1)..(33): Xaa is C or S

SEQ ID NO: 54251 - protein, 36 aa, Artificial Sequence; identical to SEQ ID NO: 12469
  Cyclic GFR-binding peptide
  MOD_RES (4)..(5)..(36): Xaa is C or S

SEQ ID NO: 54252 - protein, 32 aa, Artificial Sequence
  Cyclic GFR-binding peptide
  MOD_RES (5)..(6): Xaa is C or S
IPKAXXVPTELEPLTMLYYDEYDKVVEQLSNE

SEQ ID NO: 54253 - protein, 20 aa, Artificial Sequence
  Cyclic GFR-binding peptide
SPISILFIVGRTPKVYKQYE

SEQ ID NO: 54254 - protein, 35 aa, Artificial Sequence; identical to SEQ ID NO: 12472
  Cyclic GFR-binding peptide
  MOD_RES (1)..(32)..(34): Xaa is C or S

SEQ ID NO: 54255 - protein, 27 aa, Artificial Sequence
  Cyclic GFR-binding peptide
  MOD_RES (1)..(1): Xaa is C or S
XVPQDLSPISILFIVGRTPKVYKQYEM

SEQ ID NO: 54256 - protein, 29 aa, Artificial Sequence
  Cyclic GFR-binding peptide
  MOD_RES (1)..(1): Xaa is C or S
XAPTKLEPLTVLYYDDSSNVIEQLSNNMV

SEQ ID NO: 54257 - protein, 27 aa, Artificial Sequence
  Cyclic GFR-binding peptide
  MOD_RES (27)..(27): Xaa is C or S
EPLTVLYYDDSSNVIEQLSNNMVVRSX

SEQ ID NO: 54258 - protein, 34 aa, Artificial Sequence; identical to SEQ ID NO: 12474
  Cyclic GFR-binding peptide
  MOD_RES (3)..(4): Xaa is C or S

SEQ ID NO: 54259 - protein, 31 aa, Artificial Sequence
  Cyclic GFR-binding peptide
  MOD_RES (1)..(2): Xaa is C or S
XXAPTKLEPLTVLYYDDSSNVIEQLSNNMVV

SEQ ID NO: 54260 - protein, 39 aa, Artificial Sequence; identical to SEQ ID NO: 12478
  Cyclic GFR-binding peptide
  MOD_RES (5)..(6)..(38): Xaa is C or S

SEQ ID NO: 54261 - protein, 33 aa, Artificial Sequence
  Cyclic GFR-binding peptide
  MOD_RES (6)..(7): Xaa is C or S
KIPKAXXVPTELEPLTMLYYDENEKVVEQLSND

SEQ ID NO: 54262 - protein, 25 aa, Artificial Sequence
  Cyclic GFR-binding peptide
PTQLEPLTVLYYDDSSNVIEQLSNN

SEQ ID NO: 54263 - protein, 35 aa, Artificial Sequence; identical to SEQ ID NO: 12479
  Cyclic GFR-binding peptide
  MOD_RES (1)..(2)..(34): Xaa is C or S

SEQ ID NO: 54264 - protein, 34 aa, Artificial Sequence; identical to SEQ ID NO: 12481
  Cyclic GFR-binding peptide
  MOD_RES (1)..(2)..(33): Xaa is C or S

SEQ ID NO: 54265 - protein, 26 aa, Artificial Sequence
  Cyclic GFR-binding peptide
LSPISMLFIDEYDKVVYKQYEEMVVE

SEQ ID NO: 54266 - protein, 28 aa, Artificial Sequence
  Cyclic GFR-binding peptide
  MOD_RES (27)..(27): Xaa is C or S
LSPISILFIIGKTPKIYKQYEMIVKSXK

SEQ ID NO: 54267 - protein, 21 aa, Artificial Sequence
  Cyclic GFR-binding peptide
SPISVLFIDDSSNVIYKQYEN

SEQ ID NO: 54268 - protein, 26 aa, Artificial Sequence
  Cyclic GFR-binding peptide
DLSPISILFIVGRTPKVYKQYEMVVK

SEQ ID NO: 54269 - protein, 35 aa, Artificial Sequence
  Cyclic GFR-binding peptide
  MOD_RES (5)..(6): Xaa is C or S
IPKAXXVPTELEPLTMLYYDEYDKVVEQLSNEMVV

SEQ ID NO: 54270 - protein, 31 aa, Artificial Sequence
  Cyclic GFR-binding peptide
  MOD_RES (1)..(2): Xaa is C or S
XXVPTELEPLPMVYYDENEKVVEQLSNDMVV

SEQ ID NO: 54271 - protein, 28 aa, Artificial Sequence
  Cyclic GFR-binding peptide
APTQLEPLTVLYYDDSSNVIEQLSNNMV

SEQ ID NO: 54272 - protein, 34 aa, Artificial Sequence; identical to SEQ ID NO: 12483
  Cyclic GFR-binding peptide
  MOD_RES (3)..(4): Xaa is C or S

SEQ ID NO: 54273 - protein, 29 aa, Artificial Sequence
  Cyclic GFR-binding peptide
  MOD_RES (29)..(29): Xaa is C or S
ELEPLPMVYYDEYDKVVEQLSNEMVVEGX

SEQ ID NO: 54274 - protein, 33 aa, Artificial Sequence; identical to SEQ ID NO: 12484
  Cyclic GFR-binding peptide
  MOD_RES (1)..(2): Xaa is C or S

SEQ ID NO: 54275 - protein, 27 aa, Artificial Sequence
  Cyclic GFR-binding peptide
  MOD_RES (27)..(27): Xaa is C or S
LEPLPIVYYVGRTPKVEQLSNMVVKSX

SEQ ID NO: 54276 - protein, 22 aa, Artificial Sequence
  Cyclic GFR-binding peptide
KLSPISVLFIDDSSNVIYKQYE

SEQ ID NO: 54277 - protein, 32 aa, Artificial Sequence
  Cyclic GFR-binding peptide
  MOD_RES (2)..(3): Xaa is C or S
TXXVPTRLEPLTILYYDSANNVVEQLSNDMVV

SEQ ID NO: 54278 - protein, 25 aa, Artificial Sequence
  Cyclic GFR-binding peptide
ELEPLPMVYYDENEKVVEQLSNDMV

SEQ ID NO: 54279 - protein, 27 aa, Artificial Sequence
  Cyclic GFR-binding peptide
PQDLEPLPIVYYVGRTPKVEQLSNMVV

SEQ ID NO: 54280 - protein, 30 aa, Artificial Sequence
  Cyclic GFR-binding peptide
  MOD_RES (29)..(29): Xaa is C or S
QLSPISVLFIDDSSNVIYKQYENMVVRAXG

SEQ ID NO: 54281 - protein, 30 aa, Artificial Sequence
  Cyclic GFR-binding peptide
  MOD_RES (4)..(5): Xaa is C or S
PKAXXVPTELSPISMLFIDENEKVVYKQYE

SEQ ID NO: 54282 - protein, 33 aa, Artificial Sequence; identical to SEQ ID NO: 12487
  Cyclic GFR-binding peptide
  MOD_RES (1)..(32): Xaa is C or S

SEQ ID NO: 54283 - protein, 31 aa, Artificial Sequence
  Cyclic GFR-binding peptide
  MOD_RES (30)..(30): Xaa is C or S
TELSPISMLFIDEYDKVVYKQYEEMVVEGXG

SEQ ID NO: 54284 - protein, 32 aa, Artificial Sequence
  Cyclic GFR-binding peptide
  MOD_RES (4)..(5): Xaa is C or S
PKPXXAPTQLEPLPVVYYDDSSNVIEQLSNNM

SEQ ID NO: 54285 - protein, 38 aa, Artificial Sequence; identical to SEQ ID NO: 12489
  Cyclic GFR-binding peptide
  MOD_RES (3)..(35)..(37): Xaa is C or S

SEQ ID NO: 54286 - protein, 35 aa, Artificial Sequence; identical to SEQ ID NO: 12490
  Cyclic GFR-binding peptide
  MOD_RES (4)..(4): Xaa is C or S

SEQ ID NO: 54287 - protein, 24 aa, Artificial Sequence
  Cyclic GFR-binding peptide
QLEPLTVLYYDDSSNVIEQLSNNM

SEQ ID NO: 54288 - protein, 35 aa, Artificial Sequence; identical to SEQ ID NO: 12491
  Cyclic GFR-binding peptide
  MOD_RES (1)..(33)..(35): Xaa is C or S

SEQ ID NO: 54289 - protein, 38 aa, Artificial Sequence; identical to SEQ ID NO: 12492
  Cyclic GFR-binding peptide
  MOD_RES (5)..(6)..(37): Xaa is C or S

SEQ ID NO: 54290 - protein, 29 aa, Artificial Sequence
  Cyclic GFR-binding peptide
  MOD_RES (1)..(2): Xaa is C or S
XXVPQDLEPLPIVYYVGRTPKVEQLSNMV

SEQ ID NO: 54291 - protein, 23 aa, Artificial Sequence
  Cyclic GFR-binding peptide
LEPLTVLYYDDSSNVIEQLSNNM

SEQ ID NO: 54292 - protein, 30 aa, Artificial Sequence
  Cyclic GFR-binding peptide
  MOD_RES (27)..(29): Xaa is C or S
EPLPMVYYDENEKVVEQLSNDMVVEGXGXR

SEQ ID NO: 54293 - protein, 31 aa, Artificial Sequence
  Cyclic GFR-binding peptide
  MOD_RES (1)..(2): Xaa is C or S
XXAPTKLEPLPVVYYDDSSNVIEQLSNNMVV

SEQ ID NO: 54294 - protein, 31 aa, Artificial Sequence
  Cyclic GFR-binding peptide
  MOD_RES (30)..(30): Xaa is C or S
TKLSPISVLFIDDSSNVIYKQYENMVVRSXG

SEQ ID NO: 54295 - protein, 22 aa, Artificial Sequence
  Cyclic GFR-binding peptide
LEPLTILYYDSANNVVEQLSND

SEQ ID NO: 54296 - protein, 37 aa, Artificial Sequence; identical to SEQ ID NO: 12495
  Cyclic GFR-binding peptide
  MOD_RES (2)..(3)..(35)..(37): Xaa is C or S

SEQ ID NO: 54297 - protein, 30 aa, Artificial Sequence
  Cyclic GFR-binding peptide
  MOD_RES (1)..(2): Xaa is C or S
XXVPQALSPISILFIVGRKPKVYKQYEMIV

SEQ ID NO: 54298 - protein, 28 aa, Artificial Sequence
  Cyclic GFR-binding peptide
QDLSPISILFIIGKTPKIYKQYEMIVKS

SEQ ID NO: 54299 - protein, 33 aa, Artificial Sequence
  Cyclic GFR-binding peptide
  MOD_RES (6)..(7): Xaa is C or S
KIPKAXXVPTELEPLPMVYYDENEKVVEQLSND

SEQ ID NO: 54300 - protein, 37 aa, Artificial Sequence; identical to SEQ ID NO: 12501
  Cyclic GFR-binding peptide
  MOD_RES (5)..(6)..(37): Xaa is C or S

SEQ ID NO: 54301 - protein, 27 aa, Artificial Sequence
  Cyclic GFR-binding peptide
  MOD_RES (27)..(27): Xaa is C or S
NAISILYFDSANNVVLKKYRDMVVESX

SEQ ID NO: 54302 - protein, 37 aa, Artificial Sequence; identical to SEQ ID NO: 12502
  Cyclic GFR-binding peptide
  MOD_RES (6)..(7): Xaa is C or S

SEQ ID NO: 54303 - protein, 38 aa, Artificial Sequence; identical to SEQ ID NO: 12504
  Cyclic GFR-binding peptide
  MOD_RES (3)..(4)..(36)..(38): Xaa is C or S

SEQ ID NO: 54304 - protein, 22 aa, Artificial Sequence
  Cyclic GFR-binding peptide
LEPLPIVYYVGRTPKVEQLSNM

SEQ ID NO: 54305 - protein, 33 aa, Artificial Sequence
  Cyclic GFR-binding peptide
  MOD_RES (5)..(6): Xaa is C or S
VPKPXXAPTKLEPLTVLYYDDSSNVIEQLSNNM

SEQ ID NO: 54306 - protein, 31 aa, Artificial Sequence
  Cyclic GFR-binding peptide
  MOD_RES (31)..(31): Xaa is C or S
PTELEPLPMVYYDEYDKVVEQLSNEMVVEGX

SEQ ID NO: 54307 - protein, 28 aa, Artificial Sequence
  Cyclic GFR-binding peptide
  MOD_RES (1)..(1): Xaa is C or S
XAPTQLEPLTVLYYDDSSNVIEQLSNNM

SEQ ID NO: 54308 - protein, 32 aa, Artificial Sequence
  Cyclic GFR-binding peptide
  MOD_RES (2)..(3): Xaa is C or S
PXXVPQALEPLTILYYVGRKPKVEQLSNMIVR

SEQ ID NO: 54309 - protein, 36 aa, Artificial Sequence; identical to SEQ ID NO: 12508
  Cyclic GFR-binding peptide
  MOD_RES (4)..(5): Xaa is C or S

SEQ ID NO: 54310 - protein, 32 aa, Artificial Sequence
  Cyclic GFR-binding peptide
  MOD_RES (7)..(7): Xaa is C or S
HVTKPTXAPTKLEPLPVVYYDDSSNVIEQLSN

SEQ ID NO: 54311 - protein, 30 aa, Artificial Sequence
  Cyclic GFR-binding peptide
  MOD_RES (27)..(29): Xaa is C or S
SPISMLFIDEYDKVVYKQYEEMVVEGXGXR

SEQ ID NO: 54312 - protein, 36 aa, Artificial Sequence; identical to SEQ ID NO: 12510
  Cyclic GFR-binding peptide
  MOD_RES (3)..(4)..(36): Xaa is C or S

SEQ ID NO: 54313 - protein, 25 aa, Artificial Sequence
  Cyclic GFR-binding peptide
TRLEPLPIVYYDSANNVVEQLSNDM

SEQ ID NO: 54314 - protein, 38 aa, Artificial Sequence; identical to SEQ ID NO: 12512
  Cyclic GFR-binding peptide
  MOD_RES (5)..(6)..(38): Xaa is C or S

SEQ ID NO: 54315 - protein, 31 aa, Artificial Sequence
  Cyclic GFR-binding peptide
  MOD_RES (28)..(30): Xaa is C or S
LSAISILYLDSANNVVLKNYQDMVVESXGXR

SEQ ID NO: 54316 - protein, 22 aa, Artificial Sequence
  Cyclic GFR-binding peptide
DLSPISILFIVGRTPKVYKQYE

SEQ ID NO: 54317 - protein, 23 aa, Artificial Sequence
  Cyclic GFR-binding peptide
DLSPISILFIIGKTPKIYKQYEM

SEQ ID NO: 54318 - protein, 32 aa, Artificial Sequence; identical to SEQ ID NO: 12518
  Cyclic GFR-binding peptide
  MOD_RES (32)..(32): Xaa is C or S

SEQ ID NO: 54319 - protein, 32 aa, Artificial Sequence
  Cyclic GFR-binding peptide
  MOD_RES (30)..(32): Xaa is C or S
TQLEPLPVVYYDDSSNVIEQLSNNMVVRAXGX

SEQ ID NO: 54320 - protein, 33 aa, Artificial Sequence; identical to SEQ ID NO: 12521
  Cyclic GFR-binding peptide
  MOD_RES (2)..(3): Xaa is C or S

SEQ ID NO: 54321 - protein, 24 aa, Artificial Sequence
  Cyclic GFR-binding peptide
QDLSPISILFIIGKTPKIYKQYEM

SEQ ID NO: 54322 - protein, 32 aa, Artificial Sequence
  Cyclic GFR-binding peptide
  MOD_RES (6)..(7): Xaa is C or S
ASAAPXXVPQALSPISILFIVGRKPKVYKQYE

SEQ ID NO: 54323 - protein, 25 aa, Artificial Sequence
  Cyclic GFR-binding peptide
LEPLPMVYYDEYDKVVEQLSNEMVV

SEQ ID NO: 54324 - protein, 29 aa, Artificial Sequence
  Cyclic GFR-binding peptide
  MOD_RES (1)..(1): Xaa is C or S
XVPQALSPISILFIVGRKPKVYKQYEMIV

SEQ ID NO: 54325 - protein, 25 aa, Artificial Sequence
  Cyclic GFR-binding peptide
TELSPISMLFIDEYDKVVYKQYEEM

SEQ ID NO: 54326 - protein, 39 aa, Artificial Sequence; identical to SEQ ID NO: 12522
  Cyclic GFR-binding peptide
  MOD_RES (3)..(4)..(36)..(38): Xaa is C or S

SEQ ID NO: 54327 - protein, 34 aa, Artificial Sequence; identical to SEQ ID NO: 12523
  Cyclic GFR-binding peptide
  MOD_RES (3)..(4): Xaa is C or S

SEQ ID NO: 54328 - protein, 36 aa, Artificial Sequence; identical to SEQ ID NO: 12524
  Cyclic GFR-binding peptide
  MOD_RES (3)..(4)..(36): Xaa is C or S

SEQ ID NO: 54329 - protein, 35 aa, Artificial Sequence; identical to SEQ ID NO: 12525
  Cyclic GFR-binding peptide
  MOD_RES (32)..(34): Xaa is C or S

SEQ ID NO: 54330 - protein, 32 aa, Artificial Sequence; identical to SEQ ID NO: 12526
  Cyclic GFR-binding peptide
  MOD_RES (1)..(2): Xaa is C or S

SEQ ID NO: 54331 - protein, 31 aa, Artificial Sequence
  Cyclic GFR-binding peptide
  MOD_RES (3)..(4): Xaa is C or S
KAXXVPTELEPLPMVYYDENEKVVEQLSNDM

SEQ ID NO: 54332 - protein, 35 aa, Artificial Sequence
  Cyclic GFR-binding peptide
  MOD_RES (6)..(7): Xaa is C or S
YVPKPXXAPTKLEPLPVVYYDDSSNVIEQLSNNMV

SEQ ID NO: 54333 - protein, 34 aa, Artificial Sequence; identical to SEQ ID NO: 12527
  Cyclic GFR-binding peptide
  MOD_RES (1)..(2)..(34): Xaa is C or S

SEQ ID NO: 54334 - protein, 30 aa, Artificial Sequence
  Cyclic GFR-binding peptide
  MOD_RES (27)..(29): Xaa is C or S
NAISILYFDSANNVVLKKYRDMVVESXGXR

SEQ ID NO: 54335 - protein, 31 aa, Artificial Sequence; identical to SEQ ID NO: 12528
  Cyclic GFR-binding peptide
  MOD_RES (1)..(1): Xaa is C or S

SEQ ID NO: 54336 - protein, 28 aa, Artificial Sequence
  Cyclic GFR-binding peptide
RLEPLPIVYYDSANNVVEQLSNDMVVES

SEQ ID NO: 54337 - protein, 34 aa, Artificial Sequence; identical to SEQ ID NO: 12529
  Cyclic GFR-binding peptide
  MOD_RES (4)..(4): Xaa is C or S

SEQ ID NO: 54338 - protein, 35 aa, Artificial Sequence
  Cyclic GFR-binding peptide
  MOD_RES (6)..(7): Xaa is C or S
STPPTXXVPTRLEPLTILYYDSANNVVEQLSNDMV

SEQ ID NO: 54339 - protein, 35 aa, Artificial Sequence; identical to SEQ ID NO: 12530
  Cyclic GFR-binding peptide
  MOD_RES (2)..(3)..(35): Xaa is C or S

SEQ ID NO: 54340 - protein, 39 aa, Artificial Sequence; identical to SEQ ID NO: 12532
  Cyclic GFR-binding peptide
  MOD_RES (4)..(5)..(37)..(39): Xaa is C or S

SEQ ID NO: 54341 - protein, 32 aa, Artificial Sequence
  Cyclic GFR-binding peptide
  MOD_RES (2)..(3): Xaa is C or S
PXXAPTQLEPLPVVYYDDSSNVIEQLSNNMVV

SEQ ID NO: 54342 - protein, 32 aa, Artificial Sequence
  Cyclic GFR-binding peptide
  MOD_RES (5)..(6): Xaa is C or S
IPKAXXVPTELEPLPMVYYDEYDKVVEQLSNE

SEQ ID NO: 54343 - protein, 28 aa, Artificial Sequence
  Cyclic GFR-binding peptide
  MOD_RES (28)..(28): Xaa is C or S
LSAISILYLDSANNVVLKNYQDMVVESX

SEQ ID NO: 54344 - protein, 34 aa, Artificial Sequence
  Cyclic GFR-binding peptide
  MOD_RES (4)..(5): Xaa is C or S
PKAXXVPTELEPLPMVYYDENEKVVEQLSNDMVV

SEQ ID NO: 54345 - protein, 26 aa, Artificial Sequence
  Cyclic GFR-binding peptide
QLEPLTVLYYDDSSNVIEQLSNNMVV

SEQ ID NO: 54346 - protein, 29 aa, Artificial Sequence
  Cyclic GFR-binding peptide
  MOD_RES (1)..(1): Xaa is C or S
XVPTELEPLTMLYYDENEKVVEQLSNDMV

SEQ ID NO: 54347 - protein, 37 aa, Artificial Sequence; identical to SEQ ID NO: 12537
  Cyclic GFR-binding peptide
  MOD_RES (1)..(2)..(34)..(36): Xaa is C or S

SEQ ID NO: 54348 - protein, 31 aa, Artificial Sequence
  Cyclic GFR-binding peptide
  MOD_RES (5)..(6): Xaa is C or S
TPPTXXVPTRLEPLPIVYYDSANNVVEQLSN

SEQ ID NO: 54349 - protein, 37 aa, Artificial Sequence; identical to SEQ ID NO: 12538
  Cyclic GFR-binding peptide
  MOD_RES (3)..(4)..(36): Xaa is C or S

SEQ ID NO: 54350 - protein, 36 aa, Artificial Sequence; identical to SEQ ID NO: 12539
  Cyclic GFR-binding peptide
  MOD_RES (4)..(5)..(36): Xaa is C or S

SEQ ID NO: 54351 - protein, 29 aa, Artificial Sequence
  Cyclic GFR-binding peptide
  MOD_RES (2)..(3): Xaa is C or S
PXXAPTQLEPLTVLYYDDSSNVIEQLSNN

SEQ ID NO: 54352 - protein, 31 aa, Artificial Sequence
  Cyclic GFR-binding peptide
  MOD_RES (29)..(31): Xaa is C or S
QALEPLTILYYVGRKPKVEQLSNMIVRSXKX

SEQ ID NO: 54353 - protein, 28 aa, Artificial Sequence
  Cyclic GFR-binding peptide
  MOD_RES (1)..(1): Xaa is C or S
XVSQDLEPLPIVYYIGKTPKIEQLSNMI

SEQ ID NO: 54354 - protein, 31 aa, Artificial Sequence
  Cyclic GFR-binding peptide
  MOD_RES (1)..(2): Xaa is C or S
XXVPTELSPISMLFIDENEKVVYKQYEDMVV

SEQ ID NO: 54355 - protein, 36 aa, Artificial Sequence; identical to SEQ ID NO: 12542
  Cyclic GFR-binding peptide
  MOD_RES (4)..(5): Xaa is C or S

SEQ ID NO: 54356 - protein, 34 aa, Artificial Sequence
  Cyclic GFR-binding peptide
  MOD_RES (5)..(5): Xaa is C or S
TKPTXAPTKLEPLTVLYYDDSSNVIEQLSNNMVV

SEQ ID NO: 54357 - protein, 30 aa, Artificial Sequence
  Cyclic GFR-binding peptide
  MOD_RES (1)..(2): Xaa is C or S
XXAPTKLEPLPVVYYDDSSNVIEQLSNNMV

SEQ ID NO: 54358 - protein, 34 aa, Artificial Sequence; identical to SEQ ID NO: 12543
  Cyclic GFR-binding peptide
  MOD_RES (3)..(4): Xaa is C or S

SEQ ID NO: 54359 - protein, 20 aa, Artificial Sequence
  Cyclic GFR-binding peptide
EPLTMLYYDENEKVVEQLSN

SEQ ID NO: 54360 - protein, 34 aa, Artificial Sequence; identical to SEQ ID NO: 12545
  Cyclic GFR-binding peptide
  MOD_RES (3)..(4): Xaa is C or S

SEQ ID NO: 54361 - protein, 32 aa, Artificial Sequence
  Cyclic GFR-binding peptide
  MOD_RES (29)..(31): Xaa is C or S
QLEPLPVVYYDDSSNVIEQLSNNMVVRAXGXH

SEQ ID NO: 54362 - protein, 33 aa, Artificial Sequence; identical to SEQ ID NO: 12547
  Cyclic GFR-binding peptide
  MOD_RES (1)..(33): Xaa is C or S

SEQ ID NO: 54363 - protein, 36 aa, Artificial Sequence; identical to SEQ ID NO: 12548
  Cyclic GFR-binding peptide
  MOD_RES (3)..(4)..(36): Xaa is C or S

SEQ ID NO: 54364 - protein, 34 aa, Artificial Sequence; identical to SEQ ID NO: 12549
  Cyclic GFR-binding peptide
  MOD_RES (3)..(4): Xaa is C or S

SEQ ID NO: 54365 - protein, 36 aa, Artificial Sequence; identical to SEQ ID NO: 12550
  Cyclic GFR-binding peptide
  MOD_RES (5)..(6): Xaa is C or S

SEQ ID NO: 54366 - protein, 28 aa, Artificial Sequence
  Cyclic GFR-binding peptide
  MOD_RES (1)..(2): Xaa is C or S
XXAPTKLEPLPVVYYDDSSNVIEQLSNN

SEQ ID NO: 54367 - protein, 36 aa, Artificial Sequence; identical to SEQ ID NO: 12552
  Cyclic GFR-binding peptide
  MOD_RES (2)..(3)..(35): Xaa is C or S

SEQ ID NO: 54368 - protein, 39 aa, Artificial Sequence; identical to SEQ ID NO: 12556
  Cyclic GFR-binding peptide
  MOD_RES (6)..(7)..(39): Xaa is C or S

SEQ ID NO: 54369 - protein, 41 aa, Artificial Sequence; identical to SEQ ID NO: 12558
  Cyclic GFR-binding peptide
  MOD_RES (6)..(7)..(38)..(40): Xaa is C or S

SEQ ID NO: 54370 - protein, 39 aa, Artificial Sequence; identical to SEQ ID NO: 12559
  Cyclic GFR-binding peptide
  MOD_RES (4)..(5)..(36)..(38): Xaa is C or S

SEQ ID NO: 54371 - protein, 39 aa, Artificial Sequence; identical to SEQ ID NO: 12560
  Cyclic GFR-binding peptide
  MOD_RES (6)..(7)..(39): Xaa is C or S

SEQ ID NO: 54372 - protein, 24 aa, Artificial Sequence
  Cyclic GFR-binding peptide
LSPISILFIIGKTPKIYKQYEMIV

SEQ ID NO: 54373 - protein, 23 aa, Artificial Sequence
  Cyclic GFR-binding peptide
LSPISILFIVGRKPKVYKQYEMI

SEQ ID NO: 54374 - protein, 31 aa, Artificial Sequence
  Cyclic GFR-binding peptide
  MOD_RES (4)..(5): Xaa is C or S
ASPXXVPQDLSPISILFIVGRTPKVYKQYEM

SEQ ID NO: 54375 - protein, 37 aa, Artificial Sequence; identical to SEQ ID NO: 12562
  Cyclic GFR-binding peptide
  MOD_RES (3)..(4)..(36): Xaa is C or S

SEQ ID NO: 54376 - protein, 37 aa, Artificial Sequence; identical to SEQ ID NO: 12563
  Cyclic GFR-binding peptide
  MOD_RES (6)..(7): Xaa is C or S

SEQ ID NO: 54377 - protein, 31 aa, Artificial Sequence
  Cyclic GFR-binding peptide
  MOD_RES (3)..(4): Xaa is C or S
PTXXVPTRLNAISILYFDSANNVVLKKYRDM

SEQ ID NO: 54378 - protein, 32 aa, Artificial Sequence; identical to SEQ ID NO: 12565
  Cyclic GFR-binding peptide
  MOD_RES (1)..(1): Xaa is C or S

SEQ ID NO: 54379 - protein, 39 aa, Artificial Sequence; identical to SEQ ID NO: 12566
  Cyclic GFR-binding peptide
  MOD_RES (4)..(5)..(37)..(39): Xaa is C or S

SEQ ID NO: 54380 - protein, 22 aa, Artificial Sequence
  Cyclic GFR-binding peptide
LSPISILFIVGRKPKVYKQYEM

SEQ ID NO: 54381 - protein, 36 aa, Artificial Sequence
  Cyclic GFR-binding peptide
  MOD_RES (6)..(7): Xaa is C or S
ASASPXXVSQDLEPLPIVYYIGKTPKIEQLSNMIVK

SEQ ID NO: 54382 - protein, 26 aa, Artificial Sequence
  Cyclic GFR-binding peptide
TKLEPLTVLYYDDSSNVIEQLSNNMV

SEQ ID NO: 54383 - protein, 42 aa, Artificial Sequence; identical to SEQ ID NO: 12568
  Cyclic GFR-binding peptide
  MOD_RES (6)..(7)..(39)..(41): Xaa is C or S

SEQ ID NO: 54384 - protein, 32 aa, Artificial Sequence; identical to SEQ ID NO: 12570
  Cyclic GFR-binding peptide
  MOD_RES (32)..(32): Xaa is C or S

SEQ ID NO: 54385 - protein, 38 aa, Artificial Sequence; identical to SEQ ID NO: 12571
  Cyclic GFR-binding peptide
  MOD_RES (2)..(3)..(35)..(37): Xaa is C or S

SEQ ID NO: 54386 - protein, 28 aa, Artificial Sequence
  Cyclic GFR-binding peptide
QLSPISVLFIDDSSNVIYKQYENMVVRA

SEQ ID NO: 54387 - protein, 30 aa, Artificial Sequence
  Cyclic GFR-binding peptide
  MOD_RES (4)..(5): Xaa is C or S
PKAXXVPTELEPLTMLYYDEYDKVVEQLSN

SEQ ID NO: 54388 - protein, 35 aa, Artificial Sequence; identical to SEQ ID NO: 12576
  Cyclic GFR-binding peptide
  MOD_RES (1)..(2)..(34): Xaa is C or S

SEQ ID NO: 54389 - protein, 26 aa, Artificial Sequence
  Cyclic GFR-binding peptide
SPISVLFIDDSSNVIYKQYENMVVRS

SEQ ID NO: 54390 - protein, 33 aa, Artificial Sequence; identical to SEQ ID NO: 12578
  Cyclic GFR-binding peptide
  MOD_RES (2)..(2): Xaa is C or S

SEQ ID NO: 54391 - protein, 39 aa, Artificial Sequence; identical to SEQ ID NO: 12579
  Cyclic GFR-binding peptide
  MOD_RES (6)..(7)..(38): Xaa is C or S

SEQ ID NO: 54392 - protein, 31 aa, Artificial Sequence
  Cyclic GFR-binding peptide
  MOD_RES (5)..(6): Xaa is C or S
IPKAXXVPTELEPLTMLYYDEYDKVVEQLSN

SEQ ID NO: 54393 - protein, 28 aa, Artificial Sequence
  Cyclic GFR-binding peptide
TELSPISMLFIDEYDKVVYKQYEEMVVE

SEQ ID NO: 54394 - protein, 34 aa, Artificial Sequence; identical to SEQ ID NO: 12580
  Cyclic GFR-binding peptide
  MOD_RES (31)..(33): Xaa is C or S

SEQ ID NO: 54395 - protein, 29 aa, Artificial Sequence
  Cyclic GFR-binding peptide
  MOD_RES (29)..(29): Xaa is C or S
RLSAISILYLDSANNVVLKNYQDMVVESX

SEQ ID NO: 54396 - protein, 39 aa, Artificial Sequence; identical to SEQ ID NO: 12581
  Cyclic GFR-binding peptide
  MOD_RES (3)..(4)..(36)..(38): Xaa is C or S

SEQ ID NO: 54397 - protein, 24 aa, Artificial Sequence
  Cyclic GFR-binding peptide
PQDLSPISILFIVGRTPKVYKQYE

SEQ ID NO: 54398 - protein, 30 aa, Artificial Sequence
  Cyclic GFR-binding peptide
  MOD_RES (1)..(1): Xaa is C or S
XAPTQLEPLPVVYYDDSSNVIEQLSNNMVV

SEQ ID NO: 54399 - protein, 36 aa, Artificial Sequence; identical to SEQ ID NO: 12583
  Cyclic GFR-binding peptide
  MOD_RES (2)..(3)..(34)..(36): Xaa is C or S

SEQ ID NO: 54400 - protein, 36 aa, Artificial Sequence
  Cyclic GFR-binding peptide
  MOD_RES (6)..(7): Xaa is C or S
ASAAPXXVPQALEPLTILYYVGRKPKVEQLSNMIVR

SEQ ID NO: 54401 - protein, 31 aa, Artificial Sequence
  Cyclic GFR-binding peptide
  MOD_RES (29)..(31): Xaa is C or S
ELEPLPMVYYDEYDKVVEQLSNEMVVEGXGX

SEQ ID NO: 54402 - protein, 28 aa, Artificial Sequence
  Cyclic GFR-binding peptide
  MOD_RES (2)..(3): Xaa is C or S
PXXAPTQLSPISVLFIDDSSNVIYKQYE

SEQ ID NO: 54403 - protein, 27 aa, Artificial Sequence
  Cyclic GFR-binding peptide
PTKLSPISVLFIDDSSNVIYKQYENMV

SEQ ID NO: 54404 - protein, 38 aa, Artificial Sequence; identical to SEQ ID NO: 12585
  Cyclic GFR-binding peptide
  MOD_RES (5)..(6)..(38): Xaa is C or S

SEQ ID NO: 54405 - protein, 37 aa, Artificial Sequence; identical to SEQ ID NO: 12587
  Cyclic GFR-binding peptide
  MOD_RES (4)..(5)..(37): Xaa is C or S

SEQ ID NO: 54406 - protein, 35 aa, Artificial Sequence; identical to SEQ ID NO: 12588
  Cyclic GFR-binding peptide
  MOD_RES (3)..(4)..(35): Xaa is C or S

SEQ ID NO: 54407 - protein, 35 aa, Artificial Sequence; identical to SEQ ID NO: 12589
  Cyclic GFR-binding peptide
  MOD_RES (4)..(5): Xaa is C or S

SEQ ID NO: 54408 - protein, 32 aa, Artificial Sequence; identical to SEQ ID NO: 12590
  Cyclic GFR-binding peptide
  MOD_RES (1)..(32): Xaa is C or S

SEQ ID NO: 54409 - protein, 34 aa, Artificial Sequence
  Cyclic GFR-binding peptide
  MOD_RES (4)..(5): Xaa is C or S
ASPXXVSQDLEPLPIVYYIGKTPKIEQLSNMIVK

SEQ ID NO: 54410 - protein, 30 aa, Artificial Sequence
  Cyclic GFR-binding peptide
  MOD_RES (1)..(2): Xaa is C or S
XXVPQDLEPLPIVYYVGRTPKVEQLSNMVV

SEQ ID NO: 54411 - protein, 36 aa, Artificial Sequence; identical to SEQ ID NO: 12591
  Cyclic GFR-binding peptide
  MOD_RES (2)..(3)..(34)..(36): Xaa is C or S

SEQ ID NO: 54412 - protein, 23 aa, Artificial Sequence
  Cyclic GFR-binding peptide
KLSPISVLFIDDSSNVIYKQYEN

SEQ ID NO: 54413 - protein, 31 aa, Artificial Sequence; identical to SEQ ID NO: 12592
  Cyclic GFR-binding peptide
  MOD_RES (31)..(31): Xaa is C or S

SEQ ID NO: 54414 - protein, 37 aa, Artificial Sequence; identical to SEQ ID NO: 12593
  Cyclic GFR-binding peptide
  MOD_RES (2)..(3)..(35)..(37): Xaa is C or S

SEQ ID NO: 54415 - protein, 31 aa, Artificial Sequence
  Cyclic GFR-binding peptide
  MOD_RES (31)..(31): Xaa is C or S
PTQLEPLPVVYYDDSSNVIEQLSNNMVVRAX

SEQ ID NO: 54416 - protein, 40 aa, Artificial Sequence; identical to SEQ ID NO: 12594
  Cyclic GFR-binding peptide
  MOD_RES (4)..(5)..(37)..(39): Xaa is C or S

SEQ ID NO: 54417 - protein, 26 aa, Artificial Sequence
  Cyclic GFR-binding peptide
SPISVLFIDDSSNVIYKQYENMVVRA

SEQ ID NO: 54418 - protein, 33 aa, Artificial Sequence
  Cyclic GFR-binding peptide
  MOD_RES (31)..(33): Xaa is C or S
PTQLSPISVLFIDDSSNVIYKQYENMVVRAXGX

SEQ ID NO: 54419 - protein, 41 aa, Artificial Sequence
  Cyclic GFR-binding peptide
  MOD_RES (5)..(6)..(38)..(40): Xaa is C or S
VPKPXXAPTQLEPLTVLYYDDSSNVIEQLSNNMVVRAXGXH

SEQ ID NO: 54420 - protein, 32 aa, Artificial Sequence
  Cyclic GFR-binding peptide
  MOD_RES (2)..(3): Xaa is C or S
AXXVPTELSPISMLFIDEYDKVVYKQYEEMVV

SEQ ID NO: 54421 - protein, 29 aa, Artificial Sequence
  Cyclic GFR-binding peptide
  MOD_RES (29)..(29): Xaa is C or S
KLSPISVLFIDDSSNVIYKQYENMVVRSX

SEQ ID NO: 54422 - protein, 30 aa, Artificial Sequence
  Cyclic GFR-binding peptide
  MOD_RES (1)..(2): Xaa is C or S
XXVPTRLEPLPIVYYDSANNVVEQLSNDMV

SEQ ID NO: 54423 - protein, 35 aa, Artificial Sequence; identical to SEQ ID NO: 12597
  Cyclic GFR-binding peptide
  MOD_RES (3)..(4): Xaa is C or S

SEQ ID NO: 54424 - protein, 21 aa, Artificial Sequence
  Cyclic GFR-binding peptide
EPLPMVYYDEYDKVVEQLSNE

SEQ ID NO: 54425 - protein, 28 aa, Artificial Sequence
  Cyclic GFR-binding peptide
  MOD_RES (1)..(1): Xaa is C or S
XVPQALEPLTILYYVGRKPKVEQLSNMI

SEQ ID NO: 54426 - protein, 40 aa, Artificial Sequence; identical to SEQ ID NO: 12599
  Cyclic GFR-binding peptide
  MOD_RES (4)..(5)..(37)..(39): Xaa is C or S

SEQ ID NO: 54427 - protein, 38 aa, Artificial Sequence; identical to SEQ ID NO: 12600
  Cyclic GFR-binding peptide
  MOD_RES (2)..(3)..(35)..(37): Xaa is C or S

SEQ ID NO: 54428 - protein, 29 aa, Artificial Sequence
  Cyclic GFR-binding peptide
  MOD_RES (3)..(4): Xaa is C or S
KAXXVPTELEPLTMLYYDEYDKVVEQLSN

SEQ ID NO: 54429 - protein, 36 aa, Artificial Sequence; identical to SEQ ID NO: 12604
  Cyclic GFR-binding peptide
  MOD_RES (3)..(4)..(36): Xaa is C or S

SEQ ID NO: 54430 - protein, 34 aa, Artificial Sequence
  Cyclic GFR-binding peptide
  MOD_RES (6)..(7): Xaa is C or S
SIPKAXXVPTELEPLPMVYYDEYDKVVEQLSNEM

SEQ ID NO: 54431 - protein, 40 aa, Artificial Sequence; identical to SEQ ID NO: 12606
  Cyclic GFR-binding peptide
  MOD_RES (4)..(5)..(37)..(39): Xaa is C or S

SEQ ID NO: 54432 - protein, 35 aa, Artificial Sequence; identical to SEQ ID NO: 12607
  Cyclic GFR-binding peptide
  MOD_RES (1)..(2)..(34): Xaa is C or S

SEQ ID NO: 54433 - protein, 29 aa, Artificial Sequence
  Cyclic GFR-binding peptide
  MOD_RES (28)..(28): Xaa is C or S
LEPLTILYYDSANNVVEQLSNDMVVESXG

SEQ ID NO: 54434 - protein, 25 aa, Artificial Sequence
  Cyclic GFR-binding peptide
SPISMLFIDEYDKVVYKQYEEMVVE

SEQ ID NO: 54435 - protein, 39 aa, Artificial Sequence; identical to SEQ ID NO: 12608
  Cyclic GFR-binding peptide
  MOD_RES (4)..(5)..(37)..(39): Xaa is C or S

SEQ ID NO: 54436 - protein, 28 aa, Artificial Sequence
  Cyclic GFR-binding peptide
  MOD_RES (1)..(1): Xaa is C or S
XVPTELEPLPMVYYDENEKVVEQLSNDM

SEQ ID NO: 54437 - protein, 32 aa, Artificial Sequence
  Cyclic GFR-binding peptide
  MOD_RES (30)..(32): Xaa is C or S
TKLEPLPVVYYDDSSNVIEQLSNNMVVRSXGX

SEQ ID NO: 54438 - protein, 37 aa, Artificial Sequence; identical to SEQ ID NO: 12610
  Cyclic GFR-binding peptide
  MOD_RES (5)..(6): Xaa is C or S

SEQ ID NO: 54439 - protein, 29 aa, Artificial Sequence
  Cyclic GFR-binding peptide
  MOD_RES (1)..(2): Xaa is C or S
XXVPTRLEPLTILYYDSANNVVEQLSNDM

SEQ ID NO: 54440 - protein, 28 aa, Artificial Sequence
  Cyclic GFR-binding peptide
PTQLSPISVLFIDDSSNVIYKQYENMVV

SEQ ID NO: 54441 - protein, 25 aa, Artificial Sequence
  Cyclic GFR-binding peptide
DLSPISILFIIGKTPKIYKQYEMIV

SEQ ID NO: 54442 - protein, 27 aa, Artificial Sequence
  Cyclic GFR-binding peptide
APTKLEPLPVVYYDDSSNVIEQLSNNM

SEQ ID NO: 54443 - protein, 29 aa, Artificial Sequence
  Cyclic GFR-binding peptide
  MOD_RES (28)..(28): Xaa is C or S
LSPISVLFIDDSSNVIYKQYENMVVRAXG

SEQ ID NO: 54444 - protein, 32 aa, Artificial Sequence; identical to SEQ ID NO: 12615
  Cyclic GFR-binding peptide
  MOD_RES (1)..(2): Xaa is C or S

SEQ ID NO: 54445 - protein, 32 aa, Artificial Sequence; identical to SEQ ID NO: 12616
  Cyclic GFR-binding peptide
  MOD_RES (31)..(31): Xaa is C or S

SEQ ID NO: 54446 - protein, 36 aa, Artificial Sequence; identical to SEQ ID NO: 12617
  Cyclic GFR-binding peptide
  MOD_RES (2)..(3)..(34)..(36): Xaa is C or S

SEQ ID NO: 54447 - protein, 29 aa, Artificial Sequence
  Cyclic GFR-binding peptide
  MOD_RES (26)..(28): Xaa is C or S
SPISILFIIGKTPKIYKQYEMIVKSXKXS

SEQ ID NO: 54448 - protein, 39 aa, Artificial Sequence; identical to SEQ ID NO: 12619
  Cyclic GFR-binding peptide
  MOD_RES (6)..(7)..(39): Xaa is C or S

SEQ ID NO: 54449 - protein, 27 aa, Artificial Sequence
  Cyclic GFR-binding peptide
  MOD_RES (1)..(2): Xaa is C or S
XXAPTQLEPLPVVYYDDSSNVIEQLSN

SEQ ID NO: 54450 - protein, 40 aa, Artificial Sequence; identical to SEQ ID NO: 12621
  Cyclic GFR-binding peptide
  MOD_RES (5)..(6)..(37)..(39): Xaa is C or S

SEQ ID NO: 54451 - protein, 39 aa, Artificial Sequence; identical to SEQ ID NO: 12622
  Cyclic GFR-binding peptide
  MOD_RES (4)..(5)..(36)..(38): Xaa is C or S

SEQ ID NO: 54452 - protein, 30 aa, Artificial Sequence; identical to SEQ ID NO: 1044
  Cyclic GFR-binding peptide

SEQ ID NO: 54453 - protein, 35 aa, Artificial Sequence
  Cyclic GFR-binding peptide
  MOD_RES (6)..(7): Xaa is C or S
ASAAPXXVPQALEPLTILYYVGRKPKVEQLSNMIV

SEQ ID NO: 54454 - protein, 29 aa, Artificial Sequence
  Cyclic GFR-binding peptide
  MOD_RES (1)..(2): Xaa is C or S
XXVSQDLEPLPIVYYIGKTPKIEQLSNMI

SEQ ID NO: 54455 - protein, 37 aa, Artificial Sequence; identical to SEQ ID NO: 12630
  Cyclic GFR-binding peptide
  MOD_RES (6)..(7): Xaa is C or S

SEQ ID NO: 54456 - protein, 25 aa, Artificial Sequence
  Cyclic GFR-binding peptide
RLEPLPIVYYDSANNVVEQLSNDMV

SEQ ID NO: 54457 - protein, 35 aa, Artificial Sequence
  Cyclic GFR-binding peptide
  MOD_RES (6)..(7): Xaa is C or S
STPPTXXVPTRLSAISILYLDSANNVVLKNYQDMV

SEQ ID NO: 54458 - protein, 27 aa, Artificial Sequence
  Cyclic GFR-binding peptide
  MOD_RES (27)..(27): Xaa is C or S
EPLPMVYYDENEKVVEQLSNDMVVEGX

SEQ ID NO: 54459 - protein, 32 aa, Artificial Sequence
  Cyclic GFR-binding peptide
  MOD_RES (3)..(4): Xaa is C or S
KPXXAPTKLEPLPVVYYDDSSNVIEQLSNNMV

SEQ ID NO: 54460 - protein, 38 aa, Artificial Sequence; identical to SEQ ID NO: 12633
  Cyclic GFR-binding peptide
  MOD_RES (2)..(3)..(35)..(37): Xaa is C or S

SEQ ID NO: 54461 - protein, 35 aa, Artificial Sequence; identical to SEQ ID NO: 12635
  Cyclic GFR-binding peptide
  MOD_RES (2)..(3)..(35): Xaa is C or S

SEQ ID NO: 54462 - protein, 34 aa, Artificial Sequence; identical to SEQ ID NO: 12636
  Cyclic GFR-binding peptide
  MOD_RES (1)..(33): Xaa is C or S

SEQ ID NO: 54463 - protein, 34 aa, Artificial Sequence; identical to SEQ ID NO: 12638
  Cyclic GFR-binding peptide
  MOD_RES (2)..(3): Xaa is C or S

SEQ ID NO: 54464 - protein, 37 aa, Artificial Sequence; identical to SEQ ID NO: 12640
  Cyclic GFR-binding peptide
  MOD_RES (1)..(2)..(34)..(36): Xaa is C or S

SEQ ID NO: 54465 - protein, 29 aa, Artificial Sequence
  Cyclic GFR-binding peptide
  MOD_RES (3)..(4): Xaa is C or S
PTXXVPTRLNAISILYFDSANNVVLKKYR

SEQ ID NO: 54466 - protein, 32 aa, Artificial Sequence
  Cyclic GFR-binding peptide
  MOD_RES (4)..(4): Xaa is C or S
KPTXAPTKLEPLPVVYYDDSSNVIEQLSNNMV

SEQ ID NO: 54467 - protein, 30 aa, Artificial Sequence; identical to SEQ ID NO: 12645
  Cyclic GFR-binding peptide

SEQ ID NO: 54468 - protein, 31 aa, Artificial Sequence; identical to SEQ ID NO: 12646
  Cyclic GFR-binding peptide
  MOD_RES (31)..(31): Xaa is C or S

SEQ ID NO: 54469 - protein, 35 aa, Artificial Sequence; identical to SEQ ID NO: 12647
  Cyclic GFR-binding peptide
  MOD_RES (1)..(2)..(34): Xaa is C or S

SEQ ID NO: 54470 - protein, 35 aa, Artificial Sequence; identical to SEQ ID NO: 12648
  Cyclic GFR-binding peptide
  MOD_RES (1)..(2)..(34): Xaa is C or S

SEQ ID NO: 54471 - protein, 29 aa, Artificial Sequence
  Cyclic GFR-binding peptide
  MOD_RES (1)..(2): Xaa is C or S
XXVPTELEPLPMVYYDENEKVVEQLSNDM

SEQ ID NO: 54472 - protein, 39 aa, Artificial Sequence; identical to SEQ ID NO: 12649
  Cyclic GFR-binding peptide
  MOD_RES (7)..(39): Xaa is C or S

SEQ ID NO: 54473 - protein, 32 aa, Artificial Sequence
  Cyclic GFR-binding peptide
  MOD_RES (31)..(31): Xaa is C or S
PTRLNAISILYFDSANNVVLKKYRDMVVESXG

SEQ ID NO: 54474 - protein, 22 aa, Artificial Sequence
  Cyclic GFR-binding peptide
SPISILFIIGKTPKIYKQYEMI

SEQ ID NO: 54475 - protein, 34 aa, Artificial Sequence; identical to SEQ ID NO: 12650
  Cyclic GFR-binding peptide
  MOD_RES (1)..(2)..(33): Xaa is C or S

SEQ ID NO: 54476 - protein, 32 aa, Artificial Sequence
  Cyclic GFR-binding peptide
  MOD_RES (31)..(31): Xaa is C or S
PTELEPLTMLYYDENEKVVEQLSNDMVVEGXG

SEQ ID NO: 54477 - protein, 32 aa, Artificial Sequence; identical to SEQ ID NO: 12652
  Cyclic GFR-binding peptide
  MOD_RES (32)..(32): Xaa is C or S

SEQ ID NO: 54478 - protein, 31 aa, Artificial Sequence
  Cyclic GFR-binding peptide
  MOD_RES (4)..(4): Xaa is C or S
KPTXAPTKLEPLTVLYYDDSSNVIEQLSNNM

SEQ ID NO: 54479 - protein, 27 aa, Artificial Sequence
  Cyclic GFR-binding peptide
  MOD_RES (1)..(1): Xaa is C or S
XVSQDLSPISILFIIGKTPKIYKQYEM

SEQ ID NO: 54480 - protein, 34 aa, Artificial Sequence; identical to SEQ ID NO: 12654
  Cyclic GFR-binding peptide
  MOD_RES (1)..(2)..(34): Xaa is C or S

SEQ ID NO: 54481 - protein, 22 aa, Artificial Sequence
  Cyclic GFR-binding peptide
RLEPLPIVYYDSANNVVEQLSN

SEQ ID NO: 54482 - protein, 34 aa, Artificial Sequence
  Cyclic GFR-binding peptide
  MOD_RES (6)..(7): Xaa is C or S
KIPKAXXVPTELEPLTMLYYDENEKVVEQLSNDM

SEQ ID NO: 54483 - protein, 37 aa, Artificial Sequence; identical to SEQ ID NO: 12657
  Cyclic GFR-binding peptide
  MOD_RES (2)..(3)..(35)..(37): Xaa is C or S

SEQ ID NO: 54484 - protein, 22 aa, Artificial Sequence
  Cyclic GFR-binding peptide
ELSPISMLFIDEYDKVVYKQYE

SEQ ID NO: 54485 - protein, 34 aa, Artificial Sequence; identical to SEQ ID NO: 12661
  Cyclic GFR-binding peptide
  MOD_RES (2)..(34): Xaa is C or S

SEQ ID NO: 54486 - protein, 32 aa, Artificial Sequence
  Cyclic GFR-binding peptide
  MOD_RES (3)..(4): Xaa is C or S
KPXXAPTQLEPLTVLYYDDSSNVIEQLSNNMV

SEQ ID NO: 54487 - protein, 34 aa, Artificial Sequence
  Cyclic GFR-binding peptide
  MOD_RES (5)..(6): Xaa is C or S
VPKPXXAPTQLSPISVLFIDDSSNVIYKQYENMV

SEQ ID NO: 54488 - protein, 31 aa, Artificial Sequence
  Cyclic GFR-binding peptide
  MOD_RES (28)..(30): Xaa is C or S
LEPLTVLYYDDSSNVIEQLSNNMVVRSXGXH

SEQ ID NO: 54489 - protein, 29 aa, Artificial Sequence
  Cyclic GFR-binding peptide
  MOD_RES (29)..(29): Xaa is C or S
QALEPLTILYYVGRKPKVEQLSNMIVRSX

SEQ ID NO: 54490 - protein, 27 aa, Artificial Sequence
  Cyclic GFR-binding peptide
APTQLEPLTVLYYDDSSNVIEQLSNNM

SEQ ID NO: 54491 - protein, 32 aa, Artificial Sequence
  Cyclic GFR-binding peptide
  MOD_RES (30)..(32): Xaa is C or S
TKLSPISVLFIDDSSNVIYKQYENMVVRSXGX

SEQ ID NO: 54492 - protein, 26 aa, Artificial Sequence
  Cyclic GFR-binding peptide
KLEPLPVVYYDDSSNVIEQLSNNMVV

SEQ ID NO: 54493 - protein, 32 aa, Artificial Sequence; identical to SEQ ID NO: 12668
  Cyclic GFR-binding peptide
  MOD_RES (1)..(2): Xaa is C or S

SEQ ID NO: 54494 - protein, 31 aa, Artificial Sequence
  Cyclic GFR-binding peptide
  MOD_RES (5)..(6): Xaa is C or S
TPPTXXVPTRLNAISILYFDSANNVVLKKYR

SEQ ID NO: 54495 - protein, 30 aa, Artificial Sequence
  Cyclic GFR-binding peptide
  MOD_RES (4)..(5): Xaa is C or S
ASPXXVPQDLEPLPIVYYVGRTPKVEQLSN

SEQ ID NO: 54496 - protein, 38 aa, Artificial Sequence; identical to SEQ ID NO: 12673
  Cyclic GFR-binding peptide
  MOD_RES (3)..(4)..(36)..(38): Xaa is C or S

SEQ ID NO: 54497 - protein, 39 aa, Artificial Sequence; identical to SEQ ID NO: 12674
  Cyclic GFR-binding peptide
  MOD_RES (4)..(5)..(37)..(39): Xaa is C or S

SEQ ID NO: 54498 - protein, 26 aa, Artificial Sequence
  Cyclic GFR-binding peptide
VSQDLEPLPIVYYIGKTPKIEQLSNM

SEQ ID NO: 54499 - protein, 32 aa, Artificial Sequence; identical to SEQ ID NO: 12675
  Cyclic GFR-binding peptide
  MOD_RES (1)..(1): Xaa is C or S

SEQ ID NO: 54500 - protein, 40 aa, Artificial Sequence; identical to SEQ ID NO: 12676
  Cyclic GFR-binding peptide
  MOD_RES (6)..(7)..(39): Xaa is C or S

SEQ ID NO: 54501 - protein, 26 aa, Artificial Sequence
  Cyclic GFR-binding peptide
QLEPLPVVYYDDSSNVIEQLSNNMVV

SEQ ID NO: 54502 - protein, 35 aa, Artificial Sequence
  Cyclic GFR-binding peptide
  MOD_RES (5)..(6): Xaa is C or S
SAAPXXVPQALSPISILFIVGRKPKVYKQYEMIVR

SEQ ID NO: 54503 - protein, 31 aa, Artificial Sequence
  Cyclic GFR-binding peptide
  MOD_RES (31)..(31): Xaa is C or S
PTELSPISMLFIDENEKVVYKQYEDMVVEGX

SEQ ID NO: 54504 - protein, 32 aa, Artificial Sequence
  Cyclic GFR-binding peptide
  MOD_RES (29)..(31): Xaa is C or S
QLEPLTVLYYDDSSNVIEQLSNNMVVRAXGXH

SEQ ID NO: 54505 - protein, 33 aa, Artificial Sequence; identical to SEQ ID NO: 12681
  Cyclic GFR-binding peptide
  MOD_RES (2)..(3): Xaa is C or S

SEQ ID NO: 54506 - protein, 31 aa, Artificial Sequence
  Cyclic GFR-binding peptide
  MOD_RES (4)..(5): Xaa is C or S
PKPXXAPTQLEPLTVLYYDDSSNVIEQLSNN

SEQ ID NO: 54507 - protein, 26 aa, Artificial Sequence
  Cyclic GFR-binding peptide
QALSPISILFIVGRKPKVYKQYEMIV

SEQ ID NO: 54508 - protein, 37 aa, Artificial Sequence; identical to SEQ ID NO: 12683
  Cyclic GFR-binding peptide
  MOD_RES (2)..(3)..(35)..(37): Xaa is C or S

SEQ ID NO: 54509 - protein, 28 aa, Artificial Sequence
  Cyclic GFR-binding peptide
  MOD_RES (1)..(2): Xaa is C or S
XXAPTKLEPLTVLYYDDSSNVIEQLSNN

SEQ ID NO: 54510 - protein, 39 aa, Artificial Sequence; identical to SEQ ID NO: 12684
  Cyclic GFR-binding peptide
  MOD_RES (5)..(6)..(38): Xaa is C or S

SEQ ID NO: 54511 - protein, 31 aa, Artificial Sequence
  Cyclic GFR-binding peptide
  MOD_RES (2)..(3): Xaa is C or S
PXXAPTQLEPLTVLYYDDSSNVIEQLSNNMV

SEQ ID NO: 54512 - protein, 29 aa, Artificial Sequence
  Cyclic GFR-binding peptide
  MOD_RES (26)..(28): Xaa is C or S
EPLPIVYYIGKTPKIEQLSNMIVKSXKXS

SEQ ID NO: 54513 - protein, 32 aa, Artificial Sequence
  Cyclic GFR-binding peptide
  MOD_RES (2)..(3): Xaa is C or S
PXXVSQDLSPISILFIIGKTPKIYKQYEMIVK

SEQ ID NO: 54514 - protein, 24 aa, Artificial Sequence
  Cyclic GFR-binding peptide
QALEPLTILYYVGRKPKVEQLSNM

SEQ ID NO: 54515 - protein, 28 aa, Artificial Sequence
  Cyclic GFR-binding peptide
  MOD_RES (1)..(2): Xaa is C or S
XXVPTELEPLTMLYYDEYDKVVEQLSNE

SEQ ID NO: 54516 - protein, 33 aa, Artificial Sequence
  Cyclic GFR-binding peptide
  MOD_RES (4)..(5): Xaa is C or S
AAPXXVPQALSPISILFIVGRKPKVYKQYEMIV

SEQ ID NO: 54517 - protein, 38 aa, Artificial Sequence; identical to SEQ ID NO: 12686
  Cyclic GFR-binding peptide
  MOD_RES (2)..(3)..(35)..(37): Xaa is C or S

SEQ ID NO: 54518 - protein, 29 aa, Artificial Sequence
  Cyclic GFR-binding peptide
  MOD_RES (3)..(3): Xaa is C or S
PTXAPTKLEPLTVLYYDDSSNVIEQLSNN

SEQ ID NO: 54519 - protein, 33 aa, Artificial Sequence
  Cyclic GFR-binding peptide
  MOD_RES (3)..(4): Xaa is C or S
KPXXAPTKLEPLTVLYYDDSSNVIEQLSNNMVV

SEQ ID NO: 54520 - protein, 27 aa, Artificial Sequence
  Cyclic GFR-binding peptide
ALSPISILFIVGRKPKVYKQYEMIVRS

SEQ ID NO: 54521 - protein, 31 aa, Artificial Sequence
  Cyclic GFR-binding peptide
  MOD_RES (28)..(30): Xaa is C or S
LEPLTMLYYDENEKVVEQLSNDMVVEGXGXR

SEQ ID NO: 54522 - protein, 33 aa, Artificial Sequence
  Cyclic GFR-binding peptide
  MOD_RES (31)..(33): Xaa is C or S
PTKLEPLTVLYYDDSSNVIEQLSNNMVVRSXGX

SEQ ID NO: 54523 - protein, 38 aa, Artificial Sequence; identical to SEQ ID NO: 12692
  Cyclic GFR-binding peptide
  MOD_RES (5)..(37): Xaa is C or S

SEQ ID NO: 54524 - protein, 32 aa, Artificial Sequence
  Cyclic GFR-binding peptide
  MOD_RES (6)..(7): Xaa is C or S
TVPKPXXAPTQLEPLPVVYYDDSSNVIEQLSN

SEQ ID NO: 54525 - protein, 23 aa, Artificial Sequence
  Cyclic GFR-binding peptide
TRLSAISILYLDSANNVVLKNYQ

SEQ ID NO: 54526 - protein, 28 aa, Artificial Sequence
  Cyclic GFR-binding peptide
  MOD_RES (1)..(2): Xaa is C or S
XXVPTELEPLPMVYYDEYDKVVEQLSNE

SEQ ID NO: 54527 - protein, 29 aa, Artificial Sequence
  Cyclic GFR-binding peptide
PTELEPLTMLYYDENEKVVEQLSNDMVVE

SEQ ID NO: 54528 - protein, 29 aa, Artificial Sequence
  Cyclic GFR-binding peptide
  MOD_RES (28)..(28): Xaa is C or S
LNAISILYFDSANNVVLKKYRDMVVESXG

SEQ ID NO: 54529 - protein, 33 aa, Artificial Sequence; identical to SEQ ID NO: 12694
  Cyclic GFR-binding peptide
  MOD_RES (32)..(32): Xaa is C or S

SEQ ID NO: 54530 - protein, 33 aa, Artificial Sequence
  Cyclic GFR-binding peptide
  MOD_RES (4)..(5): Xaa is C or S
PPTXXVPTRLEPLPIVYYDSANNVVEQLSNDMV

SEQ ID NO: 54531 - protein, 32 aa, Artificial Sequence; identical to SEQ ID NO: 12695
  Cyclic GFR-binding peptide
  MOD_RES (32)..(32): Xaa is C or S

SEQ ID NO: 54532 - protein, 35 aa, Artificial Sequence
  Cyclic GFR-binding peptide
  MOD_RES (5)..(6): Xaa is C or S
TPPTXXVPTRLEPLTILYYDSANNVVEQLSNDMVV

SEQ ID NO: 54533 - protein, 38 aa, Artificial Sequence; identical to SEQ ID NO: 12697
  Cyclic GFR-binding peptide
  MOD_RES (4)..(5)..(37): Xaa is C or S

SEQ ID NO: 54534 - protein, 35 aa, Artificial Sequence; identical to SEQ ID NO: 12699
  Cyclic GFR-binding peptide
  MOD_RES (3)..(35): Xaa is C or S

SEQ ID NO: 54535 - protein, 30 aa, Artificial Sequence
  Cyclic GFR-binding peptide
PTELEPLPMVYYDEYDKVVEQLSNEMVVEG

SEQ ID NO: 54536 - protein, 33 aa, Artificial Sequence; identical to SEQ ID NO: 12700
  Cyclic GFR-binding peptide
  MOD_RES (2)..(3): Xaa is C or S

SEQ ID NO: 54537 - protein, 32 aa, Artificial Sequence
  Cyclic GFR-binding peptide
  MOD_RES (30)..(32): Xaa is C or S
TRLNAISILYFDSANNVVLKKYRDMVVESXGX

SEQ ID NO: 54538 - protein, 27 aa, Artificial Sequence
  Cyclic GFR-binding peptide
LEPLPIVYYDSANNVVEQLSNDMVVES

SEQ ID NO: 54539 - protein, 30 aa, Artificial Sequence
  Cyclic GFR-binding peptide
  MOD_RES (3)..(4): Xaa is C or S
APXXVPQALSPISILFIVGRKPKVYKQYEM

SEQ ID NO: 54540 - protein, 38 aa, Artificial Sequence; identical to SEQ ID NO: 12702
  Cyclic GFR-binding peptide
  MOD_RES (7)..(7): Xaa is C or S

SEQ ID NO: 54541 - protein, 31 aa, Artificial Sequence
  Cyclic GFR-binding peptide
  MOD_RES (4)..(5): Xaa is C or S
AAPXXVPQALSPISILFIVGRKPKVYKQYEM

SEQ ID NO: 54542 - protein, 31 aa, Artificial Sequence
  Cyclic GFR-binding peptide
  MOD_RES (31)..(31): Xaa is C or S
PTQLSPISVLFIDDSSNVIYKQYENMVVRAX

SEQ ID NO: 54543 - protein, 40 aa, Artificial Sequence; identical to SEQ ID NO: 12703
  Cyclic GFR-binding peptide
  MOD_RES (5)..(6)..(38)..(40): Xaa is C or S

SEQ ID NO: 54544 - protein, 35 aa, Artificial Sequence; identical to SEQ ID NO: 12704
  Cyclic GFR-binding peptide
  MOD_RES (3)..(4): Xaa is C or S

SEQ ID NO: 54545 - protein, 35 aa, Artificial Sequence; identical to SEQ ID NO: 12707
  Cyclic GFR-binding peptide
  MOD_RES (4)..(5): Xaa is C or S

SEQ ID NO: 54546 - protein, 27 aa, Artificial Sequence
  Cyclic GFR-binding peptide
TELSPISMLFIDEYDKVVYKQYEEMVV

SEQ ID NO: 54547 - protein, 35 aa, Artificial Sequence; identical to SEQ ID NO: 12708
  Cyclic GFR-binding peptide
  MOD_RES (2)..(3)..(34): Xaa is C or S

SEQ ID NO: 54548 - protein, 31 aa, Artificial Sequence
  Cyclic GFR-binding peptide
  MOD_RES (28)..(30): Xaa is C or S
LSPISVLFIDDSSNVIYKQYENMVVRSXGXH

SEQ ID NO: 54549 - protein, 31 aa, Artificial Sequence
  Cyclic GFR-binding peptide
  MOD_RES (4)..(5): Xaa is C or S
PKPXXAPTQLEPLPVVYYDDSSNVIEQLSNN

SEQ ID NO: 54550 - protein, 27 aa, Artificial Sequence
  Cyclic GFR-binding peptide
ELEPLPMVYYDEYDKVVEQLSNEMVVE

SEQ ID NO: 54551 - protein, 40 aa, Artificial Sequence; identical to SEQ ID NO: 12710
  Cyclic GFR-binding peptide
  MOD_RES (4)..(5)..(37)..(39): Xaa is C or S

SEQ ID NO: 54552 - protein, 36 aa, Artificial Sequence; identical to SEQ ID NO: 12711
  Cyclic GFR-binding peptide
  MOD_RES (4)..(5): Xaa is C or S

SEQ ID NO: 54553 - protein, 31 aa, Artificial Sequence
  Cyclic GFR-binding peptide
  MOD_RES (30)..(30): Xaa is C or S
TQLSPISVLFIDDSSNVIYKQYENMVVRAXG

SEQ ID NO: 54554 - protein, 26 aa, Artificial Sequence
  Cyclic GFR-binding peptide
  MOD_RES (1)..(1): Xaa is C or S
XVSQDLEPLPIVYYIGKTPKIEQLSN

SEQ ID NO: 54555 - protein, 35 aa, Artificial Sequence; identical to SEQ ID NO: 12714
  Cyclic GFR-binding peptide
  MOD_RES (2)..(3)..(34): Xaa is C or S

SEQ ID NO: 54556 - protein, 36 aa, Artificial Sequence; identical to SEQ ID NO: 12716
  Cyclic GFR-binding peptide
  MOD_RES (6)..(6): Xaa is C or S

SEQ ID NO: 54557 - protein, 36 aa, Artificial Sequence; identical to SEQ ID NO: 12715
  Cyclic GFR-binding peptide
  MOD_RES (4)..(5): Xaa is C or S

SEQ ID NO: 54558 - protein, 31 aa, Artificial Sequence; identical to SEQ ID NO: 12718
  Cyclic GFR-binding peptide
  MOD_RES (1)..(1): Xaa is C or S

SEQ ID NO: 54559 - protein, 37 aa, Artificial Sequence; identical to SEQ ID NO: 12719
  Cyclic GFR-binding peptide
  MOD_RES (6)..(7): Xaa is C or S

SEQ ID NO: 54560 - protein, 32 aa, Artificial Sequence
  Cyclic GFR-binding peptide
  MOD_RES (6)..(7): Xaa is C or S
SIPKAXXVPTELSPISMLFIDEYDKVVYKQYE

SEQ ID NO: 54561 - protein, 33 aa, Artificial Sequence
  Cyclic GFR-binding peptide
  MOD_RES (5)..(6): Xaa is C or S
SAAPXXVPQALSPISILFIVGRKPKVYKQYEMI

SEQ ID NO: 54562 - protein, 28 aa, Artificial Sequence
  Cyclic GFR-binding peptide
  MOD_RES (27)..(27): Xaa is C or S
LSPISILFIVGRKPKVYKQYEMIVRSXK

SEQ ID NO: 54563 - protein, 34 aa, Artificial Sequence; identical to SEQ ID NO: 12721
  Cyclic GFR-binding peptide
  MOD_RES (1)..(2)..(34): Xaa is C or S

SEQ ID NO: 54564 - protein, 31 aa, Artificial Sequence
  Cyclic GFR-binding peptide
  MOD_RES (29)..(31): Xaa is C or S
RLSAISILYLDSANNVVLKNYQDMVVESXGX

SEQ ID NO: 54565 - protein, 26 aa, Artificial Sequence
  Cyclic GFR-binding peptide
VSQDLSPISILFIIGKTPKIYKQYEM

SEQ ID NO: 54566 - protein, 28 aa, Artificial Sequence
  Cyclic GFR-binding peptide
TQLEPLPVVYYDDSSNVIEQLSNNMVVR

SEQ ID NO: 54567 - protein, 33 aa, Artificial Sequence; identical to SEQ ID NO: 12723
  Cyclic GFR-binding peptide
  MOD_RES (1)..(33): Xaa is C or S

SEQ ID NO: 54568 - protein, 32 aa, Artificial Sequence; identical to SEQ ID NO: 12725
  Cyclic GFR-binding peptide
  MOD_RES (1)..(32): Xaa is C or S

SEQ ID NO: 54569 - protein, 22 aa, Artificial Sequence
  Cyclic GFR-binding peptide
SAISILYLDSANNVVLKNYQDM

SEQ ID NO: 54570 - protein, 37 aa, Artificial Sequence; identical to SEQ ID NO: 12729
  Cyclic GFR-binding peptide
  MOD_RES (4)..(5)..(37): Xaa is C or S

SEQ ID NO: 54571 - protein, 39 aa, Artificial Sequence; identical to SEQ ID NO: 12730
  Cyclic GFR-binding peptide
  MOD_RES (5)..(6)..(38): Xaa is C or S

SEQ ID NO: 54572 - protein, 31 aa, Artificial Sequence
  Cyclic GFR-binding peptide
  MOD_RES (31)..(31): Xaa is C or S
PTELSPISMLFIDEYDKVVYKQYEEMVVEGX

SEQ ID NO: 54573 - protein, 27 aa, Artificial Sequence
  Cyclic GFR-binding peptide
PTQLEPLTVLYYDDSSNVIEQLSNNMV

SEQ ID NO: 54574 - protein, 24 aa, Artificial Sequence
  Cyclic GFR-binding peptide
KLSPISVLFIDDSSNVIYKQYENM

SEQ ID NO: 54575 - protein, 36 aa, Artificial Sequence; identical to SEQ ID NO: 12732
  Cyclic GFR-binding peptide
  MOD_RES (5)..(6): Xaa is C or S

SEQ ID NO: 54576 - protein, 24 aa, Artificial Sequence
  Cyclic GFR-binding peptide
EPLPIVYYVGRTPKVEQLSNMVVK

SEQ ID NO: 54577 - protein, 37 aa, Artificial Sequence; identical to SEQ ID NO: 12733
  Cyclic GFR-binding peptide
  MOD_RES (6)..(7): Xaa is C or S

SEQ ID NO: 54578 - protein, 34 aa, Artificial Sequence; identical to SEQ ID NO: 12735
  Cyclic GFR-binding peptide
  MOD_RES (1)..(33): Xaa is C or S

SEQ ID NO: 54579 - protein, 22 aa, Artificial Sequence
  Cyclic GFR-binding peptide
ELEPLPMVYYDENEKVVEQLSN

SEQ ID NO: 54580 - protein, 32 aa, Artificial Sequence
  Cyclic GFR-binding peptide
  MOD_RES (5)..(6): Xaa is C or S
SASPXXVSQDLEPLPIVYYIGKTPKIEQLSNM

SEQ ID NO: 54581 - protein, 36 aa, Artificial Sequence; identical to SEQ ID NO: 12737
  Cyclic GFR-binding peptide
  MOD_RES (4)..(5): Xaa is C or S

SEQ ID NO: 54582 - protein, 36 aa, Artificial Sequence; identical to SEQ ID NO: 12738
  Cyclic GFR-binding peptide
  MOD_RES (4)..(5): Xaa is C or S

SEQ ID NO: 54583 - protein, 31 aa, Artificial Sequence
  Cyclic GFR-binding peptide
  MOD_RES (28)..(30): Xaa is C or S
ALSPISILFIVGRKPKVYKQYEMIVRSXKXS

SEQ ID NO: 54584 - protein, 27 aa, Artificial Sequence
  Cyclic GFR-binding peptide
  MOD_RES (27)..(27): Xaa is C or S
EPLTVLYYDDSSNVIEQLSNNMVVRAX

SEQ ID NO: 54585 - protein, 30 aa, Artificial Sequence
  Cyclic GFR-binding peptide
  MOD_RES (28)..(30): Xaa is C or S
DLEPLPIVYYIGKTPKIEQLSNMIVKSXKX

SEQ ID NO: 54586 - protein, 35 aa, Artificial Sequence
  Cyclic GFR-binding peptide
  MOD_RES (6)..(7): Xaa is C or S
SIPKAXXVPTELEPLTMLYYDEYDKVVEQLSNEMV

SEQ ID NO: 54587 - protein, 22 aa, Artificial Sequence
  Cyclic GFR-binding peptide
LSPISILFIVGRTPKVYKQYEM

SEQ ID NO: 54588 - protein, 29 aa, Artificial Sequence
  Cyclic GFR-binding peptide
  MOD_RES (27)..(29): Xaa is C or S
SPISMLFIDENEKVVYKQYEDMVVEGXGX

SEQ ID NO: 54589 - protein, 25 aa, Artificial Sequence
  Cyclic GFR-binding peptide
APTKLEPLPVVYYDDSSNVIEQLSN

SEQ ID NO: 54590 - protein, 27 aa, Artificial Sequence
  Cyclic GFR-binding peptide
  MOD_RES (1)..(1): Xaa is C or S
XAPTKLEPLTVLYYDDSSNVIEQLSNN

SEQ ID NO: 54591 - protein, 29 aa, Artificial Sequence
  Cyclic GFR-binding peptide
  MOD_RES (3)..(3): Xaa is C or S
PTXAPTKLSPISVLFIDDSSNVIYKQYEN

SEQ ID NO: 54592 - protein, 27 aa, Artificial Sequence
  Cyclic GFR-binding peptide
  MOD_RES (1)..(1): Xaa is C or S
XVSQDLEPLPIVYYIGKTPKIEQLSNM

SEQ ID NO: 54593 - protein, 29 aa, Artificial Sequence
  Cyclic GFR-binding peptide
  MOD_RES (2)..(3): Xaa is C or S
PXXVPQDLEPLPIVYYVGRTPKVEQLSNM

SEQ ID NO: 54594 - protein, 31 aa, Artificial Sequence; identical to SEQ ID NO: 12744
  Cyclic GFR-binding peptide
  MOD_RES (1)..(1): Xaa is C or S

SEQ ID NO: 54595 - protein, 34 aa, Artificial Sequence; identical to SEQ ID NO: 12745
  Cyclic GFR-binding peptide
  MOD_RES (3)..(4): Xaa is C or S

SEQ ID NO: 54596 - protein, 40 aa, Artificial Sequence; identical to SEQ ID NO: 12746
  Cyclic GFR-binding peptide
  MOD_RES (5)..(6)..(38)..(40): Xaa is C or S

SEQ ID NO: 54597 - protein, 29 aa, Artificial Sequence
  Cyclic GFR-binding peptide
APTKLEPLPVVYYDDSSNVIEQLSNNMVV

SEQ ID NO: 54598 - protein, 28 aa, Artificial Sequence
  Cyclic GFR-binding peptide
VPTELEPLTMLYYDENEKVVEQLSNDMV

SEQ ID NO: 54599 - protein, 34 aa, Artificial Sequence; identical to SEQ ID NO: 12747
  Cyclic GFR-binding peptide
  MOD_RES (1)..(33): Xaa is C or S

SEQ ID NO: 54600 - protein, 33 aa, Artificial Sequence; identical to SEQ ID NO: 12748
  Cyclic GFR-binding peptide
  MOD_RES (1)..(33): Xaa is C or S

SEQ ID NO: 54601 - protein, 29 aa, Artificial Sequence
  Cyclic GFR-binding peptide
  MOD_RES (27)..(29): Xaa is C or S
EPLPMVYYDENEKVVEQLSNDMVVEGXGX

SEQ ID NO: 54602 - protein, 39 aa, Artificial Sequence; identical to SEQ ID NO: 12750
  Cyclic GFR-binding peptide
  MOD_RES (5)..(6)..(38): Xaa is C or S

SEQ ID NO: 54603 - protein, 26 aa, Artificial Sequence
  Cyclic GFR-binding peptide
PQALEPLTILYYVGRKPKVEQLSNMI

SEQ ID NO: 54604 - protein, 25 aa, Artificial Sequence
  Cyclic GFR-binding peptide
VPTELSPISMLFIDEYDKVVYKQYE

SEQ ID NO: 54605 - protein, 30 aa, Artificial Sequence
  Cyclic GFR-binding peptide
  MOD_RES (1)..(2): Xaa is C or S
XXVPTELSPISMLFIDENEKVVYKQYEDMV

SEQ ID NO: 54606 - protein, 25 aa, Artificial Sequence
  Cyclic GFR-binding peptide
PTKLEPLTVLYYDDSSNVIEQLSNN

SEQ ID NO: 54607 - protein, 38 aa, Artificial Sequence; identical to SEQ ID NO: 12751
  Cyclic GFR-binding peptide
  MOD_RES (4)..(5)..(37): Xaa is C or S

SEQ ID NO: 54608 - protein, 26 aa, Artificial Sequence
  Cyclic GFR-binding peptide
LEPLPIVYYVGRTPKVEQLSNMVVKS

SEQ ID NO: 54609 - protein, 31 aa, Artificial Sequence; identical to SEQ ID NO: 12756
  Cyclic GFR-binding peptide
  MOD_RES (31)..(31): Xaa is C or S

SEQ ID NO: 54610 - protein, 30 aa, Artificial Sequence
  Cyclic GFR-binding peptide
  MOD_RES (1)..(1): Xaa is C or S
XAPTKLEPLPVVYYDDSSNVIEQLSNNMVV

SEQ ID NO: 54611 - protein, 20 aa, Artificial Sequence
  Cyclic GFR-binding peptide
EPLPMVYYDENEKVVEQLSN

SEQ ID NO: 54612 - protein, 35 aa, Artificial Sequence; identical to SEQ ID NO: 12758
  Cyclic GFR-binding peptide
  MOD_RES (1)..(33)..(35): Xaa is C or S

SEQ ID NO: 54613 - protein, 30 aa, Artificial Sequence
  Cyclic GFR-binding peptide
  MOD_RES (29)..(29): Xaa is C or S
ELEPLPMVYYDENEKVVEQLSNDMVVEGXG

SEQ ID NO: 54614 - protein, 38 aa, Artificial Sequence; identical to SEQ ID NO: 12760
  Cyclic GFR-binding peptide
  MOD_RES (5)..(6)..(38): Xaa is C or S

SEQ ID NO: 54615 - protein, 37 aa, Artificial Sequence; identical to SEQ ID NO: 12762
  Cyclic GFR-binding peptide
  MOD_RES (1)..(2)..(34)..(36): Xaa is C or S

SEQ ID NO: 54616 - protein, 32 aa, Artificial Sequence; identical to SEQ ID NO: 12764
  Cyclic GFR-binding peptide
  MOD_RES (1)..(32): Xaa is C or S

SEQ ID NO: 54617 - protein, 30 aa, Artificial Sequence
  Cyclic GFR-binding peptide
  MOD_RES (27)..(29): Xaa is C or S
EPLPVVYYDDSSNVIEQLSNNMVVRSXGXH

SEQ ID NO: 54618 - protein, 29 aa, Artificial Sequence
  Cyclic GFR-binding peptide
  MOD_RES (2)..(3): Xaa is C or S
PXXVPQDLSPISILFIVGRTPKVYKQYEM

SEQ ID NO: 54619 - protein, 27 aa, Artificial Sequence
  Cyclic GFR-binding peptide
ELEPLTMLYYDENEKVVEQLSNDMVVE

SEQ ID NO: 54620 - protein, 35 aa, Artificial Sequence
  Cyclic GFR-binding peptide
  MOD_RES (5)..(6): Xaa is C or S
VPKPXXAPTKLSPISVLFIDDSSNVIYKQYENMVV

SEQ ID NO: 54621 - protein, 23 aa, Artificial Sequence
  Cyclic GFR-binding peptide
ALEPLTILYYVGRKPKVEQLSNM

SEQ ID NO: 54622 - protein, 29 aa, Artificial Sequence
  Cyclic GFR-binding peptide
  MOD_RES (1)..(2): Xaa is C or S
XXAPTQLEPLTVLYYDDSSNVIEQLSNNM

SEQ ID NO: 54623 - protein, 31 aa, Artificial Sequence
  Cyclic GFR-binding peptide
  MOD_RES (29)..(31): Xaa is C or S
RLEPLTILYYDSANNVVEQLSNDMVVESXGX

SEQ ID NO: 54624 - protein, 39 aa, Artificial Sequence; identical to SEQ ID NO: 12767
  Cyclic GFR-binding peptide
  MOD_RES (6)..(7)..(39): Xaa is C or S

SEQ ID NO: 54625 - protein, 31 aa, Artificial Sequence
  Cyclic GFR-binding peptide
  MOD_RES (30)..(30): Xaa is C or S
TKLEPLTVLYYDDSSNVIEQLSNNMVVRSXG

SEQ ID NO: 54626 - protein, 20 aa, Artificial Sequence
  Cyclic GFR-binding peptide
SPISMLFIDEYDKVVYKQYE

SEQ ID NO: 54627 - protein, 28 aa, Artificial Sequence
  Cyclic GFR-binding peptide
PTELSPISMLFIDENEKVVYKQYEDMVV

SEQ ID NO: 54628 - protein, 35 aa, Artificial Sequence; identical to SEQ ID NO: 12769
  Cyclic GFR-binding peptide
  MOD_RES (2)..(3)..(35): Xaa is C or S

SEQ ID NO: 54629 - protein, 28 aa, Artificial Sequence
  Cyclic GFR-binding peptide
  MOD_RES (27)..(27): Xaa is C or S
LSPISILFIVGRTPKVYKQYEMVVKSXK

SEQ ID NO: 54630 - protein, 34 aa, Artificial Sequence; identical to SEQ ID NO: 12770
  Cyclic GFR-binding peptide
  MOD_RES (1)..(2)..(34): Xaa is C or S

SEQ ID NO: 54631 - protein, 29 aa, Artificial Sequence
  Cyclic GFR-binding peptide
TELEPLTMLYYDENEKVVEQLSNDMVVEG

SEQ ID NO: 54632 - protein, 30 aa, Artificial Sequence
  Cyclic GFR-binding peptide
  MOD_RES (30)..(30): Xaa is C or S
TELEPLTMLYYDENEKVVEQLSNDMVVEGX

SEQ ID NO: 54633 - protein, 29 aa, Artificial Sequence
  Cyclic GFR-binding peptide
  MOD_RES (2)..(3): Xaa is C or S
TXXVPTRLSAISILYLDSANNVVLKNYQD

SEQ ID NO: 54634 - protein, 26 aa, Artificial Sequence
  Cyclic GFR-binding peptide
EPLPVVYYDDSSNVIEQLSNNMVVRS

SEQ ID NO: 54635 - protein, 41 aa, Artificial Sequence; identical to SEQ ID NO: 12772
  Cyclic GFR-binding peptide
  MOD_RES (6)..(7)..(38)..(40): Xaa is C or S

SEQ ID NO: 54636 - protein, 28 aa, Artificial Sequence
  Cyclic GFR-binding peptide
  MOD_RES (1)..(2): Xaa is C or S
XXVPTELSPISMLFIDEYDKVVYKQYEE

SEQ ID NO: 54637 - protein, 31 aa, Artificial Sequence; identical to SEQ ID NO: 12774
  Cyclic GFR-binding peptide
  MOD_RES (1)..(1): Xaa is C or S

SEQ ID NO: 54638 - protein, 28 aa, Artificial Sequence
  Cyclic GFR-binding peptide
  MOD_RES (2)..(3): Xaa is C or S
PXXVPQALEPLTILYYVGRKPKVEQLSN

SEQ ID NO: 54639 - protein, 38 aa, Artificial Sequence; identical to SEQ ID NO: 12776
  Cyclic GFR-binding peptide
  MOD_RES (5)..(6)..(38): Xaa is C or S

SEQ ID NO: 54640 - protein, 34 aa, Artificial Sequence
  Cyclic GFR-binding peptide
  MOD_RES (4)..(5): Xaa is C or S
PKPXXAPTKLEPLTVLYYDDSSNVIEQLSNNMVV

SEQ ID NO: 54641 - protein, 29 aa, Artificial Sequence
  Cyclic GFR-binding peptide
  MOD_RES (3)..(3): Xaa is C or S
PTXAPTKLEPLPVVYYDDSSNVIEQLSNN

SEQ ID NO: 54642 - protein, 34 aa, Artificial Sequence
  Cyclic GFR-binding peptide
  MOD_RES (5)..(6): Xaa is C or S
IPKAXXVPTELEPLTMLYYDENEKVVEQLSNDMV

SEQ ID NO: 54643 - protein, 30 aa, Artificial Sequence
  Cyclic GFR-binding peptide
  MOD_RES (27)..(29): Xaa is C or S
LSPISILFIVGRKPKVYKQYEMIVRSXKXS

SEQ ID NO: 54644 - protein, 33 aa, Artificial Sequence; identical to SEQ ID NO: 12778
  Cyclic GFR-binding peptide
  MOD_RES (2)..(3): Xaa is C or S

SEQ ID NO: 54645 - protein, 35 aa, Artificial Sequence; identical to SEQ ID NO: 12779
  Cyclic GFR-binding peptide
  MOD_RES (2)..(3)..(34): Xaa is C or S

SEQ ID NO: 54646 - protein, 22 aa, Artificial Sequence
  Cyclic GFR-binding peptide
RLNAISILYFDSANNVVLKKYR

SEQ ID NO: 54647 - protein, 24 aa, Artificial Sequence
  Cyclic GFR-binding peptide
PTELEPLPMVYYDEYDKVVEQLSN

SEQ ID NO: 54648 - protein, 38 aa, Artificial Sequence; identical to SEQ ID NO: 12780
  Cyclic GFR-binding peptide
  MOD_RES (4)..(36)..(38): Xaa is C or S

SEQ ID NO: 54649 - protein, 31 aa, Artificial Sequence
  Cyclic GFR-binding peptide
  MOD_RES (3)..(4): Xaa is C or S
PTXXVPTRLSAISILYLDSANNVVLKNYQDM

SEQ ID NO: 54650 - protein, 23 aa, Artificial Sequence
  Cyclic GFR-binding peptide
LSPISVLFIDDSSNVIYKQYENM

SEQ ID NO: 54651 - protein, 33 aa, Artificial Sequence
  Cyclic GFR-binding peptide
  MOD_RES (30)..(32): Xaa is C or S
TRLSAISILYLDSANNVVLKNYQDMVVESXGXR

SEQ ID NO: 54652 - protein, 35 aa, Artificial Sequence; identical to SEQ ID NO: 12782
  Cyclic GFR-binding peptide
  MOD_RES (3)..(4): Xaa is C or S

SEQ ID NO: 54653 - protein, 32 aa, Artificial Sequence
  Cyclic GFR-binding peptide
  MOD_RES (3)..(4): Xaa is C or S
KAXXVPTELEPLPMVYYDEYDKVVEQLSNEMV

SEQ ID NO: 54654 - protein, 27 aa, Artificial Sequence
  Cyclic GFR-binding peptide
APTKLSPISVLFIDDSSNVIYKQYENM

SEQ ID NO: 54655 - protein, 29 aa, Artificial Sequence
  Cyclic GFR-binding peptide
TELEPLTMLYYDEYDKVVEQLSNEMVVEG

SEQ ID NO: 54656 - protein, 36 aa, Artificial Sequence; identical to SEQ ID NO: 12783
  Cyclic GFR-binding peptide
  MOD_RES (3)..(4)..(35): Xaa is C or S

SEQ ID NO: 54657 - protein, 30 aa, Artificial Sequence
  Cyclic GFR-binding peptide
  MOD_RES (30)..(30): Xaa is C or S
TELEPLTMLYYDEYDKVVEQLSNEMVVEGX

SEQ ID NO: 54658 - protein, 25 aa, Artificial Sequence
  Cyclic GFR-binding peptide
SPISILFIIGKTPKIYKQYEMIVKS

SEQ ID NO: 54659 - protein, 24 aa, Artificial Sequence
  Cyclic GFR-binding peptide
QALSPISILFIVGRKPKVYKQYEM

SEQ ID NO: 54660 - protein, 25 aa, Artificial Sequence
  Cyclic GFR-binding peptide
VPTELEPLTMLYYDENEKVVEQLSN

SEQ ID NO: 54661 - protein, 33 aa, Artificial Sequence; identical to SEQ ID NO: 12786
  Cyclic GFR-binding peptide
  MOD_RES (1)..(33): Xaa is C or S

SEQ ID NO: 54662 - protein, 36 aa, Artificial Sequence; identical to SEQ ID NO: 12787
  Cyclic GFR-binding peptide
  MOD_RES (3)..(4)..(36): Xaa is C or S

SEQ ID NO: 54663 - protein, 28 aa, Artificial Sequence
  Cyclic GFR-binding peptide
VPTRLSAISILYLDSANNVVLKNYQDMV

SEQ ID NO: 54664 - protein, 33 aa, Artificial Sequence; identical to SEQ ID NO: 12788
  Cyclic GFR-binding peptide
  MOD_RES (1)..(32): Xaa is C or S

SEQ ID NO: 54665 - protein, 36 aa, Artificial Sequence
  Cyclic GFR-binding peptide
  MOD_RES (7)..(7): Xaa is C or S
HVTKPTXAPTKLEPLTVLYYDDSSNVIEQLSNNMVV

SEQ ID NO: 54666 - protein, 31 aa, Artificial Sequence
  Cyclic GFR-binding peptide
  MOD_RES (5)..(6): Xaa is C or S
IPKAXXVPTELSPISMLFIDENEKVVYKQYE

SEQ ID NO: 54667 - protein, 26 aa, Artificial Sequence
  Cyclic GFR-binding peptide
EPLPVVYYDDSSNVIEQLSNNMVVRA

SEQ ID NO: 54668 - protein, 34 aa, Artificial Sequence; identical to SEQ ID NO: 12790
  Cyclic GFR-binding peptide
  MOD_RES (2)..(3): Xaa is C or S

SEQ ID NO: 54669 - protein, 27 aa, Artificial Sequence
  Cyclic GFR-binding peptide
  MOD_RES (1)..(2): Xaa is C or S
XXVPQDLSPISILFIVGRTPKVYKQYE

SEQ ID NO: 54670 - protein, 24 aa, Artificial Sequence
  Cyclic GFR-binding peptide
TKLEPLTVLYYDDSSNVIEQLSNN

SEQ ID NO: 54671 - protein, 26 aa, Artificial Sequence
  Cyclic GFR-binding peptide
TQLSPISVLFIDDSSNVIYKQYENMV

SEQ ID NO: 54672 - protein, 35 aa, Artificial Sequence; identical to SEQ ID NO: 12791
  Cyclic GFR-binding peptide
  MOD_RES (4)..(5): Xaa is C or S

SEQ ID NO: 54673 - protein, 28 aa, Artificial Sequence
  Cyclic GFR-binding peptide
TELEPLTMLYYDENEKVVEQLSNDMVVE

SEQ ID NO: 54674 - protein, 25 aa, Artificial Sequence
  Cyclic GFR-binding peptide
VSQDLSPISILFIIGKTPKIYKQYE

SEQ ID NO: 54675 - protein, 26 aa, Artificial Sequence
  Cyclic GFR-binding peptide
PTQLEPLTVLYYDDSSNVIEQLSNNM

SEQ ID NO: 54676 - protein, 23 aa, Artificial Sequence
  Cyclic GFR-binding peptide
EPLPIVYYVGRTPKVEQLSNMVV

SEQ ID NO: 54677 - protein, 30 aa, Artificial Sequence
  Cyclic GFR-binding peptide
  MOD_RES (5)..(5): Xaa is C or S
TKPTXAPTKLSPISVLFIDDSSNVIYKQYE

SEQ ID NO: 54678 - protein, 30 aa, Artificial Sequence
  Cyclic GFR-binding peptide
  MOD_RES (30)..(30): Xaa is C or S
TQLEPLTVLYYDDSSNVIEQLSNNMVVRAX

SEQ ID NO: 54679 - protein, 41 aa, Artificial Sequence; identical to SEQ ID NO: 12796
  Cyclic GFR-binding peptide
  MOD_RES (6)..(7)..(39)..(41): Xaa is C or S

SEQ ID NO: 54680 - protein, 39 aa, Artificial Sequence; identical to SEQ ID NO: 12797
  Cyclic GFR-binding peptide
  MOD_RES (3)..(4)..(36)..(38): Xaa is C or S

SEQ ID NO: 54681 - protein, 39 aa, Artificial Sequence; identical to SEQ ID NO: 12798
  Cyclic GFR-binding peptide
  MOD_RES (6)..(7)..(39): Xaa is C or S

SEQ ID NO: 54682 - protein, 30 aa, Artificial Sequence
  Cyclic GFR-binding peptide
  MOD_RES (4)..(5): Xaa is C or S
PKPXXAPTQLEPLPVVYYDDSSNVIEQLSN

SEQ ID NO: 54683 - protein, 30 aa, Artificial Sequence
  Cyclic GFR-binding peptide
  MOD_RES (29)..(29): Xaa is C or S
QDLEPLPIVYYIGKTPKIEQLSNMIVKSXK

SEQ ID NO: 54684 - protein, 34 aa, Artificial Sequence; identical to SEQ ID NO: 12800
  Cyclic GFR-binding peptide
  MOD_RES (31)..(33): Xaa is C or S

SEQ ID NO: 54685 - protein, 30 aa, Artificial Sequence
  Cyclic GFR-binding peptide
  MOD_RES (1)..(1): Xaa is C or S
XVPTELEPLPMVYYDENEKVVEQLSNDMVV

SEQ ID NO: 54686 - protein, 30 aa, Artificial Sequence
  Cyclic GFR-binding peptide
  MOD_RES (29)..(29): Xaa is C or S
ELEPLTMLYYDENEKVVEQLSNDMVVEGXG

SEQ ID NO: 54687 - protein, 40 aa, Artificial Sequence; identical to SEQ ID NO: 12803
  Cyclic GFR-binding peptide
  MOD_RES (4)..(5)..(37)..(39): Xaa is C or S

SEQ ID NO: 54688 - protein, 37 aa, Artificial Sequence; identical to SEQ ID NO: 12804
  Cyclic GFR-binding peptide
  MOD_RES (4)..(5)..(37): Xaa is C or S

SEQ ID NO: 54689 - protein, 34 aa, Artificial Sequence; identical to SEQ ID NO: 12806
  Cyclic GFR-binding peptide
  MOD_RES (1)..(2)..(34): Xaa is C or S

SEQ ID NO: 54690 - protein, 36 aa, Artificial Sequence; identical to SEQ ID NO: 12811
  Cyclic GFR-binding peptide
  MOD_RES (4)..(5)..(36): Xaa is C or S

SEQ ID NO: 54691 - protein, 30 aa, Artificial Sequence
  Cyclic GFR-binding peptide
  MOD_RES (2)..(3): Xaa is C or S
PXXVSQDLSPISILFIIGKTPKIYKQYEMI

SEQ ID NO: 54692 - protein, 32 aa, Artificial Sequence; identical to SEQ ID NO: 12813
  Cyclic GFR-binding peptide
  MOD_RES (1)..(2): Xaa is C or S

SEQ ID NO: 54693 - protein, 29 aa, Artificial Sequence
  Cyclic GFR-binding peptide
  MOD_RES (4)..(4): Xaa is C or S
KPTXAPTKLSPISVLFIDDSSNVIYKQYE

SEQ ID NO: 54694 - protein, 21 aa, Artificial Sequence
  Cyclic GFR-binding peptide
EPLPMVYYDENEKVVEQLSND

SEQ ID NO: 54695 - protein, 24 aa, Artificial Sequence
  Cyclic GFR-binding peptide
TQLSPISVLFIDDSSNVIYKQYEN

SEQ ID NO: 54696 - protein, 31 aa, Artificial Sequence
  Cyclic GFR-binding peptide
  MOD_RES (28)..(30): Xaa is C or S
DLEPLPIVYYVGRTPKVEQLSNMVVKSXKXS

SEQ ID NO: 54697 - protein, 29 aa, Artificial Sequence
  Cyclic GFR-binding peptide
PQALEPLTILYYVGRKPKVEQLSNMIVRS

SEQ ID NO: 54698 - protein, 28 aa, Artificial Sequence
  Cyclic GFR-binding peptide
  MOD_RES (28)..(28): Xaa is C or S
LSPISMLFIDEYDKVVYKQYEEMVVEGX

SEQ ID NO: 54699 - protein, 31 aa, Artificial Sequence; identical to SEQ ID NO: 12817
  Cyclic GFR-binding peptide

SEQ ID NO: 54700 - protein, 34 aa, Artificial Sequence; identical to SEQ ID NO: 12818
  Cyclic GFR-binding peptide
  MOD_RES (32)..(34): Xaa is C or S

SEQ ID NO: 54701 - protein, 35 aa, Artificial Sequence
  Cyclic GFR-binding peptide
  MOD_RES (5)..(6): Xaa is C or S
IPKAXXVPTELSPISMLFIDEYDKVVYKQYEEMVV

SEQ ID NO: 54702 - protein, 37 aa, Artificial Sequence; identical to SEQ ID NO: 12819
  Cyclic GFR-binding peptide
  MOD_RES (2)..(3)..(35)..(37): Xaa is C or S

SEQ ID NO: 54703 - protein, 30 aa, Artificial Sequence
  Cyclic GFR-binding peptide
  MOD_RES (1)..(1): Xaa is C or S
XAPTKLEPLTVLYYDDSSNVIEQLSNNMVV

SEQ ID NO: 54704 - protein, 28 aa, Artificial Sequence
  Cyclic GFR-binding peptide
  MOD_RES (26)..(28): Xaa is C or S
EPLTILYYVGRKPKVEQLSNMIVRSXKX

SEQ ID NO: 54705 - protein, 24 aa, Artificial Sequence
  Cyclic GFR-binding peptide
ELEPLPMVYYDEYDKVVEQLSNEM

SEQ ID NO: 54706 - protein, 35 aa, Artificial Sequence
  Cyclic GFR-binding peptide
  MOD_RES (6)..(7): Xaa is C or S
STPPTXXVPTRLEPLPIVYYDSANNVVEQLSNDMV

SEQ ID NO: 54707 - protein, 24 aa, Artificial Sequence
  Cyclic GFR-binding peptide
PTRLEPLPIVYYDSANNVVEQLSN

SEQ ID NO: 54708 - protein, 34 aa, Artificial Sequence
  Cyclic GFR-binding peptide
  MOD_RES (31)..(33): Xaa is C or S
PTRLEPLPIVYYDSANNVVEQLSNDMVVESXGXR

SEQ ID NO: 54709 - protein, 28 aa, Artificial Sequence
  Cyclic GFR-binding peptide
  MOD_RES (2)..(2): Xaa is C or S
TXAPTKLEPLPVVYYDDSSNVIEQLSNN

SEQ ID NO: 54710 - protein, 38 aa, Artificial Sequence; identical to SEQ ID NO: 12820
  Cyclic GFR-binding peptide
  MOD_RES (7)..(7): Xaa is C or S

SEQ ID NO: 54711 - protein, 21 aa, Artificial Sequence
  Cyclic GFR-binding peptide
LEPLPMVYYDENEKVVEQLSN

SEQ ID NO: 54712 - protein, 28 aa, Artificial Sequence
  Cyclic GFR-binding peptide
  MOD_RES (2)..(3): Xaa is C or S
PXXAPTQLEPLTVLYYDDSSNVIEQLSN

SEQ ID NO: 54713 - protein, 25 aa, Artificial Sequence
  Cyclic GFR-binding peptide
PQALSPISILFIVGRKPKVYKQYEM

SEQ ID NO: 54714 - protein, 27 aa, Artificial Sequence
  Cyclic GFR-binding peptide
  MOD_RES (27)..(27): Xaa is C or S
LEPLTILYYVGRKPKVEQLSNMIVRSX

SEQ ID NO: 54715 - protein, 33 aa, Artificial Sequence; identical to SEQ ID NO: 12824
  Cyclic GFR-binding peptide
  MOD_RES (32)..(32): Xaa is C or S

SEQ ID NO: 54716 - protein, 24 aa, Artificial Sequence
  Cyclic GFR-binding peptide
EPLTVLYYDDSSNVIEQLSNNMVV

SEQ ID NO: 54717 - protein, 33 aa, Artificial Sequence; identical to SEQ ID NO: 12826
  Cyclic GFR-binding peptide
  MOD_RES (1)..(33): Xaa is C or S

SEQ ID NO: 54718 - protein, 33 aa, Artificial Sequence; identical to SEQ ID NO: 12827
  Cyclic GFR-binding peptide
  MOD_RES (31)..(33): Xaa is C or S

SEQ ID NO: 54719 - protein, 35 aa, Artificial Sequence
  Cyclic GFR-binding peptide
  MOD_RES (5)..(6): Xaa is C or S
TPPTXXVPTRLEPLPIVYYDSANNVVEQLSNDMVV

SEQ ID NO: 54720 - protein, 25 aa, Artificial Sequence
  Cyclic GFR-binding peptide
SQDLSPISILFIIGKTPKIYKQYEM

SEQ ID NO: 54721 - protein, 28 aa, Artificial Sequence
  Cyclic GFR-binding peptide
PTELEPLPMVYYDEYDKVVEQLSNEMVV

SEQ ID NO: 54722 - protein, 33 aa, Artificial Sequence; identical to SEQ ID NO: 12829
  Cyclic GFR-binding peptide
  MOD_RES (2)..(3): Xaa is C or S

SEQ ID NO: 54723 - protein, 33 aa, Artificial Sequence; identical to SEQ ID NO: 12831
  Cyclic GFR-binding peptide
  MOD_RES (32)..(32): Xaa is C or S

SEQ ID NO: 54724 - protein, 28 aa, Artificial Sequence
  Cyclic GFR-binding peptide
  MOD_RES (27)..(27): Xaa is C or S
EPLTVLYYDDSSNVIEQLSNNMVVRSXG

SEQ ID NO: 54725 - protein, 36 aa, Artificial Sequence; identical to SEQ ID NO: 12834
  Cyclic GFR-binding peptide
  MOD_RES (4)..(5): Xaa is C or S

SEQ ID NO: 54726 - protein, 27 aa, Artificial Sequence
  Cyclic GFR-binding peptide
QLEPLPVVYYDDSSNVIEQLSNNMVVR

SEQ ID NO: 54727 - protein, 35 aa, Artificial Sequence; identical to SEQ ID NO: 12835
  Cyclic GFR-binding peptide
  MOD_RES (3)..(35): Xaa is C or S

SEQ ID NO: 54728 - protein, 42 aa, Artificial Sequence; identical to SEQ ID NO: 12836
  Cyclic GFR-binding peptide
  MOD_RES (6)..(7)..(39)..(41): Xaa is C or S

SEQ ID NO: 54729 - protein, 38 aa, Artificial Sequence; identical to SEQ ID NO: 12837
  Cyclic GFR-binding peptide
  MOD_RES (6)..(7): Xaa is C or S

SEQ ID NO: 54730 - protein, 29 aa, Artificial Sequence
  Cyclic GFR-binding peptide
  MOD_RES (1)..(1): Xaa is C or S
XVPTRLSAISILYLDSANNVVLKNYQDMV

SEQ ID NO: 54731 - protein, 26 aa, Artificial Sequence
  Cyclic GFR-binding peptide
DLEPLPIVYYVGRTPKVEQLSNMVVK

SEQ ID NO: 54732 - protein, 27 aa, Artificial Sequence
  Cyclic GFR-binding peptide
  MOD_RES (1)..(1): Xaa is C or S
XVPTRLEPLPIVYYDSANNVVEQLSND

SEQ ID NO: 54733 - protein, 26 aa, Artificial Sequence
  Cyclic GFR-binding peptide
TELEPLPMVYYDEYDKVVEQLSNEMV

SEQ ID NO: 54734 - protein, 24 aa, Artificial Sequence
  Cyclic GFR-binding peptide
QDLSPISILFIVGRTPKVYKQYEM

SEQ ID NO: 54735 - protein, 29 aa, Artificial Sequence
  Cyclic GFR-binding peptide
  MOD_RES (28)..(28): Xaa is C or S
LEPLPMVYYDENEKVVEQLSNDMVVEGXG

SEQ ID NO: 54736 - protein, 31 aa, Artificial Sequence
  Cyclic GFR-binding peptide
  MOD_RES (4)..(5): Xaa is C or S
PPTXXVPTRLEPLTILYYDSANNVVEQLSND

SEQ ID NO: 54737 - protein, 39 aa, Artificial Sequence; identical to SEQ ID NO: 12840
  Cyclic GFR-binding peptide
  MOD_RES (3)..(4)..(36)..(38): Xaa is C or S

SEQ ID NO: 54738 - protein, 34 aa, Artificial Sequence; identical to SEQ ID NO: 12841
  Cyclic GFR-binding peptide
  MOD_RES (1)..(2)..(34): Xaa is C or S

SEQ ID NO: 54739 - protein, 27 aa, Artificial Sequence
  Cyclic GFR-binding peptide
PTRLNAISILYFDSANNVVLKKYRDMV

SEQ ID NO: 54740 - protein, 38 aa, Artificial Sequence; identical to SEQ ID NO: 12843
  Cyclic GFR-binding peptide
  MOD_RES (6)..(7)..(38): Xaa is C or S

SEQ ID NO: 54741 - protein, 29 aa, Artificial Sequence
  Cyclic GFR-binding peptide
  MOD_RES (28)..(28): Xaa is C or S
LEPLTVLYYDDSSNVIEQLSNNMVVRAXG

SEQ ID NO: 54742 - protein, 30 aa, Artificial Sequence
  Cyclic GFR-binding peptide
  MOD_RES (28)..(30): Xaa is C or S
LSPISMLFIDEYDKVVYKQYEEMVVEGXGX

SEQ ID NO: 54743 - protein, 27 aa, Artificial Sequence
  Cyclic GFR-binding peptide
TQLSPISVLFIDDSSNVIYKQYENMVV

SEQ ID NO: 54744 - protein, 33 aa, Artificial Sequence
  Cyclic GFR-binding peptide
  MOD_RES (4)..(4): Xaa is C or S
KPTXAPTKLEPLTVLYYDDSSNVIEQLSNNMVV

SEQ ID NO: 54745 - protein, 29 aa, Artificial Sequence
  Cyclic GFR-binding peptide
TRLEPLPIVYYDSANNVVEQLSNDMVVES

SEQ ID NO: 54746 - protein, 33 aa, Artificial Sequence
  Cyclic GFR-binding peptide
  MOD_RES (6)..(7): Xaa is C or S
KIPKAXXVPTELSPISMLFIDENEKVVYKQYED

SEQ ID NO: 54747 - protein, 26 aa, Artificial Sequence
  Cyclic GFR-binding peptide
TKLSPISVLFIDDSSNVIYKQYENMV

SEQ ID NO: 54748 - protein, 40 aa, Artificial Sequence; identical to SEQ ID NO: 12844
  Cyclic GFR-binding peptide
  MOD_RES (5)..(37)..(39): Xaa is C or S

SEQ ID NO: 54749 - protein, 30 aa, Artificial Sequence; identical to SEQ ID NO: 12845
  Cyclic GFR-binding peptide

SEQ ID NO: 54750 - protein, 37 aa, Artificial Sequence; identical to SEQ ID NO: 12846
  Cyclic GFR-binding peptide
  MOD_RES (6)..(7): Xaa is C or S

SEQ ID NO: 54751 - protein, 27 aa, Artificial Sequence
  Cyclic GFR-binding peptide
  MOD_RES (1)..(2): Xaa is C or S
XXVPTELEPLTMLYYDENEKVVEQLSN

SEQ ID NO: 54752 - protein, 31 aa, Artificial Sequence
  Cyclic GFR-binding peptide
  MOD_RES (28)..(30): Xaa is C or S
LEPLPVVYYDDSSNVIEQLSNNMVVRSXGXH

SEQ ID NO: 54753 - protein, 41 aa, Artificial Sequence; identical to SEQ ID NO: 12848
  Cyclic GFR-binding peptide
  MOD_RES (6)..(7)..(39)..(41): Xaa is C or S

SEQ ID NO: 54754 - protein, 32 aa, Artificial Sequence
  Cyclic GFR-binding peptide
  MOD_RES (3)..(4): Xaa is C or S
KAXXVPTELEPLTMLYYDEYDKVVEQLSNEMV

SEQ ID NO: 54755 - protein, 34 aa, Artificial Sequence; identical to SEQ ID NO: 12849
  Cyclic GFR-binding peptide
  MOD_RES (1)..(33): Xaa is C or S

SEQ ID NO: 54756 - protein, 26 aa, Artificial Sequence
  Cyclic GFR-binding peptide
  MOD_RES (26)..(26): Xaa is C or S
EPLPIVYYIGKTPKIEQLSNMIVKSX

SEQ ID NO: 54757 - protein, 22 aa, Artificial Sequence
  Cyclic GFR-binding peptide
RLSAISILYLDSANNVVLKNYQ

SEQ ID NO: 54758 - protein, 41 aa, Artificial Sequence; identical to SEQ ID NO: 12851
  Cyclic GFR-binding peptide
  MOD_RES (6)..(7)..(39)..(41): Xaa is C or S

SEQ ID NO: 54759 - protein, 30 aa, Artificial Sequence
  Cyclic GFR-binding peptide
  MOD_RES (28)..(30): Xaa is C or S
LEPLTMLYYDEYDKVVEQLSNEMVVEGXGX

SEQ ID NO: 54760 - protein, 31 aa, Artificial Sequence
  Cyclic GFR-binding peptide
  MOD_RES (31)..(31): Xaa is C or S
PTRLNAISILYFDSANNVVLKKYRDMVVESX

SEQ ID NO: 54761 - protein, 24 aa, Artificial Sequence
  Cyclic GFR-binding peptide
QLSPISVLFIDDSSNVIYKQYENM

SEQ ID NO: 54762 - protein, 33 aa, Artificial Sequence; identical to SEQ ID NO: 12856
  Cyclic GFR-binding peptide
  MOD_RES (2)..(3): Xaa is C or S

SEQ ID NO: 54763 - protein, 23 aa, Artificial Sequence
  Cyclic GFR-binding peptide
RLEPLTILYYDSANNVVEQLSND

SEQ ID NO: 54764 - protein, 22 aa, Artificial Sequence
  Cyclic GFR-binding peptide
ELSPISMLFIDENEKVVYKQYE

SEQ ID NO: 54765 - protein, 34 aa, Artificial Sequence
  Cyclic GFR-binding peptide
  MOD_RES (5)..(5): Xaa is C or S
TKPTXAPTKLEPLPVVYYDDSSNVIEQLSNNMVV

SEQ ID NO: 54766 - protein, 30 aa, Artificial Sequence; identical to SEQ ID NO: 12857
  Cyclic GFR-binding peptide

SEQ ID NO: 54767 - protein, 32 aa, Artificial Sequence
  Cyclic GFR-binding peptide
  MOD_RES (6)..(7): Xaa is C or S
ASASPXXVSQDLSPISILFIIGKTPKIYKQYE

SEQ ID NO: 54768 - protein, 39 aa, Artificial Sequence; identical to SEQ ID NO: 12858
  Cyclic GFR-binding peptide
  MOD_RES (5)..(6)..(37)..(39): Xaa is C or S

SEQ ID NO: 54769 - protein, 32 aa, Artificial Sequence
  Cyclic GFR-binding peptide
  MOD_RES (29)..(31): Xaa is C or S
QALEPLTILYYVGRKPKVEQLSNMIVRSXKXS

SEQ ID NO: 54770 - protein, 23 aa, Artificial Sequence
  Cyclic GFR-binding peptide
LEPLPVVYYDDSSNVIEQLSNNM

SEQ ID NO: 54771 - protein, 28 aa, Artificial Sequence
  Cyclic GFR-binding peptide
  MOD_RES (1)..(1): Xaa is C or S
XVPTELEPLTMLYYDEYDKVVEQLSNEM

SEQ ID NO: 54772 - protein, 41 aa, Artificial Sequence; identical to SEQ ID NO: 12862
  Cyclic GFR-binding peptide
  MOD_RES (6)..(7)..(39)..(41): Xaa is C or S

SEQ ID NO: 54773 - protein, 30 aa, Artificial Sequence
  Cyclic GFR-binding peptide
  MOD_RES (2)..(3): Xaa is C or S
AXXVPTELEPLTMLYYDEYDKVVEQLSNEM

SEQ ID NO: 54774 - protein, 32 aa, Artificial Sequence
  Cyclic GFR-binding peptide
  MOD_RES (5)..(6): Xaa is C or S
IPKAXXVPTELSPISMLFIDEYDKVVYKQYEE

SEQ ID NO: 54775 - protein, 32 aa, Artificial Sequence
  Cyclic GFR-binding peptide
  MOD_RES (31)..(31): Xaa is C or S
PTELSPISMLFIDEYDKVVYKQYEEMVVEGXG

SEQ ID NO: 54776 - protein, 24 aa, Artificial Sequence
  Cyclic GFR-binding peptide
NAISILYFDSANNVVLKKYRDMVV

SEQ ID NO: 54777 - protein, 21 aa, Artificial Sequence
  Cyclic GFR-binding peptide
NAISILYFDSANNVVLKKYRD

SEQ ID NO: 54778 - protein, 37 aa, Artificial Sequence; identical to SEQ ID NO: 12864
  Cyclic GFR-binding peptide
  MOD_RES (6)..(7): Xaa is C or S

SEQ ID NO: 54779 - protein, 33 aa, Artificial Sequence; identical to SEQ ID NO: 12865
  Cyclic GFR-binding peptide
  MOD_RES (1)..(2): Xaa is C or S

SEQ ID NO: 54780 - protein, 30 aa, Artificial Sequence
  Cyclic GFR-binding peptide
  MOD_RES (2)..(3): Xaa is C or S
PXXAPTQLEPLTVLYYDDSSNVIEQLSNNM

SEQ ID NO: 54781 - protein, 34 aa, Artificial Sequence
  Cyclic GFR-binding peptide
  MOD_RES (5)..(6): Xaa is C or S
SAAPXXVPQALSPISILFIVGRKPKVYKQYEMIV

SEQ ID NO: 54782 - protein, 35 aa, Artificial Sequence; identical to SEQ ID NO: 12867
  Cyclic GFR-binding peptide
  MOD_RES (1)..(2)..(33)..(35): Xaa is C or S

SEQ ID NO: 54783 - protein, 30 aa, Artificial Sequence
  Cyclic GFR-binding peptide
PTELEPLPMVYYDENEKVVEQLSNDMVVEG

SEQ ID NO: 54784 - protein, 29 aa, Artificial Sequence
  Cyclic GFR-binding peptide
  MOD_RES (1)..(1): Xaa is C or S
XVPTELEPLPMVYYDENEKVVEQLSNDMV

SEQ ID NO: 54785 - protein, 35 aa, Artificial Sequence; identical to SEQ ID NO: 12871
  Cyclic GFR-binding peptide
  MOD_RES (2)..(3)..(34): Xaa is C or S

SEQ ID NO: 54786 - protein, 31 aa, Artificial Sequence; identical to SEQ ID NO: 12872
  Cyclic GFR-binding peptide

SEQ ID NO: 54787 - protein, 36 aa, Artificial Sequence; identical to SEQ ID NO: 12873
  Cyclic GFR-binding peptide
  MOD_RES (1)..(2)..(33)..(35): Xaa is C or S

SEQ ID NO: 54788 - protein, 33 aa, Artificial Sequence; identical to SEQ ID NO: 12875
  Cyclic GFR-binding peptide
  MOD_RES (1)..(33): Xaa is C or S

SEQ ID NO: 54789 - protein, 39 aa, Artificial Sequence; identical to SEQ ID NO: 12876
  Cyclic GFR-binding peptide
  MOD_RES (7)..(39): Xaa is C or S

SEQ ID NO: 54790 - protein, 36 aa, Artificial Sequence; identical to SEQ ID NO: 12879
  Cyclic GFR-binding peptide
  MOD_RES (5)..(6): Xaa is C or S

SEQ ID NO: 54791 - protein, 34 aa, Artificial Sequence
  Cyclic GFR-binding peptide
  MOD_RES (4)..(5): Xaa is C or S
PKPXXAPTQLSPISVLFIDDSSNVIYKQYENMVV

SEQ ID NO: 54792 - protein, 36 aa, Artificial Sequence
  Cyclic GFR-binding peptide
  MOD_RES (6)..(7): Xaa is C or S
ASASPXXVPQDLEPLPIVYYVGRTPKVEQLSNMVVK

SEQ ID NO: 54793 - protein, 37 aa, Artificial Sequence; identical to SEQ ID NO: 12880
  Cyclic GFR-binding peptide
  MOD_RES (5)..(6): Xaa is C or S

SEQ ID NO: 54794 - protein, 29 aa, Artificial Sequence
  Cyclic GFR-binding peptide
  MOD_RES (29)..(29): Xaa is C or S
QDLSPISILFIVGRTPKVYKQYEMVVKSX

SEQ ID NO: 54795 - protein, 26 aa, Artificial Sequence
  Cyclic GFR-binding peptide
TELSPISMLFIDEYDKVVYKQYEEMV

SEQ ID NO: 54796 - protein, 38 aa, Artificial Sequence; identical to SEQ ID NO: 12882
  Cyclic GFR-binding peptide
  MOD_RES (6)..(7): Xaa is C or S

SEQ ID NO: 54797 - protein, 32 aa, Artificial Sequence
  Cyclic GFR-binding peptide
  MOD_RES (2)..(3): Xaa is C or S
AXXVPTELEPLPMVYYDEYDKVVEQLSNEMVV

SEQ ID NO: 54798 - protein, 37 aa, Artificial Sequence; identical to SEQ ID NO: 12883
  Cyclic GFR-binding peptide
  MOD_RES (3)..(4)..(36): Xaa is C or S

SEQ ID NO: 54799 - protein, 37 aa, Artificial Sequence; identical to SEQ ID NO: 12884
  Cyclic GFR-binding peptide
  MOD_RES (4)..(5)..(37): Xaa is C or S

SEQ ID NO: 54800 - protein, 23 aa, Artificial Sequence
  Cyclic GFR-binding peptide
TELSPISMLFIDENEKVVYKQYE

SEQ ID NO: 54801 - protein, 34 aa, Artificial Sequence
  Cyclic GFR-binding peptide
  MOD_RES (6)..(7): Xaa is C or S
ASASPXXVPQDLSPISILFIVGRTPKVYKQYEMV

SEQ ID NO: 54802 - protein, 29 aa, Artificial Sequence
  Cyclic GFR-binding peptide
TQLSPISVLFIDDSSNVIYKQYENMVVRA

SEQ ID NO: 54803 - protein, 27 aa, Artificial Sequence
  Cyclic GFR-binding peptide
  MOD_RES (27)..(27): Xaa is C or S
EPLPMVYYDEYDKVVEQLSNEMVVEGX

SEQ ID NO: 54804 - protein, 37 aa, Artificial Sequence; identical to SEQ ID NO: 12886
  Cyclic GFR-binding peptide
  MOD_RES (3)..(4)..(35)..(37): Xaa is C or S

SEQ ID NO: 54805 - protein, 30 aa, Artificial Sequence
  Cyclic GFR-binding peptide
  MOD_RES (29)..(29): Xaa is C or S
ELSPISMLFIDEYDKVVYKQYEEMVVEGXG

SEQ ID NO: 54806 - protein, 33 aa, Artificial Sequence
  Cyclic GFR-binding peptide
  MOD_RES (4)..(5): Xaa is C or S
ASPXXVPQDLEPLPIVYYVGRTPKVEQLSNMVV

SEQ ID NO: 54807 - protein, 28 aa, Artificial Sequence
  Cyclic GFR-binding peptide
PTELEPLPMVYYDENEKVVEQLSNDMVV

SEQ ID NO: 54808 - protein, 26 aa, Artificial Sequence
  Cyclic GFR-binding peptide
VPTELEPLTMLYYDENEKVVEQLSND

SEQ ID NO: 54809 - protein, 28 aa, Artificial Sequence
  Cyclic GFR-binding peptide
TELSPISMLFIDENEKVVYKQYEDMVVE

SEQ ID NO: 54810 - protein, 35 aa, Artificial Sequence
  Cyclic GFR-binding peptide
  MOD_RES (6)..(7): Xaa is C or S
STPPTXXVPTRLNAISILYFDSANNVVLKKYRDMV

SEQ ID NO: 54811 - protein, 25 aa, Artificial Sequence
  Cyclic GFR-binding peptide
PQDLSPISILFIVGRTPKVYKQYEM

SEQ ID NO: 54812 - protein, 30 aa, Artificial Sequence
  Cyclic GFR-binding peptide
  MOD_RES (2)..(2): Xaa is C or S
TXAPTKLEPLTVLYYDDSSNVIEQLSNNMV

SEQ ID NO: 54813 - protein, 39 aa, Artificial Sequence; identical to SEQ ID NO: 12891
  Cyclic GFR-binding peptide
  MOD_RES (4)..(36)..(38): Xaa is C or S

SEQ ID NO: 54814 - protein, 30 aa, Artificial Sequence
  Cyclic GFR-binding peptide
  MOD_RES (3)..(4): Xaa is C or S
KAXXVPTELEPLTMLYYDENEKVVEQLSND

SEQ ID NO: 54815 - protein, 36 aa, Artificial Sequence; identical to SEQ ID NO: 12893
  Cyclic GFR-binding peptide
  MOD_RES (5)..(6): Xaa is C or S

SEQ ID NO: 54816 - protein, 22 aa, Artificial Sequence
  Cyclic GFR-binding peptide
EPLTILYYDSANNVVEQLSNDM

SEQ ID NO: 54817 - protein, 29 aa, Artificial Sequence
  Cyclic GFR-binding peptide
  MOD_RES (1)..(1): Xaa is C or S
XVPQALEPLTILYYVGRKPKVEQLSNMIV

SEQ ID NO: 54818 - protein, 27 aa, Artificial Sequence
  Cyclic GFR-binding peptide
TELEPLTMLYYDEYDKVVEQLSNEMVV

SEQ ID NO: 54819 - protein, 39 aa, Artificial Sequence; identical to SEQ ID NO: 12895
  Cyclic GFR-binding peptide
  MOD_RES (4)..(5)..(36)..(38): Xaa is C or S

SEQ ID NO: 54820 - protein, 33 aa, Artificial Sequence
  Cyclic GFR-binding peptide
  MOD_RES (4)..(5): Xaa is C or S
PKPXXAPTKLEPLPVVYYDDSSNVIEQLSNNMV

SEQ ID NO: 54821 - protein, 29 aa, Artificial Sequence
  Cyclic GFR-binding peptide
APTKLEPLTVLYYDDSSNVIEQLSNNMVV

SEQ ID NO: 54822 - protein, 32 aa, Artificial Sequence; identical to SEQ ID NO: 12898
  Cyclic GFR-binding peptide
  MOD_RES (1)..(2): Xaa is C or S

SEQ ID NO: 54823 - protein, 23 aa, Artificial Sequence
  Cyclic GFR-binding peptide
TELEPLPMVYYDEYDKVVEQLSN

SEQ ID NO: 54824 - protein, 39 aa, Artificial Sequence; identical to SEQ ID NO: 12900
  Cyclic GFR-binding peptide
  MOD_RES (3)..(4)..(36)..(38): Xaa is C or S

SEQ ID NO: 54825 - protein, 35 aa, Artificial Sequence; identical to SEQ ID NO: 12901
  Cyclic GFR-binding peptide
  MOD_RES (32)..(34): Xaa is C or S

SEQ ID NO: 54826 - protein, 34 aa, Artificial Sequence
  Cyclic GFR-binding peptide
  MOD_RES (7)..(7): Xaa is C or S
HVTKPTXAPTKLEPLTVLYYDDSSNVIEQLSNNM

SEQ ID NO: 54827 - protein, 28 aa, Artificial Sequence
  Cyclic GFR-binding peptide
  MOD_RES (1)..(2): Xaa is C or S
XXVSQDLEPLPIVYYIGKTPKIEQLSNM

SEQ ID NO: 54828 - protein, 42 aa, Artificial Sequence; identical to SEQ ID NO: 12904
  Cyclic GFR-binding peptide
  MOD_RES (6)..(7)..(39)..(41): Xaa is C or S

SEQ ID NO: 54829 - protein, 36 aa, Artificial Sequence; identical to SEQ ID NO: 12905
  Cyclic GFR-binding peptide
  MOD_RES (1)..(33)..(35): Xaa is C or S

SEQ ID NO: 54830 - protein, 30 aa, Artificial Sequence
  Cyclic GFR-binding peptide
  MOD_RES (29)..(29): Xaa is C or S
ELEPLPMVYYDEYDKVVEQLSNEMVVEGXG

SEQ ID NO: 54831 - protein, 34 aa, Artificial Sequence
  Cyclic GFR-binding peptide
  MOD_RES (5)..(6): Xaa is C or S
VPKPXXAPTKLSPISVLFIDDSSNVIYKQYENMV

SEQ ID NO: 54832 - protein, 37 aa, Artificial Sequence; identical to SEQ ID NO: 12906
  Cyclic GFR-binding peptide
  MOD_RES (5)..(6)..(37): Xaa is C or S

SEQ ID NO: 54833 - protein, 29 aa, Artificial Sequence
  Cyclic GFR-binding peptide
  MOD_RES (3)..(4): Xaa is C or S
PTXXVPTRLEPLTILYYDSANNVVEQLSN

SEQ ID NO: 54834 - protein, 29 aa, Artificial Sequence
  Cyclic GFR-binding peptide
  MOD_RES (29)..(29): Xaa is C or S
ELEPLTMLYYDEYDKVVEQLSNEMVVEGX

SEQ ID NO: 54835 - protein, 31 aa, Artificial Sequence; identical to SEQ ID NO: 12907
  Cyclic GFR-binding peptide
  MOD_RES (1)..(1): Xaa is C or S

SEQ ID NO: 54836 - protein, 39 aa, Artificial Sequence; identical to SEQ ID NO: 12909
  Cyclic GFR-binding peptide
  MOD_RES (5)..(6)..(38): Xaa is C or S

SEQ ID NO: 54837 - protein, 35 aa, Artificial Sequence; identical to SEQ ID NO: 12911
  Cyclic GFR-binding peptide
  MOD_RES (32)..(34): Xaa is C or S

SEQ ID NO: 54838 - protein, 28 aa, Artificial Sequence
  Cyclic GFR-binding peptide
  MOD_RES (28)..(28): Xaa is C or S
LEPLTMLYYDENEKVVEQLSNDMVVEGX

SEQ ID NO: 54839 - protein, 32 aa, Artificial Sequence; identical to SEQ ID NO: 12913
  Cyclic GFR-binding peptide
  MOD_RES (1)..(2): Xaa is C or S

SEQ ID NO: 54840 - protein, 34 aa, Artificial Sequence
  Cyclic GFR-binding peptide
  MOD_RES (5)..(6): Xaa is C or S
TPPTXXVPTRLEPLTILYYDSANNVVEQLSNDMV

SEQ ID NO: 54841 - protein, 31 aa, Artificial Sequence
  Cyclic GFR-binding peptide
  MOD_RES (1)..(2): Xaa is C or S
XXVPTELEPLTMLYYDENEKVVEQLSNDMVV

SEQ ID NO: 54842 - protein, 29 aa, Artificial Sequence
  Cyclic GFR-binding peptide
VPTELEPLPMVYYDENEKVVEQLSNDMVV

SEQ ID NO: 54843 - protein, 32 aa, Artificial Sequence; identical to SEQ ID NO: 12914
  Cyclic GFR-binding peptide
  MOD_RES (32)..(32): Xaa is C or S

SEQ ID NO: 54844 - protein, 24 aa, Artificial Sequence
  Cyclic GFR-binding peptide
SPISMLFIDENEKVVYKQYEDMVV

SEQ ID NO: 54845 - protein, 39 aa, Artificial Sequence; identical to SEQ ID NO: 12916
  Cyclic GFR-binding peptide
  MOD_RES (4)..(5)..(37)..(39): Xaa is C or S

SEQ ID NO: 54846 - protein, 36 aa, Artificial Sequence; identical to SEQ ID NO: 12917
  Cyclic GFR-binding peptide
  MOD_RES (5)..(5): Xaa is C or S

SEQ ID NO: 54847 - protein, 33 aa, Artificial Sequence
  Cyclic GFR-binding peptide
  MOD_RES (3)..(4): Xaa is C or S
SPXXVPQDLEPLPIVYYVGRTPKVEQLSNMVVK

SEQ ID NO: 54848 - protein, 30 aa, Artificial Sequence
  Cyclic GFR-binding peptide
  MOD_RES (29)..(29): Xaa is C or S
RLEPLPIVYYDSANNVVEQLSNDMVVESXG

SEQ ID NO: 54849 - protein, 22 aa, Artificial Sequence
  Cyclic GFR-binding peptide
SPISVLFIDDSSNVIYKQYENM

SEQ ID NO: 54850 - protein, 32 aa, Artificial Sequence
  Cyclic GFR-binding peptide
  MOD_RES (29)..(31): Xaa is C or S
QDLEPLPIVYYIGKTPKIEQLSNMIVKSXKXS

SEQ ID NO: 54851 - protein, 33 aa, Artificial Sequence
  Cyclic GFR-binding peptide
  MOD_RES (5)..(6): Xaa is C or S
IPKAXXVPTELEPLTMLYYDEYDKVVEQLSNEM

SEQ ID NO: 54852 - protein, 34 aa, Artificial Sequence; identical to SEQ ID NO: 12918
  Cyclic GFR-binding peptide
  MOD_RES (2)..(34): Xaa is C or S

SEQ ID NO: 54853 - protein, 35 aa, Artificial Sequence; identical to SEQ ID NO: 12919
  Cyclic GFR-binding peptide
  MOD_RES (4)..(5): Xaa is C or S

SEQ ID NO: 54854 - protein, 29 aa, Artificial Sequence
  Cyclic GFR-binding peptide
  MOD_RES (2)..(2): Xaa is C or S
TXAPTKLSPISVLFIDDSSNVIYKQYENM

SEQ ID NO: 54855 - protein, 20 aa, Artificial Sequence
  Cyclic GFR-binding peptide
SAISILYLDSANNVVLKNYQ

SEQ ID NO: 54856 - protein, 24 aa, Artificial Sequence
  Cyclic GFR-binding peptide
PTQLEPLPVVYYDDSSNVIEQLSN

SEQ ID NO: 54857 - protein, 30 aa, Artificial Sequence
  Cyclic GFR-binding peptide
  MOD_RES (30)..(30): Xaa is C or S
TELEPLPMVYYDENEKVVEQLSNDMVVEGX

SEQ ID NO: 54858 - protein, 22 aa, Artificial Sequence
  Cyclic GFR-binding peptide
EPLPIVYYVGRTPKVEQLSNMV

SEQ ID NO: 54859 - protein, 22 aa, Artificial Sequence
  Cyclic GFR-binding peptide
LSAISILYLDSANNVVLKNYQD

SEQ ID NO: 54860 - protein, 22 aa, Artificial Sequence
  Cyclic GFR-binding peptide
LEPLPIVYYDSANNVVEQLSND

SEQ ID NO: 54861 - protein, 37 aa, Artificial Sequence; identical to SEQ ID NO: 12923
  Cyclic GFR-binding peptide
  MOD_RES (2)..(3)..(34)..(36): Xaa is C or S

SEQ ID NO: 54862 - protein, 39 aa, Artificial Sequence; identical to SEQ ID NO: 12924
  Cyclic GFR-binding peptide
  MOD_RES (4)..(5)..(37)..(39): Xaa is C or S

SEQ ID NO: 54863 - protein, 29 aa, Artificial Sequence
  Cyclic GFR-binding peptide
  MOD_RES (2)..(3): Xaa is C or S
AXXVPTELEPLTMLYYDENEKVVEQLSND

SEQ ID NO: 54864 - protein, 32 aa, Artificial Sequence
  Cyclic GFR-binding peptide
  MOD_RES (2)..(3): Xaa is C or S
PXXVPQDLEPLPIVYYVGRTPKVEQLSNMVVK

SEQ ID NO: 54865 - protein, 32 aa, Artificial Sequence
  Cyclic GFR-binding peptide
  MOD_RES (29)..(31): Xaa is C or S
RLSAISILYLDSANNVVLKNYQDMVVESXGXR

SEQ ID NO: 54866 - protein, 31 aa, Artificial Sequence; identical to SEQ ID NO: 12928
  Cyclic GFR-binding peptide
  MOD_RES (1)..(1): Xaa is C or S

SEQ ID NO: 54867 - protein, 36 aa, Artificial Sequence; identical to SEQ ID NO: 12930
  Cyclic GFR-binding peptide
  MOD_RES (5)..(6): Xaa is C or S

SEQ ID NO: 54868 - protein, 33 aa, Artificial Sequence; identical to SEQ ID NO: 12932
  Cyclic GFR-binding peptide
  MOD_RES (2)..(2): Xaa is C or S

SEQ ID NO: 54869 - protein, 35 aa, Artificial Sequence
  Cyclic GFR-binding peptide
  MOD_RES (6)..(6): Xaa is C or S
VTKPTXAPTKLEPLTVLYYDDSSNVIEQLSNNMVV

SEQ ID NO: 54870 - protein, 28 aa, Artificial Sequence
  Cyclic GFR-binding peptide
SQDLSPISILFIIGKTPKIYKQYEMIVK

SEQ ID NO: 54871 - protein, 27 aa, Artificial Sequence
  Cyclic GFR-binding peptide
  MOD_RES (1)..(2): Xaa is C or S
XXVPTELEPLTMLYYDEYDKVVEQLSN

SEQ ID NO: 54872 - protein, 36 aa, Artificial Sequence; identical to SEQ ID NO: 12933
  Cyclic GFR-binding peptide
  MOD_RES (4)..(36): Xaa is C or S

SEQ ID NO: 54873 - protein, 30 aa, Artificial Sequence
  Cyclic GFR-binding peptide
  MOD_RES (4)..(5): Xaa is C or S
AAPXXVPQALEPLTILYYVGRKPKVEQLSN

SEQ ID NO: 54874 - protein, 26 aa, Artificial Sequence
  Cyclic GFR-binding peptide
PTKLEPLPVVYYDDSSNVIEQLSNNM

SEQ ID NO: 54875 - protein, 28 aa, Artificial Sequence
  Cyclic GFR-binding peptide
  MOD_RES (1)..(2): Xaa is C or S
XXVSQDLSPISILFIIGKTPKIYKQYEM

SEQ ID NO: 54876 - protein, 38 aa, Artificial Sequence; identical to SEQ ID NO: 12936
  Cyclic GFR-binding peptide
  MOD_RES (5)..(37): Xaa is C or S

SEQ ID NO: 54877 - protein, 31 aa, Artificial Sequence
  Cyclic GFR-binding peptide
  MOD_RES (5)..(6): Xaa is C or S
TPPTXXVPTRLEPLTILYYDSANNVVEQLSN

SEQ ID NO: 54878 - protein, 33 aa, Artificial Sequence; identical to SEQ ID NO: 12937
  Cyclic GFR-binding peptide
  MOD_RES (2)..(3): Xaa is C or S

SEQ ID NO: 54879 - protein, 25 aa, Artificial Sequence
  Cyclic GFR-binding peptide
PTQLEPLPVVYYDDSSNVIEQLSNN

SEQ ID NO: 54880 - protein, 32 aa, Artificial Sequence
  Cyclic GFR-binding peptide
  MOD_RES (6)..(7): Xaa is C or S
KIPKAXXVPTELEPLPMVYYDENEKVVEQLSN

SEQ ID NO: 54881 - protein, 31 aa, Artificial Sequence
  Cyclic GFR-binding peptide
  MOD_RES (2)..(3): Xaa is C or S
TXXVPTRLSAISILYLDSANNVVLKNYQDMV

SEQ ID NO: 54882 - protein, 28 aa, Artificial Sequence
  Cyclic GFR-binding peptide
  MOD_RES (27)..(27): Xaa is C or S
SPISMLFIDENEKVVYKQYEDMVVEGXG

SEQ ID NO: 54883 - protein, 26 aa, Artificial Sequence
  Cyclic GFR-binding peptide
ELEPLPMVYYDENEKVVEQLSNDMVV

SEQ ID NO: 54884 - protein, 40 aa, Artificial Sequence; identical to SEQ ID NO: 12938
  Cyclic GFR-binding peptide
  MOD_RES (5)..(6)..(38)..(40): Xaa is C or S

SEQ ID NO: 54885 - protein, 32 aa, Artificial Sequence; identical to SEQ ID NO: 12939
  Cyclic GFR-binding peptide
  MOD_RES (1)..(1): Xaa is C or S

SEQ ID NO: 54886 - protein, 29 aa, Artificial Sequence
  Cyclic GFR-binding peptide
  MOD_RES (1)..(2): Xaa is C or S
XXVPTELEPLTMLYYDEYDKVVEQLSNEM

SEQ ID NO: 54887 - protein, 25 aa, Artificial Sequence
  Cyclic GFR-binding peptide
VPQDLEPLPIVYYVGRTPKVEQLSN

SEQ ID NO: 54888 - protein, 26 aa, Artificial Sequence
  Cyclic GFR-binding peptide
TRLEPLPIVYYDSANNVVEQLSNDMV

SEQ ID NO: 54889 - protein, 31 aa, Artificial Sequence
  Cyclic GFR-binding peptide
  MOD_RES (30)..(30): Xaa is C or S
SQDLEPLPIVYYIGKTPKIEQLSNMIVKSXK

SEQ ID NO: 54890 - protein, 30 aa, Artificial Sequence
  Cyclic GFR-binding peptide
  MOD_RES (1)..(1): Xaa is C or S
XVPTELEPLPMVYYDEYDKVVEQLSNEMVV

SEQ ID NO: 54891 - protein, 35 aa, Artificial Sequence; identical to SEQ ID NO: 12942
  Cyclic GFR-binding peptide
  MOD_RES (3)..(4)..(35): Xaa is C or S

SEQ ID NO: 54892 - protein, 38 aa, Artificial Sequence; identical to SEQ ID NO: 12943
  Cyclic GFR-binding peptide
  MOD_RES (4)..(5)..(36)..(38): Xaa is C or S

SEQ ID NO: 54893 - protein, 35 aa, Artificial Sequence; identical to SEQ ID NO: 12944
  Cyclic GFR-binding peptide
  MOD_RES (3)..(4): Xaa is C or S

SEQ ID NO: 54894 - protein, 31 aa, Artificial Sequence
  Cyclic GFR-binding peptide
  MOD_RES (1)..(2): Xaa is C or S
XXAPTKLSPISVLFIDDSSNVIYKQYENMVV

SEQ ID NO: 54895 - protein, 37 aa, Artificial Sequence; identical to SEQ ID NO: 12946
  Cyclic GFR-binding peptide
  MOD_RES (4)..(5)..(37): Xaa is C or S

SEQ ID NO: 54896 - protein, 27 aa, Artificial Sequence
  Cyclic GFR-binding peptide
QLSPISVLFIDDSSNVIYKQYENMVVR

SEQ ID NO: 54897 - protein, 35 aa, Artificial Sequence; identical to SEQ ID NO: 12949
  Cyclic GFR-binding peptide
  MOD_RES (3)..(35): Xaa is C or S

SEQ ID NO: 54898 - protein, 27 aa, Artificial Sequence
  Cyclic GFR-binding peptide
  MOD_RES (1)..(1): Xaa is C or S
XVPTELEPLTMLYYDENEKVVEQLSND

SEQ ID NO: 54899 - protein, 30 aa, Artificial Sequence
  Cyclic GFR-binding peptide
  MOD_RES (30)..(30): Xaa is C or S
TRLSAISILYLDSANNVVLKNYQDMVVESX

SEQ ID NO: 54900 - protein, 29 aa, Artificial Sequence
  Cyclic GFR-binding peptide
  MOD_RES (27)..(29): Xaa is C or S
EPLPVVYYDDSSNVIEQLSNNMVVRSXGX

SEQ ID NO: 54901 - protein, 40 aa, Artificial Sequence; identical to SEQ ID NO: 12952
  Cyclic GFR-binding peptide
  MOD_RES (5)..(6)..(38)..(40): Xaa is C or S

SEQ ID NO: 54902 - protein, 38 aa, Artificial Sequence; identical to SEQ ID NO: 12953
  Cyclic GFR-binding peptide
  MOD_RES (6)..(7): Xaa is C or S

SEQ ID NO: 54903 - protein, 32 aa, Artificial Sequence
  Cyclic GFR-binding peptide
  MOD_RES (30)..(32): Xaa is C or S
SQDLSPISILFIIGKTPKIYKQYEMIVKSXKX

SEQ ID NO: 54904 - protein, 26 aa, Artificial Sequence
  Cyclic GFR-binding peptide
VPTRLEPLTILYYDSANNVVEQLSND

SEQ ID NO: 54905 - protein, 30 aa, Artificial Sequence
  Cyclic GFR-binding peptide
  MOD_RES (27)..(29): Xaa is C or S
EPLTMLYYDENEKVVEQLSNDMVVEGXGXR

SEQ ID NO: 54906 - protein, 26 aa, Artificial Sequence
  Cyclic GFR-binding peptide
APTKLEPLTVLYYDDSSNVIEQLSNN

SEQ ID NO: 54907 - protein, 31 aa, Artificial Sequence
  Cyclic GFR-binding peptide
  MOD_RES (5)..(6): Xaa is C or S
VPKPXXAPTKLSPISVLFIDDSSNVIYKQYE

SEQ ID NO: 54908 - protein, 30 aa, Artificial Sequence
  Cyclic GFR-binding peptide
PTKLEPLTVLYYDDSSNVIEQLSNNMVVRS

SEQ ID NO: 54909 - protein, 31 aa, Artificial Sequence; identical to SEQ ID NO: 12959
  Cyclic GFR-binding peptide

SEQ ID NO: 54910 - protein, 37 aa, Artificial Sequence; identical to SEQ ID NO: 12958
  Cyclic GFR-binding peptide
  MOD_RES (4)..(5)..(37): Xaa is C or S

SEQ ID NO: 54911 - protein, 31 aa, Artificial Sequence
  Cyclic GFR-binding peptide
  MOD_RES (29)..(31): Xaa is C or S
ELEPLPMVYYDENEKVVEQLSNDMVVEGXGX

SEQ ID NO: 54912 - protein, 38 aa, Artificial Sequence; identical to SEQ ID NO: 12960
  Cyclic GFR-binding peptide
  MOD_RES (5)..(6)..(38): Xaa is C or S

SEQ ID NO: 54913 - protein, 42 aa, Artificial Sequence; identical to SEQ ID NO: 12961
  Cyclic GFR-binding peptide
  MOD_RES (6)..(7)..(39)..(41): Xaa is C or S

SEQ ID NO: 54914 - protein, 35 aa, Artificial Sequence; identical to SEQ ID NO: 12962
  Cyclic GFR-binding peptide
  MOD_RES (4)..(5): Xaa is C or S

SEQ ID NO: 54915 - protein, 33 aa, Artificial Sequence; identical to SEQ ID NO: 12963
  Cyclic GFR-binding peptide
  MOD_RES (2)..(3): Xaa is C or S

SEQ ID NO: 54916 - protein, 36 aa, Artificial Sequence; identical to SEQ ID NO: 12964
  Cyclic GFR-binding peptide
  MOD_RES (2)..(3)..(35): Xaa is C or S

SEQ ID NO: 54917 - protein, 36 aa, Artificial Sequence
  Cyclic GFR-binding peptide
  MOD_RES (6)..(7): Xaa is C or S
TVPKPXXAPTQLEPLPVVYYDDSSNVIEQLSNNMVV

SEQ ID NO: 54918 - protein, 30 aa, Artificial Sequence
  Cyclic GFR-binding peptide
  MOD_RES (30)..(30): Xaa is C or S
SQDLSPISILFIIGKTPKIYKQYEMIVKSX

SEQ ID NO: 54919 - protein, 23 aa, Artificial Sequence
  Cyclic GFR-binding peptide
TELEPLTMLYYDENEKVVEQLSN

SEQ ID NO: 54920 - protein, 32 aa, Artificial Sequence
  Cyclic GFR-binding peptide
  MOD_RES (2)..(3): Xaa is C or S
AXXVPTELEPLPMVYYDENEKVVEQLSNDMVV

SEQ ID NO: 54921 - protein, 36 aa, Artificial Sequence; identical to SEQ ID NO: 12968
  Cyclic GFR-binding peptide
  MOD_RES (2)..(3)..(35): Xaa is C or S

SEQ ID NO: 54922 - protein, 29 aa, Artificial Sequence
  Cyclic GFR-binding peptide
PTELEPLTMLYYDEYDKVVEQLSNEMVVE

SEQ ID NO: 54923 - protein, 36 aa, Artificial Sequence; identical to SEQ ID NO: 12970
  Cyclic GFR-binding peptide
  MOD_RES (5)..(5): Xaa is C or S

SEQ ID NO: 54924 - protein, 40 aa, Artificial Sequence; identical to SEQ ID NO: 12971
  Cyclic GFR-binding peptide
  MOD_RES (5)..(6)..(37)..(39): Xaa is C or S

SEQ ID NO: 54925 - protein, 22 aa, Artificial Sequence
  Cyclic GFR-binding peptide
KLEPLTVLYYDDSSNVIEQLSN

SEQ ID NO: 54926 - protein, 30 aa, Artificial Sequence
  Cyclic GFR-binding peptide
  MOD_RES (4)..(5): Xaa is C or S
PPTXXVPTRLSAISILYLDSANNVVLKNYQ

SEQ ID NO: 54927 - protein, 40 aa, Artificial Sequence; identical to SEQ ID NO: 12972
  Cyclic GFR-binding peptide
  MOD_RES (6)..(7)..(39): Xaa is C or S

SEQ ID NO: 54928 - protein, 28 aa, Artificial Sequence
  Cyclic GFR-binding peptide
QLEPLPVVYYDDSSNVIEQLSNNMVVRA

SEQ ID NO: 54929 - protein, 29 aa, Artificial Sequence
  Cyclic GFR-binding peptide
  MOD_RES (2)..(3): Xaa is C or S
PXXVSQDLSPISILFIIGKTPKIYKQYEM

SEQ ID NO: 54930 - protein, 34 aa, Artificial Sequence; identical to SEQ ID NO: 12974
  Cyclic GFR-binding peptide
  MOD_RES (2)..(3): Xaa is C or S

SEQ ID NO: 54931 - protein, 38 aa, Artificial Sequence; identical to SEQ ID NO: 12975
  Cyclic GFR-binding peptide
  MOD_RES (4)..(5)..(37): Xaa is C or S

SEQ ID NO: 54932 - protein, 33 aa, Artificial Sequence
  Cyclic GFR-binding peptide
  MOD_RES (6)..(7): Xaa is C or S
YVPKPXXAPTKLEPLTVLYYDDSSNVIEQLSNN

SEQ ID NO: 54933 - protein, 32 aa, Artificial Sequence
  Cyclic GFR-binding peptide
  MOD_RES (4)..(4): Xaa is C or S
KPTXAPTKLEPLTVLYYDDSSNVIEQLSNNMV

SEQ ID NO: 54934 - protein, 33 aa, Artificial Sequence
  Cyclic GFR-binding peptide
  MOD_RES (6)..(7): Xaa is C or S
ASAAPXXVPQALSPISILFIVGRKPKVYKQYEM

SEQ ID NO: 54935 - protein, 37 aa, Artificial Sequence; identical to SEQ ID NO: 12976
  Cyclic GFR-binding peptide
  MOD_RES (1)..(2)..(34)..(36): Xaa is C or S

SEQ ID NO: 54936 - protein, 31 aa, Artificial Sequence; identical to SEQ ID NO: 12977
  Cyclic GFR-binding peptide

SEQ ID NO: 54937 - protein, 36 aa, Artificial Sequence
  Cyclic GFR-binding peptide
  MOD_RES (6)..(7): Xaa is C or S
YVPKPXXAPTKLEPLPVVYYDDSSNVIEQLSNNMVV

SEQ ID NO: 54938 - protein, 25 aa, Artificial Sequence
  Cyclic GFR-binding peptide
PTQLSPISVLFIDDSSNVIYKQYEN

SEQ ID NO: 54939 - protein, 30 aa, Artificial Sequence
  Cyclic GFR-binding peptide
  MOD_RES (3)..(4): Xaa is C or S
KPXXAPTQLEPLPVVYYDDSSNVIEQLSNN

SEQ ID NO: 54940 - protein, 29 aa, Artificial Sequence
  Cyclic GFR-binding peptide
  MOD_RES (29)..(29): Xaa is C or S
QDLEPLPIVYYIGKTPKIEQLSNMIVKSX

SEQ ID NO: 54941 - protein, 30 aa, Artificial Sequence
  Cyclic GFR-binding peptide
  MOD_RES (28)..(30): Xaa is C or S
LEPLPVVYYDDSSNVIEQLSNNMVVRAXGX

SEQ ID NO: 54942 - protein, 27 aa, Artificial Sequence
  Cyclic GFR-binding peptide
VPTELEPLPMVYYDENEKVVEQLSNDM

SEQ ID NO: 54943 - protein, 34 aa, Artificial Sequence; identical to SEQ ID NO: 12981
  Cyclic GFR-binding peptide
  MOD_RES (3)..(4): Xaa is C or S

SEQ ID NO: 54944 - protein, 37 aa, Artificial Sequence; identical to SEQ ID NO: 12982
  Cyclic GFR-binding peptide
  MOD_RES (5)..(6): Xaa is C or S

SEQ ID NO: 54945 - protein, 27 aa, Artificial Sequence
  Cyclic GFR-binding peptide
VPTELSPISMLFIDEYDKVVYKQYEEM

SEQ ID NO: 54946 - protein, 25 aa, Artificial Sequence
  Cyclic GFR-binding peptide
PQDLEPLPIVYYVGRTPKVEQLSNM

SEQ ID NO: 54947 - protein, 31 aa, Artificial Sequence; identical to SEQ ID NO: 12983
  Cyclic GFR-binding peptide
  MOD_RES (1)..(1): Xaa is C or S

SEQ ID NO: 54948 - protein, 26 aa, Artificial Sequence
  Cyclic GFR-binding peptide
DLEPLPIVYYIGKTPKIEQLSNMIVK

SEQ ID NO: 54949 - protein, 36 aa, Artificial Sequence; identical to SEQ ID NO: 12985
  Cyclic GFR-binding peptide
  MOD_RES (1)..(2)..(34)..(36): Xaa is C or S

SEQ ID NO: 54950 - protein, 28 aa, Artificial Sequence
  Cyclic GFR-binding peptide
  MOD_RES (26)..(28): Xaa is C or S
SPISILFIVGRKPKVYKQYEMIVRSXKX

SEQ ID NO: 54951 - protein, 26 aa, Artificial Sequence
  Cyclic GFR-binding peptide
PTELEPLPMVYYDENEKVVEQLSNDM

SEQ ID NO: 54952 - protein, 33 aa, Artificial Sequence
  Cyclic GFR-binding peptide
  MOD_RES (4)..(5): Xaa is C or S
PKPXXAPTKLSPISVLFIDDSSNVIYKQYENMV

SEQ ID NO: 54953 - protein, 34 aa, Artificial Sequence
  Cyclic GFR-binding peptide
  MOD_RES (6)..(7): Xaa is C or S
ASASPXXVSQDLSPISILFIIGKTPKIYKQYEMI

SEQ ID NO: 54954 - protein, 32 aa, Artificial Sequence
  Cyclic GFR-binding peptide
  MOD_RES (31)..(31): Xaa is C or S
PTRLSAISILYLDSANNVVLKNYQDMVVESXG

SEQ ID NO: 54955 - protein, 27 aa, Artificial Sequence
  Cyclic GFR-binding peptide
  MOD_RES (1)..(2): Xaa is C or S
XXVPTRLEPLPIVYYDSANNVVEQLSN

SEQ ID NO: 54956 - protein, 23 aa, Artificial Sequence
  Cyclic GFR-binding peptide
LEPLPMVYYDENEKVVEQLSNDM

SEQ ID NO: 54957 - protein, 32 aa, Artificial Sequence
  Cyclic GFR-binding peptide
  MOD_RES (29)..(31): Xaa is C or S
QALSPISILFIVGRKPKVYKQYEMIVRSXKXS

SEQ ID NO: 54958 - protein, 29 aa, Artificial Sequence
  Cyclic GFR-binding peptide
  MOD_RES (1)..(1): Xaa is C or S
XVPQDLEPLPIVYYVGRTPKVEQLSNMVV

SEQ ID NO: 54959 - protein, 34 aa, Artificial Sequence; identical to SEQ ID NO: 12987
  Cyclic GFR-binding peptide
  MOD_RES (2)..(3)..(34): Xaa is C or S

SEQ ID NO: 54960 - protein, 37 aa, Artificial Sequence; identical to SEQ ID NO: 12989
  Cyclic GFR-binding peptide
  MOD_RES (6)..(7): Xaa is C or S

SEQ ID NO: 54961 - protein, 32 aa, Artificial Sequence
  Cyclic GFR-binding peptide
  MOD_RES (30)..(32): Xaa is C or S
TELSPISMLFIDEYDKVVYKQYEEMVVEGXGX

SEQ ID NO: 54962 - protein, 22 aa, Artificial Sequence
  Cyclic GFR-binding peptide
EPLPMVYYDEYDKVVEQLSNEM

SEQ ID NO: 54963 - protein, 37 aa, Artificial Sequence; identical to SEQ ID NO: 12994
  Cyclic GFR-binding peptide
  MOD_RES (1)..(2)..(34)..(36): Xaa is C or S

SEQ ID NO: 54964 - protein, 29 aa, Artificial Sequence
  Cyclic GFR-binding peptide
  MOD_RES (28)..(28): Xaa is C or S
LSPISMLFIDENEKVVYKQYEDMVVEGXG

SEQ ID NO: 54965 - protein, 27 aa, Artificial Sequence
  Cyclic GFR-binding peptide
  MOD_RES (1)..(1): Xaa is C or S
XVPTELEPLPMVYYDENEKVVEQLSND

SEQ ID NO: 54966 - protein, 36 aa, Artificial Sequence; identical to SEQ ID NO: 12995
  Cyclic GFR-binding peptide
  MOD_RES (1)..(2)..(34)..(36): Xaa is C or S

SEQ ID NO: 54967 - protein, 26 aa, Artificial Sequence
  Cyclic GFR-binding peptide
EPLTMLYYDENEKVVEQLSNDMVVEG

SEQ ID NO: 54968 - protein, 38 aa, Artificial Sequence; identical to SEQ ID NO: 12997
  Cyclic GFR-binding peptide
  MOD_RES (5)..(6)..(37): Xaa is C or S

SEQ ID NO: 54969 - protein, 38 aa, Artificial Sequence; identical to SEQ ID NO: 12998
  Cyclic GFR-binding peptide
  MOD_RES (5)..(6)..(38): Xaa is C or S

SEQ ID NO: 54970 - protein, 34 aa, Artificial Sequence; identical to SEQ ID NO: 13000
  Cyclic GFR-binding peptide
  MOD_RES (1)..(33): Xaa is C or S

SEQ ID NO: 54971 - protein, 37 aa, Artificial Sequence; identical to SEQ ID NO: 13001
  Cyclic GFR-binding peptide
  MOD_RES (5)..(6)..(37): Xaa is C or S

SEQ ID NO: 54972 - protein, 29 aa, Artificial Sequence
  Cyclic GFR-binding peptide
VPTELEPLPMVYYDEYDKVVEQLSNEMVV

SEQ ID NO: 54973 - protein, 34 aa, Artificial Sequence; identical to SEQ ID NO: 13004
  Cyclic GFR-binding peptide
  MOD_RES (3)..(4): Xaa is C or S

SEQ ID NO: 54974 - protein, 28 aa, Artificial Sequence
  Cyclic GFR-binding peptide
TRLEPLPIVYYDSANNVVEQLSNDMVVE

SEQ ID NO: 54975 - protein, 29 aa, Artificial Sequence
  Cyclic GFR-binding peptide
  MOD_RES (1)..(1): Xaa is C or S
XVSQDLEPLPIVYYIGKTPKIEQLSNMIV

SEQ ID NO: 54976 - protein, 39 aa, Artificial Sequence; identical to SEQ ID NO: 13011
  Cyclic GFR-binding peptide
  MOD_RES (5)..(6)..(38): Xaa is C or S

SEQ ID NO: 54977 - protein, 31 aa, Artificial Sequence
  Cyclic GFR-binding peptide
  MOD_RES (31)..(31): Xaa is C or S
PTELEPLTMLYYDEYDKVVEQLSNEMVVEGX

SEQ ID NO: 54978 - protein, 21 aa, Artificial Sequence
  Cyclic GFR-binding peptide
SPISMLFIDENEKVVYKQYED

SEQ ID NO: 54979 - protein, 38 aa, Artificial Sequence; identical to SEQ ID NO: 13013
  Cyclic GFR-binding peptide
  MOD_RES (4)..(5)..(37): Xaa is C or S

SEQ ID NO: 54980 - protein, 31 aa, Artificial Sequence
  Cyclic GFR-binding peptide
  MOD_RES (4)..(5): Xaa is C or S
PKPXXAPTKLEPLTVLYYDDSSNVIEQLSNN

SEQ ID NO: 54981 - protein, 30 aa, Artificial Sequence
  Cyclic GFR-binding peptide
  MOD_RES (28)..(30): Xaa is C or S
LSPISMLFIDENEKVVYKQYEDMVVEGXGX

SEQ ID NO: 54982 - protein, 30 aa, Artificial Sequence
  Cyclic GFR-binding peptide
  MOD_RES (27)..(29): Xaa is C or S
LEPLPIVYYVGRTPKVEQLSNMVVKSXKXS

SEQ ID NO: 54983 - protein, 34 aa, Artificial Sequence; identical to SEQ ID NO: 13016
  Cyclic GFR-binding peptide
  MOD_RES (1)..(33): Xaa is C or S

SEQ ID NO: 54984 - protein, 35 aa, Artificial Sequence; identical to SEQ ID NO: 13019
  Cyclic GFR-binding peptide
  MOD_RES (3)..(4): Xaa is C or S

SEQ ID NO: 54985 - protein, 32 aa, Artificial Sequence
  Cyclic GFR-binding peptide
  MOD_RES (5)..(6): Xaa is C or S
VPKPXXAPTQLEPLTVLYYDDSSNVIEQLSNN

SEQ ID NO: 54986 - protein, 32 aa, Artificial Sequence
  Cyclic GFR-binding peptide
  MOD_RES (2)..(3): Xaa is C or S
AXXVPTELSPISMLFIDENEKVVYKQYEDMVV

SEQ ID NO: 54987 - protein, 35 aa, Artificial Sequence
  Cyclic GFR-binding peptide
  MOD_RES (5)..(6): Xaa is C or S
SASPXXVPQDLEPLPIVYYVGRTPKVEQLSNMVVK

SEQ ID NO: 54988 - protein, 34 aa, Artificial Sequence; identical to SEQ ID NO: 13024
  Cyclic GFR-binding peptide
  MOD_RES (1)..(2)..(34): Xaa is C or S

SEQ ID NO: 54989 - protein, 25 aa, Artificial Sequence
  Cyclic GFR-binding peptide
TELSPISMLFIDENEKVVYKQYEDM

SEQ ID NO: 54990 - protein, 24 aa, Artificial Sequence
  Cyclic GFR-binding peptide
TQLEPLPVVYYDDSSNVIEQLSNN

SEQ ID NO: 54991 - protein, 31 aa, Artificial Sequence
  Cyclic GFR-binding peptide
  MOD_RES (5)..(6): Xaa is C or S
SAAPXXVPQALSPISILFIVGRKPKVYKQYE

SEQ ID NO: 54992 - protein, 41 aa, Artificial Sequence; identical to SEQ ID NO: 13028
  Cyclic GFR-binding peptide
  MOD_RES (6)..(7)..(39)..(41): Xaa is C or S

SEQ ID NO: 54993 - protein, 30 aa, Artificial Sequence
  Cyclic GFR-binding peptide
  MOD_RES (28)..(30): Xaa is C or S
ALEPLTILYYVGRKPKVEQLSNMIVRSXKX

SEQ ID NO: 54994 - protein, 32 aa, Artificial Sequence; identical to SEQ ID NO: 13029
  Cyclic GFR-binding peptide
  MOD_RES (1)..(2): Xaa is C or S

SEQ ID NO: 54995 - protein, 29 aa, Artificial Sequence
  Cyclic GFR-binding peptide
  MOD_RES (28)..(28): Xaa is C or S
DLEPLPIVYYIGKTPKIEQLSNMIVKSXK

SEQ ID NO: 54996 - protein, 38 aa, Artificial Sequence; identical to SEQ ID NO: 13030
  Cyclic GFR-binding peptide
  MOD_RES (6)..(38): Xaa is C or S

SEQ ID NO: 54997 - protein, 35 aa, Artificial Sequence; identical to SEQ ID NO: 13031
  Cyclic GFR-binding peptide
  MOD_RES (2)..(3)..(35): Xaa is C or S

SEQ ID NO: 54998 - protein, 20 aa, Artificial Sequence
  Cyclic GFR-binding peptide
EPLTMLYYDEYDKVVEQLSN

SEQ ID NO: 54999 - protein, 36 aa, Artificial Sequence; identical to SEQ ID NO: 13032
  Cyclic GFR-binding peptide
  MOD_RES (5)..(6): Xaa is C or S

SEQ ID NO: 55000 - protein, 31 aa, Artificial Sequence
  Cyclic GFR-binding peptide
  MOD_RES (30)..(30): Xaa is C or S
TELEPLPMVYYDENEKVVEQLSNDMVVEGXG

SEQ ID NO: 55001 - protein, 30 aa, Artificial Sequence
  Cyclic GFR-binding peptide
  MOD_RES (2)..(2): Xaa is C or S
TXAPTKLSPISVLFIDDSSNVIYKQYENMV

SEQ ID NO: 55002 - protein, 27 aa, Artificial Sequence
  Cyclic GFR-binding peptide
PTKLEPLPVVYYDDSSNVIEQLSNNMV

SEQ ID NO: 55003 - protein, 28 aa, Artificial Sequence
  Cyclic GFR-binding peptide
  MOD_RES (27)..(27): Xaa is C or S
LEPLPIVYYVGRTPKVEQLSNMVVKSXK

SEQ ID NO: 55004 - protein, 38 aa, Artificial Sequence; identical to SEQ ID NO: 13034
  Cyclic GFR-binding peptide
  MOD_RES (2)..(3)..(35)..(37): Xaa is C or S

SEQ ID NO: 55005 - protein, 21 aa, Artificial Sequence
  Cyclic GFR-binding peptide
EPLPVVYYDDSSNVIEQLSNN

SEQ ID NO: 55006 - protein, 36 aa, Artificial Sequence; identical to SEQ ID NO: 13035
  Cyclic GFR-binding peptide
  MOD_RES (3)..(4)..(36): Xaa is C or S

SEQ ID NO: 55007 - protein, 30 aa, Artificial Sequence; identical to SEQ ID NO: 13036
  Cyclic GFR-binding peptide

SEQ ID NO: 55008 - protein, 32 aa, Artificial Sequence
  Cyclic GFR-binding peptide
  MOD_RES (3)..(4): Xaa is C or S
SPXXVPQDLSPISILFIVGRTPKVYKQYEMVV

SEQ ID NO: 55009 - protein, 26 aa, Artificial Sequence
  Cyclic GFR-binding peptide
  MOD_RES (1)..(1): Xaa is C or S
XAPTKLEPLTVLYYDDSSNVIEQLSN

SEQ ID NO: 55010 - protein, 34 aa, Artificial Sequence
  Cyclic GFR-binding peptide
  MOD_RES (31)..(33): Xaa is C or S
PTELSPISMLFIDENEKVVYKQYEDMVVEGXGXR

SEQ ID NO: 55011 - protein, 37 aa, Artificial Sequence; identical to SEQ ID NO: 13041
  Cyclic GFR-binding peptide
  MOD_RES (1)..(2)..(34)..(36): Xaa is C or S

SEQ ID NO: 55012 - protein, 36 aa, Artificial Sequence
  Cyclic GFR-binding peptide
  MOD_RES (6)..(7): Xaa is C or S
KIPKAXXVPTELEPLTMLYYDENEKVVEQLSNDMVV

SEQ ID NO: 55013 - protein, 27 aa, Artificial Sequence
  Cyclic GFR-binding peptide
PQALSPISILFIVGRKPKVYKQYEMIV

SEQ ID NO: 55014 - protein, 33 aa, Artificial Sequence; identical to SEQ ID NO: 13042
  Cyclic GFR-binding peptide
  MOD_RES (1)..(33): Xaa is C or S

SEQ ID NO: 55015 - protein, 36 aa, Artificial Sequence; identical to SEQ ID NO: 13043
  Cyclic GFR-binding peptide
  MOD_RES (1)..(2)..(34)..(36): Xaa is C or S

SEQ ID NO: 55016 - protein, 38 aa, Artificial Sequence; identical to SEQ ID NO: 13044
  Cyclic GFR-binding peptide
  MOD_RES (6)..(7)..(38): Xaa is C or S

SEQ ID NO: 55017 - protein, 33 aa, Artificial Sequence; identical to SEQ ID NO: 13045
  Cyclic GFR-binding peptide
  MOD_RES (31)..(33): Xaa is C or S

SEQ ID NO: 55018 - protein, 24 aa, Artificial Sequence
  Cyclic GFR-binding peptide
ELEPLTMLYYDENEKVVEQLSNDM

SEQ ID NO: 55019 - protein, 30 aa, Artificial Sequence
  Cyclic GFR-binding peptide
  MOD_RES (28)..(30): Xaa is C or S
LEPLTMLYYDENEKVVEQLSNDMVVEGXGX

SEQ ID NO: 55020 - protein, 31 aa, Artificial Sequence; identical to SEQ ID NO: 13046
  Cyclic GFR-binding peptide

SEQ ID NO: 55021 - protein, 30 aa, Artificial Sequence
  Cyclic GFR-binding peptide
  MOD_RES (4)..(4): Xaa is C or S
KPTXAPTKLEPLTVLYYDDSSNVIEQLSNN

SEQ ID NO: 55022 - protein, 25 aa, Artificial Sequence
  Cyclic GFR-binding peptide
TKLSPISVLFIDDSSNVIYKQYENM

SEQ ID NO: 55023 - protein, 37 aa, Artificial Sequence; identical to SEQ ID NO: 13048
  Cyclic GFR-binding peptide
  MOD_RES (2)..(3)..(34)..(36): Xaa is C or S

SEQ ID NO: 55024 - protein, 35 aa, Artificial Sequence; identical to SEQ ID NO: 13051
  Cyclic GFR-binding peptide
  MOD_RES (4)..(5): Xaa is C or S

SEQ ID NO: 55025 - protein, 40 aa, Artificial Sequence; identical to SEQ ID NO: 13052
  Cyclic GFR-binding peptide
  MOD_RES (4)..(5)..(37)..(39): Xaa is C or S

SEQ ID NO: 55026 - protein, 29 aa, Artificial Sequence
  Cyclic GFR-binding peptide
  MOD_RES (27)..(29): Xaa is C or S
NAISILYFDSANNVVLKKYRDMVVESXGX

SEQ ID NO: 55027 - protein, 26 aa, Artificial Sequence
  Cyclic GFR-binding peptide
EPLPMVYYDENEKVVEQLSNDMVVEG

SEQ ID NO: 55028 - protein, 30 aa, Artificial Sequence
  Cyclic GFR-binding peptide
  MOD_RES (3)..(3): Xaa is C or S
PTXAPTKLEPLTVLYYDDSSNVIEQLSNNM

SEQ ID NO: 55029 - protein, 29 aa, Artificial Sequence
  Cyclic GFR-binding peptide
  MOD_RES (3)..(4): Xaa is C or S
KAXXVPTELEPLPMVYYDENEKVVEQLSN

SEQ ID NO: 55030 - protein, 37 aa, Artificial Sequence; identical to SEQ ID NO: 13056
  Cyclic GFR-binding peptide
  MOD_RES (4)..(5)..(36): Xaa is C or S

SEQ ID NO: 55031 - protein, 31 aa, Artificial Sequence; identical to SEQ ID NO: 13057
  Cyclic GFR-binding peptide
  MOD_RES (1)..(1): Xaa is C or S

SEQ ID NO: 55032 - protein, 35 aa, Artificial Sequence; identical to SEQ ID NO: 13058
  Cyclic GFR-binding peptide
  MOD_RES (32)..(34): Xaa is C or S

SEQ ID NO: 55033 - protein, 34 aa, Artificial Sequence; identical to SEQ ID NO: 13059
  Cyclic GFR-binding peptide
  MOD_RES (2)..(3): Xaa is C or S

SEQ ID NO: 55034 - protein, 40 aa, Artificial Sequence; identical to SEQ ID NO: 13060
  Cyclic GFR-binding peptide
  MOD_RES (5)..(6)..(38)..(40): Xaa is C or S

SEQ ID NO: 55035 - protein, 40 aa, Artificial Sequence; identical to SEQ ID NO: 13062
  Cyclic GFR-binding peptide
  MOD_RES (5)..(6)..(38)..(40): Xaa is C or S

SEQ ID NO: 55036 - protein, 34 aa, Artificial Sequence; identical to SEQ ID NO: 13063
  Cyclic GFR-binding peptide
  MOD_RES (1)..(2)..(33): Xaa is C or S

SEQ ID NO: 55037 - protein, 29 aa, Artificial Sequence
  Cyclic GFR-binding peptide
  MOD_RES (27)..(29): Xaa is C or S
EPLTILYYDSANNVVEQLSNDMVVESXGX

SEQ ID NO: 55038 - protein, 23 aa, Artificial Sequence
  Cyclic GFR-binding peptide
SPISILFIVGRKPKVYKQYEMIV

SEQ ID NO: 55039 - protein, 37 aa, Artificial Sequence; identical to SEQ ID NO: 13069
  Cyclic GFR-binding peptide
  MOD_RES (5)..(6): Xaa is C or S

SEQ ID NO: 55040 - protein, 34 aa, Artificial Sequence; identical to SEQ ID NO: 13070
  Cyclic GFR-binding peptide
  MOD_RES (1)..(2)..(34): Xaa is C or S

SEQ ID NO: 55041 - protein, 41 aa, Artificial Sequence; identical to SEQ ID NO: 13071
  Cyclic GFR-binding peptide
  MOD_RES (6)..(38)..(40): Xaa is C or S

SEQ ID NO: 55042 - protein, 39 aa, Artificial Sequence; identical to SEQ ID NO: 13072
  Cyclic GFR-binding peptide
  MOD_RES (5)..(6)..(38): Xaa is C or S

SEQ ID NO: 55043 - protein, 31 aa, Artificial Sequence
  Cyclic GFR-binding peptide
  MOD_RES (3)..(4): Xaa is C or S
PTXXVPTRLEPLPIVYYDSANNVVEQLSNDM

SEQ ID NO: 55044 - protein, 39 aa, Artificial Sequence; identical to SEQ ID NO: 13074
  Cyclic GFR-binding peptide
  MOD_RES (5)..(6)..(38): Xaa is C or S

SEQ ID NO: 55045 - protein, 38 aa, Artificial Sequence; identical to SEQ ID NO: 13075
  Cyclic GFR-binding peptide
  MOD_RES (2)..(3)..(35)..(37): Xaa is C or S

SEQ ID NO: 55046 - protein, 36 aa, Artificial Sequence
  Cyclic GFR-binding peptide
  MOD_RES (6)..(7): Xaa is C or S
STPPTXXVPTRLSAISILYLDSANNVVLKNYQDMVV

SEQ ID NO: 55047 - protein, 30 aa, Artificial Sequence
  Cyclic GFR-binding peptide
  MOD_RES (2)..(3): Xaa is C or S
PXXAPTKLEPLTVLYYDDSSNVIEQLSNNM

SEQ ID NO: 55048 - protein, 36 aa, Artificial Sequence; identical to SEQ ID NO: 13078
  Cyclic GFR-binding peptide
  MOD_RES (5)..(6): Xaa is C or S

SEQ ID NO: 55049 - protein, 28 aa, Artificial Sequence
  Cyclic GFR-binding peptide
ELSPISMLFIDENEKVVYKQYEDMVVEG

SEQ ID NO: 55050 - protein, 36 aa, Artificial Sequence; identical to SEQ ID NO: 13080
  Cyclic GFR-binding peptide
  MOD_RES (1)..(2)..(34)..(36): Xaa is C or S

SEQ ID NO: 55051 - protein, 30 aa, Artificial Sequence
  Cyclic GFR-binding peptide
  MOD_RES (1)..(2): Xaa is C or S
XXAPTKLSPISVLFIDDSSNVIYKQYENMV

SEQ ID NO: 55052 - protein, 33 aa, Artificial Sequence
  Cyclic GFR-binding peptide
  MOD_RES (30)..(32): Xaa is C or S
TQLEPLTVLYYDDSSNVIEQLSNNMVVRAXGXH

SEQ ID NO: 55053 - protein, 35 aa, Artificial Sequence; identical to SEQ ID NO: 13084
  Cyclic GFR-binding peptide
  MOD_RES (32)..(34): Xaa is C or S

SEQ ID NO: 55054 - protein, 33 aa, Artificial Sequence
  Cyclic GFR-binding peptide
  MOD_RES (3)..(4): Xaa is C or S
PTXXVPTRLEPLTILYYDSANNVVEQLSNDMVV

SEQ ID NO: 55055 - protein, 34 aa, Artificial Sequence
  Cyclic GFR-binding peptide
  MOD_RES (5)..(6): Xaa is C or S
IPKAXXVPTELSPISMLFIDEYDKVVYKQYEEMV

SEQ ID NO: 55056 - protein, 25 aa, Artificial Sequence
  Cyclic GFR-binding peptide
SPISILFIVGRTPKVYKQYEMVVKS

SEQ ID NO: 55057 - protein, 32 aa, Artificial Sequence; identical to SEQ ID NO: 13087
  Cyclic GFR-binding peptide
  MOD_RES (32)..(32): Xaa is C or S

SEQ ID NO: 55058 - protein, 28 aa, Artificial Sequence
  Cyclic GFR-binding peptide
  MOD_RES (27)..(27): Xaa is C or S
SPISVLFIDDSSNVIYKQYENMVVRSXG

SEQ ID NO: 55059 - protein, 28 aa, Artificial Sequence
  Cyclic GFR-binding peptide
  MOD_RES (28)..(28): Xaa is C or S
LSPISVLFIDDSSNVIYKQYENMVVRAX

SEQ ID NO: 55060 - protein, 24 aa, Artificial Sequence
  Cyclic GFR-binding peptide
TRLNAISILYFDSANNVVLKKYRD

SEQ ID NO: 55061 - protein, 36 aa, Artificial Sequence
  Cyclic GFR-binding peptide
  MOD_RES (6)..(7): Xaa is C or S
STPPTXXVPTRLEPLTILYYDSANNVVEQLSNDMVV

SEQ ID NO: 55062 - protein, 24 aa, Artificial Sequence
  Cyclic GFR-binding peptide
EPLPMVYYDENEKVVEQLSNDMVV

SEQ ID NO: 55063 - protein, 21 aa, Artificial Sequence
  Cyclic GFR-binding peptide
LEPLTMLYYDEYDKVVEQLSN

SEQ ID NO: 55064 - protein, 34 aa, Artificial Sequence
  Cyclic GFR-binding peptide
  MOD_RES (5)..(6): Xaa is C or S
IPKAXXVPTELSPISMLFIDENEKVVYKQYEDMV

SEQ ID NO: 55065 - protein, 25 aa, Artificial Sequence
  Cyclic GFR-binding peptide
PTELEPLPMVYYDEYDKVVEQLSNE

SEQ ID NO: 55066 - protein, 33 aa, Artificial Sequence
  Cyclic GFR-binding peptide
  MOD_RES (5)..(6): Xaa is C or S
SASPXXVPQDLEPLPIVYYVGRTPKVEQLSNMV

SEQ ID NO: 55067 - protein, 37 aa, Artificial Sequence; identical to SEQ ID NO: 13090
  Cyclic GFR-binding peptide
  MOD_RES (6)..(7): Xaa is C or S

SEQ ID NO: 55068 - protein, 35 aa, Artificial Sequence
  Cyclic GFR-binding peptide
  MOD_RES (6)..(7): Xaa is C or S
KIPKAXXVPTELEPLTMLYYDENEKVVEQLSNDMV

SEQ ID NO: 55069 - protein, 21 aa, Artificial Sequence
  Cyclic GFR-binding peptide
EPLTVLYYDDSSNVIEQLSNN

SEQ ID NO: 55070 - protein, 29 aa, Artificial Sequence
  Cyclic GFR-binding peptide
  MOD_RES (2)..(3): Xaa is C or S
AXXVPTELEPLPMVYYDENEKVVEQLSND

SEQ ID NO: 55071 - protein, 31 aa, Artificial Sequence
  Cyclic GFR-binding peptide
  MOD_RES (4)..(5): Xaa is C or S
PPTXXVPTRLSAISILYLDSANNVVLKNYQD

SEQ ID NO: 55072 - protein, 41 aa, Artificial Sequence; identical to SEQ ID NO: 13094
  Cyclic GFR-binding peptide
  MOD_RES (6)..(7)..(39)..(41): Xaa is C or S

SEQ ID NO: 55073 - protein, 31 aa, Artificial Sequence
  Cyclic GFR-binding peptide
  MOD_RES (2)..(3): Xaa is C or S
PXXVSQDLSPISILFIIGKTPKIYKQYEMIV

SEQ ID NO: 55074 - protein, 40 aa, Artificial Sequence; identical to SEQ ID NO: 13096
  Cyclic GFR-binding peptide
  MOD_RES (5)..(6)..(38)..(40): Xaa is C or S

SEQ ID NO: 55075 - protein, 23 aa, Artificial Sequence
  Cyclic GFR-binding peptide
RLEPLPIVYYDSANNVVEQLSND

SEQ ID NO: 55076 - protein, 39 aa, Artificial Sequence; identical to SEQ ID NO: 13097
  Cyclic GFR-binding peptide
  MOD_RES (3)..(4)..(36)..(38): Xaa is C or S

SEQ ID NO: 55077 - protein, 30 aa, Artificial Sequence
  Cyclic GFR-binding peptide
  MOD_RES (2)..(3): Xaa is C or S
PXXAPTKLSPISVLFIDDSSNVIYKQYENM

SEQ ID NO: 55078 - protein, 31 aa, Artificial Sequence
  Cyclic GFR-binding peptide
  MOD_RES (1)..(2): Xaa is C or S
XXVSQDLEPLPIVYYIGKTPKIEQLSNMIVK

SEQ ID NO: 55079 - protein, 32 aa, Artificial Sequence
  Cyclic GFR-binding peptide
  MOD_RES (30)..(32): Xaa is C or S
TELSPISMLFIDENEKVVYKQYEDMVVEGXGX

SEQ ID NO: 55080 - protein, 33 aa, Artificial Sequence; identical to SEQ ID NO: 13098
  Cyclic GFR-binding peptide
  MOD_RES (2)..(3): Xaa is C or S

SEQ ID NO: 55081 - protein, 24 aa, Artificial Sequence
  Cyclic GFR-binding peptide
DLEPLPIVYYVGRTPKVEQLSNMV

SEQ ID NO: 55082 - protein, 32 aa, Artificial Sequence
  Cyclic GFR-binding peptide
  MOD_RES (29)..(31): Xaa is C or S
KLEPLPVVYYDDSSNVIEQLSNNMVVRSXGXH

SEQ ID NO: 55083 - protein, 27 aa, Artificial Sequence
  Cyclic GFR-binding peptide
KLEPLPVVYYDDSSNVIEQLSNNMVVR

SEQ ID NO: 55084 - protein, 30 aa, Artificial Sequence
  Cyclic GFR-binding peptide
  MOD_RES (5)..(5): Xaa is C or S
TKPTXAPTKLEPLPVVYYDDSSNVIEQLSN

SEQ ID NO: 55085 - protein, 34 aa, Artificial Sequence
  Cyclic GFR-binding peptide
  MOD_RES (4)..(5): Xaa is C or S
PPTXXVPTRLEPLPIVYYDSANNVVEQLSNDMVV

SEQ ID NO: 55086 - protein, 24 aa, Artificial Sequence
  Cyclic GFR-binding peptide
QDLEPLPIVYYVGRTPKVEQLSNM

SEQ ID NO: 55087 - protein, 31 aa, Artificial Sequence
  Cyclic GFR-binding peptide
  MOD_RES (3)..(3): Xaa is C or S
PTXAPTKLSPISVLFIDDSSNVIYKQYENMV

SEQ ID NO: 55088 - protein, 40 aa, Artificial Sequence; identical to SEQ ID NO: 13099
  Cyclic GFR-binding peptide
  MOD_RES (5)..(6)..(38)..(40): Xaa is C or S

SEQ ID NO: 55089 - protein, 39 aa, Artificial Sequence; identical to SEQ ID NO: 13100
  Cyclic GFR-binding peptide
  MOD_RES (6)..(7)..(39): Xaa is C or S

SEQ ID NO: 55090 - protein, 31 aa, Artificial Sequence
  Cyclic GFR-binding peptide
  MOD_RES (1)..(2): Xaa is C or S
XXAPTQLEPLPVVYYDDSSNVIEQLSNNMVV

SEQ ID NO: 55091 - protein, 39 aa, Artificial Sequence; identical to SEQ ID NO: 13101
  Cyclic GFR-binding peptide
  MOD_RES (5)..(6)..(38): Xaa is C or S

SEQ ID NO: 55092 - protein, 28 aa, Artificial Sequence
  Cyclic GFR-binding peptide
ELEPLTMLYYDENEKVVEQLSNDMVVEG

SEQ ID NO: 55093 - protein, 36 aa, Artificial Sequence; identical to SEQ ID NO: 13102
  Cyclic GFR-binding peptide
  MOD_RES (1)..(2)..(33)..(35): Xaa is C or S

SEQ ID NO: 55094 - protein, 36 aa, Artificial Sequence; identical to SEQ ID NO: 13103
  Cyclic GFR-binding peptide
  MOD_RES (1)..(33)..(35): Xaa is C or S

SEQ ID NO: 55095 - protein, 36 aa, Artificial Sequence; identical to SEQ ID NO: 13105
  Cyclic GFR-binding peptide
  MOD_RES (1)..(2)..(33)..(35): Xaa is C or S

SEQ ID NO: 55096 - protein, 30 aa, Artificial Sequence
  Cyclic GFR-binding peptide
  MOD_RES (29)..(29): Xaa is C or S
RLNAISILYFDSANNVVLKKYRDMVVESXG

SEQ ID NO: 55097 - protein, 32 aa, Artificial Sequence
  Cyclic GFR-binding peptide
  MOD_RES (2)..(3): Xaa is C or S
PXXVSQDLEPLPIVYYIGKTPKIEQLSNMIVK

SEQ ID NO: 55098 - protein, 38 aa, Artificial Sequence; identical to SEQ ID NO: 13106
  Cyclic GFR-binding peptide
  MOD_RES (3)..(4)..(36)..(38): Xaa is C or S

SEQ ID NO: 55099 - protein, 30 aa, Artificial Sequence
  Cyclic GFR-binding peptide
PTELEPLTMLYYDENEKVVEQLSNDMVVEG

SEQ ID NO: 55100 - protein, 39 aa, Artificial Sequence; identical to SEQ ID NO: 13108
  Cyclic GFR-binding peptide
  MOD_RES (4)..(5)..(37)..(39): Xaa is C or S

SEQ ID NO: 55101 - protein, 35 aa, Artificial Sequence
  Cyclic GFR-binding peptide
  MOD_RES (6)..(7): Xaa is C or S
YVPKPXXAPTKLSPISVLFIDDSSNVIYKQYENMV

SEQ ID NO: 55102 - protein, 23 aa, Artificial Sequence
  Cyclic GFR-binding peptide
LNAISILYFDSANNVVLKKYRDM

SEQ ID NO: 55103 - protein, 35 aa, Artificial Sequence
  Cyclic GFR-binding peptide
  MOD_RES (5)..(6): Xaa is C or S
SASPXXVSQDLSPISILFIIGKTPKIYKQYEMIVK

SEQ ID NO: 55104 - protein, 33 aa, Artificial Sequence; identical to SEQ ID NO: 13111
  Cyclic GFR-binding peptide
  MOD_RES (32)..(32): Xaa is C or S

SEQ ID NO: 55105 - protein, 25 aa, Artificial Sequence
  Cyclic GFR-binding peptide
APTQLEPLPVVYYDDSSNVIEQLSN

SEQ ID NO: 55106 - protein, 28 aa, Artificial Sequence
  Cyclic GFR-binding peptide
VPQALSPISILFIVGRKPKVYKQYEMIV

SEQ ID NO: 55107 - protein, 32 aa, Artificial Sequence
  Cyclic GFR-binding peptide
  MOD_RES (31)..(31): Xaa is C or S
PTELEPLTMLYYDEYDKVVEQLSNEMVVEGXG

SEQ ID NO: 55108 - protein, 33 aa, Artificial Sequence; identical to SEQ ID NO: 13116
  Cyclic GFR-binding peptide
  MOD_RES (1)..(2)..(33): Xaa is C or S

SEQ ID NO: 55109 - protein, 33 aa, Artificial Sequence; identical to SEQ ID NO: 13115
  Cyclic GFR-binding peptide
  MOD_RES (1)..(2): Xaa is C or S

SEQ ID NO: 55110 - protein, 27 aa, Artificial Sequence
  Cyclic GFR-binding peptide
  MOD_RES (26)..(26): Xaa is C or S
EPLPIVYYVGRTPKVEQLSNMVVKSXK

SEQ ID NO: 55111 - protein, 35 aa, Artificial Sequence; identical to SEQ ID NO: 13117
  Cyclic GFR-binding peptide
  MOD_RES (3)..(4)..(35): Xaa is C or S

SEQ ID NO: 55112 - protein, 41 aa, Artificial Sequence; identical to SEQ ID NO: 13118
  Cyclic GFR-binding peptide
  MOD_RES (5)..(6)..(38)..(40): Xaa is C or S

SEQ ID NO: 55113 - protein, 32 aa, Artificial Sequence
  Cyclic GFR-binding peptide
  MOD_RES (30)..(32): Xaa is C or S
TELEPLTMLYYDEYDKVVEQLSNEMVVEGXGX

SEQ ID NO: 55114 - protein, 32 aa, Artificial Sequence
  Cyclic GFR-binding peptide
  MOD_RES (30)..(32): Xaa is C or S
PQDLSPISILFIVGRTPKVYKQYEMVVKSXKX

SEQ ID NO: 55115 - protein, 33 aa, Artificial Sequence
  Cyclic GFR-binding peptide
  MOD_RES (30)..(32): Xaa is C or S
TELEPLTMLYYDEYDKVVEQLSNEMVVEGXGXR

SEQ ID NO: 55116 - protein, 25 aa, Artificial Sequence
  Cyclic GFR-binding peptide
TRLNAISILYFDSANNVVLKKYRDM

SEQ ID NO: 55117 - protein, 31 aa, Artificial Sequence
  Cyclic GFR-binding peptide
  MOD_RES (30)..(30): Xaa is C or S
PQDLEPLPIVYYVGRTPKVEQLSNMVVKSXK

SEQ ID NO: 55118 - protein, 32 aa, Artificial Sequence; identical to SEQ ID NO: 13121
  Cyclic GFR-binding peptide
  MOD_RES (1)..(2): Xaa is C or S

SEQ ID NO: 55119 - protein, 29 aa, Artificial Sequence
  Cyclic GFR-binding peptide
  MOD_RES (27)..(29): Xaa is C or S
LSPISILFIVGRKPKVYKQYEMIVRSXKX

SEQ ID NO: 55120 - protein, 29 aa, Artificial Sequence
  Cyclic GFR-binding peptide
  MOD_RES (4)..(4): Xaa is C or S
KPTXAPTKLEPLTVLYYDDSSNVIEQLSN

SEQ ID NO: 55121 - protein, 40 aa, Artificial Sequence; identical to SEQ ID NO: 13123
  Cyclic GFR-binding peptide
  MOD_RES (5)..(6)..(38)..(40): Xaa is C or S

SEQ ID NO: 55122 - protein, 22 aa, Artificial Sequence
  Cyclic GFR-binding peptide
EPLTVLYYDDSSNVIEQLSNNM

SEQ ID NO: 55123 - protein, 33 aa, Artificial Sequence; identical to SEQ ID NO: 13125
  Cyclic GFR-binding peptide
  MOD_RES (2)..(3): Xaa is C or S

SEQ ID NO: 55124 - protein, 39 aa, Artificial Sequence; identical to SEQ ID NO: 13126
  Cyclic GFR-binding peptide
  MOD_RES (6)..(7)..(39): Xaa is C or S

SEQ ID NO: 55125 - protein, 33 aa, Artificial Sequence
  Cyclic GFR-binding peptide
  MOD_RES (4)..(5): Xaa is C or S
PKPXXAPTQLEPLPVVYYDDSSNVIEQLSNNMV

SEQ ID NO: 55126 - protein, 24 aa, Artificial Sequence
  Cyclic GFR-binding peptide
LSAISILYLDSANNVVLKNYQDMV

SEQ ID NO: 55127 - protein, 26 aa, Artificial Sequence
  Cyclic GFR-binding peptide
  MOD_RES (1)..(1): Xaa is C or S
XVPTELSPISMLFIDEYDKVVYKQYE

SEQ ID NO: 55128 - protein, 33 aa, Artificial Sequence; identical to SEQ ID NO: 13128
  Cyclic GFR-binding peptide
  MOD_RES (1)..(33): Xaa is C or S

SEQ ID NO: 55129 - protein, 23 aa, Artificial Sequence
  Cyclic GFR-binding peptide
RLSAISILYLDSANNVVLKNYQD

SEQ ID NO: 55130 - protein, 20 aa, Artificial Sequence
  Cyclic GFR-binding peptide
EPLTILYYIGKTPKIEQLSN

SEQ ID NO: 55131 - protein, 37 aa, Artificial Sequence; identical to SEQ ID NO: 13129
  Cyclic GFR-binding peptide
  MOD_RES (2)..(3)..(35)..(37): Xaa is C or S

SEQ ID NO: 55132 - protein, 30 aa, Artificial Sequence
  Cyclic GFR-binding peptide
  MOD_RES (2)..(3): Xaa is C or S
AXXVPTELSPISMLFIDENEKVVYKQYEDM

SEQ ID NO: 55133 - protein, 29 aa, Artificial Sequence
  Cyclic GFR-binding peptide
  MOD_RES (1)..(1): Xaa is C or S
XAPTKLEPLPVVYYDDSSNVIEQLSNNMV

SEQ ID NO: 55134 - protein, 30 aa, Artificial Sequence
  Cyclic GFR-binding peptide
  MOD_RES (29)..(29): Xaa is C or S
ELSPISMLFIDENEKVVYKQYEDMVVEGXG

SEQ ID NO: 55135 - protein, 29 aa, Artificial Sequence
  Cyclic GFR-binding peptide
PTKLSPISVLFIDDSSNVIYKQYENMVVR

SEQ ID NO: 55136 - protein, 40 aa, Artificial Sequence; identical to SEQ ID NO: 13131
  Cyclic GFR-binding peptide
  MOD_RES (4)..(5)..(37)..(39): Xaa is C or S

SEQ ID NO: 55137 - protein, 35 aa, Artificial Sequence; identical to SEQ ID NO: 13133
  Cyclic GFR-binding peptide
  MOD_RES (3)..(4): Xaa is C or S

SEQ ID NO: 55138 - protein, 32 aa, Artificial Sequence
  Cyclic GFR-binding peptide
  MOD_RES (4)..(5): Xaa is C or S
PKAXXVPTELSPISMLFIDEYDKVVYKQYEEM

SEQ ID NO: 55139 - protein, 27 aa, Artificial Sequence
  Cyclic GFR-binding peptide
QALSPISILFIVGRKPKVYKQYEMIVR

SEQ ID NO: 55140 - protein, 33 aa, Artificial Sequence; identical to SEQ ID NO: 13134
  Cyclic GFR-binding peptide
  MOD_RES (32)..(32): Xaa is C or S

SEQ ID NO: 55141 - protein, 42 aa, Artificial Sequence; identical to SEQ ID NO: 13136
  Cyclic GFR-binding peptide
  MOD_RES (6)..(7)..(39)..(41): Xaa is C or S

SEQ ID NO: 55142 - protein, 41 aa, Artificial Sequence; identical to SEQ ID NO: 13137
  Cyclic GFR-binding peptide
  MOD_RES (5)..(6)..(38)..(40): Xaa is C or S

SEQ ID NO: 55143 - protein, 23 aa, Artificial Sequence
  Cyclic GFR-binding peptide
EPLPMVYYDEYDKVVEQLSNEMV

SEQ ID NO: 55144 - protein, 40 aa, Artificial Sequence; identical to SEQ ID NO: 13140
  Cyclic GFR-binding peptide
  MOD_RES (6)..(7)..(39): Xaa is C or S

SEQ ID NO: 55145 - protein, 25 aa, Artificial Sequence
  Cyclic GFR-binding peptide
TQLSPISVLFIDDSSNVIYKQYENM

SEQ ID NO: 55146 - protein, 36 aa, Artificial Sequence
  Cyclic GFR-binding peptide
  MOD_RES (6)..(7): Xaa is C or S
SIPKAXXVPTELEPLPMVYYDEYDKVVEQLSNEMVV

SEQ ID NO: 55147 - protein, 25 aa, Artificial Sequence
  Cyclic GFR-binding peptide
DLEPLPIVYYIGKTPKIEQLSNMIV

SEQ ID NO: 55148 - protein, 25 aa, Artificial Sequence
  Cyclic GFR-binding peptide
EPLPMVYYDENEKVVEQLSNDMVVE

SEQ ID NO: 55149 - protein, 27 aa, Artificial Sequence
  Cyclic GFR-binding peptide
LSPISMLFIDENEKVVYKQYEDMVVEG

SEQ ID NO: 55150 - protein, 33 aa, Artificial Sequence
  Cyclic GFR-binding peptide
  MOD_RES (5)..(6): Xaa is C or S
TPPTXXVPTRLEPLTILYYDSANNVVEQLSNDM

SEQ ID NO: 55151 - protein, 31 aa, Artificial Sequence
  Cyclic GFR-binding peptide
  MOD_RES (3)..(4): Xaa is C or S
APXXVPQALSPISILFIVGRKPKVYKQYEMI

SEQ ID NO: 55152 - protein, 32 aa, Artificial Sequence; identical to SEQ ID NO: 13144
  Cyclic GFR-binding peptide
  MOD_RES (32)..(32): Xaa is C or S

SEQ ID NO: 55153 - protein, 27 aa, Artificial Sequence
  Cyclic GFR-binding peptide
  MOD_RES (26)..(26): Xaa is C or S
SPISILFIVGRKPKVYKQYEMIVRSXK

SEQ ID NO: 55154 - protein, 37 aa, Artificial Sequence; identical to SEQ ID NO: 13146
  Cyclic GFR-binding peptide
  MOD_RES (3)..(35)..(37): Xaa is C or S

SEQ ID NO: 55155 - protein, 26 aa, Artificial Sequence
  Cyclic GFR-binding peptide
PTQLEPLPVVYYDDSSNVIEQLSNNM

SEQ ID NO: 55156 - protein, 28 aa, Artificial Sequence
  Cyclic GFR-binding peptide
TQLEPLTVLYYDDSSNVIEQLSNNMVVR

SEQ ID NO: 55157 - protein, 26 aa, Artificial Sequence
  Cyclic GFR-binding peptide
TQLEPLPVVYYDDSSNVIEQLSNNMV

SEQ ID NO: 55158 - protein, 21 aa, Artificial Sequence
  Cyclic GFR-binding peptide
EPLTILYYVGRKPKVEQLSNM

SEQ ID NO: 55159 - protein, 34 aa, Artificial Sequence; identical to SEQ ID NO: 13147
  Cyclic GFR-binding peptide
  MOD_RES (1)..(2)..(34): Xaa is C or S

SEQ ID NO: 55160 - protein, 33 aa, Artificial Sequence
  Cyclic GFR-binding peptide
  MOD_RES (3)..(4): Xaa is C or S
SPXXVSQDLSPISILFIIGKTPKIYKQYEMIVK

SEQ ID NO: 55161 - protein, 27 aa, Artificial Sequence
  Cyclic GFR-binding peptide
PTELEPLPMVYYDEYDKVVEQLSNEMV

SEQ ID NO: 55162 - protein, 29 aa, Artificial Sequence
  Cyclic GFR-binding peptide
  MOD_RES (1)..(1): Xaa is C or S
XVPTRLNAISILYFDSANNVVLKKYRDMV

SEQ ID NO: 55163 - protein, 33 aa, Artificial Sequence
  Cyclic GFR-binding peptide
  MOD_RES (4)..(5): Xaa is C or S
PKAXXVPTELSPISMLFIDEYDKVVYKQYEEMV

SEQ ID NO: 55164 - protein, 41 aa, Artificial Sequence; identical to SEQ ID NO: 13149
  Cyclic GFR-binding peptide
  MOD_RES (7)..(39)..(41): Xaa is C or S

SEQ ID NO: 55165 - protein, 28 aa, Artificial Sequence
  Cyclic GFR-binding peptide
  MOD_RES (2)..(3): Xaa is C or S
AXXVPTELSPISMLFIDEYDKVVYKQYE

SEQ ID NO: 55166 - protein, 25 aa, Artificial Sequence
  Cyclic GFR-binding peptide
VPQDLSPISILFIVGRTPKVYKQYE

SEQ ID NO: 55167 - protein, 31 aa, Artificial Sequence; identical to SEQ ID NO: 13152
  Cyclic GFR-binding peptide

SEQ ID NO: 55168 - protein, 38 aa, Artificial Sequence; identical to SEQ ID NO: 13153
  Cyclic GFR-binding peptide
  MOD_RES (6)..(7): Xaa is C or S

SEQ ID NO: 55169 - protein, 31 aa, Artificial Sequence
  Cyclic GFR-binding peptide
  MOD_RES (28)..(30): Xaa is C or S
LEPLPVVYYDDSSNVIEQLSNNMVVRAXGXH

SEQ ID NO: 55170 - protein, 25 aa, Artificial Sequence
  Cyclic GFR-binding peptide
QDLSPISILFIVGRTPKVYKQYEMV

SEQ ID NO: 55171 - protein, 41 aa, Artificial Sequence; identical to SEQ ID NO: 13156
  Cyclic GFR-binding peptide
  MOD_RES (6)..(7)..(39)..(41): Xaa is C or S

SEQ ID NO: 55172 - protein, 22 aa, Artificial Sequence
  Cyclic GFR-binding peptide
LEPLPMVYYDEYDKVVEQLSNE

SEQ ID NO: 55173 - protein, 31 aa, Artificial Sequence
  Cyclic GFR-binding peptide
  MOD_RES (2)..(3): Xaa is C or S
AXXVPTELEPLTMLYYDENEKVVEQLSNDMV

SEQ ID NO: 55174 - protein, 33 aa, Artificial Sequence
  Cyclic GFR-binding peptide
  MOD_RES (6)..(6): Xaa is C or S
VTKPTXAPTKLEPLTVLYYDDSSNVIEQLSNNM

SEQ ID NO: 55175 - protein, 37 aa, Artificial Sequence; identical to SEQ ID NO: 13157
  Cyclic GFR-binding peptide
  MOD_RES (1)..(2)..(34)..(36): Xaa is C or S

SEQ ID NO: 55176 - protein, 35 aa, Artificial Sequence
  Cyclic GFR-binding peptide
  MOD_RES (5)..(6): Xaa is C or S
IPKAXXVPTELEPLTMLYYDENEKVVEQLSNDMVV

SEQ ID NO: 55177 - protein, 34 aa, Artificial Sequence
  Cyclic GFR-binding peptide
  MOD_RES (6)..(7): Xaa is C or S
KIPKAXXVPTELEPLPMVYYDENEKVVEQLSNDM

SEQ ID NO: 55178 - protein, 26 aa, Artificial Sequence
  Cyclic GFR-binding peptide
  MOD_RES (1)..(1): Xaa is C or S
XVPQDLEPLPIVYYVGRTPKVEQLSN

SEQ ID NO: 55179 - protein, 26 aa, Artificial Sequence
  Cyclic GFR-binding peptide
VPTRLEPLPIVYYDSANNVVEQLSND

SEQ ID NO: 55180 - protein, 36 aa, Artificial Sequence; identical to SEQ ID NO: 13159
  Cyclic GFR-binding peptide
  MOD_RES (2)..(3)..(35): Xaa is C or S

SEQ ID NO: 55181 - protein, 35 aa, Artificial Sequence; identical to SEQ ID NO: 13160
  Cyclic GFR-binding peptide
  MOD_RES (32)..(34): Xaa is C or S

SEQ ID NO: 55182 - protein, 31 aa, Artificial Sequence
  Cyclic GFR-binding peptide
  MOD_RES (5)..(6): Xaa is C or S
VPKPXXAPTQLEPLTVLYYDDSSNVIEQLSN

SEQ ID NO: 55183 - protein, 31 aa, Artificial Sequence; identical to SEQ ID NO: 13162
  Cyclic GFR-binding peptide
  MOD_RES (1)..(1): Xaa is C or S

SEQ ID NO: 55184 - protein, 28 aa, Artificial Sequence
  Cyclic GFR-binding peptide
VPTRLEPLPIVYYDSANNVVEQLSNDMV

SEQ ID NO: 55185 - protein, 30 aa, Artificial Sequence
  Cyclic GFR-binding peptide
  MOD_RES (30)..(30): Xaa is C or S
PQDLSPISILFIVGRTPKVYKQYEMVVKSX

SEQ ID NO: 55186 - protein, 33 aa, Artificial Sequence; identical to SEQ ID NO: 13164
  Cyclic GFR-binding peptide
  MOD_RES (32)..(32): Xaa is C or S

SEQ ID NO: 55187 - protein, 38 aa, Artificial Sequence; identical to SEQ ID NO: 13165
  Cyclic GFR-binding peptide
  MOD_RES (3)..(4)..(35)..(37): Xaa is C or S

SEQ ID NO: 55188 - protein, 38 aa, Artificial Sequence; identical to SEQ ID NO: 13167
  Cyclic GFR-binding peptide
  MOD_RES (5)..(6)..(37): Xaa is C or S

SEQ ID NO: 55189 - protein, 36 aa, Artificial Sequence; identical to SEQ ID NO: 13168
  Cyclic GFR-binding peptide
  MOD_RES (1)..(33)..(35): Xaa is C or S

SEQ ID NO: 55190 - protein, 41 aa, Artificial Sequence; identical to SEQ ID NO: 13169
  Cyclic GFR-binding peptide
  MOD_RES (5)..(6)..(38)..(40): Xaa is C or S

SEQ ID NO: 55191 - protein, 24 aa, Artificial Sequence
  Cyclic GFR-binding peptide
PTELEPLTMLYYDENEKVVEQLSN

SEQ ID NO: 55192 - protein, 25 aa, Artificial Sequence
  Cyclic GFR-binding peptide
PTRLNAISILYFDSANNVVLKKYRD

SEQ ID NO: 55193 - protein, 34 aa, Artificial Sequence; identical to SEQ ID NO: 13172
  Cyclic GFR-binding peptide
  MOD_RES (3)..(4): Xaa is C or S

SEQ ID NO: 55194 - protein, 33 aa, Artificial Sequence; identical to SEQ ID NO: 13174
  Cyclic GFR-binding peptide
  MOD_RES (1)..(33): Xaa is C or S

SEQ ID NO: 55195 - protein, 27 aa, Artificial Sequence
  Cyclic GFR-binding peptide
LEPLPMVYYDENEKVVEQLSNDMVVEG

SEQ ID NO: 55196 - protein, 32 aa, Artificial Sequence
  Cyclic GFR-binding peptide
  MOD_RES (6)..(7): Xaa is C or S
ASASPXXVPQDLSPISILFIVGRTPKVYKQYE

SEQ ID NO: 55197 - protein, 39 aa, Artificial Sequence; identical to SEQ ID NO: 13175
  Cyclic GFR-binding peptide
  MOD_RES (6)..(7)..(39): Xaa is C or S

SEQ ID NO: 55198 - protein, 29 aa, Artificial Sequence
  Cyclic GFR-binding peptide
PTRLNAISILYFDSANNVVLKKYRDMVVE

SEQ ID NO: 55199 - protein, 27 aa, Artificial Sequence
  Cyclic GFR-binding peptide
RLSAISILYLDSANNVVLKNYQDMVVE

SEQ ID NO: 55200 - protein, 21 aa, Artificial Sequence
  Cyclic GFR-binding peptide
LEPLPVVYYDDSSNVIEQLSN

SEQ ID NO: 55201 - protein, 40 aa, Artificial Sequence; identical to SEQ ID NO: 13177
  Cyclic GFR-binding peptide
  MOD_RES (6)..(38)..(40): Xaa is C or S

SEQ ID NO: 55202 - protein, 26 aa, Artificial Sequence
  Cyclic GFR-binding peptide
QDLSPISILFIVGRTPKVYKQYEMVV

SEQ ID NO: 55203 - protein, 34 aa, Artificial Sequence; identical to SEQ ID NO: 13179
  Cyclic GFR-binding peptide
  MOD_RES (1)..(33): Xaa is C or S

SEQ ID NO: 55204 - protein, 29 aa, Artificial Sequence
  Cyclic GFR-binding peptide
  MOD_RES (28)..(28): Xaa is C or S
LEPLPMVYYDEYDKVVEQLSNEMVVEGXG

SEQ ID NO: 55205 - protein, 29 aa, Artificial Sequence
  Cyclic GFR-binding peptide
SQDLEPLPIVYYIGKTPKIEQLSNMIVKS

SEQ ID NO: 55206 - protein, 26 aa, Artificial Sequence
  Cyclic GFR-binding peptide
LEPLTVLYYDDSSNVIEQLSNNMVVR

SEQ ID NO: 55207 - protein, 40 aa, Artificial Sequence; identical to SEQ ID NO: 13182
  Cyclic GFR-binding peptide
  MOD_RES (5)..(37)..(39): Xaa is C or S

SEQ ID NO: 55208 - protein, 30 aa, Artificial Sequence; identical to SEQ ID NO: 13184
  Cyclic GFR-binding peptide

SEQ ID NO: 55209 - protein, 31 aa, Artificial Sequence
  Cyclic GFR-binding peptide
  MOD_RES (2)..(2): Xaa is C or S
TXAPTKLEPLPVVYYDDSSNVIEQLSNNMVV

SEQ ID NO: 55210 - protein, 23 aa, Artificial Sequence
  Cyclic GFR-binding peptide
LEPLPIVYYIGKTPKIEQLSNMI

SEQ ID NO: 55211 - protein, 26 aa, Artificial Sequence
  Cyclic GFR-binding peptide
TELEPLPMVYYDENEKVVEQLSNDMV

SEQ ID NO: 55212 - protein, 24 aa, Artificial Sequence
  Cyclic GFR-binding peptide
SAISILYLDSANNVVLKNYQDMVV

SEQ ID NO: 55213 - protein, 35 aa, Artificial Sequence; identical to SEQ ID NO: 13185
  Cyclic GFR-binding peptide
  MOD_RES (32)..(34): Xaa is C or S

SEQ ID NO: 55214 - protein, 25 aa, Artificial Sequence
  Cyclic GFR-binding peptide
LEPLTVLYYDDSSNVIEQLSNNMVV

SEQ ID NO: 55215 - protein, 34 aa, Artificial Sequence; identical to SEQ ID NO: 13186
  Cyclic GFR-binding peptide
  MOD_RES (32)..(34): Xaa is C or S

SEQ ID NO: 55216 - protein, 30 aa, Artificial Sequence
  Cyclic GFR-binding peptide
  MOD_RES (30)..(30): Xaa is C or S
TELSPISMLFIDEYDKVVYKQYEEMVVEGX

SEQ ID NO: 55217 - protein, 27 aa, Artificial Sequence
  Cyclic GFR-binding peptide
TRLEPLTILYYDSANNVVEQLSNDMVV

SEQ ID NO: 55218 - protein, 30 aa, Artificial Sequence; identical to SEQ ID NO: 982
  Cyclic GFR-binding peptide

SEQ ID NO: 55219 - protein, 27 aa, Artificial Sequence
  Cyclic GFR-binding peptide
  MOD_RES (1)..(2): Xaa is C or S
XXVPTELSPISMLFIDEYDKVVYKQYE

SEQ ID NO: 55220 - protein, 32 aa, Artificial Sequence
  Cyclic GFR-binding peptide
  MOD_RES (6)..(7): Xaa is C or S
STPPTXXVPTRLEPLTILYYDSANNVVEQLSN

SEQ ID NO: 55221 - protein, 33 aa, Artificial Sequence
  Cyclic GFR-binding peptide
  MOD_RES (30)..(32): Xaa is C or S
SQDLEPLPIVYYIGKTPKIEQLSNMIVKSXKXS

SEQ ID NO: 55222 - protein, 38 aa, Artificial Sequence; identical to SEQ ID NO: 13191
  Cyclic GFR-binding peptide
  MOD_RES (5)..(37): Xaa is C or S

SEQ ID NO: 55223 - protein, 24 aa, Artificial Sequence
  Cyclic GFR-binding peptide
EPLTILYYDSANNVVEQLSNDMVV

SEQ ID NO: 55224 - protein, 23 aa, Artificial Sequence
  Cyclic GFR-binding peptide
LSAISILYLDSANNVVLKNYQDM

SEQ ID NO: 55225 - protein, 34 aa, Artificial Sequence; identical to SEQ ID NO: 13192
  Cyclic GFR-binding peptide
  MOD_RES (3)..(4): Xaa is C or S

SEQ ID NO: 55226 - protein, 26 aa, Artificial Sequence
  Cyclic GFR-binding peptide
ELEPLPMVYYDEYDKVVEQLSNEMVV

SEQ ID NO: 55227 - protein, 30 aa, Artificial Sequence
  Cyclic GFR-binding peptide
  MOD_RES (4)..(5): Xaa is C or S
AAPXXVPQALSPISILFIVGRKPKVYKQYE

SEQ ID NO: 55228 - protein, 20 aa, Artificial Sequence
  Cyclic GFR-binding peptide
SPISILFIVGRKPKVYKQYE

SEQ ID NO: 55229 - protein, 27 aa, Artificial Sequence
  Cyclic GFR-binding peptide
KLSPISVLFIDDSSNVIYKQYENMVVR

SEQ ID NO: 55230 - protein, 41 aa, Artificial Sequence; identical to SEQ ID NO: 13194
  Cyclic GFR-binding peptide
  MOD_RES (7)..(39)..(41): Xaa is C or S

SEQ ID NO: 55231 - protein, 32 aa, Artificial Sequence
  Cyclic GFR-binding peptide
  MOD_RES (29)..(31): Xaa is C or S
RLEPLTILYYDSANNVVEQLSNDMVVESXGXR

SEQ ID NO: 55232 - protein, 31 aa, Artificial Sequence
  Cyclic GFR-binding peptide
  MOD_RES (2)..(3): Xaa is C or S
PXXAPTKLEPLTVLYYDDSSNVIEQLSNNMV

SEQ ID NO: 55233 - protein, 30 aa, Artificial Sequence
  Cyclic GFR-binding peptide
  MOD_RES (30)..(30): Xaa is C or S
TKLEPLTVLYYDDSSNVIEQLSNNMVVRSX

SEQ ID NO: 55234 - protein, 30 aa, Artificial Sequence; identical to SEQ ID NO: 1047
  Cyclic GFR-binding peptide

SEQ ID NO: 55235 - protein, 25 aa, Artificial Sequence
  Cyclic GFR-binding peptide
TELEPLPMVYYDEYDKVVEQLSNEM

SEQ ID NO: 55236 - protein, 33 aa, Artificial Sequence
  Cyclic GFR-binding peptide
  MOD_RES (30)..(32): Xaa is C or S
PQDLSPISILFIVGRTPKVYKQYEMVVKSXKXS

SEQ ID NO: 55237 - protein, 32 aa, Artificial Sequence; identical to SEQ ID NO: 13199
  Cyclic GFR-binding peptide
  MOD_RES (1)..(1): Xaa is C or S

SEQ ID NO: 55238 - protein, 40 aa, Artificial Sequence; identical to SEQ ID NO: 13200
  Cyclic GFR-binding peptide
  MOD_RES (5)..(6)..(38)..(40): Xaa is C or S

SEQ ID NO: 55239 - protein, 36 aa, Artificial Sequence
  Cyclic GFR-binding peptide
  MOD_RES (6)..(7): Xaa is C or S
ASASPXXVSQDLSPISILFIIGKTPKIYKQYEMIVK

SEQ ID NO: 55240 - protein, 30 aa, Artificial Sequence
  Cyclic GFR-binding peptide
  MOD_RES (3)..(4): Xaa is C or S
KAXXVPTELEPLPMVYYDENEKVVEQLSND

SEQ ID NO: 55241 - protein, 35 aa, Artificial Sequence; identical to SEQ ID NO: 13203
  Cyclic GFR-binding peptide
  MOD_RES (32)..(34): Xaa is C or S

SEQ ID NO: 55242 - protein, 33 aa, Artificial Sequence
  Cyclic GFR-binding peptide
  MOD_RES (3)..(4): Xaa is C or S
KAXXVPTELEPLTMLYYDENEKVVEQLSNDMVV

SEQ ID NO: 55243 - protein, 25 aa, Artificial Sequence
  Cyclic GFR-binding peptide
EPLPIVYYVGRTPKVEQLSNMVVKS

SEQ ID NO: 55244 - protein, 33 aa, Artificial Sequence; identical to SEQ ID NO: 13204
  Cyclic GFR-binding peptide
  MOD_RES (1)..(33): Xaa is C or S

SEQ ID NO: 55245 - protein, 34 aa, Artificial Sequence; identical to SEQ ID NO: 13205
  Cyclic GFR-binding peptide
  MOD_RES (2)..(3): Xaa is C or S

SEQ ID NO: 55246 - protein, 30 aa, Artificial Sequence
  Cyclic GFR-binding peptide
  MOD_RES (27)..(29): Xaa is C or S
SPISMLFIDENEKVVYKQYEDMVVEGXGXR

SEQ ID NO: 55247 - protein, 35 aa, Artificial Sequence; identical to SEQ ID NO: 13207
  Cyclic GFR-binding peptide
  MOD_RES (3)..(4): Xaa is C or S

SEQ ID NO: 55248 - protein, 34 aa, Artificial Sequence
  Cyclic GFR-binding peptide
  MOD_RES (31)..(33): Xaa is C or S
PTKLEPLPVVYYDDSSNVIEQLSNNMVVRSXGXH

SEQ ID NO: 55249 - protein, 37 aa, Artificial Sequence; identical to SEQ ID NO: 13209
  Cyclic GFR-binding peptide
  MOD_RES (2)..(3)..(34)..(36): Xaa is C or S

SEQ ID NO: 55250 - protein, 26 aa, Artificial Sequence
  Cyclic GFR-binding peptide
TRLSAISILYLDSANNVVLKNYQDMV

SEQ ID NO: 55251 - protein, 26 aa, Artificial Sequence
  Cyclic GFR-binding peptide
  MOD_RES (1)..(1): Xaa is C or S
XVPTELEPLTMLYYDENEKVVEQLSN

SEQ ID NO: 55252 - protein, 26 aa, Artificial Sequence
  Cyclic GFR-binding peptide
  MOD_RES (1)..(1): Xaa is C or S
XVPTRLEPLPIVYYDSANNVVEQLSN

SEQ ID NO: 55253 - protein, 33 aa, Artificial Sequence; identical to SEQ ID NO: 13211
  Cyclic GFR-binding peptide
  MOD_RES (1)..(2): Xaa is C or S

SEQ ID NO: 55254 - protein, 28 aa, Artificial Sequence
  Cyclic GFR-binding peptide
  MOD_RES (27)..(27): Xaa is C or S
EPLTMLYYDEYDKVVEQLSNEMVVEGXG

SEQ ID NO: 55255 - protein, 26 aa, Artificial Sequence
  Cyclic GFR-binding peptide
PQDLEPLPIVYYVGRTPKVEQLSNMV

SEQ ID NO: 55256 - protein, 32 aa, Artificial Sequence
  Cyclic GFR-binding peptide
  MOD_RES (6)..(7): Xaa is C or S
STPPTXXVPTRLNAISILYFDSANNVVLKKYR

SEQ ID NO: 55257 - protein, 29 aa, Artificial Sequence
  Cyclic GFR-binding peptide
TQLEPLTVLYYDDSSNVIEQLSNNMVVRA

SEQ ID NO: 55258 - protein, 38 aa, Artificial Sequence; identical to SEQ ID NO: 13212
  Cyclic GFR-binding peptide
  MOD_RES (6)..(7): Xaa is C or S

SEQ ID NO: 55259 - protein, 37 aa, Artificial Sequence; identical to SEQ ID NO: 13213
  Cyclic GFR-binding peptide
  MOD_RES (6)..(7): Xaa is C or S

SEQ ID NO: 55260 - protein, 25 aa, Artificial Sequence
  Cyclic GFR-binding peptide
TRLSAISILYLDSANNVVLKNYQDM

SEQ ID NO: 55261 - protein, 25 aa, Artificial Sequence
  Cyclic GFR-binding peptide
SQDLEPLPIVYYIGKTPKIEQLSNM

SEQ ID NO: 55262 - protein, 37 aa, Artificial Sequence; identical to SEQ ID NO: 13216
  Cyclic GFR-binding peptide
  MOD_RES (5)..(37): Xaa is C or S

SEQ ID NO: 55263 - protein, 31 aa, Artificial Sequence
  Cyclic GFR-binding peptide
  MOD_RES (29)..(31): Xaa is C or S
KLSPISVLFIDDSSNVIYKQYENMVVRSXGX

SEQ ID NO: 55264 - protein, 35 aa, Artificial Sequence; identical to SEQ ID NO: 13217
  Cyclic GFR-binding peptide
  MOD_RES (5)..(5): Xaa is C or S

SEQ ID NO: 55265 - protein, 36 aa, Artificial Sequence; identical to SEQ ID NO: 13218
  Cyclic GFR-binding peptide
  MOD_RES (3)..(4)..(36): Xaa is C or S

SEQ ID NO: 55266 - protein, 33 aa, Artificial Sequence
  Cyclic GFR-binding peptide
  MOD_RES (5)..(6): Xaa is C or S
VPKPXXAPTQLEPLPVVYYDDSSNVIEQLSNNM

SEQ ID NO: 55267 - protein, 34 aa, Artificial Sequence
  Cyclic GFR-binding peptide
  MOD_RES (5)..(6): Xaa is C or S
VPKPXXAPTQLEPLPVVYYDDSSNVIEQLSNNMV

SEQ ID NO: 55268 - protein, 24 aa, Artificial Sequence
  Cyclic GFR-binding peptide
TELSPISMLFIDEYDKVVYKQYEE

SEQ ID NO: 55269 - protein, 39 aa, Artificial Sequence; identical to SEQ ID NO: 13222
  Cyclic GFR-binding peptide
  MOD_RES (5)..(6)..(38): Xaa is C or S

SEQ ID NO: 55270 - protein, 33 aa, Artificial Sequence
  Cyclic GFR-binding peptide
  MOD_RES (3)..(4): Xaa is C or S
KAXXVPTELEPLTMLYYDEYDKVVEQLSNEMVV

SEQ ID NO: 55271 - protein, 33 aa, Artificial Sequence
  Cyclic GFR-binding peptide
  MOD_RES (6)..(7): Xaa is C or S
SIPKAXXVPTELEPLTMLYYDEYDKVVEQLSNE

SEQ ID NO: 55272 - protein, 35 aa, Artificial Sequence; identical to SEQ ID NO: 13223
  Cyclic GFR-binding peptide
  MOD_RES (1)..(2)..(34): Xaa is C or S

SEQ ID NO: 55273 - protein, 37 aa, Artificial Sequence; identical to SEQ ID NO: 13226
  Cyclic GFR-binding peptide
  MOD_RES (5)..(6): Xaa is C or S

SEQ ID NO: 55274 - protein, 37 aa, Artificial Sequence; identical to SEQ ID NO: 13227
  Cyclic GFR-binding peptide
  MOD_RES (6)..(7): Xaa is C or S

SEQ ID NO: 55275 - protein, 33 aa, Artificial Sequence
  Cyclic GFR-binding peptide
  MOD_RES (4)..(5): Xaa is C or S
PPTXXVPTRLEPLTILYYDSANNVVEQLSNDMV

SEQ ID NO: 55276 - protein, 29 aa, Artificial Sequence
  Cyclic GFR-binding peptide
  MOD_RES (2)..(2): Xaa is C or S
TXAPTKLEPLTVLYYDDSSNVIEQLSNNM

SEQ ID NO: 55277 - protein, 33 aa, Artificial Sequence; identical to SEQ ID NO: 13228
  Cyclic GFR-binding peptide
  MOD_RES (1)..(33): Xaa is C or S

SEQ ID NO: 55278 - protein, 33 aa, Artificial Sequence; identical to SEQ ID NO: 13229
  Cyclic GFR-binding peptide
  MOD_RES (1)..(2)..(33): Xaa is C or S

SEQ ID NO: 55279 - protein, 41 aa, Artificial Sequence; identical to SEQ ID NO: 13231
  Cyclic GFR-binding peptide
  MOD_RES (6)..(7)..(39)..(41): Xaa is C or S

SEQ ID NO: 55280 - protein, 34 aa, Artificial Sequence
  Cyclic GFR-binding peptide
  MOD_RES (5)..(6): Xaa is C or S
SASPXXVPQDLSPISILFIVGRTPKVYKQYEMVV

SEQ ID NO: 55281 - protein, 26 aa, Artificial Sequence
  Cyclic GFR-binding peptide
SPISMLFIDENEKVVYKQYEDMVVEG

SEQ ID NO: 55282 - protein, 31 aa, Artificial Sequence
  Cyclic GFR-binding peptide
  MOD_RES (29)..(31): Xaa is C or S
QLEPLTVLYYDDSSNVIEQLSNNMVVRAXGX

SEQ ID NO: 55283 - protein, 36 aa, Artificial Sequence; identical to SEQ ID NO: 13233
  Cyclic GFR-binding peptide
  MOD_RES (1)..(2)..(34)..(36): Xaa is C or S

SEQ ID NO: 55284 - protein, 26 aa, Artificial Sequence
  Cyclic GFR-binding peptide
LEPLTILYYVGRKPKVEQLSNMIVRS

SEQ ID NO: 55285 - protein, 24 aa, Artificial Sequence
  Cyclic GFR-binding peptide
TELEPLTMLYYDEYDKVVEQLSNE

SEQ ID NO: 55286 - protein, 31 aa, Artificial Sequence; identical to SEQ ID NO: 13234
  Cyclic GFR-binding peptide
  MOD_RES (1)..(1): Xaa is C or S

SEQ ID NO: 55287 - protein, 26 aa, Artificial Sequence
  Cyclic GFR-binding peptide
QDLEPLPIVYYIGKTPKIEQLSNMIV

SEQ ID NO: 55288 - protein, 33 aa, Artificial Sequence
  Cyclic GFR-binding peptide
  MOD_RES (6)..(7): Xaa is C or S
SIPKAXXVPTELSPISMLFIDEYDKVVYKQYEE

SEQ ID NO: 55289 - protein, 30 aa, Artificial Sequence; identical to SEQ ID NO: 983
  Cyclic GFR-binding peptide

SEQ ID NO: 55290 - protein, 22 aa, Artificial Sequence
  Cyclic GFR-binding peptide
LEPLTMLYYDEYDKVVEQLSNE

SEQ ID NO: 55291 - protein, 38 aa, Artificial Sequence; identical to SEQ ID NO: 13237
  Cyclic GFR-binding peptide
  MOD_RES (5)..(6)..(38): Xaa is C or S

SEQ ID NO: 55292 - protein, 38 aa, Artificial Sequence; identical to SEQ ID NO: 13238
  Cyclic GFR-binding peptide
  MOD_RES (3)..(4)..(36)..(38): Xaa is C or S

SEQ ID NO: 55293 - protein, 38 aa, Artificial Sequence; identical to SEQ ID NO: 13239
  Cyclic GFR-binding peptide
  MOD_RES (6)..(38): Xaa is C or S

SEQ ID NO: 55294 - protein, 33 aa, Artificial Sequence
  Cyclic GFR-binding peptide
  MOD_RES (30)..(32): Xaa is C or S
TRLNAISILYFDSANNVVLKKYRDMVVESXGXR

SEQ ID NO: 55295 - protein, 34 aa, Artificial Sequence
  Cyclic GFR-binding peptide
  MOD_RES (5)..(6): Xaa is C or S
SASPXXVSQDLEPLPIVYYIGKTPKIEQLSNMIV

SEQ ID NO: 55296 - protein, 32 aa, Artificial Sequence
  Cyclic GFR-binding peptide
  MOD_RES (30)..(32): Xaa is C or S
TRLEPLPIVYYDSANNVVEQLSNDMVVESXGX

SEQ ID NO: 55297 - protein, 37 aa, Artificial Sequence; identical to SEQ ID NO: 13242
  Cyclic GFR-binding peptide
  MOD_RES (5)..(6): Xaa is C or S

SEQ ID NO: 55298 - protein, 27 aa, Artificial Sequence
  Cyclic GFR-binding peptide
TRLSAISILYLDSANNVVLKNYQDMVV

SEQ ID NO: 55299 - protein, 28 aa, Artificial Sequence
  Cyclic GFR-binding peptide
PTQLEPLTVLYYDDSSNVIEQLSNNMVV

SEQ ID NO: 55300 - protein, 38 aa, Artificial Sequence; identical to SEQ ID NO: 13246
  Cyclic GFR-binding peptide
  MOD_RES (3)..(4)..(35)..(37): Xaa is C or S

SEQ ID NO: 55301 - protein, 32 aa, Artificial Sequence
  Cyclic GFR-binding peptide
  MOD_RES (30)..(32): Xaa is C or S
PQALSPISILFIVGRKPKVYKQYEMIVRSXKX

SEQ ID NO: 55302 - protein, 23 aa, Artificial Sequence
  Cyclic GFR-binding peptide
SPISILFIIGKTPKIYKQYEMIV

SEQ ID NO: 55303 - protein, 30 aa, Artificial Sequence
  Cyclic GFR-binding peptide
  MOD_RES (27)..(29): Xaa is C or S
EPLPMVYYDEYDKVVEQLSNEMVVEGXGXR

SEQ ID NO: 55304 - protein, 23 aa, Artificial Sequence
  Cyclic GFR-binding peptide
ELEPLPMVYYDENEKVVEQLSND

SEQ ID NO: 55305 - protein, 37 aa, Artificial Sequence; identical to SEQ ID NO: 13249
  Cyclic GFR-binding peptide
  MOD_RES (2)..(3)..(35)..(37): Xaa is C or S

SEQ ID NO: 55306 - protein, 37 aa, Artificial Sequence; identical to SEQ ID NO: 13250
  Cyclic GFR-binding peptide
  MOD_RES (2)..(3)..(35)..(37): Xaa is C or S

SEQ ID NO: 55307 - protein, 33 aa, Artificial Sequence; identical to SEQ ID NO: 13251
  Cyclic GFR-binding peptide
  MOD_RES (32)..(32): Xaa is C or S

SEQ ID NO: 55308 - protein, 28 aa, Artificial Sequence
  Cyclic GFR-binding peptide
  MOD_RES (28)..(28): Xaa is C or S
DLSPISILFIVGRTPKVYKQYEMVVKSX

SEQ ID NO: 55309 - protein, 32 aa, Artificial Sequence
  Cyclic GFR-binding peptide
  MOD_RES (29)..(31): Xaa is C or S
ELEPLTMLYYDENEKVVEQLSNDMVVEGXGXR

SEQ ID NO: 55310 - protein, 37 aa, Artificial Sequence; identical to SEQ ID NO: 13253
  Cyclic GFR-binding peptide
  MOD_RES (4)..(36): Xaa is C or S

SEQ ID NO: 55311 - protein, 32 aa, Artificial Sequence
  Cyclic GFR-binding peptide
  MOD_RES (29)..(31): Xaa is C or S
QDLEPLPIVYYVGRTPKVEQLSNMVVKSXKXS

SEQ ID NO: 55312 - protein, 38 aa, Artificial Sequence; identical to SEQ ID NO: 13256
  Cyclic GFR-binding peptide
  MOD_RES (5)..(6)..(38): Xaa is C or S

SEQ ID NO: 55313 - protein, 32 aa, Artificial Sequence
  Cyclic GFR-binding peptide
  MOD_RES (3)..(3): Xaa is C or S
PTXAPTKLEPLTVLYYDDSSNVIEQLSNNMVV

SEQ ID NO: 55314 - protein, 32 aa, Artificial Sequence
  Cyclic GFR-binding peptide
  MOD_RES (31)..(31): Xaa is C or S
PTRLEPLPIVYYDSANNVVEQLSNDMVVESXG

SEQ ID NO: 55315 - protein, 33 aa, Artificial Sequence
  Cyclic GFR-binding peptide
  MOD_RES (5)..(6): Xaa is C or S
IPKAXXVPTELSPISMLFIDEYDKVVYKQYEEM

SEQ ID NO: 55316 - protein, 42 aa, Artificial Sequence; identical to SEQ ID NO: 13257
  Cyclic GFR-binding peptide
  MOD_RES (7)..(39)..(41): Xaa is C or S

SEQ ID NO: 55317 - protein, 20 aa, Artificial Sequence
  Cyclic GFR-binding peptide
NAISILYFDSANNVVLKKYR

SEQ ID NO: 55318 - protein, 32 aa, Artificial Sequence
  Cyclic GFR-binding peptide
  MOD_RES (3)..(4): Xaa is C or S
KPXXAPTKLEPLTVLYYDDSSNVIEQLSNNMV

SEQ ID NO: 55319 - protein, 28 aa, Artificial Sequence
  Cyclic GFR-binding peptide
  MOD_RES (27)..(27): Xaa is C or S
NAISILYFDSANNVVLKKYRDMVVESXG

SEQ ID NO: 55320 - protein, 31 aa, Artificial Sequence
  Cyclic GFR-binding peptide
  MOD_RES (29)..(31): Xaa is C or S
KLEPLTVLYYDDSSNVIEQLSNNMVVRSXGX

SEQ ID NO: 55321 - protein, 39 aa, Artificial Sequence; identical to SEQ ID NO: 13262
  Cyclic GFR-binding peptide
  MOD_RES (4)..(5)..(37)..(39): Xaa is C or S

SEQ ID NO: 55322 - protein, 37 aa, Artificial Sequence; identical to SEQ ID NO: 13263
  Cyclic GFR-binding peptide
  MOD_RES (6)..(7): Xaa is C or S

SEQ ID NO: 55323 - protein, 25 aa, Artificial Sequence
  Cyclic GFR-binding peptide
DLSPISILFIVGRTPKVYKQYEMVV

SEQ ID NO: 55324 - protein, 38 aa, Artificial Sequence; identical to SEQ ID NO: 13264
  Cyclic GFR-binding peptide
  MOD_RES (3)..(4)..(36)..(38): Xaa is C or S

SEQ ID NO: 55325 - protein, 29 aa, Artificial Sequence
  Cyclic GFR-binding peptide
  MOD_RES (27)..(29): Xaa is C or S
EPLPVVYYDDSSNVIEQLSNNMVVRAXGX

SEQ ID NO: 55326 - protein, 37 aa, Artificial Sequence; identical to SEQ ID NO: 13267
  Cyclic GFR-binding peptide
  MOD_RES (2)..(3)..(35)..(37): Xaa is C or S

SEQ ID NO: 55327 - protein, 24 aa, Artificial Sequence
  Cyclic GFR-binding peptide
EPLPMVYYDEYDKVVEQLSNEMVV

SEQ ID NO: 55328 - protein, 33 aa, Artificial Sequence
  Cyclic GFR-binding peptide
  MOD_RES (30)..(32): Xaa is C or S
TKLEPLTVLYYDDSSNVIEQLSNNMVVRSXGXH

SEQ ID NO: 55329 - protein, 25 aa, Artificial Sequence
  Cyclic GFR-binding peptide
VSQDLEPLPIVYYIGKTPKIEQLSN

SEQ ID NO: 55330 - protein, 35 aa, Artificial Sequence
  Cyclic GFR-binding peptide
  MOD_RES (5)..(6): Xaa is C or S
TPPTXXVPTRLNAISILYFDSANNVVLKKYRDMVV

SEQ ID NO: 55331 - protein, 36 aa, Artificial Sequence; identical to SEQ ID NO: 13269
  Cyclic GFR-binding peptide
  MOD_RES (1)..(2)..(34)..(36): Xaa is C or S

SEQ ID NO: 55332 - protein, 22 aa, Artificial Sequence
  Cyclic GFR-binding peptide
LSPISMLFIDEYDKVVYKQYEE

SEQ ID NO: 55333 - protein, 30 aa, Artificial Sequence
  Cyclic GFR-binding peptide
  MOD_RES (28)..(30): Xaa is C or S
LEPLTILYYDSANNVVEQLSNDMVVESXGX

SEQ ID NO: 55334 - protein, 29 aa, Artificial Sequence
  Cyclic GFR-binding peptide
  MOD_RES (3)..(4): Xaa is C or S
SPXXVSQDLSPISILFIIGKTPKIYKQYE

SEQ ID NO: 55335 - protein, 36 aa, Artificial Sequence; identical to SEQ ID NO: 13270
  Cyclic GFR-binding peptide
  MOD_RES (4)..(36): Xaa is C or S

SEQ ID NO: 55336 - protein, 24 aa, Artificial Sequence
  Cyclic GFR-binding peptide
TELEPLPMVYYDEYDKVVEQLSNE

SEQ ID NO: 55337 - protein, 23 aa, Artificial Sequence
  Cyclic GFR-binding peptide
EPLPMVYYDENEKVVEQLSNDMV

SEQ ID NO: 55338 - protein, 24 aa, Artificial Sequence
  Cyclic GFR-binding peptide
ELSPISMLFIDENEKVVYKQYEDM

SEQ ID NO: 55339 - protein, 37 aa, Artificial Sequence; identical to SEQ ID NO: 13273
  Cyclic GFR-binding peptide
  MOD_RES (6)..(7): Xaa is C or S

SEQ ID NO: 55340 - protein, 31 aa, Artificial Sequence
  Cyclic GFR-binding peptide
  MOD_RES (2)..(3): Xaa is C or S
PXXAPTQLSPISVLFIDDSSNVIYKQYENMV

SEQ ID NO: 55341 - protein, 30 aa, Artificial Sequence
  Cyclic GFR-binding peptide
  MOD_RES (28)..(30): Xaa is C or S
LEPLPVVYYDDSSNVIEQLSNNMVVRSXGX

SEQ ID NO: 55342 - protein, 27 aa, Artificial Sequence
  Cyclic GFR-binding peptide
PTRLEPLPIVYYDSANNVVEQLSNDMV

SEQ ID NO: 55343 - protein, 37 aa, Artificial Sequence; identical to SEQ ID NO: 13274
  Cyclic GFR-binding peptide
  MOD_RES (4)..(5)..(37): Xaa is C or S

SEQ ID NO: 55344 - protein, 37 aa, Artificial Sequence; identical to SEQ ID NO: 13276
  Cyclic GFR-binding peptide
  MOD_RES (3)..(4)..(35)..(37): Xaa is C or S

SEQ ID NO: 55345 - protein, 34 aa, Artificial Sequence; identical to SEQ ID NO: 13277
  Cyclic GFR-binding peptide
  MOD_RES (31)..(33): Xaa is C or S

SEQ ID NO: 55346 - protein, 25 aa, Artificial Sequence
  Cyclic GFR-binding peptide
SPISMLFIDENEKVVYKQYEDMVVE

SEQ ID NO: 55347 - protein, 29 aa, Artificial Sequence
  Cyclic GFR-binding peptide
VPQDLSPISILFIVGRTPKVYKQYEMVVK

SEQ ID NO: 55348 - protein, 33 aa, Artificial Sequence
  Cyclic GFR-binding peptide
  MOD_RES (30)..(32): Xaa is C or S
TKLSPISVLFIDDSSNVIYKQYENMVVRSXGXH

SEQ ID NO: 55349 - protein, 23 aa, Artificial Sequence
  Cyclic GFR-binding peptide
ELEPLTMLYYDENEKVVEQLSND

SEQ ID NO: 55350 - protein, 33 aa, Artificial Sequence
  Cyclic GFR-binding peptide
  MOD_RES (5)..(6): Xaa is C or S
SASPXXVSQDLEPLPIVYYIGKTPKIEQLSNMI

SEQ ID NO: 55351 - protein, 30 aa, Artificial Sequence
  Cyclic GFR-binding peptide
  MOD_RES (1)..(2): Xaa is C or S
XXVSQDLEPLPIVYYIGKTPKIEQLSNMIV

SEQ ID NO: 55352 - protein, 30 aa, Artificial Sequence
  Cyclic GFR-binding peptide
  MOD_RES (3)..(3): Xaa is C or S
PTXAPTKLSPISVLFIDDSSNVIYKQYENM

SEQ ID NO: 55353 - protein, 32 aa, Artificial Sequence
  Cyclic GFR-binding peptide
  MOD_RES (3)..(4): Xaa is C or S
KAXXVPTELEPLTMLYYDENEKVVEQLSNDMV

SEQ ID NO: 55354 - protein, 35 aa, Artificial Sequence; identical to SEQ ID NO: 13284
  Cyclic GFR-binding peptide
  MOD_RES (1)..(2)..(34): Xaa is C or S

SEQ ID NO: 55355 - protein, 28 aa, Artificial Sequence
  Cyclic GFR-binding peptide
  MOD_RES (2)..(2): Xaa is C or S
TXAPTKLEPLTVLYYDDSSNVIEQLSNN

SEQ ID NO: 55356 - protein, 29 aa, Artificial Sequence
  Cyclic GFR-binding peptide
  MOD_RES (29)..(29): Xaa is C or S
ELSPISMLFIDENEKVVYKQYEDMVVEGX

SEQ ID NO: 55357 - protein, 28 aa, Artificial Sequence
  Cyclic GFR-binding peptide
  MOD_RES (2)..(2): Xaa is C or S
TXAPTKLSPISVLFIDDSSNVIYKQYEN

SEQ ID NO: 55358 - protein, 27 aa, Artificial Sequence
  Cyclic GFR-binding peptide
  MOD_RES (27)..(27): Xaa is C or S
SAISILYLDSANNVVLKNYQDMVVESX

SEQ ID NO: 55359 - protein, 30 aa, Artificial Sequence
  Cyclic GFR-binding peptide
  MOD_RES (1)..(2): Xaa is C or S
XXVPQDLSPISILFIVGRTPKVYKQYEMVV

SEQ ID NO: 55360 - protein, 23 aa, Artificial Sequence
  Cyclic GFR-binding peptide
LEPLPIVYYVGRTPKVEQLSNMV

SEQ ID NO: 55361 - protein, 34 aa, Artificial Sequence; identical to SEQ ID NO: 13287
  Cyclic GFR-binding peptide
  MOD_RES (2)..(3): Xaa is C or S

SEQ ID NO: 55362 - protein, 24 aa, Artificial Sequence
  Cyclic GFR-binding peptide
LEPLTVLYYDDSSNVIEQLSNNMV

SEQ ID NO: 55363 - protein, 31 aa, Artificial Sequence; identical to SEQ ID NO: 13289
  Cyclic GFR-binding peptide

SEQ ID NO: 55364 - protein, 34 aa, Artificial Sequence
  Cyclic GFR-binding peptide
  MOD_RES (31)..(33): Xaa is C or S
PTELEPLPMVYYDEYDKVVEQLSNEMVVEGXGXR

SEQ ID NO: 55365 - protein, 29 aa, Artificial Sequence
  Cyclic GFR-binding peptide
TELEPLPMVYYDEYDKVVEQLSNEMVVEG

SEQ ID NO: 55366 - protein, 22 aa, Artificial Sequence
  Cyclic GFR-binding peptide
DLEPLPIVYYVGRTPKVEQLSN

SEQ ID NO: 55367 - protein, 33 aa, Artificial Sequence
  Cyclic GFR-binding peptide
  MOD_RES (6)..(7): Xaa is C or S
STPPTXXVPTRLNAISILYFDSANNVVLKKYRD

SEQ ID NO: 55368 - protein, 29 aa, Artificial Sequence
  Cyclic GFR-binding peptide
  MOD_RES (1)..(1): Xaa is C or S
XVPTELEPLPMVYYDEYDKVVEQLSNEMV

SEQ ID NO: 55369 - protein, 31 aa, Artificial Sequence
  Cyclic GFR-binding peptide
  MOD_RES (5)..(6): Xaa is C or S
IPKAXXVPTELEPLPMVYYDENEKVVEQLSN

SEQ ID NO: 55370 - protein, 29 aa, Artificial Sequence
  Cyclic GFR-binding peptide
  MOD_RES (28)..(28): Xaa is C or S
DLEPLPIVYYVGRTPKVEQLSNMVVKSXK

SEQ ID NO: 55371 - protein, 28 aa, Artificial Sequence
  Cyclic GFR-binding peptide
  MOD_RES (26)..(28): Xaa is C or S
SPISILFIVGRTPKVYKQYEMVVKSXKX

SEQ ID NO: 55372 - protein, 38 aa, Artificial Sequence; identical to SEQ ID NO: 13294
  Cyclic GFR-binding peptide
  MOD_RES (7)..(7): Xaa is C or S

SEQ ID NO: 55373 - protein, 27 aa, Artificial Sequence
  Cyclic GFR-binding peptide
  MOD_RES (1)..(2): Xaa is C or S
XXVPQDLEPLPIVYYVGRTPKVEQLSN

SEQ ID NO: 55374 - protein, 35 aa, Artificial Sequence; identical to SEQ ID NO: 13295
  Cyclic GFR-binding peptide
  MOD_RES (1)..(2)..(34): Xaa is C or S

SEQ ID NO: 55375 - protein, 30 aa, Artificial Sequence
  Cyclic GFR-binding peptide
  MOD_RES (1)..(2): Xaa is C or S
XXVPQALEPLTILYYVGRKPKVEQLSNMIV

SEQ ID NO: 55376 - protein, 25 aa, Artificial Sequence
  Cyclic GFR-binding peptide
PTELEPLTMLYYDEYDKVVEQLSNE

SEQ ID NO: 55377 - protein, 27 aa, Artificial Sequence
  Cyclic GFR-binding peptide
  MOD_RES (27)..(27): Xaa is C or S
LSPISILFIIGKTPKIYKQYEMIVKSX

SEQ ID NO: 55378 - protein, 32 aa, Artificial Sequence; identical to SEQ ID NO: 13296
  Cyclic GFR-binding peptide
  MOD_RES (1)..(1): Xaa is C or S

SEQ ID NO: 55379 - protein, 33 aa, Artificial Sequence
  Cyclic GFR-binding peptide
  MOD_RES (6)..(7): Xaa is C or S
SIPKAXXVPTELEPLPMVYYDEYDKVVEQLSNE

SEQ ID NO: 55380 - protein, 39 aa, Artificial Sequence; identical to SEQ ID NO: 13300
  Cyclic GFR-binding peptide
  MOD_RES (6)..(7)..(39): Xaa is C or S

SEQ ID NO: 55381 - protein, 30 aa, Artificial Sequence
  Cyclic GFR-binding peptide
  MOD_RES (3)..(4): Xaa is C or S
SPXXVSQDLSPISILFIIGKTPKIYKQYEM

SEQ ID NO: 55382 - protein, 30 aa, Artificial Sequence
  Cyclic GFR-binding peptide
  MOD_RES (3)..(4): Xaa is C or S
PTXXVPTRLNAISILYFDSANNVVLKKYRD

SEQ ID NO: 55383 - protein, 27 aa, Artificial Sequence
  Cyclic GFR-binding peptide
TELEPLTMLYYDENEKVVEQLSNDMVV

SEQ ID NO: 55384 - protein, 29 aa, Artificial Sequence
  Cyclic GFR-binding peptide
  MOD_RES (28)..(28): Xaa is C or S
LEPLPVVYYDDSSNVIEQLSNNMVVRSXG

SEQ ID NO: 55385 - protein, 34 aa, Artificial Sequence; identical to SEQ ID NO: 13302
  Cyclic GFR-binding peptide
  MOD_RES (1)..(2)..(34): Xaa is C or S

SEQ ID NO: 55386 - protein, 30 aa, Artificial Sequence
  Cyclic GFR-binding peptide
  MOD_RES (4)..(5): Xaa is C or S
PKAXXVPTELEPLPMVYYDENEKVVEQLSN

SEQ ID NO: 55387 - protein, 26 aa, Artificial Sequence
  Cyclic GFR-binding peptide
QALEPLTILYYVGRKPKVEQLSNMIV

SEQ ID NO: 55388 - protein, 38 aa, Artificial Sequence; identical to SEQ ID NO: 13303
  Cyclic GFR-binding peptide
  MOD_RES (3)..(4)..(35)..(37): Xaa is C or S

SEQ ID NO: 55389 - protein, 31 aa, Artificial Sequence
  Cyclic GFR-binding peptide
  MOD_RES (4)..(5): Xaa is C or S
PKAXXVPTELEPLPMVYYDEYDKVVEQLSNE

SEQ ID NO: 55390 - protein, 39 aa, Artificial Sequence; identical to SEQ ID NO: 13306
  Cyclic GFR-binding peptide
  MOD_RES (6)..(7)..(39): Xaa is C or S

SEQ ID NO: 55391 - protein, 36 aa, Artificial Sequence; identical to SEQ ID NO: 13307
  Cyclic GFR-binding peptide
  MOD_RES (1)..(2)..(34)..(36): Xaa is C or S

SEQ ID NO: 55392 - protein, 28 aa, Artificial Sequence
  Cyclic GFR-binding peptide
  MOD_RES (27)..(27): Xaa is C or S
LEPLPIVYYIGKTPKIEQLSNMIVKSXK

SEQ ID NO: 55393 - protein, 28 aa, Artificial Sequence
  Cyclic GFR-binding peptide
VPTRLNAISILYFDSANNVVLKKYRDMV

SEQ ID NO: 55394 - protein, 27 aa, Artificial Sequence
  Cyclic GFR-binding peptide
RLNAISILYFDSANNVVLKKYRDMVVE

SEQ ID NO: 55395 - protein, 29 aa, Artificial Sequence
  Cyclic GFR-binding peptide
  MOD_RES (29)..(29): Xaa is C or S
QLSPISVLFIDDSSNVIYKQYENMVVRAX

SEQ ID NO: 55396 - protein, 37 aa, Artificial Sequence; identical to SEQ ID NO: 13311
  Cyclic GFR-binding peptide
  MOD_RES (5)..(6): Xaa is C or S

SEQ ID NO: 55397 - protein, 34 aa, Artificial Sequence; identical to SEQ ID NO: 13312
  Cyclic GFR-binding peptide
  MOD_RES (32)..(34): Xaa is C or S

SEQ ID NO: 55398 - protein, 25 aa, Artificial Sequence
  Cyclic GFR-binding peptide
VPTELEPLTMLYYDEYDKVVEQLSN

SEQ ID NO: 55399 - protein, 24 aa, Artificial Sequence
  Cyclic GFR-binding peptide
LEPLTILYYVGRKPKVEQLSNMIV

SEQ ID NO: 55400 - protein, 25 aa, Artificial Sequence
  Cyclic GFR-binding peptide
RLSAISILYLDSANNVVLKNYQDMV

SEQ ID NO: 55401 - protein, 25 aa, Artificial Sequence
  Cyclic GFR-binding peptide
KLSPISVLFIDDSSNVIYKQYENMV

SEQ ID NO: 55402 - protein, 37 aa, Artificial Sequence; identical to SEQ ID NO: 13314
  Cyclic GFR-binding peptide
  MOD_RES (2)..(34)..(36): Xaa is C or S

SEQ ID NO: 55403 - protein, 25 aa, Artificial Sequence
  Cyclic GFR-binding peptide
TELEPLTMLYYDENEKVVEQLSNDM

SEQ ID NO: 55404 - protein, 37 aa, Artificial Sequence; identical to SEQ ID NO: 13316
  Cyclic GFR-binding peptide
  MOD_RES (4)..(36): Xaa is C or S

SEQ ID NO: 55405 - protein, 39 aa, Artificial Sequence; identical to SEQ ID NO: 13317
  Cyclic GFR-binding peptide
  MOD_RES (6)..(7)..(38): Xaa is C or S

SEQ ID NO: 55406 - protein, 29 aa, Artificial Sequence
  Cyclic GFR-binding peptide
SQDLSPISILFIIGKTPKIYKQYEMIVKS

SEQ ID NO: 55407 - protein, 28 aa, Artificial Sequence
  Cyclic GFR-binding peptide
TELEPLPMVYYDENEKVVEQLSNDMVVE

SEQ ID NO: 55408 - protein, 24 aa, Artificial Sequence
  Cyclic GFR-binding peptide
RLEPLTILYYDSANNVVEQLSNDM

SEQ ID NO: 55409 - protein, 35 aa, Artificial Sequence
  Cyclic GFR-binding peptide
  MOD_RES (7)..(7): Xaa is C or S
HVTKPTXAPTKLSPISVLFIDDSSNVIYKQYENMV

SEQ ID NO: 55410 - protein, 22 aa, Artificial Sequence
  Cyclic GFR-binding peptide
ELEPLPMVYYDEYDKVVEQLSN

SEQ ID NO: 55411 - protein, 31 aa, Artificial Sequence
  Cyclic GFR-binding peptide
  MOD_RES (2)..(3): Xaa is C or S
AXXVPTELEPLTMLYYDEYDKVVEQLSNEMV

SEQ ID NO: 55412 - protein, 30 aa, Artificial Sequence
  Cyclic GFR-binding peptide
  MOD_RES (30)..(30): Xaa is C or S
TKLEPLPVVYYDDSSNVIEQLSNNMVVRSX

SEQ ID NO: 55413 - protein, 37 aa, Artificial Sequence; identical to SEQ ID NO: 13321
  Cyclic GFR-binding peptide
  MOD_RES (1)..(2)..(34)..(36): Xaa is C or S

SEQ ID NO: 55414 - protein, 28 aa, Artificial Sequence
  Cyclic GFR-binding peptide
  MOD_RES (28)..(28): Xaa is C or S
LNAISILYFDSANNVVLKKYRDMVVESX

SEQ ID NO: 55415 - protein, 35 aa, Artificial Sequence
  Cyclic GFR-binding peptide
  MOD_RES (5)..(6): Xaa is C or S
VPKPXXAPTKLEPLTVLYYDDSSNVIEQLSNNMVV

SEQ ID NO: 55416 - protein, 35 aa, Artificial Sequence; identical to SEQ ID NO: 13323
  Cyclic GFR-binding peptide
  MOD_RES (1)..(2)..(34): Xaa is C or S

SEQ ID NO: 55417 - protein, 38 aa, Artificial Sequence; identical to SEQ ID NO: 13324
  Cyclic GFR-binding peptide
  MOD_RES (3)..(4)..(36)..(38): Xaa is C or S

SEQ ID NO: 55418 - protein, 31 aa, Artificial Sequence
  Cyclic GFR-binding peptide
  MOD_RES (28)..(30): Xaa is C or S
LEPLTMLYYDEYDKVVEQLSNEMVVEGXGXR

SEQ ID NO: 55419 - protein, 22 aa, Artificial Sequence
  Cyclic GFR-binding peptide
EPLTILYYVGRKPKVEQLSNMI

SEQ ID NO: 55420 - protein, 31 aa, Artificial Sequence
  Cyclic GFR-binding peptide
  MOD_RES (1)..(2): Xaa is C or S
XXVPQALSPISILFIVGRKPKVYKQYEMIVR

SEQ ID NO: 55421 - protein, 31 aa, Artificial Sequence
  Cyclic GFR-binding peptide
  MOD_RES (3)..(4): Xaa is C or S
APXXVPQALEPLTILYYVGRKPKVEQLSNMI

SEQ ID NO: 55422 - protein, 20 aa, Artificial Sequence
  Cyclic GFR-binding peptide
EPLTVLYYDDSSNVIEQLSN

SEQ ID NO: 55423 - protein, 32 aa, Artificial Sequence
  Cyclic GFR-binding peptide
  MOD_RES (29)..(31): Xaa is C or S
ELSPISMLFIDENEKVVYKQYEDMVVEGXGXR

SEQ ID NO: 55424 - protein, 30 aa, Artificial Sequence
  Cyclic GFR-binding peptide
  MOD_RES (1)..(1): Xaa is C or S
XVPQDLSPISILFIVGRTPKVYKQYEMVVK

SEQ ID NO: 55425 - protein, 32 aa, Artificial Sequence
  Cyclic GFR-binding peptide
  MOD_RES (2)..(3): Xaa is C or S
PXXAPTKLSPISVLFIDDSSNVIYKQYENMVV

SEQ ID NO: 55426 - protein, 28 aa, Artificial Sequence
  Cyclic GFR-binding peptide
APTKLEPLPVVYYDDSSNVIEQLSNNMV

SEQ ID NO: 55427 - protein, 39 aa, Artificial Sequence; identical to SEQ ID NO: 13334
  Cyclic GFR-binding peptide
  MOD_RES (6)..(7)..(39): Xaa is C or S

SEQ ID NO: 55428 - protein, 25 aa, Artificial Sequence
  Cyclic GFR-binding peptide
PTELSPISMLFIDEYDKVVYKQYEE

SEQ ID NO: 55429 - protein, 28 aa, Artificial Sequence
  Cyclic GFR-binding peptide
  MOD_RES (28)..(28): Xaa is C or S
LSPISVLFIDDSSNVIYKQYENMVVRSX

SEQ ID NO: 55430 - protein, 36 aa, Artificial Sequence; identical to SEQ ID NO: 13335
  Cyclic GFR-binding peptide
  MOD_RES (1)..(2)..(33)..(35): Xaa is C or S

SEQ ID NO: 55431 - protein, 29 aa, Artificial Sequence
  Cyclic GFR-binding peptide
  MOD_RES (1)..(1): Xaa is C or S
XVPTRLEPLPIVYYDSANNVVEQLSNDMV

SEQ ID NO: 55432 - protein, 32 aa, Artificial Sequence
  Cyclic GFR-binding peptide
  MOD_RES (3)..(4): Xaa is C or S
PTXXVPTRLSAISILYLDSANNVVLKNYQDMV

SEQ ID NO: 55433 - protein, 23 aa, Artificial Sequence
  Cyclic GFR-binding peptide
ELSPISMLFIDENEKVVYKQYED

SEQ ID NO: 55434 - protein, 31 aa, Artificial Sequence
  Cyclic GFR-binding peptide
  MOD_RES (31)..(31): Xaa is C or S
PTRLSAISILYLDSANNVVLKNYQDMVVESX

SEQ ID NO: 55435 - protein, 28 aa, Artificial Sequence
  Cyclic GFR-binding peptide
QALSPISILFIVGRKPKVYKQYEMIVRS

SEQ ID NO: 55436 - protein, 32 aa, Artificial Sequence; identical to SEQ ID NO: 13337
  Cyclic GFR-binding peptide
  MOD_RES (1)..(1): Xaa is C or S

SEQ ID NO: 55437 - protein, 25 aa, Artificial Sequence
  Cyclic GFR-binding peptide
EPLPIVYYDSANNVVEQLSNDMVVE

SEQ ID NO: 55438 - protein, 21 aa, Artificial Sequence
  Cyclic GFR-binding peptide
SPISILFIVGRKPKVYKQYEM

SEQ ID NO: 55439 - protein, 30 aa, Artificial Sequence
  Cyclic GFR-binding peptide
  MOD_RES (1)..(2): Xaa is C or S
XXAPTQLEPLPVVYYDDSSNVIEQLSNNMV

SEQ ID NO: 55440 - protein, 33 aa, Artificial Sequence; identical to SEQ ID NO: 13340
  Cyclic GFR-binding peptide
  MOD_RES (1)..(2): Xaa is C or S

SEQ ID NO: 55441 - protein, 34 aa, Artificial Sequence; identical to SEQ ID NO: 13341
  Cyclic GFR-binding peptide
  MOD_RES (3)..(4): Xaa is C or S

SEQ ID NO: 55442 - protein, 37 aa, Artificial Sequence; identical to SEQ ID NO: 13342
  Cyclic GFR-binding peptide
  MOD_RES (1)..(2)..(34)..(36): Xaa is C or S

SEQ ID NO: 55443 - protein, 31 aa, Artificial Sequence
  Cyclic GFR-binding peptide
  MOD_RES (4)..(5): Xaa is C or S
PKAXXVPTELSPISMLFIDEYDKVVYKQYEE

SEQ ID NO: 55444 - protein, 30 aa, Artificial Sequence
  Cyclic GFR-binding peptide
  MOD_RES (2)..(3): Xaa is C or S
PXXAPTQLSPISVLFIDDSSNVIYKQYENM

SEQ ID NO: 55445 - protein, 31 aa, Artificial Sequence
  Cyclic GFR-binding peptide
  MOD_RES (1)..(2): Xaa is C or S
XXVPTELEPLTMLYYDEYDKVVEQLSNEMVV

SEQ ID NO: 55446 - protein, 30 aa, Artificial Sequence; identical to SEQ ID NO: 1046
  Cyclic GFR-binding peptide

SEQ ID NO: 55447 - protein, 38 aa, Artificial Sequence; identical to SEQ ID NO: 13346
  Cyclic GFR-binding peptide
  MOD_RES (3)..(4)..(36)..(38): Xaa is C or S

SEQ ID NO: 55448 - protein, 37 aa, Artificial Sequence
  Cyclic GFR-binding peptide
  MOD_RES (33)..(33): Xaa is C or S
ELRSMEGLLKPKKRVYEMIQVTINSHHVRSPQXKVSS

SEQ ID NO: 55449 - protein, 29 aa, Artificial Sequence
  Cyclic GFR-binding peptide
HEELRVTAKKLKPKKRVYEIKRVQVPRHH

SEQ ID NO: 55450 - protein, 23 aa, Artificial Sequence
  Cyclic GFR-binding peptide
RVTAKKLKPKKRVYEIKRVQVPR

SEQ ID NO: 55451 - protein, 31 aa, Artificial Sequence
  Cyclic GFR-binding peptide
  MOD_RES (30)..(30): Xaa is C or S
SMEGILKPKKRVYEMIQVTINSHHVRSPQXK

SEQ ID NO: 55452 - protein, 29 aa, Artificial Sequence
  Cyclic GFR-binding peptide
ELRSMEGLLKPKKRVYEMIQVTINSHHVR

SEQ ID NO: 55453 - protein, 36 aa, Artificial Sequence; identical to SEQ ID NO: 13349
  Cyclic GFR-binding peptide
  MOD_RES (1)..(3): Xaa is C or S

SEQ ID NO: 55454 - protein, 34 aa, Artificial Sequence
  Cyclic GFR-binding peptide
  MOD_RES (34)..(34): Xaa is C or S
EELRSMEGILKPKKRVYEMIQVTINSHHVRSPQX

SEQ ID NO: 55455 - protein, 43 aa, Artificial Sequence; identical to SEQ ID NO: 13350
  Cyclic GFR-binding peptide
  MOD_RES (1)..(3)..(37): Xaa is C or S

SEQ ID NO: 55456 - protein, 35 aa, Artificial Sequence; identical to SEQ ID NO: 13351
  Cyclic GFR-binding peptide
  MOD_RES (1)..(35): Xaa is C or S

SEQ ID NO: 55457 - protein, 26 aa, Artificial Sequence
  Cyclic GFR-binding peptide
LFVQVEKHQGQHPKIRVKAMKVSREE

SEQ ID NO: 55458 - protein, 31 aa, Artificial Sequence
  Cyclic GFR-binding peptide
NHQLFSMEGLHQGQHPKIRMIQMTINSEETP

SEQ ID NO: 55459 - protein, 36 aa, Artificial Sequence
  Cyclic GFR-binding peptide
  MOD_RES (30)..(30): Xaa is C or S
ELVTAKKHQGQHPKIRIKRMQVPRQGTPVXELGEDN

SEQ ID NO: 55460 - protein, 30 aa, Artificial Sequence
  Cyclic GFR-binding peptide
DELTVQVEKFIPKKRVIEVKAVKVSRLQVQ

SEQ ID NO: 55461 - protein, 32 aa, Artificial Sequence; identical to SEQ ID NO: 13356
  Cyclic GFR-binding peptide

SEQ ID NO: 55462 - protein, 34 aa, Artificial Sequence
  Cyclic GFR-binding peptide
  MOD_RES (34)..(34): Xaa is C or S
EELRSMEGLLKPKKRVYEMIQVTINSHHVRSPQX

SEQ ID NO: 55463 - protein, 42 aa, Artificial Sequence; identical to SEQ ID NO: 13357
  Cyclic GFR-binding peptide
  MOD_RES (1)..(38): Xaa is C or S

SEQ ID NO: 55464 - protein, 27 aa, Artificial Sequence
  Cyclic GFR-binding peptide
LVTAKKHQGQHPKIRIKRMQVPRQGTP

SEQ ID NO: 55465 - protein, 26 aa, Artificial Sequence
  Cyclic GFR-binding peptide
ELRSMEGILKPKKRVYEMIQVTINSH

SEQ ID NO: 55466 - protein, 31 aa, Artificial Sequence
  Cyclic GFR-binding peptide
  MOD_RES (2)..(2): Xaa is C or S
KXALHDELTSMEGIFIPKKRVIEMIQVTINS

SEQ ID NO: 55467 - protein, 32 aa, Artificial Sequence
  Cyclic GFR-binding peptide
  MOD_RES (31)..(31): Xaa is C or S
RSMEGILKPKKRVYEMIQVTINSHHVRSPQXK

SEQ ID NO: 55468 - protein, 31 aa, Artificial Sequence
  Cyclic GFR-binding peptide
  MOD_RES (31)..(31): Xaa is C or S
TVQVEKFIPKKRVIEVKAVKVSRLQVQTPRX

SEQ ID NO: 55469 - protein, 31 aa, Artificial Sequence
  Cyclic GFR-binding peptide
  MOD_RES (30)..(30): Xaa is C or S
VQVEKFIPKKRVIEVKAVKVSRLQVQTPRXQ

SEQ ID NO: 55470 - protein, 24 aa, Artificial Sequence
  Cyclic GFR-binding peptide
LRSMEGLLKPKKRVYEMIQVTINS

SEQ ID NO: 55471 - protein, 26 aa, Artificial Sequence
  Cyclic GFR-binding peptide
VQVEKFIPKKRVIEVKAVKVSRLQVQ

SEQ ID NO: 55472 - protein, 35 aa, Artificial Sequence; identical to SEQ ID NO: 13365
  Cyclic GFR-binding peptide
  MOD_RES (2)..(2): Xaa is C or S

SEQ ID NO: 55473 - protein, 29 aa, Artificial Sequence
  Cyclic GFR-binding peptide
  MOD_RES (29)..(29): Xaa is C or S
FSMEGLHQGQHPKIRMIQMTINSEETPVX

SEQ ID NO: 55474 - protein, 36 aa, Artificial Sequence
  Cyclic GFR-binding peptide
  MOD_RES (1)..(3): Xaa is C or S
XKXALHDELTSMEGLFIPKKRVIEMIQVTINSLQVQ

SEQ ID NO: 55475 - protein, 39 aa, Artificial Sequence; identical to SEQ ID NO: 13366
  Cyclic GFR-binding peptide
  MOD_RES (1)..(38): Xaa is C or S

SEQ ID NO: 55476 - protein, 36 aa, Artificial Sequence; identical to SEQ ID NO: 13367
  Cyclic GFR-binding peptide
  MOD_RES (1)..(3): Xaa is C or S

SEQ ID NO: 55477 - protein, 35 aa, Artificial Sequence
  Cyclic GFR-binding peptide
  MOD_RES (31)..(31): Xaa is C or S
RVTAKKLKPKKRVYEIKRVQVPRHHVRSPQXKVSS

SEQ ID NO: 55478 - protein, 37 aa, Artificial Sequence; identical to SEQ ID NO: 13371
  Cyclic GFR-binding peptide
  MOD_RES (37)..(37): Xaa is C or S

SEQ ID NO: 55479 - protein, 36 aa, Artificial Sequence; identical to SEQ ID NO: 13374
  Cyclic GFR-binding peptide
  MOD_RES (36)..(36): Xaa is C or S

SEQ ID NO: 55480 - protein, 45 aa, Artificial Sequence; identical to SEQ ID NO: 13375
  Cyclic GFR-binding peptide
  MOD_RES (2)..(4)..(41): Xaa is C or S

SEQ ID NO: 55481 - protein, 31 aa, Artificial Sequence
  Cyclic GFR-binding peptide
  MOD_RES (1)..(1): Xaa is C or S
XALHDELTVQVEKFIPKKRVIEVKAVKVSRL

SEQ ID NO: 55482 - protein, 34 aa, Artificial Sequence; identical to SEQ ID NO: 13376
  Cyclic GFR-binding peptide

SEQ ID NO: 55483 - protein, 29 aa, Artificial Sequence
  Cyclic GFR-binding peptide
EELRSMEGILKPKKRVYEMIQVTINSHHV

SEQ ID NO: 55484 - protein, 37 aa, Artificial Sequence; identical to SEQ ID NO: 13377
  Cyclic GFR-binding peptide
  MOD_RES (2)..(4): Xaa is C or S

SEQ ID NO: 55485 - protein, 35 aa, Artificial Sequence; identical to SEQ ID NO: 13378
  Cyclic GFR-binding peptide
  MOD_RES (35)..(35): Xaa is C or S

SEQ ID NO: 55486 - protein, 34 aa, Artificial Sequence
  Cyclic GFR-binding peptide
  MOD_RES (2)..(2): Xaa is C or S
KXALHDELTVQVEKFIPKKRVIEVKAVKVSRLQV

SEQ ID NO: 55487 - protein, 34 aa, Artificial Sequence
  Cyclic GFR-binding peptide
  MOD_RES (34)..(34): Xaa is C or S
DELTVQVEKFIPKKRVIEVKAVKVSRLQVQTPRX

SEQ ID NO: 55488 - protein, 33 aa, Artificial Sequence; identical to SEQ ID NO: 13380
  Cyclic GFR-binding peptide

SEQ ID NO: 55489 - protein, 44 aa, Artificial Sequence; identical to SEQ ID NO: 13381
  Cyclic GFR-binding peptide
  MOD_RES (2)..(4)..(41): Xaa is C or S

SEQ ID NO: 55490 - protein, 34 aa, Artificial Sequence
  Cyclic GFR-binding peptide
  MOD_RES (1)..(3): Xaa is C or S
XEXKNHQLFVQVEKHQGQHPKIRVKAMKVSREET

SEQ ID NO: 55491 - protein, 32 aa, Artificial Sequence
  Cyclic GFR-binding peptide
  MOD_RES (32)..(32): Xaa is C or S
HQLFVQVEKHQGQHPKIRVKAMKVSREETPVX

SEQ ID NO: 55492 - protein, 30 aa, Artificial Sequence
  Cyclic GFR-binding peptide
ALHDELTVQVEKFIPKKRVIEVKAVKVSRL

SEQ ID NO: 55493 - protein, 38 aa, Artificial Sequence; identical to SEQ ID NO: 13388
  Cyclic GFR-binding peptide
  MOD_RES (2)..(2): Xaa is C or S

SEQ ID NO: 55494 - protein, 38 aa, Artificial Sequence; identical to SEQ ID NO: 13387
  Cyclic GFR-binding peptide
  MOD_RES (2)..(36): Xaa is C or S

SEQ ID NO: 55495 - protein, 28 aa, Artificial Sequence
  Cyclic GFR-binding peptide
LRVTAKKLKPKKRVYEIKRVQVPRHHVR

SEQ ID NO: 55496 - protein, 40 aa, Artificial Sequence; identical to SEQ ID NO: 13389
  Cyclic GFR-binding peptide
  MOD_RES (1)..(35): Xaa is C or S

SEQ ID NO: 55497 - protein, 28 aa, Artificial Sequence
  Cyclic GFR-binding peptide
RSMEGLLKPKKRVYEMIQVTINSHHVRS

SEQ ID NO: 55498 - protein, 27 aa, Artificial Sequence
  Cyclic GFR-binding peptide
RSMEGLLKPKKRVYEMIQVTINSHHVR

SEQ ID NO: 55499 - protein, 37 aa, Artificial Sequence; identical to SEQ ID NO: 13392
  Cyclic GFR-binding peptide
  MOD_RES (35)..(35): Xaa is C or S

SEQ ID NO: 55500 - protein, 33 aa, Artificial Sequence
  Cyclic GFR-binding peptide
  MOD_RES (32)..(32): Xaa is C or S
LRVTAKKLKPKKRVYEIKRVQVPRHHVRSPQXK

SEQ ID NO: 55501 - protein, 42 aa, Artificial Sequence; identical to SEQ ID NO: 13393
  Cyclic GFR-binding peptide
  MOD_RES (1)..(3)..(37): Xaa is C or S

SEQ ID NO: 55502 - protein, 41 aa, Artificial Sequence; identical to SEQ ID NO: 13394
  Cyclic GFR-binding peptide
  MOD_RES (1)..(38): Xaa is C or S

SEQ ID NO: 55503 - protein, 38 aa, Artificial Sequence; identical to SEQ ID NO: 13396
  Cyclic GFR-binding peptide
  MOD_RES (35)..(35): Xaa is C or S

SEQ ID NO: 55504 - protein, 37 aa, Artificial Sequence; identical to SEQ ID NO: 13397
  Cyclic GFR-binding peptide
  MOD_RES (33)..(33): Xaa is C or S

SEQ ID NO: 55505 - protein, 38 aa, Artificial Sequence; identical to SEQ ID NO: 13398
  Cyclic GFR-binding peptide
  MOD_RES (2)..(4)..(38): Xaa is C or S

SEQ ID NO: 55506 - protein, 29 aa, Artificial Sequence
  Cyclic GFR-binding peptide
LRSMEGLLKPKKRVYEMIQVTINSHHVRS

SEQ ID NO: 55507 - protein, 30 aa, Artificial Sequence
  Cyclic GFR-binding peptide
  MOD_RES (29)..(29): Xaa is C or S
FVQVEKHQGQHPKIRVKAMKVSREETPVXE

SEQ ID NO: 55508 - protein, 28 aa, Artificial Sequence
  Cyclic GFR-binding peptide
ELSMEGIHQGQHPKIRMIQMTINSQGTP

SEQ ID NO: 55509 - protein, 35 aa, Artificial Sequence; identical to SEQ ID NO: 13400
  Cyclic GFR-binding peptide
  MOD_RES (35)..(35): Xaa is C or S

SEQ ID NO: 55510 - protein, 39 aa, Artificial Sequence; identical to SEQ ID NO: 13401
  Cyclic GFR-binding peptide
  MOD_RES (2)..(4)..(38): Xaa is C or S

SEQ ID NO: 55511 - protein, 36 aa, Artificial Sequence
  Cyclic GFR-binding peptide
  MOD_RES (34)..(34): Xaa is C or S
DELTVQVEKFIPKKRVIEVKAVKVSRLQVQTPRXQV

SEQ ID NO: 55512 - protein, 26 aa, Artificial Sequence
  Cyclic GFR-binding peptide
LSMEGIHQGQHPKIRMIQMTINSQGT

SEQ ID NO: 55513 - protein, 35 aa, Artificial Sequence; identical to SEQ ID NO: 13402
  Cyclic GFR-binding peptide
  MOD_RES (33)..(33): Xaa is C or S

SEQ ID NO: 55514 - protein, 32 aa, Artificial Sequence
  Cyclic GFR-binding peptide
ELTSMEGIFIPKKRVIEMIQVTINSLQVQTPR

SEQ ID NO: 55515 - protein, 40 aa, Artificial Sequence; identical to SEQ ID NO: 13404
  Cyclic GFR-binding peptide
  MOD_RES (37)..(37): Xaa is C or S

SEQ ID NO: 55516 - protein, 38 aa, Artificial Sequence; identical to SEQ ID NO: 13405
  Cyclic GFR-binding peptide
  MOD_RES (2)..(4)..(38): Xaa is C or S

SEQ ID NO: 55517 - protein, 37 aa, Artificial Sequence
  Cyclic GFR-binding peptide
  MOD_RES (31)..(31): Xaa is C or S
QLFSMEGLHQGQHPKIRMIQMTINSEETPVXELGEDN

SEQ ID NO: 55518 - protein, 34 aa, Artificial Sequence
  Cyclic GFR-binding peptide
  MOD_RES (1)..(3): Xaa is C or S
XEXQSHEELSMEGIHQGQHPKIRMIQMTINSQGT

SEQ ID NO: 55519 - protein, 31 aa, Artificial Sequence
  Cyclic GFR-binding peptide
LHEELRVTAKKLKPKKRVYEIKRVQVPRHHV

SEQ ID NO: 55520 - protein, 34 aa, Artificial Sequence
  Cyclic GFR-binding peptide
  MOD_RES (1)..(1): Xaa is C or S
XELHEELRVTAKKLKPKKRVYEIKRVQVPRHHVR

SEQ ID NO: 55521 - protein, 29 aa, Artificial Sequence
  Cyclic GFR-binding peptide
EELRSMEGLLKPKKRVYEMIQVTINSHHV

SEQ ID NO: 55522 - protein, 26 aa, Artificial Sequence
  Cyclic GFR-binding peptide
SMEGIFIPKKRVIEMIQVTINSLQVQ

SEQ ID NO: 55523 - protein, 25 aa, Artificial Sequence
  Cyclic GFR-binding peptide
EELVTAKKHQGQHPKIRIKRMQVPR

SEQ ID NO: 55524 - protein, 31 aa, Artificial Sequence
  Cyclic GFR-binding peptide
  MOD_RES (30)..(30): Xaa is C or S
SMEGIFIPKKRVIEMIQVTINSLQVQTPRXQ

SEQ ID NO: 55525 - protein, 45 aa, Artificial Sequence; identical to SEQ ID NO: 13407
  Cyclic GFR-binding peptide
  MOD_RES (2)..(4)..(41): Xaa is C or S

SEQ ID NO: 55526 - protein, 34 aa, Artificial Sequence
  Cyclic GFR-binding peptide
  MOD_RES (30)..(30): Xaa is C or S
SMEGLLKPKKRVYEMIQVTINSHHVRSPQXKVSS

SEQ ID NO: 55527 - protein, 39 aa, Artificial Sequence; identical to SEQ ID NO: 13409
  Cyclic GFR-binding peptide
  MOD_RES (1)..(35): Xaa is C or S

SEQ ID NO: 55528 - protein, 29 aa, Artificial Sequence
  Cyclic GFR-binding peptide
ALHDELTVQVEKFIPKKRVIEVKAVKVSR

SEQ ID NO: 55529 - protein, 42 aa, Artificial Sequence; identical to SEQ ID NO: 13410
  Cyclic GFR-binding peptide
  MOD_RES (1)..(38): Xaa is C or S

SEQ ID NO: 55530 - protein, 31 aa, Artificial Sequence
  Cyclic GFR-binding peptide
  MOD_RES (30)..(30): Xaa is C or S
LFVQVEKHQGQHPKIRVKAMKVSREETPVXE

SEQ ID NO: 55531 - protein, 38 aa, Artificial Sequence
  Cyclic GFR-binding peptide
  MOD_RES (34)..(34): Xaa is C or S
EELRSMEGILKPKKRVYEMIQVTINSHHVRSPQXKVSS

SEQ ID NO: 55532 - protein, 27 aa, Artificial Sequence
  Cyclic GFR-binding peptide
EELVQVEKHQGQHPKIRVKAMKVSRQG

SEQ ID NO: 55533 - protein, 31 aa, Artificial Sequence
  Cyclic GFR-binding peptide
HDELTSMEGIFIPKKRVIEMIQVTINSLQVQ

SEQ ID NO: 55534 - protein, 29 aa, Artificial Sequence
  Cyclic GFR-binding peptide
SHEELVQVEKHQGQHPKIRVKAMKVSRQG

SEQ ID NO: 55535 - protein, 31 aa, Artificial Sequence
  Cyclic GFR-binding peptide
  MOD_RES (1)..(1): Xaa is C or S
XALHDELTSMEGLFIPKKRVIEMIQVTINSL

SEQ ID NO: 55536 - protein, 32 aa, Artificial Sequence
  Cyclic GFR-binding peptide
  MOD_RES (1)..(3): Xaa is C or S
XEXKNHQLFVTAKKHQGQHPKIRIKRMQVPRE

SEQ ID NO: 55537 - protein, 27 aa, Artificial Sequence
  Cyclic GFR-binding peptide
SMEGIFIPKKRVIEMIQVTINSLQVQT

SEQ ID NO: 55538 - protein, 33 aa, Artificial Sequence; identical to SEQ ID NO: 13416
  Cyclic GFR-binding peptide

SEQ ID NO: 55539 - protein, 34 aa, Artificial Sequence
  Cyclic GFR-binding peptide
  MOD_RES (33)..(33): Xaa is C or S
ELRSMEGLLKPKKRVYEMIQVTINSHHVRSPQXK

SEQ ID NO: 55540 - protein, 36 aa, Artificial Sequence
  Cyclic GFR-binding peptide
  MOD_RES (32)..(32): Xaa is C or S
LTVQVEKFIPKKRVIEVKAVKVSRLQVQTPRXQVNR

SEQ ID NO: 55541 - protein, 40 aa, Artificial Sequence; identical to SEQ ID NO: 13418
  Cyclic GFR-binding peptide
  MOD_RES (36)..(36): Xaa is C or S

SEQ ID NO: 55542 - protein, 35 aa, Artificial Sequence; identical to SEQ ID NO: 13419
  Cyclic GFR-binding peptide

SEQ ID NO: 55543 - protein, 39 aa, Artificial Sequence; identical to SEQ ID NO: 13420
  Cyclic GFR-binding peptide
  MOD_RES (1)..(3)..(37): Xaa is C or S

SEQ ID NO: 55544 - protein, 41 aa, Artificial Sequence; identical to SEQ ID NO: 13421
  Cyclic GFR-binding peptide
  MOD_RES (37)..(37): Xaa is C or S

SEQ ID NO: 55545 - protein, 26 aa, Artificial Sequence
  Cyclic GFR-binding peptide
SMEGILKPKKRVYEMIQVTINSHHVR

SEQ ID NO: 55546 - protein, 35 aa, Artificial Sequence; identical to SEQ ID NO: 13422
  Cyclic GFR-binding peptide
  MOD_RES (2)..(2): Xaa is C or S

SEQ ID NO: 55547 - protein, 32 aa, Artificial Sequence
  Cyclic GFR-binding peptide
  MOD_RES (31)..(31): Xaa is C or S
QLFSMEGLHQGQHPKIRMIQMTINSEETPVXE

SEQ ID NO: 55548 - protein, 35 aa, Artificial Sequence
  Cyclic GFR-binding peptide
  MOD_RES (33)..(33): Xaa is C or S
ELTSMEGLFIPKKRVIEMIQVTINSLQVQTPRXQV

SEQ ID NO: 55549 - protein, 27 aa, Artificial Sequence
  Cyclic GFR-binding peptide
LFVQVEKHQGQHPKIRVKAMKVSREET

SEQ ID NO: 55550 - protein, 29 aa, Artificial Sequence
  Cyclic GFR-binding peptide
  MOD_RES (28)..(28): Xaa is C or S
VQVEKHQGQHPKIRVKAMKVSRQGTPVXE

SEQ ID NO: 55551 - protein, 27 aa, Artificial Sequence
  Cyclic GFR-binding peptide
NHQLFVTAKKHQGQHPKIRIKRMQVPR

SEQ ID NO: 55552 - protein, 32 aa, Artificial Sequence
  Cyclic GFR-binding peptide
LHDELTVQVEKFIPKKRVIEVKAVKVSRLQVQ

SEQ ID NO: 55553 - protein, 38 aa, Artificial Sequence
  Cyclic GFR-binding peptide
  MOD_RES (34)..(34): Xaa is C or S
EELRSMEGLLKPKKRVYEMIQVTINSHHVRSPQXKVSS

SEQ ID NO: 55554 - protein, 24 aa, Artificial Sequence
  Cyclic GFR-binding peptide
LVTAKKHQGQHPKIRIKRMQVPRQ

SEQ ID NO: 55555 - protein, 32 aa, Artificial Sequence
  Cyclic GFR-binding peptide
  MOD_RES (28)..(28): Xaa is C or S
VQVEKHQGQHPKIRVKAMKVSRQGTPVXELGE

SEQ ID NO: 55556 - protein, 29 aa, Artificial Sequence
  Cyclic GFR-binding peptide
ELHEELRSMEGILKPKKRVYEMIQVTINS

SEQ ID NO: 55557 - protein, 41 aa, Artificial Sequence; identical to SEQ ID NO: 13428
  Cyclic GFR-binding peptide
  MOD_RES (1)..(38): Xaa is C or S

SEQ ID NO: 55558 - protein, 34 aa, Artificial Sequence
  Cyclic GFR-binding peptide
  MOD_RES (31)..(31): Xaa is C or S
EELVTAKKHQGQHPKIRIKRMQVPRQGTPVXELG

SEQ ID NO: 55559 - protein, 32 aa, Artificial Sequence
  Cyclic GFR-binding peptide
  MOD_RES (31)..(31): Xaa is C or S
QLFVTAKKHQGQHPKIRIKRMQVPREETPVXE

SEQ ID NO: 55560 - protein, 32 aa, Artificial Sequence
  Cyclic GFR-binding peptide
  MOD_RES (32)..(32): Xaa is C or S
HEELSMEGIHQGQHPKIRMIQMTINSQGTPVX

SEQ ID NO: 55561 - protein, 36 aa, Artificial Sequence; identical to SEQ ID NO: 13432
  Cyclic GFR-binding peptide
  MOD_RES (1)..(35): Xaa is C or S

SEQ ID NO: 55562 - protein, 37 aa, Artificial Sequence
  Cyclic GFR-binding peptide
  MOD_RES (33)..(33): Xaa is C or S
ELRSMEGILKPKKRVYEMIQVTINSHHVRSPQXKVSS

SEQ ID NO: 55563 - protein, 37 aa, Artificial Sequence; identical to SEQ ID NO: 13433
  Cyclic GFR-binding peptide
  MOD_RES (37)..(37): Xaa is C or S

SEQ ID NO: 55564 - protein, 40 aa, Artificial Sequence; identical to SEQ ID NO: 13434
  Cyclic GFR-binding peptide
  MOD_RES (1)..(38): Xaa is C or S

SEQ ID NO: 55565 - protein, 43 aa, Artificial Sequence; identical to SEQ ID NO: 13436
  Cyclic GFR-binding peptide
  MOD_RES (2)..(4)..(38): Xaa is C or S

SEQ ID NO: 55566 - protein, 27 aa, Artificial Sequence
  Cyclic GFR-binding peptide
SHEELVTAKKHQGQHPKIRIKRMQVPR

SEQ ID NO: 55567 - protein, 40 aa, Artificial Sequence; identical to SEQ ID NO: 13439
  Cyclic GFR-binding peptide
  MOD_RES (2)..(39): Xaa is C or S

SEQ ID NO: 55568 - protein, 35 aa, Artificial Sequence; identical to SEQ ID NO: 13440
  Cyclic GFR-binding peptide
  MOD_RES (34)..(34): Xaa is C or S

SEQ ID NO: 55569 - protein, 25 aa, Artificial Sequence
  Cyclic GFR-binding peptide
SMEGLFIPKKRVIEMIQVTINSLQV

SEQ ID NO: 55570 - protein, 37 aa, Artificial Sequence; identical to SEQ ID NO: 13441
  Cyclic GFR-binding peptide
  MOD_RES (37)..(37): Xaa is C or S

SEQ ID NO: 55571 - protein, 34 aa, Artificial Sequence
  Cyclic GFR-binding peptide
  MOD_RES (28)..(28): Xaa is C or S
VTAKKHQGQHPKIRIKRMQVPREETPVXELGEDN

SEQ ID NO: 55572 - protein, 36 aa, Artificial Sequence
  Cyclic GFR-binding peptide
  MOD_RES (1)..(3): Xaa is C or S
XAXELHEELRSMEGLLKPKKRVYEMIQVTINSHHVR

SEQ ID NO: 55573 - protein, 31 aa, Artificial Sequence
  Cyclic GFR-binding peptide
LHDELTVQVEKFIPKKRVIEVKAVKVSRLQV

SEQ ID NO: 55574 - protein, 35 aa, Artificial Sequence; identical to SEQ ID NO: 13443
  Cyclic GFR-binding peptide

SEQ ID NO: 55575 - protein, 36 aa, Artificial Sequence; identical to SEQ ID NO: 13444
  Cyclic GFR-binding peptide
  MOD_RES (1)..(35): Xaa is C or S

SEQ ID NO: 55576 - protein, 35 aa, Artificial Sequence
  Cyclic GFR-binding peptide
  MOD_RES (2)..(4): Xaa is C or S
RXEXQSHEELVQVEKHQGQHPKIRVKAMKVSRQGT

SEQ ID NO: 55577 - protein, 27 aa, Artificial Sequence
  Cyclic GFR-binding peptide
SHEELSMEGIHQGQHPKIRMIQMTINS

SEQ ID NO: 55578 - protein, 29 aa, Artificial Sequence
  Cyclic GFR-binding peptide
ELRVTAKKLKPKKRVYEIKRVQVPRHHVR

SEQ ID NO: 55579 - protein, 30 aa, Artificial Sequence
  Cyclic GFR-binding peptide
KNHQLFSMEGLHQGQHPKIRMIQMTINSEE

SEQ ID NO: 55580 - protein, 24 aa, Artificial Sequence
  Cyclic GFR-binding peptide
LRVTAKKLKPKKRVYEIKRVQVPR

SEQ ID NO: 55581 - protein, 26 aa, Artificial Sequence
  Cyclic GFR-binding peptide
VTAKKHQGQHPKIRIKRMQVPREETP

SEQ ID NO: 55582 - protein, 33 aa, Artificial Sequence
  Cyclic GFR-binding peptide
  MOD_RES (1)..(3): Xaa is C or S
XAXELHEELRVTAKKLKPKKRVYEIKRVQVPRH

SEQ ID NO: 55583 - protein, 29 aa, Artificial Sequence
  Cyclic GFR-binding peptide
QSHEELVQVEKHQGQHPKIRVKAMKVSRQ

SEQ ID NO: 55584 - protein, 44 aa, Artificial Sequence; identical to SEQ ID NO: 13448
  Cyclic GFR-binding peptide
  MOD_RES (2)..(4)..(41): Xaa is C or S

SEQ ID NO: 55585 - protein, 27 aa, Artificial Sequence
  Cyclic GFR-binding peptide
ELTVQVEKFIPKKRVIEVKAVKVSRLQ

SEQ ID NO: 55586 - protein, 43 aa, Artificial Sequence; identical to SEQ ID NO: 13449
  Cyclic GFR-binding peptide
  MOD_RES (2)..(39): Xaa is C or S

SEQ ID NO: 55587 - protein, 30 aa, Artificial Sequence
  Cyclic GFR-binding peptide
TSMEGLFIPKKRVIEMIQVTINSLQVQTPR

SEQ ID NO: 55588 - protein, 35 aa, Artificial Sequence
  Cyclic GFR-binding peptide
  MOD_RES (32)..(32): Xaa is C or S
HEELVTAKKHQGQHPKIRIKRMQVPRQGTPVXELG

SEQ ID NO: 55589 - protein, 38 aa, Artificial Sequence; identical to SEQ ID NO: 13451
  Cyclic GFR-binding peptide
  MOD_RES (34)..(34): Xaa is C or S

SEQ ID NO: 55590 - protein, 25 aa, Artificial Sequence
  Cyclic GFR-binding peptide
EELSMEGIHQGQHPKIRMIQMTINS

SEQ ID NO: 55591 - protein, 31 aa, Artificial Sequence
  Cyclic GFR-binding peptide
LTVQVEKFIPKKRVIEVKAVKVSRLQVQTPR

SEQ ID NO: 55592 - protein, 31 aa, Artificial Sequence
  Cyclic GFR-binding peptide
  MOD_RES (1)..(1): Xaa is C or S
XKNHQLFVQVEKHQGQHPKIRVKAMKVSREE

SEQ ID NO: 55593 - protein, 29 aa, Artificial Sequence
  Cyclic GFR-binding peptide
LTVQVEKFIPKKRVIEVKAVKVSRLQVQT

SEQ ID NO: 55594 - protein, 35 aa, Artificial Sequence; identical to SEQ ID NO: 13452
  Cyclic GFR-binding peptide

SEQ ID NO: 55595 - protein, 32 aa, Artificial Sequence
  Cyclic GFR-binding peptide
  MOD_RES (32)..(32): Xaa is C or S
LTSMEGLFIPKKRVIEMIQVTINSLQVQTPRX

SEQ ID NO: 55596 - protein, 28 aa, Artificial Sequence
  Cyclic GFR-binding peptide
HEELRSMEGLLKPKKRVYEMIQVTINSH

SEQ ID NO: 55597 - protein, 31 aa, Artificial Sequence
  Cyclic GFR-binding peptide
  MOD_RES (2)..(2): Xaa is C or S
AXELHEELRVTAKKLKPKKRVYEIKRVQVPR

SEQ ID NO: 55598 - protein, 35 aa, Artificial Sequence
  Cyclic GFR-binding peptide
  MOD_RES (30)..(30): Xaa is C or S
LFVTAKKHQGQHPKIRIKRMQVPREETPVXELGED

SEQ ID NO: 55599 - protein, 31 aa, Artificial Sequence
  Cyclic GFR-binding peptide
  MOD_RES (2)..(2): Xaa is C or S
KXALHDELTSMEGLFIPKKRVIEMIQVTINS

SEQ ID NO: 55600 - protein, 32 aa, Artificial Sequence
  Cyclic GFR-binding peptide
  MOD_RES (32)..(32): Xaa is C or S
LRSMEGILKPKKRVYEMIQVTINSHHVRSPQX

SEQ ID NO: 55601 - protein, 38 aa, Artificial Sequence; identical to SEQ ID NO: 13453
  Cyclic GFR-binding peptide
  MOD_RES (1)..(35): Xaa is C or S

SEQ ID NO: 55602 - protein, 26 aa, Artificial Sequence
  Cyclic GFR-binding peptide
EELRSMEGLLKPKKRVYEMIQVTINS

SEQ ID NO: 55603 - protein, 37 aa, Artificial Sequence; identical to SEQ ID NO: 13454
  Cyclic GFR-binding peptide
  MOD_RES (35)..(35): Xaa is C or S

SEQ ID NO: 55604 - protein, 26 aa, Artificial Sequence
  Cyclic GFR-binding peptide
RSMEGLLKPKKRVYEMIQVTINSHHV

SEQ ID NO: 55605 - protein, 33 aa, Artificial Sequence
  Cyclic GFR-binding peptide
  MOD_RES (31)..(31): Xaa is C or S
EELVQVEKHQGQHPKIRVKAMKVSRQGTPVXEL

SEQ ID NO: 55606 - protein, 29 aa, Artificial Sequence
  Cyclic GFR-binding peptide
  MOD_RES (28)..(28): Xaa is C or S
SMEGIHQGQHPKIRMIQMTINSQGTPVXE

SEQ ID NO: 55607 - protein, 30 aa, Artificial Sequence
  Cyclic GFR-binding peptide
  MOD_RES (2)..(2): Xaa is C or S
EXQSHEELSMEGIHQGQHPKIRMIQMTINS

SEQ ID NO: 55608 - protein, 24 aa, Artificial Sequence
  Cyclic GFR-binding peptide
TSMEGIFIPKKRVIEMIQVTINSL

SEQ ID NO: 55609 - protein, 34 aa, Artificial Sequence; identical to SEQ ID NO: 13457
  Cyclic GFR-binding peptide

SEQ ID NO: 55610 - protein, 24 aa, Artificial Sequence
  Cyclic GFR-binding peptide
TVQVEKFIPKKRVIEVKAVKVSRL

SEQ ID NO: 55611 - protein, 23 aa, Artificial Sequence
  Cyclic GFR-binding peptide
FSMEGLHQGQHPKIRMIQMTINS

SEQ ID NO: 55612 - protein, 29 aa, Artificial Sequence
  Cyclic GFR-binding peptide
  MOD_RES (1)..(1): Xaa is C or S
XQSHEELSMEGIHQGQHPKIRMIQMTINS

SEQ ID NO: 55613 - protein, 30 aa, Artificial Sequence
  Cyclic GFR-binding peptide
  MOD_RES (1)..(1): Xaa is C or S
XKNHQLFVQVEKHQGQHPKIRVKAMKVSRE

SEQ ID NO: 55614 - protein, 39 aa, Artificial Sequence; identical to SEQ ID NO: 13459
  Cyclic GFR-binding peptide
  MOD_RES (2)..(36): Xaa is C or S

SEQ ID NO: 55615 - protein, 22 aa, Artificial Sequence
  Cyclic GFR-binding peptide
VTAKKLKPKKRVYEIKRVQVPR

SEQ ID NO: 55616 - protein, 31 aa, Artificial Sequence
  Cyclic GFR-binding peptide
  MOD_RES (31)..(31): Xaa is C or S
QLFSMEGLHQGQHPKIRMIQMTINSEETPVX

SEQ ID NO: 55617 - protein, 32 aa, Artificial Sequence
  Cyclic GFR-binding peptide
  MOD_RES (28)..(28): Xaa is C or S
SMEGIHQGQHPKIRMIQMTINSQGTPVXELGE

SEQ ID NO: 55618 - protein, 36 aa, Artificial Sequence
  Cyclic GFR-binding peptide
  MOD_RES (32)..(32): Xaa is C or S
HEELSMEGIHQGQHPKIRMIQMTINSQGTPVXELGE

SEQ ID NO: 55619 - protein, 40 aa, Artificial Sequence; identical to SEQ ID NO: 13463
  Cyclic GFR-binding peptide
  MOD_RES (34)..(34): Xaa is C or S

SEQ ID NO: 55620 - protein, 34 aa, Artificial Sequence
  Cyclic GFR-binding peptide
  MOD_RES (2)..(2): Xaa is C or S
EXQSHEELSMEGIHQGQHPKIRMIQMTINSQGTP

SEQ ID NO: 55621 - protein, 30 aa, Artificial Sequence
  Cyclic GFR-binding peptide
LHDELTVQVEKFIPKKRVIEVKAVKVSRLQ

SEQ ID NO: 55622 - protein, 43 aa, Artificial Sequence; identical to SEQ ID NO: 13467
  Cyclic GFR-binding peptide
  MOD_RES (2)..(39): Xaa is C or S

SEQ ID NO: 55623 - protein, 27 aa, Artificial Sequence
  Cyclic GFR-binding peptide
HEELSMEGIHQGQHPKIRMIQMTINSQ

SEQ ID NO: 55624 - protein, 39 aa, Artificial Sequence; identical to SEQ ID NO: 13468
  Cyclic GFR-binding peptide
  MOD_RES (1)..(35): Xaa is C or S

SEQ ID NO: 55625 - protein, 22 aa, Artificial Sequence
  Cyclic GFR-binding peptide
VTAKKLKPKKRVYEIKRVQVPR

SEQ ID NO: 55626 - protein, 34 aa, Artificial Sequence
  Cyclic GFR-binding peptide
  MOD_RES (32)..(32): Xaa is C or S
LTSMEGIFIPKKRVIEMIQVTINSLQVQTPRXQV

SEQ ID NO: 55627 - protein, 38 aa, Artificial Sequence; identical to SEQ ID NO: 13470
  Cyclic GFR-binding peptide
  MOD_RES (1)..(38): Xaa is C or S

SEQ ID NO: 55628 - protein, 32 aa, Artificial Sequence
  Cyclic GFR-binding peptide
  MOD_RES (2)..(2): Xaa is C or S
AXELHEELRSMEGLLKPKKRVYEMIQVTINSH

SEQ ID NO: 55629 - protein, 37 aa, Artificial Sequence; identical to SEQ ID NO: 13471
  Cyclic GFR-binding peptide
  MOD_RES (34)..(34): Xaa is C or S

SEQ ID NO: 55630 - protein, 29 aa, Artificial Sequence
  Cyclic GFR-binding peptide
LRVTAKKLKPKKRVYEIKRVQVPRHHVRS

SEQ ID NO: 55631 - protein, 32 aa, Artificial Sequence
  Cyclic GFR-binding peptide
  MOD_RES (32)..(32): Xaa is C or S
HQLFVTAKKHQGQHPKIRIKRMQVPREETPVX

SEQ ID NO: 55632 - protein, 35 aa, Artificial Sequence
  Cyclic GFR-binding peptide
  MOD_RES (1)..(3): Xaa is C or S
XAXELHEELRSMEGLLKPKKRVYEMIQVTINSHHV

SEQ ID NO: 55633 - protein, 22 aa, Artificial Sequence
  Cyclic GFR-binding peptide
VQVEKLKPKKRVYEVKAVKVSR

SEQ ID NO: 55634 - protein, 27 aa, Artificial Sequence
  Cyclic GFR-binding peptide
DELTSMEGLFIPKKRVIEMIQVTINSL

SEQ ID NO: 55635 - protein, 35 aa, Artificial Sequence
  Cyclic GFR-binding peptide
  MOD_RES (1)..(1): Xaa is C or S
XALHDELTSMEGLFIPKKRVIEMIQVTINSLQVQT

SEQ ID NO: 55636 - protein, 28 aa, Artificial Sequence
  Cyclic GFR-binding peptide
QSHEELSMEGIHQGQHPKIRMIQMTINS

SEQ ID NO: 55637 - protein, 32 aa, Artificial Sequence
  Cyclic GFR-binding peptide
  MOD_RES (2)..(4): Xaa is C or S
RXEXKNHQLFVQVEKHQGQHPKIRVKAMKVSR

SEQ ID NO: 55638 - protein, 32 aa, Artificial Sequence
  Cyclic GFR-binding peptide
ALHDELTSMEGIFIPKKRVIEMIQVTINSLQV

SEQ ID NO: 55639 - protein, 33 aa, Artificial Sequence; identical to SEQ ID NO: 13474
  Cyclic GFR-binding peptide
  MOD_RES (33)..(33): Xaa is C or S

SEQ ID NO: 55640 - protein, 36 aa, Artificial Sequence
  Cyclic GFR-binding peptide
  MOD_RES (31)..(31): Xaa is C or S
QLFSMEGLHQGQHPKIRMIQMTINSEETPVXELGED

SEQ ID NO: 55641 - protein, 31 aa, Artificial Sequence
  Cyclic GFR-binding peptide
  MOD_RES (29)..(29): Xaa is C or S
FSMEGLHQGQHPKIRMIQMTINSEETPVXEL

SEQ ID NO: 55642 - protein, 41 aa, Artificial Sequence; identical to SEQ ID NO: 13476
  Cyclic GFR-binding peptide
  MOD_RES (2)..(36): Xaa is C or S

SEQ ID NO: 55643 - protein, 28 aa, Artificial Sequence
  Cyclic GFR-binding peptide
HDELTSMEGLFIPKKRVIEMIQVTINSL

SEQ ID NO: 55644 - protein, 34 aa, Artificial Sequence; identical to SEQ ID NO: 13477
  Cyclic GFR-binding peptide

SEQ ID NO: 55645 - protein, 32 aa, Artificial Sequence
  Cyclic GFR-binding peptide
DELTVQVEKFIPKKRVIEVKAVKVSRLQVQTP

SEQ ID NO: 55646 - protein, 43 aa, Artificial Sequence; identical to SEQ ID NO: 13478
  Cyclic GFR-binding peptide
  MOD_RES (2)..(39): Xaa is C or S

SEQ ID NO: 55647 - protein, 42 aa, Artificial Sequence; identical to SEQ ID NO: 13479
  Cyclic GFR-binding peptide
  MOD_RES (2)..(36): Xaa is C or S

SEQ ID NO: 55648 - protein, 30 aa, Artificial Sequence
  Cyclic GFR-binding peptide
KNHQLFVTAKKHQGQHPKIRIKRMQVPREE

SEQ ID NO: 55649 - protein, 23 aa, Artificial Sequence
  Cyclic GFR-binding peptide
SMEGLFIPKKRVIEMIQVTINSL

SEQ ID NO: 55650 - protein, 27 aa, Artificial Sequence
  Cyclic GFR-binding peptide
TVQVEKFIPKKRVIEVKAVKVSRLQVQ

SEQ ID NO: 55651 - protein, 31 aa, Artificial Sequence
  Cyclic GFR-binding peptide
  MOD_RES (31)..(31): Xaa is C or S
RSMEGLLKPKKRVYEMIQVTINSHHVRSPQX

SEQ ID NO: 55652 - protein, 45 aa, Artificial Sequence; identical to SEQ ID NO: 13482
  Cyclic GFR-binding peptide
  MOD_RES (2)..(4)..(41): Xaa is C or S

SEQ ID NO: 55653 - protein, 37 aa, Artificial Sequence
  Cyclic GFR-binding peptide
  MOD_RES (31)..(31): Xaa is C or S
QLFVTAKKHQGQHPKIRIKRMQVPREETPVXELGEDN

SEQ ID NO: 55654 - protein, 36 aa, Artificial Sequence; identical to SEQ ID NO: 13483
  Cyclic GFR-binding peptide
  MOD_RES (1)..(3): Xaa is C or S

SEQ ID NO: 55655 - protein, 38 aa, Artificial Sequence; identical to SEQ ID NO: 13484
  Cyclic GFR-binding peptide
  MOD_RES (37)..(37): Xaa is C or S

SEQ ID NO: 55656 - protein, 37 aa, Artificial Sequence; identical to SEQ ID NO: 13485
  Cyclic GFR-binding peptide
  MOD_RES (36)..(36): Xaa is C or S

SEQ ID NO: 55657 - protein, 30 aa, Artificial Sequence
  Cyclic GFR-binding peptide
QSHEELVTAKKHQGQHPKIRIKRMQVPRQG

SEQ ID NO: 55658 - protein, 34 aa, Artificial Sequence
  Cyclic GFR-binding peptide
  MOD_RES (1)..(3): Xaa is C or S
XEXKNHQLFVTAKKHQGQHPKIRIKRMQVPREET

SEQ ID NO: 55659 - protein, 35 aa, Artificial Sequence
  Cyclic GFR-binding peptide
  MOD_RES (32)..(32): Xaa is C or S
LRSMEGILKPKKRVYEMIQVTINSHHVRSPQXKVS

SEQ ID NO: 55660 - protein, 29 aa, Artificial Sequence
  Cyclic GFR-binding peptide
KNHQLFVTAKKHQGQHPKIRIKRMQVPRE

SEQ ID NO: 55661 - protein, 24 aa, Artificial Sequence
  Cyclic GFR-binding peptide
FVQVEKHQGQHPKIRVKAMKVSRE

SEQ ID NO: 55662 - protein, 38 aa, Artificial Sequence; identical to SEQ ID NO: 13490
  Cyclic GFR-binding peptide
  MOD_RES (1)..(38): Xaa is C or S

SEQ ID NO: 55663 - protein, 30 aa, Artificial Sequence
  Cyclic GFR-binding peptide
  MOD_RES (1)..(1): Xaa is C or S
XKNHQLFVTAKKHQGQHPKIRIKRMQVPRE

SEQ ID NO: 55664 - protein, 33 aa, Artificial Sequence; identical to SEQ ID NO: 13491
  Cyclic GFR-binding peptide

SEQ ID NO: 55665 - protein, 33 aa, Artificial Sequence
  Cyclic GFR-binding peptide
  MOD_RES (1)..(3): Xaa is C or S
XEXQSHEELVTAKKHQGQHPKIRIKRMQVPRQG

SEQ ID NO: 55666 - protein, 34 aa, Artificial Sequence
  Cyclic GFR-binding peptide
  MOD_RES (2)..(4): Xaa is C or S
EXKXALHDELTSMEGIFIPKKRVIEMIQVTINSL

SEQ ID NO: 55667 - protein, 41 aa, Artificial Sequence; identical to SEQ ID NO: 13492
  Cyclic GFR-binding peptide
  MOD_RES (2)..(39): Xaa is C or S

SEQ ID NO: 55668 - protein, 37 aa, Artificial Sequence
  Cyclic GFR-binding peptide
  MOD_RES (2)..(4): Xaa is C or S
EXKXALHDELTSMEGIFIPKKRVIEMIQVTINSLQVQ

SEQ ID NO: 55669 - protein, 42 aa, Artificial Sequence; identical to SEQ ID NO: 13496
  Cyclic GFR-binding peptide
  MOD_RES (1)..(3)..(40): Xaa is C or S

SEQ ID NO: 55670 - protein, 40 aa, Artificial Sequence; identical to SEQ ID NO: 13495
  Cyclic GFR-binding peptide
  MOD_RES (2)..(36): Xaa is C or S

SEQ ID NO: 55671 - protein, 40 aa, Artificial Sequence; identical to SEQ ID NO: 13497
  Cyclic GFR-binding peptide
  MOD_RES (2)..(4): Xaa is C or S

SEQ ID NO: 55672 - protein, 32 aa, Artificial Sequence
  Cyclic GFR-binding peptide
  MOD_RES (2)..(2): Xaa is C or S
AXELHEELRSMEGILKPKKRVYEMIQVTINSH

SEQ ID NO: 55673 - protein, 25 aa, Artificial Sequence
  Cyclic GFR-binding peptide
TSMEGLFIPKKRVIEMIQVTINSLQ

SEQ ID NO: 55674 - protein, 32 aa, Artificial Sequence
  Cyclic GFR-binding peptide
  MOD_RES (32)..(32): Xaa is C or S
LRSMEGLLKPKKRVYEMIQVTINSHHVRSPQX

SEQ ID NO: 55675 - protein, 23 aa, Artificial Sequence
  Cyclic GFR-binding peptide
VTAKKHQGQHPKIRIKRMQVPRE

SEQ ID NO: 55676 - protein, 31 aa, Artificial Sequence
  Cyclic GFR-binding peptide
HEELRVTAKKLKPKKRVYEIKRVQVPRHHVR

SEQ ID NO: 55677 - protein, 34 aa, Artificial Sequence
  Cyclic GFR-binding peptide
  MOD_RES (28)..(28): Xaa is C or S
SMEGIHQGQHPKIRMIQMTINSQGTPVXELGEDN

SEQ ID NO: 55678 - protein, 39 aa, Artificial Sequence; identical to SEQ ID NO: 13503
  Cyclic GFR-binding peptide
  MOD_RES (36)..(36): Xaa is C or S

SEQ ID NO: 55679 - protein, 28 aa, Artificial Sequence
  Cyclic GFR-binding peptide
FVTAKKHQGQHPKIRIKRMQVPREETPV

SEQ ID NO: 55680 - protein, 39 aa, Artificial Sequence; identical to SEQ ID NO: 13502
  Cyclic GFR-binding peptide
  MOD_RES (1)..(35): Xaa is C or S

SEQ ID NO: 55681 - protein, 25 aa, Artificial Sequence
  Cyclic GFR-binding peptide
RSMEGLLKPKKRVYEMIQVTINSHH

SEQ ID NO: 55682 - protein, 37 aa, Artificial Sequence; identical to SEQ ID NO: 13505
  Cyclic GFR-binding peptide
  MOD_RES (2)..(36): Xaa is C or S

SEQ ID NO: 55683 - protein, 36 aa, Artificial Sequence
  Cyclic GFR-binding peptide
  MOD_RES (33)..(33): Xaa is C or S
ELTVQVEKFIPKKRVIEVKAVKVSRLQVQTPRXQVN

SEQ ID NO: 55684 - protein, 30 aa, Artificial Sequence
  Cyclic GFR-binding peptide
HEELVTAKKHQGQHPKIRIKRMQVPRQGTP

SEQ ID NO: 55685 - protein, 37 aa, Artificial Sequence
  Cyclic GFR-binding peptide
  MOD_RES (34)..(34): Xaa is C or S
EELRSMEGILKPKKRVYEMIQVTINSHHVRSPQXKVS

SEQ ID NO: 55686 - protein, 36 aa, Artificial Sequence
  Cyclic GFR-binding peptide
  MOD_RES (30)..(30): Xaa is C or S
LFSMEGLHQGQHPKIRMIQMTINSEETPVXELGEDN

SEQ ID NO: 55687 - protein, 35 aa, Artificial Sequence; identical to SEQ ID NO: 13509
  Cyclic GFR-binding peptide
  MOD_RES (33)..(33): Xaa is C or S

SEQ ID NO: 55688 - protein, 37 aa, Artificial Sequence; identical to SEQ ID NO: 13510
  Cyclic GFR-binding peptide
  MOD_RES (1)..(3)..(37): Xaa is C or S

SEQ ID NO: 55689 - protein, 32 aa, Artificial Sequence
  Cyclic GFR-binding peptide
  MOD_RES (30)..(30): Xaa is C or S
LFSMEGLHQGQHPKIRMIQMTINSEETPVXEL

SEQ ID NO: 55690 - protein, 34 aa, Artificial Sequence; identical to SEQ ID NO: 13513
  Cyclic GFR-binding peptide

SEQ ID NO: 55691 - protein, 30 aa, Artificial Sequence
  Cyclic GFR-binding peptide
EELRSMEGILKPKKRVYEMIQVTINSHHVR

SEQ ID NO: 55692 - protein, 40 aa, Artificial Sequence; identical to SEQ ID NO: 13515
  Cyclic GFR-binding peptide
  MOD_RES (37)..(37): Xaa is C or S

SEQ ID NO: 55693 - protein, 35 aa, Artificial Sequence
  Cyclic GFR-binding peptide
  MOD_RES (33)..(33): Xaa is C or S
ELRVTAKKLKPKKRVYEIKRVQVPRHHVRSPQXKV

SEQ ID NO: 55694 - protein, 30 aa, Artificial Sequence
  Cyclic GFR-binding peptide
ELTSMEGIFIPKKRVIEMIQVTINSLQVQT

SEQ ID NO: 55695 - protein, 25 aa, Artificial Sequence
  Cyclic GFR-binding peptide
VQVEKHQGQHPKIRVKAMKVSREET

SEQ ID NO: 55696 - protein, 34 aa, Artificial Sequence
  Cyclic GFR-binding peptide
  MOD_RES (32)..(32): Xaa is C or S
HQLFSMEGLHQGQHPKIRMIQMTINSEETPVXEL

SEQ ID NO: 55697 - protein, 28 aa, Artificial Sequence
  Cyclic GFR-binding peptide
LTSMEGLFIPKKRVIEMIQVTINSLQVQ

SEQ ID NO: 55698 - protein, 34 aa, Artificial Sequence
  Cyclic GFR-binding peptide
  MOD_RES (1)..(3): Xaa is C or S
XKXALHDELTSMEGIFIPKKRVIEMIQVTINSLQ

SEQ ID NO: 55699 - protein, 40 aa, Artificial Sequence; identical to SEQ ID NO: 13518
  Cyclic GFR-binding peptide
  MOD_RES (37)..(37): Xaa is C or S

SEQ ID NO: 55700 - protein, 33 aa, Artificial Sequence
  Cyclic GFR-binding peptide
  MOD_RES (29)..(29): Xaa is C or S
LSMEGIHQGQHPKIRMIQMTINSQGTPVXELGE

SEQ ID NO: 55701 - protein, 35 aa, Artificial Sequence; identical to SEQ ID NO: 13520
  Cyclic GFR-binding peptide
  MOD_RES (2)..(2): Xaa is C or S

SEQ ID NO: 55702 - protein, 33 aa, Artificial Sequence
  Cyclic GFR-binding peptide
  MOD_RES (2)..(4): Xaa is C or S
EXKXALHDELTSMEGLFIPKKRVIEMIQVTINS

SEQ ID NO: 55703 - protein, 31 aa, Artificial Sequence
  Cyclic GFR-binding peptide
HEELVQVEKHQGQHPKIRVKAMKVSRQGTPV

SEQ ID NO: 55704 - protein, 22 aa, Artificial Sequence
  Cyclic GFR-binding peptide
SMEGLLKPKKRVYEMIQVTINS

SEQ ID NO: 55705 - protein, 37 aa, Artificial Sequence
  Cyclic GFR-binding peptide
  MOD_RES (32)..(32): Xaa is C or S
HQLFVTAKKHQGQHPKIRIKRMQVPREETPVXELGED

SEQ ID NO: 55706 - protein, 38 aa, Artificial Sequence; identical to SEQ ID NO: 13526
  Cyclic GFR-binding peptide
  MOD_RES (2)..(4): Xaa is C or S

SEQ ID NO: 55707 - protein, 33 aa, Artificial Sequence
  Cyclic GFR-binding peptide
ELHEELRSMEGILKPKKRVYEMIQVTINSHHVR

SEQ ID NO: 55708 - protein, 42 aa, Artificial Sequence; identical to SEQ ID NO: 13529
  Cyclic GFR-binding peptide
  MOD_RES (2)..(4)..(38): Xaa is C or S

SEQ ID NO: 55709 - protein, 32 aa, Artificial Sequence
  Cyclic GFR-binding peptide
  MOD_RES (31)..(31): Xaa is C or S
TSMEGLFIPKKRVIEMIQVTINSLQVQTPRXQ

SEQ ID NO: 55710 - protein, 33 aa, Artificial Sequence; identical to SEQ ID NO: 13533
  Cyclic GFR-binding peptide
  MOD_RES (33)..(33): Xaa is C or S

SEQ ID NO: 55711 - protein, 39 aa, Artificial Sequence; identical to SEQ ID NO: 13534
  Cyclic GFR-binding peptide
  MOD_RES (36)..(36): Xaa is C or S

SEQ ID NO: 55712 - protein, 41 aa, Artificial Sequence; identical to SEQ ID NO: 13536
  Cyclic GFR-binding peptide
  MOD_RES (2)..(4)..(38): Xaa is C or S

SEQ ID NO: 55713 - protein, 37 aa, Artificial Sequence
  Cyclic GFR-binding peptide
  MOD_RES (34)..(34): Xaa is C or S
EELRSMEGLLKPKKRVYEMIQVTINSHHVRSPQXKVS

SEQ ID NO: 55714 - protein, 35 aa, Artificial Sequence
  Cyclic GFR-binding peptide
  MOD_RES (2)..(2): Xaa is C or S
KXALHDELTVQVEKFIPKKRVIEVKAVKVSRLQVQ

SEQ ID NO: 55715 - protein, 38 aa, Artificial Sequence; identical to SEQ ID NO: 13538
  Cyclic GFR-binding peptide
  MOD_RES (33)..(33): Xaa is C or S

SEQ ID NO: 55716 - protein, 32 aa, Artificial Sequence
  Cyclic GFR-binding peptide
LHDELTSMEGLFIPKKRVIEMIQVTINSLQVQ

SEQ ID NO: 55717 - protein, 39 aa, Artificial Sequence; identical to SEQ ID NO: 13539
  Cyclic GFR-binding peptide
  MOD_RES (1)..(38): Xaa is C or S

SEQ ID NO: 55718 - protein, 24 aa, Artificial Sequence
  Cyclic GFR-binding peptide
LVQVEKHQGQHPKIRVKAMKVSRQ

SEQ ID NO: 55719 - protein, 35 aa, Artificial Sequence
  Cyclic GFR-binding peptide
  MOD_RES (31)..(31): Xaa is C or S
QLFVQVEKHQGQHPKIRVKAMKVSREETPVXELGE

SEQ ID NO: 55720 - protein, 30 aa, Artificial Sequence
  Cyclic GFR-binding peptide
HDELTSMEGIFIPKKRVIEMIQVTINSLQV

SEQ ID NO: 55721 - protein, 39 aa, Artificial Sequence; identical to SEQ ID NO: 13541
  Cyclic GFR-binding peptide
  MOD_RES (36)..(36): Xaa is C or S

SEQ ID NO: 55722 - protein, 42 aa, Artificial Sequence; identical to SEQ ID NO: 13544
  Cyclic GFR-binding peptide
  MOD_RES (2)..(4)..(38): Xaa is C or S

SEQ ID NO: 55723 - protein, 42 aa, Artificial Sequence; identical to SEQ ID NO: 13546
  Cyclic GFR-binding peptide
  MOD_RES (2)..(39): Xaa is C or S

SEQ ID NO: 55724 - protein, 34 aa, Artificial Sequence
  Cyclic GFR-binding peptide
  MOD_RES (2)..(2): Xaa is C or S
EXKNHQLFSMEGLHQGQHPKIRMIQMTINSEETP

SEQ ID NO: 55725 - protein, 43 aa, Artificial Sequence; identical to SEQ ID NO: 13547
  Cyclic GFR-binding peptide
  MOD_RES (1)..(3)..(37): Xaa is C or S

SEQ ID NO: 55726 - protein, 30 aa, Artificial Sequence
  Cyclic GFR-binding peptide
EELRSMEGLLKPKKRVYEMIQVTINSHHVR

SEQ ID NO: 55727 - protein, 26 aa, Artificial Sequence
  Cyclic GFR-binding peptide
SMEGLHQGQHPKIRMIQMTINSEETP

SEQ ID NO: 55728 - protein, 31 aa, Artificial Sequence
  Cyclic GFR-binding peptide
  MOD_RES (31)..(31): Xaa is C or S
EELVTAKKHQGQHPKIRIKRMQVPRQGTPVX

SEQ ID NO: 55729 - protein, 34 aa, Artificial Sequence; identical to SEQ ID NO: 13549
  Cyclic GFR-binding peptide

SEQ ID NO: 55730 - protein, 38 aa, Artificial Sequence; identical to SEQ ID NO: 13551
  Cyclic GFR-binding peptide
  MOD_RES (36)..(36): Xaa is C or S

SEQ ID NO: 55731 - protein, 32 aa, Artificial Sequence
  Cyclic GFR-binding peptide
  MOD_RES (30)..(30): Xaa is C or S
ELVQVEKHQGQHPKIRVKAMKVSRQGTPVXEL

SEQ ID NO: 55732 - protein, 34 aa, Artificial Sequence; identical to SEQ ID NO: 13553
  Cyclic GFR-binding peptide

SEQ ID NO: 55733 - protein, 37 aa, Artificial Sequence
  Cyclic GFR-binding peptide
  MOD_RES (31)..(31): Xaa is C or S
EELVTAKKHQGQHPKIRIKRMQVPRQGTPVXELGEDN

SEQ ID NO: 55734 - protein, 32 aa, Artificial Sequence
  Cyclic GFR-binding peptide
  MOD_RES (31)..(31): Xaa is C or S
TSMEGIFIPKKRVIEMIQVTINSLQVQTPRXQ

SEQ ID NO: 55735 - protein, 34 aa, Artificial Sequence
  Cyclic GFR-binding peptide
  MOD_RES (30)..(30): Xaa is C or S
VTAKKLKPKKRVYEIKRVQVPRHHVRSPQXKVSS

SEQ ID NO: 55736 - protein, 33 aa, Artificial Sequence
  Cyclic GFR-binding peptide
EELRVTAKKLKPKKRVYEIKRVQVPRHHVRSPQ

SEQ ID NO: 55737 - protein, 32 aa, Artificial Sequence
  Cyclic GFR-binding peptide
ELTSMEGLFIPKKRVIEMIQVTINSLQVQTPR

SEQ ID NO: 55738 - protein, 24 aa, Artificial Sequence
  Cyclic GFR-binding peptide
SMEGILKPKKRVYEMIQVTINSHH

SEQ ID NO: 55739 - protein, 26 aa, Artificial Sequence
  Cyclic GFR-binding peptide
QLFVTAKKHQGQHPKIRIKRMQVPRE

SEQ ID NO: 55740 - protein, 30 aa, Artificial Sequence
  Cyclic GFR-binding peptide
HEELRVTAKKLKPKKRVYEIKRVQVPRHHV

SEQ ID NO: 55741 - protein, 27 aa, Artificial Sequence
  Cyclic GFR-binding peptide
HQLFVQVEKHQGQHPKIRVKAMKVSRE

SEQ ID NO: 55742 - protein, 29 aa, Artificial Sequence
  Cyclic GFR-binding peptide
SHEELVTAKKHQGQHPKIRIKRMQVPRQG

SEQ ID NO: 55743 - protein, 26 aa, Artificial Sequence
  Cyclic GFR-binding peptide
EELRSMEGILKPKKRVYEMIQVTINS

SEQ ID NO: 55744 - protein, 38 aa, Artificial Sequence; identical to SEQ ID NO: 13557
  Cyclic GFR-binding peptide
  MOD_RES (35)..(35): Xaa is C or S

SEQ ID NO: 55745 - protein, 35 aa, Artificial Sequence; identical to SEQ ID NO: 13558
  Cyclic GFR-binding peptide
  MOD_RES (34)..(34): Xaa is C or S

SEQ ID NO: 55746 - protein, 26 aa, Artificial Sequence
  Cyclic GFR-binding peptide
LVQVEKHQGQHPKIRVKAMKVSRQGT

SEQ ID NO: 55747 - protein, 25 aa, Artificial Sequence
  Cyclic GFR-binding peptide
LFSMEGLHQGQHPKIRMIQMTINSE

SEQ ID NO: 55748 - protein, 35 aa, Artificial Sequence
  Cyclic GFR-binding peptide
  MOD_RES (32)..(32): Xaa is C or S
HEELVQVEKHQGQHPKIRVKAMKVSRQGTPVXELG

SEQ ID NO: 55749 - protein, 37 aa, Artificial Sequence
  Cyclic GFR-binding peptide
  MOD_RES (32)..(32): Xaa is C or S
HEELSMEGIHQGQHPKIRMIQMTINSQGTPVXELGED

SEQ ID NO: 55750 - protein, 36 aa, Artificial Sequence
  Cyclic GFR-binding peptide
  MOD_RES (2)..(4): Xaa is C or S
RXEXKNHQLFVTAKKHQGQHPKIRIKRMQVPREETP

SEQ ID NO: 55751 - protein, 36 aa, Artificial Sequence; identical to SEQ ID NO: 13561
  Cyclic GFR-binding peptide
  MOD_RES (1)..(35): Xaa is C or S

SEQ ID NO: 55752 - protein, 42 aa, Artificial Sequence; identical to SEQ ID NO: 13562
  Cyclic GFR-binding peptide
  MOD_RES (1)..(3)..(37): Xaa is C or S

SEQ ID NO: 55753 - protein, 38 aa, Artificial Sequence; identical to SEQ ID NO: 13563
  Cyclic GFR-binding peptide
  MOD_RES (2)..(36): Xaa is C or S

SEQ ID NO: 55754 - protein, 37 aa, Artificial Sequence; identical to SEQ ID NO: 13564
  Cyclic GFR-binding peptide
  MOD_RES (33)..(33): Xaa is C or S

SEQ ID NO: 55755 - protein, 30 aa, Artificial Sequence
  Cyclic GFR-binding peptide
  MOD_RES (29)..(29): Xaa is C or S
FVTAKKHQGQHPKIRIKRMQVPREETPVXE

SEQ ID NO: 55756 - protein, 33 aa, Artificial Sequence
  Cyclic GFR-binding peptide
  MOD_RES (1)..(3): Xaa is C or S
XEXQSHEELVQVEKHQGQHPKIRVKAMKVSRQG

SEQ ID NO: 55757 - protein, 25 aa, Artificial Sequence
  Cyclic GFR-binding peptide
FVTAKKHQGQHPKIRIKRMQVPREE

SEQ ID NO: 55758 - protein, 29 aa, Artificial Sequence
  Cyclic GFR-binding peptide
HEELVTAKKHQGQHPKIRIKRMQVPRQGT

SEQ ID NO: 55759 - protein, 35 aa, Artificial Sequence; identical to SEQ ID NO: 13567
  Cyclic GFR-binding peptide
  MOD_RES (33)..(33): Xaa is C or S

SEQ ID NO: 55760 - protein, 27 aa, Artificial Sequence
  Cyclic GFR-binding peptide
SMEGIHQGQHPKIRMIQMTINSQGTPV

SEQ ID NO: 55761 - protein, 28 aa, Artificial Sequence
  Cyclic GFR-binding peptide
HDELTVQVEKFIPKKRVIEVKAVKVSRL

SEQ ID NO: 55762 - protein, 31 aa, Artificial Sequence
  Cyclic GFR-binding peptide
  MOD_RES (28)..(28): Xaa is C or S
SMEGIHQGQHPKIRMIQMTINSQGTPVXELG

SEQ ID NO: 55763 - protein, 38 aa, Artificial Sequence
  Cyclic GFR-binding peptide
  MOD_RES (32)..(32): Xaa is C or S
HEELVQVEKHQGQHPKIRVKAMKVSRQGTPVXELGEDN

SEQ ID NO: 55764 - protein, 34 aa, Artificial Sequence
  Cyclic GFR-binding peptide
  MOD_RES (33)..(33): Xaa is C or S
ELRSMEGILKPKKRVYEMIQVTINSHHVRSPQXK

SEQ ID NO: 55765 - protein, 27 aa, Artificial Sequence
  Cyclic GFR-binding peptide
LTVQVEKFIPKKRVIEVKAVKVSRLQV

SEQ ID NO: 55766 - protein, 24 aa, Artificial Sequence
  Cyclic GFR-binding peptide
RSMEGILKPKKRVYEMIQVTINSH

SEQ ID NO: 55767 - protein, 34 aa, Artificial Sequence
  Cyclic GFR-binding peptide
  MOD_RES (1)..(1): Xaa is C or S
XELHEELRSMEGLLKPKKRVYEMIQVTINSHHVR

SEQ ID NO: 55768 - protein, 29 aa, Artificial Sequence
  Cyclic GFR-binding peptide
  MOD_RES (1)..(1): Xaa is C or S
XQSHEELVQVEKHQGQHPKIRVKAMKVSR

SEQ ID NO: 55769 - protein, 33 aa, Artificial Sequence
  Cyclic GFR-binding peptide
  MOD_RES (33)..(33): Xaa is C or S
ELTSMEGIFIPKKRVIEMIQVTINSLQVQTPRX

SEQ ID NO: 55770 - protein, 33 aa, Artificial Sequence
  Cyclic GFR-binding peptide
  MOD_RES (2)..(2): Xaa is C or S
KXALHDELTVQVEKFIPKKRVIEVKAVKVSRLQ

SEQ ID NO: 55771 - protein, 26 aa, Artificial Sequence
  Cyclic GFR-binding peptide
ELTSMEGIFIPKKRVIEMIQVTINSL

SEQ ID NO: 55772 - protein, 40 aa, Artificial Sequence; identical to SEQ ID NO: 13573
  Cyclic GFR-binding peptide
  MOD_RES (2)..(4): Xaa is C or S

SEQ ID NO: 55773 - protein, 37 aa, Artificial Sequence; identical to SEQ ID NO: 13574
  Cyclic GFR-binding peptide
  MOD_RES (2)..(2): Xaa is C or S

SEQ ID NO: 55774 - protein, 33 aa, Artificial Sequence
  Cyclic GFR-binding peptide
  MOD_RES (30)..(30): Xaa is C or S
ELVQVEKHQGQHPKIRVKAMKVSRQGTPVXELG

SEQ ID NO: 55775 - protein, 38 aa, Artificial Sequence; identical to SEQ ID NO: 13575
  Cyclic GFR-binding peptide
  MOD_RES (37)..(37): Xaa is C or S

SEQ ID NO: 55776 - protein, 31 aa, Artificial Sequence
  Cyclic GFR-binding peptide
  MOD_RES (1)..(3): Xaa is C or S
XEXKNHQLFVTAKKHQGQHPKIRIKRMQVPR

SEQ ID NO: 55777 - protein, 35 aa, Artificial Sequence; identical to SEQ ID NO: 13578
  Cyclic GFR-binding peptide
  MOD_RES (2)..(2): Xaa is C or S

SEQ ID NO: 55778 - protein, 33 aa, Artificial Sequence; identical to SEQ ID NO: 13577
  Cyclic GFR-binding peptide
  MOD_RES (33)..(33): Xaa is C or S

SEQ ID NO: 55779 - protein, 39 aa, Artificial Sequence; identical to SEQ ID NO: 13580
  Cyclic GFR-binding peptide
  MOD_RES (35)..(35): Xaa is C or S

SEQ ID NO: 55780 - protein, 28 aa, Artificial Sequence
  Cyclic GFR-binding peptide
SHEELSMEGIHQGQHPKIRMIQMTINSQ

SEQ ID NO: 55781 - protein, 42 aa, Artificial Sequence; identical to SEQ ID NO: 13582
  Cyclic GFR-binding peptide
  MOD_RES (2)..(39): Xaa is C or S

SEQ ID NO: 55782 - protein, 36 aa, Artificial Sequence
  Cyclic GFR-binding peptide
  MOD_RES (32)..(32): Xaa is C or S
HQLFVQVEKHQGQHPKIRVKAMKVSREETPVXELGE

SEQ ID NO: 55783 - protein, 33 aa, Artificial Sequence
  Cyclic GFR-binding peptide
  MOD_RES (32)..(32): Xaa is C or S
HEELSMEGIHQGQHPKIRMIQMTINSQGTPVXE

SEQ ID NO: 55784 - protein, 33 aa, Artificial Sequence
  Cyclic GFR-binding peptide
  MOD_RES (32)..(32): Xaa is C or S
HQLFSMEGLHQGQHPKIRMIQMTINSEETPVXE

SEQ ID NO: 55785 - protein, 32 aa, Artificial Sequence
  Cyclic GFR-binding peptide
EELRSMEGILKPKKRVYEMIQVTINSHHVRSP

SEQ ID NO: 55786 - protein, 38 aa, Artificial Sequence; identical to SEQ ID NO: 13583
  Cyclic GFR-binding peptide
  MOD_RES (34)..(34): Xaa is C or S

SEQ ID NO: 55787 - protein, 32 aa, Artificial Sequence
  Cyclic GFR-binding peptide
  MOD_RES (31)..(31): Xaa is C or S
EELVTAKKHQGQHPKIRIKRMQVPRQGTPVXE

SEQ ID NO: 55788 - protein, 30 aa, Artificial Sequence
  Cyclic GFR-binding peptide
RSMEGILKPKKRVYEMIQVTINSHHVRSPQ

SEQ ID NO: 55789 - protein, 27 aa, Artificial Sequence
  Cyclic GFR-binding peptide
NHQLFVQVEKHQGQHPKIRVKAMKVSR

SEQ ID NO: 55790 - protein, 26 aa, Artificial Sequence
  Cyclic GFR-binding peptide
SMEGIHQGQHPKIRMIQMTINSQGTP

SEQ ID NO: 55791 - protein, 29 aa, Artificial Sequence
  Cyclic GFR-binding peptide
HQLFVTAKKHQGQHPKIRIKRMQVPREET

SEQ ID NO: 55792 - protein, 29 aa, Artificial Sequence
  Cyclic GFR-binding peptide
EELSMEGIHQGQHPKIRMIQMTINSQGTP

SEQ ID NO: 55793 - protein, 32 aa, Artificial Sequence
  Cyclic GFR-binding peptide
ELHEELRSMEGLLKPKKRVYEMIQVTINSHHV

SEQ ID NO: 55794 - protein, 22 aa, Artificial Sequence
  Cyclic GFR-binding peptide
SMEGIFIPKKRVIEMIQVTINS

SEQ ID NO: 55795 - protein, 29 aa, Artificial Sequence
  Cyclic GFR-binding peptide
SMEGILKPKKRVYEMIQVTINSHHVRSPQ

SEQ ID NO: 55796 - protein, 28 aa, Artificial Sequence
  Cyclic GFR-binding peptide
FVQVEKHQGQHPKIRVKAMKVSREETPV

SEQ ID NO: 55797 - protein, 29 aa, Artificial Sequence
  Cyclic GFR-binding peptide
  MOD_RES (29)..(29): Xaa is C or S
LSMEGIHQGQHPKIRMIQMTINSQGTPVX

SEQ ID NO: 55798 - protein, 39 aa, Artificial Sequence; identical to SEQ ID NO: 13586
  Cyclic GFR-binding peptide
  MOD_RES (1)..(3): Xaa is C or S

SEQ ID NO: 55799 - protein, 33 aa, Artificial Sequence
  Cyclic GFR-binding peptide
  MOD_RES (30)..(30): Xaa is C or S
SMEGIFIPKKRVIEMIQVTINSLQVQTPRXQVN

SEQ ID NO: 55800 - protein, 29 aa, Artificial Sequence
  Cyclic GFR-binding peptide
HEELSMEGIHQGQHPKIRMIQMTINSQGT

SEQ ID NO: 55801 - protein, 33 aa, Artificial Sequence
  Cyclic GFR-binding peptide
  MOD_RES (2)..(2): Xaa is C or S
EXQSHEELVTAKKHQGQHPKIRIKRMQVPRQGT

SEQ ID NO: 55802 - protein, 28 aa, Artificial Sequence
  Cyclic GFR-binding peptide
LFVQVEKHQGQHPKIRVKAMKVSREETP

SEQ ID NO: 55803 - protein, 24 aa, Artificial Sequence
  Cyclic GFR-binding peptide
ELVTAKKHQGQHPKIRIKRMQVPR

SEQ ID NO: 55804 - protein, 24 aa, Artificial Sequence
  Cyclic GFR-binding peptide
VTAKKHQGQHPKIRIKRMQVPRQG

SEQ ID NO: 55805 - protein, 28 aa, Artificial Sequence
  Cyclic GFR-binding peptide
HEELSMEGIHQGQHPKIRMIQMTINSQG

SEQ ID NO: 55806 - protein, 38 aa, Artificial Sequence; identical to SEQ ID NO: 13589
  Cyclic GFR-binding peptide
  MOD_RES (1)..(38): Xaa is C or S

SEQ ID NO: 55807 - protein, 39 aa, Artificial Sequence; identical to SEQ ID NO: 13592
  Cyclic GFR-binding peptide
  MOD_RES (1)..(3)..(37): Xaa is C or S

SEQ ID NO: 55808 - protein, 24 aa, Artificial Sequence
  Cyclic GFR-binding peptide
LTVQVEKFIPKKRVIEVKAVKVSR

SEQ ID NO: 55809 - protein, 30 aa, Artificial Sequence
  Cyclic GFR-binding peptide
LTSMEGIFIPKKRVIEMIQVTINSLQVQTP

SEQ ID NO: 55810 - protein, 34 aa, Artificial Sequence
  Cyclic GFR-binding peptide
  MOD_RES (31)..(31): Xaa is C or S
EELSMEGIHQGQHPKIRMIQMTINSQGTPVXELG

SEQ ID NO: 55811 - protein, 28 aa, Artificial Sequence
  Cyclic GFR-binding peptide
EELSMEGIHQGQHPKIRMIQMTINSQGT

SEQ ID NO: 55812 - protein, 36 aa, Artificial Sequence; identical to SEQ ID NO: 13595
  Cyclic GFR-binding peptide

SEQ ID NO: 55813 - protein, 32 aa, Artificial Sequence
  Cyclic GFR-binding peptide
KNHQLFVTAKKHQGQHPKIRIKRMQVPREETP

SEQ ID NO: 55814 - protein, 38 aa, Artificial Sequence
  Cyclic GFR-binding peptide
  MOD_RES (34)..(34): Xaa is C or S
DELTSMEGLFIPKKRVIEMIQVTINSLQVQTPRXQVNR

SEQ ID NO: 55815 - protein, 30 aa, Artificial Sequence
  Cyclic GFR-binding peptide
  MOD_RES (28)..(28): Xaa is C or S
VQVEKHQGQHPKIRVKAMKVSREETPVXEL

SEQ ID NO: 55816 - protein, 35 aa, Artificial Sequence; identical to SEQ ID NO: 13597
  Cyclic GFR-binding peptide
  MOD_RES (1)..(1): Xaa is C or S

SEQ ID NO: 55817 - protein, 29 aa, Artificial Sequence
  Cyclic GFR-binding peptide
ELSMEGIHQGQHPKIRMIQMTINSQGTPV

SEQ ID NO: 55818 - protein, 44 aa, Artificial Sequence; identical to SEQ ID NO: 13599
  Cyclic GFR-binding peptide
  MOD_RES (1)..(3)..(40): Xaa is C or S

SEQ ID NO: 55819 - protein, 30 aa, Artificial Sequence
  Cyclic GFR-binding peptide
LHEELRVTAKKLKPKKRVYEIKRVQVPRHH

SEQ ID NO: 55820 - protein, 37 aa, Artificial Sequence
  Cyclic GFR-binding peptide
  MOD_RES (32)..(32): Xaa is C or S
HQLFSMEGLHQGQHPKIRMIQMTINSEETPVXELGED

SEQ ID NO: 55821 - protein, 37 aa, Artificial Sequence
  Cyclic GFR-binding peptide
  MOD_RES (33)..(33): Xaa is C or S
ELTSMEGLFIPKKRVIEMIQVTINSLQVQTPRXQVNR

SEQ ID NO: 55822 - protein, 32 aa, Artificial Sequence
  Cyclic GFR-binding peptide
  MOD_RES (30)..(30): Xaa is C or S
SMEGIFIPKKRVIEMIQVTINSLQVQTPRXQV

SEQ ID NO: 55823 - protein, 30 aa, Artificial Sequence
  Cyclic GFR-binding peptide
  MOD_RES (28)..(28): Xaa is C or S
VQVEKHQGQHPKIRVKAMKVSRQGTPVXEL

SEQ ID NO: 55824 - protein, 42 aa, Artificial Sequence; identical to SEQ ID NO: 13602
  Cyclic GFR-binding peptide
  MOD_RES (2)..(36): Xaa is C or S

SEQ ID NO: 55825 - protein, 36 aa, Artificial Sequence
  Cyclic GFR-binding peptide
  MOD_RES (31)..(31): Xaa is C or S
EELVTAKKHQGQHPKIRIKRMQVPRQGTPVXELGED

SEQ ID NO: 55826 - protein, 28 aa, Artificial Sequence
  Cyclic GFR-binding peptide
  MOD_RES (28)..(28): Xaa is C or S
VQVEKHQGQHPKIRVKAMKVSREETPVX

SEQ ID NO: 55827 - protein, 29 aa, Artificial Sequence
  Cyclic GFR-binding peptide
VQVEKFIPKKRVIEVKAVKVSRLQVQTPR

SEQ ID NO: 55828 - protein, 34 aa, Artificial Sequence; identical to SEQ ID NO: 13603
  Cyclic GFR-binding peptide

SEQ ID NO: 55829 - protein, 36 aa, Artificial Sequence; identical to SEQ ID NO: 13604
  Cyclic GFR-binding peptide
  MOD_RES (1)..(35): Xaa is C or S

SEQ ID NO: 55830 - protein, 35 aa, Artificial Sequence
  Cyclic GFR-binding peptide
  MOD_RES (2)..(4): Xaa is C or S
AXAXELHEELRSMEGLLKPKKRVYEMIQVTINSHH

SEQ ID NO: 55831 - protein, 33 aa, Artificial Sequence
  Cyclic GFR-binding peptide
  MOD_RES (2)..(4): Xaa is C or S
AXAXELHEELRSMEGLLKPKKRVYEMIQVTINS

SEQ ID NO: 55832 - protein, 31 aa, Artificial Sequence
  Cyclic GFR-binding peptide
  MOD_RES (1)..(3): Xaa is C or S
XEXQSHEELVTAKKHQGQHPKIRIKRMQVPR

SEQ ID NO: 55833 - protein, 39 aa, Artificial Sequence; identical to SEQ ID NO: 13605
  Cyclic GFR-binding peptide
  MOD_RES (2)..(36): Xaa is C or S

SEQ ID NO: 55834 - protein, 27 aa, Artificial Sequence
  Cyclic GFR-binding peptide
SMEGLHQGQHPKIRMIQMTINSEETPV

SEQ ID NO: 55835 - protein, 31 aa, Artificial Sequence
  Cyclic GFR-binding peptide
  MOD_RES (1)..(1): Xaa is C or S
XQSHEELVQVEKHQGQHPKIRVKAMKVSRQG

SEQ ID NO: 55836 - protein, 37 aa, Artificial Sequence
  Cyclic GFR-binding peptide
  MOD_RES (33)..(33): Xaa is C or S
ELRVTAKKLKPKKRVYEIKRVQVPRHHVRSPQXKVSS

SEQ ID NO: 55837 - protein, 26 aa, Artificial Sequence
  Cyclic GFR-binding peptide
ELRSMEGLLKPKKRVYEMIQVTINSH

SEQ ID NO: 55838 - protein, 36 aa, Artificial Sequence
  Cyclic GFR-binding peptide
  MOD_RES (2)..(4): Xaa is C or S
RXEXKNHQLFSMEGLHQGQHPKIRMIQMTINSEETP

SEQ ID NO: 55839 - protein, 34 aa, Artificial Sequence
  Cyclic GFR-binding peptide
  MOD_RES (30)..(30): Xaa is C or S
ELSMEGIHQGQHPKIRMIQMTINSQGTPVXELGE

SEQ ID NO: 55840 - protein, 22 aa, Artificial Sequence
  Cyclic GFR-binding peptide
VQVEKFIPKKRVIEVKAVKVSR

SEQ ID NO: 55841 - protein, 27 aa, Artificial Sequence
  Cyclic GFR-binding peptide
FVQVEKHQGQHPKIRVKAMKVSREETP

SEQ ID NO: 55842 - protein, 33 aa, Artificial Sequence
  Cyclic GFR-binding peptide
  MOD_RES (28)..(28): Xaa is C or S
VQVEKHQGQHPKIRVKAMKVSREETPVXELGED

SEQ ID NO: 55843 - protein, 34 aa, Artificial Sequence
  Cyclic GFR-binding peptide
  MOD_RES (33)..(33): Xaa is C or S
ELTSMEGIFIPKKRVIEMIQVTINSLQVQTPRXQ

SEQ ID NO: 55844 - protein, 43 aa, Artificial Sequence; identical to SEQ ID NO: 13608
  Cyclic GFR-binding peptide
  MOD_RES (2)..(4)..(38): Xaa is C or S

SEQ ID NO: 55845 - protein, 40 aa, Artificial Sequence; identical to SEQ ID NO: 13609
  Cyclic GFR-binding peptide
  MOD_RES (1)..(38): Xaa is C or S

SEQ ID NO: 55846 - protein, 33 aa, Artificial Sequence
  Cyclic GFR-binding peptide
  MOD_RES (30)..(30): Xaa is C or S
LFSMEGLHQGQHPKIRMIQMTINSEETPVXELG

SEQ ID NO: 55847 - protein, 28 aa, Artificial Sequence
  Cyclic GFR-binding peptide
HQLFVTAKKHQGQHPKIRIKRMQVPREE

SEQ ID NO: 55848 - protein, 33 aa, Artificial Sequence; identical to SEQ ID NO: 13610
  Cyclic GFR-binding peptide

SEQ ID NO: 55849 - protein, 36 aa, Artificial Sequence; identical to SEQ ID NO: 13612
  Cyclic GFR-binding peptide
  MOD_RES (2)..(2): Xaa is C or S

SEQ ID NO: 55850 - protein, 30 aa, Artificial Sequence
  Cyclic GFR-binding peptide
  MOD_RES (30)..(30): Xaa is C or S
VQVEKFIPKKRVIEVKAVKVSRLQVQTPRX

SEQ ID NO: 55851 - protein, 30 aa, Artificial Sequence
  Cyclic GFR-binding peptide
  MOD_RES (29)..(29): Xaa is C or S
LVQVEKHQGQHPKIRVKAMKVSRQGTPVXE

SEQ ID NO: 55852 - protein, 27 aa, Artificial Sequence
  Cyclic GFR-binding peptide
SMEGLLKPKKRVYEMIQVTINSHHVRS

SEQ ID NO: 55853 - protein, 40 aa, Artificial Sequence; identical to SEQ ID NO: 13614
  Cyclic GFR-binding peptide
  MOD_RES (1)..(3)..(37): Xaa is C or S

SEQ ID NO: 55854 - protein, 40 aa, Artificial Sequence; identical to SEQ ID NO: 13615
  Cyclic GFR-binding peptide
  MOD_RES (2)..(36): Xaa is C or S

SEQ ID NO: 55855 - protein, 30 aa, Artificial Sequence
  Cyclic GFR-binding peptide
  MOD_RES (1)..(1): Xaa is C or S
XALHDELTSMEGIFIPKKRVIEMIQVTINS

SEQ ID NO: 55856 - protein, 24 aa, Artificial Sequence
  Cyclic GFR-binding peptide
SMEGIFIPKKRVIEMIQVTINSLQ

SEQ ID NO: 55857 - protein, 25 aa, Artificial Sequence
  Cyclic GFR-binding peptide
FVQVEKHQGQHPKIRVKAMKVSREE

SEQ ID NO: 55858 - protein, 35 aa, Artificial Sequence
  Cyclic GFR-binding peptide
  MOD_RES (30)..(30): Xaa is C or S
ELVQVEKHQGQHPKIRVKAMKVSRQGTPVXELGED

SEQ ID NO: 55859 - protein, 27 aa, Artificial Sequence
  Cyclic GFR-binding peptide
LSMEGIHQGQHPKIRMIQMTINSQGTP

SEQ ID NO: 55860 - protein, 30 aa, Artificial Sequence
  Cyclic GFR-binding peptide
  MOD_RES (1)..(1): Xaa is C or S
XQSHEELSMEGIHQGQHPKIRMIQMTINSQ

SEQ ID NO: 55861 - protein, 32 aa, Artificial Sequence
  Cyclic GFR-binding peptide
  MOD_RES (31)..(31): Xaa is C or S
RVTAKKLKPKKRVYEIKRVQVPRHHVRSPQXK

SEQ ID NO: 55862 - protein, 31 aa, Artificial Sequence
  Cyclic GFR-binding peptide
ALHDELTVQVEKFIPKKRVIEVKAVKVSRLQ

SEQ ID NO: 55863 - protein, 39 aa, Artificial Sequence; identical to SEQ ID NO: 13618
  Cyclic GFR-binding peptide
  MOD_RES (33)..(33): Xaa is C or S

SEQ ID NO: 55864 - protein, 30 aa, Artificial Sequence
  Cyclic GFR-binding peptide
LHEELRSMEGLLKPKKRVYEMIQVTINSHH

SEQ ID NO: 55865 - protein, 33 aa, Artificial Sequence
  Cyclic GFR-binding peptide
  MOD_RES (31)..(31): Xaa is C or S
RSMEGLLKPKKRVYEMIQVTINSHHVRSPQXKV

SEQ ID NO: 55866 - protein, 41 aa, Artificial Sequence; identical to SEQ ID NO: 13619
  Cyclic GFR-binding peptide
  MOD_RES (37)..(37): Xaa is C or S

SEQ ID NO: 55867 - protein, 37 aa, Artificial Sequence; identical to SEQ ID NO: 13620
  Cyclic GFR-binding peptide
  MOD_RES (2)..(36): Xaa is C or S

SEQ ID NO: 55868 - protein, 29 aa, Artificial Sequence
  Cyclic GFR-binding peptide
DELTSMEGIFIPKKRVIEMIQVTINSLQV

SEQ ID NO: 55869 - protein, 39 aa, Artificial Sequence; identical to SEQ ID NO: 13622
  Cyclic GFR-binding peptide
  MOD_RES (33)..(33): Xaa is C or S

SEQ ID NO: 55870 - protein, 34 aa, Artificial Sequence
  Cyclic GFR-binding peptide
  MOD_RES (2)..(4): Xaa is C or S
RXEXKNHQLFVQVEKHQGQHPKIRVKAMKVSREE

SEQ ID NO: 55871 - protein, 39 aa, Artificial Sequence; identical to SEQ ID NO: 13623
  Cyclic GFR-binding peptide
  MOD_RES (1)..(3): Xaa is C or S

SEQ ID NO: 55872 - protein, 31 aa, Artificial Sequence
  Cyclic GFR-binding peptide
  MOD_RES (29)..(29): Xaa is C or S
LSMEGIHQGQHPKIRMIQMTINSQGTPVXEL

SEQ ID NO: 55873 - protein, 38 aa, Artificial Sequence; identical to SEQ ID NO: 13625
  Cyclic GFR-binding peptide
  MOD_RES (33)..(33): Xaa is C or S

SEQ ID NO: 55874 - protein, 32 aa, Artificial Sequence
  Cyclic GFR-binding peptide
  MOD_RES (2)..(2): Xaa is C or S
EXQSHEELVTAKKHQGQHPKIRIKRMQVPRQG

SEQ ID NO: 55875 - protein, 32 aa, Artificial Sequence
  Cyclic GFR-binding peptide
KNHQLFSMEGLHQGQHPKIRMIQMTINSEETP

SEQ ID NO: 55876 - protein, 33 aa, Artificial Sequence
  Cyclic GFR-binding peptide
  MOD_RES (2)..(4): Xaa is C or S
AXAXELHEELRVTAKKLKPKKRVYEIKRVQVPR

SEQ ID NO: 55877 - protein, 37 aa, Artificial Sequence; identical to SEQ ID NO: 13629
  Cyclic GFR-binding peptide
  MOD_RES (2)..(2): Xaa is C or S

SEQ ID NO: 55878 - protein, 33 aa, Artificial Sequence
  Cyclic GFR-binding peptide
  MOD_RES (2)..(2): Xaa is C or S
AXELHEELRVTAKKLKPKKRVYEIKRVQVPRHH

SEQ ID NO: 55879 - protein, 27 aa, Artificial Sequence
  Cyclic GFR-binding peptide
HDELTSMEGLFIPKKRVIEMIQVTINS

SEQ ID NO: 55880 - protein, 30 aa, Artificial Sequence
  Cyclic GFR-binding peptide
NHQLFVQVEKHQGQHPKIRVKAMKVSREET

SEQ ID NO: 55881 - protein, 43 aa, Artificial Sequence; identical to SEQ ID NO: 13634
  Cyclic GFR-binding peptide
  MOD_RES (2)..(4)..(41): Xaa is C or S

SEQ ID NO: 55882 - protein, 34 aa, Artificial Sequence
  Cyclic GFR-binding peptide
  MOD_RES (2)..(2): Xaa is C or S
AXELHEELRVTAKKLKPKKRVYEIKRVQVPRHHV

SEQ ID NO: 55883 - protein, 37 aa, Artificial Sequence; identical to SEQ ID NO: 13635
  Cyclic GFR-binding peptide
  MOD_RES (2)..(2): Xaa is C or S

SEQ ID NO: 55884 - protein, 30 aa, Artificial Sequence
  Cyclic GFR-binding peptide
NHQLFVTAKKHQGQHPKIRIKRMQVPREET

SEQ ID NO: 55885 - protein, 35 aa, Artificial Sequence
  Cyclic GFR-binding peptide
  MOD_RES (31)..(31): Xaa is C or S
TSMEGIFIPKKRVIEMIQVTINSLQVQTPRXQVNR

SEQ ID NO: 55886 - protein, 33 aa, Artificial Sequence
  Cyclic GFR-binding peptide
  MOD_RES (31)..(31): Xaa is C or S
QLFVTAKKHQGQHPKIRIKRMQVPREETPVXEL

SEQ ID NO: 55887 - protein, 25 aa, Artificial Sequence
  Cyclic GFR-binding peptide
VTAKKLKPKKRVYEIKRVQVPRHHV

SEQ ID NO: 55888 - protein, 30 aa, Artificial Sequence
  Cyclic GFR-binding peptide
  MOD_RES (30)..(30): Xaa is C or S
SMEGILKPKKRVYEMIQVTINSHHVRSPQX

SEQ ID NO: 55889 - protein, 40 aa, Artificial Sequence; identical to SEQ ID NO: 13636
  Cyclic GFR-binding peptide
  MOD_RES (1)..(38): Xaa is C or S

SEQ ID NO: 55890 - protein, 30 aa, Artificial Sequence
  Cyclic GFR-binding peptide
ELRSMEGILKPKKRVYEMIQVTINSHHVRS

SEQ ID NO: 55891 - protein, 30 aa, Artificial Sequence
  Cyclic GFR-binding peptide
  MOD_RES (30)..(30): Xaa is C or S
ELSMEGIHQGQHPKIRMIQMTINSQGTPVX

SEQ ID NO: 55892 - protein, 34 aa, Artificial Sequence
  Cyclic GFR-binding peptide
  MOD_RES (1)..(3): Xaa is C or S
XEXKNHQLFSMEGLHQGQHPKIRMIQMTINSEET

SEQ ID NO: 55893 - protein, 35 aa, Artificial Sequence
  Cyclic GFR-binding peptide
  MOD_RES (2)..(4): Xaa is C or S
AXAXELHEELRVTAKKLKPKKRVYEIKRVQVPRHH

SEQ ID NO: 55894 - protein, 22 aa, Artificial Sequence
  Cyclic GFR-binding peptide
VQVEKHQGQHPKIRVKAMKVSR

SEQ ID NO: 55895 - protein, 39 aa, Artificial Sequence; identical to SEQ ID NO: 13642
  Cyclic GFR-binding peptide
  MOD_RES (35)..(35): Xaa is C or S

SEQ ID NO: 55896 - protein, 24 aa, Artificial Sequence
  Cyclic GFR-binding peptide
LFVTAKKHQGQHPKIRIKRMQVPR

SEQ ID NO: 55897 - protein, 41 aa, Artificial Sequence; identical to SEQ ID NO: 13643
  Cyclic GFR-binding peptide
  MOD_RES (2)..(36): Xaa is C or S

SEQ ID NO: 55898 - protein, 34 aa, Artificial Sequence
  Cyclic GFR-binding peptide
  MOD_RES (2)..(4): Xaa is C or S
AXAXELHEELRSMEGILKPKKRVYEMIQVTINSH

SEQ ID NO: 55899 - protein, 33 aa, Artificial Sequence
  Cyclic GFR-binding peptide
  MOD_RES (32)..(32): Xaa is C or S
LTVQVEKFIPKKRVIEVKAVKVSRLQVQTPRXQ

SEQ ID NO: 55900 - protein, 31 aa, Artificial Sequence
  Cyclic GFR-binding peptide
  MOD_RES (1)..(1): Xaa is C or S
XELHEELRVTAKKLKPKKRVYEIKRVQVPRH

SEQ ID NO: 55901 - protein, 38 aa, Artificial Sequence; identical to SEQ ID NO: 13644
  Cyclic GFR-binding peptide
  MOD_RES (33)..(33): Xaa is C or S

SEQ ID NO: 55902 - protein, 26 aa, Artificial Sequence
  Cyclic GFR-binding peptide
HQLFVQVEKHQGQHPKIRVKAMKVSR

SEQ ID NO: 55903 - protein, 33 aa, Artificial Sequence
  Cyclic GFR-binding peptide
  MOD_RES (32)..(32): Xaa is C or S
HQLFVTAKKHQGQHPKIRIKRMQVPREETPVXE

SEQ ID NO: 55904 - protein, 35 aa, Artificial Sequence; identical to SEQ ID NO: 13647
  Cyclic GFR-binding peptide
  MOD_RES (33)..(33): Xaa is C or S

SEQ ID NO: 55905 - protein, 30 aa, Artificial Sequence
  Cyclic GFR-binding peptide
KNHQLFVQVEKHQGQHPKIRVKAMKVSREE

SEQ ID NO: 55906 - protein, 39 aa, Artificial Sequence; identical to SEQ ID NO: 13648
  Cyclic GFR-binding peptide
  MOD_RES (1)..(35): Xaa is C or S

SEQ ID NO: 55907 - protein, 41 aa, Artificial Sequence; identical to SEQ ID NO: 13649
  Cyclic GFR-binding peptide
  MOD_RES (1)..(3)..(37): Xaa is C or S

SEQ ID NO: 55908 - protein, 37 aa, Artificial Sequence; identical to SEQ ID NO: 13650
  Cyclic GFR-binding peptide
  MOD_RES (37)..(37): Xaa is C or S

SEQ ID NO: 55909 - protein, 29 aa, Artificial Sequence
  Cyclic GFR-binding peptide
LHDELTSMEGIFIPKKRVIEMIQVTINSL

SEQ ID NO: 55910 - protein, 42 aa, Artificial Sequence; identical to SEQ ID NO: 13651
  Cyclic GFR-binding peptide
  MOD_RES (1)..(3)..(37): Xaa is C or S

SEQ ID NO: 55911 - protein, 38 aa, Artificial Sequence; identical to SEQ ID NO: 13652
  Cyclic GFR-binding peptide
  MOD_RES (35)..(35): Xaa is C or S

SEQ ID NO: 55912 - protein, 23 aa, Artificial Sequence
  Cyclic GFR-binding peptide
SMEGIHQGQHPKIRMIQMTINSQ

SEQ ID NO: 55913 - protein, 33 aa, Artificial Sequence
  Cyclic GFR-binding peptide
  MOD_RES (31)..(31): Xaa is C or S
TSMEGLFIPKKRVIEMIQVTINSLQVQTPRXQV

SEQ ID NO: 55914 - protein, 38 aa, Artificial Sequence; identical to SEQ ID NO: 13653
  Cyclic GFR-binding peptide
  MOD_RES (1)..(3): Xaa is C or S

SEQ ID NO: 55915 - protein, 41 aa, Artificial Sequence; identical to SEQ ID NO: 13654
  Cyclic GFR-binding peptide
  MOD_RES (2)..(39): Xaa is C or S

SEQ ID NO: 55916 - protein, 35 aa, Artificial Sequence
  Cyclic GFR-binding peptide
  MOD_RES (32)..(32): Xaa is C or S
HQLFVTAKKHQGQHPKIRIKRMQVPREETPVXELG

SEQ ID NO: 55917 - protein, 40 aa, Artificial Sequence; identical to SEQ ID NO: 13655
  Cyclic GFR-binding peptide
  MOD_RES (2)..(4): Xaa is C or S

SEQ ID NO: 55918 - protein, 31 aa, Artificial Sequence
  Cyclic GFR-binding peptide
ELHEELRSMEGILKPKKRVYEMIQVTINSHH

SEQ ID NO: 55919 - protein, 30 aa, Artificial Sequence
  Cyclic GFR-binding peptide
ALHDELTSMEGIFIPKKRVIEMIQVTINSL

SEQ ID NO: 55920 - protein, 37 aa, Artificial Sequence; identical to SEQ ID NO: 13656
  Cyclic GFR-binding peptide
  MOD_RES (1)..(1): Xaa is C or S

SEQ ID NO: 55921 - protein, 40 aa, Artificial Sequence; identical to SEQ ID NO: 13657
  Cyclic GFR-binding peptide
  MOD_RES (1)..(35): Xaa is C or S

SEQ ID NO: 55922 - protein, 33 aa, Artificial Sequence
  Cyclic GFR-binding peptide
  MOD_RES (1)..(3): Xaa is C or S
XKXALHDELTSMEGIFIPKKRVIEMIQVTINSL

SEQ ID NO: 55923 - protein, 27 aa, Artificial Sequence
  Cyclic GFR-binding peptide
ELSMEGIHQGQHPKIRMIQMTINSQGT

SEQ ID NO: 55924 - protein, 38 aa, Artificial Sequence; identical to SEQ ID NO: 13659
  Cyclic GFR-binding peptide
  MOD_RES (1)..(3)..(37): Xaa is C or S

SEQ ID NO: 55925 - protein, 36 aa, Artificial Sequence
  Cyclic GFR-binding peptide
  MOD_RES (2)..(4): Xaa is C or S
AXAXELHEELRSMEGILKPKKRVYEMIQVTINSHHV

SEQ ID NO: 55926 - protein, 41 aa, Artificial Sequence; identical to SEQ ID NO: 13661
  Cyclic GFR-binding peptide
  MOD_RES (2)..(4)..(38): Xaa is C or S

SEQ ID NO: 55927 - protein, 30 aa, Artificial Sequence
  Cyclic GFR-binding peptide
HQLFSMEGLHQGQHPKIRMIQMTINSEETP

SEQ ID NO: 55928 - protein, 42 aa, Artificial Sequence; identical to SEQ ID NO: 13662
  Cyclic GFR-binding peptide
  MOD_RES (1)..(3)..(40): Xaa is C or S

SEQ ID NO: 55929 - protein, 37 aa, Artificial Sequence
  Cyclic GFR-binding peptide
  MOD_RES (34)..(34): Xaa is C or S
DELTSMEGIFIPKKRVIEMIQVTINSLQVQTPRXQVN

SEQ ID NO: 55930 - protein, 37 aa, Artificial Sequence; identical to SEQ ID NO: 13665
  Cyclic GFR-binding peptide
  MOD_RES (1)..(3)..(37): Xaa is C or S

SEQ ID NO: 55931 - protein, 26 aa, Artificial Sequence
  Cyclic GFR-binding peptide
HQLFVTAKKHQGQHPKIRIKRMQVPR

SEQ ID NO: 55932 - protein, 39 aa, Artificial Sequence; identical to SEQ ID NO: 13666
  Cyclic GFR-binding peptide
  MOD_RES (36)..(36): Xaa is C or S

SEQ ID NO: 55933 - protein, 30 aa, Artificial Sequence
  Cyclic GFR-binding peptide
EELVQVEKHQGQHPKIRVKAMKVSRQGTPV

SEQ ID NO: 55934 - protein, 42 aa, Artificial Sequence; identical to SEQ ID NO: 13668
  Cyclic GFR-binding peptide
  MOD_RES (2)..(4)..(41): Xaa is C or S

SEQ ID NO: 55935 - protein, 29 aa, Artificial Sequence
  Cyclic GFR-binding peptide
  MOD_RES (28)..(28): Xaa is C or S
VTAKKHQGQHPKIRIKRMQVPREETPVXE

SEQ ID NO: 55936 - protein, 23 aa, Artificial Sequence
  Cyclic GFR-binding peptide
SMEGILKPKKRVYEMIQVTINSH

SEQ ID NO: 55937 - protein, 23 aa, Artificial Sequence
  Cyclic GFR-binding peptide
TSMEGLFIPKKRVIEMIQVTINS

SEQ ID NO: 55938 - protein, 42 aa, Artificial Sequence; identical to SEQ ID NO: 13671
  Cyclic GFR-binding peptide
  MOD_RES (2)..(36): Xaa is C or S

SEQ ID NO: 55939 - protein, 31 aa, Artificial Sequence
  Cyclic GFR-binding peptide
  MOD_RES (30)..(30): Xaa is C or S
ELSMEGIHQGQHPKIRMIQMTINSQGTPVXE

SEQ ID NO: 55940 - protein, 22 aa, Artificial Sequence
  Cyclic GFR-binding peptide
VTAKKHQGQHPKIRIKRMQVPR

SEQ ID NO: 55941 - protein, 37 aa, Artificial Sequence; identical to SEQ ID NO: 13672
  Cyclic GFR-binding peptide
  MOD_RES (1)..(1): Xaa is C or S

SEQ ID NO: 55942 - protein, 34 aa, Artificial Sequence
  Cyclic GFR-binding peptide
  MOD_RES (31)..(31): Xaa is C or S
TVQVEKFIPKKRVIEVKAVKVSRLQVQTPRXQVN

SEQ ID NO: 55943 - protein, 26 aa, Artificial Sequence
  Cyclic GFR-binding peptide
QLFVQVEKHQGQHPKIRVKAMKVSRE

SEQ ID NO: 55944 - protein, 38 aa, Artificial Sequence; identical to SEQ ID NO: 13674
  Cyclic GFR-binding peptide
  MOD_RES (1)..(3): Xaa is C or S

SEQ ID NO: 55945 - protein, 31 aa, Artificial Sequence
  Cyclic GFR-binding peptide
  MOD_RES (28)..(28): Xaa is C or S
VQVEKHQGQHPKIRVKAMKVSREETPVXELG

SEQ ID NO: 55946 - protein, 38 aa, Artificial Sequence; identical to SEQ ID NO: 13675
  Cyclic GFR-binding peptide
  MOD_RES (33)..(33): Xaa is C or S

SEQ ID NO: 55947 - protein, 40 aa, Artificial Sequence; identical to SEQ ID NO: 13677
  Cyclic GFR-binding peptide
  MOD_RES (1)..(35): Xaa is C or S

SEQ ID NO: 55948 - protein, 25 aa, Artificial Sequence
  Cyclic GFR-binding peptide
ELTSMEGLFIPKKRVIEMIQVTINS

SEQ ID NO: 55949 - protein, 29 aa, Artificial Sequence
  Cyclic GFR-binding peptide
DELTSMEGLFIPKKRVIEMIQVTINSLQV

SEQ ID NO: 55950 - protein, 39 aa, Artificial Sequence; identical to SEQ ID NO: 13680
  Cyclic GFR-binding peptide
  MOD_RES (2)..(4): Xaa is C or S

SEQ ID NO: 55951 - protein, 39 aa, Artificial Sequence; identical to SEQ ID NO: 13681
  Cyclic GFR-binding peptide
  MOD_RES (2)..(39): Xaa is C or S

SEQ ID NO: 55952 - protein, 35 aa, Artificial Sequence
  Cyclic GFR-binding peptide
  MOD_RES (30)..(30): Xaa is C or S
LFVQVEKHQGQHPKIRVKAMKVSREETPVXELGED

SEQ ID NO: 55953 - protein, 37 aa, Artificial Sequence; identical to SEQ ID NO: 13682
  Cyclic GFR-binding peptide
  MOD_RES (1)..(35): Xaa is C or S

SEQ ID NO: 55954 - protein, 43 aa, Artificial Sequence; identical to SEQ ID NO: 13683
  Cyclic GFR-binding peptide
  MOD_RES (2)..(4)..(41): Xaa is C or S

SEQ ID NO: 55955 - protein, 24 aa, Artificial Sequence
  Cyclic GFR-binding peptide
LSMEGIHQGQHPKIRMIQMTINSQ

SEQ ID NO: 55956 - protein, 39 aa, Artificial Sequence; identical to SEQ ID NO: 13687
  Cyclic GFR-binding peptide
  MOD_RES (1)..(35): Xaa is C or S

SEQ ID NO: 55957 - protein, 32 aa, Artificial Sequence
  Cyclic GFR-binding peptide
  MOD_RES (2)..(2): Xaa is C or S
KXALHDELTSMEGIFIPKKRVIEMIQVTINSL

SEQ ID NO: 55958 - protein, 32 aa, Artificial Sequence
  Cyclic GFR-binding peptide
  MOD_RES (29)..(29): Xaa is C or S
FSMEGLHQGQHPKIRMIQMTINSEETPVXELG

SEQ ID NO: 55959 - protein, 33 aa, Artificial Sequence
  Cyclic GFR-binding peptide
  MOD_RES (31)..(31): Xaa is C or S
QLFSMEGLHQGQHPKIRMIQMTINSEETPVXEL

SEQ ID NO: 55960 - protein, 35 aa, Artificial Sequence
  Cyclic GFR-binding peptide
  MOD_RES (30)..(30): Xaa is C or S
ELVTAKKHQGQHPKIRIKRMQVPRQGTPVXELGED

SEQ ID NO: 55961 - protein, 39 aa, Artificial Sequence; identical to SEQ ID NO: 13688
  Cyclic GFR-binding peptide
  MOD_RES (36)..(36): Xaa is C or S

SEQ ID NO: 55962 - protein, 29 aa, Artificial Sequence
  Cyclic GFR-binding peptide
ALHDELTSMEGIFIPKKRVIEMIQVTINS

SEQ ID NO: 55963 - protein, 27 aa, Artificial Sequence
  Cyclic GFR-binding peptide
DELTVQVEKFIPKKRVIEVKAVKVSRL

SEQ ID NO: 55964 - protein, 38 aa, Artificial Sequence; identical to SEQ ID NO: 13691
  Cyclic GFR-binding peptide
  MOD_RES (1)..(3)..(37): Xaa is C or S

SEQ ID NO: 55965 - protein, 38 aa, Artificial Sequence; identical to SEQ ID NO: 13692
  Cyclic GFR-binding peptide
  MOD_RES (2)..(2): Xaa is C or S

SEQ ID NO: 55966 - protein, 28 aa, Artificial Sequence
  Cyclic GFR-binding peptide
HQLFSMEGLHQGQHPKIRMIQMTINSEE

SEQ ID NO: 55967 - protein, 22 aa, Artificial Sequence
  Cyclic GFR-binding peptide
SMEGLLKPKKRVYEMIQVTINS

SEQ ID NO: 55968 - protein, 35 aa, Artificial Sequence
  Cyclic GFR-binding peptide
  MOD_RES (32)..(32): Xaa is C or S
HEELSMEGIHQGQHPKIRMIQMTINSQGTPVXELG

SEQ ID NO: 55969 - protein, 37 aa, Artificial Sequence
  Cyclic GFR-binding peptide
  MOD_RES (33)..(33): Xaa is C or S
ELTSMEGIFIPKKRVIEMIQVTINSLQVQTPRXQVNR

SEQ ID NO: 55970 - protein, 39 aa, Artificial Sequence; identical to SEQ ID NO: 13693
  Cyclic GFR-binding peptide
  MOD_RES (2)..(36): Xaa is C or S

SEQ ID NO: 55971 - protein, 23 aa, Artificial Sequence
  Cyclic GFR-binding peptide
LSMEGIHQGQHPKIRMIQMTINS

SEQ ID NO: 55972 - protein, 36 aa, Artificial Sequence
  Cyclic GFR-binding peptide
  MOD_RES (32)..(32): Xaa is C or S
HQLFSMEGLHQGQHPKIRMIQMTINSEETPVXELGE

SEQ ID NO: 55973 - protein, 25 aa, Artificial Sequence
  Cyclic GFR-binding peptide
LVQVEKHQGQHPKIRVKAMKVSRQG

SEQ ID NO: 55974 - protein, 31 aa, Artificial Sequence
  Cyclic GFR-binding peptide
DELTSMEGLFIPKKRVIEMIQVTINSLQVQT

SEQ ID NO: 55975 - protein, 38 aa, Artificial Sequence; identical to SEQ ID NO: 13694
  Cyclic GFR-binding peptide
  MOD_RES (2)..(4): Xaa is C or S

SEQ ID NO: 55976 - protein, 35 aa, Artificial Sequence
  Cyclic GFR-binding peptide
  MOD_RES (32)..(32): Xaa is C or S
HQLFVQVEKHQGQHPKIRVKAMKVSREETPVXELG

SEQ ID NO: 55977 - protein, 40 aa, Artificial Sequence; identical to SEQ ID NO: 13695
  Cyclic GFR-binding peptide
  MOD_RES (1)..(38): Xaa is C or S

SEQ ID NO: 55978 - protein, 29 aa, Artificial Sequence
  Cyclic GFR-binding peptide
HDELTSMEGIFIPKKRVIEMIQVTINSLQ

SEQ ID NO: 55979 - protein, 27 aa, Artificial Sequence
  Cyclic GFR-binding peptide
QLFSMEGLHQGQHPKIRMIQMTINSEE

SEQ ID NO: 55980 - protein, 36 aa, Artificial Sequence
  Cyclic GFR-binding peptide
  MOD_RES (2)..(4): Xaa is C or S
AXAXELHEELRSMEGLLKPKKRVYEMIQVTINSHHV

SEQ ID NO: 55981 - protein, 25 aa, Artificial Sequence
  Cyclic GFR-binding peptide
LTSMEGLFIPKKRVIEMIQVTINSL

SEQ ID NO: 55982 - protein, 37 aa, Artificial Sequence; identical to SEQ ID NO: 13696
  Cyclic GFR-binding peptide
  MOD_RES (1)..(3)..(37): Xaa is C or S

SEQ ID NO: 55983 - protein, 23 aa, Artificial Sequence
  Cyclic GFR-binding peptide
VQVEKHQGQHPKIRVKAMKVSRQ

SEQ ID NO: 55984 - protein, 31 aa, Artificial Sequence
  Cyclic GFR-binding peptide
  MOD_RES (31)..(31): Xaa is C or S
EELSMEGIHQGQHPKIRMIQMTINSQGTPVX

SEQ ID NO: 55985 - protein, 39 aa, Artificial Sequence; identical to SEQ ID NO: 13697
  Cyclic GFR-binding peptide
  MOD_RES (34)..(34): Xaa is C or S

SEQ ID NO: 55986 - protein, 25 aa, Artificial Sequence
  Cyclic GFR-binding peptide
ELRSMEGILKPKKRVYEMIQVTINS

SEQ ID NO: 55987 - protein, 41 aa, Artificial Sequence; identical to SEQ ID NO: 13699
  Cyclic GFR-binding peptide
  MOD_RES (2)..(39): Xaa is C or S

SEQ ID NO: 55988 - protein, 29 aa, Artificial Sequence
  Cyclic GFR-binding peptide
  MOD_RES (1)..(1): Xaa is C or S
XKNHQLFSMEGLHQGQHPKIRMIQMTINS

SEQ ID NO: 55989 - protein, 26 aa, Artificial Sequence
  Cyclic GFR-binding peptide
LTSMEGLFIPKKRVIEMIQVTINSLQ

SEQ ID NO: 55990 - protein, 32 aa, Artificial Sequence
  Cyclic GFR-binding peptide
  MOD_RES (1)..(1): Xaa is C or S
XALHDELTVQVEKFIPKKRVIEVKAVKVSRLQ

SEQ ID NO: 55991 - protein, 39 aa, Artificial Sequence; identical to SEQ ID NO: 13702
  Cyclic GFR-binding peptide
  MOD_RES (1)..(3): Xaa is C or S

SEQ ID NO: 55992 - protein, 33 aa, Artificial Sequence
  Cyclic GFR-binding peptide
  MOD_RES (32)..(32): Xaa is C or S
LRSMEGILKPKKRVYEMIQVTINSHHVRSPQXK

SEQ ID NO: 55993 - protein, 43 aa, Artificial Sequence; identical to SEQ ID NO: 13703
  Cyclic GFR-binding peptide
  MOD_RES (1)..(3)..(40): Xaa is C or S

SEQ ID NO: 55994 - protein, 33 aa, Artificial Sequence; identical to SEQ ID NO: 13704
  Cyclic GFR-binding peptide

SEQ ID NO: 55995 - protein, 44 aa, Artificial Sequence; identical to SEQ ID NO: 13706
  Cyclic GFR-binding peptide
  MOD_RES (1)..(3)..(40): Xaa is C or S

SEQ ID NO: 55996 - protein, 44 aa, Artificial Sequence; identical to SEQ ID NO: 13707
  Cyclic GFR-binding peptide
  MOD_RES (1)..(3)..(40): Xaa is C or S

SEQ ID NO: 55997 - protein, 38 aa, Artificial Sequence; identical to SEQ ID NO: 13708
  Cyclic GFR-binding peptide
  MOD_RES (2)..(4): Xaa is C or S

SEQ ID NO: 55998 - protein, 33 aa, Artificial Sequence; identical to SEQ ID NO: 13712
  Cyclic GFR-binding peptide

SEQ ID NO: 55999 - protein, 35 aa, Artificial Sequence; identical to SEQ ID NO: 13713
  Cyclic GFR-binding peptide
  MOD_RES (1)..(35): Xaa is C or S

SEQ ID NO: 56000 - protein, 34 aa, Artificial Sequence
  Cyclic GFR-binding peptide
  MOD_RES (1)..(3): Xaa is C or S
XKXALHDELTVQVEKFIPKKRVIEVKAVKVSRLQ

SEQ ID NO: 56001 - protein, 33 aa, Artificial Sequence
  Cyclic GFR-binding peptide
  MOD_RES (2)..(2): Xaa is C or S
KXALHDELTSMEGLFIPKKRVIEMIQVTINSLQ

SEQ ID NO: 56002 - protein, 39 aa, Artificial Sequence; identical to SEQ ID NO: 13715
  Cyclic GFR-binding peptide
  MOD_RES (2)..(4): Xaa is C or S

SEQ ID NO: 56003 - protein, 31 aa, Artificial Sequence
  Cyclic GFR-binding peptide
HEELRSMEGLLKPKKRVYEMIQVTINSHHVR

SEQ ID NO: 56004 - protein, 37 aa, Artificial Sequence; identical to SEQ ID NO: 13717
  Cyclic GFR-binding peptide
  MOD_RES (2)..(36): Xaa is C or S

SEQ ID NO: 56005 - protein, 27 aa, Artificial Sequence
  Cyclic GFR-binding peptide
HEELVTAKKHQGQHPKIRIKRMQVPRQ

SEQ ID NO: 56006 - protein, 30 aa, Artificial Sequence
  Cyclic GFR-binding peptide
LHEELRSMEGILKPKKRVYEMIQVTINSHH

SEQ ID NO: 56007 - protein, 34 aa, Artificial Sequence; identical to SEQ ID NO: 13720
  Cyclic GFR-binding peptide
  MOD_RES (34)..(34): Xaa is C or S

SEQ ID NO: 56008 - protein, 32 aa, Artificial Sequence
  Cyclic GFR-binding peptide
  MOD_RES (32)..(32): Xaa is C or S
LTSMEGIFIPKKRVIEMIQVTINSLQVQTPRX

SEQ ID NO: 56009 - protein, 37 aa, Artificial Sequence; identical to SEQ ID NO: 13723
  Cyclic GFR-binding peptide
  MOD_RES (33)..(33): Xaa is C or S

SEQ ID NO: 56010 - protein, 33 aa, Artificial Sequence
  Cyclic GFR-binding peptide
  MOD_RES (33)..(33): Xaa is C or S
ELTSMEGLFIPKKRVIEMIQVTINSLQVQTPRX

SEQ ID NO: 56011 - protein, 32 aa, Artificial Sequence
  Cyclic GFR-binding peptide
  MOD_RES (1)..(1): Xaa is C or S
XQSHEELVTAKKHQGQHPKIRIKRMQVPRQGT

SEQ ID NO: 56012 - protein, 38 aa, Artificial Sequence; identical to SEQ ID NO: 13725
  Cyclic GFR-binding peptide
  MOD_RES (2)..(4): Xaa is C or S

SEQ ID NO: 56013 - protein, 30 aa, Artificial Sequence
  Cyclic GFR-binding peptide
  MOD_RES (28)..(28): Xaa is C or S
SMEGIHQGQHPKIRMIQMTINSQGTPVXEL

SEQ ID NO: 56014 - protein, 29 aa, Artificial Sequence
  Cyclic GFR-binding peptide
KNHQLFSMEGLHQGQHPKIRMIQMTINSE

SEQ ID NO: 56015 - protein, 32 aa, Artificial Sequence; identical to SEQ ID NO: 2168
  Cyclic GFR-binding peptide

SEQ ID NO: 56016 - protein, 38 aa, Artificial Sequence; identical to SEQ ID NO: 13729
  Cyclic GFR-binding peptide
  MOD_RES (1)..(3)..(37): Xaa is C or S

SEQ ID NO: 56017 - protein, 35 aa, Artificial Sequence
  Cyclic GFR-binding peptide
  MOD_RES (2)..(4): Xaa is C or S
RXEXQSHEELSMEGIHQGQHPKIRMIQMTINSQGT

SEQ ID NO: 56018 - protein, 39 aa, Artificial Sequence; identical to SEQ ID NO: 13730
  Cyclic GFR-binding peptide
  MOD_RES (37)..(37): Xaa is C or S

SEQ ID NO: 56019 - protein, 27 aa, Artificial Sequence
  Cyclic GFR-binding peptide
LFVTAKKHQGQHPKIRIKRMQVPREET

SEQ ID NO: 56020 - protein, 36 aa, Artificial Sequence; identical to SEQ ID NO: 13732
  Cyclic GFR-binding peptide
  MOD_RES (33)..(33): Xaa is C or S

SEQ ID NO: 56021 - protein, 33 aa, Artificial Sequence
  Cyclic GFR-binding peptide
  MOD_RES (30)..(30): Xaa is C or S
ELVTAKKHQGQHPKIRIKRMQVPRQGTPVXELG

SEQ ID NO: 56022 - protein, 25 aa, Artificial Sequence
  Cyclic GFR-binding peptide
TSMEGIFIPKKRVIEMIQVTINSLQ

SEQ ID NO: 56023 - protein, 28 aa, Artificial Sequence
  Cyclic GFR-binding peptide
LVTAKKHQGQHPKIRIKRMQVPRQGTPV

SEQ ID NO: 56024 - protein, 31 aa, Artificial Sequence
  Cyclic GFR-binding peptide
EELRVTAKKLKPKKRVYEIKRVQVPRHHVRS

SEQ ID NO: 56025 - protein, 37 aa, Artificial Sequence; identical to SEQ ID NO: 13734
  Cyclic GFR-binding peptide
  MOD_RES (1)..(3)..(37): Xaa is C or S

SEQ ID NO: 56026 - protein, 39 aa, Artificial Sequence; identical to SEQ ID NO: 13736
  Cyclic GFR-binding peptide
  MOD_RES (33)..(33): Xaa is C or S

SEQ ID NO: 56027 - protein, 36 aa, Artificial Sequence; identical to SEQ ID NO: 13737
  Cyclic GFR-binding peptide
  MOD_RES (2)..(36): Xaa is C or S

SEQ ID NO: 56028 - protein, 35 aa, Artificial Sequence
  Cyclic GFR-binding peptide
  MOD_RES (29)..(29): Xaa is C or S
LVQVEKHQGQHPKIRVKAMKVSRQGTPVXELGEDN

SEQ ID NO: 56029 - protein, 41 aa, Artificial Sequence; identical to SEQ ID NO: 13738
  Cyclic GFR-binding peptide
  MOD_RES (1)..(35): Xaa is C or S

SEQ ID NO: 56030 - protein, 28 aa, Artificial Sequence
  Cyclic GFR-binding peptide
LHDELTSMEGLFIPKKRVIEMIQVTINS

SEQ ID NO: 56031 - protein, 36 aa, Artificial Sequence; identical to SEQ ID NO: 13739
  Cyclic GFR-binding peptide
  MOD_RES (33)..(33): Xaa is C or S

SEQ ID NO: 56032 - protein, 33 aa, Artificial Sequence
  Cyclic GFR-binding peptide
  MOD_RES (30)..(30): Xaa is C or S
SMEGLLKPKKRVYEMIQVTINSHHVRSPQXKVS

SEQ ID NO: 56033 - protein, 29 aa, Artificial Sequence
  Cyclic GFR-binding peptide
HDELTSMEGLFIPKKRVIEMIQVTINSLQ

SEQ ID NO: 56034 - protein, 35 aa, Artificial Sequence
  Cyclic GFR-binding peptide
  MOD_RES (1)..(3): Xaa is C or S
XKXALHDELTSMEGIFIPKKRVIEMIQVTINSLQV

SEQ ID NO: 56035 - protein, 31 aa, Artificial Sequence
  Cyclic GFR-binding peptide
ALHDELTSMEGIFIPKKRVIEMIQVTINSLQ

SEQ ID NO: 56036 - protein, 35 aa, Artificial Sequence
  Cyclic GFR-binding peptide
  MOD_RES (2)..(4): Xaa is C or S
EXKXALHDELTSMEGLFIPKKRVIEMIQVTINSLQ

SEQ ID NO: 56037 - protein, 43 aa, Artificial Sequence; identical to SEQ ID NO: 13746
  Cyclic GFR-binding peptide
  MOD_RES (2)..(39): Xaa is C or S

SEQ ID NO: 56038 - protein, 30 aa, Artificial Sequence
  Cyclic GFR-binding peptide
ELTSMEGLFIPKKRVIEMIQVTINSLQVQT

SEQ ID NO: 56039 - protein, 35 aa, Artificial Sequence
  Cyclic GFR-binding peptide
  MOD_RES (1)..(3): Xaa is C or S
XKXALHDELTSMEGLFIPKKRVIEMIQVTINSLQV

SEQ ID NO: 56040 - protein, 32 aa, Artificial Sequence
  Cyclic GFR-binding peptide
  MOD_RES (2)..(4): Xaa is C or S
RXEXQSHEELSMEGIHQGQHPKIRMIQMTINS

SEQ ID NO: 56041 - protein, 37 aa, Artificial Sequence; identical to SEQ ID NO: 13747
  Cyclic GFR-binding peptide
  MOD_RES (34)..(34): Xaa is C or S

SEQ ID NO: 56042 - protein, 37 aa, Artificial Sequence; identical to SEQ ID NO: 13748
  Cyclic GFR-binding peptide
  MOD_RES (1)..(3)..(37): Xaa is C or S

SEQ ID NO: 56043 - protein, 33 aa, Artificial Sequence
  Cyclic GFR-binding peptide
  MOD_RES (1)..(1): Xaa is C or S
XQSHEELSMEGIHQGQHPKIRMIQMTINSQGTP

SEQ ID NO: 56044 - protein, 25 aa, Artificial Sequence
  Cyclic GFR-binding peptide
ELVTAKKHQGQHPKIRIKRMQVPRQ

SEQ ID NO: 56045 - protein, 38 aa, Artificial Sequence; identical to SEQ ID NO: 13749
  Cyclic GFR-binding peptide
  MOD_RES (2)..(2): Xaa is C or S

SEQ ID NO: 56046 - protein, 41 aa, Artificial Sequence; identical to SEQ ID NO: 13750
  Cyclic GFR-binding peptide
  MOD_RES (2)..(4)..(41): Xaa is C or S

SEQ ID NO: 56047 - protein, 39 aa, Artificial Sequence; identical to SEQ ID NO: 13751
  Cyclic GFR-binding peptide
  MOD_RES (2)..(4): Xaa is C or S

SEQ ID NO: 56048 - protein, 37 aa, Artificial Sequence; identical to SEQ ID NO: 13752
  Cyclic GFR-binding peptide
  MOD_RES (2)..(4): Xaa is C or S

SEQ ID NO: 56049 - protein, 28 aa, Artificial Sequence
  Cyclic GFR-binding peptide
VQVEKFIPKKRVIEVKAVKVSRLQVQTP

SEQ ID NO: 56050 - protein, 33 aa, Artificial Sequence
  Cyclic GFR-binding peptide
  MOD_RES (33)..(33): Xaa is C or S
ELRSMEGILKPKKRVYEMIQVTINSHHVRSPQX

SEQ ID NO: 56051 - protein, 44 aa, Artificial Sequence; identical to SEQ ID NO: 13754
  Cyclic GFR-binding peptide
  MOD_RES (2)..(4)..(38): Xaa is C or S

SEQ ID NO: 56052 - protein, 41 aa, Artificial Sequence; identical to SEQ ID NO: 13755
  Cyclic GFR-binding peptide
  MOD_RES (2)..(4)..(38): Xaa is C or S

SEQ ID NO: 56053 - protein, 29 aa, Artificial Sequence
  Cyclic GFR-binding peptide
LHDELTVQVEKFIPKKRVIEVKAVKVSRL

SEQ ID NO: 56054 - protein, 33 aa, Artificial Sequence
  Cyclic GFR-binding peptide
  MOD_RES (1)..(1): Xaa is C or S
XQSHEELVTAKKHQGQHPKIRIKRMQVPRQGTP

SEQ ID NO: 56055 - protein, 35 aa, Artificial Sequence; identical to SEQ ID NO: 13758
  Cyclic GFR-binding peptide
  MOD_RES (1)..(35): Xaa is C or S

SEQ ID NO: 56056 - protein, 37 aa, Artificial Sequence; identical to SEQ ID NO: 13759
  Cyclic GFR-binding peptide
  MOD_RES (1)..(1): Xaa is C or S

SEQ ID NO: 56057 - protein, 35 aa, Artificial Sequence
  Cyclic GFR-binding peptide
  MOD_RES (32)..(32): Xaa is C or S
LRSMEGLLKPKKRVYEMIQVTINSHHVRSPQXKVS

SEQ ID NO: 56058 - protein, 35 aa, Artificial Sequence
  Cyclic GFR-binding peptide
  MOD_RES (34)..(34): Xaa is C or S
EELRSMEGILKPKKRVYEMIQVTINSHHVRSPQXK

SEQ ID NO: 56059 - protein, 40 aa, Artificial Sequence; identical to SEQ ID NO: 13761
  Cyclic GFR-binding peptide
  MOD_RES (1)..(3)..(40): Xaa is C or S

SEQ ID NO: 56060 - protein, 25 aa, Artificial Sequence
  Cyclic GFR-binding peptide
ELTSMEGIFIPKKRVIEMIQVTINS

SEQ ID NO: 56061 - protein, 33 aa, Artificial Sequence
  Cyclic GFR-binding peptide
  MOD_RES (2)..(2): Xaa is C or S
KXALHDELTSMEGIFIPKKRVIEMIQVTINSLQ

SEQ ID NO: 56062 - protein, 35 aa, Artificial Sequence
  Cyclic GFR-binding peptide
  MOD_RES (1)..(3): Xaa is C or S
XAXELHEELRVTAKKLKPKKRVYEIKRVQVPRHHV

SEQ ID NO: 56063 - protein, 39 aa, Artificial Sequence; identical to SEQ ID NO: 13769
  Cyclic GFR-binding peptide
  MOD_RES (1)..(3): Xaa is C or S

SEQ ID NO: 56064 - protein, 32 aa, Artificial Sequence
  Cyclic GFR-binding peptide
  MOD_RES (1)..(3): Xaa is C or S
XEXQSHEELVQVEKHQGQHPKIRVKAMKVSRQ

SEQ ID NO: 56065 - protein, 32 aa, Artificial Sequence
  Cyclic GFR-binding peptide
  MOD_RES (2)..(2): Xaa is C or S
EXQSHEELSMEGIHQGQHPKIRMIQMTINSQG

SEQ ID NO: 56066 - protein, 38 aa, Artificial Sequence; identical to SEQ ID NO: 13770
  Cyclic GFR-binding peptide
  MOD_RES (35)..(35): Xaa is C or S

SEQ ID NO: 56067 - protein, 29 aa, Artificial Sequence
  Cyclic GFR-binding peptide
NHQLFSMEGLHQGQHPKIRMIQMTINSEE

SEQ ID NO: 56068 - protein, 37 aa, Artificial Sequence; identical to SEQ ID NO: 13771
  Cyclic GFR-binding peptide
  MOD_RES (33)..(33): Xaa is C or S

SEQ ID NO: 56069 - protein, 40 aa, Artificial Sequence; identical to SEQ ID NO: 13772
  Cyclic GFR-binding peptide
  MOD_RES (2)..(4)..(38): Xaa is C or S

SEQ ID NO: 56070 - protein, 32 aa, Artificial Sequence
  Cyclic GFR-binding peptide
  MOD_RES (1)..(3): Xaa is C or S
XAXELHEELRSMEGILKPKKRVYEMIQVTINS

SEQ ID NO: 56071 - protein, 29 aa, Artificial Sequence
  Cyclic GFR-binding peptide
  MOD_RES (1)..(1): Xaa is C or S
XQSHEELVTAKKHQGQHPKIRIKRMQVPR

SEQ ID NO: 56072 - protein, 27 aa, Artificial Sequence
  Cyclic GFR-binding peptide
QLFVTAKKHQGQHPKIRIKRMQVPREE

SEQ ID NO: 56073 - protein, 32 aa, Artificial Sequence
  Cyclic GFR-binding peptide
  MOD_RES (32)..(32): Xaa is C or S
LRVTAKKLKPKKRVYEIKRVQVPRHHVRSPQX

SEQ ID NO: 56074 - protein, 33 aa, Artificial Sequence
  Cyclic GFR-binding peptide
  MOD_RES (28)..(28): Xaa is C or S
VTAKKHQGQHPKIRIKRMQVPRQGTPVXELGED

SEQ ID NO: 56075 - protein, 33 aa, Artificial Sequence
  Cyclic GFR-binding peptide
ELHEELRSMEGLLKPKKRVYEMIQVTINSHHVR

SEQ ID NO: 56076 - protein, 36 aa, Artificial Sequence; identical to SEQ ID NO: 13775
  Cyclic GFR-binding peptide
  MOD_RES (1)..(1): Xaa is C or S

SEQ ID NO: 56077 - protein, 32 aa, Artificial Sequence
  Cyclic GFR-binding peptide
  MOD_RES (29)..(29): Xaa is C or S
FVQVEKHQGQHPKIRVKAMKVSREETPVXELG

SEQ ID NO: 56078 - protein, 39 aa, Artificial Sequence; identical to SEQ ID NO: 13777
  Cyclic GFR-binding peptide
  MOD_RES (2)..(4): Xaa is C or S

SEQ ID NO: 56079 - protein, 41 aa, Artificial Sequence; identical to SEQ ID NO: 13778
  Cyclic GFR-binding peptide
  MOD_RES (37)..(37): Xaa is C or S

SEQ ID NO: 56080 - protein, 42 aa, Artificial Sequence; identical to SEQ ID NO: 13779
  Cyclic GFR-binding peptide
  MOD_RES (2)..(4)..(38): Xaa is C or S

SEQ ID NO: 56081 - protein, 39 aa, Artificial Sequence; identical to SEQ ID NO: 13780
  Cyclic GFR-binding peptide
  MOD_RES (1)..(38): Xaa is C or S

SEQ ID NO: 56082 - protein, 32 aa, Artificial Sequence; identical to SEQ ID NO: 2187
  Cyclic GFR-binding peptide

SEQ ID NO: 56083 - protein, 36 aa, Artificial Sequence; identical to SEQ ID NO: 13783
  Cyclic GFR-binding peptide
  MOD_RES (2)..(2): Xaa is C or S

SEQ ID NO: 56084 - protein, 34 aa, Artificial Sequence
  Cyclic GFR-binding peptide
  MOD_RES (32)..(32): Xaa is C or S
LRVTAKKLKPKKRVYEIKRVQVPRHHVRSPQXKV

SEQ ID NO: 56085 - protein, 29 aa, Artificial Sequence
  Cyclic GFR-binding peptide
  MOD_RES (29)..(29): Xaa is C or S
LVTAKKHQGQHPKIRIKRMQVPRQGTPVX

SEQ ID NO: 56086 - protein, 43 aa, Artificial Sequence; identical to SEQ ID NO: 13786
  Cyclic GFR-binding peptide
  MOD_RES (1)..(3)..(37): Xaa is C or S

SEQ ID NO: 56087 - protein, 38 aa, Artificial Sequence; identical to SEQ ID NO: 13787
  Cyclic GFR-binding peptide
  MOD_RES (35)..(35): Xaa is C or S

SEQ ID NO: 56088 - protein, 32 aa, Artificial Sequence
  Cyclic GFR-binding peptide
  MOD_RES (1)..(3): Xaa is C or S
XAXELHEELRVTAKKLKPKKRVYEIKRVQVPR

SEQ ID NO: 56089 - protein, 25 aa, Artificial Sequence
  Cyclic GFR-binding peptide
ELRSMEGLLKPKKRVYEMIQVTINS

SEQ ID NO: 56090 - protein, 34 aa, Artificial Sequence
  Cyclic GFR-binding peptide
  MOD_RES (1)..(3): Xaa is C or S
XAXELHEELRSMEGLLKPKKRVYEMIQVTINSHH

SEQ ID NO: 56091 - protein, 34 aa, Artificial Sequence
  Cyclic GFR-binding peptide
  MOD_RES (2)..(4): Xaa is C or S
RXEXKNHQLFVTAKKHQGQHPKIRIKRMQVPREE

SEQ ID NO: 56092 - protein, 29 aa, Artificial Sequence
  Cyclic GFR-binding peptide
  MOD_RES (1)..(1): Xaa is C or S
XKNHQLFVTAKKHQGQHPKIRIKRMQVPR

SEQ ID NO: 56093 - protein, 32 aa, Artificial Sequence; identical to SEQ ID NO: 13789
  Cyclic GFR-binding peptide

SEQ ID NO: 56094 - protein, 34 aa, Artificial Sequence
  Cyclic GFR-binding peptide
  MOD_RES (29)..(29): Xaa is C or S
LSMEGIHQGQHPKIRMIQMTINSQGTPVXELGED

SEQ ID NO: 56095 - protein, 29 aa, Artificial Sequence
  Cyclic GFR-binding peptide
SHEELSMEGIHQGQHPKIRMIQMTINSQG

SEQ ID NO: 56096 - protein, 39 aa, Artificial Sequence; identical to SEQ ID NO: 13791
  Cyclic GFR-binding peptide
  MOD_RES (33)..(33): Xaa is C or S

SEQ ID NO: 56097 - protein, 37 aa, Artificial Sequence; identical to SEQ ID NO: 13792
  Cyclic GFR-binding peptide
  MOD_RES (2)..(36): Xaa is C or S

SEQ ID NO: 56098 - protein, 32 aa, Artificial Sequence
  Cyclic GFR-binding peptide
LHEELRSMEGILKPKKRVYEMIQVTINSHHVR

SEQ ID NO: 56099 - protein, 31 aa, Artificial Sequence
  Cyclic GFR-binding peptide
HDELTVQVEKFIPKKRVIEVKAVKVSRLQVQ

SEQ ID NO: 56100 - protein, 25 aa, Artificial Sequence
  Cyclic GFR-binding peptide
LFVTAKKHQGQHPKIRIKRMQVPRE

SEQ ID NO: 56101 - protein, 34 aa, Artificial Sequence
  Cyclic GFR-binding peptide
  MOD_RES (32)..(32): Xaa is C or S
LTSMEGLFIPKKRVIEMIQVTINSLQVQTPRXQV

SEQ ID NO: 56102 - protein, 26 aa, Artificial Sequence
  Cyclic GFR-binding peptide
FVQVEKHQGQHPKIRVKAMKVSREET

SEQ ID NO: 56103 - protein, 29 aa, Artificial Sequence
  Cyclic GFR-binding peptide
LRSMEGILKPKKRVYEMIQVTINSHHVRS

SEQ ID NO: 56104 - protein, 26 aa, Artificial Sequence
  Cyclic GFR-binding peptide
ELSMEGIHQGQHPKIRMIQMTINSQG

SEQ ID NO: 56105 - protein, 30 aa, Artificial Sequence
  Cyclic GFR-binding peptide
  MOD_RES (2)..(2): Xaa is C or S
EXKNHQLFVQVEKHQGQHPKIRVKAMKVSR

SEQ ID NO: 56106 - protein, 28 aa, Artificial Sequence
  Cyclic GFR-binding peptide
ELTVQVEKFIPKKRVIEVKAVKVSRLQV

SEQ ID NO: 56107 - protein, 25 aa, Artificial Sequence
  Cyclic GFR-binding peptide
ELRVTAKKLKPKKRVYEIKRVQVPR

SEQ ID NO: 56108 - protein, 30 aa, Artificial Sequence
  Cyclic GFR-binding peptide
LTVQVEKFIPKKRVIEVKAVKVSRLQVQTP

SEQ ID NO: 56109 - protein, 28 aa, Artificial Sequence
  Cyclic GFR-binding peptide
QSHEELVTAKKHQGQHPKIRIKRMQVPR

SEQ ID NO: 56110 - protein, 41 aa, Artificial Sequence; identical to SEQ ID NO: 13796
  Cyclic GFR-binding peptide
  MOD_RES (1)..(3)..(40): Xaa is C or S

SEQ ID NO: 56111 - protein, 31 aa, Artificial Sequence
  Cyclic GFR-binding peptide
  MOD_RES (2)..(2): Xaa is C or S
EXQSHEELSMEGIHQGQHPKIRMIQMTINSQ

SEQ ID NO: 56112 - protein, 32 aa, Artificial Sequence
  Cyclic GFR-binding peptide
  MOD_RES (28)..(28): Xaa is C or S
VTAKKHQGQHPKIRIKRMQVPREETPVXELGE

SEQ ID NO: 56113 - protein, 41 aa, Artificial Sequence; identical to SEQ ID NO: 13799
  Cyclic GFR-binding peptide
  MOD_RES (1)..(35): Xaa is C or S

SEQ ID NO: 56114 - protein, 38 aa, Artificial Sequence; identical to SEQ ID NO: 13800
  Cyclic GFR-binding peptide
  MOD_RES (2)..(4): Xaa is C or S

SEQ ID NO: 56115 - protein, 32 aa, Artificial Sequence
  Cyclic GFR-binding peptide
  MOD_RES (32)..(32): Xaa is C or S
HEELVTAKKHQGQHPKIRIKRMQVPRQGTPVX

SEQ ID NO: 56116 - protein, 37 aa, Artificial Sequence; identical to SEQ ID NO: 13805
  Cyclic GFR-binding peptide
  MOD_RES (1)..(3): Xaa is C or S

SEQ ID NO: 56117 - protein, 37 aa, Artificial Sequence; identical to SEQ ID NO: 13806
  Cyclic GFR-binding peptide
  MOD_RES (33)..(33): Xaa is C or S

SEQ ID NO: 56118 - protein, 28 aa, Artificial Sequence
  Cyclic GFR-binding peptide
SHEELVQVEKHQGQHPKIRVKAMKVSRQ

SEQ ID NO: 56119 - protein, 30 aa, Artificial Sequence
  Cyclic GFR-binding peptide
ELHEELRSMEGLLKPKKRVYEMIQVTINSH

SEQ ID NO: 56120 - protein, 23 aa, Artificial Sequence
  Cyclic GFR-binding peptide
VTAKKLKPKKRVYEIKRVQVPRH

SEQ ID NO: 56121 - protein, 41 aa, Artificial Sequence; identical to SEQ ID NO: 13808
  Cyclic GFR-binding peptide
  MOD_RES (1)..(35): Xaa is C or S

SEQ ID NO: 56122 - protein, 43 aa, Artificial Sequence; identical to SEQ ID NO: 13809
  Cyclic GFR-binding peptide
  MOD_RES (2)..(4)..(38): Xaa is C or S

SEQ ID NO: 56123 - protein, 36 aa, Artificial Sequence; identical to SEQ ID NO: 13810
  Cyclic GFR-binding peptide
  MOD_RES (2)..(2): Xaa is C or S

SEQ ID NO: 56124 - protein, 36 aa, Artificial Sequence; identical to SEQ ID NO: 13811
  Cyclic GFR-binding peptide
  MOD_RES (34)..(34): Xaa is C or S

SEQ ID NO: 56125 - protein, 33 aa, Artificial Sequence; identical to SEQ ID NO: 13812
  Cyclic GFR-binding peptide
  MOD_RES (33)..(33): Xaa is C or S

SEQ ID NO: 56126 - protein, 30 aa, Artificial Sequence
  Cyclic GFR-binding peptide
ELRSMEGLLKPKKRVYEMIQVTINSHHVRS

SEQ ID NO: 56127 - protein, 35 aa, Artificial Sequence
  Cyclic GFR-binding peptide
  MOD_RES (30)..(30): Xaa is C or S
LFSMEGLHQGQHPKIRMIQMTINSEETPVXELGED

SEQ ID NO: 56128 - protein, 32 aa, Artificial Sequence; identical to SEQ ID NO: 13815
  Cyclic GFR-binding peptide

SEQ ID NO: 56129 - protein, 28 aa, Artificial Sequence
  Cyclic GFR-binding peptide
LTVQVEKFIPKKRVIEVKAVKVSRLQVQ

SEQ ID NO: 56130 - protein, 38 aa, Artificial Sequence; identical to SEQ ID NO: 13818
  Cyclic GFR-binding peptide
  MOD_RES (37)..(37): Xaa is C or S

SEQ ID NO: 56131 - protein, 36 aa, Artificial Sequence
  Cyclic GFR-binding peptide
  MOD_RES (1)..(3): Xaa is C or S
XKXALHDELTVQVEKFIPKKRVIEVKAVKVSRLQVQ

SEQ ID NO: 56132 - protein, 39 aa, Artificial Sequence; identical to SEQ ID NO: 13820
  Cyclic GFR-binding peptide
  MOD_RES (1)..(35): Xaa is C or S

SEQ ID NO: 56133 - protein, 33 aa, Artificial Sequence; identical to SEQ ID NO: 13821
  Cyclic GFR-binding peptide
  MOD_RES (33)..(33): Xaa is C or S

SEQ ID NO: 56134 - protein, 38 aa, Artificial Sequence
  Cyclic GFR-binding peptide
  MOD_RES (34)..(34): Xaa is C or S
DELTSMEGIFIPKKRVIEMIQVTINSLQVQTPRXQVNR

SEQ ID NO: 56135 - protein, 34 aa, Artificial Sequence
  Cyclic GFR-binding peptide
  MOD_RES (30)..(30): Xaa is C or S
SMEGIFIPKKRVIEMIQVTINSLQVQTPRXQVNR

SEQ ID NO: 56136 - protein, 33 aa, Artificial Sequence
  Cyclic GFR-binding peptide
  MOD_RES (30)..(30): Xaa is C or S
LFVQVEKHQGQHPKIRVKAMKVSREETPVXELG

SEQ ID NO: 56137 - protein, 28 aa, Artificial Sequence
  Cyclic GFR-binding peptide
SHEELVTAKKHQGQHPKIRIKRMQVPRQ

SEQ ID NO: 56138 - protein, 37 aa, Artificial Sequence; identical to SEQ ID NO: 13826
  Cyclic GFR-binding peptide
  MOD_RES (1)..(3): Xaa is C or S

SEQ ID NO: 56139 - protein, 35 aa, Artificial Sequence; identical to SEQ ID NO: 13827
  Cyclic GFR-binding peptide
  MOD_RES (2)..(2): Xaa is C or S

SEQ ID NO: 56140 - protein, 44 aa, Artificial Sequence; identical to SEQ ID NO: 13828
  Cyclic GFR-binding peptide
  MOD_RES (2)..(4)..(38): Xaa is C or S

SEQ ID NO: 56141 - protein, 29 aa, Artificial Sequence
  Cyclic GFR-binding peptide
  MOD_RES (28)..(28): Xaa is C or S
SMEGLHQGQHPKIRMIQMTINSEETPVXE

SEQ ID NO: 56142 - protein, 35 aa, Artificial Sequence
  Cyclic GFR-binding peptide
  MOD_RES (31)..(31): Xaa is C or S
EELSMEGIHQGQHPKIRMIQMTINSQGTPVXELGE

SEQ ID NO: 56143 - protein, 34 aa, Artificial Sequence
  Cyclic GFR-binding peptide
  MOD_RES (31)..(31): Xaa is C or S
TSMEGIFIPKKRVIEMIQVTINSLQVQTPRXQVN

SEQ ID NO: 56144 - protein, 35 aa, Artificial Sequence
  Cyclic GFR-binding peptide
  MOD_RES (29)..(29): Xaa is C or S
FSMEGLHQGQHPKIRMIQMTINSEETPVXELGEDN

SEQ ID NO: 56145 - protein, 24 aa, Artificial Sequence
  Cyclic GFR-binding peptide
FVTAKKHQGQHPKIRIKRMQVPRE

SEQ ID NO: 56146 - protein, 34 aa, Artificial Sequence
  Cyclic GFR-binding peptide
  MOD_RES (34)..(34): Xaa is C or S
DELTSMEGLFIPKKRVIEMIQVTINSLQVQTPRX

SEQ ID NO: 56147 - protein, 31 aa, Artificial Sequence
  Cyclic GFR-binding peptide
LHEELRSMEGLLKPKKRVYEMIQVTINSHHV

SEQ ID NO: 56148 - protein, 32 aa, Artificial Sequence; identical to SEQ ID NO: 13832
  Cyclic GFR-binding peptide

SEQ ID NO: 56149 - protein, 38 aa, Artificial Sequence; identical to SEQ ID NO: 13834
  Cyclic GFR-binding peptide
  MOD_RES (1)..(3)..(37): Xaa is C or S

SEQ ID NO: 56150 - protein, 41 aa, Artificial Sequence; identical to SEQ ID NO: 13835
  Cyclic GFR-binding peptide
  MOD_RES (2)..(4)..(41): Xaa is C or S

SEQ ID NO: 56151 - protein, 42 aa, Artificial Sequence; identical to SEQ ID NO: 13836
  Cyclic GFR-binding peptide
  MOD_RES (1)..(3)..(37): Xaa is C or S

SEQ ID NO: 56152 - protein, 33 aa, Artificial Sequence; identical to SEQ ID NO: 13837
  Cyclic GFR-binding peptide

SEQ ID NO: 56153 - protein, 42 aa, Artificial Sequence; identical to SEQ ID NO: 13838
  Cyclic GFR-binding peptide
  MOD_RES (2)..(4)..(41): Xaa is C or S

SEQ ID NO: 56154 - protein, 32 aa, Artificial Sequence; identical to SEQ ID NO: 13840
  Cyclic GFR-binding peptide

SEQ ID NO: 56155 - protein, 39 aa, Artificial Sequence; identical to SEQ ID NO: 13841
  Cyclic GFR-binding peptide
  MOD_RES (34)..(34): Xaa is C or S

SEQ ID NO: 56156 - protein, 32 aa, Artificial Sequence
  Cyclic GFR-binding peptide
DELTSMEGIFIPKKRVIEMIQVTINSLQVQTP

SEQ ID NO: 56157 - protein, 29 aa, Artificial Sequence
  Cyclic GFR-binding peptide
HQLFVQVEKHQGQHPKIRVKAMKVSREET

SEQ ID NO: 56158 - protein, 31 aa, Artificial Sequence
  Cyclic GFR-binding peptide
  MOD_RES (31)..(31): Xaa is C or S
QLFVTAKKHQGQHPKIRIKRMQVPREETPVX

SEQ ID NO: 56159 - protein, 32 aa, Artificial Sequence; identical to SEQ ID NO: 13842
  Cyclic GFR-binding peptide

SEQ ID NO: 56160 - protein, 35 aa, Artificial Sequence; identical to SEQ ID NO: 13844
  Cyclic GFR-binding peptide

SEQ ID NO: 56161 - protein, 32 aa, Artificial Sequence
  Cyclic GFR-binding peptide
  MOD_RES (1)..(3): Xaa is C or S
XEXQSHEELVTAKKHQGQHPKIRIKRMQVPRQ

SEQ ID NO: 56162 - protein, 28 aa, Artificial Sequence
  Cyclic GFR-binding peptide
EELRSMEGILKPKKRVYEMIQVTINSHH

SEQ ID NO: 56163 - protein, 33 aa, Artificial Sequence
  Cyclic GFR-binding peptide
  MOD_RES (2)..(2): Xaa is C or S
EXQSHEELVQVEKHQGQHPKIRVKAMKVSRQGT

SEQ ID NO: 56164 - protein, 28 aa, Artificial Sequence
  Cyclic GFR-binding peptide
VTAKKLKPKKRVYEIKRVQVPRHHVRSP

SEQ ID NO: 56165 - protein, 40 aa, Artificial Sequence; identical to SEQ ID NO: 13847
  Cyclic GFR-binding peptide
  MOD_RES (2)..(39): Xaa is C or S

SEQ ID NO: 56166 - protein, 29 aa, Artificial Sequence
  Cyclic GFR-binding peptide
QSHEELVTAKKHQGQHPKIRIKRMQVPRQ

SEQ ID NO: 56167 - protein, 33 aa, Artificial Sequence
  Cyclic GFR-binding peptide
  MOD_RES (1)..(1): Xaa is C or S
XKNHQLFVQVEKHQGQHPKIRVKAMKVSREETP

SEQ ID NO: 56168 - protein, 31 aa, Artificial Sequence
  Cyclic GFR-binding peptide
  MOD_RES (29)..(29): Xaa is C or S
LVTAKKHQGQHPKIRIKRMQVPRQGTPVXEL

SEQ ID NO: 56169 - protein, 27 aa, Artificial Sequence
  Cyclic GFR-binding peptide
EELRSMEGILKPKKRVYEMIQVTINSH

SEQ ID NO: 56170 - protein, 37 aa, Artificial Sequence; identical to SEQ ID NO: 13850
  Cyclic GFR-binding peptide
  MOD_RES (2)..(4): Xaa is C or S

SEQ ID NO: 56171 - protein, 27 aa, Artificial Sequence
  Cyclic GFR-binding peptide
VTAKKLKPKKRVYEIKRVQVPRHHVRS

SEQ ID NO: 56172 - protein, 34 aa, Artificial Sequence; identical to SEQ ID NO: 13851
  Cyclic GFR-binding peptide
  MOD_RES (34)..(34): Xaa is C or S

SEQ ID NO: 56173 - protein, 37 aa, Artificial Sequence
  Cyclic GFR-binding peptide
  MOD_RES (2)..(4): Xaa is C or S
EXKXALHDELTVQVEKFIPKKRVIEVKAVKVSRLQVQ

SEQ ID NO: 56174 - protein, 33 aa, Artificial Sequence
  Cyclic GFR-binding peptide
  MOD_RES (1)..(1): Xaa is C or S
XALHDELTSMEGIFIPKKRVIEMIQVTINSLQV

SEQ ID NO: 56175 - protein, 22 aa, Artificial Sequence
  Cyclic GFR-binding peptide
VQVEKFIPKKRVIEVKAVKVSR

SEQ ID NO: 56176 - protein, 30 aa, Artificial Sequence
  Cyclic GFR-binding peptide
  MOD_RES (1)..(1): Xaa is C or S
XQSHEELVQVEKHQGQHPKIRVKAMKVSRQ

SEQ ID NO: 56177 - protein, 31 aa, Artificial Sequence
  Cyclic GFR-binding peptide
LHDELTSMEGIFIPKKRVIEMIQVTINSLQV

SEQ ID NO: 56178 - protein, 34 aa, Artificial Sequence
  Cyclic GFR-binding peptide
  MOD_RES (2)..(4): Xaa is C or S
AXAXELHEELRVTAKKLKPKKRVYEIKRVQVPRH

SEQ ID NO: 56179 - protein, 33 aa, Artificial Sequence; identical to SEQ ID NO: 13855
  Cyclic GFR-binding peptide
  MOD_RES (33)..(33): Xaa is C or S

SEQ ID NO: 56180 - protein, 32 aa, Artificial Sequence
  Cyclic GFR-binding peptide
ELRVTAKKLKPKKRVYEIKRVQVPRHHVRSPQ

SEQ ID NO: 56181 - protein, 38 aa, Artificial Sequence
  Cyclic GFR-binding peptide
  MOD_RES (32)..(32): Xaa is C or S
HEELVTAKKHQGQHPKIRIKRMQVPRQGTPVXELGEDN

SEQ ID NO: 56182 - protein, 41 aa, Artificial Sequence; identical to SEQ ID NO: 13857
  Cyclic GFR-binding peptide
  MOD_RES (2)..(4)..(38): Xaa is C or S

SEQ ID NO: 56183 - protein, 31 aa, Artificial Sequence
  Cyclic GFR-binding peptide
HEELVTAKKHQGQHPKIRIKRMQVPRQGTPV

SEQ ID NO: 56184 - protein, 34 aa, Artificial Sequence
  Cyclic GFR-binding peptide
  MOD_RES (28)..(28): Xaa is C or S
SMEGLHQGQHPKIRMIQMTINSEETPVXELGEDN

SEQ ID NO: 56185 - protein, 41 aa, Artificial Sequence; identical to SEQ ID NO: 13859
  Cyclic GFR-binding peptide
  MOD_RES (1)..(35): Xaa is C or S

SEQ ID NO: 56186 - protein, 36 aa, Artificial Sequence
  Cyclic GFR-binding peptide
  MOD_RES (32)..(32): Xaa is C or S
LRSMEGLLKPKKRVYEMIQVTINSHHVRSPQXKVSS

SEQ ID NO: 56187 - protein, 34 aa, Artificial Sequence
  Cyclic GFR-binding peptide
  MOD_RES (30)..(30): Xaa is C or S
LFVTAKKHQGQHPKIRIKRMQVPREETPVXELGE

SEQ ID NO: 56188 - protein, 30 aa, Artificial Sequence
  Cyclic GFR-binding peptide
RVTAKKLKPKKRVYEIKRVQVPRHHVRSPQ

SEQ ID NO: 56189 - protein, 35 aa, Artificial Sequence
  Cyclic GFR-binding peptide
  MOD_RES (33)..(33): Xaa is C or S
ELTVQVEKFIPKKRVIEVKAVKVSRLQVQTPRXQV

SEQ ID NO: 56190 - protein, 29 aa, Artificial Sequence
  Cyclic GFR-binding peptide
LHEELRSMEGLLKPKKRVYEMIQVTINSH

SEQ ID NO: 56191 - protein, 28 aa, Artificial Sequence
  Cyclic GFR-binding peptide
QSHEELVQVEKHQGQHPKIRVKAMKVSR

SEQ ID NO: 56192 - protein, 39 aa, Artificial Sequence; identical to SEQ ID NO: 13861
  Cyclic GFR-binding peptide
  MOD_RES (2)..(4): Xaa is C or S

SEQ ID NO: 56193 - protein, 33 aa, Artificial Sequence
  Cyclic GFR-binding peptide
  MOD_RES (2)..(4): Xaa is C or S
AXAXELHEELRSMEGILKPKKRVYEMIQVTINS

SEQ ID NO: 56194 - protein, 34 aa, Artificial Sequence
  Cyclic GFR-binding peptide
  MOD_RES (28)..(28): Xaa is C or S
VQVEKHQGQHPKIRVKAMKVSRQGTPVXELGEDN

SEQ ID NO: 56195 - protein, 32 aa, Artificial Sequence
  Cyclic GFR-binding peptide
  MOD_RES (2)..(4): Xaa is C or S
RXEXQSHEELVQVEKHQGQHPKIRVKAMKVSR

SEQ ID NO: 56196 - protein, 40 aa, Artificial Sequence; identical to SEQ ID NO: 13863
  Cyclic GFR-binding peptide
  MOD_RES (1)..(3)..(37): Xaa is C or S

SEQ ID NO: 56197 - protein, 25 aa, Artificial Sequence
  Cyclic GFR-binding peptide
FSMEGLHQGQHPKIRMIQMTINSEE

SEQ ID NO: 56198 - protein, 22 aa, Artificial Sequence
  Cyclic GFR-binding peptide
SMEGIFIPKKRVIEMIQVTINS

SEQ ID NO: 56199 - protein, 30 aa, Artificial Sequence
  Cyclic GFR-binding peptide
DELTSMEGLFIPKKRVIEMIQVTINSLQVQ

SEQ ID NO: 56200 - protein, 33 aa, Artificial Sequence
  Cyclic GFR-binding peptide
  MOD_RES (1)..(3): Xaa is C or S
XKXALHDELTVQVEKFIPKKRVIEVKAVKVSRL

SEQ ID NO: 56201 - protein, 33 aa, Artificial Sequence
  Cyclic GFR-binding peptide
  MOD_RES (32)..(32): Xaa is C or S
LRSMEGLLKPKKRVYEMIQVTINSHHVRSPQXK

SEQ ID NO: 56202 - protein, 32 aa, Artificial Sequence
  Cyclic GFR-binding peptide
  MOD_RES (1)..(3): Xaa is C or S
XEXQSHEELSMEGIHQGQHPKIRMIQMTINSQ

SEQ ID NO: 56203 - protein, 34 aa, Artificial Sequence
  Cyclic GFR-binding peptide
  MOD_RES (2)..(2): Xaa is C or S
EXQSHEELVQVEKHQGQHPKIRVKAMKVSRQGTP

SEQ ID NO: 56204 - protein, 41 aa, Artificial Sequence; identical to SEQ ID NO: 13869
  Cyclic GFR-binding peptide
  MOD_RES (1)..(3)..(37): Xaa is C or S

SEQ ID NO: 56205 - protein, 36 aa, Artificial Sequence; identical to SEQ ID NO: 13871
  Cyclic GFR-binding peptide
  MOD_RES (36)..(36): Xaa is C or S

SEQ ID NO: 56206 - protein, 34 aa, Artificial Sequence
  Cyclic GFR-binding peptide
  MOD_RES (1)..(1): Xaa is C or S
XALHDELTVQVEKFIPKKRVIEVKAVKVSRLQVQ

SEQ ID NO: 56207 - protein, 26 aa, Artificial Sequence
  Cyclic GFR-binding peptide
HEELVTAKKHQGQHPKIRIKRMQVPR

SEQ ID NO: 56208 - protein, 38 aa, Artificial Sequence; identical to SEQ ID NO: 13872
  Cyclic GFR-binding peptide
  MOD_RES (2)..(4): Xaa is C or S

SEQ ID NO: 56209 - protein, 30 aa, Artificial Sequence
  Cyclic GFR-binding peptide
  MOD_RES (1)..(1): Xaa is C or S
XELHEELRSMEGILKPKKRVYEMIQVTINS

SEQ ID NO: 56210 - protein, 36 aa, Artificial Sequence
  Cyclic GFR-binding peptide
  MOD_RES (34)..(34): Xaa is C or S
EELRVTAKKLKPKKRVYEIKRVQVPRHHVRSPQXKV

SEQ ID NO: 56211 - protein, 26 aa, Artificial Sequence
  Cyclic GFR-binding peptide
FSMEGLHQGQHPKIRMIQMTINSEET

SEQ ID NO: 56212 - protein, 33 aa, Artificial Sequence; identical to SEQ ID NO: 13879
  Cyclic GFR-binding peptide

SEQ ID NO: 56213 - protein, 31 aa, Artificial Sequence
  Cyclic GFR-binding peptide
HEELRSMEGILKPKKRVYEMIQVTINSHHVR

SEQ ID NO: 56214 - protein, 29 aa, Artificial Sequence
  Cyclic GFR-binding peptide
  MOD_RES (28)..(28): Xaa is C or S
VTAKKHQGQHPKIRIKRMQVPRQGTPVXE

SEQ ID NO: 56215 - protein, 31 aa, Artificial Sequence
  Cyclic GFR-binding peptide
ELRSMEGILKPKKRVYEMIQVTINSHHVRSP

SEQ ID NO: 56216 - protein, 36 aa, Artificial Sequence; identical to SEQ ID NO: 13883
  Cyclic GFR-binding peptide
  MOD_RES (2)..(36): Xaa is C or S

SEQ ID NO: 56217 - protein, 35 aa, Artificial Sequence; identical to SEQ ID NO: 13884
  Cyclic GFR-binding peptide

SEQ ID NO: 56218 - protein, 28 aa, Artificial Sequence
  Cyclic GFR-binding peptide
QLFVTAKKHQGQHPKIRIKRMQVPREET

SEQ ID NO: 56219 - protein, 44 aa, Artificial Sequence; identical to SEQ ID NO: 13887
  Cyclic GFR-binding peptide
  MOD_RES (2)..(4)..(38): Xaa is C or S

SEQ ID NO: 56220 - protein, 36 aa, Artificial Sequence
  Cyclic GFR-binding peptide
  MOD_RES (2)..(4): Xaa is C or S
RXEXKNHQLFVQVEKHQGQHPKIRVKAMKVSREETP

SEQ ID NO: 56221 - protein, 26 aa, Artificial Sequence
  Cyclic GFR-binding peptide
DELTVQVEKFIPKKRVIEVKAVKVSR

SEQ ID NO: 56222 - protein, 30 aa, Artificial Sequence
  Cyclic GFR-binding peptide
  MOD_RES (30)..(30): Xaa is C or S
LFVQVEKHQGQHPKIRVKAMKVSREETPVX

SEQ ID NO: 56223 - protein, 32 aa, Artificial Sequence
  Cyclic GFR-binding peptide
  MOD_RES (30)..(30): Xaa is C or S
SMEGILKPKKRVYEMIQVTINSHHVRSPQXKV

SEQ ID NO: 56224 - protein, 33 aa, Artificial Sequence
  Cyclic GFR-binding peptide
  MOD_RES (30)..(30): Xaa is C or S
VTAKKLKPKKRVYEIKRVQVPRHHVRSPQXKVS

SEQ ID NO: 56225 - protein, 31 aa, Artificial Sequence
  Cyclic GFR-binding peptide
  MOD_RES (2)..(2): Xaa is C or S
EXQSHEELVTAKKHQGQHPKIRIKRMQVPRQ

SEQ ID NO: 56226 - protein, 34 aa, Artificial Sequence; identical to SEQ ID NO: 13892
  Cyclic GFR-binding peptide

SEQ ID NO: 56227 - protein, 37 aa, Artificial Sequence
  Cyclic GFR-binding peptide
  MOD_RES (32)..(32): Xaa is C or S
HQLFVQVEKHQGQHPKIRVKAMKVSREETPVXELGED

SEQ ID NO: 56228 - protein, 36 aa, Artificial Sequence
  Cyclic GFR-binding peptide
  MOD_RES (33)..(33): Xaa is C or S
ELRVTAKKLKPKKRVYEIKRVQVPRHHVRSPQXKVS

SEQ ID NO: 56229 - protein, 38 aa, Artificial Sequence; identical to SEQ ID NO: 13893
  Cyclic GFR-binding peptide
  MOD_RES (1)..(35): Xaa is C or S

SEQ ID NO: 56230 - protein, 32 aa, Artificial Sequence; identical to SEQ ID NO: 2227
  Cyclic GFR-binding peptide

SEQ ID NO: 56231 - protein, 29 aa, Artificial Sequence
  Cyclic GFR-binding peptide
QSHEELSMEGIHQGQHPKIRMIQMTINSQ

SEQ ID NO: 56232 - protein, 32 aa, Artificial Sequence
  Cyclic GFR-binding peptide
  MOD_RES (2)..(4): Xaa is C or S
RXEXQSHEELVTAKKHQGQHPKIRIKRMQVPR

SEQ ID NO: 56233 - protein, 32 aa, Artificial Sequence
  Cyclic GFR-binding peptide
  MOD_RES (31)..(31): Xaa is C or S
EELVQVEKHQGQHPKIRVKAMKVSRQGTPVXE

SEQ ID NO: 56234 - protein, 37 aa, Artificial Sequence
  Cyclic GFR-binding peptide
  MOD_RES (34)..(34): Xaa is C or S
DELTVQVEKFIPKKRVIEVKAVKVSRLQVQTPRXQVN

SEQ ID NO: 56235 - protein, 36 aa, Artificial Sequence
  Cyclic GFR-binding peptide
  MOD_RES (32)..(32): Xaa is C or S
LTSMEGIFIPKKRVIEMIQVTINSLQVQTPRXQVNR

SEQ ID NO: 56236 - protein, 42 aa, Artificial Sequence; identical to SEQ ID NO: 13896
  Cyclic GFR-binding peptide
  MOD_RES (1)..(3)..(40): Xaa is C or S

SEQ ID NO: 56237 - protein, 42 aa, Artificial Sequence; identical to SEQ ID NO: 13899
  Cyclic GFR-binding peptide
  MOD_RES (1)..(3)..(37): Xaa is C or S

SEQ ID NO: 56238 - protein, 25 aa, Artificial Sequence
  Cyclic GFR-binding peptide
QLFSMEGLHQGQHPKIRMIQMTINS

SEQ ID NO: 56239 - protein, 41 aa, Artificial Sequence; identical to SEQ ID NO: 13900
  Cyclic GFR-binding peptide
  MOD_RES (37)..(37): Xaa is C or S

SEQ ID NO: 56240 - protein, 38 aa, Artificial Sequence; identical to SEQ ID NO: 13901
  Cyclic GFR-binding peptide
  MOD_RES (1)..(3): Xaa is C or S

SEQ ID NO: 56241 - protein, 24 aa, Artificial Sequence
  Cyclic GFR-binding peptide
ELSMEGIHQGQHPKIRMIQMTINS

SEQ ID NO: 56242 - protein, 36 aa, Artificial Sequence; identical to SEQ ID NO: 13902
  Cyclic GFR-binding peptide
  MOD_RES (33)..(33): Xaa is C or S

SEQ ID NO: 56243 - protein, 32 aa, Artificial Sequence
  Cyclic GFR-binding peptide
  MOD_RES (1)..(1): Xaa is C or S
XKNHQLFSMEGLHQGQHPKIRMIQMTINSEET

SEQ ID NO: 56244 - protein, 28 aa, Artificial Sequence
  Cyclic GFR-binding peptide
SMEGLFIPKKRVIEMIQVTINSLQVQTP

SEQ ID NO: 56245 - protein, 37 aa, Artificial Sequence; identical to SEQ ID NO: 13903
  Cyclic GFR-binding peptide
  MOD_RES (36)..(36): Xaa is C or S

SEQ ID NO: 56246 - protein, 25 aa, Artificial Sequence
  Cyclic GFR-binding peptide
VQVEKFIPKKRVIEVKAVKVSRLQV

SEQ ID NO: 56247 - protein, 43 aa, Artificial Sequence; identical to SEQ ID NO: 13905
  Cyclic GFR-binding peptide
  MOD_RES (1)..(3)..(40): Xaa is C or S

SEQ ID NO: 56248 - protein, 28 aa, Artificial Sequence
  Cyclic GFR-binding peptide
  MOD_RES (28)..(28): Xaa is C or S
VTAKKHQGQHPKIRIKRMQVPRQGTPVX

SEQ ID NO: 56249 - protein, 25 aa, Artificial Sequence
  Cyclic GFR-binding peptide
VTAKKHQGQHPKIRIKRMQVPREET

SEQ ID NO: 56250 - protein, 23 aa, Artificial Sequence
  Cyclic GFR-binding peptide
TVQVEKFIPKKRVIEVKAVKVSR

SEQ ID NO: 56251 - protein, 32 aa, Artificial Sequence
  Cyclic GFR-binding peptide
  MOD_RES (30)..(30): Xaa is C or S
LFVTAKKHQGQHPKIRIKRMQVPREETPVXEL

SEQ ID NO: 56252 - protein, 31 aa, Artificial Sequence
  Cyclic GFR-binding peptide
  MOD_RES (2)..(2): Xaa is C or S
EXKNHQLFVTAKKHQGQHPKIRIKRMQVPRE

SEQ ID NO: 56253 - protein, 29 aa, Artificial Sequence
  Cyclic GFR-binding peptide
ELTVQVEKFIPKKRVIEVKAVKVSRLQVQ

SEQ ID NO: 56254 - protein, 39 aa, Artificial Sequence; identical to SEQ ID NO: 13909
  Cyclic GFR-binding peptide
  MOD_RES (37)..(37): Xaa is C or S

SEQ ID NO: 56255 - protein, 35 aa, Artificial Sequence
  Cyclic GFR-binding peptide
  MOD_RES (2)..(4): Xaa is C or S
RXEXQSHEELVTAKKHQGQHPKIRIKRMQVPRQGT

SEQ ID NO: 56256 - protein, 41 aa, Artificial Sequence; identical to SEQ ID NO: 13910
  Cyclic GFR-binding peptide
  MOD_RES (2)..(36): Xaa is C or S

SEQ ID NO: 56257 - protein, 25 aa, Artificial Sequence
  Cyclic GFR-binding peptide
SMEGLLKPKKRVYEMIQVTINSHHV

SEQ ID NO: 56258 - protein, 32 aa, Artificial Sequence
  Cyclic GFR-binding peptide
  MOD_RES (1)..(3): Xaa is C or S
XEXKNHQLFVQVEKHQGQHPKIRVKAMKVSRE

SEQ ID NO: 56259 - protein, 36 aa, Artificial Sequence; identical to SEQ ID NO: 13911
  Cyclic GFR-binding peptide
  MOD_RES (33)..(33): Xaa is C or S

SEQ ID NO: 56260 - protein, 37 aa, Artificial Sequence
  Cyclic GFR-binding peptide
  MOD_RES (31)..(31): Xaa is C or S
EELVQVEKHQGQHPKIRVKAMKVSRQGTPVXELGEDN

SEQ ID NO: 56261 - protein, 30 aa, Artificial Sequence
  Cyclic GFR-binding peptide
QLFSMEGLHQGQHPKIRMIQMTINSEETPV

SEQ ID NO: 56262 - protein, 32 aa, Artificial Sequence
  Cyclic GFR-binding peptide
QSHEELVTAKKHQGQHPKIRIKRMQVPRQGTP

SEQ ID NO: 56263 - protein, 38 aa, Artificial Sequence; identical to SEQ ID NO: 13914
  Cyclic GFR-binding peptide
  MOD_RES (1)..(3)..(37): Xaa is C or S

SEQ ID NO: 56264 - protein, 29 aa, Artificial Sequence
  Cyclic GFR-binding peptide
ELVTAKKHQGQHPKIRIKRMQVPRQGTPV

SEQ ID NO: 56265 - protein, 32 aa, Artificial Sequence
  Cyclic GFR-binding peptide
  MOD_RES (1)..(3): Xaa is C or S
XEXKNHQLFSMEGLHQGQHPKIRMIQMTINSE

SEQ ID NO: 56266 - protein, 33 aa, Artificial Sequence
  Cyclic GFR-binding peptide
  MOD_RES (33)..(33): Xaa is C or S
ELRVTAKKLKPKKRVYEIKRVQVPRHHVRSPQX

SEQ ID NO: 56267 - protein, 27 aa, Artificial Sequence
  Cyclic GFR-binding peptide
VQVEKFIPKKRVIEVKAVKVSRLQVQT

SEQ ID NO: 56268 - protein, 34 aa, Artificial Sequence; identical to SEQ ID NO: 13916
  Cyclic GFR-binding peptide
  MOD_RES (1)..(1): Xaa is C or S

SEQ ID NO: 56269 - protein, 31 aa, Artificial Sequence
  Cyclic GFR-binding peptide
  MOD_RES (28)..(28): Xaa is C or S
VQVEKHQGQHPKIRVKAMKVSRQGTPVXELG

SEQ ID NO: 56270 - protein, 32 aa, Artificial Sequence
  Cyclic GFR-binding peptide
  MOD_RES (31)..(31): Xaa is C or S
TVQVEKFIPKKRVIEVKAVKVSRLQVQTPRXQ

SEQ ID NO: 56271 - protein, 37 aa, Artificial Sequence; identical to SEQ ID NO: 13917
  Cyclic GFR-binding peptide
  MOD_RES (36)..(36): Xaa is C or S

SEQ ID NO: 56272 - protein, 36 aa, Artificial Sequence; identical to SEQ ID NO: 13918
  Cyclic GFR-binding peptide

SEQ ID NO: 56273 - protein, 44 aa, Artificial Sequence; identical to SEQ ID NO: 13919
  Cyclic GFR-binding peptide
  MOD_RES (2)..(4)..(41): Xaa is C or S

SEQ ID NO: 56274 - protein, 32 aa, Artificial Sequence
  Cyclic GFR-binding peptide
  MOD_RES (2)..(4): Xaa is C or S
RXEXKNHQLFVTAKKHQGQHPKIRIKRMQVPR

SEQ ID NO: 56275 - protein, 28 aa, Artificial Sequence
  Cyclic GFR-binding peptide
HEELVQVEKHQGQHPKIRVKAMKVSRQG

SEQ ID NO: 56276 - protein, 36 aa, Artificial Sequence; identical to SEQ ID NO: 13920
  Cyclic GFR-binding peptide
  MOD_RES (33)..(33): Xaa is C or S

SEQ ID NO: 56277 - protein, 33 aa, Artificial Sequence
  Cyclic GFR-binding peptide
DELTSMEGLFIPKKRVIEMIQVTINSLQVQTPR

SEQ ID NO: 56278 - protein, 32 aa, Artificial Sequence
  Cyclic GFR-binding peptide
QSHEELSMEGIHQGQHPKIRMIQMTINSQGTP

SEQ ID NO: 56279 - protein, 30 aa, Artificial Sequence
  Cyclic GFR-binding peptide
  MOD_RES (1)..(1): Xaa is C or S
XELHEELRVTAKKLKPKKRVYEIKRVQVPR

SEQ ID NO: 56280 - protein, 34 aa, Artificial Sequence
  Cyclic GFR-binding peptide
  MOD_RES (2)..(2): Xaa is C or S
AXELHEELRSMEGILKPKKRVYEMIQVTINSHHV

SEQ ID NO: 56281 - protein, 40 aa, Artificial Sequence; identical to SEQ ID NO: 13921
  Cyclic GFR-binding peptide
  MOD_RES (2)..(4)..(38): Xaa is C or S

SEQ ID NO: 56282 - protein, 34 aa, Artificial Sequence
  Cyclic GFR-binding peptide
  MOD_RES (32)..(32): Xaa is C or S
HEELSMEGIHQGQHPKIRMIQMTINSQGTPVXEL

SEQ ID NO: 56283 - protein, 25 aa, Artificial Sequence
  Cyclic GFR-binding peptide
LRSMEGLLKPKKRVYEMIQVTINSH

SEQ ID NO: 56284 - protein, 24 aa, Artificial Sequence
  Cyclic GFR-binding peptide
LFSMEGLHQGQHPKIRMIQMTINS

SEQ ID NO: 56285 - protein, 37 aa, Artificial Sequence; identical to SEQ ID NO: 13923
  Cyclic GFR-binding peptide
  MOD_RES (36)..(36): Xaa is C or S

SEQ ID NO: 56286 - protein, 37 aa, Artificial Sequence; identical to SEQ ID NO: 13924
  Cyclic GFR-binding peptide
  MOD_RES (2)..(2): Xaa is C or S

SEQ ID NO: 56287 - protein, 27 aa, Artificial Sequence
  Cyclic GFR-binding peptide
VTAKKHQGQHPKIRIKRMQVPRQGTPV

SEQ ID NO: 56288 - protein, 44 aa, Artificial Sequence; identical to SEQ ID NO: 13926
  Cyclic GFR-binding peptide
  MOD_RES (2)..(4)..(38): Xaa is C or S

SEQ ID NO: 56289 - protein, 36 aa, Artificial Sequence; identical to SEQ ID NO: 13928
  Cyclic GFR-binding peptide
  MOD_RES (36)..(36): Xaa is C or S

SEQ ID NO: 56290 - protein, 35 aa, Artificial Sequence; identical to SEQ ID NO: 13929
  Cyclic GFR-binding peptide
  MOD_RES (35)..(35): Xaa is C or S

SEQ ID NO: 56291 - protein, 28 aa, Artificial Sequence
  Cyclic GFR-binding peptide
DELTSMEGIFIPKKRVIEMIQVTINSLQ

SEQ ID NO: 56292 - protein, 36 aa, Artificial Sequence
  Cyclic GFR-binding peptide
  MOD_RES (32)..(32): Xaa is C or S
HQLFVTAKKHQGQHPKIRIKRMQVPREETPVXELGE

SEQ ID NO: 56293 - protein, 25 aa, Artificial Sequence
  Cyclic GFR-binding peptide
VTAKKHQGQHPKIRIKRMQVPRQGT

SEQ ID NO: 56294 - protein, 35 aa, Artificial Sequence
  Cyclic GFR-binding peptide
  MOD_RES (2)..(4): Xaa is C or S
RXEXKNHQLFSMEGLHQGQHPKIRMIQMTINSEET

SEQ ID NO: 56295 - protein, 37 aa, Artificial Sequence; identical to SEQ ID NO: 13931
  Cyclic GFR-binding peptide
  MOD_RES (1)..(1): Xaa is C or S

SEQ ID NO: 56296 - protein, 27 aa, Artificial Sequence
  Cyclic GFR-binding peptide
VTAKKHQGQHPKIRIKRMQVPREETPV

SEQ ID NO: 56297 - protein, 43 aa, Artificial Sequence; identical to SEQ ID NO: 13932
  Cyclic GFR-binding peptide
  MOD_RES (2)..(4)..(41): Xaa is C or S

SEQ ID NO: 56298 - protein, 34 aa, Artificial Sequence; identical to SEQ ID NO: 13933
  Cyclic GFR-binding peptide

SEQ ID NO: 56299 - protein, 37 aa, Artificial Sequence; identical to SEQ ID NO: 13934
  Cyclic GFR-binding peptide
  MOD_RES (34)..(34): Xaa is C or S

SEQ ID NO: 56300 - protein, 34 aa, Artificial Sequence
  Cyclic GFR-binding peptide
  MOD_RES (2)..(2): Xaa is C or S
EXKNHQLFVTAKKHQGQHPKIRIKRMQVPREETP

SEQ ID NO: 56301 - protein, 37 aa, Artificial Sequence; identical to SEQ ID NO: 13935
  Cyclic GFR-binding peptide
  MOD_RES (1)..(35): Xaa is C or S

SEQ ID NO: 56302 - protein, 25 aa, Artificial Sequence
  Cyclic GFR-binding peptide
LTSMEGIFIPKKRVIEMIQVTINSL

SEQ ID NO: 56303 - protein, 37 aa, Artificial Sequence; identical to SEQ ID NO: 13936
  Cyclic GFR-binding peptide
  MOD_RES (2)..(4): Xaa is C or S

SEQ ID NO: 56304 - protein, 42 aa, Artificial Sequence; identical to SEQ ID NO: 13938
  Cyclic GFR-binding peptide
  MOD_RES (1)..(3)..(37): Xaa is C or S

SEQ ID NO: 56305 - protein, 39 aa, Artificial Sequence; identical to SEQ ID NO: 13939
  Cyclic GFR-binding peptide
  MOD_RES (1)..(3): Xaa is C or S

SEQ ID NO: 56306 - protein, 32 aa, Artificial Sequence
  Cyclic GFR-binding peptide
ELHEELRVTAKKLKPKKRVYEIKRVQVPRHHV

SEQ ID NO: 56307 - protein, 36 aa, Artificial Sequence
  Cyclic GFR-binding peptide
  MOD_RES (31)..(31): Xaa is C or S
EELVQVEKHQGQHPKIRVKAMKVSRQGTPVXELGED

SEQ ID NO: 56308 - protein, 26 aa, Artificial Sequence
  Cyclic GFR-binding peptide
EELVQVEKHQGQHPKIRVKAMKVSRQ

SEQ ID NO: 56309 - protein, 35 aa, Artificial Sequence; identical to SEQ ID NO: 13940
  Cyclic GFR-binding peptide
  MOD_RES (35)..(35): Xaa is C or S

SEQ ID NO: 56310 - protein, 36 aa, Artificial Sequence; identical to SEQ ID NO: 13941
  Cyclic GFR-binding peptide
  MOD_RES (33)..(33): Xaa is C or S

SEQ ID NO: 56311 - protein, 36 aa, Artificial Sequence
  Cyclic GFR-binding peptide
  MOD_RES (34)..(34): Xaa is C or S
EELRSMEGLLKPKKRVYEMIQVTINSHHVRSPQXKV

SEQ ID NO: 56312 - protein, 38 aa, Artificial Sequence; identical to SEQ ID NO: 13943
  Cyclic GFR-binding peptide
  MOD_RES (2)..(4)..(38): Xaa is C or S

SEQ ID NO: 56313 - protein, 34 aa, Artificial Sequence
  Cyclic GFR-binding peptide
  MOD_RES (33)..(33): Xaa is C or S
ELRVTAKKLKPKKRVYEIKRVQVPRHHVRSPQXK

SEQ ID NO: 56314 - protein, 43 aa, Artificial Sequence; identical to SEQ ID NO: 13945
  Cyclic GFR-binding peptide
  MOD_RES (2)..(4)..(41): Xaa is C or S

SEQ ID NO: 56315 - protein, 29 aa, Artificial Sequence
  Cyclic GFR-binding peptide
LFVQVEKHQGQHPKIRVKAMKVSREETPV

SEQ ID NO: 56316 - protein, 30 aa, Artificial Sequence
  Cyclic GFR-binding peptide
HEELVQVEKHQGQHPKIRVKAMKVSRQGTP

SEQ ID NO: 56317 - protein, 38 aa, Artificial Sequence; identical to SEQ ID NO: 13946
  Cyclic GFR-binding peptide
  MOD_RES (36)..(36): Xaa is C or S

SEQ ID NO: 56318 - protein, 35 aa, Artificial Sequence; identical to SEQ ID NO: 13947
  Cyclic GFR-binding peptide

SEQ ID NO: 56319 - protein, 33 aa, Artificial Sequence
  Cyclic GFR-binding peptide
  MOD_RES (29)..(29): Xaa is C or S
LVTAKKHQGQHPKIRIKRMQVPRQGTPVXELGE

SEQ ID NO: 56320 - protein, 42 aa, Artificial Sequence; identical to SEQ ID NO: 13948
  Cyclic GFR-binding peptide
  MOD_RES (2)..(39): Xaa is C or S

SEQ ID NO: 56321 - protein, 22 aa, Artificial Sequence
  Cyclic GFR-binding peptide
VTAKKHQGQHPKIRIKRMQVPR

SEQ ID NO: 56322 - protein, 34 aa, Artificial Sequence
  Cyclic GFR-binding peptide
  MOD_RES (31)..(31): Xaa is C or S
TSMEGLFIPKKRVIEMIQVTINSLQVQTPRXQVN

SEQ ID NO: 56323 - protein, 39 aa, Artificial Sequence; identical to SEQ ID NO: 13950
  Cyclic GFR-binding peptide
  MOD_RES (2)..(39): Xaa is C or S

SEQ ID NO: 56324 - protein, 27 aa, Artificial Sequence
  Cyclic GFR-binding peptide
RSMEGILKPKKRVYEMIQVTINSHHVR

SEQ ID NO: 56325 - protein, 25 aa, Artificial Sequence
  Cyclic GFR-binding peptide
LRSMEGILKPKKRVYEMIQVTINSH

SEQ ID NO: 56326 - protein, 41 aa, Artificial Sequence; identical to SEQ ID NO: 13952
  Cyclic GFR-binding peptide
  MOD_RES (2)..(4)..(41): Xaa is C or S

SEQ ID NO: 56327 - protein, 39 aa, Artificial Sequence; identical to SEQ ID NO: 13954
  Cyclic GFR-binding peptide
  MOD_RES (2)..(39): Xaa is C or S

SEQ ID NO: 56328 - protein, 42 aa, Artificial Sequence; identical to SEQ ID NO: 13955
  Cyclic GFR-binding peptide
  MOD_RES (2)..(39): Xaa is C or S

SEQ ID NO: 56329 - protein, 33 aa, Artificial Sequence
  Cyclic GFR-binding peptide
ALHDELTSMEGIFIPKKRVIEMIQVTINSLQVQ

SEQ ID NO: 56330 - protein, 31 aa, Artificial Sequence
  Cyclic GFR-binding peptide
  MOD_RES (1)..(1): Xaa is C or S
XQSHEELSMEGIHQGQHPKIRMIQMTINSQG

SEQ ID NO: 56331 - protein, 30 aa, Artificial Sequence
  Cyclic GFR-binding peptide
  MOD_RES (30)..(30): Xaa is C or S
ELVTAKKHQGQHPKIRIKRMQVPRQGTPVX

SEQ ID NO: 56332 - protein, 33 aa, Artificial Sequence
  Cyclic GFR-binding peptide
  MOD_RES (2)..(2): Xaa is C or S
EXKNHQLFVTAKKHQGQHPKIRIKRMQVPREET

SEQ ID NO: 56333 - protein, 37 aa, Artificial Sequence; identical to SEQ ID NO: 13957
  Cyclic GFR-binding peptide
  MOD_RES (1)..(1): Xaa is C or S

SEQ ID NO: 56334 - protein, 36 aa, Artificial Sequence
  Cyclic GFR-binding peptide
  MOD_RES (32)..(32): Xaa is C or S
LRSMEGILKPKKRVYEMIQVTINSHHVRSPQXKVSS

SEQ ID NO: 56335 - protein, 32 aa, Artificial Sequence
  Cyclic GFR-binding peptide
  MOD_RES (2)..(2): Xaa is C or S
KXALHDELTVQVEKFIPKKRVIEVKAVKVSRL

SEQ ID NO: 56336 - protein, 39 aa, Artificial Sequence; identical to SEQ ID NO: 13959
  Cyclic GFR-binding peptide
  MOD_RES (2)..(4)..(38): Xaa is C or S

SEQ ID NO: 56337 - protein, 31 aa, Artificial Sequence
  Cyclic GFR-binding peptide
ELTSMEGIFIPKKRVIEMIQVTINSLQVQTP

SEQ ID NO: 56338 - protein, 41 aa, Artificial Sequence; identical to SEQ ID NO: 13960
  Cyclic GFR-binding peptide
  MOD_RES (1)..(3)..(40): Xaa is C or S

SEQ ID NO: 56339 - protein, 35 aa, Artificial Sequence
  Cyclic GFR-binding peptide
  MOD_RES (31)..(31): Xaa is C or S
RSMEGILKPKKRVYEMIQVTINSHHVRSPQXKVSS

SEQ ID NO: 56340 - protein, 34 aa, Artificial Sequence
  Cyclic GFR-binding peptide
  MOD_RES (2)..(4): Xaa is C or S
AXAXELHEELRSMEGLLKPKKRVYEMIQVTINSH

SEQ ID NO: 56341 - protein, 31 aa, Artificial Sequence
  Cyclic GFR-binding peptide
LRVTAKKLKPKKRVYEIKRVQVPRHHVRSPQ

SEQ ID NO: 56342 - protein, 33 aa, Artificial Sequence
  Cyclic GFR-binding peptide
  MOD_RES (2)..(4): Xaa is C or S
RXEXKNHQLFSMEGLHQGQHPKIRMIQMTINSE

SEQ ID NO: 56343 - protein, 27 aa, Artificial Sequence
  Cyclic GFR-binding peptide
HQLFSMEGLHQGQHPKIRMIQMTINSE

SEQ ID NO: 56344 - protein, 32 aa, Artificial Sequence
  Cyclic GFR-binding peptide
ELTVQVEKFIPKKRVIEVKAVKVSRLQVQTPR

SEQ ID NO: 56345 - protein, 32 aa, Artificial Sequence
  Cyclic GFR-binding peptide
  MOD_RES (30)..(30): Xaa is C or S
ELSMEGIHQGQHPKIRMIQMTINSQGTPVXEL

SEQ ID NO: 56346 - protein, 28 aa, Artificial Sequence
  Cyclic GFR-binding peptide
FSMEGLHQGQHPKIRMIQMTINSEETPV

SEQ ID NO: 56347 - protein, 31 aa, Artificial Sequence
  Cyclic GFR-binding peptide
LRSMEGILKPKKRVYEMIQVTINSHHVRSPQ

SEQ ID NO: 56348 - protein, 29 aa, Artificial Sequence
  Cyclic GFR-binding peptide
ELHEELRVTAKKLKPKKRVYEIKRVQVPR

SEQ ID NO: 56349 - protein, 35 aa, Artificial Sequence; identical to SEQ ID NO: 13969
  Cyclic GFR-binding peptide

SEQ ID NO: 56350 - protein, 34 aa, Artificial Sequence
  Cyclic GFR-binding peptide
  MOD_RES (28)..(28): Xaa is C or S
VQVEKHQGQHPKIRVKAMKVSREETPVXELGEDN

SEQ ID NO: 56351 - protein, 29 aa, Artificial Sequence
  Cyclic GFR-binding peptide
ELHEELRSMEGLLKPKKRVYEMIQVTINS

SEQ ID NO: 56352 - protein, 22 aa, Artificial Sequence
  Cyclic GFR-binding peptide
SMEGLFIPKKRVIEMIQVTINS

SEQ ID NO: 56353 - protein, 41 aa, Artificial Sequence; identical to SEQ ID NO: 13974
  Cyclic GFR-binding peptide
  MOD_RES (1)..(3)..(37): Xaa is C or S

SEQ ID NO: 56354 - protein, 25 aa, Artificial Sequence
  Cyclic GFR-binding peptide
LFVQVEKHQGQHPKIRVKAMKVSRE

SEQ ID NO: 56355 - protein, 24 aa, Artificial Sequence
  Cyclic GFR-binding peptide
VQVEKHQGQHPKIRVKAMKVSRQG

SEQ ID NO: 56356 - protein, 32 aa, Artificial Sequence; identical to SEQ ID NO: 13976
  Cyclic GFR-binding peptide

SEQ ID NO: 56357 - protein, 36 aa, Artificial Sequence; identical to SEQ ID NO: 13977
  Cyclic GFR-binding peptide
  MOD_RES (34)..(34): Xaa is C or S

SEQ ID NO: 56358 - protein, 36 aa, Artificial Sequence
  Cyclic GFR-binding peptide
  MOD_RES (31)..(31): Xaa is C or S
QLFVQVEKHQGQHPKIRVKAMKVSREETPVXELGED

SEQ ID NO: 56359 - protein, 35 aa, Artificial Sequence
  Cyclic GFR-binding peptide
  MOD_RES (34)..(34): Xaa is C or S
DELTSMEGLFIPKKRVIEMIQVTINSLQVQTPRXQ

SEQ ID NO: 56360 - protein, 32 aa, Artificial Sequence
  Cyclic GFR-binding peptide
  MOD_RES (30)..(30): Xaa is C or S
SMEGLLKPKKRVYEMIQVTINSHHVRSPQXKV

SEQ ID NO: 56361 - protein, 31 aa, Artificial Sequence
  Cyclic GFR-binding peptide
LTSMEGLFIPKKRVIEMIQVTINSLQVQTPR

SEQ ID NO: 56362 - protein, 35 aa, Artificial Sequence; identical to SEQ ID NO: 13978
  Cyclic GFR-binding peptide
  MOD_RES (34)..(34): Xaa is C or S

SEQ ID NO: 56363 - protein, 29 aa, Artificial Sequence
  Cyclic GFR-binding peptide
  MOD_RES (1)..(1): Xaa is C or S
XKNHQLFVQVEKHQGQHPKIRVKAMKVSR

SEQ ID NO: 56364 - protein, 31 aa, Artificial Sequence
  Cyclic GFR-binding peptide
  MOD_RES (30)..(30): Xaa is C or S
ELVTAKKHQGQHPKIRIKRMQVPRQGTPVXE

SEQ ID NO: 56365 - protein, 36 aa, Artificial Sequence
  Cyclic GFR-binding peptide
  MOD_RES (2)..(4): Xaa is C or S
EXKXALHDELTVQVEKFIPKKRVIEVKAVKVSRLQV

SEQ ID NO: 56366 - protein, 28 aa, Artificial Sequence
  Cyclic GFR-binding peptide
HEELRSMEGILKPKKRVYEMIQVTINSH

SEQ ID NO: 56367 - protein, 43 aa, Artificial Sequence; identical to SEQ ID NO: 13982
  Cyclic GFR-binding peptide
  MOD_RES (2)..(4)..(38): Xaa is C or S

SEQ ID NO: 56368 - protein, 33 aa, Artificial Sequence; identical to SEQ ID NO: 13983
  Cyclic GFR-binding peptide

SEQ ID NO: 56369 - protein, 35 aa, Artificial Sequence
  Cyclic GFR-binding peptide
  MOD_RES (31)..(31): Xaa is C or S
QLFVTAKKHQGQHPKIRIKRMQVPREETPVXELGE

SEQ ID NO: 56370 - protein, 42 aa, Artificial Sequence; identical to SEQ ID NO: 13984
  Cyclic GFR-binding peptide
  MOD_RES (1)..(38): Xaa is C or S

SEQ ID NO: 56371 - protein, 36 aa, Artificial Sequence
  Cyclic GFR-binding peptide
  MOD_RES (34)..(34): Xaa is C or S
EELRSMEGILKPKKRVYEMIQVTINSHHVRSPQXKV

SEQ ID NO: 56372 - protein, 40 aa, Artificial Sequence; identical to SEQ ID NO: 13985
  Cyclic GFR-binding peptide
  MOD_RES (36)..(36): Xaa is C or S

SEQ ID NO: 56373 - protein, 35 aa, Artificial Sequence
  Cyclic GFR-binding peptide
  MOD_RES (2)..(4): Xaa is C or S
AXAXELHEELRSMEGILKPKKRVYEMIQVTINSHH

SEQ ID NO: 56374 - protein, 27 aa, Artificial Sequence
  Cyclic GFR-binding peptide
RVTAKKLKPKKRVYEIKRVQVPRHHVR

SEQ ID NO: 56375 - protein, 36 aa, Artificial Sequence
  Cyclic GFR-binding peptide
  MOD_RES (1)..(3): Xaa is C or S
XKXALHDELTSMEGIFIPKKRVIEMIQVTINSLQVQ

SEQ ID NO: 56376 - protein, 35 aa, Artificial Sequence; identical to SEQ ID NO: 13987
  Cyclic GFR-binding peptide

SEQ ID NO: 56377 - protein, 36 aa, Artificial Sequence; identical to SEQ ID NO: 13988
  Cyclic GFR-binding peptide
  MOD_RES (35)..(35): Xaa is C or S

SEQ ID NO: 56378 - protein, 30 aa, Artificial Sequence
  Cyclic GFR-binding peptide
SHEELVQVEKHQGQHPKIRVKAMKVSRQGT

SEQ ID NO: 56379 - protein, 34 aa, Artificial Sequence
  Cyclic GFR-binding peptide
  MOD_RES (2)..(4): Xaa is C or S
RXEXKNHQLFSMEGLHQGQHPKIRMIQMTINSEE

SEQ ID NO: 56380 - protein, 30 aa, Artificial Sequence
  Cyclic GFR-binding peptide
  MOD_RES (30)..(30): Xaa is C or S
LFSMEGLHQGQHPKIRMIQMTINSEETPVX

SEQ ID NO: 56381 - protein, 41 aa, Artificial Sequence; identical to SEQ ID NO: 13990
  Cyclic GFR-binding peptide
  MOD_RES (1)..(38): Xaa is C or S

SEQ ID NO: 56382 - protein, 35 aa, Artificial Sequence; identical to SEQ ID NO: 13992
  Cyclic GFR-binding peptide

SEQ ID NO: 56383 - protein, 26 aa, Artificial Sequence
  Cyclic GFR-binding peptide
VQVEKHQGQHPKIRVKAMKVSREETP

SEQ ID NO: 56384 - protein, 39 aa, Artificial Sequence; identical to SEQ ID NO: 13994
  Cyclic GFR-binding peptide
  MOD_RES (1)..(3)..(37): Xaa is C or S

SEQ ID NO: 56385 - protein, 33 aa, Artificial Sequence; identical to SEQ ID NO: 13995
  Cyclic GFR-binding peptide

SEQ ID NO: 56386 - protein, 37 aa, Artificial Sequence; identical to SEQ ID NO: 13996
  Cyclic GFR-binding peptide
  MOD_RES (1)..(3): Xaa is C or S

SEQ ID NO: 56387 - protein, 31 aa, Artificial Sequence
  Cyclic GFR-binding peptide
  MOD_RES (2)..(2): Xaa is C or S
EXKNHQLFSMEGLHQGQHPKIRMIQMTINSE

SEQ ID NO: 56388 - protein, 29 aa, Artificial Sequence
  Cyclic GFR-binding peptide
RVTAKKLKPKKRVYEIKRVQVPRHHVRSP

SEQ ID NO: 56389 - protein, 35 aa, Artificial Sequence
  Cyclic GFR-binding peptide
  MOD_RES (34)..(34): Xaa is C or S
DELTSMEGIFIPKKRVIEMIQVTINSLQVQTPRXQ

SEQ ID NO: 56390 - protein, 34 aa, Artificial Sequence
  Cyclic GFR-binding peptide
  MOD_RES (29)..(29): Xaa is C or S
LVTAKKHQGQHPKIRIKRMQVPRQGTPVXELGED

SEQ ID NO: 56391 - protein, 38 aa, Artificial Sequence; identical to SEQ ID NO: 14000
  Cyclic GFR-binding peptide
  MOD_RES (2)..(36): Xaa is C or S

SEQ ID NO: 56392 - protein, 39 aa, Artificial Sequence; identical to SEQ ID NO: 13999
  Cyclic GFR-binding peptide
  MOD_RES (1)..(38): Xaa is C or S

SEQ ID NO: 56393 - protein, 22 aa, Artificial Sequence
  Cyclic GFR-binding peptide
SMEGILKPKKRVYEMIQVTINS

SEQ ID NO: 56394 - protein, 37 aa, Artificial Sequence; identical to SEQ ID NO: 14001
  Cyclic GFR-binding peptide
  MOD_RES (1)..(3): Xaa is C or S

SEQ ID NO: 56395 - protein, 33 aa, Artificial Sequence
  Cyclic GFR-binding peptide
  MOD_RES (29)..(29): Xaa is C or S
FVQVEKHQGQHPKIRVKAMKVSREETPVXELGE

SEQ ID NO: 56396 - protein, 43 aa, Artificial Sequence; identical to SEQ ID NO: 14002
  Cyclic GFR-binding peptide
  MOD_RES (2)..(4)..(38): Xaa is C or S

SEQ ID NO: 56397 - protein, 37 aa, Artificial Sequence; identical to SEQ ID NO: 14003
  Cyclic GFR-binding peptide
  MOD_RES (37)..(37): Xaa is C or S

SEQ ID NO: 56398 - protein, 33 aa, Artificial Sequence
  Cyclic GFR-binding peptide
  MOD_RES (28)..(28): Xaa is C or S
VTAKKHQGQHPKIRIKRMQVPREETPVXELGED

SEQ ID NO: 56399 - protein, 35 aa, Artificial Sequence
  Cyclic GFR-binding peptide
  MOD_RES (2)..(2): Xaa is C or S
KXALHDELTSMEGLFIPKKRVIEMIQVTINSLQVQ

SEQ ID NO: 56400 - protein, 35 aa, Artificial Sequence
  Cyclic GFR-binding peptide
  MOD_RES (30)..(30): Xaa is C or S
ELSMEGIHQGQHPKIRMIQMTINSQGTPVXELGED

SEQ ID NO: 56401 - protein, 30 aa, Artificial Sequence
  Cyclic GFR-binding peptide
TVQVEKFIPKKRVIEVKAVKVSRLQVQTPR

SEQ ID NO: 56402 - protein, 38 aa, Artificial Sequence; identical to SEQ ID NO: 14007
  Cyclic GFR-binding peptide
  MOD_RES (1)..(38): Xaa is C or S

SEQ ID NO: 56403 - protein, 31 aa, Artificial Sequence
  Cyclic GFR-binding peptide
QSHEELVTAKKHQGQHPKIRIKRMQVPRQGT

SEQ ID NO: 56404 - protein, 29 aa, Artificial Sequence
  Cyclic GFR-binding peptide
  MOD_RES (29)..(29): Xaa is C or S
FVTAKKHQGQHPKIRIKRMQVPREETPVX

SEQ ID NO: 56405 - protein, 43 aa, Artificial Sequence; identical to SEQ ID NO: 14009
  Cyclic GFR-binding peptide
  MOD_RES (2)..(39): Xaa is C or S

SEQ ID NO: 56406 - protein, 25 aa, Artificial Sequence
  Cyclic GFR-binding peptide
SMEGIFIPKKRVIEMIQVTINSLQV

SEQ ID NO: 56407 - protein, 38 aa, Artificial Sequence; identical to SEQ ID NO: 14010
  Cyclic GFR-binding peptide
  MOD_RES (36)..(36): Xaa is C or S

SEQ ID NO: 56408 - protein, 34 aa, Artificial Sequence; identical to SEQ ID NO: 14012
  Cyclic GFR-binding peptide

SEQ ID NO: 56409 - protein, 26 aa, Artificial Sequence
  Cyclic GFR-binding peptide
LTSMEGIFIPKKRVIEMIQVTINSLQ

SEQ ID NO: 56410 - protein, 26 aa, Artificial Sequence
  Cyclic GFR-binding peptide
VTAKKLKPKKRVYEIKRVQVPRHHVR

SEQ ID NO: 56411 - protein, 28 aa, Artificial Sequence
  Cyclic GFR-binding peptide
  MOD_RES (28)..(28): Xaa is C or S
VTAKKHQGQHPKIRIKRMQVPREETPVX

SEQ ID NO: 56412 - protein, 24 aa, Artificial Sequence
  Cyclic GFR-binding peptide
ELVQVEKHQGQHPKIRVKAMKVSR

SEQ ID NO: 56413 - protein, 39 aa, Artificial Sequence; identical to SEQ ID NO: 14019
  Cyclic GFR-binding peptide
  MOD_RES (33)..(33): Xaa is C or S

SEQ ID NO: 56414 - protein, 30 aa, Artificial Sequence
  Cyclic GFR-binding peptide
  MOD_RES (30)..(30): Xaa is C or S
SMEGLFIPKKRVIEMIQVTINSLQVQTPRX

SEQ ID NO: 56415 - protein, 40 aa, Artificial Sequence; identical to SEQ ID NO: 14022
  Cyclic GFR-binding peptide
  MOD_RES (2)..(36): Xaa is C or S

SEQ ID NO: 56416 - protein, 33 aa, Artificial Sequence
  Cyclic GFR-binding peptide
  MOD_RES (32)..(32): Xaa is C or S
HEELVQVEKHQGQHPKIRVKAMKVSRQGTPVXE

SEQ ID NO: 56417 - protein, 39 aa, Artificial Sequence; identical to SEQ ID NO: 14023
  Cyclic GFR-binding peptide
  MOD_RES (1)..(3)..(37): Xaa is C or S

SEQ ID NO: 56418 - protein, 34 aa, Artificial Sequence
  Cyclic GFR-binding peptide
  MOD_RES (2)..(2): Xaa is C or S
EXQSHEELVTAKKHQGQHPKIRIKRMQVPRQGTP

SEQ ID NO: 56419 - protein, 28 aa, Artificial Sequence
  Cyclic GFR-binding peptide
NHQLFSMEGLHQGQHPKIRMIQMTINSE

SEQ ID NO: 56420 - protein, 30 aa, Artificial Sequence
  Cyclic GFR-binding peptide
HDELTSMEGLFIPKKRVIEMIQVTINSLQV

SEQ ID NO: 56421 - protein, 34 aa, Artificial Sequence
  Cyclic GFR-binding peptide
  MOD_RES (2)..(4): Xaa is C or S
EXKXALHDELTVQVEKFIPKKRVIEVKAVKVSRL

SEQ ID NO: 56422 - protein, 31 aa, Artificial Sequence
  Cyclic GFR-binding peptide
  MOD_RES (30)..(30): Xaa is C or S
VTAKKLKPKKRVYEIKRVQVPRHHVRSPQXK

SEQ ID NO: 56423 - protein, 24 aa, Artificial Sequence
  Cyclic GFR-binding peptide
SMEGIHQGQHPKIRMIQMTINSQG

SEQ ID NO: 56424 - protein, 27 aa, Artificial Sequence
  Cyclic GFR-binding peptide
TSMEGLFIPKKRVIEMIQVTINSLQVQ

SEQ ID NO: 56425 - protein, 40 aa, Artificial Sequence; identical to SEQ ID NO: 14030
  Cyclic GFR-binding peptide
  MOD_RES (2)..(36): Xaa is C or S

SEQ ID NO: 56426 - protein, 29 aa, Artificial Sequence
  Cyclic GFR-binding peptide
NHQLFVTAKKHQGQHPKIRIKRMQVPREE

SEQ ID NO: 56427 - protein, 39 aa, Artificial Sequence; identical to SEQ ID NO: 14032
  Cyclic GFR-binding peptide
  MOD_RES (1)..(3)..(37): Xaa is C or S

SEQ ID NO: 56428 - protein, 33 aa, Artificial Sequence
  Cyclic GFR-binding peptide
  MOD_RES (31)..(31): Xaa is C or S
EELSMEGIHQGQHPKIRMIQMTINSQGTPVXEL

SEQ ID NO: 56429 - protein, 38 aa, Artificial Sequence; identical to SEQ ID NO: 14033
  Cyclic GFR-binding peptide
  MOD_RES (33)..(33): Xaa is C or S

SEQ ID NO: 56430 - protein, 33 aa, Artificial Sequence
  Cyclic GFR-binding peptide
  MOD_RES (1)..(1): Xaa is C or S
XKNHQLFVTAKKHQGQHPKIRIKRMQVPREETP

SEQ ID NO: 56431 - protein, 41 aa, Artificial Sequence; identical to SEQ ID NO: 14036
  Cyclic GFR-binding peptide
  MOD_RES (2)..(36): Xaa is C or S

SEQ ID NO: 56432 - protein, 23 aa, Artificial Sequence
  Cyclic GFR-binding peptide
RSMEGLLKPKKRVYEMIQVTINS

SEQ ID NO: 56433 - protein, 24 aa, Artificial Sequence
  Cyclic GFR-binding peptide
SMEGLFIPKKRVIEMIQVTINSLQ

SEQ ID NO: 56434 - protein, 26 aa, Artificial Sequence
  Cyclic GFR-binding peptide
EELSMEGIHQGQHPKIRMIQMTINSQ

SEQ ID NO: 56435 - protein, 36 aa, Artificial Sequence; identical to SEQ ID NO: 14039
  Cyclic GFR-binding peptide
  MOD_RES (1)..(3): Xaa is C or S

SEQ ID NO: 56436 - protein, 34 aa, Artificial Sequence
  Cyclic GFR-binding peptide
  MOD_RES (32)..(32): Xaa is C or S
HQLFVQVEKHQGQHPKIRVKAMKVSREETPVXEL

SEQ ID NO: 56437 - protein, 25 aa, Artificial Sequence
  Cyclic GFR-binding peptide
SMEGLHQGQHPKIRMIQMTINSEET

SEQ ID NO: 56438 - protein, 34 aa, Artificial Sequence
  Cyclic GFR-binding peptide
  MOD_RES (1)..(3): Xaa is C or S
XEXQSHEELVQVEKHQGQHPKIRVKAMKVSRQGT

SEQ ID NO: 56439 - protein, 31 aa, Artificial Sequence
  Cyclic GFR-binding peptide
ELRSMEGLLKPKKRVYEMIQVTINSHHVRSP

SEQ ID NO: 56440 - protein, 27 aa, Artificial Sequence
  Cyclic GFR-binding peptide
ELTSMEGLFIPKKRVIEMIQVTINSLQ

SEQ ID NO: 56441 - protein, 27 aa, Artificial Sequence
  Cyclic GFR-binding peptide
ELTSMEGIFIPKKRVIEMIQVTINSLQ

SEQ ID NO: 56442 - protein, 37 aa, Artificial Sequence
  Cyclic GFR-binding peptide
  MOD_RES (32)..(32): Xaa is C or S
HEELVQVEKHQGQHPKIRVKAMKVSRQGTPVXELGED

SEQ ID NO: 56443 - protein, 37 aa, Artificial Sequence; identical to SEQ ID NO: 14044
  Cyclic GFR-binding peptide
  MOD_RES (36)..(36): Xaa is C or S

SEQ ID NO: 56444 - protein, 31 aa, Artificial Sequence
  Cyclic GFR-binding peptide
  MOD_RES (1)..(1): Xaa is C or S
XELHEELRSMEGILKPKKRVYEMIQVTINSH

SEQ ID NO: 56445 - protein, 30 aa, Artificial Sequence
  Cyclic GFR-binding peptide
  MOD_RES (30)..(30): Xaa is C or S
LFVTAKKHQGQHPKIRIKRMQVPREETPVX

SEQ ID NO: 56446 - protein, 35 aa, Artificial Sequence
  Cyclic GFR-binding peptide
  MOD_RES (31)..(31): Xaa is C or S
QLFSMEGLHQGQHPKIRMIQMTINSEETPVXELGE

SEQ ID NO: 56447 - protein, 38 aa, Artificial Sequence; identical to SEQ ID NO: 14047
  Cyclic GFR-binding peptide
  MOD_RES (37)..(37): Xaa is C or S

SEQ ID NO: 56448 - protein, 42 aa, Artificial Sequence; identical to SEQ ID NO: 14048
  Cyclic GFR-binding peptide
  MOD_RES (2)..(39): Xaa is C or S

SEQ ID NO: 56449 - protein, 25 aa, Artificial Sequence
  Cyclic GFR-binding peptide
TVQVEKFIPKKRVIEVKAVKVSRLQ

SEQ ID NO: 56450 - protein, 40 aa, Artificial Sequence; identical to SEQ ID NO: 14049
  Cyclic GFR-binding peptide
  MOD_RES (2)..(36): Xaa is C or S

SEQ ID NO: 56451 - protein, 27 aa, Artificial Sequence
  Cyclic GFR-binding peptide
LTSMEGIFIPKKRVIEMIQVTINSLQV

SEQ ID NO: 56452 - protein, 36 aa, Artificial Sequence; identical to SEQ ID NO: 14050
  Cyclic GFR-binding peptide
  MOD_RES (1)..(1): Xaa is C or S

SEQ ID NO: 56453 - protein, 42 aa, Artificial Sequence; identical to SEQ ID NO: 14051
  Cyclic GFR-binding peptide
  MOD_RES (2)..(4)..(41): Xaa is C or S

SEQ ID NO: 56454 - protein, 34 aa, Artificial Sequence; identical to SEQ ID NO: 14053
  Cyclic GFR-binding peptide
  MOD_RES (34)..(34): Xaa is C or S

SEQ ID NO: 56455 - protein, 35 aa, Artificial Sequence
  Cyclic GFR-binding peptide
  MOD_RES (31)..(31): Xaa is C or S
RSMEGLLKPKKRVYEMIQVTINSHHVRSPQXKVSS

SEQ ID NO: 56456 - protein, 44 aa, Artificial Sequence; identical to SEQ ID NO: 14058
  Cyclic GFR-binding peptide
  MOD_RES (1)..(3)..(40): Xaa is C or S

SEQ ID NO: 56457 - protein, 31 aa, Artificial Sequence
  Cyclic GFR-binding peptide
HDELTSMEGLFIPKKRVIEMIQVTINSLQVQ

SEQ ID NO: 56458 - protein, 31 aa, Artificial Sequence
  Cyclic GFR-binding peptide
KNHQLFSMEGLHQGQHPKIRMIQMTINSEET

SEQ ID NO: 56459 - protein, 30 aa, Artificial Sequence
  Cyclic GFR-binding peptide
  MOD_RES (1)..(1): Xaa is C or S
XALHDELTVQVEKFIPKKRVIEVKAVKVSR

SEQ ID NO: 56460 - protein, 33 aa, Artificial Sequence
  Cyclic GFR-binding peptide
  MOD_RES (30)..(30): Xaa is C or S
ELSMEGIHQGQHPKIRMIQMTINSQGTPVXELG

SEQ ID NO: 56461 - protein, 41 aa, Artificial Sequence; identical to SEQ ID NO: 14060
  Cyclic GFR-binding peptide
  MOD_RES (37)..(37): Xaa is C or S

SEQ ID NO: 56462 - protein, 34 aa, Artificial Sequence; identical to SEQ ID NO: 14061
  Cyclic GFR-binding peptide
  MOD_RES (33)..(33): Xaa is C or S

SEQ ID NO: 56463 - protein, 25 aa, Artificial Sequence
  Cyclic GFR-binding peptide
RVTAKKLKPKKRVYEIKRVQVPRHH

SEQ ID NO: 56464 - protein, 39 aa, Artificial Sequence; identical to SEQ ID NO: 14063
  Cyclic GFR-binding peptide
  MOD_RES (35)..(35): Xaa is C or S

SEQ ID NO: 56465 - protein, 42 aa, Artificial Sequence; identical to SEQ ID NO: 14064
  Cyclic GFR-binding peptide
  MOD_RES (1)..(38): Xaa is C or S

SEQ ID NO: 56466 - protein, 35 aa, Artificial Sequence
  Cyclic GFR-binding peptide
  MOD_RES (29)..(29): Xaa is C or S
FVQVEKHQGQHPKIRVKAMKVSREETPVXELGEDN

SEQ ID NO: 56467 - protein, 25 aa, Artificial Sequence
  Cyclic GFR-binding peptide
ELSMEGIHQGQHPKIRMIQMTINSQ

SEQ ID NO: 56468 - protein, 34 aa, Artificial Sequence
  Cyclic GFR-binding peptide
  MOD_RES (1)..(1): Xaa is C or S
XALHDELTSMEGLFIPKKRVIEMIQVTINSLQVQ

SEQ ID NO: 56469 - protein, 26 aa, Artificial Sequence
  Cyclic GFR-binding peptide
DELTSMEGIFIPKKRVIEMIQVTINS

SEQ ID NO: 56470 - protein, 29 aa, Artificial Sequence
  Cyclic GFR-binding peptide
LFSMEGLHQGQHPKIRMIQMTINSEETPV

SEQ ID NO: 56471 - protein, 33 aa, Artificial Sequence
  Cyclic GFR-binding peptide
  MOD_RES (2)..(4): Xaa is C or S
RXEXQSHEELVQVEKHQGQHPKIRVKAMKVSRQ

SEQ ID NO: 56472 - protein, 37 aa, Artificial Sequence
  Cyclic GFR-binding peptide
  MOD_RES (2)..(4): Xaa is C or S
EXKXALHDELTSMEGLFIPKKRVIEMIQVTINSLQVQ

SEQ ID NO: 56473 - protein, 35 aa, Artificial Sequence
  Cyclic GFR-binding peptide
  MOD_RES (32)..(32): Xaa is C or S
HQLFSMEGLHQGQHPKIRMIQMTINSEETPVXELG

SEQ ID NO: 56474 - protein, 30 aa, Artificial Sequence
  Cyclic GFR-binding peptide
LRSMEGILKPKKRVYEMIQVTINSHHVRSP

SEQ ID NO: 56475 - protein, 39 aa, Artificial Sequence
  Cyclic GFR-binding peptide
  MOD_RES (1)..(38): Xaa is C or S
XELHEELRSMEGLLKPKKRVYEMIQVTINSHHVRSPQXK

SEQ ID NO: 56476 - protein, 32 aa, Artificial Sequence
  Cyclic GFR-binding peptide
  MOD_RES (1)..(1): Xaa is C or S
XKNHQLFVTAKKHQGQHPKIRIKRMQVPREET

SEQ ID NO: 56477 - protein, 37 aa, Artificial Sequence
  Cyclic GFR-binding peptide
  MOD_RES (31)..(31): Xaa is C or S
QLFVQVEKHQGQHPKIRVKAMKVSREETPVXELGEDN

SEQ ID NO: 56478 - protein, 36 aa, Artificial Sequence
  Cyclic GFR-binding peptide
  MOD_RES (32)..(32): Xaa is C or S
HEELVQVEKHQGQHPKIRVKAMKVSRQGTPVXELGE

SEQ ID NO: 56479 - protein, 43 aa, Artificial Sequence; identical to SEQ ID NO: 14067
  Cyclic GFR-binding peptide
  MOD_RES (1)..(3)..(40): Xaa is C or S

SEQ ID NO: 56480 - protein, 34 aa, Artificial Sequence
  Cyclic GFR-binding peptide
  MOD_RES (30)..(30): Xaa is C or S
ELVQVEKHQGQHPKIRVKAMKVSRQGTPVXELGE

SEQ ID NO: 56481 - protein, 34 aa, Artificial Sequence; identical to SEQ ID NO: 14069
  Cyclic GFR-binding peptide
  MOD_RES (1)..(1): Xaa is C or S

SEQ ID NO: 56482 - protein, 41 aa, Artificial Sequence; identical to SEQ ID NO: 14072
  Cyclic GFR-binding peptide
  MOD_RES (1)..(3)..(37): Xaa is C or S

SEQ ID NO: 56483 - protein, 39 aa, Artificial Sequence; identical to SEQ ID NO: 14073
  Cyclic GFR-binding peptide
  MOD_RES (34)..(34): Xaa is C or S

SEQ ID NO: 56484 - protein, 26 aa, Artificial Sequence
  Cyclic GFR-binding peptide
HQLFSMEGLHQGQHPKIRMIQMTINS

SEQ ID NO: 56485 - protein, 33 aa, Artificial Sequence
  Cyclic GFR-binding peptide
  MOD_RES (28)..(28): Xaa is C or S
SMEGLHQGQHPKIRMIQMTINSEETPVXELGED

SEQ ID NO: 56486 - protein, 39 aa, Artificial Sequence; identical to SEQ ID NO: 14074
  Cyclic GFR-binding peptide
  MOD_RES (34)..(34): Xaa is C or S

SEQ ID NO: 56487 - protein, 34 aa, Artificial Sequence
  Cyclic GFR-binding peptide
  MOD_RES (32)..(32): Xaa is C or S
HQLFVTAKKHQGQHPKIRIKRMQVPREETPVXEL

SEQ ID NO: 56488 - protein, 33 aa, Artificial Sequence
  Cyclic GFR-binding peptide
DELTVQVEKFIPKKRVIEVKAVKVSRLQVQTPR

SEQ ID NO: 56489 - protein, 36 aa, Artificial Sequence
  Cyclic GFR-binding peptide
  MOD_RES (2)..(4): Xaa is C or S
RXEXQSHEELVQVEKHQGQHPKIRVKAMKVSRQGTP

SEQ ID NO: 56490 - protein, 38 aa, Artificial Sequence
  Cyclic GFR-binding peptide
  MOD_RES (32)..(32): Xaa is C or S
HEELSMEGIHQGQHPKIRMIQMTINSQGTPVXELGEDN

SEQ ID NO: 56491 - protein, 36 aa, Artificial Sequence
  Cyclic GFR-binding peptide
  MOD_RES (1)..(3): Xaa is C or S
XAXELHEELRSMEGILKPKKRVYEMIQVTINSHHVR

SEQ ID NO: 56492 - protein, 33 aa, Artificial Sequence
  Cyclic GFR-binding peptide
  MOD_RES (1)..(3): Xaa is C or S
XEXKNHQLFVTAKKHQGQHPKIRIKRMQVPREE

SEQ ID NO: 56493 - protein, 32 aa, Artificial Sequence
  Cyclic GFR-binding peptide
  MOD_RES (2)..(2): Xaa is C or S
EXKNHQLFVQVEKHQGQHPKIRVKAMKVSREE

SEQ ID NO: 56494 - protein, 22 aa, Artificial Sequence
  Cyclic GFR-binding peptide
SMEGLHQGQHPKIRMIQMTINS

SEQ ID NO: 56495 - protein, 36 aa, Artificial Sequence
  Cyclic GFR-binding peptide
  MOD_RES (2)..(4): Xaa is C or S
EXKXALHDELTSMEGLFIPKKRVIEMIQVTINSLQV

SEQ ID NO: 56496 - protein, 27 aa, Artificial Sequence
  Cyclic GFR-binding peptide
VQVEKHQGQHPKIRVKAMKVSREETPV

SEQ ID NO: 56497 - protein, 33 aa, Artificial Sequence
  Cyclic GFR-binding peptide
EELRSMEGILKPKKRVYEMIQVTINSHHVRSPQ

SEQ ID NO: 56498 - protein, 30 aa, Artificial Sequence
  Cyclic GFR-binding peptide
  MOD_RES (1)..(1): Xaa is C or S
XALHDELTSMEGLFIPKKRVIEMIQVTINS

SEQ ID NO: 56499 - protein, 24 aa, Artificial Sequence
  Cyclic GFR-binding peptide
SMEGLLKPKKRVYEMIQVTINSHH

SEQ ID NO: 56500 - protein, 28 aa, Artificial Sequence
  Cyclic GFR-binding peptide
EELVQVEKHQGQHPKIRVKAMKVSRQGT

SEQ ID NO: 56501 - protein, 37 aa, Artificial Sequence; identical to SEQ ID NO: 14077
  Cyclic GFR-binding peptide
  MOD_RES (36)..(36): Xaa is C or S

SEQ ID NO: 56502 - protein, 32 aa, Artificial Sequence
  Cyclic GFR-binding peptide
  MOD_RES (1)..(1): Xaa is C or S
XQSHEELVQVEKHQGQHPKIRVKAMKVSRQGT

SEQ ID NO: 56503 - protein, 41 aa, Artificial Sequence; identical to SEQ ID NO: 14078
  Cyclic GFR-binding peptide
  MOD_RES (1)..(35): Xaa is C or S

SEQ ID NO: 56504 - protein, 28 aa, Artificial Sequence
  Cyclic GFR-binding peptide
  MOD_RES (28)..(28): Xaa is C or S
SMEGLHQGQHPKIRMIQMTINSEETPVX

SEQ ID NO: 56505 - protein, 29 aa, Artificial Sequence
  Cyclic GFR-binding peptide
VTAKKLKPKKRVYEIKRVQVPRHHVRSPQ

SEQ ID NO: 56506 - protein, 30 aa, Artificial Sequence
  Cyclic GFR-binding peptide
  MOD_RES (28)..(28): Xaa is C or S
SMEGLHQGQHPKIRMIQMTINSEETPVXEL

SEQ ID NO: 56507 - protein, 29 aa, Artificial Sequence
  Cyclic GFR-binding peptide
  MOD_RES (29)..(29): Xaa is C or S
FVQVEKHQGQHPKIRVKAMKVSREETPVX

SEQ ID NO: 56508 - protein, 33 aa, Artificial Sequence
  Cyclic GFR-binding peptide
  MOD_RES (31)..(31): Xaa is C or S
TSMEGIFIPKKRVIEMIQVTINSLQVQTPRXQV

SEQ ID NO: 56509 - protein, 34 aa, Artificial Sequence
  Cyclic GFR-binding peptide
  MOD_RES (33)..(33): Xaa is C or S
ELTVQVEKFIPKKRVIEVKAVKVSRLQVQTPRXQ

SEQ ID NO: 56510 - protein, 44 aa, Artificial Sequence; identical to SEQ ID NO: 14079
  Cyclic GFR-binding peptide
  MOD_RES (1)..(3)..(40): Xaa is C or S

SEQ ID NO: 56511 - protein, 26 aa, Artificial Sequence
  Cyclic GFR-binding peptide
VTAKKHQGQHPKIRIKRMQVPRQGTP

SEQ ID NO: 56512 - protein, 32 aa, Artificial Sequence
  Cyclic GFR-binding peptide
  MOD_RES (31)..(31): Xaa is C or S
QLFVQVEKHQGQHPKIRVKAMKVSREETPVXE

SEQ ID NO: 56513 - protein, 38 aa, Artificial Sequence; identical to SEQ ID NO: 14081
  Cyclic GFR-binding peptide
  MOD_RES (36)..(36): Xaa is C or S

SEQ ID NO: 56514 - protein, 33 aa, Artificial Sequence
  Cyclic GFR-binding peptide
  MOD_RES (30)..(30): Xaa is C or S
SMEGILKPKKRVYEMIQVTINSHHVRSPQXKVS

SEQ ID NO: 56515 - protein, 34 aa, Artificial Sequence; identical to SEQ ID NO: 14084
  Cyclic GFR-binding peptide

SEQ ID NO: 56516 - protein, 32 aa, Artificial Sequence
  Cyclic GFR-binding peptide
LHDELTSMEGIFIPKKRVIEMIQVTINSLQVQ

SEQ ID NO: 56517 - protein, 32 aa, Artificial Sequence
  Cyclic GFR-binding peptide
ALHDELTSMEGLFIPKKRVIEMIQVTINSLQV

SEQ ID NO: 56518 - protein, 37 aa, Artificial Sequence; identical to SEQ ID NO: 14086
  Cyclic GFR-binding peptide
  MOD_RES (2)..(4): Xaa is C or S

SEQ ID NO: 56519 - protein, 36 aa, Artificial Sequence
  Cyclic GFR-binding peptide
  MOD_RES (32)..(32): Xaa is C or S
LTSMEGLFIPKKRVIEMIQVTINSLQVQTPRXQVNR

SEQ ID NO: 56520 - protein, 25 aa, Artificial Sequence
  Cyclic GFR-binding peptide
SMEGILKPKKRVYEMIQVTINSHHV

SEQ ID NO: 56521 - protein, 29 aa, Artificial Sequence
  Cyclic GFR-binding peptide
QLFVTAKKHQGQHPKIRIKRMQVPREETP

SEQ ID NO: 56522 - protein, 34 aa, Artificial Sequence
  Cyclic GFR-binding peptide
  MOD_RES (32)..(32): Xaa is C or S
LRSMEGILKPKKRVYEMIQVTINSHHVRSPQXKV

SEQ ID NO: 56523 - protein, 32 aa, Artificial Sequence
  Cyclic GFR-binding peptide
  MOD_RES (30)..(30): Xaa is C or S
VTAKKLKPKKRVYEIKRVQVPRHHVRSPQXKV

SEQ ID NO: 56524 - protein, 31 aa, Artificial Sequence
  Cyclic GFR-binding peptide
DELTVQVEKFIPKKRVIEVKAVKVSRLQVQT

SEQ ID NO: 56525 - protein, 33 aa, Artificial Sequence; identical to SEQ ID NO: 14090
  Cyclic GFR-binding peptide

SEQ ID NO: 56526 - protein, 30 aa, Artificial Sequence
  Cyclic GFR-binding peptide
  MOD_RES (29)..(29): Xaa is C or S
FSMEGLHQGQHPKIRMIQMTINSEETPVXE

SEQ ID NO: 56527 - protein, 28 aa, Artificial Sequence
  Cyclic GFR-binding peptide
LFVTAKKHQGQHPKIRIKRMQVPREETP

SEQ ID NO: 56528 - protein, 28 aa, Artificial Sequence
  Cyclic GFR-binding peptide
TSMEGIFIPKKRVIEMIQVTINSLQVQT

SEQ ID NO: 56529 - protein, 26 aa, Artificial Sequence
  Cyclic GFR-binding peptide
TSMEGIFIPKKRVIEMIQVTINSLQV

SEQ ID NO: 56530 - protein, 32 aa, Artificial Sequence
  Cyclic GFR-binding peptide
QSHEELVQVEKHQGQHPKIRVKAMKVSRQGTP

SEQ ID NO: 56531 - protein, 30 aa, Artificial Sequence
  Cyclic GFR-binding peptide
ELTVQVEKFIPKKRVIEVKAVKVSRLQVQT

SEQ ID NO: 56532 - protein, 35 aa, Artificial Sequence
  Cyclic GFR-binding peptide
  MOD_RES (2)..(2): Xaa is C or S
AXELHEELRSMEGLLKPKKRVYEMIQVTINSHHVR

SEQ ID NO: 56533 - protein, 40 aa, Artificial Sequence; identical to SEQ ID NO: 14093
  Cyclic GFR-binding peptide
  MOD_RES (2)..(4): Xaa is C or S

SEQ ID NO: 56534 - protein, 29 aa, Artificial Sequence
  Cyclic GFR-binding peptide
ELTSMEGIFIPKKRVIEMIQVTINSLQVQ

SEQ ID NO: 56535 - protein, 45 aa, Artificial Sequence; identical to SEQ ID NO: 14095
  Cyclic GFR-binding peptide
  MOD_RES (2)..(4)..(41): Xaa is C or S

SEQ ID NO: 56536 - protein, 34 aa, Artificial Sequence; identical to SEQ ID NO: 14096
  Cyclic GFR-binding peptide
  MOD_RES (1)..(1): Xaa is C or S

SEQ ID NO: 56537 - protein, 29 aa, Artificial Sequence
  Cyclic GFR-binding peptide
SMEGLLKPKKRVYEMIQVTINSHHVRSPQ

SEQ ID NO: 56538 - protein, 38 aa, Artificial Sequence; identical to SEQ ID NO: 14098
  Cyclic GFR-binding peptide
  MOD_RES (2)..(36): Xaa is C or S

SEQ ID NO: 56539 - protein, 38 aa, Artificial Sequence; identical to SEQ ID NO: 14099
  Cyclic GFR-binding peptide
  MOD_RES (2)..(4)..(38): Xaa is C or S

SEQ ID NO: 56540 - protein, 22 aa, Artificial Sequence
  Cyclic GFR-binding peptide
VQVEKHQGQHPKIRVKAMKVSR

SEQ ID NO: 56541 - protein, 33 aa, Artificial Sequence
  Cyclic GFR-binding peptide
  MOD_RES (31)..(31): Xaa is C or S
EELVTAKKHQGQHPKIRIKRMQVPRQGTPVXEL

SEQ ID NO: 56542 - protein, 29 aa, Artificial Sequence
  Cyclic GFR-binding peptide
QLFSMEGLHQGQHPKIRMIQMTINSEETP

SEQ ID NO: 56543 - protein, 26 aa, Artificial Sequence
  Cyclic GFR-binding peptide
ELVTAKKHQGQHPKIRIKRMQVPRQG

SEQ ID NO: 56544 - protein, 45 aa, Artificial Sequence; identical to SEQ ID NO: 14100
  Cyclic GFR-binding peptide
  MOD_RES (2)..(4)..(41): Xaa is C or S

SEQ ID NO: 56545 - protein, 32 aa, Artificial Sequence
  Cyclic GFR-binding peptide
LHEELRVTAKKLKPKKRVYEIKRVQVPRHHVR

SEQ ID NO: 56546 - protein, 36 aa, Artificial Sequence
  Cyclic GFR-binding peptide
  MOD_RES (30)..(30): Xaa is C or S
LFVQVEKHQGQHPKIRVKAMKVSREETPVXELGEDN

SEQ ID NO: 56547 - protein, 34 aa, Artificial Sequence
  Cyclic GFR-binding peptide
  MOD_RES (1)..(1): Xaa is C or S
XELHEELRSMEGILKPKKRVYEMIQVTINSHHVR

SEQ ID NO: 56548 - protein, 34 aa, Artificial Sequence
  Cyclic GFR-binding peptide
  MOD_RES (2)..(4): Xaa is C or S
EXKXALHDELTSMEGLFIPKKRVIEMIQVTINSL

SEQ ID NO: 56549 - protein, 30 aa, Artificial Sequence
  Cyclic GFR-binding peptide
  MOD_RES (2)..(2): Xaa is C or S
EXQSHEELVQVEKHQGQHPKIRVKAMKVSR

SEQ ID NO: 56550 - protein, 32 aa, Artificial Sequence
  Cyclic GFR-binding peptide
  MOD_RES (29)..(29): Xaa is C or S
LVTAKKHQGQHPKIRIKRMQVPRQGTPVXELG

SEQ ID NO: 56551 - protein, 32 aa, Artificial Sequence
  Cyclic GFR-binding peptide
  MOD_RES (30)..(30): Xaa is C or S
SMEGLFIPKKRVIEMIQVTINSLQVQTPRXQV

SEQ ID NO: 56552 - protein, 35 aa, Artificial Sequence; identical to SEQ ID NO: 14102
  Cyclic GFR-binding peptide
  MOD_RES (35)..(35): Xaa is C or S

SEQ ID NO: 56553 - protein, 27 aa, Artificial Sequence
  Cyclic GFR-binding peptide
SMEGLFIPKKRVIEMIQVTINSLQVQT

SEQ ID NO: 56554 - protein, 34 aa, Artificial Sequence
  Cyclic GFR-binding peptide
  MOD_RES (29)..(29): Xaa is C or S
LVQVEKHQGQHPKIRVKAMKVSRQGTPVXELGED

SEQ ID NO: 56555 - protein, 24 aa, Artificial Sequence
  Cyclic GFR-binding peptide
LTSMEGLFIPKKRVIEMIQVTINS

SEQ ID NO: 56556 - protein, 31 aa, Artificial Sequence
  Cyclic GFR-binding peptide
ELTSMEGLFIPKKRVIEMIQVTINSLQVQTP

SEQ ID NO: 56557 - protein, 26 aa, Artificial Sequence
  Cyclic GFR-binding peptide
LFSMEGLHQGQHPKIRMIQMTINSEE

SEQ ID NO: 56558 - protein, 40 aa, Artificial Sequence; identical to SEQ ID NO: 14103
  Cyclic GFR-binding peptide
  MOD_RES (1)..(3)..(37): Xaa is C or S

SEQ ID NO: 56559 - protein, 38 aa, Artificial Sequence; identical to SEQ ID NO: 14104
  Cyclic GFR-binding peptide
  MOD_RES (2)..(36): Xaa is C or S

SEQ ID NO: 56560 - protein, 34 aa, Artificial Sequence
  Cyclic GFR-binding peptide
  MOD_RES (31)..(31): Xaa is C or S
EELVQVEKHQGQHPKIRVKAMKVSRQGTPVXELG

SEQ ID NO: 56561 - protein, 27 aa, Artificial Sequence
  Cyclic GFR-binding peptide
ELRSMEGILKPKKRVYEMIQVTINSHH

SEQ ID NO: 56562 - protein, 33 aa, Artificial Sequence
  Cyclic GFR-binding peptide
  MOD_RES (1)..(1): Xaa is C or S
XQSHEELVQVEKHQGQHPKIRVKAMKVSRQGTP

SEQ ID NO: 56563 - protein, 33 aa, Artificial Sequence; identical to SEQ ID NO: 14107
  Cyclic GFR-binding peptide

SEQ ID NO: 56564 - protein, 32 aa, Artificial Sequence
  Cyclic GFR-binding peptide
ELRSMEGILKPKKRVYEMIQVTINSHHVRSPQ

SEQ ID NO: 56565 - protein, 28 aa, Artificial Sequence
  Cyclic GFR-binding peptide
RVTAKKLKPKKRVYEIKRVQVPRHHVRS

SEQ ID NO: 56566 - protein, 39 aa, Artificial Sequence; identical to SEQ ID NO: 14110
  Cyclic GFR-binding peptide
  MOD_RES (2)..(4)..(38): Xaa is C or S

SEQ ID NO: 56567 - protein, 30 aa, Artificial Sequence
  Cyclic GFR-binding peptide
  MOD_RES (30)..(30): Xaa is C or S
VTAKKLKPKKRVYEIKRVQVPRHHVRSPQX

SEQ ID NO: 56568 - protein, 29 aa, Artificial Sequence
  Cyclic GFR-binding peptide
SMEGLFIPKKRVIEMIQVTINSLQVQTPR

SEQ ID NO: 56569 - protein, 40 aa, Artificial Sequence; identical to SEQ ID NO: 14111
  Cyclic GFR-binding peptide
  MOD_RES (2)..(39): Xaa is C or S

SEQ ID NO: 56570 - protein, 36 aa, Artificial Sequence; identical to SEQ ID NO: 14112
  Cyclic GFR-binding peptide
  MOD_RES (1)..(3): Xaa is C or S

SEQ ID NO: 56571 - protein, 31 aa, Artificial Sequence
  Cyclic GFR-binding peptide
  MOD_RES (31)..(31): Xaa is C or S
QLFVQVEKHQGQHPKIRVKAMKVSREETPVX

SEQ ID NO: 56572 - protein, 28 aa, Artificial Sequence
  Cyclic GFR-binding peptide
TVQVEKFIPKKRVIEVKAVKVSRLQVQT

SEQ ID NO: 56573 - protein, 35 aa, Artificial Sequence; identical to SEQ ID NO: 14113
  Cyclic GFR-binding peptide

SEQ ID NO: 56574 - protein, 34 aa, Artificial Sequence
  Cyclic GFR-binding peptide
  MOD_RES (1)..(3): Xaa is C or S
XEXQSHEELVTAKKHQGQHPKIRIKRMQVPRQGT

SEQ ID NO: 56575 - protein, 34 aa, Artificial Sequence
  Cyclic GFR-binding peptide
  MOD_RES (2)..(2): Xaa is C or S
KXALHDELTSMEGIFIPKKRVIEMIQVTINSLQV

SEQ ID NO: 56576 - protein, 34 aa, Artificial Sequence
  Cyclic GFR-binding peptide
  MOD_RES (1)..(3): Xaa is C or S
XAXELHEELRVTAKKLKPKKRVYEIKRVQVPRHH

SEQ ID NO: 56577 - protein, 32 aa, Artificial Sequence; identical to SEQ ID NO: 14119
  Cyclic GFR-binding peptide

SEQ ID NO: 56578 - protein, 44 aa, Artificial Sequence; identical to SEQ ID NO: 14120
  Cyclic GFR-binding peptide
  MOD_RES (2)..(4)..(41): Xaa is C or S

SEQ ID NO: 56579 - protein, 31 aa, Artificial Sequence
  Cyclic GFR-binding peptide
  MOD_RES (2)..(2): Xaa is C or S
EXKNHQLFVQVEKHQGQHPKIRVKAMKVSRE

SEQ ID NO: 56580 - protein, 29 aa, Artificial Sequence
  Cyclic GFR-binding peptide
HDELTVQVEKFIPKKRVIEVKAVKVSRLQ

SEQ ID NO: 56581 - protein, 35 aa, Artificial Sequence
  Cyclic GFR-binding peptide
  MOD_RES (1)..(3): Xaa is C or S
XAXELHEELRSMEGILKPKKRVYEMIQVTINSHHV

SEQ ID NO: 56582 - protein, 38 aa, Artificial Sequence; identical to SEQ ID NO: 14125
  Cyclic GFR-binding peptide
  MOD_RES (1)..(38): Xaa is C or S

SEQ ID NO: 56583 - protein, 29 aa, Artificial Sequence
  Cyclic GFR-binding peptide
HQLFSMEGLHQGQHPKIRMIQMTINSEET

SEQ ID NO: 56584 - protein, 40 aa, Artificial Sequence; identical to SEQ ID NO: 14127
  Cyclic GFR-binding peptide
  MOD_RES (1)..(35): Xaa is C or S

SEQ ID NO: 56585 - protein, 24 aa, Artificial Sequence
  Cyclic GFR-binding peptide
LFVQVEKHQGQHPKIRVKAMKVSR

SEQ ID NO: 56586 - protein, 42 aa, Artificial Sequence; identical to SEQ ID NO: 14126
  Cyclic GFR-binding peptide
  MOD_RES (1)..(3)..(40): Xaa is C or S

SEQ ID NO: 56587 - protein, 26 aa, Artificial Sequence
  Cyclic GFR-binding peptide
LRVTAKKLKPKKRVYEIKRVQVPRHH

SEQ ID NO: 56588 - protein, 35 aa, Artificial Sequence
  Cyclic GFR-binding peptide
  MOD_RES (2)..(2): Xaa is C or S
AXELHEELRSMEGILKPKKRVYEMIQVTINSHHVR

SEQ ID NO: 56589 - protein, 23 aa, Artificial Sequence
  Cyclic GFR-binding peptide
LVTAKKHQGQHPKIRIKRMQVPR

SEQ ID NO: 56590 - protein, 23 aa, Artificial Sequence
  Cyclic GFR-binding peptide
FVTAKKHQGQHPKIRIKRMQVPR

SEQ ID NO: 56591 - protein, 26 aa, Artificial Sequence
  Cyclic GFR-binding peptide
ELTVQVEKFIPKKRVIEVKAVKVSRL

SEQ ID NO: 56592 - protein, 33 aa, Artificial Sequence
  Cyclic GFR-binding peptide
  MOD_RES (2)..(2): Xaa is C or S
EXQSHEELSMEGIHQGQHPKIRMIQMTINSQGT

SEQ ID NO: 56593 - protein, 37 aa, Artificial Sequence; identical to SEQ ID NO: 14130
  Cyclic GFR-binding peptide
  MOD_RES (1)..(35): Xaa is C or S

SEQ ID NO: 56594 - protein, 31 aa, Artificial Sequence
  Cyclic GFR-binding peptide
EELRSMEGLLKPKKRVYEMIQVTINSHHVRS

SEQ ID NO: 56595 - protein, 30 aa, Artificial Sequence
  Cyclic GFR-binding peptide
  MOD_RES (28)..(28): Xaa is C or S
VTAKKHQGQHPKIRIKRMQVPREETPVXEL

SEQ ID NO: 56596 - protein, 28 aa, Artificial Sequence
  Cyclic GFR-binding peptide
KNHQLFVTAKKHQGQHPKIRIKRMQVPR

SEQ ID NO: 56597 - protein, 28 aa, Artificial Sequence
  Cyclic GFR-binding peptide
ELVQVEKHQGQHPKIRVKAMKVSRQGTP

SEQ ID NO: 56598 - protein, 33 aa, Artificial Sequence
  Cyclic GFR-binding peptide
  MOD_RES (2)..(4): Xaa is C or S
RXEXKNHQLFVQVEKHQGQHPKIRVKAMKVSRE

SEQ ID NO: 56599 - protein, 28 aa, Artificial Sequence
  Cyclic GFR-binding peptide
QLFSMEGLHQGQHPKIRMIQMTINSEET

SEQ ID NO: 56600 - protein, 41 aa, Artificial Sequence; identical to SEQ ID NO: 14133
  Cyclic GFR-binding peptide
  MOD_RES (1)..(38): Xaa is C or S

SEQ ID NO: 56601 - protein, 28 aa, Artificial Sequence
  Cyclic GFR-binding peptide
HDELTSMEGIFIPKKRVIEMIQVTINSL

SEQ ID NO: 56602 - protein, 26 aa, Artificial Sequence
  Cyclic GFR-binding peptide
SMEGLFIPKKRVIEMIQVTINSLQVQ

SEQ ID NO: 56603 - protein, 30 aa, Artificial Sequence
  Cyclic GFR-binding peptide
LTSMEGLFIPKKRVIEMIQVTINSLQVQTP

SEQ ID NO: 56604 - protein, 31 aa, Artificial Sequence
  Cyclic GFR-binding peptide
  MOD_RES (1)..(3): Xaa is C or S
XEXKNHQLFSMEGLHQGQHPKIRMIQMTINS

SEQ ID NO: 56605 - protein, 40 aa, Artificial Sequence; identical to SEQ ID NO: 14135
  Cyclic GFR-binding peptide
  MOD_RES (1)..(3)..(37): Xaa is C or S

SEQ ID NO: 56606 - protein, 30 aa, Artificial Sequence
  Cyclic GFR-binding peptide
QLFVTAKKHQGQHPKIRIKRMQVPREETPV

SEQ ID NO: 56607 - protein, 38 aa, Artificial Sequence
  Cyclic GFR-binding peptide
  MOD_RES (32)..(32): Xaa is C or S
HQLFVQVEKHQGQHPKIRVKAMKVSREETPVXELGEDN

SEQ ID NO: 56608 - protein, 28 aa, Artificial Sequence
  Cyclic GFR-binding peptide
HEELVTAKKHQGQHPKIRIKRMQVPRQG

SEQ ID NO: 56609 - protein, 35 aa, Artificial Sequence; identical to SEQ ID NO: 14138
  Cyclic GFR-binding peptide
  MOD_RES (1)..(35): Xaa is C or S

SEQ ID NO: 56610 - protein, 38 aa, Artificial Sequence; identical to SEQ ID NO: 14139
  Cyclic GFR-binding peptide
  MOD_RES (2)..(2): Xaa is C or S

SEQ ID NO: 56611 - protein, 24 aa, Artificial Sequence
  Cyclic GFR-binding peptide
VTAKKLKPKKRVYEIKRVQVPRHH

SEQ ID NO: 56612 - protein, 34 aa, Artificial Sequence
  Cyclic GFR-binding peptide
  MOD_RES (30)..(30): Xaa is C or S
SMEGILKPKKRVYEMIQVTINSHHVRSPQXKVSS

SEQ ID NO: 56613 - protein, 32 aa, Artificial Sequence; identical to SEQ ID NO: 2208
  Cyclic GFR-binding peptide

SEQ ID NO: 56614 - protein, 38 aa, Artificial Sequence; identical to SEQ ID NO: 14144
  Cyclic GFR-binding peptide
  MOD_RES (1)..(3): Xaa is C or S

SEQ ID NO: 56615 - protein, 29 aa, Artificial Sequence
  Cyclic GFR-binding peptide
NHQLFVQVEKHQGQHPKIRVKAMKVSREE

SEQ ID NO: 56616 - protein, 30 aa, Artificial Sequence
  Cyclic GFR-binding peptide
SHEELVTAKKHQGQHPKIRIKRMQVPRQGT

SEQ ID NO: 56617 - protein, 34 aa, Artificial Sequence; identical to SEQ ID NO: 14146
  Cyclic GFR-binding peptide
  MOD_RES (33)..(33): Xaa is C or S

SEQ ID NO: 56618 - protein, 33 aa, Artificial Sequence
  Cyclic GFR-binding peptide
  MOD_RES (1)..(3): Xaa is C or S
XEXQSHEELSMEGIHQGQHPKIRMIQMTINSQG

SEQ ID NO: 56619 - protein, 25 aa, Artificial Sequence
  Cyclic GFR-binding peptide
LSMEGIHQGQHPKIRMIQMTINSQG

SEQ ID NO: 56620 - protein, 30 aa, Artificial Sequence
  Cyclic GFR-binding peptide
  MOD_RES (1)..(1): Xaa is C or S
XELHEELRSMEGLLKPKKRVYEMIQVTINS

SEQ ID NO: 56621 - protein, 36 aa, Artificial Sequence; identical to SEQ ID NO: 14149
  Cyclic GFR-binding peptide

SEQ ID NO: 56622 - protein, 36 aa, Artificial Sequence; identical to SEQ ID NO: 14150
  Cyclic GFR-binding peptide
  MOD_RES (1)..(1): Xaa is C or S

SEQ ID NO: 56623 - protein, 31 aa, Artificial Sequence
  Cyclic GFR-binding peptide
  MOD_RES (30)..(30): Xaa is C or S
SMEGLFIPKKRVIEMIQVTINSLQVQTPRXQ

SEQ ID NO: 56624 - protein, 33 aa, Artificial Sequence; identical to SEQ ID NO: 14152
  Cyclic GFR-binding peptide

SEQ ID NO: 56625 - protein, 35 aa, Artificial Sequence; identical to SEQ ID NO: 14153
  Cyclic GFR-binding peptide
  MOD_RES (33)..(33): Xaa is C or S

SEQ ID NO: 56626 - protein, 30 aa, Artificial Sequence
  Cyclic GFR-binding peptide
HDELTVQVEKFIPKKRVIEVKAVKVSRLQV

SEQ ID NO: 56627 - protein, 35 aa, Artificial Sequence
  Cyclic GFR-binding peptide
  MOD_RES (2)..(4): Xaa is C or S
RXEXKNHQLFVQVEKHQGQHPKIRVKAMKVSREET

SEQ ID NO: 56628 - protein, 34 aa, Artificial Sequence; identical to SEQ ID NO: 14155
  Cyclic GFR-binding peptide
  MOD_RES (34)..(34): Xaa is C or S

SEQ ID NO: 56629 - protein, 36 aa, Artificial Sequence; identical to SEQ ID NO: 14157
  Cyclic GFR-binding peptide

SEQ ID NO: 56630 - protein, 44 aa, Artificial Sequence; identical to SEQ ID NO: 14158
  Cyclic GFR-binding peptide
  MOD_RES (2)..(4)..(41): Xaa is C or S

SEQ ID NO: 56631 - protein, 25 aa, Artificial Sequence
  Cyclic GFR-binding peptide
QLFVTAKKHQGQHPKIRIKRMQVPR

SEQ ID NO: 56632 - protein, 31 aa, Artificial Sequence
  Cyclic GFR-binding peptide
  MOD_RES (28)..(28): Xaa is C or S
SMEGLHQGQHPKIRMIQMTINSEETPVXELG

SEQ ID NO: 56633 - protein, 30 aa, Artificial Sequence
  Cyclic GFR-binding peptide
  MOD_RES (30)..(30): Xaa is C or S
SMEGLLKPKKRVYEMIQVTINSHHVRSPQX

SEQ ID NO: 56634 - protein, 27 aa, Artificial Sequence
  Cyclic GFR-binding peptide
EELRSMEGLLKPKKRVYEMIQVTINSH

SEQ ID NO: 56635 - protein, 34 aa, Artificial Sequence
  Cyclic GFR-binding peptide
  MOD_RES (32)..(32): Xaa is C or S
LTVQVEKFIPKKRVIEVKAVKVSRLQVQTPRXQV

SEQ ID NO: 56636 - protein, 34 aa, Artificial Sequence
  Cyclic GFR-binding peptide
  MOD_RES (28)..(28): Xaa is C or S
VTAKKHQGQHPKIRIKRMQVPRQGTPVXELGEDN

SEQ ID NO: 56637 - protein, 44 aa, Artificial Sequence; identical to SEQ ID NO: 14162
  Cyclic GFR-binding peptide
  MOD_RES (2)..(4)..(41): Xaa is C or S

SEQ ID NO: 56638 - protein, 40 aa, Artificial Sequence; identical to SEQ ID NO: 14163
  Cyclic GFR-binding peptide
  MOD_RES (37)..(37): Xaa is C or S

SEQ ID NO: 56639 - protein, 24 aa, Artificial Sequence
  Cyclic GFR-binding peptide
TSMEGLFIPKKRVIEMIQVTINSL

SEQ ID NO: 56640 - protein, 31 aa, Artificial Sequence
  Cyclic GFR-binding peptide
  MOD_RES (28)..(28): Xaa is C or S
VTAKKHQGQHPKIRIKRMQVPRQGTPVXELG

SEQ ID NO: 56641 - protein, 41 aa, Artificial Sequence; identical to SEQ ID NO: 14166
  Cyclic GFR-binding peptide
  MOD_RES (2)..(39): Xaa is C or S

SEQ ID NO: 56642 - protein, 36 aa, Artificial Sequence
  Cyclic GFR-binding peptide
  MOD_RES (33)..(33): Xaa is C or S
ELRSMEGLLKPKKRVYEMIQVTINSHHVRSPQXKVS

SEQ ID NO: 56643 - protein, 41 aa, Artificial Sequence; identical to SEQ ID NO: 14168
  Cyclic GFR-binding peptide
  MOD_RES (2)..(4)..(41): Xaa is C or S

SEQ ID NO: 56644 - protein, 38 aa, Artificial Sequence; identical to SEQ ID NO: 14171
  Cyclic GFR-binding peptide
  MOD_RES (33)..(33): Xaa is C or S

SEQ ID NO: 56645 - protein, 39 aa, Artificial Sequence; identical to SEQ ID NO: 14172
  Cyclic GFR-binding peptide
  MOD_RES (33)..(33): Xaa is C or S

SEQ ID NO: 56646 - protein, 30 aa, Artificial Sequence
  Cyclic GFR-binding peptide
TSMEGIFIPKKRVIEMIQVTINSLQVQTPR

SEQ ID NO: 56647 - protein, 28 aa, Artificial Sequence
  Cyclic GFR-binding peptide
ELRVTAKKLKPKKRVYEIKRVQVPRHHV

SEQ ID NO: 56648 - protein, 34 aa, Artificial Sequence; identical to SEQ ID NO: 14173
  Cyclic GFR-binding peptide
  MOD_RES (33)..(33): Xaa is C or S

SEQ ID NO: 56649 - protein, 33 aa, Artificial Sequence
  Cyclic GFR-binding peptide
  MOD_RES (31)..(31): Xaa is C or S
RSMEGILKPKKRVYEMIQVTINSHHVRSPQXKV

SEQ ID NO: 56650 - protein, 34 aa, Artificial Sequence
  Cyclic GFR-binding peptide
  MOD_RES (31)..(31): Xaa is C or S
RVTAKKLKPKKRVYEIKRVQVPRHHVRSPQXKVS

SEQ ID NO: 56651 - protein, 33 aa, Artificial Sequence
  Cyclic GFR-binding peptide
  MOD_RES (30)..(30): Xaa is C or S
SMEGLFIPKKRVIEMIQVTINSLQVQTPRXQVN

SEQ ID NO: 56652 - protein, 25 aa, Artificial Sequence
  Cyclic GFR-binding peptide
EELVQVEKHQGQHPKIRVKAMKVSR

SEQ ID NO: 56653 - protein, 37 aa, Artificial Sequence; identical to SEQ ID NO: 14176
  Cyclic GFR-binding peptide
  MOD_RES (1)..(3): Xaa is C or S

SEQ ID NO: 56654 - protein, 26 aa, Artificial Sequence
  Cyclic GFR-binding peptide
LFVTAKKHQGQHPKIRIKRMQVPREE

SEQ ID NO: 56655 - protein, 32 aa, Artificial Sequence
  Cyclic GFR-binding peptide
  MOD_RES (1)..(1): Xaa is C or S
XKNHQLFVQVEKHQGQHPKIRVKAMKVSREET

SEQ ID NO: 56656 - protein, 36 aa, Artificial Sequence
  Cyclic GFR-binding peptide
  MOD_RES (30)..(30): Xaa is C or S
ELVQVEKHQGQHPKIRVKAMKVSRQGTPVXELGEDN

SEQ ID NO: 56657 - protein, 33 aa, Artificial Sequence
  Cyclic GFR-binding peptide
  MOD_RES (29)..(29): Xaa is C or S
FVTAKKHQGQHPKIRIKRMQVPREETPVXELGE

SEQ ID NO: 56658 - protein, 34 aa, Artificial Sequence
  Cyclic GFR-binding peptide
  MOD_RES (31)..(31): Xaa is C or S
QLFVQVEKHQGQHPKIRVKAMKVSREETPVXELG

SEQ ID NO: 56659 - protein, 40 aa, Artificial Sequence; identical to SEQ ID NO: 14178
  Cyclic GFR-binding peptide
  MOD_RES (34)..(34): Xaa is C or S

SEQ ID NO: 56660 - protein, 37 aa, Artificial Sequence; identical to SEQ ID NO: 14179
  Cyclic GFR-binding peptide
  MOD_RES (33)..(33): Xaa is C or S

SEQ ID NO: 56661 - protein, 34 aa, Artificial Sequence
  Cyclic GFR-binding peptide
  MOD_RES (29)..(29): Xaa is C or S
FVQVEKHQGQHPKIRVKAMKVSREETPVXELGED

SEQ ID NO: 56662 - protein, 41 aa, Artificial Sequence; identical to SEQ ID NO: 14181
  Cyclic GFR-binding peptide
  MOD_RES (2)..(36): Xaa is C or S

SEQ ID NO: 56663 - protein, 41 aa, Artificial Sequence; identical to SEQ ID NO: 14182
  Cyclic GFR-binding peptide
  MOD_RES (1)..(38): Xaa is C or S

SEQ ID NO: 56664 - protein, 40 aa, Artificial Sequence; identical to SEQ ID NO: 14180
  Cyclic GFR-binding peptide
  MOD_RES (2)..(36): Xaa is C or S

SEQ ID NO: 56665 - protein, 24 aa, Artificial Sequence
  Cyclic GFR-binding peptide
FSMEGLHQGQHPKIRMIQMTINSE

SEQ ID NO: 56666 - protein, 27 aa, Artificial Sequence
  Cyclic GFR-binding peptide
ELRVTAKKLKPKKRVYEIKRVQVPRHH

SEQ ID NO: 56667 - protein, 29 aa, Artificial Sequence
  Cyclic GFR-binding peptide
LTSMEGLFIPKKRVIEMIQVTINSLQVQT

SEQ ID NO: 56668 - protein, 28 aa, Artificial Sequence
  Cyclic GFR-binding peptide
LHEELRSMEGILKPKKRVYEMIQVTINS

SEQ ID NO: 56669 - protein, 27 aa, Artificial Sequence
  Cyclic GFR-binding peptide
SMEGILKPKKRVYEMIQVTINSHHVRS

SEQ ID NO: 56670 - protein, 36 aa, Artificial Sequence
  Cyclic GFR-binding peptide
  MOD_RES (34)..(34): Xaa is C or S
DELTSMEGIFIPKKRVIEMIQVTINSLQVQTPRXQV

SEQ ID NO: 56671 - protein, 32 aa, Artificial Sequence
  Cyclic GFR-binding peptide
  MOD_RES (2)..(2): Xaa is C or S
EXKNHQLFSMEGLHQGQHPKIRMIQMTINSEE

SEQ ID NO: 56672 - protein, 36 aa, Artificial Sequence; identical to SEQ ID NO: 14189
  Cyclic GFR-binding peptide
  MOD_RES (1)..(1): Xaa is C or S

SEQ ID NO: 56673 - protein, 42 aa, Artificial Sequence; identical to SEQ ID NO: 14190
  Cyclic GFR-binding peptide
  MOD_RES (2)..(36): Xaa is C or S

SEQ ID NO: 56674 - protein, 38 aa, Artificial Sequence; identical to SEQ ID NO: 14193
  Cyclic GFR-binding peptide
  MOD_RES (1)..(3): Xaa is C or S

SEQ ID NO: 56675 - protein, 32 aa, Artificial Sequence
  Cyclic GFR-binding peptide
  MOD_RES (1)..(1): Xaa is C or S
XQSHEELSMEGIHQGQHPKIRMIQMTINSQGT

SEQ ID NO: 56676 - protein, 23 aa, Artificial Sequence
  Cyclic GFR-binding peptide
SMEGIFIPKKRVIEMIQVTINSL

SEQ ID NO: 56677 - protein, 35 aa, Artificial Sequence
  Cyclic GFR-binding peptide
  MOD_RES (1)..(3): Xaa is C or S
XEXKNHQLFVTAKKHQGQHPKIRIKRMQVPREETP

SEQ ID NO: 56678 - protein, 40 aa, Artificial Sequence; identical to SEQ ID NO: 14199
  Cyclic GFR-binding peptide
  MOD_RES (1)..(3)..(37): Xaa is C or S

SEQ ID NO: 56679 - protein, 36 aa, Artificial Sequence
  Cyclic GFR-binding peptide
  MOD_RES (2)..(4): Xaa is C or S
AXAXELHEELRVTAKKLKPKKRVYEIKRVQVPRHHV

SEQ ID NO: 56680 - protein, 43 aa, Artificial Sequence; identical to SEQ ID NO: 14201
  Cyclic GFR-binding peptide
  MOD_RES (2)..(4)..(38): Xaa is C or S

SEQ ID NO: 56681 - protein, 31 aa, Artificial Sequence
  Cyclic GFR-binding peptide
  MOD_RES (1)..(1): Xaa is C or S
XKNHQLFSMEGLHQGQHPKIRMIQMTINSEE

SEQ ID NO: 56682 - protein, 33 aa, Artificial Sequence
  Cyclic GFR-binding peptide
  MOD_RES (2)..(2): Xaa is C or S
EXKNHQLFSMEGLHQGQHPKIRMIQMTINSEET

SEQ ID NO: 56683 - protein, 27 aa, Artificial Sequence
  Cyclic GFR-binding peptide
LRVTAKKLKPKKRVYEIKRVQVPRHHV

SEQ ID NO: 56684 - protein, 28 aa, Artificial Sequence
  Cyclic GFR-binding peptide
DELTVQVEKFIPKKRVIEVKAVKVSRLQ

SEQ ID NO: 56685 - protein, 28 aa, Artificial Sequence
  Cyclic GFR-binding peptide
LHEELRVTAKKLKPKKRVYEIKRVQVPR

SEQ ID NO: 56686 - protein, 28 aa, Artificial Sequence
  Cyclic GFR-binding peptide
LTSMEGIFIPKKRVIEMIQVTINSLQVQ

SEQ ID NO: 56687 - protein, 29 aa, Artificial Sequence
  Cyclic GFR-binding peptide
ALHDELTSMEGLFIPKKRVIEMIQVTINS

SEQ ID NO: 56688 - protein, 38 aa, Artificial Sequence; identical to SEQ ID NO: 14204
  Cyclic GFR-binding peptide
  MOD_RES (35)..(35): Xaa is C or S

SEQ ID NO: 56689 - protein, 35 aa, Artificial Sequence; identical to SEQ ID NO: 14207
  Cyclic GFR-binding peptide
  MOD_RES (1)..(1): Xaa is C or S

SEQ ID NO: 56690 - protein, 32 aa, Artificial Sequence
  Cyclic GFR-binding peptide
  MOD_RES (28)..(28): Xaa is C or S
VTAKKHQGQHPKIRIKRMQVPRQGTPVXELGE

SEQ ID NO: 56691 - protein, 41 aa, Artificial Sequence; identical to SEQ ID NO: 14208
  Cyclic GFR-binding peptide
  MOD_RES (1)..(3)..(37): Xaa is C or S

SEQ ID NO: 56692 - protein, 26 aa, Artificial Sequence
  Cyclic GFR-binding peptide
FVTAKKHQGQHPKIRIKRMQVPREET

SEQ ID NO: 56693 - protein, 39 aa, Artificial Sequence; identical to SEQ ID NO: 14210
  Cyclic GFR-binding peptide
  MOD_RES (35)..(35): Xaa is C or S

SEQ ID NO: 56694 - protein, 38 aa, Artificial Sequence; identical to SEQ ID NO: 14212
  Cyclic GFR-binding peptide
  MOD_RES (2)..(2): Xaa is C or S

SEQ ID NO: 56695 - protein, 30 aa, Artificial Sequence
  Cyclic GFR-binding peptide
HQLFVTAKKHQGQHPKIRIKRMQVPREETP

SEQ ID NO: 56696 - protein, 31 aa, Artificial Sequence
  Cyclic GFR-binding peptide
  MOD_RES (2)..(2): Xaa is C or S
KXALHDELTVQVEKFIPKKRVIEVKAVKVSR

SEQ ID NO: 56697 - protein, 40 aa, Artificial Sequence; identical to SEQ ID NO: 14211
  Cyclic GFR-binding peptide
  MOD_RES (2)..(39): Xaa is C or S

SEQ ID NO: 56698 - protein, 30 aa, Artificial Sequence
  Cyclic GFR-binding peptide
  MOD_RES (2)..(2): Xaa is C or S
EXKNHQLFVTAKKHQGQHPKIRIKRMQVPR

SEQ ID NO: 56699 - protein, 29 aa, Artificial Sequence
  Cyclic GFR-binding peptide
TSMEGIFIPKKRVIEMIQVTINSLQVQTP

SEQ ID NO: 56700 - protein, 39 aa, Artificial Sequence; identical to SEQ ID NO: 14215
  Cyclic GFR-binding peptide
  MOD_RES (35)..(35): Xaa is C or S

SEQ ID NO: 56701 - protein, 31 aa, Artificial Sequence
  Cyclic GFR-binding peptide
  MOD_RES (31)..(31): Xaa is C or S
TSMEGLFIPKKRVIEMIQVTINSLQVQTPRX

SEQ ID NO: 56702 - protein, 31 aa, Artificial Sequence
  Cyclic GFR-binding peptide
  MOD_RES (30)..(30): Xaa is C or S
LFVTAKKHQGQHPKIRIKRMQVPREETPVXE

SEQ ID NO: 56703 - protein, 40 aa, Artificial Sequence; identical to SEQ ID NO: 14216
  Cyclic GFR-binding peptide
  MOD_RES (36)..(36): Xaa is C or S

SEQ ID NO: 56704 - protein, 31 aa, Artificial Sequence
  Cyclic GFR-binding peptide
  MOD_RES (1)..(3): Xaa is C or S
XEXQSHEELSMEGIHQGQHPKIRMIQMTINS

SEQ ID NO: 56705 - protein, 33 aa, Artificial Sequence
  Cyclic GFR-binding peptide
  MOD_RES (32)..(32): Xaa is C or S
HEELVTAKKHQGQHPKIRIKRMQVPRQGTPVXE

SEQ ID NO: 56706 - protein, 40 aa, Artificial Sequence; identical to SEQ ID NO: 14217
  Cyclic GFR-binding peptide
  MOD_RES (1)..(3)..(40): Xaa is C or S

SEQ ID NO: 56707 - protein, 41 aa, Artificial Sequence; identical to SEQ ID NO: 14219
  Cyclic GFR-binding peptide
  MOD_RES (2)..(4)..(41): Xaa is C or S

SEQ ID NO: 56708 - protein, 29 aa, Artificial Sequence
  Cyclic GFR-binding peptide
LTSMEGIFIPKKRVIEMIQVTINSLQVQT

SEQ ID NO: 56709 - protein, 26 aa, Artificial Sequence
  Cyclic GFR-binding peptide
DELTSMEGLFIPKKRVIEMIQVTINS

SEQ ID NO: 56710 - protein, 37 aa, Artificial Sequence; identical to SEQ ID NO: 14221
  Cyclic GFR-binding peptide
  MOD_RES (37)..(37): Xaa is C or S

SEQ ID NO: 56711 - protein, 31 aa, Artificial Sequence
  Cyclic GFR-binding peptide
LTSMEGIFIPKKRVIEMIQVTINSLQVQTPR

SEQ ID NO: 56712 - protein, 42 aa, Artificial Sequence; identical to SEQ ID NO: 14223
  Cyclic GFR-binding peptide
  MOD_RES (2)..(36): Xaa is C or S

SEQ ID NO: 56713 - protein, 30 aa, Artificial Sequence
  Cyclic GFR-binding peptide
HEELSMEGIHQGQHPKIRMIQMTINSQGTP

SEQ ID NO: 56714 - protein, 36 aa, Artificial Sequence; identical to SEQ ID NO: 14225
  Cyclic GFR-binding peptide
  MOD_RES (2)..(2): Xaa is C or S

SEQ ID NO: 56715 - protein, 33 aa, Artificial Sequence
  Cyclic GFR-binding peptide
  MOD_RES (1)..(1): Xaa is C or S
XKNHQLFSMEGLHQGQHPKIRMIQMTINSEETP

SEQ ID NO: 56716 - protein, 30 aa, Artificial Sequence
  Cyclic GFR-binding peptide
EELRVTAKKLKPKKRVYEIKRVQVPRHHVR

SEQ ID NO: 56717 - protein, 37 aa, Artificial Sequence
  Cyclic GFR-binding peptide
  MOD_RES (34)..(34): Xaa is C or S
EELRVTAKKLKPKKRVYEIKRVQVPRHHVRSPQXKVS

SEQ ID NO: 56718 - protein, 36 aa, Artificial Sequence
  Cyclic GFR-binding peptide
  MOD_RES (2)..(4): Xaa is C or S
RXEXQSHEELVTAKKHQGQHPKIRIKRMQVPRQGTP

SEQ ID NO: 56719 - protein, 41 aa, Artificial Sequence; identical to SEQ ID NO: 14228
  Cyclic GFR-binding peptide
  MOD_RES (1)..(3)..(40): Xaa is C or S

SEQ ID NO: 56720 - protein, 34 aa, Artificial Sequence; identical to SEQ ID NO: 14229
  Cyclic GFR-binding peptide
  MOD_RES (1)..(1): Xaa is C or S

SEQ ID NO: 56721 - protein, 39 aa, Artificial Sequence; identical to SEQ ID NO: 14230
  Cyclic GFR-binding peptide
  MOD_RES (35)..(35): Xaa is C or S

SEQ ID NO: 56722 - protein, 39 aa, Artificial Sequence; identical to SEQ ID NO: 14231
  Cyclic GFR-binding peptide
  MOD_RES (2)..(4): Xaa is C or S

SEQ ID NO: 56723 - protein, 37 aa, Artificial Sequence
  Cyclic GFR-binding peptide
  MOD_RES (32)..(32): Xaa is C or S
HEELVTAKKHQGQHPKIRIKRMQVPRQGTPVXELGED

SEQ ID NO: 56724 - protein, 34 aa, Artificial Sequence; identical to SEQ ID NO: 14232
  Cyclic GFR-binding peptide

SEQ ID NO: 56725 - protein, 31 aa, Artificial Sequence
  Cyclic GFR-binding peptide
  MOD_RES (29)..(29): Xaa is C or S
FVQVEKHQGQHPKIRVKAMKVSREETPVXEL

SEQ ID NO: 56726 - protein, 32 aa, Artificial Sequence
  Cyclic GFR-binding peptide
  MOD_RES (29)..(29): Xaa is C or S
LVQVEKHQGQHPKIRVKAMKVSRQGTPVXELG

SEQ ID NO: 56727 - protein, 29 aa, Artificial Sequence
  Cyclic GFR-binding peptide
KNHQLFVQVEKHQGQHPKIRVKAMKVSRE

SEQ ID NO: 56728 - protein, 28 aa, Artificial Sequence
  Cyclic GFR-binding peptide
KNHQLFSMEGLHQGQHPKIRMIQMTINS

SEQ ID NO: 56729 - protein, 32 aa, Artificial Sequence
  Cyclic GFR-binding peptide
  MOD_RES (1)..(3): Xaa is C or S
XKXALHDELTSMEGLFIPKKRVIEMIQVTINS

SEQ ID NO: 56730 - protein, 30 aa, Artificial Sequence
  Cyclic GFR-binding peptide
LHDELTSMEGIFIPKKRVIEMIQVTINSLQ

SEQ ID NO: 56731 - protein, 34 aa, Artificial Sequence; identical to SEQ ID NO: 14234
  Cyclic GFR-binding peptide
  MOD_RES (34)..(34): Xaa is C or S

SEQ ID NO: 56732 - protein, 28 aa, Artificial Sequence
  Cyclic GFR-binding peptide
LSMEGIHQGQHPKIRMIQMTINSQGTPV

SEQ ID NO: 56733 - protein, 38 aa, Artificial Sequence; identical to SEQ ID NO: 14235
  Cyclic GFR-binding peptide
  MOD_RES (1)..(38): Xaa is C or S

SEQ ID NO: 56734 - protein, 38 aa, Artificial Sequence; identical to SEQ ID NO: 14236
  Cyclic GFR-binding peptide
  MOD_RES (1)..(35): Xaa is C or S

SEQ ID NO: 56735 - protein, 24 aa, Artificial Sequence
  Cyclic GFR-binding peptide
VTAKKHQGQHPKIRIKRMQVPREE

SEQ ID NO: 56736 - protein, 39 aa, Artificial Sequence; identical to SEQ ID NO: 14237
  Cyclic GFR-binding peptide
  MOD_RES (2)..(39): Xaa is C or S

SEQ ID NO: 56737 - protein, 32 aa, Artificial Sequence
  Cyclic GFR-binding peptide
  MOD_RES (1)..(1): Xaa is C or S
XELHEELRSMEGLLKPKKRVYEMIQVTINSHH

SEQ ID NO: 56738 - protein, 37 aa, Artificial Sequence; identical to SEQ ID NO: 14238
  Cyclic GFR-binding peptide
  MOD_RES (34)..(34): Xaa is C or S

SEQ ID NO: 56739 - protein, 31 aa, Artificial Sequence
  Cyclic GFR-binding peptide
LRSMEGLLKPKKRVYEMIQVTINSHHVRSPQ

SEQ ID NO: 56740 - protein, 34 aa, Artificial Sequence; identical to SEQ ID NO: 14239
  Cyclic GFR-binding peptide
  MOD_RES (33)..(33): Xaa is C or S

SEQ ID NO: 56741 - protein, 42 aa, Artificial Sequence; identical to SEQ ID NO: 14240
  Cyclic GFR-binding peptide
  MOD_RES (2)..(4)..(38): Xaa is C or S

SEQ ID NO: 56742 - protein, 35 aa, Artificial Sequence
  Cyclic GFR-binding peptide
  MOD_RES (1)..(3): Xaa is C or S
XKXALHDELTVQVEKFIPKKRVIEVKAVKVSRLQV

SEQ ID NO: 56743 - protein, 23 aa, Artificial Sequence
  Cyclic GFR-binding peptide
FVQVEKHQGQHPKIRVKAMKVSR

SEQ ID NO: 56744 - protein, 30 aa, Artificial Sequence
  Cyclic GFR-binding peptide
  MOD_RES (2)..(2): Xaa is C or S
EXQSHEELVTAKKHQGQHPKIRIKRMQVPR

SEQ ID NO: 56745 - protein, 37 aa, Artificial Sequence; identical to SEQ ID NO: 14245
  Cyclic GFR-binding peptide
  MOD_RES (1)..(35): Xaa is C or S

SEQ ID NO: 56746 - protein, 23 aa, Artificial Sequence
  Cyclic GFR-binding peptide
LVQVEKHQGQHPKIRVKAMKVSR

SEQ ID NO: 56747 - protein, 35 aa, Artificial Sequence; identical to SEQ ID NO: 14246
  Cyclic GFR-binding peptide
  MOD_RES (1)..(35): Xaa is C or S

SEQ ID NO: 56748 - protein, 41 aa, Artificial Sequence; identical to SEQ ID NO: 14244
  Cyclic GFR-binding peptide
  MOD_RES (1)..(3)..(40): Xaa is C or S

SEQ ID NO: 56749 - protein, 33 aa, Artificial Sequence
  Cyclic GFR-binding peptide
  MOD_RES (1)..(1): Xaa is C or S
XALHDELTSMEGLFIPKKRVIEMIQVTINSLQV

SEQ ID NO: 56750 - protein, 39 aa, Artificial Sequence; identical to SEQ ID NO: 14248
  Cyclic GFR-binding peptide
  MOD_RES (2)..(36): Xaa is C or S

SEQ ID NO: 56751 - protein, 28 aa, Artificial Sequence
  Cyclic GFR-binding peptide
SMEGILKPKKRVYEMIQVTINSHHVRSP

SEQ ID NO: 56752 - protein, 33 aa, Artificial Sequence
  Cyclic GFR-binding peptide
EELRSMEGLLKPKKRVYEMIQVTINSHHVRSPQ

SEQ ID NO: 56753 - protein, 24 aa, Artificial Sequence
  Cyclic GFR-binding peptide
RSMEGLLKPKKRVYEMIQVTINSH

SEQ ID NO: 56754 - protein, 38 aa, Artificial Sequence; identical to SEQ ID NO: 14249
  Cyclic GFR-binding peptide
  MOD_RES (1)..(3)..(37): Xaa is C or S

SEQ ID NO: 56755 - protein, 28 aa, Artificial Sequence
  Cyclic GFR-binding peptide
LHEELRSMEGLLKPKKRVYEMIQVTINS

SEQ ID NO: 56756 - protein, 29 aa, Artificial Sequence
  Cyclic GFR-binding peptide
  MOD_RES (28)..(28): Xaa is C or S
VQVEKHQGQHPKIRVKAMKVSREETPVXE

SEQ ID NO: 56757 - protein, 33 aa, Artificial Sequence
  Cyclic GFR-binding peptide
  MOD_RES (2)..(4): Xaa is C or S
RXEXQSHEELSMEGIHQGQHPKIRMIQMTINSQ

SEQ ID NO: 56758 - protein, 33 aa, Artificial Sequence
  Cyclic GFR-binding peptide
  MOD_RES (28)..(28): Xaa is C or S
VQVEKHQGQHPKIRVKAMKVSRQGTPVXELGED

SEQ ID NO: 56759 - protein, 29 aa, Artificial Sequence
  Cyclic GFR-binding peptide
EELRVTAKKLKPKKRVYEIKRVQVPRHHV

SEQ ID NO: 56760 - protein, 42 aa, Artificial Sequence; identical to SEQ ID NO: 14252
  Cyclic GFR-binding peptide
  MOD_RES (1)..(38): Xaa is C or S

SEQ ID NO: 56761 - protein, 26 aa, Artificial Sequence
  Cyclic GFR-binding peptide
EELVTAKKHQGQHPKIRIKRMQVPRQ

SEQ ID NO: 56762 - protein, 31 aa, Artificial Sequence
  Cyclic GFR-binding peptide
ELRVTAKKLKPKKRVYEIKRVQVPRHHVRSP

SEQ ID NO: 56763 - protein, 34 aa, Artificial Sequence
  Cyclic GFR-binding peptide
  MOD_RES (2)..(4): Xaa is C or S
RXEXQSHEELSMEGIHQGQHPKIRMIQMTINSQG

SEQ ID NO: 56764 - protein, 23 aa, Artificial Sequence
  Cyclic GFR-binding peptide
TSMEGIFIPKKRVIEMIQVTINS

SEQ ID NO: 56765 - protein, 33 aa, Artificial Sequence
  Cyclic GFR-binding peptide
  MOD_RES (33)..(33): Xaa is C or S
ELTVQVEKFIPKKRVIEVKAVKVSRLQVQTPRX

SEQ ID NO: 56766 - protein, 36 aa, Artificial Sequence
  Cyclic GFR-binding peptide
  MOD_RES (33)..(33): Xaa is C or S
ELRSMEGILKPKKRVYEMIQVTINSHHVRSPQXKVS

SEQ ID NO: 56767 - protein, 34 aa, Artificial Sequence
  Cyclic GFR-binding peptide
  MOD_RES (2)..(2): Xaa is C or S
AXELHEELRSMEGLLKPKKRVYEMIQVTINSHHV

SEQ ID NO: 56768 - protein, 27 aa, Artificial Sequence
  Cyclic GFR-binding peptide
NHQLFSMEGLHQGQHPKIRMIQMTINS

SEQ ID NO: 56769 - protein, 37 aa, Artificial Sequence
  Cyclic GFR-binding peptide
  MOD_RES (2)..(4): Xaa is C or S
AXAXELHEELRSMEGILKPKKRVYEMIQVTINSHHVR

SEQ ID NO: 56770 - protein, 42 aa, Artificial Sequence; identical to SEQ ID NO: 14256
  Cyclic GFR-binding peptide
  MOD_RES (2)..(4)..(38): Xaa is C or S

SEQ ID NO: 56771 - protein, 28 aa, Artificial Sequence
  Cyclic GFR-binding peptide
LHDELTVQVEKFIPKKRVIEVKAVKVSR

SEQ ID NO: 56772 - protein, 27 aa, Artificial Sequence
  Cyclic GFR-binding peptide
HDELTSMEGIFIPKKRVIEMIQVTINS

SEQ ID NO: 56773 - protein, 39 aa, Artificial Sequence; identical to SEQ ID NO: 14257
  Cyclic GFR-binding peptide
  MOD_RES (37)..(37): Xaa is C or S

SEQ ID NO: 56774 - protein, 32 aa, Artificial Sequence
  Cyclic GFR-binding peptide
ELHEELRSMEGILKPKKRVYEMIQVTINSHHV

SEQ ID NO: 56775 - protein, 33 aa, Artificial Sequence
  Cyclic GFR-binding peptide
  MOD_RES (2)..(2): Xaa is C or S
AXELHEELRSMEGLLKPKKRVYEMIQVTINSHH

SEQ ID NO: 56776 - protein, 29 aa, Artificial Sequence
  Cyclic GFR-binding peptide
EELVQVEKHQGQHPKIRVKAMKVSRQGTP

SEQ ID NO: 56777 - protein, 35 aa, Artificial Sequence
  Cyclic GFR-binding peptide
  MOD_RES (29)..(29): Xaa is C or S
FVTAKKHQGQHPKIRIKRMQVPREETPVXELGEDN

SEQ ID NO: 56778 - protein, 34 aa, Artificial Sequence; identical to SEQ ID NO: 14261
  Cyclic GFR-binding peptide

SEQ ID NO: 56779 - protein, 36 aa, Artificial Sequence; identical to SEQ ID NO: 14260
  Cyclic GFR-binding peptide
  MOD_RES (34)..(34): Xaa is C or S

SEQ ID NO: 56780 - protein, 25 aa, Artificial Sequence
  Cyclic GFR-binding peptide
LRVTAKKLKPKKRVYEIKRVQVPRH

SEQ ID NO: 56781 - protein, 40 aa, Artificial Sequence; identical to SEQ ID NO: 14264
  Cyclic GFR-binding peptide
  MOD_RES (37)..(37): Xaa is C or S

SEQ ID NO: 56782 - protein, 36 aa, Artificial Sequence; identical to SEQ ID NO: 14263
  Cyclic GFR-binding peptide
  MOD_RES (2)..(36): Xaa is C or S

SEQ ID NO: 56783 - protein, 42 aa, Artificial Sequence; identical to SEQ ID NO: 14265
  Cyclic GFR-binding peptide
  MOD_RES (2)..(4)..(41): Xaa is C or S

SEQ ID NO: 56784 - protein, 35 aa, Artificial Sequence; identical to SEQ ID NO: 14266
  Cyclic GFR-binding peptide
  MOD_RES (1)..(1): Xaa is C or S

SEQ ID NO: 56785 - protein, 38 aa, Artificial Sequence; identical to SEQ ID NO: 14267
  Cyclic GFR-binding peptide
  MOD_RES (34)..(34): Xaa is C or S

SEQ ID NO: 56786 - protein, 35 aa, Artificial Sequence; identical to SEQ ID NO: 14268
  Cyclic GFR-binding peptide
  MOD_RES (2)..(2): Xaa is C or S

SEQ ID NO: 56787 - protein, 27 aa, Artificial Sequence
  Cyclic GFR-binding peptide
ELVTAKKHQGQHPKIRIKRMQVPRQGT

SEQ ID NO: 56788 - protein, 35 aa, Artificial Sequence
  Cyclic GFR-binding peptide
  MOD_RES (1)..(3): Xaa is C or S
XEXQSHEELVQVEKHQGQHPKIRVKAMKVSRQGTP

SEQ ID NO: 56789 - protein, 33 aa, Artificial Sequence
  Cyclic GFR-binding peptide
  MOD_RES (33)..(33): Xaa is C or S
ELRSMEGLLKPKKRVYEMIQVTINSHHVRSPQX

SEQ ID NO: 56790 - protein, 31 aa, Artificial Sequence
  Cyclic GFR-binding peptide
HQLFVQVEKHQGQHPKIRVKAMKVSREETPV

SEQ ID NO: 56791 - protein, 36 aa, Artificial Sequence
  Cyclic GFR-binding peptide
  MOD_RES (32)..(32): Xaa is C or S
LRVTAKKLKPKKRVYEIKRVQVPRHHVRSPQXKVSS

SEQ ID NO: 56792 - protein, 33 aa, Artificial Sequence
  Cyclic GFR-binding peptide
  MOD_RES (1)..(1): Xaa is C or S
XELHEELRVTAKKLKPKKRVYEIKRVQVPRHHV

SEQ ID NO: 56793 - protein, 34 aa, Artificial Sequence
  Cyclic GFR-binding peptide
  MOD_RES (30)..(30): Xaa is C or S
LFSMEGLHQGQHPKIRMIQMTINSEETPVXELGE

SEQ ID NO: 56794 - protein, 40 aa, Artificial Sequence; identical to SEQ ID NO: 14273
  Cyclic GFR-binding peptide
  MOD_RES (34)..(34): Xaa is C or S

SEQ ID NO: 56795 - protein, 27 aa, Artificial Sequence
  Cyclic GFR-binding peptide
EELSMEGIHQGQHPKIRMIQMTINSQG

SEQ ID NO: 56796 - protein, 35 aa, Artificial Sequence; identical to SEQ ID NO: 14274
  Cyclic GFR-binding peptide
  MOD_RES (34)..(34): Xaa is C or S

SEQ ID NO: 56797 - protein, 30 aa, Artificial Sequence
  Cyclic GFR-binding peptide
RSMEGLLKPKKRVYEMIQVTINSHHVRSPQ

SEQ ID NO: 56798 - protein, 32 aa, Artificial Sequence
  Cyclic GFR-binding peptide
ELRSMEGLLKPKKRVYEMIQVTINSHHVRSPQ

SEQ ID NO: 56799 - protein, 31 aa, Artificial Sequence
  Cyclic GFR-binding peptide
  MOD_RES (1)..(1): Xaa is C or S
XQSHEELVTAKKHQGQHPKIRIKRMQVPRQG

SEQ ID NO: 56800 - protein, 38 aa, Artificial Sequence; identical to SEQ ID NO: 14276
  Cyclic GFR-binding peptide
  MOD_RES (1)..(35): Xaa is C or S

SEQ ID NO: 56801 - protein, 25 aa, Artificial Sequence
  Cyclic GFR-binding peptide
QLFVQVEKHQGQHPKIRVKAMKVSR

SEQ ID NO: 56802 - protein, 35 aa, Artificial Sequence; identical to SEQ ID NO: 14278
  Cyclic GFR-binding peptide
  MOD_RES (35)..(35): Xaa is C or S

SEQ ID NO: 56803 - protein, 34 aa, Artificial Sequence
  Cyclic GFR-binding peptide
  MOD_RES (32)..(32): Xaa is C or S
HEELVTAKKHQGQHPKIRIKRMQVPRQGTPVXEL

SEQ ID NO: 56804 - protein, 36 aa, Artificial Sequence
  Cyclic GFR-binding peptide
  MOD_RES (30)..(30): Xaa is C or S
ELSMEGIHQGQHPKIRMIQMTINSQGTPVXELGEDN

SEQ ID NO: 56805 - protein, 28 aa, Artificial Sequence
  Cyclic GFR-binding peptide
ELTSMEGIFIPKKRVIEMIQVTINSLQV

SEQ ID NO: 56806 - protein, 30 aa, Artificial Sequence
  Cyclic GFR-binding peptide
SHEELSMEGIHQGQHPKIRMIQMTINSQGT

SEQ ID NO: 56807 - protein, 36 aa, Artificial Sequence; identical to SEQ ID NO: 14281
  Cyclic GFR-binding peptide
  MOD_RES (2)..(36): Xaa is C or S

SEQ ID NO: 56808 - protein, 34 aa, Artificial Sequence
  Cyclic GFR-binding peptide
  MOD_RES (30)..(30): Xaa is C or S
LFVQVEKHQGQHPKIRVKAMKVSREETPVXELGE

SEQ ID NO: 56809 - protein, 31 aa, Artificial Sequence
  Cyclic GFR-binding peptide
QSHEELSMEGIHQGQHPKIRMIQMTINSQGT

SEQ ID NO: 56810 - protein, 35 aa, Artificial Sequence; identical to SEQ ID NO: 14282
  Cyclic GFR-binding peptide
  MOD_RES (34)..(34): Xaa is C or S

SEQ ID NO: 56811 - protein, 34 aa, Artificial Sequence
  Cyclic GFR-binding peptide
  MOD_RES (29)..(29): Xaa is C or S
FVTAKKHQGQHPKIRIKRMQVPREETPVXELGED

SEQ ID NO: 56812 - protein, 36 aa, Artificial Sequence; identical to SEQ ID NO: 14284
  Cyclic GFR-binding peptide
  MOD_RES (2)..(2): Xaa is C or S

SEQ ID NO: 56813 - protein, 31 aa, Artificial Sequence
  Cyclic GFR-binding peptide
ALHDELTSMEGLFIPKKRVIEMIQVTINSLQ

SEQ ID NO: 56814 - protein, 27 aa, Artificial Sequence
  Cyclic GFR-binding peptide
FVTAKKHQGQHPKIRIKRMQVPREETP

SEQ ID NO: 56815 - protein, 25 aa, Artificial Sequence
  Cyclic GFR-binding peptide
SMEGIHQGQHPKIRMIQMTINSQGT

SEQ ID NO: 56816 - protein, 35 aa, Artificial Sequence; identical to SEQ ID NO: 14289
  Cyclic GFR-binding peptide
  MOD_RES (33)..(33): Xaa is C or S

SEQ ID NO: 56817 - protein, 41 aa, Artificial Sequence; identical to SEQ ID NO: 14290
  Cyclic GFR-binding peptide
  MOD_RES (37)..(37): Xaa is C or S

SEQ ID NO: 56818 - protein, 30 aa, Artificial Sequence
  Cyclic GFR-binding peptide
LRSMEGLLKPKKRVYEMIQVTINSHHVRSP

SEQ ID NO: 56819 - protein, 36 aa, Artificial Sequence; identical to SEQ ID NO: 14292
  Cyclic GFR-binding peptide
  MOD_RES (36)..(36): Xaa is C or S

SEQ ID NO: 56820 - protein, 35 aa, Artificial Sequence
  Cyclic GFR-binding peptide
  MOD_RES (2)..(4): Xaa is C or S
EXKXALHDELTVQVEKFIPKKRVIEVKAVKVSRLQ

SEQ ID NO: 56821 - protein, 34 aa, Artificial Sequence
  Cyclic GFR-binding peptide
  MOD_RES (31)..(31): Xaa is C or S
QLFSMEGLHQGQHPKIRMIQMTINSEETPVXELG

SEQ ID NO: 56822 - protein, 35 aa, Artificial Sequence
  Cyclic GFR-binding peptide
  MOD_RES (32)..(32): Xaa is C or S
LTVQVEKFIPKKRVIEVKAVKVSRLQVQTPRXQVN

SEQ ID NO: 56823 - protein, 35 aa, Artificial Sequence
  Cyclic GFR-binding peptide
  MOD_RES (1)..(3): Xaa is C or S
XEXKNHQLFVQVEKHQGQHPKIRVKAMKVSREETP

SEQ ID NO: 56824 - protein, 32 aa, Artificial Sequence
  Cyclic GFR-binding peptide
LHEELRSMEGLLKPKKRVYEMIQVTINSHHVR

SEQ ID NO: 56825 - protein, 42 aa, Artificial Sequence; identical to SEQ ID NO: 14296
  Cyclic GFR-binding peptide
  MOD_RES (1)..(3)..(40): Xaa is C or S

SEQ ID NO: 56826 - protein, 35 aa, Artificial Sequence
  Cyclic GFR-binding peptide
  MOD_RES (32)..(32): Xaa is C or S
LRVTAKKLKPKKRVYEIKRVQVPRHHVRSPQXKVS

SEQ ID NO: 56827 - protein, 30 aa, Artificial Sequence
  Cyclic GFR-binding peptide
LHDELTSMEGLFIPKKRVIEMIQVTINSLQ

SEQ ID NO: 56828 - protein, 32 aa, Artificial Sequence
  Cyclic GFR-binding peptide
  MOD_RES (1)..(1): Xaa is C or S
XALHDELTSMEGLFIPKKRVIEMIQVTINSLQ

SEQ ID NO: 56829 - protein, 30 aa, Artificial Sequence
  Cyclic GFR-binding peptide
ELRVTAKKLKPKKRVYEIKRVQVPRHHVRS

SEQ ID NO: 56830 - protein, 34 aa, Artificial Sequence
  Cyclic GFR-binding peptide
  MOD_RES (30)..(30): Xaa is C or S
SMEGLFIPKKRVIEMIQVTINSLQVQTPRXQVNR

SEQ ID NO: 56831 - protein, 31 aa, Artificial Sequence
  Cyclic GFR-binding peptide
HQLFSMEGLHQGQHPKIRMIQMTINSEETPV

SEQ ID NO: 56832 - protein, 32 aa, Artificial Sequence
  Cyclic GFR-binding peptide
KNHQLFVQVEKHQGQHPKIRVKAMKVSREETP

SEQ ID NO: 56833 - protein, 28 aa, Artificial Sequence
  Cyclic GFR-binding peptide
  MOD_RES (28)..(28): Xaa is C or S
VQVEKHQGQHPKIRVKAMKVSRQGTPVX

SEQ ID NO: 56834 - protein, 34 aa, Artificial Sequence
  Cyclic GFR-binding peptide
  MOD_RES (2)..(4): Xaa is C or S
RXEXQSHEELVQVEKHQGQHPKIRVKAMKVSRQG

SEQ ID NO: 56835 - protein, 33 aa, Artificial Sequence
  Cyclic GFR-binding peptide
  MOD_RES (1)..(1): Xaa is C or S
XELHEELRSMEGLLKPKKRVYEMIQVTINSHHV

SEQ ID NO: 56836 - protein, 37 aa, Artificial Sequence
  Cyclic GFR-binding peptide
  MOD_RES (34)..(34): Xaa is C or S
DELTSMEGLFIPKKRVIEMIQVTINSLQVQTPRXQVN

SEQ ID NO: 56837 - protein, 27 aa, Artificial Sequence
  Cyclic GFR-binding peptide
FSMEGLHQGQHPKIRMIQMTINSEETP

SEQ ID NO: 56838 - protein, 36 aa, Artificial Sequence; identical to SEQ ID NO: 14299
  Cyclic GFR-binding peptide
  MOD_RES (35)..(35): Xaa is C or S

SEQ ID NO: 56839 - protein, 31 aa, Artificial Sequence
  Cyclic GFR-binding peptide
LHDELTSMEGLFIPKKRVIEMIQVTINSLQV

SEQ ID NO: 56840 - protein, 28 aa, Artificial Sequence
  Cyclic GFR-binding peptide
LRSMEGILKPKKRVYEMIQVTINSHHVR

SEQ ID NO: 56841 - protein, 32 aa, Artificial Sequence
  Cyclic GFR-binding peptide
  MOD_RES (30)..(30): Xaa is C or S
ELVTAKKHQGQHPKIRIKRMQVPRQGTPVXEL

SEQ ID NO: 56842 - protein, 26 aa, Artificial Sequence
  Cyclic GFR-binding peptide
EELRVTAKKLKPKKRVYEIKRVQVPR

SEQ ID NO: 56843 - protein, 30 aa, Artificial Sequence
  Cyclic GFR-binding peptide
EELSMEGIHQGQHPKIRMIQMTINSQGTPV

SEQ ID NO: 56844 - protein, 34 aa, Artificial Sequence
  Cyclic GFR-binding peptide
  MOD_RES (2)..(4): Xaa is C or S
RXEXQSHEELVTAKKHQGQHPKIRIKRMQVPRQG

SEQ ID NO: 56845 - protein, 39 aa, Artificial Sequence; identical to SEQ ID NO: 14305
  Cyclic GFR-binding peptide
  MOD_RES (34)..(34): Xaa is C or S

SEQ ID NO: 56846 - protein, 38 aa, Artificial Sequence; identical to SEQ ID NO: 14306
  Cyclic GFR-binding peptide
  MOD_RES (2)..(4)..(38): Xaa is C or S

SEQ ID NO: 56847 - protein, 37 aa, Artificial Sequence
  Cyclic GFR-binding peptide
  MOD_RES (31)..(31): Xaa is C or S
EELSMEGIHQGQHPKIRMIQMTINSQGTPVXELGEDN

SEQ ID NO: 56848 - protein, 31 aa, Artificial Sequence
  Cyclic GFR-binding peptide
  MOD_RES (31)..(31): Xaa is C or S
EELVQVEKHQGQHPKIRVKAMKVSRQGTPVX

SEQ ID NO: 56849 - protein, 44 aa, Artificial Sequence; identical to SEQ ID NO: 14310
  Cyclic GFR-binding peptide
  MOD_RES (2)..(4)..(38): Xaa is C or S

SEQ ID NO: 56850 - protein, 36 aa, Artificial Sequence; identical to SEQ ID NO: 14311
  Cyclic GFR-binding peptide
  MOD_RES (36)..(36): Xaa is C or S

SEQ ID NO: 56851 - protein, 39 aa, Artificial Sequence; identical to SEQ ID NO: 14312
  Cyclic GFR-binding peptide
  MOD_RES (2)..(36): Xaa is C or S

SEQ ID NO: 56852 - protein, 43 aa, Artificial Sequence; identical to SEQ ID NO: 14313
  Cyclic GFR-binding peptide
  MOD_RES (2)..(4)..(41): Xaa is C or S

SEQ ID NO: 56853 - protein, 36 aa, Artificial Sequence; identical to SEQ ID NO: 14314
  Cyclic GFR-binding peptide
  MOD_RES (1)..(35): Xaa is C or S

SEQ ID NO: 56854 - protein, 28 aa, Artificial Sequence
  Cyclic GFR-binding peptide
ELVTAKKHQGQHPKIRIKRMQVPRQGTP

SEQ ID NO: 56855 - protein, 25 aa, Artificial Sequence
  Cyclic GFR-binding peptide
RSMEGILKPKKRVYEMIQVTINSHH

SEQ ID NO: 56856 - protein, 42 aa, Artificial Sequence; identical to SEQ ID NO: 14315
  Cyclic GFR-binding peptide
  MOD_RES (2)..(4)..(38): Xaa is C or S

SEQ ID NO: 56857 - protein, 34 aa, Artificial Sequence
  Cyclic GFR-binding peptide
  MOD_RES (32)..(32): Xaa is C or S
LRSMEGLLKPKKRVYEMIQVTINSHHVRSPQXKV

SEQ ID NO: 56858 - protein, 33 aa, Artificial Sequence
  Cyclic GFR-binding peptide
  MOD_RES (30)..(30): Xaa is C or S
VQVEKFIPKKRVIEVKAVKVSRLQVQTPRXQVN

SEQ ID NO: 56859 - protein, 28 aa, Artificial Sequence
  Cyclic GFR-binding peptide
QLFVQVEKHQGQHPKIRVKAMKVSREET

SEQ ID NO: 56860 - protein, 29 aa, Artificial Sequence
  Cyclic GFR-binding peptide
ELVQVEKHQGQHPKIRVKAMKVSRQGTPV

SEQ ID NO: 56861 - protein, 32 aa, Artificial Sequence
  Cyclic GFR-binding peptide
  MOD_RES (1)..(1): Xaa is C or S
XELHEELRVTAKKLKPKKRVYEIKRVQVPRHH

SEQ ID NO: 56862 - protein, 44 aa, Artificial Sequence; identical to SEQ ID NO: 14318
  Cyclic GFR-binding peptide
  MOD_RES (2)..(4)..(38): Xaa is C or S

SEQ ID NO: 56863 - protein, 37 aa, Artificial Sequence
  Cyclic GFR-binding peptide
  MOD_RES (33)..(33): Xaa is C or S
ELTVQVEKFIPKKRVIEVKAVKVSRLQVQTPRXQVNR

SEQ ID NO: 56864 - protein, 32 aa, Artificial Sequence
  Cyclic GFR-binding peptide
  MOD_RES (29)..(29): Xaa is C or S
FVTAKKHQGQHPKIRIKRMQVPREETPVXELG

SEQ ID NO: 56865 - protein, 37 aa, Artificial Sequence; identical to SEQ ID NO: 14319
  Cyclic GFR-binding peptide
  MOD_RES (2)..(2): Xaa is C or S

SEQ ID NO: 56866 - protein, 31 aa, Artificial Sequence
  Cyclic GFR-binding peptide
LHEELRSMEGILKPKKRVYEMIQVTINSHHV

SEQ ID NO: 56867 - protein, 36 aa, Artificial Sequence
  Cyclic GFR-binding peptide
  MOD_RES (33)..(33): Xaa is C or S
ELTSMEGLFIPKKRVIEMIQVTINSLQVQTPRXQVN

SEQ ID NO: 56868 - protein, 36 aa, Artificial Sequence
  Cyclic GFR-binding peptide
  MOD_RES (2)..(4): Xaa is C or S
RXEXQSHEELSMEGIHQGQHPKIRMIQMTINSQGTP

SEQ ID NO: 56869 - protein, 35 aa, Artificial Sequence
  Cyclic GFR-binding peptide
  MOD_RES (31)..(31): Xaa is C or S
EELVTAKKHQGQHPKIRIKRMQVPRQGTPVXELGE

SEQ ID NO: 56870 - protein, 30 aa, Artificial Sequence
  Cyclic GFR-binding peptide
NHQLFSMEGLHQGQHPKIRMIQMTINSEET

SEQ ID NO: 56871 - protein, 31 aa, Artificial Sequence
  Cyclic GFR-binding peptide
NHQLFVTAKKHQGQHPKIRIKRMQVPREETP

SEQ ID NO: 56872 - protein, 33 aa, Artificial Sequence
  Cyclic GFR-binding peptide
  MOD_RES (29)..(29): Xaa is C or S
LVQVEKHQGQHPKIRVKAMKVSRQGTPVXELGE

SEQ ID NO: 56873 - protein, 27 aa, Artificial Sequence
  Cyclic GFR-binding peptide
HDELTVQVEKFIPKKRVIEVKAVKVSR

SEQ ID NO: 56874 - protein, 34 aa, Artificial Sequence; identical to SEQ ID NO: 14323
  Cyclic GFR-binding peptide
  MOD_RES (33)..(33): Xaa is C or S

SEQ ID NO: 56875 - protein, 31 aa, Artificial Sequence
  Cyclic GFR-binding peptide
SHEELVQVEKHQGQHPKIRVKAMKVSRQGTP

SEQ ID NO: 56876 - protein, 39 aa, Artificial Sequence; identical to SEQ ID NO: 14324
  Cyclic GFR-binding peptide
  MOD_RES (2)..(39): Xaa is C or S

SEQ ID NO: 56877 - protein, 23 aa, Artificial Sequence
  Cyclic GFR-binding peptide
VTAKKHQGQHPKIRIKRMQVPRQ

SEQ ID NO: 56878 - protein, 34 aa, Artificial Sequence
  Cyclic GFR-binding peptide
  MOD_RES (32)..(32): Xaa is C or S
HEELVQVEKHQGQHPKIRVKAMKVSRQGTPVXEL

SEQ ID NO: 56879 - protein, 38 aa, Artificial Sequence; identical to SEQ ID NO: 14328
  Cyclic GFR-binding peptide
  MOD_RES (34)..(34): Xaa is C or S

SEQ ID NO: 56880 - protein, 30 aa, Artificial Sequence
  Cyclic GFR-binding peptide
  MOD_RES (28)..(28): Xaa is C or S
VTAKKHQGQHPKIRIKRMQVPRQGTPVXEL

SEQ ID NO: 56881 - protein, 24 aa, Artificial Sequence
  Cyclic GFR-binding peptide
SMEGLHQGQHPKIRMIQMTINSEE

SEQ ID NO: 56882 - protein, 32 aa, Artificial Sequence
  Cyclic GFR-binding peptide
  MOD_RES (31)..(31): Xaa is C or S
RSMEGLLKPKKRVYEMIQVTINSHHVRSPQXK

SEQ ID NO: 56883 - protein, 31 aa, Artificial Sequence
  Cyclic GFR-binding peptide
  MOD_RES (2)..(2): Xaa is C or S
AXELHEELRSMEGILKPKKRVYEMIQVTINS

SEQ ID NO: 56884 - protein, 34 aa, Artificial Sequence
  Cyclic GFR-binding peptide
  MOD_RES (31)..(31): Xaa is C or S
QLFVTAKKHQGQHPKIRIKRMQVPREETPVXELG

SEQ ID NO: 56885 - protein, 33 aa, Artificial Sequence
  Cyclic GFR-binding peptide
  MOD_RES (28)..(28): Xaa is C or S
SMEGIHQGQHPKIRMIQMTINSQGTPVXELGED

SEQ ID NO: 56886 - protein, 32 aa, Artificial Sequence
  Cyclic GFR-binding peptide
ALHDELTVQVEKFIPKKRVIEVKAVKVSRLQV

SEQ ID NO: 56887 - protein, 38 aa, Artificial Sequence
  Cyclic GFR-binding peptide
  MOD_RES (32)..(32): Xaa is C or S
HQLFSMEGLHQGQHPKIRMIQMTINSEETPVXELGEDN

SEQ ID NO: 56888 - protein, 31 aa, Artificial Sequence
  Cyclic GFR-binding peptide
  MOD_RES (2)..(2): Xaa is C or S
EXQSHEELVQVEKHQGQHPKIRVKAMKVSRQ

SEQ ID NO: 56889 - protein, 43 aa, Artificial Sequence; identical to SEQ ID NO: 14333
  Cyclic GFR-binding peptide
  MOD_RES (1)..(3)..(40): Xaa is C or S

SEQ ID NO: 56890 - protein, 30 aa, Artificial Sequence
  Cyclic GFR-binding peptide
  MOD_RES (1)..(1): Xaa is C or S
XKNHQLFSMEGLHQGQHPKIRMIQMTINSE

SEQ ID NO: 56891 - protein, 34 aa, Artificial Sequence; identical to SEQ ID NO: 14336
  Cyclic GFR-binding peptide
  MOD_RES (34)..(34): Xaa is C or S

SEQ ID NO: 56892 - protein, 39 aa, Artificial Sequence; identical to SEQ ID NO: 14337
  Cyclic GFR-binding peptide
  MOD_RES (37)..(37): Xaa is C or S

SEQ ID NO: 56893 - protein, 29 aa, Artificial Sequence
  Cyclic GFR-binding peptide
RSMEGILKPKKRVYEMIQVTINSHHVRSP

SEQ ID NO: 56894 - protein, 35 aa, Artificial Sequence; identical to SEQ ID NO: 14339
  Cyclic GFR-binding peptide
  MOD_RES (34)..(34): Xaa is C or S

SEQ ID NO: 56895 - protein, 30 aa, Artificial Sequence
  Cyclic GFR-binding peptide
ELHEELRVTAKKLKPKKRVYEIKRVQVPRH

SEQ ID NO: 56896 - protein, 33 aa, Artificial Sequence
  Cyclic GFR-binding peptide
  MOD_RES (1)..(3): Xaa is C or S
XKXALHDELTSMEGLFIPKKRVIEMIQVTINSL

SEQ ID NO: 56897 - protein, 37 aa, Artificial Sequence; identical to SEQ ID NO: 14341
  Cyclic GFR-binding peptide
  MOD_RES (1)..(1): Xaa is C or S

SEQ ID NO: 56898 - protein, 30 aa, Artificial Sequence
  Cyclic GFR-binding peptide
ELHEELRSMEGILKPKKRVYEMIQVTINSH

SEQ ID NO: 56899 - protein, 36 aa, Artificial Sequence; identical to SEQ ID NO: 14342
  Cyclic GFR-binding peptide
  MOD_RES (2)..(36): Xaa is C or S

SEQ ID NO: 56900 - protein, 40 aa, Artificial Sequence; identical to SEQ ID NO: 14345
  Cyclic GFR-binding peptide
  MOD_RES (2)..(4): Xaa is C or S

SEQ ID NO: 56901 - protein, 40 aa, Artificial Sequence; identical to SEQ ID NO: 14346
  Cyclic GFR-binding peptide
  MOD_RES (1)..(38): Xaa is C or S

SEQ ID NO: 56902 - protein, 33 aa, Artificial Sequence
  Cyclic GFR-binding peptide
ALHDELTSMEGLFIPKKRVIEMIQVTINSLQVQ

SEQ ID NO: 56903 - protein, 36 aa, Artificial Sequence
  Cyclic GFR-binding peptide
  MOD_RES (34)..(34): Xaa is C or S
DELTSMEGLFIPKKRVIEMIQVTINSLQVQTPRXQV

SEQ ID NO: 56904 - protein, 36 aa, Artificial Sequence; identical to SEQ ID NO: 14347
  Cyclic GFR-binding peptide
  MOD_RES (35)..(35): Xaa is C or S

SEQ ID NO: 56905 - protein, 35 aa, Artificial Sequence; identical to SEQ ID NO: 14348
  Cyclic GFR-binding peptide

SEQ ID NO: 56906 - protein, 39 aa, Artificial Sequence; identical to SEQ ID NO: 14349
  Cyclic GFR-binding peptide
  MOD_RES (34)..(34): Xaa is C or S

SEQ ID NO: 56907 - protein, 31 aa, Artificial Sequence
  Cyclic GFR-binding peptide
ELHEELRSMEGLLKPKKRVYEMIQVTINSHH

SEQ ID NO: 56908 - protein, 43 aa, Artificial Sequence; identical to SEQ ID NO: 14351
  Cyclic GFR-binding peptide
  MOD_RES (1)..(3)..(37): Xaa is C or S

SEQ ID NO: 56909 - protein, 40 aa, Artificial Sequence; identical to SEQ ID NO: 14352
  Cyclic GFR-binding peptide
  MOD_RES (1)..(3)..(40): Xaa is C or S

SEQ ID NO: 56910 - protein, 40 aa, Artificial Sequence; identical to SEQ ID NO: 14353
  Cyclic GFR-binding peptide
  MOD_RES (1)..(3)..(40): Xaa is C or S

SEQ ID NO: 56911 - protein, 33 aa, Artificial Sequence
  Cyclic GFR-binding peptide
  MOD_RES (31)..(31): Xaa is C or S
TVQVEKFIPKKRVIEVKAVKVSRLQVQTPRXQV

SEQ ID NO: 56912 - protein, 36 aa, Artificial Sequence; identical to SEQ ID NO: 14356
  Cyclic GFR-binding peptide
  MOD_RES (36)..(36): Xaa is C or S

SEQ ID NO: 56913 - protein, 24 aa, Artificial Sequence
  Cyclic GFR-binding peptide
LRSMEGILKPKKRVYEMIQVTINS

SEQ ID NO: 56914 - protein, 33 aa, Artificial Sequence; identical to SEQ ID NO: 14355
  Cyclic GFR-binding peptide

SEQ ID NO: 56915 - protein, 28 aa, Artificial Sequence
  Cyclic GFR-binding peptide
ELTSMEGLFIPKKRVIEMIQVTINSLQV

SEQ ID NO: 56916 - protein, 33 aa, Artificial Sequence
  Cyclic GFR-binding peptide
  MOD_RES (1)..(1): Xaa is C or S
XELHEELRSMEGILKPKKRVYEMIQVTINSHHV

SEQ ID NO: 56917 - protein, 33 aa, Artificial Sequence; identical to SEQ ID NO: 14357
  Cyclic GFR-binding peptide

SEQ ID NO: 56918 - protein, 27 aa, Artificial Sequence
  Cyclic GFR-binding peptide
QLFVQVEKHQGQHPKIRVKAMKVSREE

SEQ ID NO: 56919 - protein, 28 aa, Artificial Sequence
  Cyclic GFR-binding peptide
EELVTAKKHQGQHPKIRIKRMQVPRQGT

SEQ ID NO: 56920 - protein, 34 aa, Artificial Sequence; identical to SEQ ID NO: 14358
  Cyclic GFR-binding peptide

SEQ ID NO: 56921 - protein, 35 aa, Artificial Sequence
  Cyclic GFR-binding peptide
  MOD_RES (31)..(31): Xaa is C or S
TSMEGLFIPKKRVIEMIQVTINSLQVQTPRXQVNR

SEQ ID NO: 56922 - protein, 26 aa, Artificial Sequence
  Cyclic GFR-binding peptide
HEELSMEGIHQGQHPKIRMIQMTINS

SEQ ID NO: 56923 - protein, 40 aa, Artificial Sequence; identical to SEQ ID NO: 14359
  Cyclic GFR-binding peptide
  MOD_RES (37)..(37): Xaa is C or S

SEQ ID NO: 56924 - protein, 30 aa, Artificial Sequence
  Cyclic GFR-binding peptide
ALHDELTSMEGLFIPKKRVIEMIQVTINSL

SEQ ID NO: 56925 - protein, 30 aa, Artificial Sequence
  Cyclic GFR-binding peptide
LRVTAKKLKPKKRVYEIKRVQVPRHHVRSP

SEQ ID NO: 56926 - protein, 34 aa, Artificial Sequence; identical to SEQ ID NO: 14362
  Cyclic GFR-binding peptide
  MOD_RES (1)..(1): Xaa is C or S

SEQ ID NO: 56927 - protein, 31 aa, Artificial Sequence
  Cyclic GFR-binding peptide
KNHQLFVQVEKHQGQHPKIRVKAMKVSREET

SEQ ID NO: 56928 - protein, 33 aa, Artificial Sequence
  Cyclic GFR-binding peptide
  MOD_RES (1)..(1): Xaa is C or S
XALHDELTVQVEKFIPKKRVIEVKAVKVSRLQV

SEQ ID NO: 56929 - protein, 34 aa, Artificial Sequence
  Cyclic GFR-binding peptide
  MOD_RES (34)..(34): Xaa is C or S
EELRVTAKKLKPKKRVYEIKRVQVPRHHVRSPQX

SEQ ID NO: 56930 - protein, 27 aa, Artificial Sequence
  Cyclic GFR-binding peptide
TSMEGIFIPKKRVIEMIQVTINSLQVQ

SEQ ID NO: 56931 - protein, 36 aa, Artificial Sequence; identical to SEQ ID NO: 14363
  Cyclic GFR-binding peptide
  MOD_RES (35)..(35): Xaa is C or S

SEQ ID NO: 56932 - protein, 31 aa, Artificial Sequence
  Cyclic GFR-binding peptide
ELHEELRVTAKKLKPKKRVYEIKRVQVPRHH

SEQ ID NO: 56933 - protein, 40 aa, Artificial Sequence; identical to SEQ ID NO: 14364
  Cyclic GFR-binding peptide
  MOD_RES (34)..(34): Xaa is C or S

SEQ ID NO: 56934 - protein, 32 aa, Artificial Sequence
  Cyclic GFR-binding peptide
  MOD_RES (32)..(32): Xaa is C or S
HEELVQVEKHQGQHPKIRVKAMKVSRQGTPVX

SEQ ID NO: 56935 - protein, 31 aa, Artificial Sequence
  Cyclic GFR-binding peptide
QSHEELVQVEKHQGQHPKIRVKAMKVSRQGT

SEQ ID NO: 56936 - protein, 36 aa, Artificial Sequence; identical to SEQ ID NO: 14365
  Cyclic GFR-binding peptide

SEQ ID NO: 56937 - protein, 25 aa, Artificial Sequence
  Cyclic GFR-binding peptide
LTVQVEKFIPKKRVIEVKAVKVSRL

SEQ ID NO: 56938 - protein, 26 aa, Artificial Sequence
  Cyclic GFR-binding peptide
TSMEGLFIPKKRVIEMIQVTINSLQV

SEQ ID NO: 56939 - protein, 40 aa, Artificial Sequence; identical to SEQ ID NO: 14369
  Cyclic GFR-binding peptide
  MOD_RES (2)..(39): Xaa is C or S

SEQ ID NO: 56940 - protein, 27 aa, Artificial Sequence
  Cyclic GFR-binding peptide
SHEELVQVEKHQGQHPKIRVKAMKVSR

SEQ ID NO: 56941 - protein, 38 aa, Artificial Sequence; identical to SEQ ID NO: 14370
  Cyclic GFR-binding peptide
  MOD_RES (36)..(36): Xaa is C or S

SEQ ID NO: 56942 - protein, 32 aa, Artificial Sequence
  Cyclic GFR-binding peptide
  MOD_RES (1)..(3): Xaa is C or S
XAXELHEELRSMEGLLKPKKRVYEMIQVTINS

SEQ ID NO: 56943 - protein, 38 aa, Artificial Sequence; identical to SEQ ID NO: 14372
  Cyclic GFR-binding peptide
  MOD_RES (2)..(4)..(38): Xaa is C or S

SEQ ID NO: 56944 - protein, 35 aa, Artificial Sequence
  Cyclic GFR-binding peptide
  MOD_RES (32)..(32): Xaa is C or S
LTSMEGLFIPKKRVIEMIQVTINSLQVQTPRXQVN

SEQ ID NO: 56945 - protein, 43 aa, Artificial Sequence; identical to SEQ ID NO: 14373
  Cyclic GFR-binding peptide
  MOD_RES (1)..(3)..(40): Xaa is C or S

SEQ ID NO: 56946 - protein, 31 aa, Artificial Sequence
  Cyclic GFR-binding peptide
DELTSMEGIFIPKKRVIEMIQVTINSLQVQT

SEQ ID NO: 56947 - protein, 40 aa, Artificial Sequence; identical to SEQ ID NO: 14374
  Cyclic GFR-binding peptide
  MOD_RES (2)..(39): Xaa is C or S

SEQ ID NO: 56948 - protein, 35 aa, Artificial Sequence
  Cyclic GFR-binding peptide
  MOD_RES (29)..(29): Xaa is C or S
LSMEGIHQGQHPKIRMIQMTINSQGTPVXELGEDN

SEQ ID NO: 56949 - protein, 43 aa, Artificial Sequence; identical to SEQ ID NO: 14375
  Cyclic GFR-binding peptide
  MOD_RES (1)..(3)..(40): Xaa is C or S

SEQ ID NO: 56950 - protein, 26 aa, Artificial Sequence
  Cyclic GFR-binding peptide
ELTSMEGLFIPKKRVIEMIQVTINSL

SEQ ID NO: 56951 - protein, 43 aa, Artificial Sequence; identical to SEQ ID NO: 14378
  Cyclic GFR-binding peptide
  MOD_RES (2)..(4)..(41): Xaa is C or S

SEQ ID NO: 56952 - protein, 24 aa, Artificial Sequence
  Cyclic GFR-binding peptide
VQVEKHQGQHPKIRVKAMKVSREE

SEQ ID NO: 56953 - protein, 33 aa, Artificial Sequence
  Cyclic GFR-binding peptide
DELTSMEGIFIPKKRVIEMIQVTINSLQVQTPR

SEQ ID NO: 56954 - protein, 35 aa, Artificial Sequence
  Cyclic GFR-binding peptide
  MOD_RES (1)..(3): Xaa is C or S
XEXQSHEELVTAKKHQGQHPKIRIKRMQVPRQGTP

SEQ ID NO: 56955 - protein, 28 aa, Artificial Sequence
  Cyclic GFR-binding peptide
SMEGLLKPKKRVYEMIQVTINSHHVRSP

SEQ ID NO: 56956 - protein, 28 aa, Artificial Sequence
  Cyclic GFR-binding peptide
ELRSMEGILKPKKRVYEMIQVTINSHHV

SEQ ID NO: 56957 - protein, 29 aa, Artificial Sequence
  Cyclic GFR-binding peptide
QLFVQVEKHQGQHPKIRVKAMKVSREETP

SEQ ID NO: 56958 - protein, 41 aa, Artificial Sequence; identical to SEQ ID NO: 14382
  Cyclic GFR-binding peptide
  MOD_RES (2)..(4)..(38): Xaa is C or S

SEQ ID NO: 56959 - protein, 31 aa, Artificial Sequence
  Cyclic GFR-binding peptide
  MOD_RES (2)..(2): Xaa is C or S
AXELHEELRSMEGLLKPKKRVYEMIQVTINS

SEQ ID NO: 56960 - protein, 27 aa, Artificial Sequence
  Cyclic GFR-binding peptide
LTSMEGLFIPKKRVIEMIQVTINSLQV

SEQ ID NO: 56961 - protein, 26 aa, Artificial Sequence
  Cyclic GFR-binding peptide
HEELVQVEKHQGQHPKIRVKAMKVSR

SEQ ID NO: 56962 - protein, 36 aa, Artificial Sequence; identical to SEQ ID NO: 14385
  Cyclic GFR-binding peptide
  MOD_RES (2)..(36): Xaa is C or S

SEQ ID NO: 56963 - protein, 36 aa, Artificial Sequence; identical to SEQ ID NO: 14386
  Cyclic GFR-binding peptide
  MOD_RES (34)..(34): Xaa is C or S

SEQ ID NO: 56964 - protein, 35 aa, Artificial Sequence
  Cyclic GFR-binding peptide
  MOD_RES (2)..(2): Xaa is C or S
AXELHEELRVTAKKLKPKKRVYEIKRVQVPRHHVR

SEQ ID NO: 56965 - protein, 27 aa, Artificial Sequence
  Cyclic GFR-binding peptide
EELRVTAKKLKPKKRVYEIKRVQVPRH

SEQ ID NO: 56966 - protein, 39 aa, Artificial Sequence; identical to SEQ ID NO: 14387
  Cyclic GFR-binding peptide
  MOD_RES (2)..(36): Xaa is C or S

SEQ ID NO: 56967 - protein, 32 aa, Artificial Sequence
  Cyclic GFR-binding peptide
  MOD_RES (2)..(2): Xaa is C or S
AXELHEELRVTAKKLKPKKRVYEIKRVQVPRH

SEQ ID NO: 56968 - protein, 37 aa, Artificial Sequence; identical to SEQ ID NO: 14390
  Cyclic GFR-binding peptide
  MOD_RES (35)..(35): Xaa is C or S

SEQ ID NO: 56969 - protein, 33 aa, Artificial Sequence
  Cyclic GFR-binding peptide
  MOD_RES (1)..(3): Xaa is C or S
XAXELHEELRSMEGLLKPKKRVYEMIQVTINSH

SEQ ID NO: 56970 - protein, 24 aa, Artificial Sequence
  Cyclic GFR-binding peptide
LTSMEGIFIPKKRVIEMIQVTINS

SEQ ID NO: 56971 - protein, 40 aa, Artificial Sequence; identical to SEQ ID NO: 14393
  Cyclic GFR-binding peptide
  MOD_RES (2)..(4)..(38): Xaa is C or S

SEQ ID NO: 56972 - protein, 36 aa, Artificial Sequence
  Cyclic GFR-binding peptide
  MOD_RES (31)..(31): Xaa is C or S
QLFVTAKKHQGQHPKIRIKRMQVPREETPVXELGED

SEQ ID NO: 56973 - protein, 33 aa, Artificial Sequence
  Cyclic GFR-binding peptide
  MOD_RES (32)..(32): Xaa is C or S
LTSMEGIFIPKKRVIEMIQVTINSLQVQTPRXQ

SEQ ID NO: 56974 - protein, 23 aa, Artificial Sequence
  Cyclic GFR-binding peptide
SMEGLLKPKKRVYEMIQVTINSH

SEQ ID NO: 56975 - protein, 32 aa, Artificial Sequence
  Cyclic GFR-binding peptide
  MOD_RES (30)..(30): Xaa is C or S
LFVQVEKHQGQHPKIRVKAMKVSREETPVXEL

SEQ ID NO: 56976 - protein, 33 aa, Artificial Sequence
  Cyclic GFR-binding peptide
  MOD_RES (1)..(3): Xaa is C or S
XAXELHEELRSMEGILKPKKRVYEMIQVTINSH

SEQ ID NO: 56977 - protein, 41 aa, Artificial Sequence; identical to SEQ ID NO: 14394
  Cyclic GFR-binding peptide
  MOD_RES (1)..(3)..(37): Xaa is C or S

SEQ ID NO: 56978 - protein, 30 aa, Artificial Sequence
  Cyclic GFR-binding peptide
HEELRSMEGILKPKKRVYEMIQVTINSHHV

SEQ ID NO: 56979 - protein, 35 aa, Artificial Sequence
  Cyclic GFR-binding peptide
  MOD_RES (2)..(4): Xaa is C or S
EXKXALHDELTSMEGIFIPKKRVIEMIQVTINSLQ

SEQ ID NO: 56980 - protein, 34 aa, Artificial Sequence
  Cyclic GFR-binding peptide
  MOD_RES (1)..(3): Xaa is C or S
XAXELHEELRSMEGILKPKKRVYEMIQVTINSHH

SEQ ID NO: 56981 - protein, 36 aa, Artificial Sequence; identical to SEQ ID NO: 14397
  Cyclic GFR-binding peptide
  MOD_RES (1)..(35): Xaa is C or S

SEQ ID NO: 56982 - protein, 31 aa, Artificial Sequence
  Cyclic GFR-binding peptide
  MOD_RES (28)..(28): Xaa is C or S
VTAKKHQGQHPKIRIKRMQVPREETPVXELG

SEQ ID NO: 56983 - protein, 40 aa, Artificial Sequence; identical to SEQ ID NO: 14399
  Cyclic GFR-binding peptide
  MOD_RES (1)..(3)..(40): Xaa is C or S

SEQ ID NO: 56984 - protein, 40 aa, Artificial Sequence; identical to SEQ ID NO: 14400
  Cyclic GFR-binding peptide
  MOD_RES (36)..(36): Xaa is C or S

SEQ ID NO: 56985 - protein, 29 aa, Artificial Sequence
  Cyclic GFR-binding peptide
TSMEGLFIPKKRVIEMIQVTINSLQVQTP

SEQ ID NO: 56986 - protein, 37 aa, Artificial Sequence; identical to SEQ ID NO: 14401
  Cyclic GFR-binding peptide
  MOD_RES (34)..(34): Xaa is C or S

SEQ ID NO: 56987 - protein, 23 aa, Artificial Sequence
  Cyclic GFR-binding peptide
SMEGLHQGQHPKIRMIQMTINSE

SEQ ID NO: 56988 - protein, 40 aa, Artificial Sequence; identical to SEQ ID NO: 14402
  Cyclic GFR-binding peptide
  MOD_RES (34)..(34): Xaa is C or S

SEQ ID NO: 56989 - protein, 37 aa, Artificial Sequence; identical to SEQ ID NO: 14403
  Cyclic GFR-binding peptide
  MOD_RES (1)..(3)..(37): Xaa is C or S

SEQ ID NO: 56990 - protein, 31 aa, Artificial Sequence
  Cyclic GFR-binding peptide
  MOD_RES (31)..(31): Xaa is C or S
TSMEGIFIPKKRVIEMIQVTINSLQVQTPRX

SEQ ID NO: 56991 - protein, 30 aa, Artificial Sequence
  Cyclic GFR-binding peptide
  MOD_RES (29)..(29): Xaa is C or S
LVTAKKHQGQHPKIRIKRMQVPRQGTPVXE

SEQ ID NO: 56992 - protein, 34 aa, Artificial Sequence; identical to SEQ ID NO: 14405
  Cyclic GFR-binding peptide
  MOD_RES (33)..(33): Xaa is C or S

SEQ ID NO: 56993 - protein, 22 aa, Artificial Sequence
  Cyclic GFR-binding peptide
SMEGILKPKKRVYEMIQVTINS

SEQ ID NO: 56994 - protein, 34 aa, Artificial Sequence
  Cyclic GFR-binding peptide
  MOD_RES (33)..(33): Xaa is C or S
ELTSMEGLFIPKKRVIEMIQVTINSLQVQTPRXQ

SEQ ID NO: 56995 - protein, 28 aa, Artificial Sequence
  Cyclic GFR-binding peptide
KNHQLFVQVEKHQGQHPKIRVKAMKVSR

SEQ ID NO: 56996 - protein, 42 aa, Artificial Sequence; identical to SEQ ID NO: 14408
  Cyclic GFR-binding peptide
  MOD_RES (2)..(4)..(41): Xaa is C or S

SEQ ID NO: 56997 - protein, 34 aa, Artificial Sequence; identical to SEQ ID NO: 14409
  Cyclic GFR-binding peptide

SEQ ID NO: 56998 - protein, 32 aa, Artificial Sequence
  Cyclic GFR-binding peptide
  MOD_RES (1)..(1): Xaa is C or S
XALHDELTSMEGIFIPKKRVIEMIQVTINSLQ

SEQ ID NO: 56999 - protein, 41 aa, Artificial Sequence; identical to SEQ ID NO: 14410
  Cyclic GFR-binding peptide
  MOD_RES (2)..(4)..(41): Xaa is C or S

SEQ ID NO: 57000 - protein, 31 aa, Artificial Sequence
  Cyclic GFR-binding peptide
  MOD_RES (1)..(3): Xaa is C or S
XEXKNHQLFVQVEKHQGQHPKIRVKAMKVSR

SEQ ID NO: 57001 - protein, 32 aa, Artificial Sequence
  Cyclic GFR-binding peptide
EELRVTAKKLKPKKRVYEIKRVQVPRHHVRSP

SEQ ID NO: 57002 - protein, 27 aa, Artificial Sequence
  Cyclic GFR-binding peptide
HEELVQVEKHQGQHPKIRVKAMKVSRQ

SEQ ID NO: 57003 - protein, 40 aa, Artificial Sequence; identical to SEQ ID NO: 14413
  Cyclic GFR-binding peptide
  MOD_RES (2)..(4)..(38): Xaa is C or S

SEQ ID NO: 57004 - protein, 35 aa, Artificial Sequence
  Cyclic GFR-binding peptide
  MOD_RES (32)..(32): Xaa is C or S
LTSMEGIFIPKKRVIEMIQVTINSLQVQTPRXQVN

SEQ ID NO: 57005 - protein, 34 aa, Artificial Sequence
  Cyclic GFR-binding peptide
  MOD_RES (2)..(2): Xaa is C or S
EXKNHQLFVQVEKHQGQHPKIRVKAMKVSREETP

SEQ ID NO: 57006 - protein, 30 aa, Artificial Sequence
  Cyclic GFR-binding peptide
  MOD_RES (30)..(30): Xaa is C or S
ELVQVEKHQGQHPKIRVKAMKVSRQGTPVX

SEQ ID NO: 57007 - protein, 35 aa, Artificial Sequence
  Cyclic GFR-binding peptide
  MOD_RES (1)..(3): Xaa is C or S
XEXQSHEELSMEGIHQGQHPKIRMIQMTINSQGTP

SEQ ID NO: 57008 - protein, 31 aa, Artificial Sequence
  Cyclic GFR-binding peptide
  MOD_RES (30)..(30): Xaa is C or S
ELVQVEKHQGQHPKIRVKAMKVSRQGTPVXE

SEQ ID NO: 57009 - protein, 28 aa, Artificial Sequence
  Cyclic GFR-binding peptide
SMEGIFIPKKRVIEMIQVTINSLQVQTP

SEQ ID NO: 57010 - protein, 38 aa, Artificial Sequence; identical to SEQ ID NO: 14419
  Cyclic GFR-binding peptide
  MOD_RES (37)..(37): Xaa is C or S

SEQ ID NO: 57011 - protein, 33 aa, Artificial Sequence
  Cyclic GFR-binding peptide
  MOD_RES (2)..(2): Xaa is C or S
EXKNHQLFVQVEKHQGQHPKIRVKAMKVSREET

SEQ ID NO: 57012 - protein, 25 aa, Artificial Sequence
  Cyclic GFR-binding peptide
VQVEKHQGQHPKIRVKAMKVSRQGT

SEQ ID NO: 57013 - protein, 30 aa, Artificial Sequence
  Cyclic GFR-binding peptide
QSHEELSMEGIHQGQHPKIRMIQMTINSQG

SEQ ID NO: 57014 - protein, 35 aa, Artificial Sequence
  Cyclic GFR-binding peptide
  MOD_RES (33)..(33): Xaa is C or S
ELRSMEGILKPKKRVYEMIQVTINSHHVRSPQXKV

SEQ ID NO: 57015 - protein, 32 aa, Artificial Sequence
  Cyclic GFR-binding peptide
  MOD_RES (2)..(2): Xaa is C or S
KXALHDELTSMEGLFIPKKRVIEMIQVTINSL

SEQ ID NO: 57016 - protein, 40 aa, Artificial Sequence; identical to SEQ ID NO: 14424
  Cyclic GFR-binding peptide
  MOD_RES (1)..(38): Xaa is C or S

SEQ ID NO: 57017 - protein, 38 aa, Artificial Sequence
  Cyclic GFR-binding peptide
  MOD_RES (34)..(34): Xaa is C or S
DELTVQVEKFIPKKRVIEVKAVKVSRLQVQTPRXQVNR

SEQ ID NO: 57018 - protein, 28 aa, Artificial Sequence
  Cyclic GFR-binding peptide
NHQLFVTAKKHQGQHPKIRIKRMQVPRE

SEQ ID NO: 57019 - protein, 26 aa, Artificial Sequence
  Cyclic GFR-binding peptide
QLFSMEGLHQGQHPKIRMIQMTINSE

SEQ ID NO: 57020 - protein, 28 aa, Artificial Sequence
  Cyclic GFR-binding peptide
  MOD_RES (28)..(28): Xaa is C or S
SMEGIHQGQHPKIRMIQMTINSQGTPVX

SEQ ID NO: 57021 - protein, 32 aa, Artificial Sequence
  Cyclic GFR-binding peptide
  MOD_RES (1)..(1): Xaa is C or S
XELHEELRSMEGILKPKKRVYEMIQVTINSHH

SEQ ID NO: 57022 - protein, 31 aa, Artificial Sequence
  Cyclic GFR-binding peptide
  MOD_RES (1)..(1): Xaa is C or S
XKNHQLFVTAKKHQGQHPKIRIKRMQVPREE

SEQ ID NO: 57023 - protein, 32 aa, Artificial Sequence
  Cyclic GFR-binding peptide
  MOD_RES (28)..(28): Xaa is C or S
SMEGLHQGQHPKIRMIQMTINSEETPVXELGE

SEQ ID NO: 57024 - protein, 38 aa, Artificial Sequence
  Cyclic GFR-binding peptide
  MOD_RES (34)..(34): Xaa is C or S
EELRVTAKKLKPKKRVYEIKRVQVPRHHVRSPQXKVSS

SEQ ID NO: 57025 - protein, 33 aa, Artificial Sequence; identical to SEQ ID NO: 14426
  Cyclic GFR-binding peptide

SEQ ID NO: 57026 - protein, 27 aa, Artificial Sequence
  Cyclic GFR-binding peptide
ELVQVEKHQGQHPKIRVKAMKVSRQGT

SEQ ID NO: 57027 - protein, 40 aa, Artificial Sequence; identical to SEQ ID NO: 14427
  Cyclic GFR-binding peptide
  MOD_RES (36)..(36): Xaa is C or S

SEQ ID NO: 57028 - protein, 26 aa, Artificial Sequence
  Cyclic GFR-binding peptide
LRSMEGILKPKKRVYEMIQVTINSHH

SEQ ID NO: 57029 - protein, 23 aa, Artificial Sequence
  Cyclic GFR-binding peptide
RSMEGILKPKKRVYEMIQVTINS

SEQ ID NO: 57030 - protein, 30 aa, Artificial Sequence
  Cyclic GFR-binding peptide
HEELRSMEGLLKPKKRVYEMIQVTINSHHV

SEQ ID NO: 57031 - protein, 36 aa, Artificial Sequence; identical to SEQ ID NO: 14428
  Cyclic GFR-binding peptide
  MOD_RES (1)..(1): Xaa is C or S

SEQ ID NO: 57032 - protein, 30 aa, Artificial Sequence
  Cyclic GFR-binding peptide
  MOD_RES (2)..(2): Xaa is C or S
EXKNHQLFSMEGLHQGQHPKIRMIQMTINS

SEQ ID NO: 57033 - protein, 27 aa, Artificial Sequence
  Cyclic GFR-binding peptide
LRSMEGLLKPKKRVYEMIQVTINSHHV

SEQ ID NO: 57034 - protein, 43 aa, Artificial Sequence; identical to SEQ ID NO: 14429
  Cyclic GFR-binding peptide
  MOD_RES (1)..(3)..(37): Xaa is C or S

SEQ ID NO: 57035 - protein, 29 aa, Artificial Sequence
  Cyclic GFR-binding peptide
LFVTAKKHQGQHPKIRIKRMQVPREETPV

SEQ ID NO: 57036 - protein, 30 aa, Artificial Sequence
  Cyclic GFR-binding peptide
QSHEELVQVEKHQGQHPKIRVKAMKVSRQG

SEQ ID NO: 57037 - protein, 28 aa, Artificial Sequence
  Cyclic GFR-binding peptide
NHQLFVQVEKHQGQHPKIRVKAMKVSRE

SEQ ID NO: 57038 - protein, 29 aa, Artificial Sequence
  Cyclic GFR-binding peptide
HEELRSMEGILKPKKRVYEMIQVTINSHH

SEQ ID NO: 57039 - protein, 27 aa, Artificial Sequence
  Cyclic GFR-binding peptide
LFSMEGLHQGQHPKIRMIQMTINSEET

SEQ ID NO: 57040 - protein, 28 aa, Artificial Sequence
  Cyclic GFR-binding peptide
HQLFVQVEKHQGQHPKIRVKAMKVSREE

SEQ ID NO: 57041 - protein, 35 aa, Artificial Sequence
  Cyclic GFR-binding peptide
  MOD_RES (31)..(31): Xaa is C or S
EELVQVEKHQGQHPKIRVKAMKVSRQGTPVXELGE

SEQ ID NO: 57042 - protein, 31 aa, Artificial Sequence
  Cyclic GFR-binding peptide
  MOD_RES (29)..(29): Xaa is C or S
FVTAKKHQGQHPKIRIKRMQVPREETPVXEL

SEQ ID NO: 57043 - protein, 34 aa, Artificial Sequence
  Cyclic GFR-binding peptide
  MOD_RES (1)..(3): Xaa is C or S
XKXALHDELTSMEGLFIPKKRVIEMIQVTINSLQ

SEQ ID NO: 57044 - protein, 33 aa, Artificial Sequence
  Cyclic GFR-binding peptide
  MOD_RES (31)..(31): Xaa is C or S
RVTAKKLKPKKRVYEIKRVQVPRHHVRSPQXKV

SEQ ID NO: 57045 - protein, 26 aa, Artificial Sequence
  Cyclic GFR-binding peptide
LTVQVEKFIPKKRVIEVKAVKVSRLQ

SEQ ID NO: 57046 - protein, 38 aa, Artificial Sequence; identical to SEQ ID NO: 14439
  Cyclic GFR-binding peptide
  MOD_RES (1)..(3): Xaa is C or S

SEQ ID NO: 57047 - protein, 35 aa, Artificial Sequence
  Cyclic GFR-binding peptide
  MOD_RES (29)..(29): Xaa is C or S
LVTAKKHQGQHPKIRIKRMQVPRQGTPVXELGEDN

SEQ ID NO: 57048 - protein, 31 aa, Artificial Sequence
  Cyclic GFR-binding peptide
ELTVQVEKFIPKKRVIEVKAVKVSRLQVQTP

SEQ ID NO: 57049 - protein, 36 aa, Artificial Sequence
  Cyclic GFR-binding peptide
  MOD_RES (2)..(4): Xaa is C or S
EXKXALHDELTSMEGIFIPKKRVIEMIQVTINSLQV

SEQ ID NO: 57050 - protein, 37 aa, Artificial Sequence; identical to SEQ ID NO: 14441
  Cyclic GFR-binding peptide
  MOD_RES (35)..(35): Xaa is C or S

SEQ ID NO: 57051 - protein, 32 aa, Artificial Sequence
  Cyclic GFR-binding peptide
  MOD_RES (2)..(2): Xaa is C or S
EXQSHEELVQVEKHQGQHPKIRVKAMKVSRQG

SEQ ID NO: 57052 - protein, 32 aa, Artificial Sequence
  Cyclic GFR-binding peptide
  MOD_RES (2)..(2): Xaa is C or S
EXKNHQLFVTAKKHQGQHPKIRIKRMQVPREE

SEQ ID NO: 57053 - protein, 31 aa, Artificial Sequence
  Cyclic GFR-binding peptide
  MOD_RES (30)..(30): Xaa is C or S
LFSMEGLHQGQHPKIRMIQMTINSEETPVXE

SEQ ID NO: 57054 - protein, 33 aa, Artificial Sequence
  Cyclic GFR-binding peptide
  MOD_RES (2)..(4): Xaa is C or S
RXEXKNHQLFVTAKKHQGQHPKIRIKRMQVPRE

SEQ ID NO: 57055 - protein, 30 aa, Artificial Sequence
  Cyclic GFR-binding peptide
  MOD_RES (29)..(29): Xaa is C or S
LSMEGIHQGQHPKIRMIQMTINSQGTPVXE

SEQ ID NO: 57056 - protein, 31 aa, Artificial Sequence
  Cyclic GFR-binding peptide
  MOD_RES (1)..(3): Xaa is C or S
XEXQSHEELVQVEKHQGQHPKIRVKAMKVSR

SEQ ID NO: 57057 - protein, 27 aa, Artificial Sequence
  Cyclic GFR-binding peptide
DELTSMEGIFIPKKRVIEMIQVTINSL

SEQ ID NO: 57058 - protein, 33 aa, Artificial Sequence
  Cyclic GFR-binding peptide
  MOD_RES (1)..(3): Xaa is C or S
XEXKNHQLFVQVEKHQGQHPKIRVKAMKVSREE

SEQ ID NO: 57059 - protein, 31 aa, Artificial Sequence
  Cyclic GFR-binding peptide
  MOD_RES (31)..(31): Xaa is C or S
RSMEGILKPKKRVYEMIQVTINSHHVRSPQX

SEQ ID NO: 57060 - protein, 26 aa, Artificial Sequence
  Cyclic GFR-binding peptide
TVQVEKFIPKKRVIEVKAVKVSRLQV

SEQ ID NO: 57061 - protein, 31 aa, Artificial Sequence
  Cyclic GFR-binding peptide
  MOD_RES (31)..(31): Xaa is C or S
RVTAKKLKPKKRVYEIKRVQVPRHHVRSPQX

SEQ ID NO: 57062 - protein, 28 aa, Artificial Sequence
  Cyclic GFR-binding peptide
HEELRVTAKKLKPKKRVYEIKRVQVPRH

SEQ ID NO: 57063 - protein, 30 aa, Artificial Sequence
  Cyclic GFR-binding peptide
EELVTAKKHQGQHPKIRIKRMQVPRQGTPV

SEQ ID NO: 57064 - protein, 27 aa, Artificial Sequence
  Cyclic GFR-binding peptide
VQVEKHQGQHPKIRVKAMKVSRQGTPV

SEQ ID NO: 57065 - protein, 25 aa, Artificial Sequence
  Cyclic GFR-binding peptide
LVTAKKHQGQHPKIRIKRMQVPRQG

SEQ ID NO: 57066 - protein, 35 aa, Artificial Sequence; identical to SEQ ID NO: 14443
  Cyclic GFR-binding peptide
  MOD_RES (1)..(1): Xaa is C or S

SEQ ID NO: 57067 - protein, 38 aa, Artificial Sequence; identical to SEQ ID NO: 14444
  Cyclic GFR-binding peptide
  MOD_RES (36)..(36): Xaa is C or S

SEQ ID NO: 57068 - protein, 34 aa, Artificial Sequence
  Cyclic GFR-binding peptide
  MOD_RES (34)..(34): Xaa is C or S
DELTSMEGIFIPKKRVIEMIQVTINSLQVQTPRX

SEQ ID NO: 57069 - protein, 24 aa, Artificial Sequence
  Cyclic GFR-binding peptide
RVTAKKLKPKKRVYEIKRVQVPRH

SEQ ID NO: 57070 - protein, 42 aa, Artificial Sequence; identical to SEQ ID NO: 14447
  Cyclic GFR-binding peptide
  MOD_RES (2)..(39): Xaa is C or S

SEQ ID NO: 57071 - protein, 30 aa, Artificial Sequence
  Cyclic GFR-binding peptide
DELTSMEGIFIPKKRVIEMIQVTINSLQVQ

SEQ ID NO: 57072 - protein, 35 aa, Artificial Sequence
  Cyclic GFR-binding peptide
  MOD_RES (34)..(34): Xaa is C or S
DELTVQVEKFIPKKRVIEVKAVKVSRLQVQTPRXQ

SEQ ID NO: 57073 - protein, 38 aa, Artificial Sequence; identical to SEQ ID NO: 14448
  Cyclic GFR-binding peptide
  MOD_RES (34)..(34): Xaa is C or S

SEQ ID NO: 57074 - protein, 35 aa, Artificial Sequence
  Cyclic GFR-binding peptide
  MOD_RES (1)..(3): Xaa is C or S
XEXKNHQLFSMEGLHQGQHPKIRMIQMTINSEETP

SEQ ID NO: 57075 - protein, 35 aa, Artificial Sequence; identical to SEQ ID NO: 14451
  Cyclic GFR-binding peptide
  MOD_RES (1)..(1): Xaa is C or S

SEQ ID NO: 57076 - protein, 36 aa, Artificial Sequence; identical to SEQ ID NO: 14450
  Cyclic GFR-binding peptide
  MOD_RES (1)..(1): Xaa is C or S

SEQ ID NO: 57077 - protein, 38 aa, Artificial Sequence; identical to SEQ ID NO: 14452
  Cyclic GFR-binding peptide
  MOD_RES (34)..(34): Xaa is C or S

SEQ ID NO: 57078 - protein, 33 aa, Artificial Sequence
  Cyclic GFR-binding peptide
ALHDELTVQVEKFIPKKRVIEVKAVKVSRLQVQ

SEQ ID NO: 57079 - protein, 36 aa, Artificial Sequence; identical to SEQ ID NO: 14453
  Cyclic GFR-binding peptide
  MOD_RES (35)..(35): Xaa is C or S

SEQ ID NO: 57080 - protein, 33 aa, Artificial Sequence; identical to SEQ ID NO: 14455
  Cyclic GFR-binding peptide

SEQ ID NO: 57081 - protein, 34 aa, Artificial Sequence
  Cyclic GFR-binding peptide
  MOD_RES (2)..(2): Xaa is C or S
KXALHDELTSMEGLFIPKKRVIEMIQVTINSLQV

SEQ ID NO: 57082 - protein, 34 aa, Artificial Sequence; identical to SEQ ID NO: 14456
  Cyclic GFR-binding peptide

SEQ ID NO: 57083 - protein, 26 aa, Artificial Sequence
  Cyclic GFR-binding peptide
LRSMEGLLKPKKRVYEMIQVTINSHH

SEQ ID NO: 57084 - protein, 34 aa, Artificial Sequence
  Cyclic GFR-binding peptide
  MOD_RES (30)..(30): Xaa is C or S
VQVEKFIPKKRVIEVKAVKVSRLQVQTPRXQVNR

SEQ ID NO: 57085 - protein, 26 aa, Artificial Sequence
  Cyclic GFR-binding peptide
RSMEGILKPKKRVYEMIQVTINSHHV

SEQ ID NO: 57086 - protein, 37 aa, Artificial Sequence; identical to SEQ ID NO: 14457
  Cyclic GFR-binding peptide
  MOD_RES (1)..(35): Xaa is C or S

SEQ ID NO: 57087 - protein, 36 aa, Artificial Sequence; identical to SEQ ID NO: 14458
  Cyclic GFR-binding peptide
  MOD_RES (35)..(35): Xaa is C or S

SEQ ID NO: 57088 - protein, 29 aa, Artificial Sequence
  Cyclic GFR-binding peptide
LHDELTSMEGLFIPKKRVIEMIQVTINSL

SEQ ID NO: 57089 - protein, 33 aa, Artificial Sequence
  Cyclic GFR-binding peptide
  MOD_RES (32)..(32): Xaa is C or S
LTSMEGLFIPKKRVIEMIQVTINSLQVQTPRXQ

SEQ ID NO: 57090 - protein, 26 aa, Artificial Sequence
  Cyclic GFR-binding peptide
VQVEKHQGQHPKIRVKAMKVSRQGTP

SEQ ID NO: 57091 - protein, 38 aa, Artificial Sequence; identical to SEQ ID NO: 14460
  Cyclic GFR-binding peptide
  MOD_RES (37)..(37): Xaa is C or S

SEQ ID NO: 57092 - protein, 31 aa, Artificial Sequence
  Cyclic GFR-binding peptide
SHEELVTAKKHQGQHPKIRIKRMQVPRQGTP

SEQ ID NO: 57093 - protein, 32 aa, Artificial Sequence
  Cyclic GFR-binding peptide
  MOD_RES (1)..(3): Xaa is C or S
XKXALHDELTVQVEKFIPKKRVIEVKAVKVSR

SEQ ID NO: 57094 - protein, 40 aa, Artificial Sequence; identical to SEQ ID NO: 14463
  Cyclic GFR-binding peptide
  MOD_RES (1)..(35): Xaa is C or S

SEQ ID NO: 57095 - protein, 35 aa, Artificial Sequence
  Cyclic GFR-binding peptide
  MOD_RES (34)..(34): Xaa is C or S
EELRSMEGLLKPKKRVYEMIQVTINSHHVRSPQXK

SEQ ID NO: 57096 - protein, 40 aa, Artificial Sequence; identical to SEQ ID NO: 14466
  Cyclic GFR-binding peptide
  MOD_RES (1)..(35): Xaa is C or S

SEQ ID NO: 57097 - protein, 28 aa, Artificial Sequence
  Cyclic GFR-binding peptide
LHDELTSMEGIFIPKKRVIEMIQVTINS

SEQ ID NO: 57098 - protein, 26 aa, Artificial Sequence
  Cyclic GFR-binding peptide
RVTAKKLKPKKRVYEIKRVQVPRHHV

SEQ ID NO: 57099 - protein, 41 aa, Artificial Sequence; identical to SEQ ID NO: 14471
  Cyclic GFR-binding peptide
  MOD_RES (2)..(36): Xaa is C or S

SEQ ID NO: 57100 - protein, 36 aa, Artificial Sequence
  Cyclic GFR-binding peptide
  MOD_RES (33)..(33): Xaa is C or S
ELTSMEGIFIPKKRVIEMIQVTINSLQVQTPRXQVN

SEQ ID NO: 57101 - protein, 28 aa, Artificial Sequence
  Cyclic GFR-binding peptide
LFSMEGLHQGQHPKIRMIQMTINSEETP

SEQ ID NO: 57102 - protein, 40 aa, Artificial Sequence; identical to SEQ ID NO: 14472
  Cyclic GFR-binding peptide
  MOD_RES (2)..(4): Xaa is C or S

SEQ ID NO: 57103 - protein, 36 aa, Artificial Sequence; identical to SEQ ID NO: 14473
  Cyclic GFR-binding peptide
  MOD_RES (2)..(2): Xaa is C or S

SEQ ID NO: 57104 - protein, 35 aa, Artificial Sequence
  Cyclic GFR-binding peptide
  MOD_RES (33)..(33): Xaa is C or S
ELTSMEGIFIPKKRVIEMIQVTINSLQVQTPRXQV

SEQ ID NO: 57105 - protein, 37 aa, Artificial Sequence; identical to SEQ ID NO: 14475
  Cyclic GFR-binding peptide
  MOD_RES (1)..(3): Xaa is C or S

SEQ ID NO: 57106 - protein, 33 aa, Artificial Sequence; identical to SEQ ID NO: 14476
  Cyclic GFR-binding peptide

SEQ ID NO: 57107 - protein, 32 aa, Artificial Sequence
  Cyclic GFR-binding peptide
  MOD_RES (32)..(32): Xaa is C or S
HQLFSMEGLHQGQHPKIRMIQMTINSEETPVX

SEQ ID NO: 57108 - protein, 28 aa, Artificial Sequence
  Cyclic GFR-binding peptide
DELTSMEGLFIPKKRVIEMIQVTINSLQ

SEQ ID NO: 57109 - protein, 27 aa, Artificial Sequence
  Cyclic GFR-binding peptide
EELVTAKKHQGQHPKIRIKRMQVPRQG

SEQ ID NO: 57110 - protein, 43 aa, Artificial Sequence; identical to SEQ ID NO: 14477
  Cyclic GFR-binding peptide
  MOD_RES (1)..(3)..(37): Xaa is C or S

SEQ ID NO: 57111 - protein, 33 aa, Artificial Sequence
  Cyclic GFR-binding peptide
  MOD_RES (29)..(29): Xaa is C or S
FSMEGLHQGQHPKIRMIQMTINSEETPVXELGE

SEQ ID NO: 57112 - protein, 45 aa, Artificial Sequence; identical to SEQ ID NO: 14478
  Cyclic GFR-binding peptide
  MOD_RES (2)..(4)..(41): Xaa is C or S

SEQ ID NO: 57113 - protein, 25 aa, Artificial Sequence
  Cyclic GFR-binding peptide
ELVQVEKHQGQHPKIRVKAMKVSRQ

SEQ ID NO: 57114 - protein, 29 aa, Artificial Sequence
  Cyclic GFR-binding peptide
TVQVEKFIPKKRVIEVKAVKVSRLQVQTP

SEQ ID NO: 57115 - protein, 28 aa, Artificial Sequence
  Cyclic GFR-binding peptide
ELRSMEGLLKPKKRVYEMIQVTINSHHV

SEQ ID NO: 57116 - protein, 36 aa, Artificial Sequence
  Cyclic GFR-binding peptide
  MOD_RES (32)..(32): Xaa is C or S
HEELVTAKKHQGQHPKIRIKRMQVPRQGTPVXELGE

SEQ ID NO: 57117 - protein, 31 aa, Artificial Sequence
  Cyclic GFR-binding peptide
  MOD_RES (1)..(1): Xaa is C or S
XALHDELTSMEGIFIPKKRVIEMIQVTINSL

SEQ ID NO: 57118 - protein, 34 aa, Artificial Sequence; identical to SEQ ID NO: 14482
  Cyclic GFR-binding peptide

SEQ ID NO: 57119 - protein, 37 aa, Artificial Sequence; identical to SEQ ID NO: 14483
  Cyclic GFR-binding peptide
  MOD_RES (34)..(34): Xaa is C or S

SEQ ID NO: 57120 - protein, 32 aa, Artificial Sequence
  Cyclic GFR-binding peptide
EELRSMEGLLKPKKRVYEMIQVTINSHHVRSP

SEQ ID NO: 57121 - protein, 39 aa, Artificial Sequence; identical to SEQ ID NO: 14484
  Cyclic GFR-binding peptide
  MOD_RES (2)..(4)..(38): Xaa is C or S

SEQ ID NO: 57122 - protein, 22 aa, Artificial Sequence
  Cyclic GFR-binding peptide
SMEGLFIPKKRVIEMIQVTINS

SEQ ID NO: 57123 - protein, 33 aa, Artificial Sequence
  Cyclic GFR-binding peptide
  MOD_RES (2)..(4): Xaa is C or S
EXKXALHDELTSMEGIFIPKKRVIEMIQVTINS

SEQ ID NO: 57124 - protein, 27 aa, Artificial Sequence
  Cyclic GFR-binding peptide
HEELRVTAKKLKPKKRVYEIKRVQVPR

SEQ ID NO: 57125 - protein, 28 aa, Artificial Sequence
  Cyclic GFR-binding peptide
TSMEGLFIPKKRVIEMIQVTINSLQVQT

SEQ ID NO: 57126 - protein, 26 aa, Artificial Sequence
  Cyclic GFR-binding peptide
LVTAKKHQGQHPKIRIKRMQVPRQGT

SEQ ID NO: 57127 - protein, 31 aa, Artificial Sequence
  Cyclic GFR-binding peptide
NHQLFVQVEKHQGQHPKIRVKAMKVSREETP

SEQ ID NO: 57128 - protein, 39 aa, Artificial Sequence; identical to SEQ ID NO: 14492
  Cyclic GFR-binding peptide
  MOD_RES (2)..(39): Xaa is C or S

SEQ ID NO: 57129 - protein, 36 aa, Artificial Sequence
  Cyclic GFR-binding peptide
  MOD_RES (1)..(3): Xaa is C or S
XAXELHEELRVTAKKLKPKKRVYEIKRVQVPRHHVR

SEQ ID NO: 57130 - protein, 32 aa, Artificial Sequence
  Cyclic GFR-binding peptide
  MOD_RES (32)..(32): Xaa is C or S
LTVQVEKFIPKKRVIEVKAVKVSRLQVQTPRX

SEQ ID NO: 57131 - protein, 29 aa, Artificial Sequence
  Cyclic GFR-binding peptide
SMEGIFIPKKRVIEMIQVTINSLQVQTPR

SEQ ID NO: 57132 - protein, 41 aa, Artificial Sequence; identical to SEQ ID NO: 14493
  Cyclic GFR-binding peptide
  MOD_RES (2)..(39): Xaa is C or S

SEQ ID NO: 57133 - protein, 39 aa, Artificial Sequence; identical to SEQ ID NO: 14494
  Cyclic GFR-binding peptide
  MOD_RES (1)..(3)..(37): Xaa is C or S

SEQ ID NO: 57134 - protein, 28 aa, Artificial Sequence
  Cyclic GFR-binding peptide
EELRSMEGLLKPKKRVYEMIQVTINSHH

SEQ ID NO: 57135 - protein, 38 aa, Artificial Sequence; identical to SEQ ID NO: 14495
  Cyclic GFR-binding peptide
  MOD_RES (2)..(2): Xaa is C or S

SEQ ID NO: 57136 - protein, 39 aa, Artificial Sequence; identical to SEQ ID NO: 14497
  Cyclic GFR-binding peptide
  MOD_RES (2)..(4)..(38): Xaa is C or S

SEQ ID NO: 57137 - protein, 31 aa, Artificial Sequence
  Cyclic GFR-binding peptide
  MOD_RES (30)..(30): Xaa is C or S
SMEGLLKPKKRVYEMIQVTINSHHVRSPQXK

SEQ ID NO: 57138 - protein, 40 aa, Artificial Sequence; identical to SEQ ID NO: 14500
  Cyclic GFR-binding peptide
  MOD_RES (1)..(3)..(37): Xaa is C or S

SEQ ID NO: 57139 - protein, 34 aa, Artificial Sequence; identical to SEQ ID NO: 14501
  Cyclic GFR-binding peptide

SEQ ID NO: 57140 - protein, 39 aa, Artificial Sequence; identical to SEQ ID NO: 14504
  Cyclic GFR-binding peptide
  MOD_RES (1)..(38): Xaa is C or S

SEQ ID NO: 57141 - protein, 32 aa, Artificial Sequence
  Cyclic GFR-binding peptide
  MOD_RES (2)..(4): Xaa is C or S
RXEXKNHQLFSMEGLHQGQHPKIRMIQMTINS

SEQ ID NO: 57142 - protein, 27 aa, Artificial Sequence
  Cyclic GFR-binding peptide
HQLFVTAKKHQGQHPKIRIKRMQVPRE

SEQ ID NO: 57143 - protein, 42 aa, Artificial Sequence; identical to SEQ ID NO: 14505
  Cyclic GFR-binding peptide
  MOD_RES (1)..(38): Xaa is C or S

SEQ ID NO: 57144 - protein, 28 aa, Artificial Sequence
  Cyclic GFR-binding peptide
LVQVEKHQGQHPKIRVKAMKVSRQGTPV

SEQ ID NO: 57145 - protein, 36 aa, Artificial Sequence
  Cyclic GFR-binding peptide
  MOD_RES (30)..(30): Xaa is C or S
LFVTAKKHQGQHPKIRIKRMQVPREETPVXELGEDN

SEQ ID NO: 57146 - protein, 37 aa, Artificial Sequence
  Cyclic GFR-binding peptide
  MOD_RES (2)..(4): Xaa is C or S
AXAXELHEELRSMEGLLKPKKRVYEMIQVTINSHHVR

SEQ ID NO: 57147 - protein, 31 aa, Artificial Sequence
  Cyclic GFR-binding peptide
  MOD_RES (1)..(1): Xaa is C or S
XELHEELRSMEGLLKPKKRVYEMIQVTINSH

SEQ ID NO: 57148 - protein, 38 aa, Artificial Sequence; identical to SEQ ID NO: 14506
  Cyclic GFR-binding peptide
  MOD_RES (1)..(35): Xaa is C or S

SEQ ID NO: 57149 - protein, 42 aa, Artificial Sequence; identical to SEQ ID NO: 14507
  Cyclic GFR-binding peptide
  MOD_RES (1)..(3)..(40): Xaa is C or S

SEQ ID NO: 57150 - protein, 41 aa, Artificial Sequence; identical to SEQ ID NO: 14508
  Cyclic GFR-binding peptide
  MOD_RES (1)..(35): Xaa is C or S

SEQ ID NO: 57151 - protein, 33 aa, Artificial Sequence
  Cyclic GFR-binding peptide
  MOD_RES (2)..(4): Xaa is C or S
EXKXALHDELTVQVEKFIPKKRVIEVKAVKVSR

SEQ ID NO: 57152 - protein, 27 aa, Artificial Sequence
  Cyclic GFR-binding peptide
LRSMEGILKPKKRVYEMIQVTINSHHV

SEQ ID NO: 57153 - protein, 37 aa, Artificial Sequence
  Cyclic GFR-binding peptide
  MOD_RES (2)..(4): Xaa is C or S
AXAXELHEELRVTAKKLKPKKRVYEIKRVQVPRHHVR

SEQ ID NO: 57154 - protein, 26 aa, Artificial Sequence
  Cyclic GFR-binding peptide
ELVQVEKHQGQHPKIRVKAMKVSRQG

SEQ ID NO: 57155 - protein, 40 aa, Artificial Sequence; identical to SEQ ID NO: 14510
  Cyclic GFR-binding peptide
  MOD_RES (2)..(4)..(38): Xaa is C or S

SEQ ID NO: 57156 - protein, 32 aa, Artificial Sequence
  Cyclic GFR-binding peptide
  MOD_RES (29)..(29): Xaa is C or S
LSMEGIHQGQHPKIRMIQMTINSQGTPVXELG

SEQ ID NO: 57157 - protein, 36 aa, Artificial Sequence
  Cyclic GFR-binding peptide
  MOD_RES (31)..(31): Xaa is C or S
EELSMEGIHQGQHPKIRMIQMTINSQGTPVXELGED

SEQ ID NO: 57158 - protein, 33 aa, Artificial Sequence
  Cyclic GFR-binding peptide
  MOD_RES (31)..(31): Xaa is C or S
QLFVQVEKHQGQHPKIRVKAMKVSREETPVXEL

SEQ ID NO: 57159 - protein, 35 aa, Artificial Sequence; identical to SEQ ID NO: 14515
  Cyclic GFR-binding peptide
  MOD_RES (1)..(35): Xaa is C or S

SEQ ID NO: 57160 - protein, 39 aa, Artificial Sequence; identical to SEQ ID NO: 14516
  Cyclic GFR-binding peptide
  MOD_RES (2)..(4)..(38): Xaa is C or S

SEQ ID NO: 57161 - protein, 29 aa, Artificial Sequence
  Cyclic GFR-binding peptide
ELRSMEGILKPKKRVYEMIQVTINSHHVR

SEQ ID NO: 57162 - protein, 34 aa, Artificial Sequence
  Cyclic GFR-binding peptide
  MOD_RES (31)..(31): Xaa is C or S
RSMEGILKPKKRVYEMIQVTINSHHVRSPQXKVS

SEQ ID NO: 57163 - protein, 41 aa, Artificial Sequence; identical to SEQ ID NO: 14518
  Cyclic GFR-binding peptide
  MOD_RES (1)..(3)..(40): Xaa is C or S

SEQ ID NO: 57164 - protein, 37 aa, Artificial Sequence; identical to SEQ ID NO: 14519
  Cyclic GFR-binding peptide
  MOD_RES (2)..(4): Xaa is C or S

SEQ ID NO: 57165 - protein, 37 aa, Artificial Sequence; identical to SEQ ID NO: 14520
  Cyclic GFR-binding peptide
  MOD_RES (2)..(36): Xaa is C or S

SEQ ID NO: 57166 - protein, 35 aa, Artificial Sequence
  Cyclic GFR-binding peptide
  MOD_RES (33)..(33): Xaa is C or S
ELRSMEGLLKPKKRVYEMIQVTINSHHVRSPQXKV

SEQ ID NO: 57167 - protein, 40 aa, Artificial Sequence; identical to SEQ ID NO: 14521
  Cyclic GFR-binding peptide
  MOD_RES (1)..(3)..(40): Xaa is C or S

SEQ ID NO: 57168 - protein, 44 aa, Artificial Sequence; identical to SEQ ID NO: 14523
  Cyclic GFR-binding peptide
  MOD_RES (1)..(3)..(40): Xaa is C or S

SEQ ID NO: 57169 - protein, 33 aa, Artificial Sequence
  Cyclic GFR-binding peptide
  MOD_RES (2)..(2): Xaa is C or S
AXELHEELRSMEGILKPKKRVYEMIQVTINSHH

SEQ ID NO: 57170 - protein, 33 aa, Artificial Sequence
  Cyclic GFR-binding peptide
ELHEELRVTAKKLKPKKRVYEIKRVQVPRHHVR

SEQ ID NO: 57171 - protein, 29 aa, Artificial Sequence
  Cyclic GFR-binding peptide
  MOD_RES (29)..(29): Xaa is C or S
LVQVEKHQGQHPKIRVKAMKVSRQGTPVX

SEQ ID NO: 57172 - protein, 26 aa, Artificial Sequence
  Cyclic GFR-binding peptide
SMEGLLKPKKRVYEMIQVTINSHHVR

SEQ ID NO: 57173 - protein, 31 aa, Artificial Sequence
  Cyclic GFR-binding peptide
HQLFVTAKKHQGQHPKIRIKRMQVPREETPV

SEQ ID NO: 57174 - protein, 33 aa, Artificial Sequence
  Cyclic GFR-binding peptide
  MOD_RES (32)..(32): Xaa is C or S
HQLFVQVEKHQGQHPKIRVKAMKVSREETPVXE

SEQ ID NO: 57175 - protein, 37 aa, Artificial Sequence; identical to SEQ ID NO: 14524
  Cyclic GFR-binding peptide
  MOD_RES (35)..(35): Xaa is C or S

SEQ ID NO: 57176 - protein, 37 aa, Artificial Sequence; identical to SEQ ID NO: 14525
  Cyclic GFR-binding peptide
  MOD_RES (35)..(35): Xaa is C or S

SEQ ID NO: 57177 - protein, 23 aa, Artificial Sequence
  Cyclic GFR-binding peptide
VQVEKFIPKKRVIEVKAVKVSRL

SEQ ID NO: 57178 - protein, 29 aa, Artificial Sequence
  Cyclic GFR-binding peptide
LHEELRVTAKKLKPKKRVYEIKRVQVPRH

SEQ ID NO: 57179 - protein, 41 aa, Artificial Sequence; identical to SEQ ID NO: 14527
  Cyclic GFR-binding peptide
  MOD_RES (1)..(3)..(40): Xaa is C or S

SEQ ID NO: 57180 - protein, 37 aa, Artificial Sequence; identical to SEQ ID NO: 14528
  Cyclic GFR-binding peptide
  MOD_RES (2)..(36): Xaa is C or S

SEQ ID NO: 57181 - protein, 41 aa, Artificial Sequence; identical to SEQ ID NO: 14529
  Cyclic GFR-binding peptide
  MOD_RES (2)..(39): Xaa is C or S

SEQ ID NO: 57182 - protein, 24 aa, Artificial Sequence
  Cyclic GFR-binding peptide
VQVEKFIPKKRVIEVKAVKVSRLQ

SEQ ID NO: 57183 - protein, 41 aa, Artificial Sequence; identical to SEQ ID NO: 14530
  Cyclic GFR-binding peptide
  MOD_RES (2)..(4)..(38): Xaa is C or S

SEQ ID NO: 57184 - protein, 32 aa, Artificial Sequence
  Cyclic GFR-binding peptide
  MOD_RES (1)..(3): Xaa is C or S
XKXALHDELTSMEGIFIPKKRVIEMIQVTINS

SEQ ID NO: 57185 - protein, 40 aa, Artificial Sequence; identical to SEQ ID NO: 14532
  Cyclic GFR-binding peptide
  MOD_RES (2)..(4)..(38): Xaa is C or S

SEQ ID NO: 57186 - protein, 27 aa, Artificial Sequence
  Cyclic GFR-binding peptide
ELRSMEGLLKPKKRVYEMIQVTINSHH

SEQ ID NO: 57187 - protein, 33 aa, Artificial Sequence
  Cyclic GFR-binding peptide
  MOD_RES (2)..(4): Xaa is C or S
RXEXQSHEELVTAKKHQGQHPKIRIKRMQVPRQ

SEQ ID NO: 57188 - protein, 27 aa, Artificial Sequence
  Cyclic GFR-binding peptide
LVQVEKHQGQHPKIRVKAMKVSRQGTP

SEQ ID NO: 57189 - protein, 39 aa, Artificial Sequence; identical to SEQ ID NO: 14533
  Cyclic GFR-binding peptide
  MOD_RES (1)..(3): Xaa is C or S

SEQ ID NO: 57190 - protein, 38 aa, Artificial Sequence; identical to SEQ ID NO: 14534
  Cyclic GFR-binding peptide
  MOD_RES (1)..(35): Xaa is C or S

SEQ ID NO: 57191 - protein, 39 aa, Artificial Sequence; identical to SEQ ID NO: 14535
  Cyclic GFR-binding peptide
  MOD_RES (37)..(37): Xaa is C or S

SEQ ID NO: 57192 - protein, 40 aa, Artificial Sequence; identical to SEQ ID NO: 14536
  Cyclic GFR-binding peptide
  MOD_RES (34)..(34): Xaa is C or S

SEQ ID NO: 57193 - protein, 29 aa, Artificial Sequence
  Cyclic GFR-binding peptide
LHEELRSMEGILKPKKRVYEMIQVTINSH

SEQ ID NO: 57194 - protein, 35 aa, Artificial Sequence; identical to SEQ ID NO: 14542
  Cyclic GFR-binding peptide

SEQ ID NO: 57195 - protein, 38 aa, Artificial Sequence; identical to SEQ ID NO: 14544
  Cyclic GFR-binding peptide
  MOD_RES (2)..(36): Xaa is C or S

SEQ ID NO: 57196 - protein, 29 aa, Artificial Sequence
  Cyclic GFR-binding peptide
ELTSMEGLFIPKKRVIEMIQVTINSLQVQ

SEQ ID NO: 57197 - protein, 31 aa, Artificial Sequence
  Cyclic GFR-binding peptide
KNHQLFVTAKKHQGQHPKIRIKRMQVPREET

SEQ ID NO: 57198 - protein, 28 aa, Artificial Sequence
  Cyclic GFR-binding peptide
LRSMEGLLKPKKRVYEMIQVTINSHHVR

SEQ ID NO: 57199 - protein, 35 aa, Artificial Sequence
  Cyclic GFR-binding peptide
  MOD_RES (34)..(34): Xaa is C or S
EELRVTAKKLKPKKRVYEIKRVQVPRHHVRSPQXK

SEQ ID NO: 57200 - protein, 34 aa, Artificial Sequence
  Cyclic GFR-binding peptide
  MOD_RES (30)..(30): Xaa is C or S
ELVTAKKHQGQHPKIRIKRMQVPRQGTPVXELGE

SEQ ID NO: 57201 - protein, 39 aa, Artificial Sequence; identical to SEQ ID NO: 14552
  Cyclic GFR-binding peptide
  MOD_RES (36)..(36): Xaa is C or S

SEQ ID NO: 57202 - protein, 29 aa, Artificial Sequence
  Cyclic GFR-binding peptide
DELTVQVEKFIPKKRVIEVKAVKVSRLQV

SEQ ID NO: 57203 - protein, 31 aa, Artificial Sequence
  Cyclic GFR-binding peptide
HEELSMEGIHQGQHPKIRMIQMTINSQGTPV

SEQ ID NO: 57204 - protein, 29 aa, Artificial Sequence
  Cyclic GFR-binding peptide
HEELRSMEGLLKPKKRVYEMIQVTINSHH

SEQ ID NO: 57205 - protein, 32 aa, Artificial Sequence
  Cyclic GFR-binding peptide
  MOD_RES (28)..(28): Xaa is C or S
VQVEKHQGQHPKIRVKAMKVSREETPVXELGE

SEQ ID NO: 57206 - protein, 40 aa, Artificial Sequence; identical to SEQ ID NO: 14554
  Cyclic GFR-binding peptide
  MOD_RES (36)..(36): Xaa is C or S

SEQ ID NO: 57207 - protein, 37 aa, Artificial Sequence; identical to SEQ ID NO: 14555
  Cyclic GFR-binding peptide
  MOD_RES (2)..(2): Xaa is C or S

SEQ ID NO: 57208 - protein, 34 aa, Artificial Sequence
  Cyclic GFR-binding peptide
  MOD_RES (31)..(31): Xaa is C or S
RSMEGLLKPKKRVYEMIQVTINSHHVRSPQXKVS

SEQ ID NO: 57209 - protein, 42 aa, Artificial Sequence; identical to SEQ ID NO: 14556
  Cyclic GFR-binding peptide
  MOD_RES (2)..(36): Xaa is C or S

SEQ ID NO: 57210 - protein, 25 aa, Artificial Sequence
  Cyclic GFR-binding peptide
ELTVQVEKFIPKKRVIEVKAVKVSR

SEQ ID NO: 57211 - protein, 31 aa, Artificial Sequence
  Cyclic GFR-binding peptide
  MOD_RES (29)..(29): Xaa is C or S
LVQVEKHQGQHPKIRVKAMKVSRQGTPVXEL

SEQ ID NO: 57212 - protein, 31 aa, Artificial Sequence
  Cyclic GFR-binding peptide
EELRSMEGILKPKKRVYEMIQVTINSHHVRS

SEQ ID NO: 57213 - protein, 31 aa, Artificial Sequence
  Cyclic GFR-binding peptide
SHEELSMEGIHQGQHPKIRMIQMTINSQGTP

SEQ ID NO: 57214 - protein, 30 aa, Artificial Sequence
  Cyclic GFR-binding peptide
  MOD_RES (1)..(1): Xaa is C or S
XQSHEELVTAKKHQGQHPKIRIKRMQVPRQ

SEQ ID NO: 57215 - protein, 36 aa, Artificial Sequence; identical to SEQ ID NO: 14558
  Cyclic GFR-binding peptide
  MOD_RES (1)..(3): Xaa is C or S

SEQ ID NO: 57216 - protein, 41 aa, Artificial Sequence; identical to SEQ ID NO: 14560
  Cyclic GFR-binding peptide
  MOD_RES (1)..(38): Xaa is C or S

SEQ ID NO: 57217 - protein, 36 aa, Artificial Sequence; identical to SEQ ID NO: 14561
  Cyclic GFR-binding peptide
  MOD_RES (34)..(34): Xaa is C or S

SEQ ID NO: 57218 - protein, 43 aa, Artificial Sequence; identical to SEQ ID NO: 14563
  Cyclic GFR-binding peptide
  MOD_RES (2)..(39): Xaa is C or S

SEQ ID NO: 57219 - protein, 22 aa, Artificial Sequence
  Cyclic GFR-binding peptide
VTAKKFIPKKRVIEIKRVQVPR

SEQ ID NO: 57220 - protein, 36 aa, Artificial Sequence; identical to SEQ ID NO: 14569
  Cyclic GFR-binding peptide
  MOD_RES (34)..(34): Xaa is C or S

SEQ ID NO: 57221 - protein, 28 aa, Artificial Sequence
  Cyclic GFR-binding peptide
RSMEGILKPKKRVYEMIQVTINSHHVRS

SEQ ID NO: 57222 - protein, 35 aa, Artificial Sequence
  Cyclic GFR-binding peptide
  MOD_RES (2)..(4): Xaa is C or S
RXEXKNHQLFVTAKKHQGQHPKIRIKRMQVPREET

SEQ ID NO: 57223 - protein, 26 aa, Artificial Sequence
  Cyclic GFR-binding peptide
ELRVTAKKLKPKKRVYEIKRVQVPRH

SEQ ID NO: 57224 - protein, 32 aa, Artificial Sequence
  Cyclic GFR-binding peptide
  MOD_RES (30)..(30): Xaa is C or S
VQVEKFIPKKRVIEVKAVKVSRLQVQTPRXQV

SEQ ID NO: 57225 - protein, 23 aa, Artificial Sequence
  Cyclic GFR-binding peptide
VQVEKHQGQHPKIRVKAMKVSRE

SEQ ID NO: 57226 - protein, 36 aa, Artificial Sequence; identical to SEQ ID NO: 14573
  Cyclic GFR-binding peptide

SEQ ID NO: 57227 - protein, 34 aa, Artificial Sequence
  Cyclic GFR-binding peptide
  MOD_RES (29)..(29): Xaa is C or S
FSMEGLHQGQHPKIRMIQMTINSEETPVXELGED

SEQ ID NO: 57228 - protein, 29 aa, Artificial Sequence
  Cyclic GFR-binding peptide
HEELVQVEKHQGQHPKIRVKAMKVSRQGT

SEQ ID NO: 57229 - protein, 38 aa, Artificial Sequence
  Cyclic GFR-binding peptide
  MOD_RES (32)..(32): Xaa is C or S
HQLFVTAKKHQGQHPKIRIKRMQVPREETPVXELGEDN

SEQ ID NO: 57230 - protein, 32 aa, Artificial Sequence
  Cyclic GFR-binding peptide
  MOD_RES (31)..(31): Xaa is C or S
EELSMEGIHQGQHPKIRMIQMTINSQGTPVXE

SEQ ID NO: 57231 - protein, 27 aa, Artificial Sequence
  Cyclic GFR-binding peptide
HEELRSMEGLLKPKKRVYEMIQVTINS

SEQ ID NO: 57232 - protein, 27 aa, Artificial Sequence
  Cyclic GFR-binding peptide
HEELRSMEGILKPKKRVYEMIQVTINS

SEQ ID NO: 57233 - protein, 42 aa, Artificial Sequence; identical to SEQ ID NO: 14576
  Cyclic GFR-binding peptide
  MOD_RES (2)..(4)..(41): Xaa is C or S

SEQ ID NO: 57234 - protein, 30 aa, Artificial Sequence
  Cyclic GFR-binding peptide
QLFVQVEKHQGQHPKIRVKAMKVSREETPV

SEQ ID NO: 57235 - protein, 35 aa, Artificial Sequence
  Cyclic GFR-binding peptide
  MOD_RES (2)..(2): Xaa is C or S
KXALHDELTSMEGIFIPKKRVIEMIQVTINSLQVQ

SEQ ID NO: 57236 - protein, 29 aa, Artificial Sequence
  Cyclic GFR-binding peptide
EELVTAKKHQGQHPKIRIKRMQVPRQGTP

SEQ ID NO: 57237 - protein, 34 aa, Artificial Sequence; identical to SEQ ID NO: 14579
  Cyclic GFR-binding peptide
  MOD_RES (1)..(1): Xaa is C or S

SEQ ID NO: 57238 - protein, 35 aa, Artificial Sequence
  Cyclic GFR-binding peptide
  MOD_RES (31)..(31): Xaa is C or S
TVQVEKFIPKKRVIEVKAVKVSRLQVQTPRXQVNR

SEQ ID NO: 57239 - protein, 30 aa, Artificial Sequence
  Cyclic GFR-binding peptide
  MOD_RES (30)..(30): Xaa is C or S
SMEGIFIPKKRVIEMIQVTINSLQVQTPRX

SEQ ID NO: 57240 - protein, 33 aa, Artificial Sequence
  Cyclic GFR-binding peptide
  MOD_RES (1)..(3): Xaa is C or S
XEXKNHQLFSMEGLHQGQHPKIRMIQMTINSEE

SEQ ID NO: 57241 - protein, 32 aa, Artificial Sequence
  Cyclic GFR-binding peptide
DELTSMEGLFIPKKRVIEMIQVTINSLQVQTP

SEQ ID NO: 57242 - protein, 39 aa, Artificial Sequence; identical to SEQ ID NO: 14582
  Cyclic GFR-binding peptide
  MOD_RES (37)..(37): Xaa is C or S

SEQ ID NO: 57243 - protein, 22 aa, Artificial Sequence
  Cyclic GFR-binding peptide
SMEGIHQGQHPKIRMIQMTINS

SEQ ID NO: 57244 - protein, 29 aa, Artificial Sequence
  Cyclic GFR-binding peptide
RSMEGLLKPKKRVYEMIQVTINSHHVRSP

SEQ ID NO: 57245 - protein, 37 aa, Artificial Sequence; identical to SEQ ID NO: 14585
  Cyclic GFR-binding peptide
  MOD_RES (1)..(35): Xaa is C or S

SEQ ID NO: 57246 - protein, 30 aa, Artificial Sequence
  Cyclic GFR-binding peptide
HQLFVQVEKHQGQHPKIRVKAMKVSREETP

SEQ ID NO: 57247 - protein, 28 aa, Artificial Sequence
  Cyclic GFR-binding peptide
EELRVTAKKLKPKKRVYEIKRVQVPRHH

SEQ ID NO: 57248 - protein, 33 aa, Artificial Sequence
  Cyclic GFR-binding peptide
  MOD_RES (30)..(30): Xaa is C or S
LFVTAKKHQGQHPKIRIKRMQVPREETPVXELG

SEQ ID NO: 57249 - protein, 34 aa, Artificial Sequence
  Cyclic GFR-binding peptide
  MOD_RES (1)..(1): Xaa is C or S
XALHDELTSMEGIFIPKKRVIEMIQVTINSLQVQ

SEQ ID NO: 57250 - protein, 37 aa, Artificial Sequence
  Cyclic GFR-binding peptide
  MOD_RES (5)..(5): Xaa is C or S
SSVKXQPSRVHHSNITVQIMEYVRKKPKLLGEMSRLE

SEQ ID NO: 57251 - protein, 29 aa, Artificial Sequence
  Cyclic GFR-binding peptide
HHRPVQVRKIEYVRKKPKLKKATVRLEEH

SEQ ID NO: 57252 - protein, 23 aa, Artificial Sequence
  Cyclic GFR-binding peptide
RPVQVRKIEYVRKKPKLKKATVR

SEQ ID NO: 57253 - protein, 31 aa, Artificial Sequence
  Cyclic GFR-binding peptide
  MOD_RES (2)..(2): Xaa is C or S
KXQPSRVHHSNITVQIMEYVRKKPKLIGEMS

SEQ ID NO: 57254 - protein, 29 aa, Artificial Sequence
  Cyclic GFR-binding peptide
RVHHSNITVQIMEYVRKKPKLLGEMSRLE

SEQ ID NO: 57255 - protein, 36 aa, Artificial Sequence; identical to SEQ ID NO: 14592
  Cyclic GFR-binding peptide
  MOD_RES (34)..(36): Xaa is C or S

SEQ ID NO: 57256 - protein, 34 aa, Artificial Sequence
  Cyclic GFR-binding peptide
  MOD_RES (1)..(1): Xaa is C or S
XQPSRVHHSNITVQIMEYVRKKPKLIGEMSRLEE

SEQ ID NO: 57257 - protein, 43 aa, Artificial Sequence; identical to SEQ ID NO: 14593
  Cyclic GFR-binding peptide
  MOD_RES (7)..(41)..(43): Xaa is C or S

SEQ ID NO: 57258 - protein, 35 aa, Artificial Sequence; identical to SEQ ID NO: 14594
  Cyclic GFR-binding peptide
  MOD_RES (1)..(35): Xaa is C or S

SEQ ID NO: 57259 - protein, 26 aa, Artificial Sequence
  Cyclic GFR-binding peptide
EERSVKMAKVRIKPHQGQHKEVQVFL

SEQ ID NO: 57260 - protein, 31 aa, Artificial Sequence
  Cyclic GFR-binding peptide
PTEESNITMQIMRIKPHQGQHLGEMSFLQHN

SEQ ID NO: 57261 - protein, 36 aa, Artificial Sequence
  Cyclic GFR-binding peptide
  MOD_RES (7)..(7): Xaa is C or S
NDEGLEXVPTGQRPVQMRKIRIKPHQGQHKKATVLE

SEQ ID NO: 57262 - protein, 30 aa, Artificial Sequence
  Cyclic GFR-binding peptide
QVQLRSVKVAKVEIVRKKPIFKEVQVTLED

SEQ ID NO: 57263 - protein, 32 aa, Artificial Sequence; identical to SEQ ID NO: 14599
  Cyclic GFR-binding peptide

SEQ ID NO: 57264 - protein, 34 aa, Artificial Sequence
  Cyclic GFR-binding peptide
  MOD_RES (1)..(1): Xaa is C or S
XQPSRVHHSNITVQIMEYVRKKPKLLGEMSRLEE

SEQ ID NO: 57265 - protein, 42 aa, Artificial Sequence; identical to SEQ ID NO: 14600
  Cyclic GFR-binding peptide
  MOD_RES (5)..(42): Xaa is C or S

SEQ ID NO: 57266 - protein, 27 aa, Artificial Sequence
  Cyclic GFR-binding peptide
PTGQRPVQMRKIRIKPHQGQHKKATVL

SEQ ID NO: 57267 - protein, 26 aa, Artificial Sequence
  Cyclic GFR-binding peptide
HSNITVQIMEYVRKKPKLIGEMSRLE

SEQ ID NO: 57268 - protein, 31 aa, Artificial Sequence
  Cyclic GFR-binding peptide
  MOD_RES (30)..(30): Xaa is C or S
SNITVQIMEIVRKKPIFIGEMSTLEDHLAXK

SEQ ID NO: 57269 - protein, 32 aa, Artificial Sequence
  Cyclic GFR-binding peptide
  MOD_RES (2)..(2): Xaa is C or S
KXQPSRVHHSNITVQIMEYVRKKPKLIGEMSR

SEQ ID NO: 57270 - protein, 31 aa, Artificial Sequence
  Cyclic GFR-binding peptide
  MOD_RES (1)..(1): Xaa is C or S
XRPTQVQLRSVKVAKVEIVRKKPIFKEVQVT

SEQ ID NO: 57271 - protein, 31 aa, Artificial Sequence
  Cyclic GFR-binding peptide
  MOD_RES (2)..(2): Xaa is C or S
QXRPTQVQLRSVKVAKVEIVRKKPIFKEVQV

SEQ ID NO: 57272 - protein, 24 aa, Artificial Sequence
  Cyclic GFR-binding peptide
SNITVQIMEYVRKKPKLLGEMSRL

SEQ ID NO: 57273 - protein, 26 aa, Artificial Sequence
  Cyclic GFR-binding peptide
QVQLRSVKVAKVEIVRKKPIFKEVQV

SEQ ID NO: 57274 - protein, 35 aa, Artificial Sequence; identical to SEQ ID NO: 14608
  Cyclic GFR-binding peptide
  MOD_RES (34)..(34): Xaa is C or S

SEQ ID NO: 57275 - protein, 29 aa, Artificial Sequence
  Cyclic GFR-binding peptide
  MOD_RES (1)..(1): Xaa is C or S
XVPTEESNITMQIMRIKPHQGQHLGEMSF

SEQ ID NO: 57276 - protein, 36 aa, Artificial Sequence
  Cyclic GFR-binding peptide
  MOD_RES (34)..(36): Xaa is C or S
QVQLSNITVQIMEIVRKKPIFLGEMSTLEDHLAXKX

SEQ ID NO: 57277 - protein, 39 aa, Artificial Sequence; identical to SEQ ID NO: 14609
  Cyclic GFR-binding peptide
  MOD_RES (2)..(39): Xaa is C or S

SEQ ID NO: 57278 - protein, 36 aa, Artificial Sequence; identical to SEQ ID NO: 14610
  Cyclic GFR-binding peptide
  MOD_RES (34)..(36): Xaa is C or S

SEQ ID NO: 57279 - protein, 35 aa, Artificial Sequence
  Cyclic GFR-binding peptide
  MOD_RES (5)..(5): Xaa is C or S
SSVKXQPSRVHHRPVQVRKIEYVRKKPKLKKATVR

SEQ ID NO: 57280 - protein, 37 aa, Artificial Sequence; identical to SEQ ID NO: 14614
  Cyclic GFR-binding peptide
  MOD_RES (1)..(1): Xaa is C or S

SEQ ID NO: 57281 - protein, 36 aa, Artificial Sequence; identical to SEQ ID NO: 14617
  Cyclic GFR-binding peptide
  MOD_RES (1)..(1): Xaa is C or S

SEQ ID NO: 57282 - protein, 45 aa, Artificial Sequence; identical to SEQ ID NO: 14618
  Cyclic GFR-binding peptide
  MOD_RES (5)..(42)..(44): Xaa is C or S

SEQ ID NO: 57283 - protein, 31 aa, Artificial Sequence
  Cyclic GFR-binding peptide
  MOD_RES (31)..(31): Xaa is C or S
LRSVKVAKVEIVRKKPIFKEVQVTLEDHLAX

SEQ ID NO: 57284 - protein, 34 aa, Artificial Sequence; identical to SEQ ID NO: 14619
  Cyclic GFR-binding peptide

SEQ ID NO: 57285 - protein, 29 aa, Artificial Sequence
  Cyclic GFR-binding peptide
VHHSNITVQIMEYVRKKPKLIGEMSRLEE

SEQ ID NO: 57286 - protein, 37 aa, Artificial Sequence; identical to SEQ ID NO: 14620
  Cyclic GFR-binding peptide
  MOD_RES (34)..(36): Xaa is C or S

SEQ ID NO: 57287 - protein, 35 aa, Artificial Sequence; identical to SEQ ID NO: 14621
  Cyclic GFR-binding peptide
  MOD_RES (1)..(1): Xaa is C or S

SEQ ID NO: 57288 - protein, 34 aa, Artificial Sequence
  Cyclic GFR-binding peptide
  MOD_RES (33)..(33): Xaa is C or S
VQLRSVKVAKVEIVRKKPIFKEVQVTLEDHLAXK

SEQ ID NO: 57289 - protein, 34 aa, Artificial Sequence
  Cyclic GFR-binding peptide
  MOD_RES (1)..(1): Xaa is C or S
XRPTQVQLRSVKVAKVEIVRKKPIFKEVQVTLED

SEQ ID NO: 57290 - protein, 33 aa, Artificial Sequence; identical to SEQ ID NO: 14623
  Cyclic GFR-binding peptide

SEQ ID NO: 57291 - protein, 44 aa, Artificial Sequence; identical to SEQ ID NO: 14624
  Cyclic GFR-binding peptide
  MOD_RES (4)..(41)..(43): Xaa is C or S

SEQ ID NO: 57292 - protein, 34 aa, Artificial Sequence
  Cyclic GFR-binding peptide
  MOD_RES (32)..(34): Xaa is C or S
TEERSVKMAKVRIKPHQGQHKEVQVFLQHNKXEX

SEQ ID NO: 57293 - protein, 32 aa, Artificial Sequence
  Cyclic GFR-binding peptide
  MOD_RES (1)..(1): Xaa is C or S
XVPTEERSVKMAKVRIKPHQGQHKEVQVFLQH

SEQ ID NO: 57294 - protein, 30 aa, Artificial Sequence
  Cyclic GFR-binding peptide
LRSVKVAKVEIVRKKPIFKEVQVTLEDHLA

SEQ ID NO: 57295 - protein, 38 aa, Artificial Sequence; identical to SEQ ID NO: 14631
  Cyclic GFR-binding peptide
  MOD_RES (37)..(37): Xaa is C or S

SEQ ID NO: 57296 - protein, 38 aa, Artificial Sequence; identical to SEQ ID NO: 14630
  Cyclic GFR-binding peptide
  MOD_RES (3)..(37): Xaa is C or S

SEQ ID NO: 57297 - protein, 28 aa, Artificial Sequence
  Cyclic GFR-binding peptide
RVHHRPVQVRKIEYVRKKPKLKKATVRL

SEQ ID NO: 57298 - protein, 40 aa, Artificial Sequence; identical to SEQ ID NO: 14632
  Cyclic GFR-binding peptide
  MOD_RES (6)..(40): Xaa is C or S

SEQ ID NO: 57299 - protein, 28 aa, Artificial Sequence
  Cyclic GFR-binding peptide
SRVHHSNITVQIMEYVRKKPKLLGEMSR

SEQ ID NO: 57300 - protein, 27 aa, Artificial Sequence
  Cyclic GFR-binding peptide
RVHHSNITVQIMEYVRKKPKLLGEMSR

SEQ ID NO: 57301 - protein, 37 aa, Artificial Sequence; identical to SEQ ID NO: 14635
  Cyclic GFR-binding peptide
  MOD_RES (3)..(3): Xaa is C or S

SEQ ID NO: 57302 - protein, 33 aa, Artificial Sequence
  Cyclic GFR-binding peptide
  MOD_RES (2)..(2): Xaa is C or S
KXQPSRVHHRPVQVRKIEYVRKKPKLKKATVRL

SEQ ID NO: 57303 - protein, 42 aa, Artificial Sequence; identical to SEQ ID NO: 14636
  Cyclic GFR-binding peptide
  MOD_RES (6)..(40)..(42): Xaa is C or S

SEQ ID NO: 57304 - protein, 41 aa, Artificial Sequence; identical to SEQ ID NO: 14637
  Cyclic GFR-binding peptide
  MOD_RES (4)..(41): Xaa is C or S

SEQ ID NO: 57305 - protein, 38 aa, Artificial Sequence; identical to SEQ ID NO: 14639
  Cyclic GFR-binding peptide
  MOD_RES (4)..(4): Xaa is C or S

SEQ ID NO: 57306 - protein, 37 aa, Artificial Sequence; identical to SEQ ID NO: 14640
  Cyclic GFR-binding peptide
  MOD_RES (5)..(5): Xaa is C or S

SEQ ID NO: 57307 - protein, 38 aa, Artificial Sequence; identical to SEQ ID NO: 14641
  Cyclic GFR-binding peptide
  MOD_RES (1)..(35)..(37): Xaa is C or S

SEQ ID NO: 57308 - protein, 29 aa, Artificial Sequence
  Cyclic GFR-binding peptide
SRVHHSNITVQIMEYVRKKPKLLGEMSRL

SEQ ID NO: 57309 - protein, 30 aa, Artificial Sequence
  Cyclic GFR-binding peptide
  MOD_RES (2)..(2): Xaa is C or S
EXVPTEERSVKMAKVRIKPHQGQHKEVQVF

SEQ ID NO: 57310 - protein, 28 aa, Artificial Sequence
  Cyclic GFR-binding peptide
PTGQSNITMQIMRIKPHQGQHIGEMSLE

SEQ ID NO: 57311 - protein, 35 aa, Artificial Sequence; identical to SEQ ID NO: 14643
  Cyclic GFR-binding peptide
  MOD_RES (1)..(1): Xaa is C or S

SEQ ID NO: 57312 - protein, 39 aa, Artificial Sequence; identical to SEQ ID NO: 14644
  Cyclic GFR-binding peptide
  MOD_RES (2)..(36)..(38): Xaa is C or S

SEQ ID NO: 57313 - protein, 36 aa, Artificial Sequence
  Cyclic GFR-binding peptide
  MOD_RES (3)..(3): Xaa is C or S
VQXRPTQVQLRSVKVAKVEIVRKKPIFKEVQVTLED

SEQ ID NO: 57314 - protein, 26 aa, Artificial Sequence
  Cyclic GFR-binding peptide
TGQSNITMQIMRIKPHQGQHIGEMSL

SEQ ID NO: 57315 - protein, 35 aa, Artificial Sequence; identical to SEQ ID NO: 14645
  Cyclic GFR-binding peptide
  MOD_RES (3)..(3): Xaa is C or S

SEQ ID NO: 57316 - protein, 32 aa, Artificial Sequence
  Cyclic GFR-binding peptide
RPTQVQLSNITVQIMEIVRKKPIFIGEMSTLE

SEQ ID NO: 57317 - protein, 40 aa, Artificial Sequence; identical to SEQ ID NO: 14647
  Cyclic GFR-binding peptide
  MOD_RES (4)..(4): Xaa is C or S

SEQ ID NO: 57318 - protein, 38 aa, Artificial Sequence; identical to SEQ ID NO: 14648
  Cyclic GFR-binding peptide
  MOD_RES (1)..(35)..(37): Xaa is C or S

SEQ ID NO: 57319 - protein, 37 aa, Artificial Sequence
  Cyclic GFR-binding peptide
  MOD_RES (7)..(7): Xaa is C or S
NDEGLEXVPTEESNITMQIMRIKPHQGQHLGEMSFLQ

SEQ ID NO: 57320 - protein, 34 aa, Artificial Sequence
  Cyclic GFR-binding peptide
  MOD_RES (32)..(34): Xaa is C or S
TGQSNITMQIMRIKPHQGQHIGEMSLEEHSQXEX

SEQ ID NO: 57321 - protein, 31 aa, Artificial Sequence
  Cyclic GFR-binding peptide
VHHRPVQVRKIEYVRKKPKLKKATVRLEEHL

SEQ ID NO: 57322 - protein, 34 aa, Artificial Sequence
  Cyclic GFR-binding peptide
  MOD_RES (34)..(34): Xaa is C or S
RVHHRPVQVRKIEYVRKKPKLKKATVRLEEHLEX

SEQ ID NO: 57323 - protein, 29 aa, Artificial Sequence
  Cyclic GFR-binding peptide
VHHSNITVQIMEYVRKKPKLLGEMSRLEE

SEQ ID NO: 57324 - protein, 26 aa, Artificial Sequence
  Cyclic GFR-binding peptide
QVQLSNITVQIMEIVRKKPIFIGEMS

SEQ ID NO: 57325 - protein, 25 aa, Artificial Sequence
  Cyclic GFR-binding peptide
RPVQMRKIRIKPHQGQHKKATVLEE

SEQ ID NO: 57326 - protein, 31 aa, Artificial Sequence
  Cyclic GFR-binding peptide
  MOD_RES (2)..(2): Xaa is C or S
QXRPTQVQLSNITVQIMEIVRKKPIFIGEMS

SEQ ID NO: 57327 - protein, 45 aa, Artificial Sequence; identical to SEQ ID NO: 14650
  Cyclic GFR-binding peptide
  MOD_RES (5)..(42)..(44): Xaa is C or S

SEQ ID NO: 57328 - protein, 34 aa, Artificial Sequence
  Cyclic GFR-binding peptide
  MOD_RES (5)..(5): Xaa is C or S
SSVKXQPSRVHHSNITVQIMEYVRKKPKLLGEMS

SEQ ID NO: 57329 - protein, 39 aa, Artificial Sequence; identical to SEQ ID NO: 14652
  Cyclic GFR-binding peptide
  MOD_RES (5)..(39): Xaa is C or S

SEQ ID NO: 57330 - protein, 29 aa, Artificial Sequence
  Cyclic GFR-binding peptide
RSVKVAKVEIVRKKPIFKEVQVTLEDHLA

SEQ ID NO: 57331 - protein, 42 aa, Artificial Sequence; identical to SEQ ID NO: 14653
  Cyclic GFR-binding peptide
  MOD_RES (5)..(42): Xaa is C or S

SEQ ID NO: 57332 - protein, 31 aa, Artificial Sequence
  Cyclic GFR-binding peptide
  MOD_RES (2)..(2): Xaa is C or S
EXVPTEERSVKMAKVRIKPHQGQHKEVQVFL

SEQ ID NO: 57333 - protein, 38 aa, Artificial Sequence
  Cyclic GFR-binding peptide
  MOD_RES (5)..(5): Xaa is C or S
SSVKXQPSRVHHSNITVQIMEYVRKKPKLIGEMSRLEE

SEQ ID NO: 57334 - protein, 27 aa, Artificial Sequence
  Cyclic GFR-binding peptide
GQRSVKMAKVRIKPHQGQHKEVQVLEE

SEQ ID NO: 57335 - protein, 31 aa, Artificial Sequence
  Cyclic GFR-binding peptide
QVQLSNITVQIMEIVRKKPIFIGEMSTLEDH

SEQ ID NO: 57336 - protein, 29 aa, Artificial Sequence
  Cyclic GFR-binding peptide
GQRSVKMAKVRIKPHQGQHKEVQVLEEHS

SEQ ID NO: 57337 - protein, 31 aa, Artificial Sequence
  Cyclic GFR-binding peptide
  MOD_RES (31)..(31): Xaa is C or S
LSNITVQIMEIVRKKPIFLGEMSTLEDHLAX

SEQ ID NO: 57338 - protein, 32 aa, Artificial Sequence
  Cyclic GFR-binding peptide
  MOD_RES (30)..(32): Xaa is C or S
ERPVQMRKIRIKPHQGQHKKATVFLQHNKXEX

SEQ ID NO: 57339 - protein, 27 aa, Artificial Sequence
  Cyclic GFR-binding peptide
TQVQLSNITVQIMEIVRKKPIFIGEMS

SEQ ID NO: 57340 - protein, 33 aa, Artificial Sequence; identical to SEQ ID NO: 14659
  Cyclic GFR-binding peptide

SEQ ID NO: 57341 - protein, 34 aa, Artificial Sequence
  Cyclic GFR-binding peptide
  MOD_RES (2)..(2): Xaa is C or S
KXQPSRVHHSNITVQIMEYVRKKPKLLGEMSRLE

SEQ ID NO: 57342 - protein, 36 aa, Artificial Sequence
  Cyclic GFR-binding peptide
  MOD_RES (5)..(5): Xaa is C or S
RNVQXRPTQVQLRSVKVAKVEIVRKKPIFKEVQVTL

SEQ ID NO: 57343 - protein, 40 aa, Artificial Sequence; identical to SEQ ID NO: 14660
  Cyclic GFR-binding peptide
  MOD_RES (5)..(5): Xaa is C or S

SEQ ID NO: 57344 - protein, 35 aa, Artificial Sequence; identical to SEQ ID NO: 14661
  Cyclic GFR-binding peptide

SEQ ID NO: 57345 - protein, 39 aa, Artificial Sequence; identical to SEQ ID NO: 14662
  Cyclic GFR-binding peptide
  MOD_RES (3)..(37)..(39): Xaa is C or S

SEQ ID NO: 57346 - protein, 41 aa, Artificial Sequence; identical to SEQ ID NO: 14663
  Cyclic GFR-binding peptide
  MOD_RES (5)..(5): Xaa is C or S

SEQ ID NO: 57347 - protein, 26 aa, Artificial Sequence
  Cyclic GFR-binding peptide
RVHHSNITVQIMEYVRKKPKLIGEMS

SEQ ID NO: 57348 - protein, 35 aa, Artificial Sequence; identical to SEQ ID NO: 14664
  Cyclic GFR-binding peptide
  MOD_RES (34)..(34): Xaa is C or S

SEQ ID NO: 57349 - protein, 32 aa, Artificial Sequence
  Cyclic GFR-binding peptide
  MOD_RES (2)..(2): Xaa is C or S
EXVPTEESNITMQIMRIKPHQGQHLGEMSFLQ

SEQ ID NO: 57350 - protein, 35 aa, Artificial Sequence
  Cyclic GFR-binding peptide
  MOD_RES (3)..(3): Xaa is C or S
VQXRPTQVQLSNITVQIMEIVRKKPIFLGEMSTLE

SEQ ID NO: 57351 - protein, 27 aa, Artificial Sequence
  Cyclic GFR-binding peptide
TEERSVKMAKVRIKPHQGQHKEVQVFL

SEQ ID NO: 57352 - protein, 29 aa, Artificial Sequence
  Cyclic GFR-binding peptide
  MOD_RES (2)..(2): Xaa is C or S
EXVPTGQRSVKMAKVRIKPHQGQHKEVQV

SEQ ID NO: 57353 - protein, 27 aa, Artificial Sequence
  Cyclic GFR-binding peptide
RPVQMRKIRIKPHQGQHKKATVFLQHN

SEQ ID NO: 57354 - protein, 32 aa, Artificial Sequence
  Cyclic GFR-binding peptide
QVQLRSVKVAKVEIVRKKPIFKEVQVTLEDHL

SEQ ID NO: 57355 - protein, 38 aa, Artificial Sequence
  Cyclic GFR-binding peptide
  MOD_RES (5)..(5): Xaa is C or S
SSVKXQPSRVHHSNITVQIMEYVRKKPKLLGEMSRLEE

SEQ ID NO: 57356 - protein, 24 aa, Artificial Sequence
  Cyclic GFR-binding peptide
QRPVQMRKIRIKPHQGQHKKATVL

SEQ ID NO: 57357 - protein, 32 aa, Artificial Sequence
  Cyclic GFR-binding peptide
  MOD_RES (5)..(5): Xaa is C or S
EGLEXVPTGQRSVKMAKVRIKPHQGQHKEVQV

SEQ ID NO: 57358 - protein, 29 aa, Artificial Sequence
  Cyclic GFR-binding peptide
SNITVQIMEYVRKKPKLIGEMSRLEEHLE

SEQ ID NO: 57359 - protein, 41 aa, Artificial Sequence; identical to SEQ ID NO: 14670
  Cyclic GFR-binding peptide
  MOD_RES (4)..(41): Xaa is C or S

SEQ ID NO: 57360 - protein, 34 aa, Artificial Sequence
  Cyclic GFR-binding peptide
  MOD_RES (4)..(4): Xaa is C or S
GLEXVPTGQRPVQMRKIRIKPHQGQHKKATVLEE

SEQ ID NO: 57361 - protein, 32 aa, Artificial Sequence
  Cyclic GFR-binding peptide
  MOD_RES (2)..(2): Xaa is C or S
EXVPTEERPVQMRKIRIKPHQGQHKKATVFLQ

SEQ ID NO: 57362 - protein, 32 aa, Artificial Sequence
  Cyclic GFR-binding peptide
  MOD_RES (1)..(1): Xaa is C or S
XVPTGQSNITMQIMRIKPHQGQHIGEMSLEEH

SEQ ID NO: 57363 - protein, 36 aa, Artificial Sequence; identical to SEQ ID NO: 14674
  Cyclic GFR-binding peptide
  MOD_RES (2)..(36): Xaa is C or S

SEQ ID NO: 57364 - protein, 37 aa, Artificial Sequence
  Cyclic GFR-binding peptide
  MOD_RES (5)..(5): Xaa is C or S
SSVKXQPSRVHHSNITVQIMEYVRKKPKLIGEMSRLE

SEQ ID NO: 57365 - protein, 37 aa, Artificial Sequence; identical to SEQ ID NO: 14675
  Cyclic GFR-binding peptide
  MOD_RES (1)..(1): Xaa is C or S

SEQ ID NO: 57366 - protein, 40 aa, Artificial Sequence; identical to SEQ ID NO: 14676
  Cyclic GFR-binding peptide
  MOD_RES (3)..(40): Xaa is C or S

SEQ ID NO: 57367 - protein, 43 aa, Artificial Sequence; identical to SEQ ID NO: 14678
  Cyclic GFR-binding peptide
  MOD_RES (6)..(40)..(42): Xaa is C or S

SEQ ID NO: 57368 - protein, 27 aa, Artificial Sequence
  Cyclic GFR-binding peptide
RPVQMRKIRIKPHQGQHKKATVLEEHS

SEQ ID NO: 57369 - protein, 40 aa, Artificial Sequence; identical to SEQ ID NO: 14681
  Cyclic GFR-binding peptide
  MOD_RES (2)..(39): Xaa is C or S

SEQ ID NO: 57370 - protein, 35 aa, Artificial Sequence; identical to SEQ ID NO: 14682
  Cyclic GFR-binding peptide
  MOD_RES (2)..(2): Xaa is C or S

SEQ ID NO: 57371 - protein, 25 aa, Artificial Sequence
  Cyclic GFR-binding peptide
VQLSNITVQIMEIVRKKPIFLGEMS

SEQ ID NO: 57372 - protein, 37 aa, Artificial Sequence; identical to SEQ ID NO: 14683
  Cyclic GFR-binding peptide
  MOD_RES (1)..(1): Xaa is C or S

SEQ ID NO: 57373 - protein, 34 aa, Artificial Sequence
  Cyclic GFR-binding peptide
  MOD_RES (7)..(7): Xaa is C or S
NDEGLEXVPTEERPVQMRKIRIKPHQGQHKKATV

SEQ ID NO: 57374 - protein, 36 aa, Artificial Sequence
  Cyclic GFR-binding peptide
  MOD_RES (34)..(36): Xaa is C or S
RVHHSNITVQIMEYVRKKPKLLGEMSRLEEHLEXAX

SEQ ID NO: 57375 - protein, 31 aa, Artificial Sequence
  Cyclic GFR-binding peptide
VQLRSVKVAKVEIVRKKPIFKEVQVTLEDHL

SEQ ID NO: 57376 - protein, 35 aa, Artificial Sequence; identical to SEQ ID NO: 14685
  Cyclic GFR-binding peptide

SEQ ID NO: 57377 - protein, 36 aa, Artificial Sequence; identical to SEQ ID NO: 14686
  Cyclic GFR-binding peptide
  MOD_RES (2)..(36): Xaa is C or S

SEQ ID NO: 57378 - protein, 35 aa, Artificial Sequence
  Cyclic GFR-binding peptide
  MOD_RES (32)..(34): Xaa is C or S
TGQRSVKMAKVRIKPHQGQHKEVQVLEEHSQXEXR

SEQ ID NO: 57379 - protein, 27 aa, Artificial Sequence
  Cyclic GFR-binding peptide
SNITMQIMRIKPHQGQHIGEMSLEEHS

SEQ ID NO: 57380 - protein, 29 aa, Artificial Sequence
  Cyclic GFR-binding peptide
RVHHRPVQVRKIEYVRKKPKLKKATVRLE

SEQ ID NO: 57381 - protein, 30 aa, Artificial Sequence
  Cyclic GFR-binding peptide
EESNITMQIMRIKPHQGQHLGEMSFLQHNK

SEQ ID NO: 57382 - protein, 24 aa, Artificial Sequence
  Cyclic GFR-binding peptide
RPVQVRKIEYVRKKPKLKKATVRL

SEQ ID NO: 57383 - protein, 26 aa, Artificial Sequence
  Cyclic GFR-binding peptide
PTEERPVQMRKIRIKPHQGQHKKATV

SEQ ID NO: 57384 - protein, 33 aa, Artificial Sequence
  Cyclic GFR-binding peptide
  MOD_RES (31)..(33): Xaa is C or S
HRPVQVRKIEYVRKKPKLKKATVRLEEHLEXAX

SEQ ID NO: 57385 - protein, 29 aa, Artificial Sequence
  Cyclic GFR-binding peptide
QRSVKMAKVRIKPHQGQHKEVQVLEEHSQ

SEQ ID NO: 57386 - protein, 44 aa, Artificial Sequence; identical to SEQ ID NO: 14690
  Cyclic GFR-binding peptide
  MOD_RES (4)..(41)..(43): Xaa is C or S

SEQ ID NO: 57387 - protein, 27 aa, Artificial Sequence
  Cyclic GFR-binding peptide
QLRSVKVAKVEIVRKKPIFKEVQVTLE

SEQ ID NO: 57388 - protein, 43 aa, Artificial Sequence; identical to SEQ ID NO: 14691
  Cyclic GFR-binding peptide
  MOD_RES (5)..(42): Xaa is C or S

SEQ ID NO: 57389 - protein, 30 aa, Artificial Sequence
  Cyclic GFR-binding peptide
RPTQVQLSNITVQIMEIVRKKPIFLGEMST

SEQ ID NO: 57390 - protein, 35 aa, Artificial Sequence
  Cyclic GFR-binding peptide
  MOD_RES (4)..(4): Xaa is C or S
GLEXVPTGQRPVQMRKIRIKPHQGQHKKATVLEEH

SEQ ID NO: 57391 - protein, 38 aa, Artificial Sequence; identical to SEQ ID NO: 14693
  Cyclic GFR-binding peptide
  MOD_RES (5)..(5): Xaa is C or S

SEQ ID NO: 57392 - protein, 25 aa, Artificial Sequence
  Cyclic GFR-binding peptide
SNITMQIMRIKPHQGQHIGEMSLEE

SEQ ID NO: 57393 - protein, 31 aa, Artificial Sequence
  Cyclic GFR-binding peptide
RPTQVQLRSVKVAKVEIVRKKPIFKEVQVTL

SEQ ID NO: 57394 - protein, 31 aa, Artificial Sequence
  Cyclic GFR-binding peptide
  MOD_RES (31)..(31): Xaa is C or S
EERSVKMAKVRIKPHQGQHKEVQVFLQHNKX

SEQ ID NO: 57395 - protein, 29 aa, Artificial Sequence
  Cyclic GFR-binding peptide
TQVQLRSVKVAKVEIVRKKPIFKEVQVTL

SEQ ID NO: 57396 - protein, 35 aa, Artificial Sequence; identical to SEQ ID NO: 14694
  Cyclic GFR-binding peptide

SEQ ID NO: 57397 - protein, 32 aa, Artificial Sequence
  Cyclic GFR-binding peptide
  MOD_RES (1)..(1): Xaa is C or S
XRPTQVQLSNITVQIMEIVRKKPIFLGEMSTL

SEQ ID NO: 57398 - protein, 28 aa, Artificial Sequence
  Cyclic GFR-binding peptide
HSNITVQIMEYVRKKPKLLGEMSRLEEH

SEQ ID NO: 57399 - protein, 31 aa, Artificial Sequence
  Cyclic GFR-binding peptide
  MOD_RES (30)..(30): Xaa is C or S
RPVQVRKIEYVRKKPKLKKATVRLEEHLEXA

SEQ ID NO: 57400 - protein, 35 aa, Artificial Sequence
  Cyclic GFR-binding peptide
  MOD_RES (6)..(6): Xaa is C or S
DEGLEXVPTEERPVQMRKIRIKPHQGQHKKATVFL

SEQ ID NO: 57401 - protein, 31 aa, Artificial Sequence
  Cyclic GFR-binding peptide
  MOD_RES (30)..(30): Xaa is C or S
SNITVQIMEIVRKKPIFLGEMSTLEDHLAXK

SEQ ID NO: 57402 - protein, 32 aa, Artificial Sequence
  Cyclic GFR-binding peptide
  MOD_RES (1)..(1): Xaa is C or S
XQPSRVHHSNITVQIMEYVRKKPKLIGEMSRL

SEQ ID NO: 57403 - protein, 38 aa, Artificial Sequence; identical to SEQ ID NO: 14695
  Cyclic GFR-binding peptide
  MOD_RES (4)..(38): Xaa is C or S

SEQ ID NO: 57404 - protein, 26 aa, Artificial Sequence
  Cyclic GFR-binding peptide
SNITVQIMEYVRKKPKLLGEMSRLEE

SEQ ID NO: 57405 - protein, 37 aa, Artificial Sequence; identical to SEQ ID NO: 14696
  Cyclic GFR-binding peptide
  MOD_RES (3)..(3): Xaa is C or S

SEQ ID NO: 57406 - protein, 26 aa, Artificial Sequence
  Cyclic GFR-binding peptide
VHHSNITVQIMEYVRKKPKLLGEMSR

SEQ ID NO: 57407 - protein, 33 aa, Artificial Sequence
  Cyclic GFR-binding peptide
  MOD_RES (3)..(3): Xaa is C or S
LEXVPTGQRSVKMAKVRIKPHQGQHKEVQVLEE

SEQ ID NO: 57408 - protein, 29 aa, Artificial Sequence
  Cyclic GFR-binding peptide
  MOD_RES (2)..(2): Xaa is C or S
EXVPTGQSNITMQIMRIKPHQGQHIGEMS

SEQ ID NO: 57409 - protein, 30 aa, Artificial Sequence
  Cyclic GFR-binding peptide
  MOD_RES (29)..(29): Xaa is C or S
SNITMQIMRIKPHQGQHIGEMSLEEHSQXE

SEQ ID NO: 57410 - protein, 24 aa, Artificial Sequence
  Cyclic GFR-binding peptide
LSNITVQIMEIVRKKPIFIGEMST

SEQ ID NO: 57411 - protein, 34 aa, Artificial Sequence; identical to SEQ ID NO: 14699
  Cyclic GFR-binding peptide

SEQ ID NO: 57412 - protein, 24 aa, Artificial Sequence
  Cyclic GFR-binding peptide
LRSVKVAKVEIVRKKPIFKEVQVT

SEQ ID NO: 57413 - protein, 23 aa, Artificial Sequence
  Cyclic GFR-binding peptide
SNITMQIMRIKPHQGQHLGEMSF

SEQ ID NO: 57414 - protein, 29 aa, Artificial Sequence
  Cyclic GFR-binding peptide
  MOD_RES (29)..(29): Xaa is C or S
SNITMQIMRIKPHQGQHIGEMSLEEHSQX

SEQ ID NO: 57415 - protein, 30 aa, Artificial Sequence
  Cyclic GFR-binding peptide
  MOD_RES (30)..(30): Xaa is C or S
ERSVKMAKVRIKPHQGQHKEVQVFLQHNKX

SEQ ID NO: 57416 - protein, 39 aa, Artificial Sequence; identical to SEQ ID NO: 14701
  Cyclic GFR-binding peptide
  MOD_RES (4)..(38): Xaa is C or S

SEQ ID NO: 57417 - protein, 22 aa, Artificial Sequence
  Cyclic GFR-binding peptide
RPVQVRKIEYVRKKPKLKKATV

SEQ ID NO: 57418 - protein, 31 aa, Artificial Sequence
  Cyclic GFR-binding peptide
  MOD_RES (1)..(1): Xaa is C or S
XVPTEESNITMQIMRIKPHQGQHLGEMSFLQ

SEQ ID NO: 57419 - protein, 32 aa, Artificial Sequence
  Cyclic GFR-binding peptide
  MOD_RES (5)..(5): Xaa is C or S
EGLEXVPTGQSNITMQIMRIKPHQGQHIGEMS

SEQ ID NO: 57420 - protein, 36 aa, Artificial Sequence
  Cyclic GFR-binding peptide
  MOD_RES (5)..(5): Xaa is C or S
EGLEXVPTGQSNITMQIMRIKPHQGQHIGEMSLEEH

SEQ ID NO: 57421 - protein, 40 aa, Artificial Sequence; identical to SEQ ID NO: 14705
  Cyclic GFR-binding peptide
  MOD_RES (7)..(7): Xaa is C or S

SEQ ID NO: 57422 - protein, 34 aa, Artificial Sequence
  Cyclic GFR-binding peptide
  MOD_RES (33)..(33): Xaa is C or S
PTGQSNITMQIMRIKPHQGQHIGEMSLEEHSQXE

SEQ ID NO: 57423 - protein, 30 aa, Artificial Sequence
  Cyclic GFR-binding peptide
QLRSVKVAKVEIVRKKPIFKEVQVTLEDHL

SEQ ID NO: 57424 - protein, 43 aa, Artificial Sequence; identical to SEQ ID NO: 14709
  Cyclic GFR-binding peptide
  MOD_RES (5)..(42): Xaa is C or S

SEQ ID NO: 57425 - protein, 27 aa, Artificial Sequence
  Cyclic GFR-binding peptide
QSNITMQIMRIKPHQGQHIGEMSLEEH

SEQ ID NO: 57426 - protein, 39 aa, Artificial Sequence; identical to SEQ ID NO: 14710
  Cyclic GFR-binding peptide
  MOD_RES (5)..(39): Xaa is C or S

SEQ ID NO: 57427 - protein, 22 aa, Artificial Sequence
  Cyclic GFR-binding peptide
RPVQVRKIEYVRKKPKLKKATV

SEQ ID NO: 57428 - protein, 34 aa, Artificial Sequence
  Cyclic GFR-binding peptide
  MOD_RES (3)..(3): Xaa is C or S
VQXRPTQVQLSNITVQIMEIVRKKPIFIGEMSTL

SEQ ID NO: 57429 - protein, 38 aa, Artificial Sequence; identical to SEQ ID NO: 14712
  Cyclic GFR-binding peptide
  MOD_RES (1)..(38): Xaa is C or S

SEQ ID NO: 57430 - protein, 32 aa, Artificial Sequence
  Cyclic GFR-binding peptide
  MOD_RES (31)..(31): Xaa is C or S
HSNITVQIMEYVRKKPKLLGEMSRLEEHLEXA

SEQ ID NO: 57431 - protein, 37 aa, Artificial Sequence; identical to SEQ ID NO: 14713
  Cyclic GFR-binding peptide
  MOD_RES (4)..(4): Xaa is C or S

SEQ ID NO: 57432 - protein, 29 aa, Artificial Sequence
  Cyclic GFR-binding peptide
SRVHHRPVQVRKIEYVRKKPKLKKATVRL

SEQ ID NO: 57433 - protein, 32 aa, Artificial Sequence
  Cyclic GFR-binding peptide
  MOD_RES (1)..(1): Xaa is C or S
XVPTEERPVQMRKIRIKPHQGQHKKATVFLQH

SEQ ID NO: 57434 - protein, 35 aa, Artificial Sequence
  Cyclic GFR-binding peptide
  MOD_RES (33)..(35): Xaa is C or S
VHHSNITVQIMEYVRKKPKLLGEMSRLEEHLEXAX

SEQ ID NO: 57435 - protein, 22 aa, Artificial Sequence
  Cyclic GFR-binding peptide
RSVKVAKVEYVRKKPKLKEVQV

SEQ ID NO: 57436 - protein, 27 aa, Artificial Sequence
  Cyclic GFR-binding peptide
LSNITVQIMEIVRKKPIFLGEMSTLED

SEQ ID NO: 57437 - protein, 35 aa, Artificial Sequence; identical to SEQ ID NO: 14716
  Cyclic GFR-binding peptide
  MOD_RES (35)..(35): Xaa is C or S

SEQ ID NO: 57438 - protein, 28 aa, Artificial Sequence
  Cyclic GFR-binding peptide
SNITMQIMRIKPHQGQHIGEMSLEEHSQ

SEQ ID NO: 57439 - protein, 32 aa, Artificial Sequence
  Cyclic GFR-binding peptide
  MOD_RES (29)..(31): Xaa is C or S
RSVKMAKVRIKPHQGQHKEVQVFLQHNKXEXR

SEQ ID NO: 57440 - protein, 32 aa, Artificial Sequence
  Cyclic GFR-binding peptide
VQLSNITVQIMEIVRKKPIFIGEMSTLEDHLA

SEQ ID NO: 57441 - protein, 33 aa, Artificial Sequence; identical to SEQ ID NO: 14717
  Cyclic GFR-binding peptide
  MOD_RES (1)..(1): Xaa is C or S

SEQ ID NO: 57442 - protein, 36 aa, Artificial Sequence
  Cyclic GFR-binding peptide
  MOD_RES (6)..(6): Xaa is C or S
DEGLEXVPTEESNITMQIMRIKPHQGQHLGEMSFLQ

SEQ ID NO: 57443 - protein, 31 aa, Artificial Sequence
  Cyclic GFR-binding peptide
  MOD_RES (3)..(3): Xaa is C or S
LEXVPTEESNITMQIMRIKPHQGQHLGEMSF

SEQ ID NO: 57444 - protein, 41 aa, Artificial Sequence; identical to SEQ ID NO: 14719
  Cyclic GFR-binding peptide
  MOD_RES (6)..(40): Xaa is C or S

SEQ ID NO: 57445 - protein, 28 aa, Artificial Sequence
  Cyclic GFR-binding peptide
LSNITVQIMEIVRKKPIFLGEMSTLEDH

SEQ ID NO: 57446 - protein, 34 aa, Artificial Sequence
  Cyclic GFR-binding peptide
SRVHHSNITVQIMEYVRKKPKLLGEMSRLEEHLE

SEQ ID NO: 57447 - protein, 32 aa, Artificial Sequence
  Cyclic GFR-binding peptide
PTQVQLRSVKVAKVEIVRKKPIFKEVQVTLED

SEQ ID NO: 57448 - protein, 43 aa, Artificial Sequence; identical to SEQ ID NO: 14720
  Cyclic GFR-binding peptide
  MOD_RES (5)..(42): Xaa is C or S

SEQ ID NO: 57449 - protein, 42 aa, Artificial Sequence; identical to SEQ ID NO: 14721
  Cyclic GFR-binding peptide
  MOD_RES (7)..(41): Xaa is C or S

SEQ ID NO: 57450 - protein, 30 aa, Artificial Sequence
  Cyclic GFR-binding peptide
EERPVQMRKIRIKPHQGQHKKATVFLQHNK

SEQ ID NO: 57451 - protein, 23 aa, Artificial Sequence
  Cyclic GFR-binding peptide
LSNITVQIMEIVRKKPIFLGEMS

SEQ ID NO: 57452 - protein, 27 aa, Artificial Sequence
  Cyclic GFR-binding peptide
QVQLRSVKVAKVEIVRKKPIFKEVQVT

SEQ ID NO: 57453 - protein, 31 aa, Artificial Sequence
  Cyclic GFR-binding peptide
  MOD_RES (1)..(1): Xaa is C or S
XQPSRVHHSNITVQIMEYVRKKPKLLGEMSR

SEQ ID NO: 57454 - protein, 45 aa, Artificial Sequence; identical to SEQ ID NO: 14724
  Cyclic GFR-binding peptide
  MOD_RES (5)..(42)..(44): Xaa is C or S

SEQ ID NO: 57455 - protein, 37 aa, Artificial Sequence
  Cyclic GFR-binding peptide
  MOD_RES (7)..(7): Xaa is C or S
NDEGLEXVPTEERPVQMRKIRIKPHQGQHKKATVFLQ

SEQ ID NO: 57456 - protein, 36 aa, Artificial Sequence; identical to SEQ ID NO: 14725
  Cyclic GFR-binding peptide
  MOD_RES (34)..(36): Xaa is C or S

SEQ ID NO: 57457 - protein, 38 aa, Artificial Sequence; identical to SEQ ID NO: 14726
  Cyclic GFR-binding peptide
  MOD_RES (2)..(2): Xaa is C or S

SEQ ID NO: 57458 - protein, 37 aa, Artificial Sequence; identical to SEQ ID NO: 14727
  Cyclic GFR-binding peptide
  MOD_RES (2)..(2): Xaa is C or S

SEQ ID NO: 57459 - protein, 30 aa, Artificial Sequence
  Cyclic GFR-binding peptide
GQRPVQMRKIRIKPHQGQHKKATVLEEHSQ

SEQ ID NO: 57460 - protein, 34 aa, Artificial Sequence
  Cyclic GFR-binding peptide
  MOD_RES (32)..(34): Xaa is C or S
TEERPVQMRKIRIKPHQGQHKKATVFLQHNKXEX

SEQ ID NO: 57461 - protein, 35 aa, Artificial Sequence
  Cyclic GFR-binding peptide
  MOD_RES (4)..(4): Xaa is C or S
SVKXQPSRVHHSNITVQIMEYVRKKPKLIGEMSRL

SEQ ID NO: 57462 - protein, 29 aa, Artificial Sequence
  Cyclic GFR-binding peptide
ERPVQMRKIRIKPHQGQHKKATVFLQHNK

SEQ ID NO: 57463 - protein, 24 aa, Artificial Sequence
  Cyclic GFR-binding peptide
ERSVKMAKVRIKPHQGQHKEVQVF

SEQ ID NO: 57464 - protein, 38 aa, Artificial Sequence; identical to SEQ ID NO: 14732
  Cyclic GFR-binding peptide
  MOD_RES (1)..(38): Xaa is C or S

SEQ ID NO: 57465 - protein, 30 aa, Artificial Sequence
  Cyclic GFR-binding peptide
  MOD_RES (30)..(30): Xaa is C or S
ERPVQMRKIRIKPHQGQHKKATVFLQHNKX

SEQ ID NO: 57466 - protein, 33 aa, Artificial Sequence; identical to SEQ ID NO: 14733
  Cyclic GFR-binding peptide

SEQ ID NO: 57467 - protein, 33 aa, Artificial Sequence
  Cyclic GFR-binding peptide
  MOD_RES (31)..(33): Xaa is C or S
GQRPVQMRKIRIKPHQGQHKKATVLEEHSQXEX

SEQ ID NO: 57468 - protein, 34 aa, Artificial Sequence
  Cyclic GFR-binding peptide
  MOD_RES (31)..(33): Xaa is C or S
LSNITVQIMEIVRKKPIFIGEMSTLEDHLAXKXE

SEQ ID NO: 57469 - protein, 41 aa, Artificial Sequence; identical to SEQ ID NO: 14734
  Cyclic GFR-binding peptide
  MOD_RES (3)..(40): Xaa is C or S

SEQ ID NO: 57470 - protein, 37 aa, Artificial Sequence
  Cyclic GFR-binding peptide
  MOD_RES (34)..(36): Xaa is C or S
QVQLSNITVQIMEIVRKKPIFIGEMSTLEDHLAXKXE

SEQ ID NO: 57471 - protein, 42 aa, Artificial Sequence; identical to SEQ ID NO: 14738
  Cyclic GFR-binding peptide
  MOD_RES (3)..(40)..(42): Xaa is C or S

SEQ ID NO: 57472 - protein, 40 aa, Artificial Sequence; identical to SEQ ID NO: 14737
  Cyclic GFR-binding peptide
  MOD_RES (5)..(39): Xaa is C or S

SEQ ID NO: 57473 - protein, 40 aa, Artificial Sequence; identical to SEQ ID NO: 14739
  Cyclic GFR-binding peptide
  MOD_RES (37)..(39): Xaa is C or S

SEQ ID NO: 57474 - protein, 32 aa, Artificial Sequence
  Cyclic GFR-binding peptide
  MOD_RES (31)..(31): Xaa is C or S
HSNITVQIMEYVRKKPKLIGEMSRLEEHLEXA

SEQ ID NO: 57475 - protein, 25 aa, Artificial Sequence
  Cyclic GFR-binding peptide
QLSNITVQIMEIVRKKPIFLGEMST

SEQ ID NO: 57476 - protein, 32 aa, Artificial Sequence
  Cyclic GFR-binding peptide
  MOD_RES (1)..(1): Xaa is C or S
XQPSRVHHSNITVQIMEYVRKKPKLLGEMSRL

SEQ ID NO: 57477 - protein, 23 aa, Artificial Sequence
  Cyclic GFR-binding peptide
ERPVQMRKIRIKPHQGQHKKATV

SEQ ID NO: 57478 - protein, 31 aa, Artificial Sequence
  Cyclic GFR-binding peptide
RVHHRPVQVRKIEYVRKKPKLKKATVRLEEH

SEQ ID NO: 57479 - protein, 34 aa, Artificial Sequence
  Cyclic GFR-binding peptide
  MOD_RES (7)..(7): Xaa is C or S
NDEGLEXVPTGQSNITMQIMRIKPHQGQHIGEMS

SEQ ID NO: 57480 - protein, 39 aa, Artificial Sequence; identical to SEQ ID NO: 14745
  Cyclic GFR-binding peptide
  MOD_RES (4)..(4): Xaa is C or S

SEQ ID NO: 57481 - protein, 28 aa, Artificial Sequence
  Cyclic GFR-binding peptide
VPTEERPVQMRKIRIKPHQGQHKKATVF

SEQ ID NO: 57482 - protein, 39 aa, Artificial Sequence; identical to SEQ ID NO: 14744
  Cyclic GFR-binding peptide
  MOD_RES (5)..(39): Xaa is C or S

SEQ ID NO: 57483 - protein, 25 aa, Artificial Sequence
  Cyclic GFR-binding peptide
HHSNITVQIMEYVRKKPKLLGEMSR

SEQ ID NO: 57484 - protein, 37 aa, Artificial Sequence; identical to SEQ ID NO: 14747
  Cyclic GFR-binding peptide
  MOD_RES (2)..(36): Xaa is C or S

SEQ ID NO: 57485 - protein, 36 aa, Artificial Sequence
  Cyclic GFR-binding peptide
  MOD_RES (4)..(4): Xaa is C or S
NVQXRPTQVQLRSVKVAKVEIVRKKPIFKEVQVTLE

SEQ ID NO: 57486 - protein, 30 aa, Artificial Sequence
  Cyclic GFR-binding peptide
PTGQRPVQMRKIRIKPHQGQHKKATVLEEH

SEQ ID NO: 57487 - protein, 37 aa, Artificial Sequence
  Cyclic GFR-binding peptide
  MOD_RES (4)..(4): Xaa is C or S
SVKXQPSRVHHSNITVQIMEYVRKKPKLIGEMSRLEE

SEQ ID NO: 57488 - protein, 36 aa, Artificial Sequence
  Cyclic GFR-binding peptide
  MOD_RES (7)..(7): Xaa is C or S
NDEGLEXVPTEESNITMQIMRIKPHQGQHLGEMSFL

SEQ ID NO: 57489 - protein, 35 aa, Artificial Sequence; identical to SEQ ID NO: 14751
  Cyclic GFR-binding peptide
  MOD_RES (3)..(3): Xaa is C or S

SEQ ID NO: 57490 - protein, 37 aa, Artificial Sequence; identical to SEQ ID NO: 14752
  Cyclic GFR-binding peptide
  MOD_RES (1)..(35)..(37): Xaa is C or S

SEQ ID NO: 57491 - protein, 32 aa, Artificial Sequence
  Cyclic GFR-binding peptide
  MOD_RES (3)..(3): Xaa is C or S
LEXVPTEESNITMQIMRIKPHQGQHLGEMSFL

SEQ ID NO: 57492 - protein, 34 aa, Artificial Sequence; identical to SEQ ID NO: 14755
  Cyclic GFR-binding peptide

SEQ ID NO: 57493 - protein, 30 aa, Artificial Sequence
  Cyclic GFR-binding peptide
RVHHSNITVQIMEYVRKKPKLIGEMSRLEE

SEQ ID NO: 57494 - protein, 40 aa, Artificial Sequence; identical to SEQ ID NO: 14757
  Cyclic GFR-binding peptide
  MOD_RES (4)..(4): Xaa is C or S

SEQ ID NO: 57495 - protein, 35 aa, Artificial Sequence
  Cyclic GFR-binding peptide
  MOD_RES (3)..(3): Xaa is C or S
VKXQPSRVHHRPVQVRKIEYVRKKPKLKKATVRLE

SEQ ID NO: 57496 - protein, 30 aa, Artificial Sequence
  Cyclic GFR-binding peptide
TQVQLSNITVQIMEIVRKKPIFIGEMSTLE

SEQ ID NO: 57497 - protein, 25 aa, Artificial Sequence
  Cyclic GFR-binding peptide
TEERSVKMAKVRIKPHQGQHKEVQV

SEQ ID NO: 57498 - protein, 34 aa, Artificial Sequence
  Cyclic GFR-binding peptide
  MOD_RES (3)..(3): Xaa is C or S
LEXVPTEESNITMQIMRIKPHQGQHLGEMSFLQH

SEQ ID NO: 57499 - protein, 28 aa, Artificial Sequence
  Cyclic GFR-binding peptide
QVQLSNITVQIMEIVRKKPIFLGEMSTL

SEQ ID NO: 57500 - protein, 34 aa, Artificial Sequence
  Cyclic GFR-binding peptide
  MOD_RES (32)..(34): Xaa is C or S
QLSNITVQIMEIVRKKPIFIGEMSTLEDHLAXKX

SEQ ID NO: 57501 - protein, 40 aa, Artificial Sequence; identical to SEQ ID NO: 14760
  Cyclic GFR-binding peptide
  MOD_RES (4)..(4): Xaa is C or S

SEQ ID NO: 57502 - protein, 33 aa, Artificial Sequence
  Cyclic GFR-binding peptide
  MOD_RES (5)..(5): Xaa is C or S
EGLEXVPTGQSNITMQIMRIKPHQGQHIGEMSL

SEQ ID NO: 57503 - protein, 35 aa, Artificial Sequence; identical to SEQ ID NO: 14762
  Cyclic GFR-binding peptide
  MOD_RES (34)..(34): Xaa is C or S

SEQ ID NO: 57504 - protein, 33 aa, Artificial Sequence
  Cyclic GFR-binding peptide
  MOD_RES (30)..(32): Xaa is C or S
SNITVQIMEIVRKKPIFLGEMSTLEDHLAXKXE

SEQ ID NO: 57505 - protein, 31 aa, Artificial Sequence
  Cyclic GFR-binding peptide
VPTGQRSVKMAKVRIKPHQGQHKEVQVLEEH

SEQ ID NO: 57506 - protein, 22 aa, Artificial Sequence
  Cyclic GFR-binding peptide
SNITVQIMEYVRKKPKLLGEMS

SEQ ID NO: 57507 - protein, 37 aa, Artificial Sequence
  Cyclic GFR-binding peptide
  MOD_RES (6)..(6): Xaa is C or S
DEGLEXVPTEERPVQMRKIRIKPHQGQHKKATVFLQH

SEQ ID NO: 57508 - protein, 38 aa, Artificial Sequence; identical to SEQ ID NO: 14768
  Cyclic GFR-binding peptide
  MOD_RES (35)..(37): Xaa is C or S

SEQ ID NO: 57509 - protein, 33 aa, Artificial Sequence
  Cyclic GFR-binding peptide
RVHHSNITVQIMEYVRKKPKLIGEMSRLEEHLE

SEQ ID NO: 57510 - protein, 42 aa, Artificial Sequence; identical to SEQ ID NO: 14771
  Cyclic GFR-binding peptide
  MOD_RES (5)..(39)..(41): Xaa is C or S

SEQ ID NO: 57511 - protein, 32 aa, Artificial Sequence
  Cyclic GFR-binding peptide
  MOD_RES (2)..(2): Xaa is C or S
QXRPTQVQLSNITVQIMEIVRKKPIFLGEMST

SEQ ID NO: 57512 - protein, 33 aa, Artificial Sequence; identical to SEQ ID NO: 14775
  Cyclic GFR-binding peptide
  MOD_RES (1)..(1): Xaa is C or S

SEQ ID NO: 57513 - protein, 39 aa, Artificial Sequence; identical to SEQ ID NO: 14776
  Cyclic GFR-binding peptide
  MOD_RES (4)..(4): Xaa is C or S

SEQ ID NO: 57514 - protein, 41 aa, Artificial Sequence; identical to SEQ ID NO: 14778
  Cyclic GFR-binding peptide
  MOD_RES (4)..(38)..(40): Xaa is C or S

SEQ ID NO: 57515 - protein, 37 aa, Artificial Sequence
  Cyclic GFR-binding peptide
  MOD_RES (4)..(4): Xaa is C or S
SVKXQPSRVHHSNITVQIMEYVRKKPKLLGEMSRLEE

SEQ ID NO: 57516 - protein, 35 aa, Artificial Sequence
  Cyclic GFR-binding peptide
  MOD_RES (34)..(34): Xaa is C or S
QVQLRSVKVAKVEIVRKKPIFKEVQVTLEDHLAXK

SEQ ID NO: 57517 - protein, 38 aa, Artificial Sequence; identical to SEQ ID NO: 14780
  Cyclic GFR-binding peptide
  MOD_RES (6)..(6): Xaa is C or S

SEQ ID NO: 57518 - protein, 32 aa, Artificial Sequence
  Cyclic GFR-binding peptide
QVQLSNITVQIMEIVRKKPIFLGEMSTLEDHL

SEQ ID NO: 57519 - protein, 39 aa, Artificial Sequence; identical to SEQ ID NO: 14781
  Cyclic GFR-binding peptide
  MOD_RES (2)..(39): Xaa is C or S

SEQ ID NO: 57520 - protein, 24 aa, Artificial Sequence
  Cyclic GFR-binding peptide
QRSVKMAKVRIKPHQGQHKEVQVL

SEQ ID NO: 57521 - protein, 35 aa, Artificial Sequence
  Cyclic GFR-binding peptide
  MOD_RES (5)..(5): Xaa is C or S
EGLEXVPTEERSVKMAKVRIKPHQGQHKEVQVFLQ

SEQ ID NO: 57522 - protein, 30 aa, Artificial Sequence
  Cyclic GFR-binding peptide
VQLSNITVQIMEIVRKKPIFIGEMSTLEDH

SEQ ID NO: 57523 - protein, 39 aa, Artificial Sequence; identical to SEQ ID NO: 14783
  Cyclic GFR-binding peptide
  MOD_RES (4)..(4): Xaa is C or S

SEQ ID NO: 57524 - protein, 42 aa, Artificial Sequence; identical to SEQ ID NO: 14786
  Cyclic GFR-binding peptide
  MOD_RES (5)..(39)..(41): Xaa is C or S

SEQ ID NO: 57525 - protein, 42 aa, Artificial Sequence; identical to SEQ ID NO: 14788
  Cyclic GFR-binding peptide
  MOD_RES (4)..(41): Xaa is C or S

SEQ ID NO: 57526 - protein, 34 aa, Artificial Sequence
  Cyclic GFR-binding peptide
  MOD_RES (33)..(33): Xaa is C or S
PTEESNITMQIMRIKPHQGQHLGEMSFLQHNKXE

SEQ ID NO: 57527 - protein, 43 aa, Artificial Sequence; identical to SEQ ID NO: 14789
  Cyclic GFR-binding peptide
  MOD_RES (7)..(41)..(43): Xaa is C or S

SEQ ID NO: 57528 - protein, 30 aa, Artificial Sequence
  Cyclic GFR-binding peptide
RVHHSNITVQIMEYVRKKPKLLGEMSRLEE

SEQ ID NO: 57529 - protein, 26 aa, Artificial Sequence
  Cyclic GFR-binding peptide
PTEESNITMQIMRIKPHQGQHLGEMS

SEQ ID NO: 57530 - protein, 31 aa, Artificial Sequence
  Cyclic GFR-binding peptide
  MOD_RES (1)..(1): Xaa is C or S
XVPTGQRPVQMRKIRIKPHQGQHKKATVLEE

SEQ ID NO: 57531 - protein, 34 aa, Artificial Sequence; identical to SEQ ID NO: 14791
  Cyclic GFR-binding peptide

SEQ ID NO: 57532 - protein, 38 aa, Artificial Sequence; identical to SEQ ID NO: 14793
  Cyclic GFR-binding peptide
  MOD_RES (3)..(3): Xaa is C or S

SEQ ID NO: 57533 - protein, 32 aa, Artificial Sequence
  Cyclic GFR-binding peptide
  MOD_RES (3)..(3): Xaa is C or S
LEXVPTGQRSVKMAKVRIKPHQGQHKEVQVLE

SEQ ID NO: 57534 - protein, 34 aa, Artificial Sequence; identical to SEQ ID NO: 14795
  Cyclic GFR-binding peptide

SEQ ID NO: 57535 - protein, 37 aa, Artificial Sequence
  Cyclic GFR-binding peptide
  MOD_RES (7)..(7): Xaa is C or S
NDEGLEXVPTGQRPVQMRKIRIKPHQGQHKKATVLEE

SEQ ID NO: 57536 - protein, 32 aa, Artificial Sequence
  Cyclic GFR-binding peptide
  MOD_RES (2)..(2): Xaa is C or S
QXRPTQVQLSNITVQIMEIVRKKPIFIGEMST

SEQ ID NO: 57537 - protein, 34 aa, Artificial Sequence
  Cyclic GFR-binding peptide
  MOD_RES (5)..(5): Xaa is C or S
SSVKXQPSRVHHRPVQVRKIEYVRKKPKLKKATV

SEQ ID NO: 57538 - protein, 33 aa, Artificial Sequence
  Cyclic GFR-binding peptide
QPSRVHHRPVQVRKIEYVRKKPKLKKATVRLEE

SEQ ID NO: 57539 - protein, 32 aa, Artificial Sequence
  Cyclic GFR-binding peptide
RPTQVQLSNITVQIMEIVRKKPIFLGEMSTLE

SEQ ID NO: 57540 - protein, 24 aa, Artificial Sequence
  Cyclic GFR-binding peptide
HHSNITVQIMEYVRKKPKLIGEMS

SEQ ID NO: 57541 - protein, 26 aa, Artificial Sequence
  Cyclic GFR-binding peptide
ERPVQMRKIRIKPHQGQHKKATVFLQ

SEQ ID NO: 57542 - protein, 30 aa, Artificial Sequence
  Cyclic GFR-binding peptide
VHHRPVQVRKIEYVRKKPKLKKATVRLEEH

SEQ ID NO: 57543 - protein, 27 aa, Artificial Sequence
  Cyclic GFR-binding peptide
ERSVKMAKVRIKPHQGQHKEVQVFLQH

SEQ ID NO: 57544 - protein, 29 aa, Artificial Sequence
  Cyclic GFR-binding peptide
GQRPVQMRKIRIKPHQGQHKKATVLEEHS

SEQ ID NO: 57545 - protein, 26 aa, Artificial Sequence
  Cyclic GFR-binding peptide
SNITVQIMEYVRKKPKLIGEMSRLEE

SEQ ID NO: 57546 - protein, 38 aa, Artificial Sequence; identical to SEQ ID NO: 14799
  Cyclic GFR-binding peptide
  MOD_RES (4)..(4): Xaa is C or S

SEQ ID NO: 57547 - protein, 35 aa, Artificial Sequence; identical to SEQ ID NO: 14800
  Cyclic GFR-binding peptide
  MOD_RES (2)..(2): Xaa is C or S

SEQ ID NO: 57548 - protein, 26 aa, Artificial Sequence
  Cyclic GFR-binding peptide
TGQRSVKMAKVRIKPHQGQHKEVQVL

SEQ ID NO: 57549 - protein, 25 aa, Artificial Sequence
  Cyclic GFR-binding peptide
ESNITMQIMRIKPHQGQHLGEMSFL

SEQ ID NO: 57550 - protein, 35 aa, Artificial Sequence
  Cyclic GFR-binding peptide
  MOD_RES (4)..(4): Xaa is C or S
GLEXVPTGQRSVKMAKVRIKPHQGQHKEVQVLEEH

SEQ ID NO: 57551 - protein, 37 aa, Artificial Sequence
  Cyclic GFR-binding peptide
  MOD_RES (6)..(6): Xaa is C or S
DEGLEXVPTGQSNITMQIMRIKPHQGQHIGEMSLEEH

SEQ ID NO: 57552 - protein, 36 aa, Artificial Sequence
  Cyclic GFR-binding peptide
  MOD_RES (33)..(35): Xaa is C or S
PTEERPVQMRKIRIKPHQGQHKKATVFLQHNKXEXR

SEQ ID NO: 57553 - protein, 36 aa, Artificial Sequence; identical to SEQ ID NO: 14803
  Cyclic GFR-binding peptide
  MOD_RES (2)..(36): Xaa is C or S

SEQ ID NO: 57554 - protein, 42 aa, Artificial Sequence; identical to SEQ ID NO: 14804
  Cyclic GFR-binding peptide
  MOD_RES (6)..(40)..(42): Xaa is C or S

SEQ ID NO: 57555 - protein, 38 aa, Artificial Sequence; identical to SEQ ID NO: 14805
  Cyclic GFR-binding peptide
  MOD_RES (3)..(37): Xaa is C or S

SEQ ID NO: 57556 - protein, 37 aa, Artificial Sequence; identical to SEQ ID NO: 14806
  Cyclic GFR-binding peptide
  MOD_RES (5)..(5): Xaa is C or S

SEQ ID NO: 57557 - protein, 30 aa, Artificial Sequence
  Cyclic GFR-binding peptide
  MOD_RES (2)..(2): Xaa is C or S
EXVPTEERPVQMRKIRIKPHQGQHKKATVF

SEQ ID NO: 57558 - protein, 33 aa, Artificial Sequence
  Cyclic GFR-binding peptide
  MOD_RES (31)..(33): Xaa is C or S
GQRSVKMAKVRIKPHQGQHKEVQVLEEHSQXEX

SEQ ID NO: 57559 - protein, 25 aa, Artificial Sequence
  Cyclic GFR-binding peptide
EERPVQMRKIRIKPHQGQHKKATVF

SEQ ID NO: 57560 - protein, 29 aa, Artificial Sequence
  Cyclic GFR-binding peptide
TGQRPVQMRKIRIKPHQGQHKKATVLEEH

SEQ ID NO: 57561 - protein, 35 aa, Artificial Sequence; identical to SEQ ID NO: 14809
  Cyclic GFR-binding peptide
  MOD_RES (3)..(3): Xaa is C or S

SEQ ID NO: 57562 - protein, 27 aa, Artificial Sequence
  Cyclic GFR-binding peptide
VPTGQSNITMQIMRIKPHQGQHIGEMS

SEQ ID NO: 57563 - protein, 28 aa, Artificial Sequence
  Cyclic GFR-binding peptide
LRSVKVAKVEIVRKKPIFKEVQVTLEDH

SEQ ID NO: 57564 - protein, 31 aa, Artificial Sequence
  Cyclic GFR-binding peptide
  MOD_RES (4)..(4): Xaa is C or S
GLEXVPTGQSNITMQIMRIKPHQGQHIGEMS

SEQ ID NO: 57565 - protein, 38 aa, Artificial Sequence
  Cyclic GFR-binding peptide
  MOD_RES (7)..(7): Xaa is C or S
NDEGLEXVPTGQRSVKMAKVRIKPHQGQHKEVQVLEEH

SEQ ID NO: 57566 - protein, 34 aa, Artificial Sequence
  Cyclic GFR-binding peptide
  MOD_RES (2)..(2): Xaa is C or S
KXQPSRVHHSNITVQIMEYVRKKPKLIGEMSRLE

SEQ ID NO: 57567 - protein, 27 aa, Artificial Sequence
  Cyclic GFR-binding peptide
VQLRSVKVAKVEIVRKKPIFKEVQVTL

SEQ ID NO: 57568 - protein, 24 aa, Artificial Sequence
  Cyclic GFR-binding peptide
HSNITVQIMEYVRKKPKLIGEMSR

SEQ ID NO: 57569 - protein, 34 aa, Artificial Sequence
  Cyclic GFR-binding peptide
  MOD_RES (34)..(34): Xaa is C or S
RVHHSNITVQIMEYVRKKPKLLGEMSRLEEHLEX

SEQ ID NO: 57570 - protein, 29 aa, Artificial Sequence
  Cyclic GFR-binding peptide
  MOD_RES (29)..(29): Xaa is C or S
RSVKMAKVRIKPHQGQHKEVQVLEEHSQX

SEQ ID NO: 57571 - protein, 33 aa, Artificial Sequence
  Cyclic GFR-binding peptide
  MOD_RES (1)..(1): Xaa is C or S
XRPTQVQLSNITVQIMEIVRKKPIFIGEMSTLE

SEQ ID NO: 57572 - protein, 33 aa, Artificial Sequence
  Cyclic GFR-binding peptide
  MOD_RES (32)..(32): Xaa is C or S
QLRSVKVAKVEIVRKKPIFKEVQVTLEDHLAXK

SEQ ID NO: 57573 - protein, 26 aa, Artificial Sequence
  Cyclic GFR-binding peptide
LSNITVQIMEIVRKKPIFIGEMSTLE

SEQ ID NO: 57574 - protein, 40 aa, Artificial Sequence; identical to SEQ ID NO: 14815
  Cyclic GFR-binding peptide
  MOD_RES (37)..(39): Xaa is C or S

SEQ ID NO: 57575 - protein, 37 aa, Artificial Sequence; identical to SEQ ID NO: 14816
  Cyclic GFR-binding peptide
  MOD_RES (36)..(36): Xaa is C or S

SEQ ID NO: 57576 - protein, 33 aa, Artificial Sequence
  Cyclic GFR-binding peptide
  MOD_RES (4)..(4): Xaa is C or S
GLEXVPTGQRSVKMAKVRIKPHQGQHKEVQVLE

SEQ ID NO: 57577 - protein, 38 aa, Artificial Sequence; identical to SEQ ID NO: 14817
  Cyclic GFR-binding peptide
  MOD_RES (2)..(2): Xaa is C or S

SEQ ID NO: 57578 - protein, 31 aa, Artificial Sequence
  Cyclic GFR-binding peptide
  MOD_RES (29)..(31): Xaa is C or S
RPVQMRKIRIKPHQGQHKKATVFLQHNKXEX

SEQ ID NO: 57579 - protein, 35 aa, Artificial Sequence; identical to SEQ ID NO: 14820
  Cyclic GFR-binding peptide
  MOD_RES (34)..(34): Xaa is C or S

SEQ ID NO: 57580 - protein, 33 aa, Artificial Sequence; identical to SEQ ID NO: 14819
  Cyclic GFR-binding peptide
  MOD_RES (1)..(1): Xaa is C or S

SEQ ID NO: 57581 - protein, 39 aa, Artificial Sequence; identical to SEQ ID NO: 14822
  Cyclic GFR-binding peptide
  MOD_RES (5)..(5): Xaa is C or S

SEQ ID NO: 57582 - protein, 28 aa, Artificial Sequence
  Cyclic GFR-binding peptide
QSNITMQIMRIKPHQGQHIGEMSLEEHS

SEQ ID NO: 57583 - protein, 42 aa, Artificial Sequence; identical to SEQ ID NO: 14824
  Cyclic GFR-binding peptide
  MOD_RES (4)..(41): Xaa is C or S

SEQ ID NO: 57584 - protein, 36 aa, Artificial Sequence
  Cyclic GFR-binding peptide
  MOD_RES (5)..(5): Xaa is C or S
EGLEXVPTEERSVKMAKVRIKPHQGQHKEVQVFLQH

SEQ ID NO: 57585 - protein, 33 aa, Artificial Sequence
  Cyclic GFR-binding peptide
  MOD_RES (2)..(2): Xaa is C or S
EXVPTGQSNITMQIMRIKPHQGQHIGEMSLEEH

SEQ ID NO: 57586 - protein, 33 aa, Artificial Sequence
  Cyclic GFR-binding peptide
  MOD_RES (2)..(2): Xaa is C or S
EXVPTEESNITMQIMRIKPHQGQHLGEMSFLQH

SEQ ID NO: 57587 - protein, 32 aa, Artificial Sequence
  Cyclic GFR-binding peptide
PSRVHHSNITVQIMEYVRKKPKLIGEMSRLEE

SEQ ID NO: 57588 - protein, 38 aa, Artificial Sequence; identical to SEQ ID NO: 14825
  Cyclic GFR-binding peptide
  MOD_RES (5)..(5): Xaa is C or S

SEQ ID NO: 57589 - protein, 32 aa, Artificial Sequence
  Cyclic GFR-binding peptide
  MOD_RES (2)..(2): Xaa is C or S
EXVPTGQRPVQMRKIRIKPHQGQHKKATVLEE

SEQ ID NO: 57590 - protein, 30 aa, Artificial Sequence
  Cyclic GFR-binding peptide
QPSRVHHSNITVQIMEYVRKKPKLIGEMSR

SEQ ID NO: 57591 - protein, 27 aa, Artificial Sequence
  Cyclic GFR-binding peptide
RSVKMAKVRIKPHQGQHKEVQVFLQHN

SEQ ID NO: 57592 - protein, 26 aa, Artificial Sequence
  Cyclic GFR-binding peptide
PTGQSNITMQIMRIKPHQGQHIGEMS

SEQ ID NO: 57593 - protein, 29 aa, Artificial Sequence
  Cyclic GFR-binding peptide
TEERPVQMRKIRIKPHQGQHKKATVFLQH

SEQ ID NO: 57594 - protein, 29 aa, Artificial Sequence
  Cyclic GFR-binding peptide
PTGQSNITMQIMRIKPHQGQHIGEMSLEE

SEQ ID NO: 57595 - protein, 32 aa, Artificial Sequence
  Cyclic GFR-binding peptide
VHHSNITVQIMEYVRKKPKLLGEMSRLEEHLE

SEQ ID NO: 57596 - protein, 22 aa, Artificial Sequence
  Cyclic GFR-binding peptide
SNITVQIMEIVRKKPIFIGEMS

SEQ ID NO: 57597 - protein, 29 aa, Artificial Sequence
  Cyclic GFR-binding peptide
QPSRVHHSNITVQIMEYVRKKPKLIGEMS

SEQ ID NO: 57598 - protein, 28 aa, Artificial Sequence
  Cyclic GFR-binding peptide
VPTEERSVKMAKVRIKPHQGQHKEVQVF

SEQ ID NO: 57599 - protein, 29 aa, Artificial Sequence
  Cyclic GFR-binding peptide
  MOD_RES (1)..(1): Xaa is C or S
XVPTGQSNITMQIMRIKPHQGQHIGEMSL

SEQ ID NO: 57600 - protein, 39 aa, Artificial Sequence; identical to SEQ ID NO: 14828
  Cyclic GFR-binding peptide
  MOD_RES (37)..(39): Xaa is C or S

SEQ ID NO: 57601 - protein, 33 aa, Artificial Sequence
  Cyclic GFR-binding peptide
  MOD_RES (4)..(4): Xaa is C or S
NVQXRPTQVQLSNITVQIMEIVRKKPIFIGEMS

SEQ ID NO: 57602 - protein, 29 aa, Artificial Sequence
  Cyclic GFR-binding peptide
TGQSNITMQIMRIKPHQGQHIGEMSLEEH

SEQ ID NO: 57603 - protein, 33 aa, Artificial Sequence
  Cyclic GFR-binding peptide
  MOD_RES (32)..(32): Xaa is C or S
TGQRPVQMRKIRIKPHQGQHKKATVLEEHSQXE

SEQ ID NO: 57604 - protein, 28 aa, Artificial Sequence
  Cyclic GFR-binding peptide
PTEERSVKMAKVRIKPHQGQHKEVQVFL

SEQ ID NO: 57605 - protein, 24 aa, Artificial Sequence
  Cyclic GFR-binding peptide
RPVQMRKIRIKPHQGQHKKATVLE

SEQ ID NO: 57606 - protein, 24 aa, Artificial Sequence
  Cyclic GFR-binding peptide
GQRPVQMRKIRIKPHQGQHKKATV

SEQ ID NO: 57607 - protein, 28 aa, Artificial Sequence
  Cyclic GFR-binding peptide
GQSNITMQIMRIKPHQGQHIGEMSLEEH

SEQ ID NO: 57608 - protein, 38 aa, Artificial Sequence; identical to SEQ ID NO: 14831
  Cyclic GFR-binding peptide
  MOD_RES (1)..(38): Xaa is C or S

SEQ ID NO: 57609 - protein, 39 aa, Artificial Sequence; identical to SEQ ID NO: 14834
  Cyclic GFR-binding peptide
  MOD_RES (3)..(37)..(39): Xaa is C or S

SEQ ID NO: 57610 - protein, 24 aa, Artificial Sequence
  Cyclic GFR-binding peptide
RSVKVAKVEIVRKKPIFKEVQVTL

SEQ ID NO: 57611 - protein, 30 aa, Artificial Sequence
  Cyclic GFR-binding peptide
PTQVQLSNITVQIMEIVRKKPIFIGEMSTL

SEQ ID NO: 57612 - protein, 34 aa, Artificial Sequence
  Cyclic GFR-binding peptide
  MOD_RES (4)..(4): Xaa is C or S
GLEXVPTGQSNITMQIMRIKPHQGQHIGEMSLEE

SEQ ID NO: 57613 - protein, 28 aa, Artificial Sequence
  Cyclic GFR-binding peptide
TGQSNITMQIMRIKPHQGQHIGEMSLEE

SEQ ID NO: 57614 - protein, 36 aa, Artificial Sequence; identical to SEQ ID NO: 14837
  Cyclic GFR-binding peptide

SEQ ID NO: 57615 - protein, 32 aa, Artificial Sequence
  Cyclic GFR-binding peptide
PTEERPVQMRKIRIKPHQGQHKKATVFLQHNK

SEQ ID NO: 57616 - protein, 38 aa, Artificial Sequence
  Cyclic GFR-binding peptide
  MOD_RES (5)..(5): Xaa is C or S
RNVQXRPTQVQLSNITVQIMEIVRKKPIFLGEMSTLED

SEQ ID NO: 57617 - protein, 30 aa, Artificial Sequence
  Cyclic GFR-binding peptide
  MOD_RES (3)..(3): Xaa is C or S
LEXVPTEERSVKMAKVRIKPHQGQHKEVQV

SEQ ID NO: 57618 - protein, 35 aa, Artificial Sequence; identical to SEQ ID NO: 14839
  Cyclic GFR-binding peptide
  MOD_RES (35)..(35): Xaa is C or S

SEQ ID NO: 57619 - protein, 29 aa, Artificial Sequence
  Cyclic GFR-binding peptide
VPTGQSNITMQIMRIKPHQGQHIGEMSLE

SEQ ID NO: 57620 - protein, 44 aa, Artificial Sequence; identical to SEQ ID NO: 14841
  Cyclic GFR-binding peptide
  MOD_RES (5)..(42)..(44): Xaa is C or S

SEQ ID NO: 57621 - protein, 30 aa, Artificial Sequence
  Cyclic GFR-binding peptide
HHRPVQVRKIEYVRKKPKLKKATVRLEEHL

SEQ ID NO: 57622 - protein, 37 aa, Artificial Sequence
  Cyclic GFR-binding peptide
  MOD_RES (6)..(6): Xaa is C or S
DEGLEXVPTEESNITMQIMRIKPHQGQHLGEMSFLQH

SEQ ID NO: 57623 - protein, 37 aa, Artificial Sequence
  Cyclic GFR-binding peptide
  MOD_RES (5)..(5): Xaa is C or S
RNVQXRPTQVQLSNITVQIMEIVRKKPIFLGEMSTLE

SEQ ID NO: 57624 - protein, 32 aa, Artificial Sequence
  Cyclic GFR-binding peptide
  MOD_RES (3)..(3): Xaa is C or S
VQXRPTQVQLSNITVQIMEIVRKKPIFIGEMS

SEQ ID NO: 57625 - protein, 30 aa, Artificial Sequence
  Cyclic GFR-binding peptide
  MOD_RES (3)..(3): Xaa is C or S
LEXVPTGQRSVKMAKVRIKPHQGQHKEVQV

SEQ ID NO: 57626 - protein, 42 aa, Artificial Sequence; identical to SEQ ID NO: 14844
  Cyclic GFR-binding peptide
  MOD_RES (7)..(41): Xaa is C or S

SEQ ID NO: 57627 - protein, 36 aa, Artificial Sequence
  Cyclic GFR-binding peptide
  MOD_RES (6)..(6): Xaa is C or S
DEGLEXVPTGQRPVQMRKIRIKPHQGQHKKATVLEE

SEQ ID NO: 57628 - protein, 28 aa, Artificial Sequence
  Cyclic GFR-binding peptide
  MOD_RES (1)..(1): Xaa is C or S
XVPTEERSVKMAKVRIKPHQGQHKEVQV

SEQ ID NO: 57629 - protein, 29 aa, Artificial Sequence
  Cyclic GFR-binding peptide
RPTQVQLRSVKVAKVEIVRKKPIFKEVQV

SEQ ID NO: 57630 - protein, 34 aa, Artificial Sequence; identical to SEQ ID NO: 14845
  Cyclic GFR-binding peptide

SEQ ID NO: 57631 - protein, 36 aa, Artificial Sequence; identical to SEQ ID NO: 14846
  Cyclic GFR-binding peptide
  MOD_RES (2)..(36): Xaa is C or S

SEQ ID NO: 57632 - protein, 35 aa, Artificial Sequence
  Cyclic GFR-binding peptide
  MOD_RES (32)..(34): Xaa is C or S
HHSNITVQIMEYVRKKPKLLGEMSRLEEHLEXAXA

SEQ ID NO: 57633 - protein, 33 aa, Artificial Sequence
  Cyclic GFR-binding peptide
  MOD_RES (30)..(32): Xaa is C or S
SNITVQIMEYVRKKPKLLGEMSRLEEHLEXAXA

SEQ ID NO: 57634 - protein, 31 aa, Artificial Sequence
  Cyclic GFR-binding peptide
  MOD_RES (29)..(31): Xaa is C or S
RPVQMRKIRIKPHQGQHKKATVLEEHSQXEX

SEQ ID NO: 57635 - protein, 39 aa, Artificial Sequence; identical to SEQ ID NO: 14847
  Cyclic GFR-binding peptide
  MOD_RES (4)..(38): Xaa is C or S

SEQ ID NO: 57636 - protein, 27 aa, Artificial Sequence
  Cyclic GFR-binding peptide
VPTEESNITMQIMRIKPHQGQHLGEMS

SEQ ID NO: 57637 - protein, 31 aa, Artificial Sequence
  Cyclic GFR-binding peptide
  MOD_RES (31)..(31): Xaa is C or S
GQRSVKMAKVRIKPHQGQHKEVQVLEEHSQX

SEQ ID NO: 57638 - protein, 37 aa, Artificial Sequence
  Cyclic GFR-binding peptide
  MOD_RES (5)..(5): Xaa is C or S
SSVKXQPSRVHHRPVQVRKIEYVRKKPKLKKATVRLE

SEQ ID NO: 57639 - protein, 26 aa, Artificial Sequence
  Cyclic GFR-binding peptide
HSNITVQIMEYVRKKPKLLGEMSRLE

SEQ ID NO: 57640 - protein, 36 aa, Artificial Sequence
  Cyclic GFR-binding peptide
  MOD_RES (33)..(35): Xaa is C or S
PTEESNITMQIMRIKPHQGQHLGEMSFLQHNKXEXR

SEQ ID NO: 57641 - protein, 34 aa, Artificial Sequence
  Cyclic GFR-binding peptide
  MOD_RES (5)..(5): Xaa is C or S
EGLEXVPTGQSNITMQIMRIKPHQGQHIGEMSLE

SEQ ID NO: 57642 - protein, 22 aa, Artificial Sequence
  Cyclic GFR-binding peptide
RSVKVAKVEIVRKKPIFKEVQV

SEQ ID NO: 57643 - protein, 27 aa, Artificial Sequence
  Cyclic GFR-binding peptide
PTEERSVKMAKVRIKPHQGQHKEVQVF

SEQ ID NO: 57644 - protein, 33 aa, Artificial Sequence
  Cyclic GFR-binding peptide
  MOD_RES (6)..(6): Xaa is C or S
DEGLEXVPTEERSVKMAKVRIKPHQGQHKEVQV

SEQ ID NO: 57645 - protein, 34 aa, Artificial Sequence
  Cyclic GFR-binding peptide
  MOD_RES (2)..(2): Xaa is C or S
QXRPTQVQLSNITVQIMEIVRKKPIFIGEMSTLE

SEQ ID NO: 57646 - protein, 43 aa, Artificial Sequence; identical to SEQ ID NO: 14850
  Cyclic GFR-binding peptide
  MOD_RES (6)..(40)..(42): Xaa is C or S

SEQ ID NO: 57647 - protein, 40 aa, Artificial Sequence; identical to SEQ ID NO: 14851
  Cyclic GFR-binding peptide
  MOD_RES (3)..(40): Xaa is C or S

SEQ ID NO: 57648 - protein, 33 aa, Artificial Sequence
  Cyclic GFR-binding peptide
  MOD_RES (4)..(4): Xaa is C or S
GLEXVPTEESNITMQIMRIKPHQGQHLGEMSFL

SEQ ID NO: 57649 - protein, 28 aa, Artificial Sequence
  Cyclic GFR-binding peptide
EERPVQMRKIRIKPHQGQHKKATVFLQH

SEQ ID NO: 57650 - protein, 33 aa, Artificial Sequence; identical to SEQ ID NO: 14852
  Cyclic GFR-binding peptide

SEQ ID NO: 57651 - protein, 36 aa, Artificial Sequence; identical to SEQ ID NO: 14854
  Cyclic GFR-binding peptide
  MOD_RES (35)..(35): Xaa is C or S

SEQ ID NO: 57652 - protein, 30 aa, Artificial Sequence
  Cyclic GFR-binding peptide
  MOD_RES (1)..(1): Xaa is C or S
XRPTQVQLRSVKVAKVEIVRKKPIFKEVQV

SEQ ID NO: 57653 - protein, 30 aa, Artificial Sequence
  Cyclic GFR-binding peptide
  MOD_RES (2)..(2): Xaa is C or S
EXVPTGQRSVKMAKVRIKPHQGQHKEVQVL

SEQ ID NO: 57654 - protein, 27 aa, Artificial Sequence
  Cyclic GFR-binding peptide
SRVHHSNITVQIMEYVRKKPKLLGEMS

SEQ ID NO: 57655 - protein, 40 aa, Artificial Sequence
  Cyclic GFR-binding peptide
  MOD_RES (4)..(38)..(40): Xaa is C or S
GLEXVPTGQRPVQMRKIRIKPHQGQHKKATVLEEHSQXEX

SEQ ID NO: 57656 - protein, 40 aa, Artificial Sequence; identical to SEQ ID NO: 14856
  Cyclic GFR-binding peptide
  MOD_RES (5)..(39): Xaa is C or S

SEQ ID NO: 57657 - protein, 30 aa, Artificial Sequence
  Cyclic GFR-binding peptide
  MOD_RES (30)..(30): Xaa is C or S
SNITVQIMEIVRKKPIFIGEMSTLEDHLAX

SEQ ID NO: 57658 - protein, 24 aa, Artificial Sequence
  Cyclic GFR-binding peptide
QLSNITVQIMEIVRKKPIFIGEMS

SEQ ID NO: 57659 - protein, 25 aa, Artificial Sequence
  Cyclic GFR-binding peptide
EERSVKMAKVRIKPHQGQHKEVQVF

SEQ ID NO: 57660 - protein, 35 aa, Artificial Sequence
  Cyclic GFR-binding peptide
  MOD_RES (6)..(6): Xaa is C or S
DEGLEXVPTGQRSVKMAKVRIKPHQGQHKEVQVLE

SEQ ID NO: 57661 - protein, 27 aa, Artificial Sequence
  Cyclic GFR-binding peptide
PTGQSNITMQIMRIKPHQGQHIGEMSL

SEQ ID NO: 57662 - protein, 30 aa, Artificial Sequence
  Cyclic GFR-binding peptide
  MOD_RES (30)..(30): Xaa is C or S
QSNITMQIMRIKPHQGQHIGEMSLEEHSQX

SEQ ID NO: 57663 - protein, 32 aa, Artificial Sequence
  Cyclic GFR-binding peptide
  MOD_RES (2)..(2): Xaa is C or S
KXQPSRVHHRPVQVRKIEYVRKKPKLKKATVR

SEQ ID NO: 57664 - protein, 31 aa, Artificial Sequence
  Cyclic GFR-binding peptide
QLRSVKVAKVEIVRKKPIFKEVQVTLEDHLA

SEQ ID NO: 57665 - protein, 39 aa, Artificial Sequence; identical to SEQ ID NO: 14859
  Cyclic GFR-binding peptide
  MOD_RES (7)..(7): Xaa is C or S

SEQ ID NO: 57666 - protein, 30 aa, Artificial Sequence
  Cyclic GFR-binding peptide
HHSNITVQIMEYVRKKPKLLGEMSRLEEHL

SEQ ID NO: 57667 - protein, 33 aa, Artificial Sequence
  Cyclic GFR-binding peptide
  MOD_RES (3)..(3): Xaa is C or S
VKXQPSRVHHSNITVQIMEYVRKKPKLLGEMSR

SEQ ID NO: 57668 - protein, 41 aa, Artificial Sequence; identical to SEQ ID NO: 14860
  Cyclic GFR-binding peptide
  MOD_RES (5)..(5): Xaa is C or S

SEQ ID NO: 57669 - protein, 37 aa, Artificial Sequence; identical to SEQ ID NO: 14861
  Cyclic GFR-binding peptide
  MOD_RES (2)..(36): Xaa is C or S

SEQ ID NO: 57670 - protein, 29 aa, Artificial Sequence
  Cyclic GFR-binding peptide
VQLSNITVQIMEIVRKKPIFIGEMSTLED

SEQ ID NO: 57671 - protein, 39 aa, Artificial Sequence; identical to SEQ ID NO: 14863
  Cyclic GFR-binding peptide
  MOD_RES (7)..(7): Xaa is C or S

SEQ ID NO: 57672 - protein, 34 aa, Artificial Sequence
  Cyclic GFR-binding peptide
  MOD_RES (31)..(33): Xaa is C or S
EERSVKMAKVRIKPHQGQHKEVQVFLQHNKXEXR

SEQ ID NO: 57673 - protein, 39 aa, Artificial Sequence; identical to SEQ ID NO: 14864
  Cyclic GFR-binding peptide
  MOD_RES (37)..(39): Xaa is C or S

SEQ ID NO: 57674 - protein, 31 aa, Artificial Sequence
  Cyclic GFR-binding peptide
  MOD_RES (3)..(3): Xaa is C or S
LEXVPTGQSNITMQIMRIKPHQGQHIGEMSL

SEQ ID NO: 57675 - protein, 38 aa, Artificial Sequence; identical to SEQ ID NO: 14866
  Cyclic GFR-binding peptide
  MOD_RES (6)..(6): Xaa is C or S

SEQ ID NO: 57676 - protein, 32 aa, Artificial Sequence
  Cyclic GFR-binding peptide
  MOD_RES (31)..(31): Xaa is C or S
GQRPVQMRKIRIKPHQGQHKKATVLEEHSQXE

SEQ ID NO: 57677 - protein, 32 aa, Artificial Sequence
  Cyclic GFR-binding peptide
PTEESNITMQIMRIKPHQGQHLGEMSFLQHNK

SEQ ID NO: 57678 - protein, 33 aa, Artificial Sequence
  Cyclic GFR-binding peptide
  MOD_RES (30)..(32): Xaa is C or S
RPVQVRKIEYVRKKPKLKKATVRLEEHLEXAXA

SEQ ID NO: 57679 - protein, 37 aa, Artificial Sequence; identical to SEQ ID NO: 14870
  Cyclic GFR-binding peptide
  MOD_RES (36)..(36): Xaa is C or S

SEQ ID NO: 57680 - protein, 33 aa, Artificial Sequence
  Cyclic GFR-binding peptide
  MOD_RES (32)..(32): Xaa is C or S
HHRPVQVRKIEYVRKKPKLKKATVRLEEHLEXA

SEQ ID NO: 57681 - protein, 27 aa, Artificial Sequence
  Cyclic GFR-binding peptide
SNITVQIMEIVRKKPIFLGEMSTLEDH

SEQ ID NO: 57682 - protein, 30 aa, Artificial Sequence
  Cyclic GFR-binding peptide
TEERSVKMAKVRIKPHQGQHKEVQVFLQHN

SEQ ID NO: 57683 - protein, 43 aa, Artificial Sequence; identical to SEQ ID NO: 14875
  Cyclic GFR-binding peptide
  MOD_RES (3)..(40)..(42): Xaa is C or S

SEQ ID NO: 57684 - protein, 34 aa, Artificial Sequence
  Cyclic GFR-binding peptide
  MOD_RES (33)..(33): Xaa is C or S
VHHRPVQVRKIEYVRKKPKLKKATVRLEEHLEXA

SEQ ID NO: 57685 - protein, 37 aa, Artificial Sequence; identical to SEQ ID NO: 14876
  Cyclic GFR-binding peptide
  MOD_RES (36)..(36): Xaa is C or S

SEQ ID NO: 57686 - protein, 30 aa, Artificial Sequence
  Cyclic GFR-binding peptide
TEERPVQMRKIRIKPHQGQHKKATVFLQHN

SEQ ID NO: 57687 - protein, 35 aa, Artificial Sequence
  Cyclic GFR-binding peptide
  MOD_RES (5)..(5): Xaa is C or S
RNVQXRPTQVQLSNITVQIMEIVRKKPIFIGEMST

SEQ ID NO: 57688 - protein, 33 aa, Artificial Sequence
  Cyclic GFR-binding peptide
  MOD_RES (3)..(3): Xaa is C or S
LEXVPTEERPVQMRKIRIKPHQGQHKKATVFLQ

SEQ ID NO: 57689 - protein, 25 aa, Artificial Sequence
  Cyclic GFR-binding peptide
VHHRPVQVRKIEYVRKKPKLKKATV

SEQ ID NO: 57690 - protein, 30 aa, Artificial Sequence
  Cyclic GFR-binding peptide
  MOD_RES (1)..(1): Xaa is C or S
XQPSRVHHSNITVQIMEYVRKKPKLIGEMS

SEQ ID NO: 57691 - protein, 40 aa, Artificial Sequence; identical to SEQ ID NO: 14877
  Cyclic GFR-binding peptide
  MOD_RES (3)..(40): Xaa is C or S

SEQ ID NO: 57692 - protein, 30 aa, Artificial Sequence
  Cyclic GFR-binding peptide
SRVHHSNITVQIMEYVRKKPKLIGEMSRLE

SEQ ID NO: 57693 - protein, 30 aa, Artificial Sequence
  Cyclic GFR-binding peptide
  MOD_RES (1)..(1): Xaa is C or S
XVPTGQSNITMQIMRIKPHQGQHIGEMSLE

SEQ ID NO: 57694 - protein, 34 aa, Artificial Sequence
  Cyclic GFR-binding peptide
  MOD_RES (32)..(34): Xaa is C or S
TEESNITMQIMRIKPHQGQHLGEMSFLQHNKXEX

SEQ ID NO: 57695 - protein, 35 aa, Artificial Sequence
  Cyclic GFR-binding peptide
  MOD_RES (32)..(34): Xaa is C or S
HHRPVQVRKIEYVRKKPKLKKATVRLEEHLEXAXA

SEQ ID NO: 57696 - protein, 22 aa, Artificial Sequence
  Cyclic GFR-binding peptide
RSVKMAKVRIKPHQGQHKEVQV

SEQ ID NO: 57697 - protein, 39 aa, Artificial Sequence; identical to SEQ ID NO: 14883
  Cyclic GFR-binding peptide
  MOD_RES (5)..(5): Xaa is C or S

SEQ ID NO: 57698 - protein, 24 aa, Artificial Sequence
  Cyclic GFR-binding peptide
RPVQMRKIRIKPHQGQHKKATVFL

SEQ ID NO: 57699 - protein, 41 aa, Artificial Sequence; identical to SEQ ID NO: 14884
  Cyclic GFR-binding peptide
  MOD_RES (6)..(40): Xaa is C or S

SEQ ID NO: 57700 - protein, 34 aa, Artificial Sequence
  Cyclic GFR-binding peptide
  MOD_RES (31)..(33): Xaa is C or S
HSNITVQIMEYVRKKPKLIGEMSRLEEHLEXAXA

SEQ ID NO: 57701 - protein, 33 aa, Artificial Sequence
  Cyclic GFR-binding peptide
  MOD_RES (2)..(2): Xaa is C or S
QXRPTQVQLRSVKVAKVEIVRKKPIFKEVQVTL

SEQ ID NO: 57702 - protein, 31 aa, Artificial Sequence
  Cyclic GFR-binding peptide
  MOD_RES (31)..(31): Xaa is C or S
HRPVQVRKIEYVRKKPKLKKATVRLEEHLEX

SEQ ID NO: 57703 - protein, 38 aa, Artificial Sequence; identical to SEQ ID NO: 14885
  Cyclic GFR-binding peptide
  MOD_RES (6)..(6): Xaa is C or S

SEQ ID NO: 57704 - protein, 26 aa, Artificial Sequence
  Cyclic GFR-binding peptide
RSVKMAKVRIKPHQGQHKEVQVFLQH

SEQ ID NO: 57705 - protein, 33 aa, Artificial Sequence
  Cyclic GFR-binding peptide
  MOD_RES (2)..(2): Xaa is C or S
EXVPTEERPVQMRKIRIKPHQGQHKKATVFLQH

SEQ ID NO: 57706 - protein, 35 aa, Artificial Sequence; identical to SEQ ID NO: 14888
  Cyclic GFR-binding peptide
  MOD_RES (3)..(3): Xaa is C or S

SEQ ID NO: 57707 - protein, 30 aa, Artificial Sequence
  Cyclic GFR-binding peptide
EERSVKMAKVRIKPHQGQHKEVQVFLQHNK

SEQ ID NO: 57708 - protein, 39 aa, Artificial Sequence; identical to SEQ ID NO: 14889
  Cyclic GFR-binding peptide
  MOD_RES (5)..(39): Xaa is C or S

SEQ ID NO: 57709 - protein, 41 aa, Artificial Sequence; identical to SEQ ID NO: 14890
  Cyclic GFR-binding peptide
  MOD_RES (5)..(39)..(41): Xaa is C or S

SEQ ID NO: 57710 - protein, 37 aa, Artificial Sequence; identical to SEQ ID NO: 14891
  Cyclic GFR-binding peptide
  MOD_RES (1)..(1): Xaa is C or S

SEQ ID NO: 57711 - protein, 29 aa, Artificial Sequence
  Cyclic GFR-binding peptide
LSNITVQIMEIVRKKPIFIGEMSTLEDHL

SEQ ID NO: 57712 - protein, 42 aa, Artificial Sequence; identical to SEQ ID NO: 14892
  Cyclic GFR-binding peptide
  MOD_RES (6)..(40)..(42): Xaa is C or S

SEQ ID NO: 57713 - protein, 38 aa, Artificial Sequence; identical to SEQ ID NO: 14893
  Cyclic GFR-binding peptide
  MOD_RES (4)..(4): Xaa is C or S

SEQ ID NO: 57714 - protein, 23 aa, Artificial Sequence
  Cyclic GFR-binding peptide
QSNITMQIMRIKPHQGQHIGEMS

SEQ ID NO: 57715 - protein, 33 aa, Artificial Sequence
  Cyclic GFR-binding peptide
  MOD_RES (3)..(3): Xaa is C or S
VQXRPTQVQLSNITVQIMEIVRKKPIFLGEMST

SEQ ID NO: 57716 - protein, 38 aa, Artificial Sequence; identical to SEQ ID NO: 14894
  Cyclic GFR-binding peptide
  MOD_RES (36)..(38): Xaa is C or S

SEQ ID NO: 57717 - protein, 41 aa, Artificial Sequence; identical to SEQ ID NO: 14895
  Cyclic GFR-binding peptide
  MOD_RES (3)..(40): Xaa is C or S

SEQ ID NO: 57718 - protein, 35 aa, Artificial Sequence
  Cyclic GFR-binding peptide
  MOD_RES (4)..(4): Xaa is C or S
GLEXVPTEERPVQMRKIRIKPHQGQHKKATVFLQH

SEQ ID NO: 57719 - protein, 40 aa, Artificial Sequence; identical to SEQ ID NO: 14896
  Cyclic GFR-binding peptide
  MOD_RES (37)..(39): Xaa is C or S

SEQ ID NO: 57720 - protein, 31 aa, Artificial Sequence
  Cyclic GFR-binding peptide
HHSNITVQIMEYVRKKPKLIGEMSRLEEHLE

SEQ ID NO: 57721 - protein, 30 aa, Artificial Sequence
  Cyclic GFR-binding peptide
LSNITVQIMEIVRKKPIFIGEMSTLEDHLA

SEQ ID NO: 57722 - protein, 37 aa, Artificial Sequence; identical to SEQ ID NO: 14897
  Cyclic GFR-binding peptide
  MOD_RES (37)..(37): Xaa is C or S

SEQ ID NO: 57723 - protein, 40 aa, Artificial Sequence; identical to SEQ ID NO: 14898
  Cyclic GFR-binding peptide
  MOD_RES (6)..(40): Xaa is C or S

SEQ ID NO: 57724 - protein, 33 aa, Artificial Sequence
  Cyclic GFR-binding peptide
  MOD_RES (31)..(33): Xaa is C or S
LSNITVQIMEIVRKKPIFIGEMSTLEDHLAXKX

SEQ ID NO: 57725 - protein, 27 aa, Artificial Sequence
  Cyclic GFR-binding peptide
TGQSNITMQIMRIKPHQGQHIGEMSLE

SEQ ID NO: 57726 - protein, 38 aa, Artificial Sequence; identical to SEQ ID NO: 14900
  Cyclic GFR-binding peptide
  MOD_RES (2)..(36)..(38): Xaa is C or S

SEQ ID NO: 57727 - protein, 36 aa, Artificial Sequence
  Cyclic GFR-binding peptide
  MOD_RES (33)..(35): Xaa is C or S
VHHSNITVQIMEYVRKKPKLIGEMSRLEEHLEXAXA

SEQ ID NO: 57728 - protein, 41 aa, Artificial Sequence; identical to SEQ ID NO: 14902
  Cyclic GFR-binding peptide
  MOD_RES (4)..(38)..(40): Xaa is C or S

SEQ ID NO: 57729 - protein, 30 aa, Artificial Sequence
  Cyclic GFR-binding peptide
PTEESNITMQIMRIKPHQGQHLGEMSFLQH

SEQ ID NO: 57730 - protein, 42 aa, Artificial Sequence; identical to SEQ ID NO: 14903
  Cyclic GFR-binding peptide
  MOD_RES (3)..(40)..(42): Xaa is C or S

SEQ ID NO: 57731 - protein, 37 aa, Artificial Sequence
  Cyclic GFR-binding peptide
  MOD_RES (4)..(4): Xaa is C or S
NVQXRPTQVQLSNITVQIMEIVRKKPIFIGEMSTLED

SEQ ID NO: 57732 - protein, 37 aa, Artificial Sequence; identical to SEQ ID NO: 14906
  Cyclic GFR-binding peptide
  MOD_RES (1)..(35)..(37): Xaa is C or S

SEQ ID NO: 57733 - protein, 26 aa, Artificial Sequence
  Cyclic GFR-binding peptide
RPVQMRKIRIKPHQGQHKKATVFLQH

SEQ ID NO: 57734 - protein, 39 aa, Artificial Sequence; identical to SEQ ID NO: 14907
  Cyclic GFR-binding peptide
  MOD_RES (4)..(4): Xaa is C or S

SEQ ID NO: 57735 - protein, 30 aa, Artificial Sequence
  Cyclic GFR-binding peptide
VPTGQRSVKMAKVRIKPHQGQHKEVQVLEE

SEQ ID NO: 57736 - protein, 42 aa, Artificial Sequence; identical to SEQ ID NO: 14909
  Cyclic GFR-binding peptide
  MOD_RES (2)..(39)..(41): Xaa is C or S

SEQ ID NO: 57737 - protein, 29 aa, Artificial Sequence
  Cyclic GFR-binding peptide
  MOD_RES (2)..(2): Xaa is C or S
EXVPTEERPVQMRKIRIKPHQGQHKKATV

SEQ ID NO: 57738 - protein, 23 aa, Artificial Sequence
  Cyclic GFR-binding peptide
HSNITVQIMEYVRKKPKLIGEMS

SEQ ID NO: 57739 - protein, 23 aa, Artificial Sequence
  Cyclic GFR-binding peptide
SNITVQIMEIVRKKPIFLGEMST

SEQ ID NO: 57740 - protein, 42 aa, Artificial Sequence; identical to SEQ ID NO: 14912
  Cyclic GFR-binding peptide
  MOD_RES (7)..(41): Xaa is C or S

SEQ ID NO: 57741 - protein, 31 aa, Artificial Sequence
  Cyclic GFR-binding peptide
  MOD_RES (2)..(2): Xaa is C or S
EXVPTGQSNITMQIMRIKPHQGQHIGEMSLE

SEQ ID NO: 57742 - protein, 22 aa, Artificial Sequence
  Cyclic GFR-binding peptide
RPVQMRKIRIKPHQGQHKKATV

SEQ ID NO: 57743 - protein, 37 aa, Artificial Sequence; identical to SEQ ID NO: 14913
  Cyclic GFR-binding peptide
  MOD_RES (37)..(37): Xaa is C or S

SEQ ID NO: 57744 - protein, 34 aa, Artificial Sequence
  Cyclic GFR-binding peptide
  MOD_RES (4)..(4): Xaa is C or S
NVQXRPTQVQLRSVKVAKVEIVRKKPIFKEVQVT

SEQ ID NO: 57745 - protein, 26 aa, Artificial Sequence
  Cyclic GFR-binding peptide
ERSVKMAKVRIKPHQGQHKEVQVFLQ

SEQ ID NO: 57746 - protein, 38 aa, Artificial Sequence; identical to SEQ ID NO: 14915
  Cyclic GFR-binding peptide
  MOD_RES (36)..(38): Xaa is C or S

SEQ ID NO: 57747 - protein, 31 aa, Artificial Sequence
  Cyclic GFR-binding peptide
  MOD_RES (4)..(4): Xaa is C or S
GLEXVPTEERSVKMAKVRIKPHQGQHKEVQV

SEQ ID NO: 57748 - protein, 38 aa, Artificial Sequence; identical to SEQ ID NO: 14916
  Cyclic GFR-binding peptide
  MOD_RES (6)..(6): Xaa is C or S

SEQ ID NO: 57749 - protein, 40 aa, Artificial Sequence; identical to SEQ ID NO: 14918
  Cyclic GFR-binding peptide
  MOD_RES (6)..(40): Xaa is C or S

SEQ ID NO: 57750 - protein, 25 aa, Artificial Sequence
  Cyclic GFR-binding peptide
SNITVQIMEIVRKKPIFLGEMSTLE

SEQ ID NO: 57751 - protein, 29 aa, Artificial Sequence
  Cyclic GFR-binding peptide
VQLSNITVQIMEIVRKKPIFLGEMSTLED

SEQ ID NO: 57752 - protein, 39 aa, Artificial Sequence; identical to SEQ ID NO: 14921
  Cyclic GFR-binding peptide
  MOD_RES (36)..(38): Xaa is C or S

SEQ ID NO: 57753 - protein, 39 aa, Artificial Sequence; identical to SEQ ID NO: 14922
  Cyclic GFR-binding peptide
  MOD_RES (1)..(38): Xaa is C or S

SEQ ID NO: 57754 - protein, 35 aa, Artificial Sequence
  Cyclic GFR-binding peptide
  MOD_RES (6)..(6): Xaa is C or S
DEGLEXVPTEERSVKMAKVRIKPHQGQHKEVQVFL

SEQ ID NO: 57755 - protein, 37 aa, Artificial Sequence; identical to SEQ ID NO: 14923
  Cyclic GFR-binding peptide
  MOD_RES (3)..(37): Xaa is C or S

SEQ ID NO: 57756 - protein, 43 aa, Artificial Sequence; identical to SEQ ID NO: 14924
  Cyclic GFR-binding peptide
  MOD_RES (3)..(40)..(42): Xaa is C or S

SEQ ID NO: 57757 - protein, 24 aa, Artificial Sequence
  Cyclic GFR-binding peptide
QSNITMQIMRIKPHQGQHIGEMSL

SEQ ID NO: 57758 - protein, 39 aa, Artificial Sequence; identical to SEQ ID NO: 14928
  Cyclic GFR-binding peptide
  MOD_RES (5)..(39): Xaa is C or S

SEQ ID NO: 57759 - protein, 32 aa, Artificial Sequence
  Cyclic GFR-binding peptide
  MOD_RES (31)..(31): Xaa is C or S
LSNITVQIMEIVRKKPIFIGEMSTLEDHLAXK

SEQ ID NO: 57760 - protein, 32 aa, Artificial Sequence
  Cyclic GFR-binding peptide
  MOD_RES (4)..(4): Xaa is C or S
GLEXVPTEESNITMQIMRIKPHQGQHLGEMSF

SEQ ID NO: 57761 - protein, 33 aa, Artificial Sequence
  Cyclic GFR-binding peptide
  MOD_RES (3)..(3): Xaa is C or S
LEXVPTEESNITMQIMRIKPHQGQHLGEMSFLQ

SEQ ID NO: 57762 - protein, 35 aa, Artificial Sequence
  Cyclic GFR-binding peptide
  MOD_RES (6)..(6): Xaa is C or S
DEGLEXVPTGQRPVQMRKIRIKPHQGQHKKATVLE

SEQ ID NO: 57763 - protein, 39 aa, Artificial Sequence; identical to SEQ ID NO: 14929
  Cyclic GFR-binding peptide
  MOD_RES (4)..(4): Xaa is C or S

SEQ ID NO: 57764 - protein, 29 aa, Artificial Sequence
  Cyclic GFR-binding peptide
SNITVQIMEIVRKKPIFIGEMSTLEDHLA

SEQ ID NO: 57765 - protein, 27 aa, Artificial Sequence
  Cyclic GFR-binding peptide
LRSVKVAKVEIVRKKPIFKEVQVTLED

SEQ ID NO: 57766 - protein, 38 aa, Artificial Sequence; identical to SEQ ID NO: 14932
  Cyclic GFR-binding peptide
  MOD_RES (2)..(36)..(38): Xaa is C or S

SEQ ID NO: 57767 - protein, 38 aa, Artificial Sequence; identical to SEQ ID NO: 14933
  Cyclic GFR-binding peptide
  MOD_RES (37)..(37): Xaa is C or S

SEQ ID NO: 57768 - protein, 28 aa, Artificial Sequence
  Cyclic GFR-binding peptide
EESNITMQIMRIKPHQGQHLGEMSFLQH

SEQ ID NO: 57769 - protein, 22 aa, Artificial Sequence
  Cyclic GFR-binding peptide
SNITVQIMEYVRKKPKLLGEMS

SEQ ID NO: 57770 - protein, 35 aa, Artificial Sequence
  Cyclic GFR-binding peptide
  MOD_RES (4)..(4): Xaa is C or S
GLEXVPTGQSNITMQIMRIKPHQGQHIGEMSLEEH

SEQ ID NO: 57771 - protein, 37 aa, Artificial Sequence
  Cyclic GFR-binding peptide
  MOD_RES (5)..(5): Xaa is C or S
RNVQXRPTQVQLSNITVQIMEIVRKKPIFIGEMSTLE

SEQ ID NO: 57772 - protein, 39 aa, Artificial Sequence; identical to SEQ ID NO: 14934
  Cyclic GFR-binding peptide
  MOD_RES (4)..(38): Xaa is C or S

SEQ ID NO: 57773 - protein, 23 aa, Artificial Sequence
  Cyclic GFR-binding peptide
SNITMQIMRIKPHQGQHIGEMSL

SEQ ID NO: 57774 - protein, 36 aa, Artificial Sequence
  Cyclic GFR-binding peptide
  MOD_RES (5)..(5): Xaa is C or S
EGLEXVPTEESNITMQIMRIKPHQGQHLGEMSFLQH

SEQ ID NO: 57775 - protein, 25 aa, Artificial Sequence
  Cyclic GFR-binding peptide
GQRSVKMAKVRIKPHQGQHKEVQVL

SEQ ID NO: 57776 - protein, 31 aa, Artificial Sequence
  Cyclic GFR-binding peptide
TQVQLSNITVQIMEIVRKKPIFLGEMSTLED

SEQ ID NO: 57777 - protein, 38 aa, Artificial Sequence; identical to SEQ ID NO: 14935
  Cyclic GFR-binding peptide
  MOD_RES (35)..(37): Xaa is C or S

SEQ ID NO: 57778 - protein, 35 aa, Artificial Sequence
  Cyclic GFR-binding peptide
  MOD_RES (4)..(4): Xaa is C or S
GLEXVPTEERSVKMAKVRIKPHQGQHKEVQVFLQH

SEQ ID NO: 57779 - protein, 40 aa, Artificial Sequence; identical to SEQ ID NO: 14936
  Cyclic GFR-binding peptide
  MOD_RES (3)..(40): Xaa is C or S

SEQ ID NO: 57780 - protein, 29 aa, Artificial Sequence
  Cyclic GFR-binding peptide
QLSNITVQIMEIVRKKPIFIGEMSTLEDH

SEQ ID NO: 57781 - protein, 27 aa, Artificial Sequence
  Cyclic GFR-binding peptide
EESNITMQIMRIKPHQGQHLGEMSFLQ

SEQ ID NO: 57782 - protein, 36 aa, Artificial Sequence
  Cyclic GFR-binding peptide
  MOD_RES (33)..(35): Xaa is C or S
VHHSNITVQIMEYVRKKPKLLGEMSRLEEHLEXAXA

SEQ ID NO: 57783 - protein, 25 aa, Artificial Sequence
  Cyclic GFR-binding peptide
LSNITVQIMEIVRKKPIFLGEMSTL

SEQ ID NO: 57784 - protein, 37 aa, Artificial Sequence; identical to SEQ ID NO: 14937
  Cyclic GFR-binding peptide
  MOD_RES (1)..(35)..(37): Xaa is C or S

SEQ ID NO: 57785 - protein, 23 aa, Artificial Sequence
  Cyclic GFR-binding peptide
QRSVKMAKVRIKPHQGQHKEVQV

SEQ ID NO: 57786 - protein, 31 aa, Artificial Sequence
  Cyclic GFR-binding peptide
  MOD_RES (1)..(1): Xaa is C or S
XVPTGQSNITMQIMRIKPHQGQHIGEMSLEE

SEQ ID NO: 57787 - protein, 39 aa, Artificial Sequence; identical to SEQ ID NO: 14938
  Cyclic GFR-binding peptide
  MOD_RES (6)..(6): Xaa is C or S

SEQ ID NO: 57788 - protein, 25 aa, Artificial Sequence
  Cyclic GFR-binding peptide
SNITVQIMEYVRKKPKLIGEMSRLE

SEQ ID NO: 57789 - protein, 41 aa, Artificial Sequence; identical to SEQ ID NO: 14940
  Cyclic GFR-binding peptide
  MOD_RES (3)..(40): Xaa is C or S

SEQ ID NO: 57790 - protein, 29 aa, Artificial Sequence
  Cyclic GFR-binding peptide
  MOD_RES (29)..(29): Xaa is C or S
SNITMQIMRIKPHQGQHLGEMSFLQHNKX

SEQ ID NO: 57791 - protein, 26 aa, Artificial Sequence
  Cyclic GFR-binding peptide
QLSNITVQIMEIVRKKPIFLGEMSTL

SEQ ID NO: 57792 - protein, 32 aa, Artificial Sequence
  Cyclic GFR-binding peptide
  MOD_RES (32)..(32): Xaa is C or S
QLRSVKVAKVEIVRKKPIFKEVQVTLEDHLAX

SEQ ID NO: 57793 - protein, 39 aa, Artificial Sequence; identical to SEQ ID NO: 14943
  Cyclic GFR-binding peptide
  MOD_RES (37)..(39): Xaa is C or S

SEQ ID NO: 57794 - protein, 33 aa, Artificial Sequence
  Cyclic GFR-binding peptide
  MOD_RES (2)..(2): Xaa is C or S
KXQPSRVHHSNITVQIMEYVRKKPKLIGEMSRL

SEQ ID NO: 57795 - protein, 43 aa, Artificial Sequence; identical to SEQ ID NO: 14944
  Cyclic GFR-binding peptide
  MOD_RES (4)..(41)..(43): Xaa is C or S

SEQ ID NO: 57796 - protein, 33 aa, Artificial Sequence; identical to SEQ ID NO: 14945
  Cyclic GFR-binding peptide

SEQ ID NO: 57797 - protein, 44 aa, Artificial Sequence; identical to SEQ ID NO: 14947
  Cyclic GFR-binding peptide
  MOD_RES (5)..(42)..(44): Xaa is C or S

SEQ ID NO: 57798 - protein, 44 aa, Artificial Sequence; identical to SEQ ID NO: 14948
  Cyclic GFR-binding peptide
  MOD_RES (5)..(42)..(44): Xaa is C or S

SEQ ID NO: 57799 - protein, 38 aa, Artificial Sequence; identical to SEQ ID NO: 14949
  Cyclic GFR-binding peptide
  MOD_RES (35)..(37): Xaa is C or S

SEQ ID NO: 57800 - protein, 33 aa, Artificial Sequence; identical to SEQ ID NO: 14953
  Cyclic GFR-binding peptide

SEQ ID NO: 57801 - protein, 35 aa, Artificial Sequence; identical to SEQ ID NO: 14954
  Cyclic GFR-binding peptide
  MOD_RES (1)..(35): Xaa is C or S

SEQ ID NO: 57802 - protein, 34 aa, Artificial Sequence
  Cyclic GFR-binding peptide
  MOD_RES (32)..(34): Xaa is C or S
QLRSVKVAKVEIVRKKPIFKEVQVTLEDHLAXKX

SEQ ID NO: 57803 - protein, 33 aa, Artificial Sequence
  Cyclic GFR-binding peptide
  MOD_RES (32)..(32): Xaa is C or S
QLSNITVQIMEIVRKKPIFLGEMSTLEDHLAXK

SEQ ID NO: 57804 - protein, 39 aa, Artificial Sequence; identical to SEQ ID NO: 14956
  Cyclic GFR-binding peptide
  MOD_RES (36)..(38): Xaa is C or S

SEQ ID NO: 57805 - protein, 31 aa, Artificial Sequence
  Cyclic GFR-binding peptide
RVHHSNITVQIMEYVRKKPKLLGEMSRLEEH

SEQ ID NO: 57806 - protein, 37 aa, Artificial Sequence; identical to SEQ ID NO: 14958
  Cyclic GFR-binding peptide
  MOD_RES (2)..(36): Xaa is C or S

SEQ ID NO: 57807 - protein, 27 aa, Artificial Sequence
  Cyclic GFR-binding peptide
QRPVQMRKIRIKPHQGQHKKATVLEEH

SEQ ID NO: 57808 - protein, 30 aa, Artificial Sequence
  Cyclic GFR-binding peptide
HHSNITVQIMEYVRKKPKLIGEMSRLEEHL

SEQ ID NO: 57809 - protein, 34 aa, Artificial Sequence; identical to SEQ ID NO: 14961
  Cyclic GFR-binding peptide
  MOD_RES (1)..(1): Xaa is C or S

SEQ ID NO: 57810 - protein, 32 aa, Artificial Sequence
  Cyclic GFR-binding peptide
  MOD_RES (1)..(1): Xaa is C or S
XRPTQVQLSNITVQIMEIVRKKPIFIGEMSTL

SEQ ID NO: 57811 - protein, 37 aa, Artificial Sequence; identical to SEQ ID NO: 14964
  Cyclic GFR-binding peptide
  MOD_RES (5)..(5): Xaa is C or S

SEQ ID NO: 57812 - protein, 33 aa, Artificial Sequence
  Cyclic GFR-binding peptide
  MOD_RES (1)..(1): Xaa is C or S
XRPTQVQLSNITVQIMEIVRKKPIFLGEMSTLE

SEQ ID NO: 57813 - protein, 32 aa, Artificial Sequence
  Cyclic GFR-binding peptide
  MOD_RES (32)..(32): Xaa is C or S
TGQRPVQMRKIRIKPHQGQHKKATVLEEHSQX

SEQ ID NO: 57814 - protein, 38 aa, Artificial Sequence; identical to SEQ ID NO: 14966
  Cyclic GFR-binding peptide
  MOD_RES (35)..(37): Xaa is C or S

SEQ ID NO: 57815 - protein, 30 aa, Artificial Sequence
  Cyclic GFR-binding peptide
  MOD_RES (3)..(3): Xaa is C or S
LEXVPTGQSNITMQIMRIKPHQGQHIGEMS

SEQ ID NO: 57816 - protein, 29 aa, Artificial Sequence
  Cyclic GFR-binding peptide
ESNITMQIMRIKPHQGQHLGEMSFLQHNK

SEQ ID NO: 57817 - protein, 32 aa, Artificial Sequence; identical to SEQ ID NO: 1113
  Cyclic GFR-binding peptide

SEQ ID NO: 57818 - protein, 38 aa, Artificial Sequence; identical to SEQ ID NO: 14970
  Cyclic GFR-binding peptide
  MOD_RES (2)..(36)..(38): Xaa is C or S

SEQ ID NO: 57819 - protein, 35 aa, Artificial Sequence
  Cyclic GFR-binding peptide
  MOD_RES (32)..(34): Xaa is C or S
TGQSNITMQIMRIKPHQGQHIGEMSLEEHSQXEXR

SEQ ID NO: 57820 - protein, 39 aa, Artificial Sequence; identical to SEQ ID NO: 14971
  Cyclic GFR-binding peptide
  MOD_RES (3)..(3): Xaa is C or S

SEQ ID NO: 57821 - protein, 27 aa, Artificial Sequence
  Cyclic GFR-binding peptide
TEERPVQMRKIRIKPHQGQHKKATVFL

SEQ ID NO: 57822 - protein, 36 aa, Artificial Sequence; identical to SEQ ID NO: 14973
  Cyclic GFR-binding peptide
  MOD_RES (4)..(4): Xaa is C or S

SEQ ID NO: 57823 - protein, 33 aa, Artificial Sequence
  Cyclic GFR-binding peptide
  MOD_RES (4)..(4): Xaa is C or S
GLEXVPTGQRPVQMRKIRIKPHQGQHKKATVLE

SEQ ID NO: 57824 - protein, 25 aa, Artificial Sequence
  Cyclic GFR-binding peptide
QLSNITVQIMEIVRKKPIFIGEMST

SEQ ID NO: 57825 - protein, 28 aa, Artificial Sequence
  Cyclic GFR-binding peptide
VPTGQRPVQMRKIRIKPHQGQHKKATVL

SEQ ID NO: 57826 - protein, 31 aa, Artificial Sequence
  Cyclic GFR-binding peptide
SRVHHRPVQVRKIEYVRKKPKLKKATVRLEE

SEQ ID NO: 57827 - protein, 37 aa, Artificial Sequence; identical to SEQ ID NO: 14975
  Cyclic GFR-binding peptide
  MOD_RES (1)..(35)..(37): Xaa is C or S

SEQ ID NO: 57828 - protein, 39 aa, Artificial Sequence; identical to SEQ ID NO: 14977
  Cyclic GFR-binding peptide
  MOD_RES (7)..(7): Xaa is C or S

SEQ ID NO: 57829 - protein, 36 aa, Artificial Sequence; identical to SEQ ID NO: 14978
  Cyclic GFR-binding peptide
  MOD_RES (1)..(35): Xaa is C or S

SEQ ID NO: 57830 - protein, 35 aa, Artificial Sequence
  Cyclic GFR-binding peptide
  MOD_RES (7)..(7): Xaa is C or S
NDEGLEXVPTGQRSVKMAKVRIKPHQGQHKEVQVL

SEQ ID NO: 57831 - protein, 41 aa, Artificial Sequence; identical to SEQ ID NO: 14979
  Cyclic GFR-binding peptide
  MOD_RES (7)..(41): Xaa is C or S

SEQ ID NO: 57832 - protein, 28 aa, Artificial Sequence
  Cyclic GFR-binding peptide
SNITVQIMEIVRKKPIFLGEMSTLEDHL

SEQ ID NO: 57833 - protein, 36 aa, Artificial Sequence; identical to SEQ ID NO: 14980
  Cyclic GFR-binding peptide
  MOD_RES (4)..(4): Xaa is C or S

SEQ ID NO: 57834 - protein, 33 aa, Artificial Sequence
  Cyclic GFR-binding peptide
  MOD_RES (4)..(4): Xaa is C or S
SVKXQPSRVHHSNITVQIMEYVRKKPKLLGEMS

SEQ ID NO: 57835 - protein, 29 aa, Artificial Sequence
  Cyclic GFR-binding peptide
QLSNITVQIMEIVRKKPIFLGEMSTLEDH

SEQ ID NO: 57836 - protein, 35 aa, Artificial Sequence
  Cyclic GFR-binding peptide
  MOD_RES (33)..(35): Xaa is C or S
VQLSNITVQIMEIVRKKPIFIGEMSTLEDHLAXKX

SEQ ID NO: 57837 - protein, 31 aa, Artificial Sequence
  Cyclic GFR-binding peptide
QLSNITVQIMEIVRKKPIFIGEMSTLEDHLA

SEQ ID NO: 57838 - protein, 35 aa, Artificial Sequence
  Cyclic GFR-binding peptide
  MOD_RES (32)..(34): Xaa is C or S
QLSNITVQIMEIVRKKPIFLGEMSTLEDHLAXKXE

SEQ ID NO: 57839 - protein, 43 aa, Artificial Sequence; identical to SEQ ID NO: 14987
  Cyclic GFR-binding peptide
  MOD_RES (5)..(42): Xaa is C or S

SEQ ID NO: 57840 - protein, 30 aa, Artificial Sequence
  Cyclic GFR-binding peptide
TQVQLSNITVQIMEIVRKKPIFLGEMSTLE

SEQ ID NO: 57841 - protein, 35 aa, Artificial Sequence
  Cyclic GFR-binding peptide
  MOD_RES (33)..(35): Xaa is C or S
VQLSNITVQIMEIVRKKPIFLGEMSTLEDHLAXKX

SEQ ID NO: 57842 - protein, 32 aa, Artificial Sequence
  Cyclic GFR-binding peptide
  MOD_RES (29)..(31): Xaa is C or S
SNITMQIMRIKPHQGQHIGEMSLEEHSQXEXR

SEQ ID NO: 57843 - protein, 37 aa, Artificial Sequence; identical to SEQ ID NO: 14988
  Cyclic GFR-binding peptide
  MOD_RES (4)..(4): Xaa is C or S

SEQ ID NO: 57844 - protein, 37 aa, Artificial Sequence; identical to SEQ ID NO: 14989
  Cyclic GFR-binding peptide
  MOD_RES (1)..(35)..(37): Xaa is C or S

SEQ ID NO: 57845 - protein, 33 aa, Artificial Sequence
  Cyclic GFR-binding peptide
  MOD_RES (33)..(33): Xaa is C or S
PTGQSNITMQIMRIKPHQGQHIGEMSLEEHSQX

SEQ ID NO: 57846 - protein, 25 aa, Artificial Sequence
  Cyclic GFR-binding peptide
QRPVQMRKIRIKPHQGQHKKATVLE

SEQ ID NO: 57847 - protein, 38 aa, Artificial Sequence; identical to SEQ ID NO: 14990
  Cyclic GFR-binding peptide
  MOD_RES (37)..(37): Xaa is C or S

SEQ ID NO: 57848 - protein, 41 aa, Artificial Sequence; identical to SEQ ID NO: 14991
  Cyclic GFR-binding peptide
  MOD_RES (1)..(38)..(40): Xaa is C or S

SEQ ID NO: 57849 - protein, 39 aa, Artificial Sequence; identical to SEQ ID NO: 14992
  Cyclic GFR-binding peptide
  MOD_RES (36)..(38): Xaa is C or S

SEQ ID NO: 57850 - protein, 37 aa, Artificial Sequence; identical to SEQ ID NO: 14993
  Cyclic GFR-binding peptide
  MOD_RES (34)..(36): Xaa is C or S

SEQ ID NO: 57851 - protein, 28 aa, Artificial Sequence
  Cyclic GFR-binding peptide
PTQVQLRSVKVAKVEIVRKKPIFKEVQV

SEQ ID NO: 57852 - protein, 33 aa, Artificial Sequence
  Cyclic GFR-binding peptide
  MOD_RES (1)..(1): Xaa is C or S
XQPSRVHHSNITVQIMEYVRKKPKLIGEMSRLE

SEQ ID NO: 57853 - protein, 44 aa, Artificial Sequence; identical to SEQ ID NO: 14995
  Cyclic GFR-binding peptide
  MOD_RES (7)..(41)..(43): Xaa is C or S

SEQ ID NO: 57854 - protein, 41 aa, Artificial Sequence; identical to SEQ ID NO: 14996
  Cyclic GFR-binding peptide
  MOD_RES (4)..(38)..(40): Xaa is C or S

SEQ ID NO: 57855 - protein, 29 aa, Artificial Sequence
  Cyclic GFR-binding peptide
LRSVKVAKVEIVRKKPIFKEVQVTLEDHL

SEQ ID NO: 57856 - protein, 33 aa, Artificial Sequence
  Cyclic GFR-binding peptide
  MOD_RES (33)..(33): Xaa is C or S
PTGQRPVQMRKIRIKPHQGQHKKATVLEEHSQX

SEQ ID NO: 57857 - protein, 35 aa, Artificial Sequence; identical to SEQ ID NO: 14999
  Cyclic GFR-binding peptide
  MOD_RES (1)..(35): Xaa is C or S

SEQ ID NO: 57858 - protein, 37 aa, Artificial Sequence; identical to SEQ ID NO: 15000
  Cyclic GFR-binding peptide
  MOD_RES (37)..(37): Xaa is C or S

SEQ ID NO: 57859 - protein, 35 aa, Artificial Sequence
  Cyclic GFR-binding peptide
  MOD_RES (4)..(4): Xaa is C or S
SVKXQPSRVHHSNITVQIMEYVRKKPKLLGEMSRL

SEQ ID NO: 57860 - protein, 35 aa, Artificial Sequence
  Cyclic GFR-binding peptide
  MOD_RES (2)..(2): Xaa is C or S
KXQPSRVHHSNITVQIMEYVRKKPKLIGEMSRLEE

SEQ ID NO: 57861 - protein, 40 aa, Artificial Sequence; identical to SEQ ID NO: 15002
  Cyclic GFR-binding peptide
  MOD_RES (1)..(38)..(40): Xaa is C or S

SEQ ID NO: 57862 - protein, 25 aa, Artificial Sequence
  Cyclic GFR-binding peptide
SNITVQIMEIVRKKPIFIGEMSTLE

SEQ ID NO: 57863 - protein, 33 aa, Artificial Sequence
  Cyclic GFR-binding peptide
  MOD_RES (32)..(32): Xaa is C or S
QLSNITVQIMEIVRKKPIFIGEMSTLEDHLAXK

SEQ ID NO: 57864 - protein, 35 aa, Artificial Sequence
  Cyclic GFR-binding peptide
  MOD_RES (33)..(35): Xaa is C or S
VHHRPVQVRKIEYVRKKPKLKKATVRLEEHLEXAX

SEQ ID NO: 57865 - protein, 39 aa, Artificial Sequence; identical to SEQ ID NO: 15010
  Cyclic GFR-binding peptide
  MOD_RES (37)..(39): Xaa is C or S

SEQ ID NO: 57866 - protein, 32 aa, Artificial Sequence
  Cyclic GFR-binding peptide
  MOD_RES (30)..(32): Xaa is C or S
QRSVKMAKVRIKPHQGQHKEVQVLEEHSQXEX

SEQ ID NO: 57867 - protein, 32 aa, Artificial Sequence
  Cyclic GFR-binding peptide
  MOD_RES (31)..(31): Xaa is C or S
GQSNITMQIMRIKPHQGQHIGEMSLEEHSQXE

SEQ ID NO: 57868 - protein, 38 aa, Artificial Sequence; identical to SEQ ID NO: 15011
  Cyclic GFR-binding peptide
  MOD_RES (4)..(4): Xaa is C or S

SEQ ID NO: 57869 - protein, 29 aa, Artificial Sequence
  Cyclic GFR-binding peptide
EESNITMQIMRIKPHQGQHLGEMSFLQHN

SEQ ID NO: 57870 - protein, 37 aa, Artificial Sequence; identical to SEQ ID NO: 15012
  Cyclic GFR-binding peptide
  MOD_RES (5)..(5): Xaa is C or S

SEQ ID NO: 57871 - protein, 40 aa, Artificial Sequence; identical to SEQ ID NO: 15013
  Cyclic GFR-binding peptide
  MOD_RES (3)..(37)..(39): Xaa is C or S

SEQ ID NO: 57872 - protein, 32 aa, Artificial Sequence
  Cyclic GFR-binding peptide
  MOD_RES (30)..(32): Xaa is C or S
SNITVQIMEYVRKKPKLIGEMSRLEEHLEXAX

SEQ ID NO: 57873 - protein, 29 aa, Artificial Sequence
  Cyclic GFR-binding peptide
  MOD_RES (29)..(29): Xaa is C or S
RPVQMRKIRIKPHQGQHKKATVLEEHSQX

SEQ ID NO: 57874 - protein, 27 aa, Artificial Sequence
  Cyclic GFR-binding peptide
EERPVQMRKIRIKPHQGQHKKATVFLQ

SEQ ID NO: 57875 - protein, 32 aa, Artificial Sequence
  Cyclic GFR-binding peptide
  MOD_RES (1)..(1): Xaa is C or S
XQPSRVHHRPVQVRKIEYVRKKPKLKKATVRL

SEQ ID NO: 57876 - protein, 33 aa, Artificial Sequence
  Cyclic GFR-binding peptide
  MOD_RES (6)..(6): Xaa is C or S
DEGLEXVPTGQRPVQMRKIRIKPHQGQHKKATV

SEQ ID NO: 57877 - protein, 33 aa, Artificial Sequence
  Cyclic GFR-binding peptide
RVHHSNITVQIMEYVRKKPKLLGEMSRLEEHLE

SEQ ID NO: 57878 - protein, 36 aa, Artificial Sequence; identical to SEQ ID NO: 15016
  Cyclic GFR-binding peptide
  MOD_RES (36)..(36): Xaa is C or S

SEQ ID NO: 57879 - protein, 32 aa, Artificial Sequence
  Cyclic GFR-binding peptide
  MOD_RES (4)..(4): Xaa is C or S
GLEXVPTEERSVKMAKVRIKPHQGQHKEVQVF

SEQ ID NO: 57880 - protein, 39 aa, Artificial Sequence; identical to SEQ ID NO: 15018
  Cyclic GFR-binding peptide
  MOD_RES (36)..(38): Xaa is C or S

SEQ ID NO: 57881 - protein, 41 aa, Artificial Sequence; identical to SEQ ID NO: 15019
  Cyclic GFR-binding peptide
  MOD_RES (5)..(5): Xaa is C or S

SEQ ID NO: 57882 - protein, 42 aa, Artificial Sequence; identical to SEQ ID NO: 15020
  Cyclic GFR-binding peptide
  MOD_RES (5)..(39)..(41): Xaa is C or S

SEQ ID NO: 57883 - protein, 39 aa, Artificial Sequence; identical to SEQ ID NO: 15021
  Cyclic GFR-binding peptide
  MOD_RES (2)..(39): Xaa is C or S

SEQ ID NO: 57884 - protein, 32 aa, Artificial Sequence; identical to SEQ ID NO: 1132
  Cyclic GFR-binding peptide

SEQ ID NO: 57885 - protein, 36 aa, Artificial Sequence; identical to SEQ ID NO: 15024
  Cyclic GFR-binding peptide
  MOD_RES (35)..(35): Xaa is C or S

SEQ ID NO: 57886 - protein, 34 aa, Artificial Sequence
  Cyclic GFR-binding peptide
  MOD_RES (3)..(3): Xaa is C or S
VKXQPSRVHHRPVQVRKIEYVRKKPKLKKATVRL

SEQ ID NO: 57887 - protein, 29 aa, Artificial Sequence
  Cyclic GFR-binding peptide
  MOD_RES (1)..(1): Xaa is C or S
XVPTGQRPVQMRKIRIKPHQGQHKKATVL

SEQ ID NO: 57888 - protein, 43 aa, Artificial Sequence; identical to SEQ ID NO: 15027
  Cyclic GFR-binding peptide
  MOD_RES (7)..(41)..(43): Xaa is C or S

SEQ ID NO: 57889 - protein, 38 aa, Artificial Sequence; identical to SEQ ID NO: 15028
  Cyclic GFR-binding peptide
  MOD_RES (4)..(4): Xaa is C or S

SEQ ID NO: 57890 - protein, 32 aa, Artificial Sequence
  Cyclic GFR-binding peptide
  MOD_RES (30)..(32): Xaa is C or S
RPVQVRKIEYVRKKPKLKKATVRLEEHLEXAX

SEQ ID NO: 57891 - protein, 25 aa, Artificial Sequence
  Cyclic GFR-binding peptide
SNITVQIMEYVRKKPKLLGEMSRLE

SEQ ID NO: 57892 - protein, 34 aa, Artificial Sequence
  Cyclic GFR-binding peptide
  MOD_RES (32)..(34): Xaa is C or S
HHSNITVQIMEYVRKKPKLLGEMSRLEEHLEXAX

SEQ ID NO: 57893 - protein, 34 aa, Artificial Sequence
  Cyclic GFR-binding peptide
  MOD_RES (31)..(33): Xaa is C or S
EERPVQMRKIRIKPHQGQHKKATVFLQHNKXEXR

SEQ ID NO: 57894 - protein, 29 aa, Artificial Sequence
  Cyclic GFR-binding peptide
  MOD_RES (29)..(29): Xaa is C or S
RPVQMRKIRIKPHQGQHKKATVFLQHNKX

SEQ ID NO: 57895 - protein, 32 aa, Artificial Sequence; identical to SEQ ID NO: 15030
  Cyclic GFR-binding peptide

SEQ ID NO: 57896 - protein, 34 aa, Artificial Sequence
  Cyclic GFR-binding peptide
  MOD_RES (6)..(6): Xaa is C or S
DEGLEXVPTGQSNITMQIMRIKPHQGQHIGEMSL

SEQ ID NO: 57897 - protein, 29 aa, Artificial Sequence
  Cyclic GFR-binding peptide
GQSNITMQIMRIKPHQGQHIGEMSLEEHS

SEQ ID NO: 57898 - protein, 39 aa, Artificial Sequence; identical to SEQ ID NO: 15032
  Cyclic GFR-binding peptide
  MOD_RES (7)..(7): Xaa is C or S

SEQ ID NO: 57899 - protein, 37 aa, Artificial Sequence; identical to SEQ ID NO: 15033
  Cyclic GFR-binding peptide
  MOD_RES (2)..(36): Xaa is C or S

SEQ ID NO: 57900 - protein, 32 aa, Artificial Sequence
  Cyclic GFR-binding peptide
RVHHSNITVQIMEYVRKKPKLIGEMSRLEEHL

SEQ ID NO: 57901 - protein, 31 aa, Artificial Sequence
  Cyclic GFR-binding peptide
QVQLRSVKVAKVEIVRKKPIFKEVQVTLEDH

SEQ ID NO: 57902 - protein, 25 aa, Artificial Sequence
  Cyclic GFR-binding peptide
ERPVQMRKIRIKPHQGQHKKATVFL

SEQ ID NO: 57903 - protein, 34 aa, Artificial Sequence
  Cyclic GFR-binding peptide
  MOD_RES (3)..(3): Xaa is C or S
VQXRPTQVQLSNITVQIMEIVRKKPIFLGEMSTL

SEQ ID NO: 57904 - protein, 26 aa, Artificial Sequence
  Cyclic GFR-binding peptide
TEERSVKMAKVRIKPHQGQHKEVQVF

SEQ ID NO: 57905 - protein, 29 aa, Artificial Sequence
  Cyclic GFR-binding peptide
SRVHHSNITVQIMEYVRKKPKLIGEMSRL

SEQ ID NO: 57906 - protein, 26 aa, Artificial Sequence
  Cyclic GFR-binding peptide
GQSNITMQIMRIKPHQGQHIGEMSLE

SEQ ID NO: 57907 - protein, 30 aa, Artificial Sequence
  Cyclic GFR-binding peptide
  MOD_RES (29)..(29): Xaa is C or S
RSVKMAKVRIKPHQGQHKEVQVFLQHNKXE

SEQ ID NO: 57908 - protein, 28 aa, Artificial Sequence
  Cyclic GFR-binding peptide
VQLRSVKVAKVEIVRKKPIFKEVQVTLE

SEQ ID NO: 57909 - protein, 25 aa, Artificial Sequence
  Cyclic GFR-binding peptide
RPVQVRKIEYVRKKPKLKKATVRLE

SEQ ID NO: 57910 - protein, 30 aa, Artificial Sequence
  Cyclic GFR-binding peptide
PTQVQLRSVKVAKVEIVRKKPIFKEVQVTL

SEQ ID NO: 57911 - protein, 28 aa, Artificial Sequence
  Cyclic GFR-binding peptide
RPVQMRKIRIKPHQGQHKKATVLEEHSQ

SEQ ID NO: 57912 - protein, 41 aa, Artificial Sequence; identical to SEQ ID NO: 15037
  Cyclic GFR-binding peptide
  MOD_RES (2)..(39)..(41): Xaa is C or S

SEQ ID NO: 57913 - protein, 31 aa, Artificial Sequence
  Cyclic GFR-binding peptide
  MOD_RES (30)..(30): Xaa is C or S
QSNITMQIMRIKPHQGQHIGEMSLEEHSQXE

SEQ ID NO: 57914 - protein, 32 aa, Artificial Sequence
  Cyclic GFR-binding peptide
  MOD_RES (5)..(5): Xaa is C or S
EGLEXVPTEERPVQMRKIRIKPHQGQHKKATV

SEQ ID NO: 57915 - protein, 41 aa, Artificial Sequence; identical to SEQ ID NO: 15040
  Cyclic GFR-binding peptide
  MOD_RES (7)..(41): Xaa is C or S

SEQ ID NO: 57916 - protein, 38 aa, Artificial Sequence; identical to SEQ ID NO: 15041
  Cyclic GFR-binding peptide
  MOD_RES (35)..(37): Xaa is C or S

SEQ ID NO: 57917 - protein, 32 aa, Artificial Sequence
  Cyclic GFR-binding peptide
  MOD_RES (1)..(1): Xaa is C or S
XVPTGQRPVQMRKIRIKPHQGQHKKATVLEEH

SEQ ID NO: 57918 - protein, 37 aa, Artificial Sequence; identical to SEQ ID NO: 15046
  Cyclic GFR-binding peptide
  MOD_RES (35)..(37): Xaa is C or S

SEQ ID NO: 57919 - protein, 37 aa, Artificial Sequence; identical to SEQ ID NO: 15047
  Cyclic GFR-binding peptide
  MOD_RES (5)..(5): Xaa is C or S

SEQ ID NO: 57920 - protein, 28 aa, Artificial Sequence
  Cyclic GFR-binding peptide
QRSVKMAKVRIKPHQGQHKEVQVLEEHS

SEQ ID NO: 57921 - protein, 30 aa, Artificial Sequence
  Cyclic GFR-binding peptide
HSNITVQIMEYVRKKPKLLGEMSRLEEHLE

SEQ ID NO: 57922 - protein, 23 aa, Artificial Sequence
  Cyclic GFR-binding peptide
HRPVQVRKIEYVRKKPKLKKATV

SEQ ID NO: 57923 - protein, 41 aa, Artificial Sequence; identical to SEQ ID NO: 15049
  Cyclic GFR-binding peptide
  MOD_RES (7)..(41): Xaa is C or S

SEQ ID NO: 57924 - protein, 43 aa, Artificial Sequence; identical to SEQ ID NO: 15050
  Cyclic GFR-binding peptide
  MOD_RES (6)..(40)..(42): Xaa is C or S

SEQ ID NO: 57925 - protein, 36 aa, Artificial Sequence; identical to SEQ ID NO: 15051
  Cyclic GFR-binding peptide
  MOD_RES (35)..(35): Xaa is C or S

SEQ ID NO: 57926 - protein, 36 aa, Artificial Sequence; identical to SEQ ID NO: 15052
  Cyclic GFR-binding peptide
  MOD_RES (3)..(3): Xaa is C or S

SEQ ID NO: 57927 - protein, 33 aa, Artificial Sequence; identical to SEQ ID NO: 15053
  Cyclic GFR-binding peptide
  MOD_RES (1)..(1): Xaa is C or S

SEQ ID NO: 57928 - protein, 30 aa, Artificial Sequence
  Cyclic GFR-binding peptide
SRVHHSNITVQIMEYVRKKPKLLGEMSRLE

SEQ ID NO: 57929 - protein, 35 aa, Artificial Sequence
  Cyclic GFR-binding peptide
  MOD_RES (6)..(6): Xaa is C or S
DEGLEXVPTEESNITMQIMRIKPHQGQHLGEMSFL

SEQ ID NO: 57930 - protein, 32 aa, Artificial Sequence; identical to SEQ ID NO: 15056
  Cyclic GFR-binding peptide

SEQ ID NO: 57931 - protein, 28 aa, Artificial Sequence
  Cyclic GFR-binding peptide
QVQLRSVKVAKVEIVRKKPIFKEVQVTL

SEQ ID NO: 57932 - protein, 38 aa, Artificial Sequence; identical to SEQ ID NO: 15059
  Cyclic GFR-binding peptide
  MOD_RES (2)..(2): Xaa is C or S

SEQ ID NO: 57933 - protein, 36 aa, Artificial Sequence
  Cyclic GFR-binding peptide
  MOD_RES (34)..(36): Xaa is C or S
QVQLRSVKVAKVEIVRKKPIFKEVQVTLEDHLAXKX

SEQ ID NO: 57934 - protein, 39 aa, Artificial Sequence; identical to SEQ ID NO: 15061
  Cyclic GFR-binding peptide
  MOD_RES (5)..(39): Xaa is C or S

SEQ ID NO: 57935 - protein, 33 aa, Artificial Sequence; identical to SEQ ID NO: 15062
  Cyclic GFR-binding peptide
  MOD_RES (1)..(1): Xaa is C or S

SEQ ID NO: 57936 - protein, 38 aa, Artificial Sequence
  Cyclic GFR-binding peptide
  MOD_RES (5)..(5): Xaa is C or S
RNVQXRPTQVQLSNITVQIMEIVRKKPIFIGEMSTLED

SEQ ID NO: 57937 - protein, 34 aa, Artificial Sequence
  Cyclic GFR-binding peptide
  MOD_RES (5)..(5): Xaa is C or S
RNVQXRPTQVQLSNITVQIMEIVRKKPIFIGEMS

SEQ ID NO: 57938 - protein, 33 aa, Artificial Sequence
  Cyclic GFR-binding peptide
  MOD_RES (4)..(4): Xaa is C or S
GLEXVPTEERSVKMAKVRIKPHQGQHKEVQVFL

SEQ ID NO: 57939 - protein, 28 aa, Artificial Sequence
  Cyclic GFR-binding peptide
QRPVQMRKIRIKPHQGQHKKATVLEEHS

SEQ ID NO: 57940 - protein, 37 aa, Artificial Sequence; identical to SEQ ID NO: 15067
  Cyclic GFR-binding peptide
  MOD_RES (35)..(37): Xaa is C or S

SEQ ID NO: 57941 - protein, 35 aa, Artificial Sequence; identical to SEQ ID NO: 15068
  Cyclic GFR-binding peptide
  MOD_RES (34)..(34): Xaa is C or S

SEQ ID NO: 57942 - protein, 44 aa, Artificial Sequence; identical to SEQ ID NO: 15069
  Cyclic GFR-binding peptide
  MOD_RES (7)..(41)..(43): Xaa is C or S

SEQ ID NO: 57943 - protein, 29 aa, Artificial Sequence
  Cyclic GFR-binding peptide
  MOD_RES (2)..(2): Xaa is C or S
EXVPTEESNITMQIMRIKPHQGQHLGEMS

SEQ ID NO: 57944 - protein, 35 aa, Artificial Sequence
  Cyclic GFR-binding peptide
  MOD_RES (5)..(5): Xaa is C or S
EGLEXVPTGQSNITMQIMRIKPHQGQHIGEMSLEE

SEQ ID NO: 57945 - protein, 34 aa, Artificial Sequence
  Cyclic GFR-binding peptide
  MOD_RES (4)..(4): Xaa is C or S
NVQXRPTQVQLSNITVQIMEIVRKKPIFIGEMST

SEQ ID NO: 57946 - protein, 35 aa, Artificial Sequence
  Cyclic GFR-binding peptide
  MOD_RES (7)..(7): Xaa is C or S
NDEGLEXVPTEESNITMQIMRIKPHQGQHLGEMSF

SEQ ID NO: 57947 - protein, 24 aa, Artificial Sequence
  Cyclic GFR-binding peptide
ERPVQMRKIRIKPHQGQHKKATVF

SEQ ID NO: 57948 - protein, 34 aa, Artificial Sequence
  Cyclic GFR-binding peptide
  MOD_RES (1)..(1): Xaa is C or S
XRPTQVQLSNITVQIMEIVRKKPIFLGEMSTLED

SEQ ID NO: 57949 - protein, 31 aa, Artificial Sequence
  Cyclic GFR-binding peptide
VHHSNITVQIMEYVRKKPKLLGEMSRLEEHL

SEQ ID NO: 57950 - protein, 32 aa, Artificial Sequence; identical to SEQ ID NO: 15073
  Cyclic GFR-binding peptide

SEQ ID NO: 57951 - protein, 38 aa, Artificial Sequence; identical to SEQ ID NO: 15075
  Cyclic GFR-binding peptide
  MOD_RES (2)..(36)..(38): Xaa is C or S

SEQ ID NO: 57952 - protein, 41 aa, Artificial Sequence; identical to SEQ ID NO: 15076
  Cyclic GFR-binding peptide
  MOD_RES (1)..(38)..(40): Xaa is C or S

SEQ ID NO: 57953 - protein, 42 aa, Artificial Sequence; identical to SEQ ID NO: 15077
  Cyclic GFR-binding peptide
  MOD_RES (6)..(40)..(42): Xaa is C or S

SEQ ID NO: 57954 - protein, 33 aa, Artificial Sequence; identical to SEQ ID NO: 15078
  Cyclic GFR-binding peptide

SEQ ID NO: 57955 - protein, 42 aa, Artificial Sequence; identical to SEQ ID NO: 15079
  Cyclic GFR-binding peptide
  MOD_RES (2)..(39)..(41): Xaa is C or S

SEQ ID NO: 57956 - protein, 32 aa, Artificial Sequence; identical to SEQ ID NO: 15081
  Cyclic GFR-binding peptide

SEQ ID NO: 57957 - protein, 39 aa, Artificial Sequence; identical to SEQ ID NO: 15082
  Cyclic GFR-binding peptide
  MOD_RES (6)..(6): Xaa is C or S

SEQ ID NO: 57958 - protein, 32 aa, Artificial Sequence
  Cyclic GFR-binding peptide
PTQVQLSNITVQIMEIVRKKPIFIGEMSTLED

SEQ ID NO: 57959 - protein, 29 aa, Artificial Sequence
  Cyclic GFR-binding peptide
TEERSVKMAKVRIKPHQGQHKEVQVFLQH

SEQ ID NO: 57960 - protein, 31 aa, Artificial Sequence
  Cyclic GFR-binding peptide
  MOD_RES (1)..(1): Xaa is C or S
XVPTEERPVQMRKIRIKPHQGQHKKATVFLQ

SEQ ID NO: 57961 - protein, 32 aa, Artificial Sequence; identical to SEQ ID NO: 15083
  Cyclic GFR-binding peptide

SEQ ID NO: 57962 - protein, 35 aa, Artificial Sequence; identical to SEQ ID NO: 15085
  Cyclic GFR-binding peptide

SEQ ID NO: 57963 - protein, 32 aa, Artificial Sequence
  Cyclic GFR-binding peptide
  MOD_RES (30)..(32): Xaa is C or S
QRPVQMRKIRIKPHQGQHKKATVLEEHSQXEX

SEQ ID NO: 57964 - protein, 28 aa, Artificial Sequence
  Cyclic GFR-binding peptide
HHSNITVQIMEYVRKKPKLIGEMSRLEE

SEQ ID NO: 57965 - protein, 33 aa, Artificial Sequence
  Cyclic GFR-binding peptide
  MOD_RES (32)..(32): Xaa is C or S
TGQRSVKMAKVRIKPHQGQHKEVQVLEEHSQXE

SEQ ID NO: 57966 - protein, 28 aa, Artificial Sequence
  Cyclic GFR-binding peptide
PSRVHHRPVQVRKIEYVRKKPKLKKATV

SEQ ID NO: 57967 - protein, 40 aa, Artificial Sequence; identical to SEQ ID NO: 15088
  Cyclic GFR-binding peptide
  MOD_RES (2)..(39): Xaa is C or S

SEQ ID NO: 57968 - protein, 29 aa, Artificial Sequence
  Cyclic GFR-binding peptide
QRPVQMRKIRIKPHQGQHKKATVLEEHSQ

SEQ ID NO: 57969 - protein, 33 aa, Artificial Sequence
  Cyclic GFR-binding peptide
  MOD_RES (33)..(33): Xaa is C or S
PTEERSVKMAKVRIKPHQGQHKEVQVFLQHNKX

SEQ ID NO: 57970 - protein, 31 aa, Artificial Sequence
  Cyclic GFR-binding peptide
  MOD_RES (3)..(3): Xaa is C or S
LEXVPTGQRPVQMRKIRIKPHQGQHKKATVL

SEQ ID NO: 57971 - protein, 27 aa, Artificial Sequence
  Cyclic GFR-binding peptide
HSNITVQIMEYVRKKPKLIGEMSRLEE

SEQ ID NO: 57972 - protein, 37 aa, Artificial Sequence; identical to SEQ ID NO: 15091
  Cyclic GFR-binding peptide
  MOD_RES (34)..(36): Xaa is C or S

SEQ ID NO: 57973 - protein, 27 aa, Artificial Sequence
  Cyclic GFR-binding peptide
SRVHHRPVQVRKIEYVRKKPKLKKATV

SEQ ID NO: 57974 - protein, 34 aa, Artificial Sequence; identical to SEQ ID NO: 15092
  Cyclic GFR-binding peptide
  MOD_RES (1)..(1): Xaa is C or S

SEQ ID NO: 57975 - protein, 37 aa, Artificial Sequence
  Cyclic GFR-binding peptide
  MOD_RES (34)..(36): Xaa is C or S
QVQLRSVKVAKVEIVRKKPIFKEVQVTLEDHLAXKXE

SEQ ID NO: 57976 - protein, 33 aa, Artificial Sequence
  Cyclic GFR-binding peptide
  MOD_RES (33)..(33): Xaa is C or S
VQLSNITVQIMEIVRKKPIFIGEMSTLEDHLAX

SEQ ID NO: 57977 - protein, 22 aa, Artificial Sequence
  Cyclic GFR-binding peptide
RSVKVAKVEIVRKKPIFKEVQV

SEQ ID NO: 57978 - protein, 30 aa, Artificial Sequence
  Cyclic GFR-binding peptide
  MOD_RES (30)..(30): Xaa is C or S
QRSVKMAKVRIKPHQGQHKEVQVLEEHSQX

SEQ ID NO: 57979 - protein, 31 aa, Artificial Sequence
  Cyclic GFR-binding peptide
VQLSNITVQIMEIVRKKPIFIGEMSTLEDHL

SEQ ID NO: 57980 - protein, 34 aa, Artificial Sequence
  Cyclic GFR-binding peptide
  MOD_RES (31)..(33): Xaa is C or S
HRPVQVRKIEYVRKKPKLKKATVRLEEHLEXAXA

SEQ ID NO: 57981 - protein, 33 aa, Artificial Sequence; identical to SEQ ID NO: 15096
  Cyclic GFR-binding peptide
  MOD_RES (1)..(1): Xaa is C or S

SEQ ID NO: 57982 - protein, 32 aa, Artificial Sequence
  Cyclic GFR-binding peptide
QPSRVHHRPVQVRKIEYVRKKPKLKKATVRLE

SEQ ID NO: 57983 - protein, 38 aa, Artificial Sequence
  Cyclic GFR-binding peptide
  MOD_RES (7)..(7): Xaa is C or S
NDEGLEXVPTGQRPVQMRKIRIKPHQGQHKKATVLEEH

SEQ ID NO: 57984 - protein, 41 aa, Artificial Sequence; identical to SEQ ID NO: 15098
  Cyclic GFR-binding peptide
  MOD_RES (4)..(38)..(40): Xaa is C or S

SEQ ID NO: 57985 - protein, 31 aa, Artificial Sequence
  Cyclic GFR-binding peptide
VPTGQRPVQMRKIRIKPHQGQHKKATVLEEH

SEQ ID NO: 57986 - protein, 34 aa, Artificial Sequence
  Cyclic GFR-binding peptide
  MOD_RES (7)..(7): Xaa is C or S
NDEGLEXVPTEESNITMQIMRIKPHQGQHLGEMS

SEQ ID NO: 57987 - protein, 41 aa, Artificial Sequence; identical to SEQ ID NO: 15100
  Cyclic GFR-binding peptide
  MOD_RES (7)..(41): Xaa is C or S

SEQ ID NO: 57988 - protein, 36 aa, Artificial Sequence
  Cyclic GFR-binding peptide
  MOD_RES (5)..(5): Xaa is C or S
SSVKXQPSRVHHSNITVQIMEYVRKKPKLLGEMSRL

SEQ ID NO: 57989 - protein, 34 aa, Artificial Sequence
  Cyclic GFR-binding peptide
  MOD_RES (5)..(5): Xaa is C or S
EGLEXVPTEERPVQMRKIRIKPHQGQHKKATVFL

SEQ ID NO: 57990 - protein, 30 aa, Artificial Sequence
  Cyclic GFR-binding peptide
QPSRVHHRPVQVRKIEYVRKKPKLKKATVR

SEQ ID NO: 57991 - protein, 35 aa, Artificial Sequence
  Cyclic GFR-binding peptide
  MOD_RES (3)..(3): Xaa is C or S
VQXRPTQVQLRSVKVAKVEIVRKKPIFKEVQVTLE

SEQ ID NO: 57992 - protein, 29 aa, Artificial Sequence
  Cyclic GFR-binding peptide
HSNITVQIMEYVRKKPKLLGEMSRLEEHL

SEQ ID NO: 57993 - protein, 28 aa, Artificial Sequence
  Cyclic GFR-binding peptide
RSVKMAKVRIKPHQGQHKEVQVLEEHSQ

SEQ ID NO: 57994 - protein, 39 aa, Artificial Sequence; identical to SEQ ID NO: 15102
  Cyclic GFR-binding peptide
  MOD_RES (36)..(38): Xaa is C or S

SEQ ID NO: 57995 - protein, 33 aa, Artificial Sequence
  Cyclic GFR-binding peptide
  MOD_RES (30)..(32): Xaa is C or S
SNITVQIMEYVRKKPKLIGEMSRLEEHLEXAXA

SEQ ID NO: 57996 - protein, 34 aa, Artificial Sequence
  Cyclic GFR-binding peptide
  MOD_RES (7)..(7): Xaa is C or S
NDEGLEXVPTGQRSVKMAKVRIKPHQGQHKEVQV

SEQ ID NO: 57997 - protein, 32 aa, Artificial Sequence
  Cyclic GFR-binding peptide
  MOD_RES (29)..(31): Xaa is C or S
RSVKMAKVRIKPHQGQHKEVQVLEEHSQXEXR

SEQ ID NO: 57998 - protein, 40 aa, Artificial Sequence; identical to SEQ ID NO: 15104
  Cyclic GFR-binding peptide
  MOD_RES (4)..(38)..(40): Xaa is C or S

SEQ ID NO: 57999 - protein, 25 aa, Artificial Sequence
  Cyclic GFR-binding peptide
EESNITMQIMRIKPHQGQHLGEMSF

SEQ ID NO: 58000 - protein, 22 aa, Artificial Sequence
  Cyclic GFR-binding peptide
SNITVQIMEIVRKKPIFIGEMS

SEQ ID NO: 58001 - protein, 30 aa, Artificial Sequence
  Cyclic GFR-binding peptide
QVQLSNITVQIMEIVRKKPIFLGEMSTLED

SEQ ID NO: 58002 - protein, 33 aa, Artificial Sequence
  Cyclic GFR-binding peptide
  MOD_RES (31)..(33): Xaa is C or S
LRSVKVAKVEIVRKKPIFKEVQVTLEDHLAXKX

SEQ ID NO: 58003 - protein, 33 aa, Artificial Sequence
  Cyclic GFR-binding peptide
  MOD_RES (2)..(2): Xaa is C or S
KXQPSRVHHSNITVQIMEYVRKKPKLLGEMSRL

SEQ ID NO: 58004 - protein, 32 aa, Artificial Sequence
  Cyclic GFR-binding peptide
  MOD_RES (30)..(32): Xaa is C or S
QSNITMQIMRIKPHQGQHIGEMSLEEHSQXEX

SEQ ID NO: 58005 - protein, 34 aa, Artificial Sequence
  Cyclic GFR-binding peptide
  MOD_RES (33)..(33): Xaa is C or S
PTGQRSVKMAKVRIKPHQGQHKEVQVLEEHSQXE

SEQ ID NO: 58006 - protein, 41 aa, Artificial Sequence; identical to SEQ ID NO: 15110
  Cyclic GFR-binding peptide
  MOD_RES (5)..(39)..(41): Xaa is C or S

SEQ ID NO: 58007 - protein, 36 aa, Artificial Sequence; identical to SEQ ID NO: 15112
  Cyclic GFR-binding peptide
  MOD_RES (1)..(1): Xaa is C or S

SEQ ID NO: 58008 - protein, 34 aa, Artificial Sequence
  Cyclic GFR-binding peptide
  MOD_RES (34)..(34): Xaa is C or S
QVQLRSVKVAKVEIVRKKPIFKEVQVTLEDHLAX

SEQ ID NO: 58009 - protein, 26 aa, Artificial Sequence
  Cyclic GFR-binding peptide
RPVQMRKIRIKPHQGQHKKATVLEEH

SEQ ID NO: 58010 - protein, 38 aa, Artificial Sequence; identical to SEQ ID NO: 15113
  Cyclic GFR-binding peptide
  MOD_RES (35)..(37): Xaa is C or S

SEQ ID NO: 58011 - protein, 30 aa, Artificial Sequence
  Cyclic GFR-binding peptide
  MOD_RES (30)..(30): Xaa is C or S
SNITVQIMEYVRKKPKLIGEMSRLEEHLEX

SEQ ID NO: 58012 - protein, 36 aa, Artificial Sequence
  Cyclic GFR-binding peptide
  MOD_RES (3)..(3): Xaa is C or S
VKXQPSRVHHRPVQVRKIEYVRKKPKLKKATVRLEE

SEQ ID NO: 58013 - protein, 26 aa, Artificial Sequence
  Cyclic GFR-binding peptide
TEESNITMQIMRIKPHQGQHLGEMSF

SEQ ID NO: 58014 - protein, 33 aa, Artificial Sequence; identical to SEQ ID NO: 15120
  Cyclic GFR-binding peptide

SEQ ID NO: 58015 - protein, 31 aa, Artificial Sequence
  Cyclic GFR-binding peptide
RVHHSNITVQIMEYVRKKPKLIGEMSRLEEH

SEQ ID NO: 58016 - protein, 29 aa, Artificial Sequence
  Cyclic GFR-binding peptide
  MOD_RES (2)..(2): Xaa is C or S
EXVPTGQRPVQMRKIRIKPHQGQHKKATV

SEQ ID NO: 58017 - protein, 31 aa, Artificial Sequence
  Cyclic GFR-binding peptide
PSRVHHSNITVQIMEYVRKKPKLIGEMSRLE

SEQ ID NO: 58018 - protein, 36 aa, Artificial Sequence; identical to SEQ ID NO: 15124
  Cyclic GFR-binding peptide
  MOD_RES (1)..(35): Xaa is C or S

SEQ ID NO: 58019 - protein, 35 aa, Artificial Sequence; identical to SEQ ID NO: 15125
  Cyclic GFR-binding peptide

SEQ ID NO: 58020 - protein, 28 aa, Artificial Sequence
  Cyclic GFR-binding peptide
TEERPVQMRKIRIKPHQGQHKKATVFLQ

SEQ ID NO: 58021 - protein, 44 aa, Artificial Sequence; identical to SEQ ID NO: 15128
  Cyclic GFR-binding peptide
  MOD_RES (7)..(41)..(43): Xaa is C or S

SEQ ID NO: 58022 - protein, 36 aa, Artificial Sequence
  Cyclic GFR-binding peptide
  MOD_RES (33)..(35): Xaa is C or S
PTEERSVKMAKVRIKPHQGQHKEVQVFLQHNKXEXR

SEQ ID NO: 58023 - protein, 26 aa, Artificial Sequence
  Cyclic GFR-binding peptide
RSVKVAKVEIVRKKPIFKEVQVTLED

SEQ ID NO: 58024 - protein, 30 aa, Artificial Sequence
  Cyclic GFR-binding peptide
  MOD_RES (1)..(1): Xaa is C or S
XVPTEERSVKMAKVRIKPHQGQHKEVQVFL

SEQ ID NO: 58025 - protein, 32 aa, Artificial Sequence
  Cyclic GFR-binding peptide
  MOD_RES (3)..(3): Xaa is C or S
VKXQPSRVHHSNITVQIMEYVRKKPKLIGEMS

SEQ ID NO: 58026 - protein, 33 aa, Artificial Sequence
  Cyclic GFR-binding peptide
  MOD_RES (4)..(4): Xaa is C or S
SVKXQPSRVHHRPVQVRKIEYVRKKPKLKKATV

SEQ ID NO: 58027 - protein, 31 aa, Artificial Sequence
  Cyclic GFR-binding peptide
  MOD_RES (30)..(30): Xaa is C or S
QRPVQMRKIRIKPHQGQHKKATVLEEHSQXE

SEQ ID NO: 58028 - protein, 34 aa, Artificial Sequence; identical to SEQ ID NO: 15133
  Cyclic GFR-binding peptide

SEQ ID NO: 58029 - protein, 37 aa, Artificial Sequence
  Cyclic GFR-binding peptide
  MOD_RES (6)..(6): Xaa is C or S
DEGLEXVPTEERSVKMAKVRIKPHQGQHKEVQVFLQH

SEQ ID NO: 58030 - protein, 36 aa, Artificial Sequence
  Cyclic GFR-binding peptide
  MOD_RES (4)..(4): Xaa is C or S
SVKXQPSRVHHRPVQVRKIEYVRKKPKLKKATVRLE

SEQ ID NO: 58031 - protein, 38 aa, Artificial Sequence; identical to SEQ ID NO: 15134
  Cyclic GFR-binding peptide
  MOD_RES (4)..(38): Xaa is C or S

SEQ ID NO: 58032 - protein, 32 aa, Artificial Sequence; identical to SEQ ID NO: 1172
  Cyclic GFR-binding peptide

SEQ ID NO: 58033 - protein, 29 aa, Artificial Sequence
  Cyclic GFR-binding peptide
QSNITMQIMRIKPHQGQHIGEMSLEEHSQ

SEQ ID NO: 58034 - protein, 32 aa, Artificial Sequence
  Cyclic GFR-binding peptide
  MOD_RES (29)..(31): Xaa is C or S
RPVQMRKIRIKPHQGQHKKATVLEEHSQXEXR

SEQ ID NO: 58035 - protein, 32 aa, Artificial Sequence
  Cyclic GFR-binding peptide
  MOD_RES (2)..(2): Xaa is C or S
EXVPTGQRSVKMAKVRIKPHQGQHKEVQVLEE

SEQ ID NO: 58036 - protein, 37 aa, Artificial Sequence
  Cyclic GFR-binding peptide
  MOD_RES (4)..(4): Xaa is C or S
NVQXRPTQVQLRSVKVAKVEIVRKKPIFKEVQVTLED

SEQ ID NO: 58037 - protein, 36 aa, Artificial Sequence
  Cyclic GFR-binding peptide
  MOD_RES (5)..(5): Xaa is C or S
RNVQXRPTQVQLSNITVQIMEIVRKKPIFIGEMSTL

SEQ ID NO: 58038 - protein, 42 aa, Artificial Sequence; identical to SEQ ID NO: 15137
  Cyclic GFR-binding peptide
  MOD_RES (3)..(40)..(42): Xaa is C or S

SEQ ID NO: 58039 - protein, 42 aa, Artificial Sequence; identical to SEQ ID NO: 15140
  Cyclic GFR-binding peptide
  MOD_RES (6)..(40)..(42): Xaa is C or S

SEQ ID NO: 58040 - protein, 25 aa, Artificial Sequence
  Cyclic GFR-binding peptide
SNITMQIMRIKPHQGQHLGEMSFLQ

SEQ ID NO: 58041 - protein, 41 aa, Artificial Sequence; identical to SEQ ID NO: 15141
  Cyclic GFR-binding peptide
  MOD_RES (5)..(5): Xaa is C or S

SEQ ID NO: 58042 - protein, 38 aa, Artificial Sequence; identical to SEQ ID NO: 15142
  Cyclic GFR-binding peptide
  MOD_RES (36)..(38): Xaa is C or S

SEQ ID NO: 58043 - protein, 24 aa, Artificial Sequence
  Cyclic GFR-binding peptide
SNITMQIMRIKPHQGQHIGEMSLE

SEQ ID NO: 58044 - protein, 36 aa, Artificial Sequence; identical to SEQ ID NO: 15143
  Cyclic GFR-binding peptide
  MOD_RES (4)..(4): Xaa is C or S

SEQ ID NO: 58045 - protein, 32 aa, Artificial Sequence
  Cyclic GFR-binding peptide
  MOD_RES (32)..(32): Xaa is C or S
TEESNITMQIMRIKPHQGQHLGEMSFLQHNKX

SEQ ID NO: 58046 - protein, 28 aa, Artificial Sequence
  Cyclic GFR-binding peptide
PTQVQLSNITVQIMEIVRKKPIFLGEMS

SEQ ID NO: 58047 - protein, 37 aa, Artificial Sequence; identical to SEQ ID NO: 15144
  Cyclic GFR-binding peptide
  MOD_RES (2)..(2): Xaa is C or S

SEQ ID NO: 58048 - protein, 25 aa, Artificial Sequence
  Cyclic GFR-binding peptide
VQLRSVKVAKVEIVRKKPIFKEVQV

SEQ ID NO: 58049 - protein, 43 aa, Artificial Sequence; identical to SEQ ID NO: 15145
  Cyclic GFR-binding peptide
  MOD_RES (4)..(41)..(43): Xaa is C or S

SEQ ID NO: 58050 - protein, 28 aa, Artificial Sequence
  Cyclic GFR-binding peptide
  MOD_RES (1)..(1): Xaa is C or S
XVPTGQRPVQMRKIRIKPHQGQHKKATV

SEQ ID NO: 58051 - protein, 25 aa, Artificial Sequence
  Cyclic GFR-binding peptide
TEERPVQMRKIRIKPHQGQHKKATV

SEQ ID NO: 58052 - protein, 23 aa, Artificial Sequence
  Cyclic GFR-binding peptide
RSVKVAKVEIVRKKPIFKEVQVT

SEQ ID NO: 58053 - protein, 32 aa, Artificial Sequence
  Cyclic GFR-binding peptide
  MOD_RES (3)..(3): Xaa is C or S
LEXVPTEERPVQMRKIRIKPHQGQHKKATVFL

SEQ ID NO: 58054 - protein, 31 aa, Artificial Sequence
  Cyclic GFR-binding peptide
  MOD_RES (30)..(30): Xaa is C or S
ERPVQMRKIRIKPHQGQHKKATVFLQHNKXE

SEQ ID NO: 58055 - protein, 29 aa, Artificial Sequence
  Cyclic GFR-binding peptide
QVQLRSVKVAKVEIVRKKPIFKEVQVTLE

SEQ ID NO: 58056 - protein, 39 aa, Artificial Sequence; identical to SEQ ID NO: 15149
  Cyclic GFR-binding peptide
  MOD_RES (3)..(3): Xaa is C or S

SEQ ID NO: 58057 - protein, 35 aa, Artificial Sequence
  Cyclic GFR-binding peptide
  MOD_RES (32)..(34): Xaa is C or S
TGQRPVQMRKIRIKPHQGQHKKATVLEEHSQXEXR

SEQ ID NO: 58058 - protein, 41 aa, Artificial Sequence; identical to SEQ ID NO: 15150
  Cyclic GFR-binding peptide
  MOD_RES (6)..(40): Xaa is C or S

SEQ ID NO: 58059 - protein, 25 aa, Artificial Sequence
  Cyclic GFR-binding peptide
VHHSNITVQIMEYVRKKPKLLGEMS

SEQ ID NO: 58060 - protein, 32 aa, Artificial Sequence
  Cyclic GFR-binding peptide
  MOD_RES (30)..(32): Xaa is C or S
ERSVKMAKVRIKPHQGQHKEVQVFLQHNKXEX

SEQ ID NO: 58061 - protein, 36 aa, Artificial Sequence; identical to SEQ ID NO: 15151
  Cyclic GFR-binding peptide
  MOD_RES (4)..(4): Xaa is C or S

SEQ ID NO: 58062 - protein, 37 aa, Artificial Sequence
  Cyclic GFR-binding peptide
  MOD_RES (7)..(7): Xaa is C or S
NDEGLEXVPTGQRSVKMAKVRIKPHQGQHKEVQVLEE

SEQ ID NO: 58063 - protein, 30 aa, Artificial Sequence
  Cyclic GFR-binding peptide
VPTEESNITMQIMRIKPHQGQHLGEMSFLQ

SEQ ID NO: 58064 - protein, 32 aa, Artificial Sequence
  Cyclic GFR-binding peptide
PTGQRPVQMRKIRIKPHQGQHKKATVLEEHSQ

SEQ ID NO: 58065 - protein, 38 aa, Artificial Sequence; identical to SEQ ID NO: 15154
  Cyclic GFR-binding peptide
  MOD_RES (2)..(36)..(38): Xaa is C or S

SEQ ID NO: 58066 - protein, 29 aa, Artificial Sequence
  Cyclic GFR-binding peptide
VPTGQRPVQMRKIRIKPHQGQHKKATVLE

SEQ ID NO: 58067 - protein, 32 aa, Artificial Sequence
  Cyclic GFR-binding peptide
  MOD_RES (30)..(32): Xaa is C or S
ESNITMQIMRIKPHQGQHLGEMSFLQHNKXEX

SEQ ID NO: 58068 - protein, 33 aa, Artificial Sequence
  Cyclic GFR-binding peptide
  MOD_RES (1)..(1): Xaa is C or S
XQPSRVHHRPVQVRKIEYVRKKPKLKKATVRLE

SEQ ID NO: 58069 - protein, 27 aa, Artificial Sequence
  Cyclic GFR-binding peptide
TQVQLRSVKVAKVEIVRKKPIFKEVQV

SEQ ID NO: 58070 - protein, 34 aa, Artificial Sequence; identical to SEQ ID NO: 15156
  Cyclic GFR-binding peptide
  MOD_RES (34)..(34): Xaa is C or S

SEQ ID NO: 58071 - protein, 31 aa, Artificial Sequence
  Cyclic GFR-binding peptide
  MOD_RES (4)..(4): Xaa is C or S
GLEXVPTGQRSVKMAKVRIKPHQGQHKEVQV

SEQ ID NO: 58072 - protein, 32 aa, Artificial Sequence
  Cyclic GFR-binding peptide
  MOD_RES (2)..(2): Xaa is C or S
QXRPTQVQLRSVKVAKVEIVRKKPIFKEVQVT

SEQ ID NO: 58073 - protein, 37 aa, Artificial Sequence; identical to SEQ ID NO: 15157
  Cyclic GFR-binding peptide
  MOD_RES (2)..(2): Xaa is C or S

SEQ ID NO: 58074 - protein, 36 aa, Artificial Sequence; identical to SEQ ID NO: 15158
  Cyclic GFR-binding peptide

SEQ ID NO: 58075 - protein, 44 aa, Artificial Sequence; identical to SEQ ID NO: 15159
  Cyclic GFR-binding peptide
  MOD_RES (4)..(41)..(43): Xaa is C or S

SEQ ID NO: 58076 - protein, 32 aa, Artificial Sequence
  Cyclic GFR-binding peptide
  MOD_RES (29)..(31): Xaa is C or S
RPVQMRKIRIKPHQGQHKKATVFLQHNKXEXR

SEQ ID NO: 58077 - protein, 28 aa, Artificial Sequence
  Cyclic GFR-binding peptide
GQRSVKMAKVRIKPHQGQHKEVQVLEEH

SEQ ID NO: 58078 - protein, 36 aa, Artificial Sequence; identical to SEQ ID NO: 15160
  Cyclic GFR-binding peptide
  MOD_RES (4)..(4): Xaa is C or S

SEQ ID NO: 58079 - protein, 33 aa, Artificial Sequence
  Cyclic GFR-binding peptide
RPTQVQLSNITVQIMEIVRKKPIFLGEMSTLED

SEQ ID NO: 58080 - protein, 32 aa, Artificial Sequence
  Cyclic GFR-binding peptide
PTGQSNITMQIMRIKPHQGQHIGEMSLEEHSQ

SEQ ID NO: 58081 - protein, 30 aa, Artificial Sequence
  Cyclic GFR-binding peptide
  MOD_RES (30)..(30): Xaa is C or S
RPVQVRKIEYVRKKPKLKKATVRLEEHLEX

SEQ ID NO: 58082 - protein, 34 aa, Artificial Sequence
  Cyclic GFR-binding peptide
  MOD_RES (33)..(33): Xaa is C or S
VHHSNITVQIMEYVRKKPKLIGEMSRLEEHLEXA

SEQ ID NO: 58083 - protein, 40 aa, Artificial Sequence; identical to SEQ ID NO: 15161
  Cyclic GFR-binding peptide
  MOD_RES (3)..(37)..(39): Xaa is C or S

SEQ ID NO: 58084 - protein, 34 aa, Artificial Sequence
  Cyclic GFR-binding peptide
  MOD_RES (3)..(3): Xaa is C or S
LEXVPTGQSNITMQIMRIKPHQGQHIGEMSLEEH

SEQ ID NO: 58085 - protein, 25 aa, Artificial Sequence
  Cyclic GFR-binding peptide
HSNITVQIMEYVRKKPKLLGEMSRL

SEQ ID NO: 58086 - protein, 24 aa, Artificial Sequence
  Cyclic GFR-binding peptide
SNITMQIMRIKPHQGQHLGEMSFL

SEQ ID NO: 58087 - protein, 37 aa, Artificial Sequence; identical to SEQ ID NO: 15163
  Cyclic GFR-binding peptide
  MOD_RES (2)..(2): Xaa is C or S

SEQ ID NO: 58088 - protein, 37 aa, Artificial Sequence; identical to SEQ ID NO: 15164
  Cyclic GFR-binding peptide
  MOD_RES (36)..(36): Xaa is C or S

SEQ ID NO: 58089 - protein, 27 aa, Artificial Sequence
  Cyclic GFR-binding peptide
VPTGQRPVQMRKIRIKPHQGQHKKATV

SEQ ID NO: 58090 - protein, 44 aa, Artificial Sequence; identical to SEQ ID NO: 15166
  Cyclic GFR-binding peptide
  MOD_RES (7)..(41)..(43): Xaa is C or S

SEQ ID NO: 58091 - protein, 36 aa, Artificial Sequence; identical to SEQ ID NO: 15168
  Cyclic GFR-binding peptide
  MOD_RES (1)..(1): Xaa is C or S

SEQ ID NO: 58092 - protein, 35 aa, Artificial Sequence; identical to SEQ ID NO: 15169
  Cyclic GFR-binding peptide
  MOD_RES (1)..(1): Xaa is C or S

SEQ ID NO: 58093 - protein, 28 aa, Artificial Sequence
  Cyclic GFR-binding peptide
QLSNITVQIMEIVRKKPIFIGEMSTLED

SEQ ID NO: 58094 - protein, 36 aa, Artificial Sequence
  Cyclic GFR-binding peptide
  MOD_RES (5)..(5): Xaa is C or S
EGLEXVPTEERPVQMRKIRIKPHQGQHKKATVFLQH

SEQ ID NO: 58095 - protein, 25 aa, Artificial Sequence
  Cyclic GFR-binding peptide
TGQRPVQMRKIRIKPHQGQHKKATV

SEQ ID NO: 58096 - protein, 35 aa, Artificial Sequence
  Cyclic GFR-binding peptide
  MOD_RES (32)..(34): Xaa is C or S
TEESNITMQIMRIKPHQGQHLGEMSFLQHNKXEXR

SEQ ID NO: 58097 - protein, 37 aa, Artificial Sequence; identical to SEQ ID NO: 15171
  Cyclic GFR-binding peptide
  MOD_RES (37)..(37): Xaa is C or S

SEQ ID NO: 58098 - protein, 27 aa, Artificial Sequence
  Cyclic GFR-binding peptide
VPTEERPVQMRKIRIKPHQGQHKKATV

SEQ ID NO: 58099 - protein, 43 aa, Artificial Sequence; identical to SEQ ID NO: 15172
  Cyclic GFR-binding peptide
  MOD_RES (3)..(40)..(42): Xaa is C or S

SEQ ID NO: 58100 - protein, 34 aa, Artificial Sequence; identical to SEQ ID NO: 15173
  Cyclic GFR-binding peptide

SEQ ID NO: 58101 - protein, 37 aa, Artificial Sequence; identical to SEQ ID NO: 15174
  Cyclic GFR-binding peptide
  MOD_RES (4)..(4): Xaa is C or S

SEQ ID NO: 58102 - protein, 34 aa, Artificial Sequence
  Cyclic GFR-binding peptide
  MOD_RES (33)..(33): Xaa is C or S
PTEERPVQMRKIRIKPHQGQHKKATVFLQHNKXE

SEQ ID NO: 58103 - protein, 37 aa, Artificial Sequence; identical to SEQ ID NO: 15175
  Cyclic GFR-binding peptide
  MOD_RES (3)..(37): Xaa is C or S

SEQ ID NO: 58104 - protein, 25 aa, Artificial Sequence
  Cyclic GFR-binding peptide
LSNITVQIMEIVRKKPIFIGEMSTL

SEQ ID NO: 58105 - protein, 37 aa, Artificial Sequence; identical to SEQ ID NO: 15176
  Cyclic GFR-binding peptide
  MOD_RES (34)..(36): Xaa is C or S

SEQ ID NO: 58106 - protein, 42 aa, Artificial Sequence; identical to SEQ ID NO: 15178
  Cyclic GFR-binding peptide
  MOD_RES (6)..(40)..(42): Xaa is C or S

SEQ ID NO: 58107 - protein, 39 aa, Artificial Sequence; identical to SEQ ID NO: 15179
  Cyclic GFR-binding peptide
  MOD_RES (37)..(39): Xaa is C or S

SEQ ID NO: 58108 - protein, 32 aa, Artificial Sequence
  Cyclic GFR-binding peptide
VHHRPVQVRKIEYVRKKPKLKKATVRLEEHLE

SEQ ID NO: 58109 - protein, 36 aa, Artificial Sequence
  Cyclic GFR-binding peptide
  MOD_RES (6)..(6): Xaa is C or S
DEGLEXVPTGQRSVKMAKVRIKPHQGQHKEVQVLEE

SEQ ID NO: 58110 - protein, 26 aa, Artificial Sequence
  Cyclic GFR-binding peptide
QRSVKMAKVRIKPHQGQHKEVQVLEE

SEQ ID NO: 58111 - protein, 35 aa, Artificial Sequence; identical to SEQ ID NO: 15180
  Cyclic GFR-binding peptide
  MOD_RES (1)..(1): Xaa is C or S

SEQ ID NO: 58112 - protein, 36 aa, Artificial Sequence; identical to SEQ ID NO: 15181
  Cyclic GFR-binding peptide
  MOD_RES (4)..(4): Xaa is C or S

SEQ ID NO: 58113 - protein, 36 aa, Artificial Sequence
  Cyclic GFR-binding peptide
  MOD_RES (3)..(3): Xaa is C or S
VKXQPSRVHHSNITVQIMEYVRKKPKLLGEMSRLEE

SEQ ID NO: 58114 - protein, 38 aa, Artificial Sequence; identical to SEQ ID NO: 15183
  Cyclic GFR-binding peptide
  MOD_RES (1)..(35)..(37): Xaa is C or S

SEQ ID NO: 58115 - protein, 34 aa, Artificial Sequence
  Cyclic GFR-binding peptide
  MOD_RES (2)..(2): Xaa is C or S
KXQPSRVHHRPVQVRKIEYVRKKPKLKKATVRLE

SEQ ID NO: 58116 - protein, 43 aa, Artificial Sequence; identical to SEQ ID NO: 15185
  Cyclic GFR-binding peptide
  MOD_RES (3)..(40)..(42): Xaa is C or S

SEQ ID NO: 58117 - protein, 29 aa, Artificial Sequence
  Cyclic GFR-binding peptide
VPTEERSVKMAKVRIKPHQGQHKEVQVFL

SEQ ID NO: 58118 - protein, 30 aa, Artificial Sequence
  Cyclic GFR-binding peptide
PTGQRSVKMAKVRIKPHQGQHKEVQVLEEH

SEQ ID NO: 58119 - protein, 38 aa, Artificial Sequence; identical to SEQ ID NO: 15186
  Cyclic GFR-binding peptide
  MOD_RES (3)..(3): Xaa is C or S

SEQ ID NO: 58120 - protein, 35 aa, Artificial Sequence; identical to SEQ ID NO: 15187
  Cyclic GFR-binding peptide

SEQ ID NO: 58121 - protein, 33 aa, Artificial Sequence
  Cyclic GFR-binding peptide
  MOD_RES (5)..(5): Xaa is C or S
EGLEXVPTGQRPVQMRKIRIKPHQGQHKKATVL

SEQ ID NO: 58122 - protein, 42 aa, Artificial Sequence; identical to SEQ ID NO: 15188
  Cyclic GFR-binding peptide
  MOD_RES (4)..(41): Xaa is C or S

SEQ ID NO: 58123 - protein, 22 aa, Artificial Sequence
  Cyclic GFR-binding peptide
RPVQMRKIRIKPHQGQHKKATV

SEQ ID NO: 58124 - protein, 34 aa, Artificial Sequence
  Cyclic GFR-binding peptide
  MOD_RES (4)..(4): Xaa is C or S
NVQXRPTQVQLSNITVQIMEIVRKKPIFLGEMST

SEQ ID NO: 58125 - protein, 39 aa, Artificial Sequence; identical to SEQ ID NO: 15190
  Cyclic GFR-binding peptide
  MOD_RES (1)..(38): Xaa is C or S

SEQ ID NO: 58126 - protein, 27 aa, Artificial Sequence
  Cyclic GFR-binding peptide
RVHHSNITVQIMEYVRKKPKLIGEMSR

SEQ ID NO: 58127 - protein, 25 aa, Artificial Sequence
  Cyclic GFR-binding peptide
HSNITVQIMEYVRKKPKLIGEMSRL

SEQ ID NO: 58128 - protein, 41 aa, Artificial Sequence; identical to SEQ ID NO: 15192
  Cyclic GFR-binding peptide
  MOD_RES (1)..(38)..(40): Xaa is C or S

SEQ ID NO: 58129 - protein, 39 aa, Artificial Sequence; identical to SEQ ID NO: 15194
  Cyclic GFR-binding peptide
  MOD_RES (1)..(38): Xaa is C or S

SEQ ID NO: 58130 - protein, 42 aa, Artificial Sequence; identical to SEQ ID NO: 15195
  Cyclic GFR-binding peptide
  MOD_RES (4)..(41): Xaa is C or S

SEQ ID NO: 58131 - protein, 33 aa, Artificial Sequence
  Cyclic GFR-binding peptide
QVQLSNITVQIMEIVRKKPIFIGEMSTLEDHLA

SEQ ID NO: 58132 - protein, 31 aa, Artificial Sequence
  Cyclic GFR-binding peptide
  MOD_RES (31)..(31): Xaa is C or S
GQSNITMQIMRIKPHQGQHIGEMSLEEHSQX

SEQ ID NO: 58133 - protein, 30 aa, Artificial Sequence
  Cyclic GFR-binding peptide
  MOD_RES (1)..(1): Xaa is C or S
XVPTGQRPVQMRKIRIKPHQGQHKKATVLE

SEQ ID NO: 58134 - protein, 33 aa, Artificial Sequence
  Cyclic GFR-binding peptide
  MOD_RES (32)..(32): Xaa is C or S
TEERPVQMRKIRIKPHQGQHKKATVFLQHNKXE

SEQ ID NO: 58135 - protein, 37 aa, Artificial Sequence; identical to SEQ ID NO: 15197
  Cyclic GFR-binding peptide
  MOD_RES (37)..(37): Xaa is C or S

SEQ ID NO: 58136 - protein, 36 aa, Artificial Sequence
  Cyclic GFR-binding peptide
  MOD_RES (5)..(5): Xaa is C or S
SSVKXQPSRVHHSNITVQIMEYVRKKPKLIGEMSRL

SEQ ID NO: 58137 - protein, 32 aa, Artificial Sequence
  Cyclic GFR-binding peptide
  MOD_RES (31)..(31): Xaa is C or S
LRSVKVAKVEIVRKKPIFKEVQVTLEDHLAXK

SEQ ID NO: 58138 - protein, 39 aa, Artificial Sequence; identical to SEQ ID NO: 15199
  Cyclic GFR-binding peptide
  MOD_RES (2)..(36)..(38): Xaa is C or S

SEQ ID NO: 58139 - protein, 31 aa, Artificial Sequence
  Cyclic GFR-binding peptide
PTQVQLSNITVQIMEIVRKKPIFIGEMSTLE

SEQ ID NO: 58140 - protein, 41 aa, Artificial Sequence; identical to SEQ ID NO: 15200
  Cyclic GFR-binding peptide
  MOD_RES (2)..(39)..(41): Xaa is C or S

SEQ ID NO: 58141 - protein, 35 aa, Artificial Sequence
  Cyclic GFR-binding peptide
  MOD_RES (5)..(5): Xaa is C or S
SSVKXQPSRVHHSNITVQIMEYVRKKPKLIGEMSR

SEQ ID NO: 58142 - protein, 34 aa, Artificial Sequence
  Cyclic GFR-binding peptide
  MOD_RES (31)..(33): Xaa is C or S
HSNITVQIMEYVRKKPKLLGEMSRLEEHLEXAXA

SEQ ID NO: 58143 - protein, 31 aa, Artificial Sequence
  Cyclic GFR-binding peptide
QPSRVHHRPVQVRKIEYVRKKPKLKKATVRL

SEQ ID NO: 58144 - protein, 33 aa, Artificial Sequence
  Cyclic GFR-binding peptide
  MOD_RES (30)..(32): Xaa is C or S
ESNITMQIMRIKPHQGQHLGEMSFLQHNKXEXR

SEQ ID NO: 58145 - protein, 27 aa, Artificial Sequence
  Cyclic GFR-binding peptide
ESNITMQIMRIKPHQGQHLGEMSFLQH

SEQ ID NO: 58146 - protein, 32 aa, Artificial Sequence
  Cyclic GFR-binding peptide
RPTQVQLRSVKVAKVEIVRKKPIFKEVQVTLE

SEQ ID NO: 58147 - protein, 32 aa, Artificial Sequence
  Cyclic GFR-binding peptide
  MOD_RES (3)..(3): Xaa is C or S
LEXVPTGQSNITMQIMRIKPHQGQHIGEMSLE

SEQ ID NO: 58148 - protein, 28 aa, Artificial Sequence
  Cyclic GFR-binding peptide
VPTEESNITMQIMRIKPHQGQHLGEMSF

SEQ ID NO: 58149 - protein, 31 aa, Artificial Sequence
  Cyclic GFR-binding peptide
QPSRVHHSNITVQIMEYVRKKPKLIGEMSRL

SEQ ID NO: 58150 - protein, 29 aa, Artificial Sequence
  Cyclic GFR-binding peptide
RPVQVRKIEYVRKKPKLKKATVRLEEHLE

SEQ ID NO: 58151 - protein, 35 aa, Artificial Sequence; identical to SEQ ID NO: 15209
  Cyclic GFR-binding peptide

SEQ ID NO: 58152 - protein, 34 aa, Artificial Sequence
  Cyclic GFR-binding peptide
  MOD_RES (7)..(7): Xaa is C or S
NDEGLEXVPTEERSVKMAKVRIKPHQGQHKEVQV

SEQ ID NO: 58153 - protein, 29 aa, Artificial Sequence
  Cyclic GFR-binding peptide
SNITVQIMEYVRKKPKLLGEMSRLEEHLE

SEQ ID NO: 58154 - protein, 22 aa, Artificial Sequence
  Cyclic GFR-binding peptide
SNITVQIMEIVRKKPIFLGEMS

SEQ ID NO: 58155 - protein, 41 aa, Artificial Sequence; identical to SEQ ID NO: 15214
  Cyclic GFR-binding peptide
  MOD_RES (5)..(39)..(41): Xaa is C or S

SEQ ID NO: 58156 - protein, 25 aa, Artificial Sequence
  Cyclic GFR-binding peptide
ERSVKMAKVRIKPHQGQHKEVQVFL

SEQ ID NO: 58157 - protein, 24 aa, Artificial Sequence
  Cyclic GFR-binding peptide
GQRSVKMAKVRIKPHQGQHKEVQV

SEQ ID NO: 58158 - protein, 32 aa, Artificial Sequence; identical to SEQ ID NO: 15216
  Cyclic GFR-binding peptide

SEQ ID NO: 58159 - protein, 36 aa, Artificial Sequence; identical to SEQ ID NO: 15217
  Cyclic GFR-binding peptide
  MOD_RES (3)..(3): Xaa is C or S

SEQ ID NO: 58160 - protein, 36 aa, Artificial Sequence
  Cyclic GFR-binding peptide
  MOD_RES (6)..(6): Xaa is C or S
DEGLEXVPTEERSVKMAKVRIKPHQGQHKEVQVFLQ

SEQ ID NO: 58161 - protein, 35 aa, Artificial Sequence
  Cyclic GFR-binding peptide
  MOD_RES (2)..(2): Xaa is C or S
QXRPTQVQLSNITVQIMEIVRKKPIFLGEMSTLED

SEQ ID NO: 58162 - protein, 32 aa, Artificial Sequence
  Cyclic GFR-binding peptide
  MOD_RES (3)..(3): Xaa is C or S
VKXQPSRVHHSNITVQIMEYVRKKPKLLGEMS

SEQ ID NO: 58163 - protein, 31 aa, Artificial Sequence
  Cyclic GFR-binding peptide
RPTQVQLSNITVQIMEIVRKKPIFLGEMSTL

SEQ ID NO: 58164 - protein, 35 aa, Artificial Sequence; identical to SEQ ID NO: 15218
  Cyclic GFR-binding peptide
  MOD_RES (2)..(2): Xaa is C or S

SEQ ID NO: 58165 - protein, 29 aa, Artificial Sequence
  Cyclic GFR-binding peptide
  MOD_RES (29)..(29): Xaa is C or S
RSVKMAKVRIKPHQGQHKEVQVFLQHNKX

SEQ ID NO: 58166 - protein, 31 aa, Artificial Sequence
  Cyclic GFR-binding peptide
  MOD_RES (2)..(2): Xaa is C or S
EXVPTGQRPVQMRKIRIKPHQGQHKKATVLE

SEQ ID NO: 58167 - protein, 36 aa, Artificial Sequence
  Cyclic GFR-binding peptide
  MOD_RES (33)..(35): Xaa is C or S
VQLRSVKVAKVEIVRKKPIFKEVQVTLEDHLAXKXE

SEQ ID NO: 58168 - protein, 28 aa, Artificial Sequence
  Cyclic GFR-binding peptide
HSNITVQIMEYVRKKPKLIGEMSRLEEH

SEQ ID NO: 58169 - protein, 43 aa, Artificial Sequence; identical to SEQ ID NO: 15222
  Cyclic GFR-binding peptide
  MOD_RES (6)..(40)..(42): Xaa is C or S

SEQ ID NO: 58170 - protein, 33 aa, Artificial Sequence; identical to SEQ ID NO: 15223
  Cyclic GFR-binding peptide

SEQ ID NO: 58171 - protein, 35 aa, Artificial Sequence
  Cyclic GFR-binding peptide
  MOD_RES (5)..(5): Xaa is C or S
EGLEXVPTEERPVQMRKIRIKPHQGQHKKATVFLQ

SEQ ID NO: 58172 - protein, 42 aa, Artificial Sequence; identical to SEQ ID NO: 15224
  Cyclic GFR-binding peptide
  MOD_RES (5)..(42): Xaa is C or S

SEQ ID NO: 58173 - protein, 36 aa, Artificial Sequence
  Cyclic GFR-binding peptide
  MOD_RES (3)..(3): Xaa is C or S
VKXQPSRVHHSNITVQIMEYVRKKPKLIGEMSRLEE

SEQ ID NO: 58174 - protein, 40 aa, Artificial Sequence; identical to SEQ ID NO: 15225
  Cyclic GFR-binding peptide
  MOD_RES (5)..(5): Xaa is C or S

SEQ ID NO: 58175 - protein, 35 aa, Artificial Sequence
  Cyclic GFR-binding peptide
  MOD_RES (32)..(34): Xaa is C or S
HHSNITVQIMEYVRKKPKLIGEMSRLEEHLEXAXA

SEQ ID NO: 58176 - protein, 27 aa, Artificial Sequence
  Cyclic GFR-binding peptide
RVHHRPVQVRKIEYVRKKPKLKKATVR

SEQ ID NO: 58177 - protein, 36 aa, Artificial Sequence
  Cyclic GFR-binding peptide
  MOD_RES (34)..(36): Xaa is C or S
QVQLSNITVQIMEIVRKKPIFIGEMSTLEDHLAXKX

SEQ ID NO: 58178 - protein, 35 aa, Artificial Sequence; identical to SEQ ID NO: 15227
  Cyclic GFR-binding peptide

SEQ ID NO: 58179 - protein, 36 aa, Artificial Sequence; identical to SEQ ID NO: 15228
  Cyclic GFR-binding peptide
  MOD_RES (2)..(2): Xaa is C or S

SEQ ID NO: 58180 - protein, 30 aa, Artificial Sequence
  Cyclic GFR-binding peptide
TGQRSVKMAKVRIKPHQGQHKEVQVLEEHS

SEQ ID NO: 58181 - protein, 34 aa, Artificial Sequence
  Cyclic GFR-binding peptide
  MOD_RES (31)..(33): Xaa is C or S
EESNITMQIMRIKPHQGQHLGEMSFLQHNKXEXR

SEQ ID NO: 58182 - protein, 30 aa, Artificial Sequence
  Cyclic GFR-binding peptide
  MOD_RES (1)..(1): Xaa is C or S
XVPTEESNITMQIMRIKPHQGQHLGEMSFL

SEQ ID NO: 58183 - protein, 41 aa, Artificial Sequence; identical to SEQ ID NO: 15230
  Cyclic GFR-binding peptide
  MOD_RES (4)..(41): Xaa is C or S

SEQ ID NO: 58184 - protein, 35 aa, Artificial Sequence; identical to SEQ ID NO: 15232
  Cyclic GFR-binding peptide

SEQ ID NO: 58185 - protein, 26 aa, Artificial Sequence
  Cyclic GFR-binding peptide
PTEERSVKMAKVRIKPHQGQHKEVQV

SEQ ID NO: 58186 - protein, 39 aa, Artificial Sequence; identical to SEQ ID NO: 15234
  Cyclic GFR-binding peptide
  MOD_RES (3)..(37)..(39): Xaa is C or S

SEQ ID NO: 58187 - protein, 33 aa, Artificial Sequence; identical to SEQ ID NO: 15235
  Cyclic GFR-binding peptide

SEQ ID NO: 58188 - protein, 37 aa, Artificial Sequence; identical to SEQ ID NO: 15236
  Cyclic GFR-binding peptide
  MOD_RES (35)..(37): Xaa is C or S

SEQ ID NO: 58189 - protein, 31 aa, Artificial Sequence
  Cyclic GFR-binding peptide
  MOD_RES (30)..(30): Xaa is C or S
ESNITMQIMRIKPHQGQHLGEMSFLQHNKXE

SEQ ID NO: 58190 - protein, 29 aa, Artificial Sequence
  Cyclic GFR-binding peptide
PSRVHHRPVQVRKIEYVRKKPKLKKATVR

SEQ ID NO: 58191 - protein, 35 aa, Artificial Sequence
  Cyclic GFR-binding peptide
  MOD_RES (2)..(2): Xaa is C or S
QXRPTQVQLSNITVQIMEIVRKKPIFIGEMSTLED

SEQ ID NO: 58192 - protein, 34 aa, Artificial Sequence
  Cyclic GFR-binding peptide
  MOD_RES (6)..(6): Xaa is C or S
DEGLEXVPTGQRPVQMRKIRIKPHQGQHKKATVL

SEQ ID NO: 58193 - protein, 38 aa, Artificial Sequence; identical to SEQ ID NO: 15240
  Cyclic GFR-binding peptide
  MOD_RES (3)..(37): Xaa is C or S

SEQ ID NO: 58194 - protein, 39 aa, Artificial Sequence; identical to SEQ ID NO: 15239
  Cyclic GFR-binding peptide
  MOD_RES (2)..(39): Xaa is C or S

SEQ ID NO: 58195 - protein, 22 aa, Artificial Sequence
  Cyclic GFR-binding peptide
SNITVQIMEYVRKKPKLIGEMS

SEQ ID NO: 58196 - protein, 37 aa, Artificial Sequence; identical to SEQ ID NO: 15241
  Cyclic GFR-binding peptide
  MOD_RES (35)..(37): Xaa is C or S

SEQ ID NO: 58197 - protein, 33 aa, Artificial Sequence
  Cyclic GFR-binding peptide
  MOD_RES (5)..(5): Xaa is C or S
EGLEXVPTEERSVKMAKVRIKPHQGQHKEVQVF

SEQ ID NO: 58198 - protein, 43 aa, Artificial Sequence; identical to SEQ ID NO: 15242
  Cyclic GFR-binding peptide
  MOD_RES (6)..(40)..(42): Xaa is C or S

SEQ ID NO: 58199 - protein, 37 aa, Artificial Sequence; identical to SEQ ID NO: 15243
  Cyclic GFR-binding peptide
  MOD_RES (1)..(1): Xaa is C or S

SEQ ID NO: 58200 - protein, 33 aa, Artificial Sequence
  Cyclic GFR-binding peptide
  MOD_RES (6)..(6): Xaa is C or S
DEGLEXVPTEERPVQMRKIRIKPHQGQHKKATV

SEQ ID NO: 58201 - protein, 35 aa, Artificial Sequence
  Cyclic GFR-binding peptide
  MOD_RES (34)..(34): Xaa is C or S
QVQLSNITVQIMEIVRKKPIFLGEMSTLEDHLAXK

SEQ ID NO: 58202 - protein, 35 aa, Artificial Sequence
  Cyclic GFR-binding peptide
  MOD_RES (6)..(6): Xaa is C or S
DEGLEXVPTGQSNITMQIMRIKPHQGQHIGEMSLE

SEQ ID NO: 58203 - protein, 30 aa, Artificial Sequence
  Cyclic GFR-binding peptide
RPTQVQLRSVKVAKVEIVRKKPIFKEVQVT

SEQ ID NO: 58204 - protein, 38 aa, Artificial Sequence; identical to SEQ ID NO: 15247
  Cyclic GFR-binding peptide
  MOD_RES (1)..(38): Xaa is C or S

SEQ ID NO: 58205 - protein, 31 aa, Artificial Sequence
  Cyclic GFR-binding peptide
TGQRPVQMRKIRIKPHQGQHKKATVLEEHSQ

SEQ ID NO: 58206 - protein, 29 aa, Artificial Sequence
  Cyclic GFR-binding peptide
  MOD_RES (1)..(1): Xaa is C or S
XVPTEERPVQMRKIRIKPHQGQHKKATVF

SEQ ID NO: 58207 - protein, 43 aa, Artificial Sequence; identical to SEQ ID NO: 15249
  Cyclic GFR-binding peptide
  MOD_RES (5)..(42): Xaa is C or S

SEQ ID NO: 58208 - protein, 25 aa, Artificial Sequence
  Cyclic GFR-binding peptide
VQLSNITVQIMEIVRKKPIFIGEMS

SEQ ID NO: 58209 - protein, 38 aa, Artificial Sequence; identical to SEQ ID NO: 15250
  Cyclic GFR-binding peptide
  MOD_RES (3)..(3): Xaa is C or S

SEQ ID NO: 58210 - protein, 34 aa, Artificial Sequence; identical to SEQ ID NO: 15252
  Cyclic GFR-binding peptide

SEQ ID NO: 58211 - protein, 26 aa, Artificial Sequence
  Cyclic GFR-binding peptide
QLSNITVQIMEIVRKKPIFIGEMSTL

SEQ ID NO: 58212 - protein, 26 aa, Artificial Sequence
  Cyclic GFR-binding peptide
RVHHRPVQVRKIEYVRKKPKLKKATV

SEQ ID NO: 58213 - protein, 28 aa, Artificial Sequence
  Cyclic GFR-binding peptide
  MOD_RES (1)..(1): Xaa is C or S
XVPTEERPVQMRKIRIKPHQGQHKKATV

SEQ ID NO: 58214 - protein, 24 aa, Artificial Sequence
  Cyclic GFR-binding peptide
RSVKMAKVRIKPHQGQHKEVQVLE

SEQ ID NO: 58215 - protein, 39 aa, Artificial Sequence; identical to SEQ ID NO: 15259
  Cyclic GFR-binding peptide
  MOD_RES (7)..(7): Xaa is C or S

SEQ ID NO: 58216 - protein, 30 aa, Artificial Sequence
  Cyclic GFR-binding peptide
  MOD_RES (1)..(1): Xaa is C or S
XRPTQVQLSNITVQIMEIVRKKPIFLGEMS

SEQ ID NO: 58217 - protein, 40 aa, Artificial Sequence; identical to SEQ ID NO: 15262
  Cyclic GFR-binding peptide
  MOD_RES (5)..(39): Xaa is C or S

SEQ ID NO: 58218 - protein, 33 aa, Artificial Sequence
  Cyclic GFR-binding peptide
  MOD_RES (2)..(2): Xaa is C or S
EXVPTGQRSVKMAKVRIKPHQGQHKEVQVLEEH

SEQ ID NO: 58219 - protein, 39 aa, Artificial Sequence; identical to SEQ ID NO: 15263
  Cyclic GFR-binding peptide
  MOD_RES (3)..(37)..(39): Xaa is C or S

SEQ ID NO: 58220 - protein, 34 aa, Artificial Sequence
  Cyclic GFR-binding peptide
  MOD_RES (33)..(33): Xaa is C or S
PTGQRPVQMRKIRIKPHQGQHKKATVLEEHSQXE

SEQ ID NO: 58221 - protein, 28 aa, Artificial Sequence
  Cyclic GFR-binding peptide
ESNITMQIMRIKPHQGQHLGEMSFLQHN

SEQ ID NO: 58222 - protein, 30 aa, Artificial Sequence
  Cyclic GFR-binding peptide
VQLSNITVQIMEIVRKKPIFLGEMSTLEDH

SEQ ID NO: 58223 - protein, 34 aa, Artificial Sequence
  Cyclic GFR-binding peptide
  MOD_RES (31)..(33): Xaa is C or S
LRSVKVAKVEIVRKKPIFKEVQVTLEDHLAXKXE

SEQ ID NO: 58224 - protein, 31 aa, Artificial Sequence
  Cyclic GFR-binding peptide
  MOD_RES (2)..(2): Xaa is C or S
KXQPSRVHHRPVQVRKIEYVRKKPKLKKATV

SEQ ID NO: 58225 - protein, 24 aa, Artificial Sequence
  Cyclic GFR-binding peptide
GQSNITMQIMRIKPHQGQHIGEMS

SEQ ID NO: 58226 - protein, 27 aa, Artificial Sequence
  Cyclic GFR-binding peptide
QVQLSNITVQIMEIVRKKPIFLGEMST

SEQ ID NO: 58227 - protein, 40 aa, Artificial Sequence; identical to SEQ ID NO: 15270
  Cyclic GFR-binding peptide
  MOD_RES (5)..(39): Xaa is C or S

SEQ ID NO: 58228 - protein, 29 aa, Artificial Sequence
  Cyclic GFR-binding peptide
EERPVQMRKIRIKPHQGQHKKATVFLQHN

SEQ ID NO: 58229 - protein, 39 aa, Artificial Sequence; identical to SEQ ID NO: 15272
  Cyclic GFR-binding peptide
  MOD_RES (3)..(37)..(39): Xaa is C or S

SEQ ID NO: 58230 - protein, 33 aa, Artificial Sequence
  Cyclic GFR-binding peptide
  MOD_RES (3)..(3): Xaa is C or S
LEXVPTGQSNITMQIMRIKPHQGQHIGEMSLEE

SEQ ID NO: 58231 - protein, 38 aa, Artificial Sequence; identical to SEQ ID NO: 15273
  Cyclic GFR-binding peptide
  MOD_RES (6)..(6): Xaa is C or S

SEQ ID NO: 58232 - protein, 33 aa, Artificial Sequence
  Cyclic GFR-binding peptide
  MOD_RES (33)..(33): Xaa is C or S
PTEERPVQMRKIRIKPHQGQHKKATVFLQHNKX

SEQ ID NO: 58233 - protein, 41 aa, Artificial Sequence; identical to SEQ ID NO: 15276
  Cyclic GFR-binding peptide
  MOD_RES (6)..(40): Xaa is C or S

SEQ ID NO: 58234 - protein, 23 aa, Artificial Sequence
  Cyclic GFR-binding peptide
SNITVQIMEYVRKKPKLLGEMSR

SEQ ID NO: 58235 - protein, 24 aa, Artificial Sequence
  Cyclic GFR-binding peptide
QLSNITVQIMEIVRKKPIFLGEMS

SEQ ID NO: 58236 - protein, 26 aa, Artificial Sequence
  Cyclic GFR-binding peptide
QSNITMQIMRIKPHQGQHIGEMSLEE

SEQ ID NO: 58237 - protein, 36 aa, Artificial Sequence; identical to SEQ ID NO: 15279
  Cyclic GFR-binding peptide
  MOD_RES (34)..(36): Xaa is C or S

SEQ ID NO: 58238 - protein, 34 aa, Artificial Sequence
  Cyclic GFR-binding peptide
  MOD_RES (3)..(3): Xaa is C or S
LEXVPTEERSVKMAKVRIKPHQGQHKEVQVFLQH

SEQ ID NO: 58239 - protein, 25 aa, Artificial Sequence
  Cyclic GFR-binding peptide
TEESNITMQIMRIKPHQGQHLGEMS

SEQ ID NO: 58240 - protein, 34 aa, Artificial Sequence
  Cyclic GFR-binding peptide
  MOD_RES (32)..(34): Xaa is C or S
TGQRSVKMAKVRIKPHQGQHKEVQVLEEHSQXEX

SEQ ID NO: 58241 - protein, 31 aa, Artificial Sequence
  Cyclic GFR-binding peptide
PSRVHHSNITVQIMEYVRKKPKLLGEMSRLE

SEQ ID NO: 58242 - protein, 27 aa, Artificial Sequence
  Cyclic GFR-binding peptide
QLSNITVQIMEIVRKKPIFLGEMSTLE

SEQ ID NO: 58243 - protein, 27 aa, Artificial Sequence
  Cyclic GFR-binding peptide
QLSNITVQIMEIVRKKPIFIGEMSTLE

SEQ ID NO: 58244 - protein, 37 aa, Artificial Sequence
  Cyclic GFR-binding peptide
  MOD_RES (6)..(6): Xaa is C or S
DEGLEXVPTGQRSVKMAKVRIKPHQGQHKEVQVLEEH

SEQ ID NO: 58245 - protein, 37 aa, Artificial Sequence; identical to SEQ ID NO: 15284
  Cyclic GFR-binding peptide
  MOD_RES (2)..(2): Xaa is C or S

SEQ ID NO: 58246 - protein, 31 aa, Artificial Sequence
  Cyclic GFR-binding peptide
  MOD_RES (31)..(31): Xaa is C or S
HSNITVQIMEYVRKKPKLIGEMSRLEEHLEX

SEQ ID NO: 58247 - protein, 30 aa, Artificial Sequence
  Cyclic GFR-binding peptide
  MOD_RES (1)..(1): Xaa is C or S
XVPTEERPVQMRKIRIKPHQGQHKKATVFL

SEQ ID NO: 58248 - protein, 35 aa, Artificial Sequence
  Cyclic GFR-binding peptide
  MOD_RES (5)..(5): Xaa is C or S
EGLEXVPTEESNITMQIMRIKPHQGQHLGEMSFLQ

SEQ ID NO: 58249 - protein, 38 aa, Artificial Sequence; identical to SEQ ID NO: 15287
  Cyclic GFR-binding peptide
  MOD_RES (2)..(2): Xaa is C or S

SEQ ID NO: 58250 - protein, 42 aa, Artificial Sequence; identical to SEQ ID NO: 15288
  Cyclic GFR-binding peptide
  MOD_RES (4)..(41): Xaa is C or S

SEQ ID NO: 58251 - protein, 25 aa, Artificial Sequence
  Cyclic GFR-binding peptide
QLRSVKVAKVEIVRKKPIFKEVQVT

SEQ ID NO: 58252 - protein, 40 aa, Artificial Sequence; identical to SEQ ID NO: 15289
  Cyclic GFR-binding peptide
  MOD_RES (5)..(39): Xaa is C or S

SEQ ID NO: 58253 - protein, 27 aa, Artificial Sequence
  Cyclic GFR-binding peptide
VQLSNITVQIMEIVRKKPIFIGEMSTL

SEQ ID NO: 58254 - protein, 36 aa, Artificial Sequence; identical to SEQ ID NO: 15290
  Cyclic GFR-binding peptide
  MOD_RES (36)..(36): Xaa is C or S

SEQ ID NO: 58255 - protein, 42 aa, Artificial Sequence; identical to SEQ ID NO: 15291
  Cyclic GFR-binding peptide
  MOD_RES (2)..(39)..(41): Xaa is C or S

SEQ ID NO: 58256 - protein, 34 aa, Artificial Sequence; identical to SEQ ID NO: 15293
  Cyclic GFR-binding peptide
  MOD_RES (1)..(1): Xaa is C or S

SEQ ID NO: 58257 - protein, 35 aa, Artificial Sequence
  Cyclic GFR-binding peptide
  MOD_RES (5)..(5): Xaa is C or S
SSVKXQPSRVHHSNITVQIMEYVRKKPKLLGEMSR

SEQ ID NO: 58258 - protein, 44 aa, Artificial Sequence; identical to SEQ ID NO: 15298
  Cyclic GFR-binding peptide
  MOD_RES (5)..(42)..(44): Xaa is C or S

SEQ ID NO: 58259 - protein, 31 aa, Artificial Sequence
  Cyclic GFR-binding peptide
QVQLSNITVQIMEIVRKKPIFLGEMSTLEDH

SEQ ID NO: 58260 - protein, 31 aa, Artificial Sequence
  Cyclic GFR-binding peptide
TEESNITMQIMRIKPHQGQHLGEMSFLQHNK

SEQ ID NO: 58261 - protein, 30 aa, Artificial Sequence
  Cyclic GFR-binding peptide
  MOD_RES (30)..(30): Xaa is C or S
RSVKVAKVEIVRKKPIFKEVQVTLEDHLAX

SEQ ID NO: 58262 - protein, 33 aa, Artificial Sequence
  Cyclic GFR-binding peptide
  MOD_RES (4)..(4): Xaa is C or S
GLEXVPTGQSNITMQIMRIKPHQGQHIGEMSLE

SEQ ID NO: 58263 - protein, 41 aa, Artificial Sequence; identical to SEQ ID NO: 15300
  Cyclic GFR-binding peptide
  MOD_RES (5)..(5): Xaa is C or S

SEQ ID NO: 58264 - protein, 34 aa, Artificial Sequence; identical to SEQ ID NO: 15301
  Cyclic GFR-binding peptide
  MOD_RES (2)..(2): Xaa is C or S

SEQ ID NO: 58265 - protein, 25 aa, Artificial Sequence
  Cyclic GFR-binding peptide
HHRPVQVRKIEYVRKKPKLKKATVR

SEQ ID NO: 58266 - protein, 39 aa, Artificial Sequence; identical to SEQ ID NO: 15303
  Cyclic GFR-binding peptide
  MOD_RES (5)..(5): Xaa is C or S

SEQ ID NO: 58267 - protein, 42 aa, Artificial Sequence; identical to SEQ ID NO: 15304
  Cyclic GFR-binding peptide
  MOD_RES (5)..(42): Xaa is C or S

SEQ ID NO: 58268 - protein, 35 aa, Artificial Sequence
  Cyclic GFR-binding peptide
  MOD_RES (7)..(7): Xaa is C or S
NDEGLEXVPTEERSVKMAKVRIKPHQGQHKEVQVF

SEQ ID NO: 58269 - protein, 25 aa, Artificial Sequence
  Cyclic GFR-binding peptide
QSNITMQIMRIKPHQGQHIGEMSLE

SEQ ID NO: 58270 - protein, 34 aa, Artificial Sequence
  Cyclic GFR-binding peptide
  MOD_RES (34)..(34): Xaa is C or S
QVQLSNITVQIMEIVRKKPIFLGEMSTLEDHLAX

SEQ ID NO: 58271 - protein, 26 aa, Artificial Sequence
  Cyclic GFR-binding peptide
SNITVQIMEIVRKKPIFIGEMSTLED

SEQ ID NO: 58272 - protein, 29 aa, Artificial Sequence
  Cyclic GFR-binding peptide
VPTEESNITMQIMRIKPHQGQHLGEMSFL

SEQ ID NO: 58273 - protein, 33 aa, Artificial Sequence
  Cyclic GFR-binding peptide
  MOD_RES (30)..(32): Xaa is C or S
QRSVKMAKVRIKPHQGQHKEVQVLEEHSQXEXR

SEQ ID NO: 58274 - protein, 37 aa, Artificial Sequence
  Cyclic GFR-binding peptide
  MOD_RES (34)..(36): Xaa is C or S
QVQLSNITVQIMEIVRKKPIFLGEMSTLEDHLAXKXE

SEQ ID NO: 58275 - protein, 35 aa, Artificial Sequence
  Cyclic GFR-binding peptide
  MOD_RES (4)..(4): Xaa is C or S
GLEXVPTEESNITMQIMRIKPHQGQHLGEMSFLQH

SEQ ID NO: 58276 - protein, 30 aa, Artificial Sequence
  Cyclic GFR-binding peptide
PSRVHHSNITVQIMEYVRKKPKLIGEMSRL

SEQ ID NO: 58277 - protein, 39 aa, Artificial Sequence; identical to SEQ ID NO: 15307
  Cyclic GFR-binding peptide
  MOD_RES (2)..(39): Xaa is C or S

SEQ ID NO: 58278 - protein, 32 aa, Artificial Sequence
  Cyclic GFR-binding peptide
  MOD_RES (32)..(32): Xaa is C or S
TEERPVQMRKIRIKPHQGQHKKATVFLQHNKX

SEQ ID NO: 58279 - protein, 37 aa, Artificial Sequence
  Cyclic GFR-binding peptide
  MOD_RES (7)..(7): Xaa is C or S
NDEGLEXVPTEERSVKMAKVRIKPHQGQHKEVQVFLQ

SEQ ID NO: 58280 - protein, 36 aa, Artificial Sequence
  Cyclic GFR-binding peptide
  MOD_RES (5)..(5): Xaa is C or S
EGLEXVPTGQRSVKMAKVRIKPHQGQHKEVQVLEEH

SEQ ID NO: 58281 - protein, 43 aa, Artificial Sequence; identical to SEQ ID NO: 15308
  Cyclic GFR-binding peptide
  MOD_RES (4)..(41)..(43): Xaa is C or S

SEQ ID NO: 58282 - protein, 34 aa, Artificial Sequence
  Cyclic GFR-binding peptide
  MOD_RES (5)..(5): Xaa is C or S
EGLEXVPTGQRSVKMAKVRIKPHQGQHKEVQVLE

SEQ ID NO: 58283 - protein, 34 aa, Artificial Sequence; identical to SEQ ID NO: 15310
  Cyclic GFR-binding peptide
  MOD_RES (34)..(34): Xaa is C or S

SEQ ID NO: 58284 - protein, 41 aa, Artificial Sequence; identical to SEQ ID NO: 15313
  Cyclic GFR-binding peptide
  MOD_RES (5)..(39)..(41): Xaa is C or S

SEQ ID NO: 58285 - protein, 39 aa, Artificial Sequence; identical to SEQ ID NO: 15314
  Cyclic GFR-binding peptide
  MOD_RES (6)..(6): Xaa is C or S

SEQ ID NO: 58286 - protein, 26 aa, Artificial Sequence
  Cyclic GFR-binding peptide
SNITMQIMRIKPHQGQHLGEMSFLQH

SEQ ID NO: 58287 - protein, 33 aa, Artificial Sequence
  Cyclic GFR-binding peptide
  MOD_RES (6)..(6): Xaa is C or S
DEGLEXVPTEESNITMQIMRIKPHQGQHLGEMS

SEQ ID NO: 58288 - protein, 39 aa, Artificial Sequence; identical to SEQ ID NO: 15315
  Cyclic GFR-binding peptide
  MOD_RES (6)..(6): Xaa is C or S

SEQ ID NO: 58289 - protein, 34 aa, Artificial Sequence
  Cyclic GFR-binding peptide
  MOD_RES (3)..(3): Xaa is C or S
LEXVPTEERPVQMRKIRIKPHQGQHKKATVFLQH

SEQ ID NO: 58290 - protein, 33 aa, Artificial Sequence
  Cyclic GFR-binding peptide
RPTQVQLRSVKVAKVEIVRKKPIFKEVQVTLED

SEQ ID NO: 58291 - protein, 36 aa, Artificial Sequence
  Cyclic GFR-binding peptide
  MOD_RES (33)..(35): Xaa is C or S
PTGQRSVKMAKVRIKPHQGQHKEVQVLEEHSQXEXR

SEQ ID NO: 58292 - protein, 38 aa, Artificial Sequence
  Cyclic GFR-binding peptide
  MOD_RES (7)..(7): Xaa is C or S
NDEGLEXVPTGQSNITMQIMRIKPHQGQHIGEMSLEEH

SEQ ID NO: 58293 - protein, 36 aa, Artificial Sequence
  Cyclic GFR-binding peptide
  MOD_RES (34)..(36): Xaa is C or S
RVHHSNITVQIMEYVRKKPKLIGEMSRLEEHLEXAX

SEQ ID NO: 58294 - protein, 33 aa, Artificial Sequence
  Cyclic GFR-binding peptide
  MOD_RES (31)..(33): Xaa is C or S
EERPVQMRKIRIKPHQGQHKKATVFLQHNKXEX

SEQ ID NO: 58295 - protein, 32 aa, Artificial Sequence
  Cyclic GFR-binding peptide
  MOD_RES (31)..(31): Xaa is C or S
EERSVKMAKVRIKPHQGQHKEVQVFLQHNKXE

SEQ ID NO: 58296 - protein, 22 aa, Artificial Sequence
  Cyclic GFR-binding peptide
SNITMQIMRIKPHQGQHLGEMS

SEQ ID NO: 58297 - protein, 36 aa, Artificial Sequence
  Cyclic GFR-binding peptide
  MOD_RES (33)..(35): Xaa is C or S
VQLSNITVQIMEIVRKKPIFLGEMSTLEDHLAXKXE

SEQ ID NO: 58298 - protein, 27 aa, Artificial Sequence
  Cyclic GFR-binding peptide
VPTEERSVKMAKVRIKPHQGQHKEVQV

SEQ ID NO: 58299 - protein, 33 aa, Artificial Sequence
  Cyclic GFR-binding peptide
QPSRVHHSNITVQIMEYVRKKPKLIGEMSRLEE

SEQ ID NO: 58300 - protein, 30 aa, Artificial Sequence
  Cyclic GFR-binding peptide
  MOD_RES (30)..(30): Xaa is C or S
SNITVQIMEIVRKKPIFLGEMSTLEDHLAX

SEQ ID NO: 58301 - protein, 24 aa, Artificial Sequence
  Cyclic GFR-binding peptide
HHSNITVQIMEYVRKKPKLLGEMS

SEQ ID NO: 58302 - protein, 28 aa, Artificial Sequence
  Cyclic GFR-binding peptide
TGQRSVKMAKVRIKPHQGQHKEVQVLEE

SEQ ID NO: 58303 - protein, 37 aa, Artificial Sequence; identical to SEQ ID NO: 15319
  Cyclic GFR-binding peptide
  MOD_RES (2)..(2): Xaa is C or S

SEQ ID NO: 58304 - protein, 32 aa, Artificial Sequence
  Cyclic GFR-binding peptide
  MOD_RES (32)..(32): Xaa is C or S
TGQRSVKMAKVRIKPHQGQHKEVQVLEEHSQX

SEQ ID NO: 58305 - protein, 41 aa, Artificial Sequence; identical to SEQ ID NO: 15320
  Cyclic GFR-binding peptide
  MOD_RES (7)..(41): Xaa is C or S

SEQ ID NO: 58306 - protein, 28 aa, Artificial Sequence
  Cyclic GFR-binding peptide
  MOD_RES (1)..(1): Xaa is C or S
XVPTEESNITMQIMRIKPHQGQHLGEMS

SEQ ID NO: 58307 - protein, 29 aa, Artificial Sequence
  Cyclic GFR-binding peptide
QPSRVHHRPVQVRKIEYVRKKPKLKKATV

SEQ ID NO: 58308 - protein, 30 aa, Artificial Sequence
  Cyclic GFR-binding peptide
  MOD_RES (3)..(3): Xaa is C or S
LEXVPTEESNITMQIMRIKPHQGQHLGEMS

SEQ ID NO: 58309 - protein, 29 aa, Artificial Sequence
  Cyclic GFR-binding peptide
  MOD_RES (1)..(1): Xaa is C or S
XVPTEERSVKMAKVRIKPHQGQHKEVQVF

SEQ ID NO: 58310 - protein, 33 aa, Artificial Sequence
  Cyclic GFR-binding peptide
  MOD_RES (3)..(3): Xaa is C or S
VQXRPTQVQLSNITVQIMEIVRKKPIFIGEMST

SEQ ID NO: 58311 - protein, 34 aa, Artificial Sequence
  Cyclic GFR-binding peptide
  MOD_RES (2)..(2): Xaa is C or S
QXRPTQVQLRSVKVAKVEIVRKKPIFKEVQVTLE

SEQ ID NO: 58312 - protein, 44 aa, Artificial Sequence; identical to SEQ ID NO: 15321
  Cyclic GFR-binding peptide
  MOD_RES (5)..(42)..(44): Xaa is C or S

SEQ ID NO: 58313 - protein, 26 aa, Artificial Sequence
  Cyclic GFR-binding peptide
PTGQRPVQMRKIRIKPHQGQHKKATV

SEQ ID NO: 58314 - protein, 32 aa, Artificial Sequence
  Cyclic GFR-binding peptide
  MOD_RES (2)..(2): Xaa is C or S
EXVPTEERSVKMAKVRIKPHQGQHKEVQVFLQ

SEQ ID NO: 58315 - protein, 38 aa, Artificial Sequence; identical to SEQ ID NO: 15323
  Cyclic GFR-binding peptide
  MOD_RES (3)..(3): Xaa is C or S

SEQ ID NO: 58316 - protein, 33 aa, Artificial Sequence
  Cyclic GFR-binding peptide
  MOD_RES (4)..(4): Xaa is C or S
SVKXQPSRVHHSNITVQIMEYVRKKPKLIGEMS

SEQ ID NO: 58317 - protein, 34 aa, Artificial Sequence; identical to SEQ ID NO: 15326
  Cyclic GFR-binding peptide

SEQ ID NO: 58318 - protein, 32 aa, Artificial Sequence
  Cyclic GFR-binding peptide
QVQLSNITVQIMEIVRKKPIFIGEMSTLEDHL

SEQ ID NO: 58319 - protein, 32 aa, Artificial Sequence
  Cyclic GFR-binding peptide
VQLSNITVQIMEIVRKKPIFLGEMSTLEDHLA

SEQ ID NO: 58320 - protein, 37 aa, Artificial Sequence; identical to SEQ ID NO: 15328
  Cyclic GFR-binding peptide
  MOD_RES (34)..(36): Xaa is C or S

SEQ ID NO: 58321 - protein, 36 aa, Artificial Sequence
  Cyclic GFR-binding peptide
  MOD_RES (5)..(5): Xaa is C or S
RNVQXRPTQVQLSNITVQIMEIVRKKPIFLGEMSTL

SEQ ID NO: 58322 - protein, 25 aa, Artificial Sequence
  Cyclic GFR-binding peptide
VHHSNITVQIMEYVRKKPKLIGEMS

SEQ ID NO: 58323 - protein, 29 aa, Artificial Sequence
  Cyclic GFR-binding peptide
PTEERPVQMRKIRIKPHQGQHKKATVFLQ

SEQ ID NO: 58324 - protein, 34 aa, Artificial Sequence
  Cyclic GFR-binding peptide
  MOD_RES (3)..(3): Xaa is C or S
VKXQPSRVHHSNITVQIMEYVRKKPKLIGEMSRL

SEQ ID NO: 58325 - protein, 32 aa, Artificial Sequence
  Cyclic GFR-binding peptide
  MOD_RES (3)..(3): Xaa is C or S
VKXQPSRVHHRPVQVRKIEYVRKKPKLKKATV

SEQ ID NO: 58326 - protein, 31 aa, Artificial Sequence
  Cyclic GFR-binding peptide
TQVQLRSVKVAKVEIVRKKPIFKEVQVTLED

SEQ ID NO: 58327 - protein, 33 aa, Artificial Sequence; identical to SEQ ID NO: 15332
  Cyclic GFR-binding peptide

SEQ ID NO: 58328 - protein, 30 aa, Artificial Sequence
  Cyclic GFR-binding peptide
  MOD_RES (2)..(2): Xaa is C or S
EXVPTEESNITMQIMRIKPHQGQHLGEMSF

SEQ ID NO: 58329 - protein, 28 aa, Artificial Sequence
  Cyclic GFR-binding peptide
PTEERPVQMRKIRIKPHQGQHKKATVFL

SEQ ID NO: 58330 - protein, 28 aa, Artificial Sequence
  Cyclic GFR-binding peptide
TQVQLSNITVQIMEIVRKKPIFIGEMST

SEQ ID NO: 58331 - protein, 26 aa, Artificial Sequence
  Cyclic GFR-binding peptide
VQLSNITVQIMEIVRKKPIFIGEMST

SEQ ID NO: 58332 - protein, 32 aa, Artificial Sequence
  Cyclic GFR-binding peptide
PTGQRSVKMAKVRIKPHQGQHKEVQVLEEHSQ

SEQ ID NO: 58333 - protein, 30 aa, Artificial Sequence
  Cyclic GFR-binding peptide
TQVQLRSVKVAKVEIVRKKPIFKEVQVTLE

SEQ ID NO: 58334 - protein, 35 aa, Artificial Sequence
  Cyclic GFR-binding peptide
  MOD_RES (34)..(34): Xaa is C or S
RVHHSNITVQIMEYVRKKPKLLGEMSRLEEHLEXA

SEQ ID NO: 58335 - protein, 40 aa, Artificial Sequence; identical to SEQ ID NO: 15335
  Cyclic GFR-binding peptide
  MOD_RES (37)..(39): Xaa is C or S

SEQ ID NO: 58336 - protein, 29 aa, Artificial Sequence
  Cyclic GFR-binding peptide
QVQLSNITVQIMEIVRKKPIFIGEMSTLE

SEQ ID NO: 58337 - protein, 45 aa, Artificial Sequence; identical to SEQ ID NO: 15337
  Cyclic GFR-binding peptide
  MOD_RES (5)..(42)..(44): Xaa is C or S

SEQ ID NO: 58338 - protein, 34 aa, Artificial Sequence; identical to SEQ ID NO: 15338
  Cyclic GFR-binding peptide
  MOD_RES (34)..(34): Xaa is C or S

SEQ ID NO: 58339 - protein, 29 aa, Artificial Sequence
  Cyclic GFR-binding peptide
QPSRVHHSNITVQIMEYVRKKPKLLGEMS

SEQ ID NO: 58340 - protein, 38 aa, Artificial Sequence; identical to SEQ ID NO: 15340
  Cyclic GFR-binding peptide
  MOD_RES (3)..(37): Xaa is C or S

SEQ ID NO: 58341 - protein, 38 aa, Artificial Sequence; identical to SEQ ID NO: 15341
  Cyclic GFR-binding peptide
  MOD_RES (1)..(35)..(37): Xaa is C or S

SEQ ID NO: 58342 - protein, 22 aa, Artificial Sequence
  Cyclic GFR-binding peptide
RSVKMAKVRIKPHQGQHKEVQV

SEQ ID NO: 58343 - protein, 33 aa, Artificial Sequence
  Cyclic GFR-binding peptide
  MOD_RES (3)..(3): Xaa is C or S
LEXVPTGQRPVQMRKIRIKPHQGQHKKATVLEE

SEQ ID NO: 58344 - protein, 29 aa, Artificial Sequence
  Cyclic GFR-binding peptide
PTEESNITMQIMRIKPHQGQHLGEMSFLQ

SEQ ID NO: 58345 - protein, 26 aa, Artificial Sequence
  Cyclic GFR-binding peptide
GQRPVQMRKIRIKPHQGQHKKATVLE

SEQ ID NO: 58346 - protein, 45 aa, Artificial Sequence; identical to SEQ ID NO: 15342
  Cyclic GFR-binding peptide
  MOD_RES (5)..(42)..(44): Xaa is C or S

SEQ ID NO: 58347 - protein, 32 aa, Artificial Sequence
  Cyclic GFR-binding peptide
RVHHRPVQVRKIEYVRKKPKLKKATVRLEEHL

SEQ ID NO: 58348 - protein, 36 aa, Artificial Sequence
  Cyclic GFR-binding peptide
  MOD_RES (7)..(7): Xaa is C or S
NDEGLEXVPTEERSVKMAKVRIKPHQGQHKEVQVFL

SEQ ID NO: 58349 - protein, 34 aa, Artificial Sequence
  Cyclic GFR-binding peptide
  MOD_RES (34)..(34): Xaa is C or S
RVHHSNITVQIMEYVRKKPKLIGEMSRLEEHLEX

SEQ ID NO: 58350 - protein, 34 aa, Artificial Sequence
  Cyclic GFR-binding peptide
  MOD_RES (31)..(33): Xaa is C or S
LSNITVQIMEIVRKKPIFLGEMSTLEDHLAXKXE

SEQ ID NO: 58351 - protein, 30 aa, Artificial Sequence
  Cyclic GFR-binding peptide
  MOD_RES (29)..(29): Xaa is C or S
RSVKMAKVRIKPHQGQHKEVQVLEEHSQXE

SEQ ID NO: 58352 - protein, 32 aa, Artificial Sequence
  Cyclic GFR-binding peptide
  MOD_RES (4)..(4): Xaa is C or S
GLEXVPTGQRPVQMRKIRIKPHQGQHKKATVL

SEQ ID NO: 58353 - protein, 32 aa, Artificial Sequence
  Cyclic GFR-binding peptide
  MOD_RES (3)..(3): Xaa is C or S
VQXRPTQVQLSNITVQIMEIVRKKPIFLGEMS

SEQ ID NO: 58354 - protein, 35 aa, Artificial Sequence; identical to SEQ ID NO: 15344
  Cyclic GFR-binding peptide
  MOD_RES (1)..(1): Xaa is C or S

SEQ ID NO: 58355 - protein, 27 aa, Artificial Sequence
  Cyclic GFR-binding peptide
TQVQLSNITVQIMEIVRKKPIFLGEMS

SEQ ID NO: 58356 - protein, 34 aa, Artificial Sequence
  Cyclic GFR-binding peptide
  MOD_RES (6)..(6): Xaa is C or S
DEGLEXVPTGQRSVKMAKVRIKPHQGQHKEVQVL

SEQ ID NO: 58357 - protein, 24 aa, Artificial Sequence
  Cyclic GFR-binding peptide
SNITVQIMEIVRKKPIFLGEMSTL

SEQ ID NO: 58358 - protein, 31 aa, Artificial Sequence
  Cyclic GFR-binding peptide
PTQVQLSNITVQIMEIVRKKPIFLGEMSTLE

SEQ ID NO: 58359 - protein, 26 aa, Artificial Sequence
  Cyclic GFR-binding peptide
EESNITMQIMRIKPHQGQHLGEMSFL

SEQ ID NO: 58360 - protein, 40 aa, Artificial Sequence; identical to SEQ ID NO: 15345
  Cyclic GFR-binding peptide
  MOD_RES (4)..(38)..(40): Xaa is C or S

SEQ ID NO: 58361 - protein, 38 aa, Artificial Sequence; identical to SEQ ID NO: 15346
  Cyclic GFR-binding peptide
  MOD_RES (3)..(37): Xaa is C or S

SEQ ID NO: 58362 - protein, 34 aa, Artificial Sequence
  Cyclic GFR-binding peptide
  MOD_RES (4)..(4): Xaa is C or S
GLEXVPTGQRSVKMAKVRIKPHQGQHKEVQVLEE

SEQ ID NO: 58363 - protein, 27 aa, Artificial Sequence
  Cyclic GFR-binding peptide
HHSNITVQIMEYVRKKPKLIGEMSRLE

SEQ ID NO: 58364 - protein, 33 aa, Artificial Sequence
  Cyclic GFR-binding peptide
  MOD_RES (33)..(33): Xaa is C or S
PTGQRSVKMAKVRIKPHQGQHKEVQVLEEHSQX

SEQ ID NO: 58365 - protein, 33 aa, Artificial Sequence; identical to SEQ ID NO: 15349
  Cyclic GFR-binding peptide

SEQ ID NO: 58366 - protein, 32 aa, Artificial Sequence
  Cyclic GFR-binding peptide
QPSRVHHSNITVQIMEYVRKKPKLIGEMSRLE

SEQ ID NO: 58367 - protein, 28 aa, Artificial Sequence
  Cyclic GFR-binding peptide
SRVHHRPVQVRKIEYVRKKPKLKKATVR

SEQ ID NO: 58368 - protein, 39 aa, Artificial Sequence; identical to SEQ ID NO: 15352
  Cyclic GFR-binding peptide
  MOD_RES (2)..(36)..(38): Xaa is C or S

SEQ ID NO: 58369 - protein, 30 aa, Artificial Sequence
  Cyclic GFR-binding peptide
  MOD_RES (1)..(1): Xaa is C or S
XQPSRVHHRPVQVRKIEYVRKKPKLKKATV

SEQ ID NO: 58370 - protein, 29 aa, Artificial Sequence
  Cyclic GFR-binding peptide
RPTQVQLSNITVQIMEIVRKKPIFLGEMS

SEQ ID NO: 58371 - protein, 40 aa, Artificial Sequence; identical to SEQ ID NO: 15353
  Cyclic GFR-binding peptide
  MOD_RES (2)..(39): Xaa is C or S

SEQ ID NO: 58372 - protein, 36 aa, Artificial Sequence; identical to SEQ ID NO: 15354
  Cyclic GFR-binding peptide
  MOD_RES (34)..(36): Xaa is C or S

SEQ ID NO: 58373 - protein, 31 aa, Artificial Sequence
  Cyclic GFR-binding peptide
  MOD_RES (1)..(1): Xaa is C or S
XVPTEERSVKMAKVRIKPHQGQHKEVQVFLQ

SEQ ID NO: 58374 - protein, 28 aa, Artificial Sequence
  Cyclic GFR-binding peptide
TQVQLRSVKVAKVEIVRKKPIFKEVQVT

SEQ ID NO: 58375 - protein, 35 aa, Artificial Sequence; identical to SEQ ID NO: 15355
  Cyclic GFR-binding peptide

SEQ ID NO: 58376 - protein, 34 aa, Artificial Sequence
  Cyclic GFR-binding peptide
  MOD_RES (32)..(34): Xaa is C or S
TGQRPVQMRKIRIKPHQGQHKKATVLEEHSQXEX

SEQ ID NO: 58377 - protein, 34 aa, Artificial Sequence
  Cyclic GFR-binding peptide
  MOD_RES (33)..(33): Xaa is C or S
VQLSNITVQIMEIVRKKPIFIGEMSTLEDHLAXK

SEQ ID NO: 58378 - protein, 34 aa, Artificial Sequence
  Cyclic GFR-binding peptide
  MOD_RES (32)..(34): Xaa is C or S
HHRPVQVRKIEYVRKKPKLKKATVRLEEHLEXAX

SEQ ID NO: 58379 - protein, 32 aa, Artificial Sequence; identical to SEQ ID NO: 15362
  Cyclic GFR-binding peptide

SEQ ID NO: 58380 - protein, 44 aa, Artificial Sequence; identical to SEQ ID NO: 15363
  Cyclic GFR-binding peptide
  MOD_RES (4)..(41)..(43): Xaa is C or S

SEQ ID NO: 58381 - protein, 31 aa, Artificial Sequence
  Cyclic GFR-binding peptide
  MOD_RES (30)..(30): Xaa is C or S
ERSVKMAKVRIKPHQGQHKEVQVFLQHNKXE

SEQ ID NO: 58382 - protein, 29 aa, Artificial Sequence
  Cyclic GFR-binding peptide
QLRSVKVAKVEIVRKKPIFKEVQVTLEDH

SEQ ID NO: 58383 - protein, 35 aa, Artificial Sequence
  Cyclic GFR-binding peptide
  MOD_RES (33)..(35): Xaa is C or S
VHHSNITVQIMEYVRKKPKLIGEMSRLEEHLEXAX

SEQ ID NO: 58384 - protein, 38 aa, Artificial Sequence; identical to SEQ ID NO: 15368
  Cyclic GFR-binding peptide
  MOD_RES (1)..(38): Xaa is C or S

SEQ ID NO: 58385 - protein, 29 aa, Artificial Sequence
  Cyclic GFR-binding peptide
TEESNITMQIMRIKPHQGQHLGEMSFLQH

SEQ ID NO: 58386 - protein, 40 aa, Artificial Sequence; identical to SEQ ID NO: 15370
  Cyclic GFR-binding peptide
  MOD_RES (6)..(40): Xaa is C or S

SEQ ID NO: 58387 - protein, 24 aa, Artificial Sequence
  Cyclic GFR-binding peptide
RSVKMAKVRIKPHQGQHKEVQVFL

SEQ ID NO: 58388 - protein, 42 aa, Artificial Sequence; identical to SEQ ID NO: 15369
  Cyclic GFR-binding peptide
  MOD_RES (3)..(40)..(42): Xaa is C or S

SEQ ID NO: 58389 - protein, 26 aa, Artificial Sequence
  Cyclic GFR-binding peptide
HHRPVQVRKIEYVRKKPKLKKATVRL

SEQ ID NO: 58390 - protein, 35 aa, Artificial Sequence
  Cyclic GFR-binding peptide
  MOD_RES (34)..(34): Xaa is C or S
RVHHSNITVQIMEYVRKKPKLIGEMSRLEEHLEXA

SEQ ID NO: 58391 - protein, 23 aa, Artificial Sequence
  Cyclic GFR-binding peptide
RPVQMRKIRIKPHQGQHKKATVL

SEQ ID NO: 58392 - protein, 23 aa, Artificial Sequence
  Cyclic GFR-binding peptide
RPVQMRKIRIKPHQGQHKKATVF

SEQ ID NO: 58393 - protein, 26 aa, Artificial Sequence
  Cyclic GFR-binding peptide
LRSVKVAKVEIVRKKPIFKEVQVTLE

SEQ ID NO: 58394 - protein, 33 aa, Artificial Sequence
  Cyclic GFR-binding peptide
  MOD_RES (32)..(32): Xaa is C or S
TGQSNITMQIMRIKPHQGQHIGEMSLEEHSQXE

SEQ ID NO: 58395 - protein, 37 aa, Artificial Sequence; identical to SEQ ID NO: 15373
  Cyclic GFR-binding peptide
  MOD_RES (3)..(37): Xaa is C or S

SEQ ID NO: 58396 - protein, 31 aa, Artificial Sequence
  Cyclic GFR-binding peptide
SRVHHSNITVQIMEYVRKKPKLLGEMSRLEE

SEQ ID NO: 58397 - protein, 30 aa, Artificial Sequence
  Cyclic GFR-binding peptide
  MOD_RES (3)..(3): Xaa is C or S
LEXVPTEERPVQMRKIRIKPHQGQHKKATV

SEQ ID NO: 58398 - protein, 28 aa, Artificial Sequence
  Cyclic GFR-binding peptide
RPVQMRKIRIKPHQGQHKKATVFLQHNK

SEQ ID NO: 58399 - protein, 28 aa, Artificial Sequence
  Cyclic GFR-binding peptide
PTGQRSVKMAKVRIKPHQGQHKEVQVLE

SEQ ID NO: 58400 - protein, 33 aa, Artificial Sequence
  Cyclic GFR-binding peptide
  MOD_RES (30)..(32): Xaa is C or S
ERSVKMAKVRIKPHQGQHKEVQVFLQHNKXEXR

SEQ ID NO: 58401 - protein, 28 aa, Artificial Sequence
  Cyclic GFR-binding peptide
TEESNITMQIMRIKPHQGQHLGEMSFLQ

SEQ ID NO: 58402 - protein, 41 aa, Artificial Sequence; identical to SEQ ID NO: 15376
  Cyclic GFR-binding peptide
  MOD_RES (4)..(41): Xaa is C or S

SEQ ID NO: 58403 - protein, 28 aa, Artificial Sequence
  Cyclic GFR-binding peptide
LSNITVQIMEIVRKKPIFIGEMSTLEDH

SEQ ID NO: 58404 - protein, 26 aa, Artificial Sequence
  Cyclic GFR-binding peptide
QVQLSNITVQIMEIVRKKPIFLGEMS

SEQ ID NO: 58405 - protein, 30 aa, Artificial Sequence
  Cyclic GFR-binding peptide
PTQVQLSNITVQIMEIVRKKPIFLGEMSTL

SEQ ID NO: 58406 - protein, 31 aa, Artificial Sequence
  Cyclic GFR-binding peptide
  MOD_RES (29)..(31): Xaa is C or S
SNITMQIMRIKPHQGQHLGEMSFLQHNKXEX

SEQ ID NO: 58407 - protein, 40 aa, Artificial Sequence; identical to SEQ ID NO: 15378
  Cyclic GFR-binding peptide
  MOD_RES (4)..(38)..(40): Xaa is C or S

SEQ ID NO: 58408 - protein, 30 aa, Artificial Sequence
  Cyclic GFR-binding peptide
VPTEERPVQMRKIRIKPHQGQHKKATVFLQ

SEQ ID NO: 58409 - protein, 38 aa, Artificial Sequence
  Cyclic GFR-binding peptide
  MOD_RES (7)..(7): Xaa is C or S
NDEGLEXVPTEERSVKMAKVRIKPHQGQHKEVQVFLQH

SEQ ID NO: 58410 - protein, 28 aa, Artificial Sequence
  Cyclic GFR-binding peptide
GQRPVQMRKIRIKPHQGQHKKATVLEEH

SEQ ID NO: 58411 - protein, 35 aa, Artificial Sequence; identical to SEQ ID NO: 15381
  Cyclic GFR-binding peptide
  MOD_RES (1)..(35): Xaa is C or S

SEQ ID NO: 58412 - protein, 38 aa, Artificial Sequence; identical to SEQ ID NO: 15382
  Cyclic GFR-binding peptide
  MOD_RES (37)..(37): Xaa is C or S

SEQ ID NO: 58413 - protein, 24 aa, Artificial Sequence
  Cyclic GFR-binding peptide
HHRPVQVRKIEYVRKKPKLKKATV

SEQ ID NO: 58414 - protein, 34 aa, Artificial Sequence
  Cyclic GFR-binding peptide
  MOD_RES (5)..(5): Xaa is C or S
SSVKXQPSRVHHSNITVQIMEYVRKKPKLIGEMS

SEQ ID NO: 58415 - protein, 32 aa, Artificial Sequence; identical to SEQ ID NO: 1153
  Cyclic GFR-binding peptide

SEQ ID NO: 58416 - protein, 38 aa, Artificial Sequence; identical to SEQ ID NO: 15387
  Cyclic GFR-binding peptide
  MOD_RES (36)..(38): Xaa is C or S

SEQ ID NO: 58417 - protein, 29 aa, Artificial Sequence
  Cyclic GFR-binding peptide
EERSVKMAKVRIKPHQGQHKEVQVFLQHN

SEQ ID NO: 58418 - protein, 30 aa, Artificial Sequence
  Cyclic GFR-binding peptide
TGQRPVQMRKIRIKPHQGQHKKATVLEEHS

SEQ ID NO: 58419 - protein, 34 aa, Artificial Sequence; identical to SEQ ID NO: 15389
  Cyclic GFR-binding peptide
  MOD_RES (2)..(2): Xaa is C or S

SEQ ID NO: 58420 - protein, 33 aa, Artificial Sequence
  Cyclic GFR-binding peptide
  MOD_RES (31)..(33): Xaa is C or S
GQSNITMQIMRIKPHQGQHIGEMSLEEHSQXEX

SEQ ID NO: 58421 - protein, 25 aa, Artificial Sequence
  Cyclic GFR-binding peptide
GQSNITMQIMRIKPHQGQHIGEMSL

SEQ ID NO: 58422 - protein, 30 aa, Artificial Sequence
  Cyclic GFR-binding peptide
  MOD_RES (30)..(30): Xaa is C or S
SNITVQIMEYVRKKPKLLGEMSRLEEHLEX

SEQ ID NO: 58423 - protein, 36 aa, Artificial Sequence; identical to SEQ ID NO: 15392
  Cyclic GFR-binding peptide

SEQ ID NO: 58424 - protein, 36 aa, Artificial Sequence; identical to SEQ ID NO: 15393
  Cyclic GFR-binding peptide
  MOD_RES (36)..(36): Xaa is C or S

SEQ ID NO: 58425 - protein, 31 aa, Artificial Sequence
  Cyclic GFR-binding peptide
  MOD_RES (2)..(2): Xaa is C or S
QXRPTQVQLSNITVQIMEIVRKKPIFLGEMS

SEQ ID NO: 58426 - protein, 33 aa, Artificial Sequence; identical to SEQ ID NO: 15395
  Cyclic GFR-binding peptide

SEQ ID NO: 58427 - protein, 35 aa, Artificial Sequence; identical to SEQ ID NO: 15396
  Cyclic GFR-binding peptide
  MOD_RES (3)..(3): Xaa is C or S

SEQ ID NO: 58428 - protein, 30 aa, Artificial Sequence
  Cyclic GFR-binding peptide
VQLRSVKVAKVEIVRKKPIFKEVQVTLEDH

SEQ ID NO: 58429 - protein, 35 aa, Artificial Sequence
  Cyclic GFR-binding peptide
  MOD_RES (32)..(34): Xaa is C or S
TEERSVKMAKVRIKPHQGQHKEVQVFLQHNKXEXR

SEQ ID NO: 58430 - protein, 34 aa, Artificial Sequence; identical to SEQ ID NO: 15398
  Cyclic GFR-binding peptide
  MOD_RES (1)..(1): Xaa is C or S

SEQ ID NO: 58431 - protein, 36 aa, Artificial Sequence; identical to SEQ ID NO: 15400
  Cyclic GFR-binding peptide

SEQ ID NO: 58432 - protein, 44 aa, Artificial Sequence; identical to SEQ ID NO: 15401
  Cyclic GFR-binding peptide
  MOD_RES (4)..(41)..(43): Xaa is C or S

SEQ ID NO: 58433 - protein, 25 aa, Artificial Sequence
  Cyclic GFR-binding peptide
RPVQMRKIRIKPHQGQHKKATVFLQ

SEQ ID NO: 58434 - protein, 31 aa, Artificial Sequence
  Cyclic GFR-binding peptide
  MOD_RES (4)..(4): Xaa is C or S
GLEXVPTEESNITMQIMRIKPHQGQHLGEMS

SEQ ID NO: 58435 - protein, 30 aa, Artificial Sequence
  Cyclic GFR-binding peptide
  MOD_RES (1)..(1): Xaa is C or S
XQPSRVHHSNITVQIMEYVRKKPKLLGEMS

SEQ ID NO: 58436 - protein, 27 aa, Artificial Sequence
  Cyclic GFR-binding peptide
HSNITVQIMEYVRKKPKLLGEMSRLEE

SEQ ID NO: 58437 - protein, 34 aa, Artificial Sequence
  Cyclic GFR-binding peptide
  MOD_RES (3)..(3): Xaa is C or S
VQXRPTQVQLRSVKVAKVEIVRKKPIFKEVQVTL

SEQ ID NO: 58438 - protein, 34 aa, Artificial Sequence
  Cyclic GFR-binding peptide
  MOD_RES (7)..(7): Xaa is C or S
NDEGLEXVPTGQRPVQMRKIRIKPHQGQHKKATV

SEQ ID NO: 58439 - protein, 44 aa, Artificial Sequence; identical to SEQ ID NO: 15405
  Cyclic GFR-binding peptide
  MOD_RES (4)..(41)..(43): Xaa is C or S

SEQ ID NO: 58440 - protein, 40 aa, Artificial Sequence; identical to SEQ ID NO: 15406
  Cyclic GFR-binding peptide
  MOD_RES (4)..(4): Xaa is C or S

SEQ ID NO: 58441 - protein, 24 aa, Artificial Sequence
  Cyclic GFR-binding peptide
LSNITVQIMEIVRKKPIFLGEMST

SEQ ID NO: 58442 - protein, 31 aa, Artificial Sequence
  Cyclic GFR-binding peptide
  MOD_RES (4)..(4): Xaa is C or S
GLEXVPTGQRPVQMRKIRIKPHQGQHKKATV

SEQ ID NO: 58443 - protein, 41 aa, Artificial Sequence; identical to SEQ ID NO: 15409
  Cyclic GFR-binding peptide
  MOD_RES (3)..(40): Xaa is C or S

SEQ ID NO: 58444 - protein, 36 aa, Artificial Sequence
  Cyclic GFR-binding peptide
  MOD_RES (4)..(4): Xaa is C or S
SVKXQPSRVHHSNITVQIMEYVRKKPKLLGEMSRLE

SEQ ID NO: 58445 - protein, 41 aa, Artificial Sequence; identical to SEQ ID NO: 15411
  Cyclic GFR-binding peptide
  MOD_RES (1)..(38)..(40): Xaa is C or S

SEQ ID NO: 58446 - protein, 38 aa, Artificial Sequence; identical to SEQ ID NO: 15414
  Cyclic GFR-binding peptide
  MOD_RES (6)..(6): Xaa is C or S

SEQ ID NO: 58447 - protein, 39 aa, Artificial Sequence; identical to SEQ ID NO: 15415
  Cyclic GFR-binding peptide
  MOD_RES (7)..(7): Xaa is C or S

SEQ ID NO: 58448 - protein, 30 aa, Artificial Sequence
  Cyclic GFR-binding peptide
RPTQVQLSNITVQIMEIVRKKPIFIGEMST

SEQ ID NO: 58449 - protein, 28 aa, Artificial Sequence
  Cyclic GFR-binding peptide
VHHRPVQVRKIEYVRKKPKLKKATVRLE

SEQ ID NO: 58450 - protein, 34 aa, Artificial Sequence; identical to SEQ ID NO: 15416
  Cyclic GFR-binding peptide
  MOD_RES (2)..(2): Xaa is C or S

SEQ ID NO: 58451 - protein, 33 aa, Artificial Sequence
  Cyclic GFR-binding peptide
  MOD_RES (3)..(3): Xaa is C or S
VKXQPSRVHHSNITVQIMEYVRKKPKLIGEMSR

SEQ ID NO: 58452 - protein, 34 aa, Artificial Sequence
  Cyclic GFR-binding peptide
  MOD_RES (4)..(4): Xaa is C or S
SVKXQPSRVHHRPVQVRKIEYVRKKPKLKKATVR

SEQ ID NO: 58453 - protein, 33 aa, Artificial Sequence
  Cyclic GFR-binding peptide
  MOD_RES (4)..(4): Xaa is C or S
NVQXRPTQVQLSNITVQIMEIVRKKPIFLGEMS

SEQ ID NO: 58454 - protein, 25 aa, Artificial Sequence
  Cyclic GFR-binding peptide
RSVKMAKVRIKPHQGQHKEVQVLEE

SEQ ID NO: 58455 - protein, 37 aa, Artificial Sequence; identical to SEQ ID NO: 15419
  Cyclic GFR-binding peptide
  MOD_RES (35)..(37): Xaa is C or S

SEQ ID NO: 58456 - protein, 26 aa, Artificial Sequence
  Cyclic GFR-binding peptide
EERPVQMRKIRIKPHQGQHKKATVFL

SEQ ID NO: 58457 - protein, 32 aa, Artificial Sequence
  Cyclic GFR-binding peptide
  MOD_RES (32)..(32): Xaa is C or S
TEERSVKMAKVRIKPHQGQHKEVQVFLQHNKX

SEQ ID NO: 58458 - protein, 36 aa, Artificial Sequence
  Cyclic GFR-binding peptide
  MOD_RES (7)..(7): Xaa is C or S
NDEGLEXVPTGQRSVKMAKVRIKPHQGQHKEVQVLE

SEQ ID NO: 58459 - protein, 33 aa, Artificial Sequence
  Cyclic GFR-binding peptide
  MOD_RES (5)..(5): Xaa is C or S
EGLEXVPTEERPVQMRKIRIKPHQGQHKKATVF

SEQ ID NO: 58460 - protein, 34 aa, Artificial Sequence
  Cyclic GFR-binding peptide
  MOD_RES (4)..(4): Xaa is C or S
GLEXVPTEERSVKMAKVRIKPHQGQHKEVQVFLQ

SEQ ID NO: 58461 - protein, 40 aa, Artificial Sequence; identical to SEQ ID NO: 15421
  Cyclic GFR-binding peptide
  MOD_RES (7)..(7): Xaa is C or S

SEQ ID NO: 58462 - protein, 37 aa, Artificial Sequence; identical to SEQ ID NO: 15422
  Cyclic GFR-binding peptide
  MOD_RES (5)..(5): Xaa is C or S

SEQ ID NO: 58463 - protein, 34 aa, Artificial Sequence
  Cyclic GFR-binding peptide
  MOD_RES (6)..(6): Xaa is C or S
DEGLEXVPTEERSVKMAKVRIKPHQGQHKEVQVF

SEQ ID NO: 58464 - protein, 41 aa, Artificial Sequence; identical to SEQ ID NO: 15424
  Cyclic GFR-binding peptide
  MOD_RES (6)..(40): Xaa is C or S

SEQ ID NO: 58465 - protein, 41 aa, Artificial Sequence; identical to SEQ ID NO: 15425
  Cyclic GFR-binding peptide
  MOD_RES (4)..(41): Xaa is C or S

SEQ ID NO: 58466 - protein, 40 aa, Artificial Sequence; identical to SEQ ID NO: 15423
  Cyclic GFR-binding peptide
  MOD_RES (5)..(39): Xaa is C or S

SEQ ID NO: 58467 - protein, 24 aa, Artificial Sequence
  Cyclic GFR-binding peptide
ESNITMQIMRIKPHQGQHLGEMSF

SEQ ID NO: 58468 - protein, 27 aa, Artificial Sequence
  Cyclic GFR-binding peptide
HHRPVQVRKIEYVRKKPKLKKATVRLE

SEQ ID NO: 58469 - protein, 29 aa, Artificial Sequence
  Cyclic GFR-binding peptide
TQVQLSNITVQIMEIVRKKPIFLGEMSTL

SEQ ID NO: 58470 - protein, 28 aa, Artificial Sequence
  Cyclic GFR-binding peptide
SNITVQIMEYVRKKPKLIGEMSRLEEHL

SEQ ID NO: 58471 - protein, 27 aa, Artificial Sequence
  Cyclic GFR-binding peptide
SRVHHSNITVQIMEYVRKKPKLIGEMS

SEQ ID NO: 58472 - protein, 36 aa, Artificial Sequence
  Cyclic GFR-binding peptide
  MOD_RES (3)..(3): Xaa is C or S
VQXRPTQVQLSNITVQIMEIVRKKPIFIGEMSTLED

SEQ ID NO: 58473 - protein, 32 aa, Artificial Sequence
  Cyclic GFR-binding peptide
  MOD_RES (31)..(31): Xaa is C or S
EESNITMQIMRIKPHQGQHLGEMSFLQHNKXE

SEQ ID NO: 58474 - protein, 36 aa, Artificial Sequence; identical to SEQ ID NO: 15432
  Cyclic GFR-binding peptide
  MOD_RES (36)..(36): Xaa is C or S

SEQ ID NO: 58475 - protein, 42 aa, Artificial Sequence; identical to SEQ ID NO: 15433
  Cyclic GFR-binding peptide
  MOD_RES (7)..(41): Xaa is C or S

SEQ ID NO: 58476 - protein, 38 aa, Artificial Sequence; identical to SEQ ID NO: 15436
  Cyclic GFR-binding peptide
  MOD_RES (36)..(38): Xaa is C or S

SEQ ID NO: 58477 - protein, 32 aa, Artificial Sequence
  Cyclic GFR-binding peptide
  MOD_RES (32)..(32): Xaa is C or S
TGQSNITMQIMRIKPHQGQHIGEMSLEEHSQX

SEQ ID NO: 58478 - protein, 23 aa, Artificial Sequence
  Cyclic GFR-binding peptide
LSNITVQIMEIVRKKPIFIGEMS

SEQ ID NO: 58479 - protein, 35 aa, Artificial Sequence
  Cyclic GFR-binding peptide
  MOD_RES (33)..(35): Xaa is C or S
PTEERPVQMRKIRIKPHQGQHKKATVFLQHNKXEX

SEQ ID NO: 58480 - protein, 40 aa, Artificial Sequence; identical to SEQ ID NO: 15442
  Cyclic GFR-binding peptide
  MOD_RES (4)..(38)..(40): Xaa is C or S

SEQ ID NO: 58481 - protein, 36 aa, Artificial Sequence
  Cyclic GFR-binding peptide
  MOD_RES (33)..(35): Xaa is C or S
VHHRPVQVRKIEYVRKKPKLKKATVRLEEHLEXAXA

SEQ ID NO: 58482 - protein, 43 aa, Artificial Sequence; identical to SEQ ID NO: 15444
  Cyclic GFR-binding peptide
  MOD_RES (6)..(40)..(42): Xaa is C or S

SEQ ID NO: 58483 - protein, 31 aa, Artificial Sequence
  Cyclic GFR-binding peptide
  MOD_RES (31)..(31): Xaa is C or S
EESNITMQIMRIKPHQGQHLGEMSFLQHNKX

SEQ ID NO: 58484 - protein, 33 aa, Artificial Sequence
  Cyclic GFR-binding peptide
  MOD_RES (32)..(32): Xaa is C or S
TEESNITMQIMRIKPHQGQHLGEMSFLQHNKXE

SEQ ID NO: 58485 - protein, 27 aa, Artificial Sequence
  Cyclic GFR-binding peptide
VHHRPVQVRKIEYVRKKPKLKKATVRL

SEQ ID NO: 58486 - protein, 28 aa, Artificial Sequence
  Cyclic GFR-binding peptide
QLRSVKVAKVEIVRKKPIFKEVQVTLED

SEQ ID NO: 58487 - protein, 28 aa, Artificial Sequence
  Cyclic GFR-binding peptide
RPVQVRKIEYVRKKPKLKKATVRLEEHL

SEQ ID NO: 58488 - protein, 28 aa, Artificial Sequence
  Cyclic GFR-binding peptide
QVQLSNITVQIMEIVRKKPIFIGEMSTL

SEQ ID NO: 58489 - protein, 29 aa, Artificial Sequence
  Cyclic GFR-binding peptide
SNITVQIMEIVRKKPIFLGEMSTLEDHLA

SEQ ID NO: 58490 - protein, 38 aa, Artificial Sequence; identical to SEQ ID NO: 15447
  Cyclic GFR-binding peptide
  MOD_RES (4)..(4): Xaa is C or S

SEQ ID NO: 58491 - protein, 35 aa, Artificial Sequence; identical to SEQ ID NO: 15450
  Cyclic GFR-binding peptide
  MOD_RES (35)..(35): Xaa is C or S

SEQ ID NO: 58492 - protein, 32 aa, Artificial Sequence
  Cyclic GFR-binding peptide
  MOD_RES (5)..(5): Xaa is C or S
EGLEXVPTGQRPVQMRKIRIKPHQGQHKKATV

SEQ ID NO: 58493 - protein, 41 aa, Artificial Sequence; identical to SEQ ID NO: 15451
  Cyclic GFR-binding peptide
  MOD_RES (5)..(39)..(41): Xaa is C or S

SEQ ID NO: 58494 - protein, 26 aa, Artificial Sequence
  Cyclic GFR-binding peptide
TEERPVQMRKIRIKPHQGQHKKATVF

SEQ ID NO: 58495 - protein, 39 aa, Artificial Sequence; identical to SEQ ID NO: 15453
  Cyclic GFR-binding peptide
  MOD_RES (5)..(5): Xaa is C or S

SEQ ID NO: 58496 - protein, 38 aa, Artificial Sequence; identical to SEQ ID NO: 15455
  Cyclic GFR-binding peptide
  MOD_RES (37)..(37): Xaa is C or S

SEQ ID NO: 58497 - protein, 30 aa, Artificial Sequence
  Cyclic GFR-binding peptide
PTEERPVQMRKIRIKPHQGQHKKATVFLQH

SEQ ID NO: 58498 - protein, 31 aa, Artificial Sequence
  Cyclic GFR-binding peptide
  MOD_RES (30)..(30): Xaa is C or S
RSVKVAKVEIVRKKPIFKEVQVTLEDHLAXK

SEQ ID NO: 58499 - protein, 40 aa, Artificial Sequence; identical to SEQ ID NO: 15454
  Cyclic GFR-binding peptide
  MOD_RES (2)..(39): Xaa is C or S

SEQ ID NO: 58500 - protein, 30 aa, Artificial Sequence
  Cyclic GFR-binding peptide
  MOD_RES (29)..(29): Xaa is C or S
RPVQMRKIRIKPHQGQHKKATVFLQHNKXE

SEQ ID NO: 58501 - protein, 29 aa, Artificial Sequence
  Cyclic GFR-binding peptide
PTQVQLSNITVQIMEIVRKKPIFIGEMST

SEQ ID NO: 58502 - protein, 39 aa, Artificial Sequence; identical to SEQ ID NO: 15458
  Cyclic GFR-binding peptide
  MOD_RES (5)..(5): Xaa is C or S

SEQ ID NO: 58503 - protein, 31 aa, Artificial Sequence
  Cyclic GFR-binding peptide
  MOD_RES (1)..(1): Xaa is C or S
XRPTQVQLSNITVQIMEIVRKKPIFLGEMST

SEQ ID NO: 58504 - protein, 31 aa, Artificial Sequence
  Cyclic GFR-binding peptide
  MOD_RES (2)..(2): Xaa is C or S
EXVPTEERPVQMRKIRIKPHQGQHKKATVFL

SEQ ID NO: 58505 - protein, 40 aa, Artificial Sequence; identical to SEQ ID NO: 15459
  Cyclic GFR-binding peptide
  MOD_RES (5)..(5): Xaa is C or S

SEQ ID NO: 58506 - protein, 31 aa, Artificial Sequence
  Cyclic GFR-binding peptide
  MOD_RES (29)..(31): Xaa is C or S
SNITMQIMRIKPHQGQHIGEMSLEEHSQXEX

SEQ ID NO: 58507 - protein, 33 aa, Artificial Sequence
  Cyclic GFR-binding peptide
  MOD_RES (2)..(2): Xaa is C or S
EXVPTGQRPVQMRKIRIKPHQGQHKKATVLEEH

SEQ ID NO: 58508 - protein, 40 aa, Artificial Sequence; identical to SEQ ID NO: 15460
  Cyclic GFR-binding peptide
  MOD_RES (1)..(38)..(40): Xaa is C or S

SEQ ID NO: 58509 - protein, 41 aa, Artificial Sequence; identical to SEQ ID NO: 15462
  Cyclic GFR-binding peptide
  MOD_RES (1)..(38)..(40): Xaa is C or S

SEQ ID NO: 58510 - protein, 29 aa, Artificial Sequence
  Cyclic GFR-binding peptide
TQVQLSNITVQIMEIVRKKPIFIGEMSTL

SEQ ID NO: 58511 - protein, 26 aa, Artificial Sequence
  Cyclic GFR-binding peptide
SNITVQIMEIVRKKPIFLGEMSTLED

SEQ ID NO: 58512 - protein, 37 aa, Artificial Sequence; identical to SEQ ID NO: 15464
  Cyclic GFR-binding peptide
  MOD_RES (1)..(1): Xaa is C or S

SEQ ID NO: 58513 - protein, 31 aa, Artificial Sequence
  Cyclic GFR-binding peptide
RPTQVQLSNITVQIMEIVRKKPIFIGEMSTL

SEQ ID NO: 58514 - protein, 42 aa, Artificial Sequence; identical to SEQ ID NO: 15466
  Cyclic GFR-binding peptide
  MOD_RES (7)..(41): Xaa is C or S

SEQ ID NO: 58515 - protein, 30 aa, Artificial Sequence
  Cyclic GFR-binding peptide
PTGQSNITMQIMRIKPHQGQHIGEMSLEEH

SEQ ID NO: 58516 - protein, 36 aa, Artificial Sequence; identical to SEQ ID NO: 15468
  Cyclic GFR-binding peptide
  MOD_RES (35)..(35): Xaa is C or S

SEQ ID NO: 58517 - protein, 33 aa, Artificial Sequence
  Cyclic GFR-binding peptide
  MOD_RES (33)..(33): Xaa is C or S
PTEESNITMQIMRIKPHQGQHLGEMSFLQHNKX

SEQ ID NO: 58518 - protein, 30 aa, Artificial Sequence
  Cyclic GFR-binding peptide
RVHHRPVQVRKIEYVRKKPKLKKATVRLEE

SEQ ID NO: 58519 - protein, 37 aa, Artificial Sequence
  Cyclic GFR-binding peptide
  MOD_RES (4)..(4): Xaa is C or S
SVKXQPSRVHHRPVQVRKIEYVRKKPKLKKATVRLEE

SEQ ID NO: 58520 - protein, 36 aa, Artificial Sequence
  Cyclic GFR-binding peptide
  MOD_RES (33)..(35): Xaa is C or S
PTGQRPVQMRKIRIKPHQGQHKKATVLEEHSQXEXR

SEQ ID NO: 58521 - protein, 41 aa, Artificial Sequence; identical to SEQ ID NO: 15471
  Cyclic GFR-binding peptide
  MOD_RES (2)..(39)..(41): Xaa is C or S

SEQ ID NO: 58522 - protein, 34 aa, Artificial Sequence; identical to SEQ ID NO: 15472
  Cyclic GFR-binding peptide
  MOD_RES (34)..(34): Xaa is C or S

SEQ ID NO: 58523 - protein, 39 aa, Artificial Sequence; identical to SEQ ID NO: 15473
  Cyclic GFR-binding peptide
  MOD_RES (5)..(5): Xaa is C or S

SEQ ID NO: 58524 - protein, 39 aa, Artificial Sequence; identical to SEQ ID NO: 15475
  Cyclic GFR-binding peptide
  MOD_RES (36)..(38): Xaa is C or S

SEQ ID NO: 58525 - protein, 37 aa, Artificial Sequence
  Cyclic GFR-binding peptide
  MOD_RES (6)..(6): Xaa is C or S
DEGLEXVPTGQRPVQMRKIRIKPHQGQHKKATVLEEH

SEQ ID NO: 58526 - protein, 34 aa, Artificial Sequence; identical to SEQ ID NO: 15476
  Cyclic GFR-binding peptide

SEQ ID NO: 58527 - protein, 31 aa, Artificial Sequence
  Cyclic GFR-binding peptide
  MOD_RES (3)..(3): Xaa is C or S
LEXVPTEERSVKMAKVRIKPHQGQHKEVQVF

SEQ ID NO: 58528 - protein, 32 aa, Artificial Sequence
  Cyclic GFR-binding peptide
  MOD_RES (4)..(4): Xaa is C or S
GLEXVPTGQRSVKMAKVRIKPHQGQHKEVQVL

SEQ ID NO: 58529 - protein, 29 aa, Artificial Sequence
  Cyclic GFR-binding peptide
ERSVKMAKVRIKPHQGQHKEVQVFLQHNK

SEQ ID NO: 58530 - protein, 28 aa, Artificial Sequence
  Cyclic GFR-binding peptide
SNITMQIMRIKPHQGQHLGEMSFLQHNK

SEQ ID NO: 58531 - protein, 32 aa, Artificial Sequence
  Cyclic GFR-binding peptide
  MOD_RES (30)..(32): Xaa is C or S
SNITVQIMEIVRKKPIFLGEMSTLEDHLAXKX

SEQ ID NO: 58532 - protein, 30 aa, Artificial Sequence
  Cyclic GFR-binding peptide
QLSNITVQIMEIVRKKPIFIGEMSTLEDHL

SEQ ID NO: 58533 - protein, 34 aa, Artificial Sequence; identical to SEQ ID NO: 15478
  Cyclic GFR-binding peptide
  MOD_RES (1)..(1): Xaa is C or S

SEQ ID NO: 58534 - protein, 28 aa, Artificial Sequence
  Cyclic GFR-binding peptide
VPTGQSNITMQIMRIKPHQGQHIGEMSL

SEQ ID NO: 58535 - protein, 38 aa, Artificial Sequence; identical to SEQ ID NO: 15479
  Cyclic GFR-binding peptide
  MOD_RES (1)..(38): Xaa is C or S

SEQ ID NO: 58536 - protein, 38 aa, Artificial Sequence; identical to SEQ ID NO: 15480
  Cyclic GFR-binding peptide
  MOD_RES (4)..(38): Xaa is C or S

SEQ ID NO: 58537 - protein, 24 aa, Artificial Sequence
  Cyclic GFR-binding peptide
EERPVQMRKIRIKPHQGQHKKATV

SEQ ID NO: 58538 - protein, 39 aa, Artificial Sequence; identical to SEQ ID NO: 15481
  Cyclic GFR-binding peptide
  MOD_RES (1)..(38): Xaa is C or S

SEQ ID NO: 58539 - protein, 32 aa, Artificial Sequence
  Cyclic GFR-binding peptide
  MOD_RES (32)..(32): Xaa is C or S
HHSNITVQIMEYVRKKPKLLGEMSRLEEHLEX

SEQ ID NO: 58540 - protein, 37 aa, Artificial Sequence; identical to SEQ ID NO: 15482
  Cyclic GFR-binding peptide
  MOD_RES (4)..(4): Xaa is C or S

SEQ ID NO: 58541 - protein, 31 aa, Artificial Sequence
  Cyclic GFR-binding peptide
QPSRVHHSNITVQIMEYVRKKPKLLGEMSRL

SEQ ID NO: 58542 - protein, 34 aa, Artificial Sequence; identical to SEQ ID NO: 15483
  Cyclic GFR-binding peptide
  MOD_RES (2)..(2): Xaa is C or S

SEQ ID NO: 58543 - protein, 42 aa, Artificial Sequence; identical to SEQ ID NO: 15484
  Cyclic GFR-binding peptide
  MOD_RES (5)..(39)..(41): Xaa is C or S

SEQ ID NO: 58544 - protein, 35 aa, Artificial Sequence
  Cyclic GFR-binding peptide
  MOD_RES (33)..(35): Xaa is C or S
VQLRSVKVAKVEIVRKKPIFKEVQVTLEDHLAXKX

SEQ ID NO: 58545 - protein, 23 aa, Artificial Sequence
  Cyclic GFR-binding peptide
RSVKMAKVRIKPHQGQHKEVQVF

SEQ ID NO: 58546 - protein, 30 aa, Artificial Sequence
  Cyclic GFR-binding peptide
  MOD_RES (29)..(29): Xaa is C or S
RPVQMRKIRIKPHQGQHKKATVLEEHSQXE

SEQ ID NO: 58547 - protein, 37 aa, Artificial Sequence; identical to SEQ ID NO: 15489
  Cyclic GFR-binding peptide
  MOD_RES (3)..(37): Xaa is C or S

SEQ ID NO: 58548 - protein, 23 aa, Artificial Sequence
  Cyclic GFR-binding peptide
RSVKMAKVRIKPHQGQHKEVQVL

SEQ ID NO: 58549 - protein, 35 aa, Artificial Sequence; identical to SEQ ID NO: 15490
  Cyclic GFR-binding peptide
  MOD_RES (1)..(35): Xaa is C or S

SEQ ID NO: 58550 - protein, 41 aa, Artificial Sequence; identical to SEQ ID NO: 15488
  Cyclic GFR-binding peptide
  MOD_RES (2)..(39)..(41): Xaa is C or S

SEQ ID NO: 58551 - protein, 33 aa, Artificial Sequence
  Cyclic GFR-binding peptide
  MOD_RES (33)..(33): Xaa is C or S
VQLSNITVQIMEIVRKKPIFLGEMSTLEDHLAX

SEQ ID NO: 58552 - protein, 39 aa, Artificial Sequence; identical to SEQ ID NO: 15492
  Cyclic GFR-binding peptide
  MOD_RES (4)..(38): Xaa is C or S

SEQ ID NO: 58553 - protein, 28 aa, Artificial Sequence
  Cyclic GFR-binding peptide
PSRVHHSNITVQIMEYVRKKPKLIGEMS

SEQ ID NO: 58554 - protein, 33 aa, Artificial Sequence
  Cyclic GFR-binding peptide
QPSRVHHSNITVQIMEYVRKKPKLLGEMSRLEE

SEQ ID NO: 58555 - protein, 24 aa, Artificial Sequence
  Cyclic GFR-binding peptide
HSNITVQIMEYVRKKPKLLGEMSR

SEQ ID NO: 58556 - protein, 38 aa, Artificial Sequence; identical to SEQ ID NO: 15493
  Cyclic GFR-binding peptide
  MOD_RES (2)..(36)..(38): Xaa is C or S

SEQ ID NO: 58557 - protein, 28 aa, Artificial Sequence
  Cyclic GFR-binding peptide
SNITVQIMEYVRKKPKLLGEMSRLEEHL

SEQ ID NO: 58558 - protein, 29 aa, Artificial Sequence
  Cyclic GFR-binding peptide
  MOD_RES (2)..(2): Xaa is C or S
EXVPTEERSVKMAKVRIKPHQGQHKEVQV

SEQ ID NO: 58559 - protein, 33 aa, Artificial Sequence
  Cyclic GFR-binding peptide
  MOD_RES (30)..(32): Xaa is C or S
QSNITMQIMRIKPHQGQHIGEMSLEEHSQXEXR

SEQ ID NO: 58560 - protein, 33 aa, Artificial Sequence
  Cyclic GFR-binding peptide
  MOD_RES (6)..(6): Xaa is C or S
DEGLEXVPTGQRSVKMAKVRIKPHQGQHKEVQV

SEQ ID NO: 58561 - protein, 29 aa, Artificial Sequence
  Cyclic GFR-binding peptide
VHHRPVQVRKIEYVRKKPKLKKATVRLEE

SEQ ID NO: 58562 - protein, 42 aa, Artificial Sequence; identical to SEQ ID NO: 15496
  Cyclic GFR-binding peptide
  MOD_RES (5)..(42): Xaa is C or S

SEQ ID NO: 58563 - protein, 26 aa, Artificial Sequence
  Cyclic GFR-binding peptide
QRPVQMRKIRIKPHQGQHKKATVLEE

SEQ ID NO: 58564 - protein, 31 aa, Artificial Sequence
  Cyclic GFR-binding peptide
PSRVHHRPVQVRKIEYVRKKPKLKKATVRLE

SEQ ID NO: 58565 - protein, 34 aa, Artificial Sequence
  Cyclic GFR-binding peptide
  MOD_RES (31)..(33): Xaa is C or S
GQSNITMQIMRIKPHQGQHIGEMSLEEHSQXEXR

SEQ ID NO: 58566 - protein, 23 aa, Artificial Sequence
  Cyclic GFR-binding peptide
SNITVQIMEIVRKKPIFIGEMST

SEQ ID NO: 58567 - protein, 33 aa, Artificial Sequence
  Cyclic GFR-binding peptide
  MOD_RES (1)..(1): Xaa is C or S
XRPTQVQLRSVKVAKVEIVRKKPIFKEVQVTLE

SEQ ID NO: 58568 - protein, 36 aa, Artificial Sequence
  Cyclic GFR-binding peptide
  MOD_RES (4)..(4): Xaa is C or S
SVKXQPSRVHHSNITVQIMEYVRKKPKLIGEMSRLE

SEQ ID NO: 58569 - protein, 34 aa, Artificial Sequence
  Cyclic GFR-binding peptide
  MOD_RES (33)..(33): Xaa is C or S
VHHSNITVQIMEYVRKKPKLLGEMSRLEEHLEXA

SEQ ID NO: 58570 - protein, 27 aa, Artificial Sequence
  Cyclic GFR-binding peptide
SNITMQIMRIKPHQGQHLGEMSFLQHN

SEQ ID NO: 58571 - protein, 37 aa, Artificial Sequence
  Cyclic GFR-binding peptide
  MOD_RES (34)..(36): Xaa is C or S
RVHHSNITVQIMEYVRKKPKLIGEMSRLEEHLEXAXA

SEQ ID NO: 58572 - protein, 42 aa, Artificial Sequence; identical to SEQ ID NO: 15500
  Cyclic GFR-binding peptide
  MOD_RES (5)..(39)..(41): Xaa is C or S

SEQ ID NO: 58573 - protein, 28 aa, Artificial Sequence
  Cyclic GFR-binding peptide
RSVKVAKVEIVRKKPIFKEVQVTLEDHL

SEQ ID NO: 58574 - protein, 27 aa, Artificial Sequence
  Cyclic GFR-binding peptide
SNITVQIMEIVRKKPIFIGEMSTLEDH

SEQ ID NO: 58575 - protein, 39 aa, Artificial Sequence; identical to SEQ ID NO: 15501
  Cyclic GFR-binding peptide
  MOD_RES (3)..(3): Xaa is C or S

SEQ ID NO: 58576 - protein, 32 aa, Artificial Sequence
  Cyclic GFR-binding peptide
VHHSNITVQIMEYVRKKPKLIGEMSRLEEHLE

SEQ ID NO: 58577 - protein, 33 aa, Artificial Sequence
  Cyclic GFR-binding peptide
  MOD_RES (32)..(32): Xaa is C or S
HHSNITVQIMEYVRKKPKLLGEMSRLEEHLEXA

SEQ ID NO: 58578 - protein, 29 aa, Artificial Sequence
  Cyclic GFR-binding peptide
PTGQRSVKMAKVRIKPHQGQHKEVQVLEE

SEQ ID NO: 58579 - protein, 35 aa, Artificial Sequence
  Cyclic GFR-binding peptide
  MOD_RES (7)..(7): Xaa is C or S
NDEGLEXVPTEERPVQMRKIRIKPHQGQHKKATVF

SEQ ID NO: 58580 - protein, 34 aa, Artificial Sequence; identical to SEQ ID NO: 15505
  Cyclic GFR-binding peptide

SEQ ID NO: 58581 - protein, 36 aa, Artificial Sequence; identical to SEQ ID NO: 15504
  Cyclic GFR-binding peptide
  MOD_RES (3)..(3): Xaa is C or S

SEQ ID NO: 58582 - protein, 25 aa, Artificial Sequence
  Cyclic GFR-binding peptide
HRPVQVRKIEYVRKKPKLKKATVRL

SEQ ID NO: 58583 - protein, 40 aa, Artificial Sequence; identical to SEQ ID NO: 15508
  Cyclic GFR-binding peptide
  MOD_RES (4)..(4): Xaa is C or S

SEQ ID NO: 58584 - protein, 36 aa, Artificial Sequence; identical to SEQ ID NO: 15507
  Cyclic GFR-binding peptide
  MOD_RES (1)..(35): Xaa is C or S

SEQ ID NO: 58585 - protein, 42 aa, Artificial Sequence; identical to SEQ ID NO: 15509
  Cyclic GFR-binding peptide
  MOD_RES (2)..(39)..(41): Xaa is C or S

SEQ ID NO: 58586 - protein, 35 aa, Artificial Sequence; identical to SEQ ID NO: 15510
  Cyclic GFR-binding peptide
  MOD_RES (35)..(35): Xaa is C or S

SEQ ID NO: 58587 - protein, 38 aa, Artificial Sequence; identical to SEQ ID NO: 15511
  Cyclic GFR-binding peptide
  MOD_RES (5)..(5): Xaa is C or S

SEQ ID NO: 58588 - protein, 35 aa, Artificial Sequence; identical to SEQ ID NO: 15512
  Cyclic GFR-binding peptide
  MOD_RES (34)..(34): Xaa is C or S

SEQ ID NO: 58589 - protein, 27 aa, Artificial Sequence
  Cyclic GFR-binding peptide
TGQRPVQMRKIRIKPHQGQHKKATVLE

SEQ ID NO: 58590 - protein, 35 aa, Artificial Sequence
  Cyclic GFR-binding peptide
  MOD_RES (33)..(35): Xaa is C or S
PTGQRSVKMAKVRIKPHQGQHKEVQVLEEHSQXEX

SEQ ID NO: 58591 - protein, 33 aa, Artificial Sequence
  Cyclic GFR-binding peptide
  MOD_RES (1)..(1): Xaa is C or S
XQPSRVHHSNITVQIMEYVRKKPKLLGEMSRLE

SEQ ID NO: 58592 - protein, 31 aa, Artificial Sequence
  Cyclic GFR-binding peptide
VPTEERSVKMAKVRIKPHQGQHKEVQVFLQH

SEQ ID NO: 58593 - protein, 36 aa, Artificial Sequence
  Cyclic GFR-binding peptide
  MOD_RES (5)..(5): Xaa is C or S
SSVKXQPSRVHHRPVQVRKIEYVRKKPKLKKATVRL

SEQ ID NO: 58594 - protein, 33 aa, Artificial Sequence
  Cyclic GFR-binding peptide
  MOD_RES (33)..(33): Xaa is C or S
VHHRPVQVRKIEYVRKKPKLKKATVRLEEHLEX

SEQ ID NO: 58595 - protein, 34 aa, Artificial Sequence
  Cyclic GFR-binding peptide
  MOD_RES (5)..(5): Xaa is C or S
EGLEXVPTEESNITMQIMRIKPHQGQHLGEMSFL

SEQ ID NO: 58596 - protein, 40 aa, Artificial Sequence; identical to SEQ ID NO: 15517
  Cyclic GFR-binding peptide
  MOD_RES (7)..(7): Xaa is C or S

SEQ ID NO: 58597 - protein, 27 aa, Artificial Sequence
  Cyclic GFR-binding peptide
GQSNITMQIMRIKPHQGQHIGEMSLEE

SEQ ID NO: 58598 - protein, 35 aa, Artificial Sequence; identical to SEQ ID NO: 15518
  Cyclic GFR-binding peptide
  MOD_RES (2)..(2): Xaa is C or S

SEQ ID NO: 58599 - protein, 30 aa, Artificial Sequence
  Cyclic GFR-binding peptide
QPSRVHHSNITVQIMEYVRKKPKLLGEMSR

SEQ ID NO: 58600 - protein, 32 aa, Artificial Sequence
  Cyclic GFR-binding peptide
QPSRVHHSNITVQIMEYVRKKPKLLGEMSRLE

SEQ ID NO: 58601 - protein, 31 aa, Artificial Sequence
  Cyclic GFR-binding peptide
  MOD_RES (31)..(31): Xaa is C or S
GQRPVQMRKIRIKPHQGQHKKATVLEEHSQX

SEQ ID NO: 58602 - protein, 38 aa, Artificial Sequence; identical to SEQ ID NO: 15520
  Cyclic GFR-binding peptide
  MOD_RES (4)..(38): Xaa is C or S

SEQ ID NO: 58603 - protein, 25 aa, Artificial Sequence
  Cyclic GFR-binding peptide
RSVKMAKVRIKPHQGQHKEVQVFLQ

SEQ ID NO: 58604 - protein, 35 aa, Artificial Sequence; identical to SEQ ID NO: 15522
  Cyclic GFR-binding peptide
  MOD_RES (1)..(1): Xaa is C or S

SEQ ID NO: 58605 - protein, 34 aa, Artificial Sequence
  Cyclic GFR-binding peptide
  MOD_RES (3)..(3): Xaa is C or S
LEXVPTGQRPVQMRKIRIKPHQGQHKKATVLEEH

SEQ ID NO: 58606 - protein, 36 aa, Artificial Sequence
  Cyclic GFR-binding peptide
  MOD_RES (7)..(7): Xaa is C or S
NDEGLEXVPTGQSNITMQIMRIKPHQGQHIGEMSLE

SEQ ID NO: 58607 - protein, 28 aa, Artificial Sequence
  Cyclic GFR-binding peptide
VQLSNITVQIMEIVRKKPIFIGEMSTLE

SEQ ID NO: 58608 - protein, 30 aa, Artificial Sequence
  Cyclic GFR-binding peptide
TGQSNITMQIMRIKPHQGQHIGEMSLEEHS

SEQ ID NO: 58609 - protein, 36 aa, Artificial Sequence; identical to SEQ ID NO: 15525
  Cyclic GFR-binding peptide
  MOD_RES (1)..(35): Xaa is C or S

SEQ ID NO: 58610 - protein, 34 aa, Artificial Sequence
  Cyclic GFR-binding peptide
  MOD_RES (5)..(5): Xaa is C or S
EGLEXVPTEERSVKMAKVRIKPHQGQHKEVQVFL

SEQ ID NO: 58611 - protein, 31 aa, Artificial Sequence
  Cyclic GFR-binding peptide
TGQSNITMQIMRIKPHQGQHIGEMSLEEHSQ

SEQ ID NO: 58612 - protein, 35 aa, Artificial Sequence; identical to SEQ ID NO: 15526
  Cyclic GFR-binding peptide
  MOD_RES (2)..(2): Xaa is C or S

SEQ ID NO: 58613 - protein, 34 aa, Artificial Sequence
  Cyclic GFR-binding peptide
  MOD_RES (6)..(6): Xaa is C or S
DEGLEXVPTEERPVQMRKIRIKPHQGQHKKATVF

SEQ ID NO: 58614 - protein, 36 aa, Artificial Sequence; identical to SEQ ID NO: 15528
  Cyclic GFR-binding peptide
  MOD_RES (35)..(35): Xaa is C or S

SEQ ID NO: 58615 - protein, 31 aa, Artificial Sequence
  Cyclic GFR-binding peptide
QLSNITVQIMEIVRKKPIFLGEMSTLEDHLA

SEQ ID NO: 58616 - protein, 27 aa, Artificial Sequence
  Cyclic GFR-binding peptide
PTEERPVQMRKIRIKPHQGQHKKATVF

SEQ ID NO: 58617 - protein, 25 aa, Artificial Sequence
  Cyclic GFR-binding peptide
TGQSNITMQIMRIKPHQGQHIGEMS

SEQ ID NO: 58618 - protein, 35 aa, Artificial Sequence; identical to SEQ ID NO: 15533
  Cyclic GFR-binding peptide
  MOD_RES (3)..(3): Xaa is C or S

SEQ ID NO: 58619 - protein, 41 aa, Artificial Sequence; identical to SEQ ID NO: 15534
  Cyclic GFR-binding peptide
  MOD_RES (5)..(5): Xaa is C or S

SEQ ID NO: 58620 - protein, 30 aa, Artificial Sequence
  Cyclic GFR-binding peptide
PSRVHHSNITVQIMEYVRKKPKLLGEMSRL

SEQ ID NO: 58621 - protein, 36 aa, Artificial Sequence; identical to SEQ ID NO: 15536
  Cyclic GFR-binding peptide
  MOD_RES (1)..(1): Xaa is C or S

SEQ ID NO: 58622 - protein, 35 aa, Artificial Sequence
  Cyclic GFR-binding peptide
  MOD_RES (32)..(34): Xaa is C or S
QLRSVKVAKVEIVRKKPIFKEVQVTLEDHLAXKXE

SEQ ID NO: 58623 - protein, 34 aa, Artificial Sequence
  Cyclic GFR-binding peptide
  MOD_RES (4)..(4): Xaa is C or S
GLEXVPTEESNITMQIMRIKPHQGQHLGEMSFLQ

SEQ ID NO: 58624 - protein, 35 aa, Artificial Sequence
  Cyclic GFR-binding peptide
  MOD_RES (4)..(4): Xaa is C or S
NVQXRPTQVQLRSVKVAKVEIVRKKPIFKEVQVTL

SEQ ID NO: 58625 - protein, 35 aa, Artificial Sequence
  Cyclic GFR-binding peptide
  MOD_RES (33)..(35): Xaa is C or S
PTEERSVKMAKVRIKPHQGQHKEVQVFLQHNKXEX

SEQ ID NO: 58626 - protein, 32 aa, Artificial Sequence
  Cyclic GFR-binding peptide
RVHHSNITVQIMEYVRKKPKLLGEMSRLEEHL

SEQ ID NO: 58627 - protein, 42 aa, Artificial Sequence; identical to SEQ ID NO: 15540
  Cyclic GFR-binding peptide
  MOD_RES (3)..(40)..(42): Xaa is C or S

SEQ ID NO: 58628 - protein, 35 aa, Artificial Sequence
  Cyclic GFR-binding peptide
  MOD_RES (4)..(4): Xaa is C or S
SVKXQPSRVHHRPVQVRKIEYVRKKPKLKKATVRL

SEQ ID NO: 58629 - protein, 30 aa, Artificial Sequence
  Cyclic GFR-binding peptide
QLSNITVQIMEIVRKKPIFLGEMSTLEDHL

SEQ ID NO: 58630 - protein, 32 aa, Artificial Sequence
  Cyclic GFR-binding peptide
  MOD_RES (32)..(32): Xaa is C or S
QLSNITVQIMEIVRKKPIFLGEMSTLEDHLAX

SEQ ID NO: 58631 - protein, 30 aa, Artificial Sequence
  Cyclic GFR-binding peptide
SRVHHRPVQVRKIEYVRKKPKLKKATVRLE

SEQ ID NO: 58632 - protein, 34 aa, Artificial Sequence
  Cyclic GFR-binding peptide
  MOD_RES (5)..(5): Xaa is C or S
RNVQXRPTQVQLSNITVQIMEIVRKKPIFLGEMS

SEQ ID NO: 58633 - protein, 31 aa, Artificial Sequence
  Cyclic GFR-binding peptide
VPTEESNITMQIMRIKPHQGQHLGEMSFLQH

SEQ ID NO: 58634 - protein, 32 aa, Artificial Sequence
  Cyclic GFR-binding peptide
PTEERSVKMAKVRIKPHQGQHKEVQVFLQHNK

SEQ ID NO: 58635 - protein, 28 aa, Artificial Sequence
  Cyclic GFR-binding peptide
  MOD_RES (1)..(1): Xaa is C or S
XVPTGQRSVKMAKVRIKPHQGQHKEVQV

SEQ ID NO: 58636 - protein, 34 aa, Artificial Sequence
  Cyclic GFR-binding peptide
  MOD_RES (31)..(33): Xaa is C or S
GQRSVKMAKVRIKPHQGQHKEVQVLEEHSQXEXR

SEQ ID NO: 58637 - protein, 33 aa, Artificial Sequence
  Cyclic GFR-binding peptide
  MOD_RES (33)..(33): Xaa is C or S
VHHSNITVQIMEYVRKKPKLLGEMSRLEEHLEX

SEQ ID NO: 58638 - protein, 37 aa, Artificial Sequence
  Cyclic GFR-binding peptide
  MOD_RES (4)..(4): Xaa is C or S
NVQXRPTQVQLSNITVQIMEIVRKKPIFLGEMSTLED

SEQ ID NO: 58639 - protein, 27 aa, Artificial Sequence
  Cyclic GFR-binding peptide
PTEESNITMQIMRIKPHQGQHLGEMSF

SEQ ID NO: 58640 - protein, 36 aa, Artificial Sequence; identical to SEQ ID NO: 15543
  Cyclic GFR-binding peptide
  MOD_RES (2)..(2): Xaa is C or S

SEQ ID NO: 58641 - protein, 31 aa, Artificial Sequence
  Cyclic GFR-binding peptide
VQLSNITVQIMEIVRKKPIFLGEMSTLEDHL

SEQ ID NO: 58642 - protein, 28 aa, Artificial Sequence
  Cyclic GFR-binding peptide
RVHHSNITVQIMEYVRKKPKLIGEMSRL

SEQ ID NO: 58643 - protein, 32 aa, Artificial Sequence
  Cyclic GFR-binding peptide
  MOD_RES (3)..(3): Xaa is C or S
LEXVPTGQRPVQMRKIRIKPHQGQHKKATVLE

SEQ ID NO: 58644 - protein, 26 aa, Artificial Sequence
  Cyclic GFR-binding peptide
RPVQVRKIEYVRKKPKLKKATVRLEE

SEQ ID NO: 58645 - protein, 30 aa, Artificial Sequence
  Cyclic GFR-binding peptide
VPTGQSNITMQIMRIKPHQGQHIGEMSLEE

SEQ ID NO: 58646 - protein, 34 aa, Artificial Sequence
  Cyclic GFR-binding peptide
  MOD_RES (31)..(33): Xaa is C or S
GQRPVQMRKIRIKPHQGQHKKATVLEEHSQXEXR

SEQ ID NO: 58647 - protein, 39 aa, Artificial Sequence; identical to SEQ ID NO: 15549
  Cyclic GFR-binding peptide
  MOD_RES (6)..(6): Xaa is C or S

SEQ ID NO: 58648 - protein, 38 aa, Artificial Sequence; identical to SEQ ID NO: 15550
  Cyclic GFR-binding peptide
  MOD_RES (1)..(35)..(37): Xaa is C or S

SEQ ID NO: 58649 - protein, 37 aa, Artificial Sequence
  Cyclic GFR-binding peptide
  MOD_RES (7)..(7): Xaa is C or S
NDEGLEXVPTGQSNITMQIMRIKPHQGQHIGEMSLEE

SEQ ID NO: 58650 - protein, 31 aa, Artificial Sequence
  Cyclic GFR-binding peptide
  MOD_RES (1)..(1): Xaa is C or S
XVPTGQRSVKMAKVRIKPHQGQHKEVQVLEE

SEQ ID NO: 58651 - protein, 44 aa, Artificial Sequence; identical to SEQ ID NO: 15554
  Cyclic GFR-binding peptide
  MOD_RES (7)..(41)..(43): Xaa is C or S

SEQ ID NO: 58652 - protein, 36 aa, Artificial Sequence; identical to SEQ ID NO: 15555
  Cyclic GFR-binding peptide
  MOD_RES (1)..(1): Xaa is C or S

SEQ ID NO: 58653 - protein, 39 aa, Artificial Sequence; identical to SEQ ID NO: 15556
  Cyclic GFR-binding peptide
  MOD_RES (4)..(38): Xaa is C or S

SEQ ID NO: 58654 - protein, 43 aa, Artificial Sequence; identical to SEQ ID NO: 15557
  Cyclic GFR-binding peptide
  MOD_RES (3)..(40)..(42): Xaa is C or S

SEQ ID NO: 58655 - protein, 36 aa, Artificial Sequence; identical to SEQ ID NO: 15558
  Cyclic GFR-binding peptide
  MOD_RES (2)..(36): Xaa is C or S

SEQ ID NO: 58656 - protein, 28 aa, Artificial Sequence
  Cyclic GFR-binding peptide
PTGQRPVQMRKIRIKPHQGQHKKATVLE

SEQ ID NO: 58657 - protein, 25 aa, Artificial Sequence
  Cyclic GFR-binding peptide
HHSNITVQIMEYVRKKPKLIGEMSR

SEQ ID NO: 58658 - protein, 42 aa, Artificial Sequence; identical to SEQ ID NO: 15559
  Cyclic GFR-binding peptide
  MOD_RES (5)..(39)..(41): Xaa is C or S

SEQ ID NO: 58659 - protein, 34 aa, Artificial Sequence
  Cyclic GFR-binding peptide
  MOD_RES (3)..(3): Xaa is C or S
VKXQPSRVHHSNITVQIMEYVRKKPKLLGEMSRL

SEQ ID NO: 58660 - protein, 33 aa, Artificial Sequence
  Cyclic GFR-binding peptide
  MOD_RES (4)..(4): Xaa is C or S
NVQXRPTQVQLRSVKVAKVEIVRKKPIFKEVQV

SEQ ID NO: 58661 - protein, 28 aa, Artificial Sequence
  Cyclic GFR-binding peptide
TEERSVKMAKVRIKPHQGQHKEVQVFLQ

SEQ ID NO: 58662 - protein, 29 aa, Artificial Sequence
  Cyclic GFR-binding peptide
VPTGQRSVKMAKVRIKPHQGQHKEVQVLE

SEQ ID NO: 58663 - protein, 32 aa, Artificial Sequence
  Cyclic GFR-binding peptide
  MOD_RES (32)..(32): Xaa is C or S
HHRPVQVRKIEYVRKKPKLKKATVRLEEHLEX

SEQ ID NO: 58664 - protein, 44 aa, Artificial Sequence; identical to SEQ ID NO: 15562
  Cyclic GFR-binding peptide
  MOD_RES (7)..(41)..(43): Xaa is C or S

SEQ ID NO: 58665 - protein, 37 aa, Artificial Sequence
  Cyclic GFR-binding peptide
  MOD_RES (5)..(5): Xaa is C or S
RNVQXRPTQVQLRSVKVAKVEIVRKKPIFKEVQVTLE

SEQ ID NO: 58666 - protein, 32 aa, Artificial Sequence
  Cyclic GFR-binding peptide
  MOD_RES (4)..(4): Xaa is C or S
GLEXVPTEERPVQMRKIRIKPHQGQHKKATVF

SEQ ID NO: 58667 - protein, 37 aa, Artificial Sequence; identical to SEQ ID NO: 15563
  Cyclic GFR-binding peptide
  MOD_RES (36)..(36): Xaa is C or S

SEQ ID NO: 58668 - protein, 31 aa, Artificial Sequence
  Cyclic GFR-binding peptide
VHHSNITVQIMEYVRKKPKLIGEMSRLEEHL

SEQ ID NO: 58669 - protein, 36 aa, Artificial Sequence
  Cyclic GFR-binding peptide
  MOD_RES (4)..(4): Xaa is C or S
NVQXRPTQVQLSNITVQIMEIVRKKPIFLGEMSTLE

SEQ ID NO: 58670 - protein, 36 aa, Artificial Sequence
  Cyclic GFR-binding peptide
  MOD_RES (33)..(35): Xaa is C or S
PTGQSNITMQIMRIKPHQGQHIGEMSLEEHSQXEXR

SEQ ID NO: 58671 - protein, 35 aa, Artificial Sequence
  Cyclic GFR-binding peptide
  MOD_RES (5)..(5): Xaa is C or S
EGLEXVPTGQRPVQMRKIRIKPHQGQHKKATVLEE

SEQ ID NO: 58672 - protein, 30 aa, Artificial Sequence
  Cyclic GFR-binding peptide
TEESNITMQIMRIKPHQGQHLGEMSFLQHN

SEQ ID NO: 58673 - protein, 31 aa, Artificial Sequence
  Cyclic GFR-binding peptide
PTEERPVQMRKIRIKPHQGQHKKATVFLQHN

SEQ ID NO: 58674 - protein, 33 aa, Artificial Sequence
  Cyclic GFR-binding peptide
  MOD_RES (5)..(5): Xaa is C or S
EGLEXVPTGQRSVKMAKVRIKPHQGQHKEVQVL

SEQ ID NO: 58675 - protein, 27 aa, Artificial Sequence
  Cyclic GFR-binding peptide
RSVKVAKVEIVRKKPIFKEVQVTLEDH

SEQ ID NO: 58676 - protein, 34 aa, Artificial Sequence; identical to SEQ ID NO: 15567
  Cyclic GFR-binding peptide
  MOD_RES (2)..(2): Xaa is C or S

SEQ ID NO: 58677 - protein, 31 aa, Artificial Sequence
  Cyclic GFR-binding peptide
PTGQRSVKMAKVRIKPHQGQHKEVQVLEEHS

SEQ ID NO: 58678 - protein, 39 aa, Artificial Sequence; identical to SEQ ID NO: 15568
  Cyclic GFR-binding peptide
  MOD_RES (1)..(38): Xaa is C or S

SEQ ID NO: 58679 - protein, 23 aa, Artificial Sequence
  Cyclic GFR-binding peptide
QRPVQMRKIRIKPHQGQHKKATV

SEQ ID NO: 58680 - protein, 34 aa, Artificial Sequence
  Cyclic GFR-binding peptide
  MOD_RES (3)..(3): Xaa is C or S
LEXVPTGQRSVKMAKVRIKPHQGQHKEVQVLEEH

SEQ ID NO: 58681 - protein, 38 aa, Artificial Sequence; identical to SEQ ID NO: 15572
  Cyclic GFR-binding peptide
  MOD_RES (5)..(5): Xaa is C or S

SEQ ID NO: 58682 - protein, 30 aa, Artificial Sequence
  Cyclic GFR-binding peptide
  MOD_RES (3)..(3): Xaa is C or S
LEXVPTGQRPVQMRKIRIKPHQGQHKKATV

SEQ ID NO: 58683 - protein, 24 aa, Artificial Sequence
  Cyclic GFR-binding peptide
EESNITMQIMRIKPHQGQHLGEMS

SEQ ID NO: 58684 - protein, 32 aa, Artificial Sequence
  Cyclic GFR-binding peptide
  MOD_RES (2)..(2): Xaa is C or S
KXQPSRVHHSNITVQIMEYVRKKPKLLGEMSR

SEQ ID NO: 58685 - protein, 31 aa, Artificial Sequence
  Cyclic GFR-binding peptide
  MOD_RES (30)..(30): Xaa is C or S
SNITVQIMEYVRKKPKLIGEMSRLEEHLEXA

SEQ ID NO: 58686 - protein, 34 aa, Artificial Sequence
  Cyclic GFR-binding peptide
  MOD_RES (4)..(4): Xaa is C or S
GLEXVPTEERPVQMRKIRIKPHQGQHKKATVFLQ

SEQ ID NO: 58687 - protein, 33 aa, Artificial Sequence
  Cyclic GFR-binding peptide
  MOD_RES (6)..(6): Xaa is C or S
DEGLEXVPTGQSNITMQIMRIKPHQGQHIGEMS

SEQ ID NO: 58688 - protein, 32 aa, Artificial Sequence
  Cyclic GFR-binding peptide
VQLRSVKVAKVEIVRKKPIFKEVQVTLEDHLA

SEQ ID NO: 58689 - protein, 38 aa, Artificial Sequence
  Cyclic GFR-binding peptide
  MOD_RES (7)..(7): Xaa is C or S
NDEGLEXVPTEESNITMQIMRIKPHQGQHLGEMSFLQH

SEQ ID NO: 58690 - protein, 31 aa, Artificial Sequence
  Cyclic GFR-binding peptide
  MOD_RES (30)..(30): Xaa is C or S
QRSVKMAKVRIKPHQGQHKEVQVLEEHSQXE

SEQ ID NO: 58691 - protein, 43 aa, Artificial Sequence; identical to SEQ ID NO: 15577
  Cyclic GFR-binding peptide
  MOD_RES (4)..(41)..(43): Xaa is C or S

SEQ ID NO: 58692 - protein, 30 aa, Artificial Sequence
  Cyclic GFR-binding peptide
  MOD_RES (30)..(30): Xaa is C or S
ESNITMQIMRIKPHQGQHLGEMSFLQHNKX

SEQ ID NO: 58693 - protein, 34 aa, Artificial Sequence; identical to SEQ ID NO: 15580
  Cyclic GFR-binding peptide
  MOD_RES (1)..(1): Xaa is C or S

SEQ ID NO: 58694 - protein, 39 aa, Artificial Sequence; identical to SEQ ID NO: 15581
  Cyclic GFR-binding peptide
  MOD_RES (3)..(3): Xaa is C or S

SEQ ID NO: 58695 - protein, 29 aa, Artificial Sequence
  Cyclic GFR-binding peptide
PSRVHHSNITVQIMEYVRKKPKLIGEMSR

SEQ ID NO: 58696 - protein, 35 aa, Artificial Sequence; identical to SEQ ID NO: 15583
  Cyclic GFR-binding peptide
  MOD_RES (2)..(2): Xaa is C or S

SEQ ID NO: 58697 - protein, 30 aa, Artificial Sequence
  Cyclic GFR-binding peptide
HRPVQVRKIEYVRKKPKLKKATVRLEEHLE

SEQ ID NO: 58698 - protein, 33 aa, Artificial Sequence
  Cyclic GFR-binding peptide
  MOD_RES (31)..(33): Xaa is C or S
LSNITVQIMEIVRKKPIFLGEMSTLEDHLAXKX

SEQ ID NO: 58699 - protein, 37 aa, Artificial Sequence; identical to SEQ ID NO: 15585
  Cyclic GFR-binding peptide
  MOD_RES (37)..(37): Xaa is C or S

SEQ ID NO: 58700 - protein, 30 aa, Artificial Sequence
  Cyclic GFR-binding peptide
HSNITVQIMEYVRKKPKLIGEMSRLEEHLE

SEQ ID NO: 58701 - protein, 36 aa, Artificial Sequence; identical to SEQ ID NO: 15586
  Cyclic GFR-binding peptide
  MOD_RES (1)..(35): Xaa is C or S

SEQ ID NO: 58702 - protein, 40 aa, Artificial Sequence; identical to SEQ ID NO: 15589
  Cyclic GFR-binding peptide
  MOD_RES (37)..(39): Xaa is C or S

SEQ ID NO: 58703 - protein, 40 aa, Artificial Sequence; identical to SEQ ID NO: 15590
  Cyclic GFR-binding peptide
  MOD_RES (3)..(40): Xaa is C or S

SEQ ID NO: 58704 - protein, 33 aa, Artificial Sequence
  Cyclic GFR-binding peptide
QVQLSNITVQIMEIVRKKPIFLGEMSTLEDHLA

SEQ ID NO: 58705 - protein, 36 aa, Artificial Sequence
  Cyclic GFR-binding peptide
  MOD_RES (3)..(3): Xaa is C or S
VQXRPTQVQLSNITVQIMEIVRKKPIFLGEMSTLED

SEQ ID NO: 58706 - protein, 36 aa, Artificial Sequence; identical to SEQ ID NO: 15591
  Cyclic GFR-binding peptide
  MOD_RES (2)..(2): Xaa is C or S

SEQ ID NO: 58707 - protein, 35 aa, Artificial Sequence; identical to SEQ ID NO: 15592
  Cyclic GFR-binding peptide

SEQ ID NO: 58708 - protein, 39 aa, Artificial Sequence; identical to SEQ ID NO: 15593
  Cyclic GFR-binding peptide
  MOD_RES (6)..(6): Xaa is C or S

SEQ ID NO: 58709 - protein, 31 aa, Artificial Sequence
  Cyclic GFR-binding peptide
HHSNITVQIMEYVRKKPKLLGEMSRLEEHLE

SEQ ID NO: 58710 - protein, 43 aa, Artificial Sequence; identical to SEQ ID NO: 15595
  Cyclic GFR-binding peptide
  MOD_RES (7)..(41)..(43): Xaa is C or S

SEQ ID NO: 58711 - protein, 40 aa, Artificial Sequence; identical to SEQ ID NO: 15596
  Cyclic GFR-binding peptide
  MOD_RES (1)..(38)..(40): Xaa is C or S

SEQ ID NO: 58712 - protein, 40 aa, Artificial Sequence; identical to SEQ ID NO: 15597
  Cyclic GFR-binding peptide
  MOD_RES (1)..(38)..(40): Xaa is C or S

SEQ ID NO: 58713 - protein, 33 aa, Artificial Sequence
  Cyclic GFR-binding peptide
  MOD_RES (3)..(3): Xaa is C or S
VQXRPTQVQLRSVKVAKVEIVRKKPIFKEVQVT

SEQ ID NO: 58714 - protein, 36 aa, Artificial Sequence; identical to SEQ ID NO: 15600
  Cyclic GFR-binding peptide
  MOD_RES (1)..(1): Xaa is C or S

SEQ ID NO: 58715 - protein, 24 aa, Artificial Sequence
  Cyclic GFR-binding peptide
SNITVQIMEYVRKKPKLIGEMSRL

SEQ ID NO: 58716 - protein, 33 aa, Artificial Sequence; identical to SEQ ID NO: 15599
  Cyclic GFR-binding peptide

SEQ ID NO: 58717 - protein, 28 aa, Artificial Sequence
  Cyclic GFR-binding peptide
VQLSNITVQIMEIVRKKPIFLGEMSTLE

SEQ ID NO: 58718 - protein, 33 aa, Artificial Sequence
  Cyclic GFR-binding peptide
  MOD_RES (33)..(33): Xaa is C or S
VHHSNITVQIMEYVRKKPKLIGEMSRLEEHLEX

SEQ ID NO: 58719 - protein, 33 aa, Artificial Sequence; identical to SEQ ID NO: 15601
  Cyclic GFR-binding peptide

SEQ ID NO: 58720 - protein, 27 aa, Artificial Sequence
  Cyclic GFR-binding peptide
EERSVKMAKVRIKPHQGQHKEVQVFLQ

SEQ ID NO: 58721 - protein, 28 aa, Artificial Sequence
  Cyclic GFR-binding peptide
TGQRPVQMRKIRIKPHQGQHKKATVLEE

SEQ ID NO: 58722 - protein, 34 aa, Artificial Sequence; identical to SEQ ID NO: 15602
  Cyclic GFR-binding peptide

SEQ ID NO: 58723 - protein, 35 aa, Artificial Sequence
  Cyclic GFR-binding peptide
  MOD_RES (5)..(5): Xaa is C or S
RNVQXRPTQVQLSNITVQIMEIVRKKPIFLGEMST

SEQ ID NO: 58724 - protein, 26 aa, Artificial Sequence
  Cyclic GFR-binding peptide
SNITMQIMRIKPHQGQHIGEMSLEEH

SEQ ID NO: 58725 - protein, 40 aa, Artificial Sequence; identical to SEQ ID NO: 15603
  Cyclic GFR-binding peptide
  MOD_RES (4)..(4): Xaa is C or S

SEQ ID NO: 58726 - protein, 30 aa, Artificial Sequence
  Cyclic GFR-binding peptide
LSNITVQIMEIVRKKPIFLGEMSTLEDHLA

SEQ ID NO: 58727 - protein, 30 aa, Artificial Sequence
  Cyclic GFR-binding peptide
PSRVHHRPVQVRKIEYVRKKPKLKKATVRL

SEQ ID NO: 58728 - protein, 34 aa, Artificial Sequence; identical to SEQ ID NO: 15606
  Cyclic GFR-binding peptide
  MOD_RES (34)..(34): Xaa is C or S

SEQ ID NO: 58729 - protein, 31 aa, Artificial Sequence
  Cyclic GFR-binding peptide
TEERSVKMAKVRIKPHQGQHKEVQVFLQHNK

SEQ ID NO: 58730 - protein, 33 aa, Artificial Sequence
  Cyclic GFR-binding peptide
  MOD_RES (33)..(33): Xaa is C or S
VQLRSVKVAKVEIVRKKPIFKEVQVTLEDHLAX

SEQ ID NO: 58731 - protein, 34 aa, Artificial Sequence
  Cyclic GFR-binding peptide
  MOD_RES (1)..(1): Xaa is C or S
XQPSRVHHRPVQVRKIEYVRKKPKLKKATVRLEE

SEQ ID NO: 58732 - protein, 27 aa, Artificial Sequence
  Cyclic GFR-binding peptide
QVQLSNITVQIMEIVRKKPIFIGEMST

SEQ ID NO: 58733 - protein, 36 aa, Artificial Sequence; identical to SEQ ID NO: 15607
  Cyclic GFR-binding peptide
  MOD_RES (2)..(2): Xaa is C or S

SEQ ID NO: 58734 - protein, 31 aa, Artificial Sequence
  Cyclic GFR-binding peptide
HHRPVQVRKIEYVRKKPKLKKATVRLEEHLE

SEQ ID NO: 58735 - protein, 40 aa, Artificial Sequence; identical to SEQ ID NO: 15608
  Cyclic GFR-binding peptide
  MOD_RES (7)..(7): Xaa is C or S

SEQ ID NO: 58736 - protein, 32 aa, Artificial Sequence
  Cyclic GFR-binding peptide
  MOD_RES (1)..(1): Xaa is C or S
XVPTGQRSVKMAKVRIKPHQGQHKEVQVLEEH

SEQ ID NO: 58737 - protein, 31 aa, Artificial Sequence
  Cyclic GFR-binding peptide
TGQRSVKMAKVRIKPHQGQHKEVQVLEEHSQ

SEQ ID NO: 58738 - protein, 36 aa, Artificial Sequence; identical to SEQ ID NO: 15609
  Cyclic GFR-binding peptide

SEQ ID NO: 58739 - protein, 25 aa, Artificial Sequence
  Cyclic GFR-binding peptide
LRSVKVAKVEIVRKKPIFKEVQVTL

SEQ ID NO: 58740 - protein, 26 aa, Artificial Sequence
  Cyclic GFR-binding peptide
VQLSNITVQIMEIVRKKPIFLGEMST

SEQ ID NO: 58741 - protein, 40 aa, Artificial Sequence; identical to SEQ ID NO: 15613
  Cyclic GFR-binding peptide
  MOD_RES (2)..(39): Xaa is C or S

SEQ ID NO: 58742 - protein, 27 aa, Artificial Sequence
  Cyclic GFR-binding peptide
RSVKMAKVRIKPHQGQHKEVQVLEEHS

SEQ ID NO: 58743 - protein, 38 aa, Artificial Sequence; identical to SEQ ID NO: 15614
  Cyclic GFR-binding peptide
  MOD_RES (3)..(3): Xaa is C or S

SEQ ID NO: 58744 - protein, 32 aa, Artificial Sequence
  Cyclic GFR-binding peptide
  MOD_RES (30)..(32): Xaa is C or S
SNITVQIMEYVRKKPKLLGEMSRLEEHLEXAX

SEQ ID NO: 58745 - protein, 38 aa, Artificial Sequence; identical to SEQ ID NO: 15616
  Cyclic GFR-binding peptide
  MOD_RES (1)..(35)..(37): Xaa is C or S

SEQ ID NO: 58746 - protein, 35 aa, Artificial Sequence
  Cyclic GFR-binding peptide
  MOD_RES (4)..(4): Xaa is C or S
NVQXRPTQVQLSNITVQIMEIVRKKPIFLGEMSTL

SEQ ID NO: 58747 - protein, 43 aa, Artificial Sequence; identical to SEQ ID NO: 15617
  Cyclic GFR-binding peptide
  MOD_RES (4)..(41)..(43): Xaa is C or S

SEQ ID NO: 58748 - protein, 31 aa, Artificial Sequence
  Cyclic GFR-binding peptide
TQVQLSNITVQIMEIVRKKPIFIGEMSTLED

SEQ ID NO: 58749 - protein, 40 aa, Artificial Sequence; identical to SEQ ID NO: 15618
  Cyclic GFR-binding peptide
  MOD_RES (2)..(39): Xaa is C or S

SEQ ID NO: 58750 - protein, 35 aa, Artificial Sequence
  Cyclic GFR-binding peptide
  MOD_RES (7)..(7): Xaa is C or S
NDEGLEXVPTGQSNITMQIMRIKPHQGQHIGEMSL

SEQ ID NO: 58751 - protein, 43 aa, Artificial Sequence; identical to SEQ ID NO: 15619
  Cyclic GFR-binding peptide
  MOD_RES (4)..(41)..(43): Xaa is C or S

SEQ ID NO: 58752 - protein, 26 aa, Artificial Sequence
  Cyclic GFR-binding peptide
LSNITVQIMEIVRKKPIFLGEMSTLE

SEQ ID NO: 58753 - protein, 43 aa, Artificial Sequence; identical to SEQ ID NO: 15622
  Cyclic GFR-binding peptide
  MOD_RES (3)..(40)..(42): Xaa is C or S

SEQ ID NO: 58754 - protein, 24 aa, Artificial Sequence
  Cyclic GFR-binding peptide
EERSVKMAKVRIKPHQGQHKEVQV

SEQ ID NO: 58755 - protein, 33 aa, Artificial Sequence
  Cyclic GFR-binding peptide
RPTQVQLSNITVQIMEIVRKKPIFIGEMSTLED

SEQ ID NO: 58756 - protein, 35 aa, Artificial Sequence
  Cyclic GFR-binding peptide
  MOD_RES (33)..(35): Xaa is C or S
PTGQRPVQMRKIRIKPHQGQHKKATVLEEHSQXEX

SEQ ID NO: 58757 - protein, 28 aa, Artificial Sequence
  Cyclic GFR-binding peptide
PSRVHHSNITVQIMEYVRKKPKLLGEMS

SEQ ID NO: 58758 - protein, 28 aa, Artificial Sequence
  Cyclic GFR-binding peptide
VHHSNITVQIMEYVRKKPKLIGEMSRLE

SEQ ID NO: 58759 - protein, 29 aa, Artificial Sequence
  Cyclic GFR-binding peptide
PTEERSVKMAKVRIKPHQGQHKEVQVFLQ

SEQ ID NO: 58760 - protein, 41 aa, Artificial Sequence; identical to SEQ ID NO: 15626
  Cyclic GFR-binding peptide
  MOD_RES (4)..(38)..(40): Xaa is C or S

SEQ ID NO: 58761 - protein, 31 aa, Artificial Sequence
  Cyclic GFR-binding peptide
  MOD_RES (30)..(30): Xaa is C or S
SNITVQIMEYVRKKPKLLGEMSRLEEHLEXA

SEQ ID NO: 58762 - protein, 27 aa, Artificial Sequence
  Cyclic GFR-binding peptide
VQLSNITVQIMEIVRKKPIFLGEMSTL

SEQ ID NO: 58763 - protein, 26 aa, Artificial Sequence
  Cyclic GFR-binding peptide
RSVKMAKVRIKPHQGQHKEVQVLEEH

SEQ ID NO: 58764 - protein, 36 aa, Artificial Sequence; identical to SEQ ID NO: 15629
  Cyclic GFR-binding peptide
  MOD_RES (1)..(35): Xaa is C or S

SEQ ID NO: 58765 - protein, 36 aa, Artificial Sequence; identical to SEQ ID NO: 15630
  Cyclic GFR-binding peptide
  MOD_RES (3)..(3): Xaa is C or S

SEQ ID NO: 58766 - protein, 35 aa, Artificial Sequence
  Cyclic GFR-binding peptide
  MOD_RES (34)..(34): Xaa is C or S
RVHHRPVQVRKIEYVRKKPKLKKATVRLEEHLEXA

SEQ ID NO: 58767 - protein, 27 aa, Artificial Sequence
  Cyclic GFR-binding peptide
HRPVQVRKIEYVRKKPKLKKATVRLEE

SEQ ID NO: 58768 - protein, 39 aa, Artificial Sequence; identical to SEQ ID NO: 15631
  Cyclic GFR-binding peptide
  MOD_RES (4)..(38): Xaa is C or S

SEQ ID NO: 58769 - protein, 32 aa, Artificial Sequence
  Cyclic GFR-binding peptide
  MOD_RES (31)..(31): Xaa is C or S
HRPVQVRKIEYVRKKPKLKKATVRLEEHLEXA

SEQ ID NO: 58770 - protein, 37 aa, Artificial Sequence; identical to SEQ ID NO: 15634
  Cyclic GFR-binding peptide
  MOD_RES (3)..(3): Xaa is C or S

SEQ ID NO: 58771 - protein, 33 aa, Artificial Sequence
  Cyclic GFR-binding peptide
  MOD_RES (31)..(33): Xaa is C or S
HSNITVQIMEYVRKKPKLLGEMSRLEEHLEXAX

SEQ ID NO: 58772 - protein, 24 aa, Artificial Sequence
  Cyclic GFR-binding peptide
SNITVQIMEIVRKKPIFIGEMSTL

SEQ ID NO: 58773 - protein, 40 aa, Artificial Sequence; identical to SEQ ID NO: 15637
  Cyclic GFR-binding peptide
  MOD_RES (3)..(37)..(39): Xaa is C or S

SEQ ID NO: 58774 - protein, 36 aa, Artificial Sequence
  Cyclic GFR-binding peptide
  MOD_RES (6)..(6): Xaa is C or S
DEGLEXVPTEERPVQMRKIRIKPHQGQHKKATVFLQ

SEQ ID NO: 58775 - protein, 33 aa, Artificial Sequence
  Cyclic GFR-binding peptide
  MOD_RES (2)..(2): Xaa is C or S
QXRPTQVQLSNITVQIMEIVRKKPIFIGEMSTL

SEQ ID NO: 58776 - protein, 23 aa, Artificial Sequence
  Cyclic GFR-binding peptide
HSNITVQIMEYVRKKPKLLGEMS

SEQ ID NO: 58777 - protein, 32 aa, Artificial Sequence
  Cyclic GFR-binding peptide
  MOD_RES (3)..(3): Xaa is C or S
LEXVPTEERSVKMAKVRIKPHQGQHKEVQVFL

SEQ ID NO: 58778 - protein, 33 aa, Artificial Sequence
  Cyclic GFR-binding peptide
  MOD_RES (31)..(33): Xaa is C or S
HSNITVQIMEYVRKKPKLIGEMSRLEEHLEXAX

SEQ ID NO: 58779 - protein, 41 aa, Artificial Sequence; identical to SEQ ID NO: 15638
  Cyclic GFR-binding peptide
  MOD_RES (5)..(39)..(41): Xaa is C or S

SEQ ID NO: 58780 - protein, 30 aa, Artificial Sequence
  Cyclic GFR-binding peptide
VHHSNITVQIMEYVRKKPKLIGEMSRLEEH

SEQ ID NO: 58781 - protein, 35 aa, Artificial Sequence
  Cyclic GFR-binding peptide
  MOD_RES (32)..(34): Xaa is C or S
QLSNITVQIMEIVRKKPIFIGEMSTLEDHLAXKXE

SEQ ID NO: 58782 - protein, 34 aa, Artificial Sequence
  Cyclic GFR-binding peptide
  MOD_RES (32)..(34): Xaa is C or S
HHSNITVQIMEYVRKKPKLIGEMSRLEEHLEXAX

SEQ ID NO: 58783 - protein, 36 aa, Artificial Sequence; identical to SEQ ID NO: 15641
  Cyclic GFR-binding peptide
  MOD_RES (2)..(36): Xaa is C or S

SEQ ID NO: 58784 - protein, 31 aa, Artificial Sequence
  Cyclic GFR-binding peptide
  MOD_RES (4)..(4): Xaa is C or S
GLEXVPTEERPVQMRKIRIKPHQGQHKKATV

SEQ ID NO: 58785 - protein, 40 aa, Artificial Sequence; identical to SEQ ID NO: 15643
  Cyclic GFR-binding peptide
  MOD_RES (1)..(38)..(40): Xaa is C or S

SEQ ID NO: 58786 - protein, 40 aa, Artificial Sequence; identical to SEQ ID NO: 15644
  Cyclic GFR-binding peptide
  MOD_RES (5)..(5): Xaa is C or S

SEQ ID NO: 58787 - protein, 29 aa, Artificial Sequence
  Cyclic GFR-binding peptide
PTQVQLSNITVQIMEIVRKKPIFLGEMST

SEQ ID NO: 58788 - protein, 37 aa, Artificial Sequence; identical to SEQ ID NO: 15645
  Cyclic GFR-binding peptide
  MOD_RES (4)..(4): Xaa is C or S

SEQ ID NO: 58789 - protein, 23 aa, Artificial Sequence
  Cyclic GFR-binding peptide
ESNITMQIMRIKPHQGQHLGEMS

SEQ ID NO: 58790 - protein, 40 aa, Artificial Sequence; identical to SEQ ID NO: 15646
  Cyclic GFR-binding peptide
  MOD_RES (7)..(7): Xaa is C or S

SEQ ID NO: 58791 - protein, 37 aa, Artificial Sequence; identical to SEQ ID NO: 15647
  Cyclic GFR-binding peptide
  MOD_RES (1)..(35)..(37): Xaa is C or S

SEQ ID NO: 58792 - protein, 31 aa, Artificial Sequence
  Cyclic GFR-binding peptide
  MOD_RES (1)..(1): Xaa is C or S
XRPTQVQLSNITVQIMEIVRKKPIFIGEMST

SEQ ID NO: 58793 - protein, 30 aa, Artificial Sequence
  Cyclic GFR-binding peptide
  MOD_RES (2)..(2): Xaa is C or S
EXVPTGQRPVQMRKIRIKPHQGQHKKATVL

SEQ ID NO: 58794 - protein, 34 aa, Artificial Sequence; identical to SEQ ID NO: 15649
  Cyclic GFR-binding peptide
  MOD_RES (2)..(2): Xaa is C or S

SEQ ID NO: 58795 - protein, 22 aa, Artificial Sequence
  Cyclic GFR-binding peptide
SNITVQIMEYVRKKPKLIGEMS

SEQ ID NO: 58796 - protein, 34 aa, Artificial Sequence
  Cyclic GFR-binding peptide
  MOD_RES (2)..(2): Xaa is C or S
QXRPTQVQLSNITVQIMEIVRKKPIFLGEMSTLE

SEQ ID NO: 58797 - protein, 28 aa, Artificial Sequence
  Cyclic GFR-binding peptide
RSVKMAKVRIKPHQGQHKEVQVFLQHNK

SEQ ID NO: 58798 - protein, 42 aa, Artificial Sequence; identical to SEQ ID NO: 15652
  Cyclic GFR-binding peptide
  MOD_RES (2)..(39)..(41): Xaa is C or S

SEQ ID NO: 58799 - protein, 34 aa, Artificial Sequence; identical to SEQ ID NO: 15653
  Cyclic GFR-binding peptide

SEQ ID NO: 58800 - protein, 32 aa, Artificial Sequence
  Cyclic GFR-binding peptide
  MOD_RES (32)..(32): Xaa is C or S
QLSNITVQIMEIVRKKPIFIGEMSTLEDHLAX

SEQ ID NO: 58801 - protein, 41 aa, Artificial Sequence; identical to SEQ ID NO: 15654
  Cyclic GFR-binding peptide
  MOD_RES (1)..(38)..(40): Xaa is C or S

SEQ ID NO: 58802 - protein, 31 aa, Artificial Sequence
  Cyclic GFR-binding peptide
  MOD_RES (29)..(31): Xaa is C or S
RSVKMAKVRIKPHQGQHKEVQVFLQHNKXEX

SEQ ID NO: 58803 - protein, 32 aa, Artificial Sequence
  Cyclic GFR-binding peptide
PSRVHHRPVQVRKIEYVRKKPKLKKATVRLEE

SEQ ID NO: 58804 - protein, 27 aa, Artificial Sequence
  Cyclic GFR-binding peptide
QRSVKMAKVRIKPHQGQHKEVQVLEEH

SEQ ID NO: 58805 - protein, 40 aa, Artificial Sequence; identical to SEQ ID NO: 15657
  Cyclic GFR-binding peptide
  MOD_RES (3)..(37)..(39): Xaa is C or S

SEQ ID NO: 58806 - protein, 35 aa, Artificial Sequence
  Cyclic GFR-binding peptide
  MOD_RES (4)..(4): Xaa is C or S
NVQXRPTQVQLSNITVQIMEIVRKKPIFIGEMSTL

SEQ ID NO: 58807 - protein, 34 aa, Artificial Sequence
  Cyclic GFR-binding peptide
  MOD_RES (33)..(33): Xaa is C or S
PTEERSVKMAKVRIKPHQGQHKEVQVFLQHNKXE

SEQ ID NO: 58808 - protein, 30 aa, Artificial Sequence
  Cyclic GFR-binding peptide
  MOD_RES (1)..(1): Xaa is C or S
XVPTGQRSVKMAKVRIKPHQGQHKEVQVLE

SEQ ID NO: 58809 - protein, 35 aa, Artificial Sequence
  Cyclic GFR-binding peptide
  MOD_RES (33)..(35): Xaa is C or S
PTGQSNITMQIMRIKPHQGQHIGEMSLEEHSQXEX

SEQ ID NO: 58810 - protein, 31 aa, Artificial Sequence
  Cyclic GFR-binding peptide
  MOD_RES (2)..(2): Xaa is C or S
EXVPTGQRSVKMAKVRIKPHQGQHKEVQVLE

SEQ ID NO: 58811 - protein, 28 aa, Artificial Sequence
  Cyclic GFR-binding peptide
PTQVQLSNITVQIMEIVRKKPIFIGEMS

SEQ ID NO: 58812 - protein, 38 aa, Artificial Sequence; identical to SEQ ID NO: 15663
  Cyclic GFR-binding peptide
  MOD_RES (2)..(2): Xaa is C or S

SEQ ID NO: 58813 - protein, 33 aa, Artificial Sequence
  Cyclic GFR-binding peptide
  MOD_RES (32)..(32): Xaa is C or S
TEERSVKMAKVRIKPHQGQHKEVQVFLQHNKXE

SEQ ID NO: 58814 - protein, 25 aa, Artificial Sequence
  Cyclic GFR-binding peptide
TGQRSVKMAKVRIKPHQGQHKEVQV

SEQ ID NO: 58815 - protein, 30 aa, Artificial Sequence
  Cyclic GFR-binding peptide
GQSNITMQIMRIKPHQGQHIGEMSLEEHSQ

SEQ ID NO: 58816 - protein, 35 aa, Artificial Sequence
  Cyclic GFR-binding peptide
  MOD_RES (3)..(3): Xaa is C or S
VKXQPSRVHHSNITVQIMEYVRKKPKLIGEMSRLE

SEQ ID NO: 58817 - protein, 32 aa, Artificial Sequence
  Cyclic GFR-binding peptide
  MOD_RES (31)..(31): Xaa is C or S
LSNITVQIMEIVRKKPIFLGEMSTLEDHLAXK

SEQ ID NO: 58818 - protein, 40 aa, Artificial Sequence; identical to SEQ ID NO: 15668
  Cyclic GFR-binding peptide
  MOD_RES (3)..(40): Xaa is C or S

SEQ ID NO: 58819 - protein, 38 aa, Artificial Sequence
  Cyclic GFR-binding peptide
  MOD_RES (5)..(5): Xaa is C or S
RNVQXRPTQVQLRSVKVAKVEIVRKKPIFKEVQVTLED

SEQ ID NO: 58820 - protein, 28 aa, Artificial Sequence
  Cyclic GFR-binding peptide
ERPVQMRKIRIKPHQGQHKKATVFLQHN

SEQ ID NO: 58821 - protein, 26 aa, Artificial Sequence
  Cyclic GFR-binding peptide
ESNITMQIMRIKPHQGQHLGEMSFLQ

SEQ ID NO: 58822 - protein, 28 aa, Artificial Sequence
  Cyclic GFR-binding peptide
  MOD_RES (1)..(1): Xaa is C or S
XVPTGQSNITMQIMRIKPHQGQHIGEMS

SEQ ID NO: 58823 - protein, 32 aa, Artificial Sequence
  Cyclic GFR-binding peptide
  MOD_RES (32)..(32): Xaa is C or S
HHSNITVQIMEYVRKKPKLIGEMSRLEEHLEX

SEQ ID NO: 58824 - protein, 31 aa, Artificial Sequence
  Cyclic GFR-binding peptide
  MOD_RES (31)..(31): Xaa is C or S
EERPVQMRKIRIKPHQGQHKKATVFLQHNKX

SEQ ID NO: 58825 - protein, 32 aa, Artificial Sequence
  Cyclic GFR-binding peptide
  MOD_RES (5)..(5): Xaa is C or S
EGLEXVPTEESNITMQIMRIKPHQGQHLGEMS

SEQ ID NO: 58826 - protein, 38 aa, Artificial Sequence
  Cyclic GFR-binding peptide
  MOD_RES (5)..(5): Xaa is C or S
SSVKXQPSRVHHRPVQVRKIEYVRKKPKLKKATVRLEE

SEQ ID NO: 58827 - protein, 33 aa, Artificial Sequence; identical to SEQ ID NO: 15670
  Cyclic GFR-binding peptide

SEQ ID NO: 58828 - protein, 27 aa, Artificial Sequence
  Cyclic GFR-binding peptide
TGQRSVKMAKVRIKPHQGQHKEVQVLE

SEQ ID NO: 58829 - protein, 40 aa, Artificial Sequence; identical to SEQ ID NO: 15671
  Cyclic GFR-binding peptide
  MOD_RES (5)..(5): Xaa is C or S

SEQ ID NO: 58830 - protein, 26 aa, Artificial Sequence
  Cyclic GFR-binding peptide
HHSNITVQIMEYVRKKPKLIGEMSRL

SEQ ID NO: 58831 - protein, 23 aa, Artificial Sequence
  Cyclic GFR-binding peptide
SNITVQIMEYVRKKPKLIGEMSR

SEQ ID NO: 58832 - protein, 30 aa, Artificial Sequence
  Cyclic GFR-binding peptide
VHHSNITVQIMEYVRKKPKLLGEMSRLEEH

SEQ ID NO: 58833 - protein, 36 aa, Artificial Sequence; identical to SEQ ID NO: 15672
  Cyclic GFR-binding peptide
  MOD_RES (36)..(36): Xaa is C or S

SEQ ID NO: 58834 - protein, 30 aa, Artificial Sequence
  Cyclic GFR-binding peptide
  MOD_RES (29)..(29): Xaa is C or S
SNITMQIMRIKPHQGQHLGEMSFLQHNKXE

SEQ ID NO: 58835 - protein, 27 aa, Artificial Sequence
  Cyclic GFR-binding peptide
VHHSNITVQIMEYVRKKPKLLGEMSRL

SEQ ID NO: 58836 - protein, 43 aa, Artificial Sequence; identical to SEQ ID NO: 15673
  Cyclic GFR-binding peptide
  MOD_RES (7)..(41)..(43): Xaa is C or S

SEQ ID NO: 58837 - protein, 29 aa, Artificial Sequence
  Cyclic GFR-binding peptide
VPTEERPVQMRKIRIKPHQGQHKKATVFL

SEQ ID NO: 58838 - protein, 30 aa, Artificial Sequence
  Cyclic GFR-binding peptide
GQRSVKMAKVRIKPHQGQHKEVQVLEEHSQ

SEQ ID NO: 58839 - protein, 28 aa, Artificial Sequence
  Cyclic GFR-binding peptide
ERSVKMAKVRIKPHQGQHKEVQVFLQHN

SEQ ID NO: 58840 - protein, 29 aa, Artificial Sequence
  Cyclic GFR-binding peptide
HHSNITVQIMEYVRKKPKLIGEMSRLEEH

SEQ ID NO: 58841 - protein, 27 aa, Artificial Sequence
  Cyclic GFR-binding peptide
TEESNITMQIMRIKPHQGQHLGEMSFL

SEQ ID NO: 58842 - protein, 28 aa, Artificial Sequence
  Cyclic GFR-binding peptide
EERSVKMAKVRIKPHQGQHKEVQVFLQH

SEQ ID NO: 58843 - protein, 35 aa, Artificial Sequence
  Cyclic GFR-binding peptide
  MOD_RES (5)..(5): Xaa is C or S
EGLEXVPTGQRSVKMAKVRIKPHQGQHKEVQVLEE

SEQ ID NO: 58844 - protein, 31 aa, Artificial Sequence
  Cyclic GFR-binding peptide
  MOD_RES (3)..(3): Xaa is C or S
LEXVPTEERPVQMRKIRIKPHQGQHKKATVF

SEQ ID NO: 58845 - protein, 34 aa, Artificial Sequence
  Cyclic GFR-binding peptide
  MOD_RES (32)..(34): Xaa is C or S
QLSNITVQIMEIVRKKPIFLGEMSTLEDHLAXKX

SEQ ID NO: 58846 - protein, 33 aa, Artificial Sequence
  Cyclic GFR-binding peptide
  MOD_RES (3)..(3): Xaa is C or S
VKXQPSRVHHRPVQVRKIEYVRKKPKLKKATVR

SEQ ID NO: 58847 - protein, 26 aa, Artificial Sequence
  Cyclic GFR-binding peptide
QLRSVKVAKVEIVRKKPIFKEVQVTL

SEQ ID NO: 58848 - protein, 38 aa, Artificial Sequence; identical to SEQ ID NO: 15683
  Cyclic GFR-binding peptide
  MOD_RES (36)..(38): Xaa is C or S

SEQ ID NO: 58849 - protein, 35 aa, Artificial Sequence
  Cyclic GFR-binding peptide
  MOD_RES (7)..(7): Xaa is C or S
NDEGLEXVPTGQRPVQMRKIRIKPHQGQHKKATVL

SEQ ID NO: 58850 - protein, 31 aa, Artificial Sequence
  Cyclic GFR-binding peptide
PTQVQLRSVKVAKVEIVRKKPIFKEVQVTLE

SEQ ID NO: 58851 - protein, 36 aa, Artificial Sequence
  Cyclic GFR-binding peptide
  MOD_RES (33)..(35): Xaa is C or S
VQLSNITVQIMEIVRKKPIFIGEMSTLEDHLAXKXE

SEQ ID NO: 58852 - protein, 37 aa, Artificial Sequence; identical to SEQ ID NO: 15685
  Cyclic GFR-binding peptide
  MOD_RES (3)..(3): Xaa is C or S

SEQ ID NO: 58853 - protein, 32 aa, Artificial Sequence
  Cyclic GFR-binding peptide
  MOD_RES (31)..(31): Xaa is C or S
GQRSVKMAKVRIKPHQGQHKEVQVLEEHSQXE

SEQ ID NO: 58854 - protein, 32 aa, Artificial Sequence
  Cyclic GFR-binding peptide
  MOD_RES (31)..(31): Xaa is C or S
EERPVQMRKIRIKPHQGQHKKATVFLQHNKXE

SEQ ID NO: 58855 - protein, 31 aa, Artificial Sequence
  Cyclic GFR-binding peptide
  MOD_RES (2)..(2): Xaa is C or S
EXVPTEESNITMQIMRIKPHQGQHLGEMSFL

SEQ ID NO: 58856 - protein, 33 aa, Artificial Sequence
  Cyclic GFR-binding peptide
  MOD_RES (30)..(32): Xaa is C or S
ERPVQMRKIRIKPHQGQHKKATVFLQHNKXEXR

SEQ ID NO: 58857 - protein, 30 aa, Artificial Sequence
  Cyclic GFR-binding peptide
  MOD_RES (2)..(2): Xaa is C or S
EXVPTGQSNITMQIMRIKPHQGQHIGEMSL

SEQ ID NO: 58858 - protein, 31 aa, Artificial Sequence
  Cyclic GFR-binding peptide
  MOD_RES (29)..(31): Xaa is C or S
RSVKMAKVRIKPHQGQHKEVQVLEEHSQXEX

SEQ ID NO: 58859 - protein, 27 aa, Artificial Sequence
  Cyclic GFR-binding peptide
LSNITVQIMEIVRKKPIFIGEMSTLED

SEQ ID NO: 58860 - protein, 33 aa, Artificial Sequence
  Cyclic GFR-binding peptide
  MOD_RES (31)..(33): Xaa is C or S
EERSVKMAKVRIKPHQGQHKEVQVFLQHNKXEX

SEQ ID NO: 58861 - protein, 31 aa, Artificial Sequence
  Cyclic GFR-binding peptide
  MOD_RES (1)..(1): Xaa is C or S
XQPSRVHHSNITVQIMEYVRKKPKLIGEMSR

SEQ ID NO: 58862 - protein, 26 aa, Artificial Sequence
  Cyclic GFR-binding peptide
VQLRSVKVAKVEIVRKKPIFKEVQVT

SEQ ID NO: 58863 - protein, 31 aa, Artificial Sequence
  Cyclic GFR-binding peptide
  MOD_RES (1)..(1): Xaa is C or S
XQPSRVHHRPVQVRKIEYVRKKPKLKKATVR

SEQ ID NO: 58864 - protein, 28 aa, Artificial Sequence
  Cyclic GFR-binding peptide
HRPVQVRKIEYVRKKPKLKKATVRLEEH

SEQ ID NO: 58865 - protein, 30 aa, Artificial Sequence
  Cyclic GFR-binding peptide
VPTGQRPVQMRKIRIKPHQGQHKKATVLEE

SEQ ID NO: 58866 - protein, 27 aa, Artificial Sequence
  Cyclic GFR-binding peptide
VPTGQRSVKMAKVRIKPHQGQHKEVQV

SEQ ID NO: 58867 - protein, 25 aa, Artificial Sequence
  Cyclic GFR-binding peptide
GQRPVQMRKIRIKPHQGQHKKATVL

SEQ ID NO: 58868 - protein, 35 aa, Artificial Sequence; identical to SEQ ID NO: 15687
  Cyclic GFR-binding peptide
  MOD_RES (35)..(35): Xaa is C or S

SEQ ID NO: 58869 - protein, 38 aa, Artificial Sequence; identical to SEQ ID NO: 15688
  Cyclic GFR-binding peptide
  MOD_RES (3)..(3): Xaa is C or S

SEQ ID NO: 58870 - protein, 34 aa, Artificial Sequence
  Cyclic GFR-binding peptide
  MOD_RES (1)..(1): Xaa is C or S
XRPTQVQLSNITVQIMEIVRKKPIFIGEMSTLED

SEQ ID NO: 58871 - protein, 24 aa, Artificial Sequence
  Cyclic GFR-binding peptide
HRPVQVRKIEYVRKKPKLKKATVR

SEQ ID NO: 58872 - protein, 42 aa, Artificial Sequence; identical to SEQ ID NO: 15691
  Cyclic GFR-binding peptide
  MOD_RES (4)..(41): Xaa is C or S

SEQ ID NO: 58873 - protein, 30 aa, Artificial Sequence
  Cyclic GFR-binding peptide
QVQLSNITVQIMEIVRKKPIFIGEMSTLED

SEQ ID NO: 58874 - protein, 35 aa, Artificial Sequence
  Cyclic GFR-binding peptide
  MOD_RES (2)..(2): Xaa is C or S
QXRPTQVQLRSVKVAKVEIVRKKPIFKEVQVTLED

SEQ ID NO: 58875 - protein, 38 aa, Artificial Sequence; identical to SEQ ID NO: 15692
  Cyclic GFR-binding peptide
  MOD_RES (5)..(5): Xaa is C or S

SEQ ID NO: 58876 - protein, 35 aa, Artificial Sequence
  Cyclic GFR-binding peptide
  MOD_RES (33)..(35): Xaa is C or S
PTEESNITMQIMRIKPHQGQHLGEMSFLQHNKXEX

SEQ ID NO: 58877 - protein, 35 aa, Artificial Sequence; identical to SEQ ID NO: 15695
  Cyclic GFR-binding peptide
  MOD_RES (35)..(35): Xaa is C or S

SEQ ID NO: 58878 - protein, 36 aa, Artificial Sequence; identical to SEQ ID NO: 15694
  Cyclic GFR-binding peptide
  MOD_RES (36)..(36): Xaa is C or S

SEQ ID NO: 58879 - protein, 38 aa, Artificial Sequence; identical to SEQ ID NO: 15696
  Cyclic GFR-binding peptide
  MOD_RES (5)..(5): Xaa is C or S

SEQ ID NO: 58880 - protein, 33 aa, Artificial Sequence
  Cyclic GFR-binding peptide
QVQLRSVKVAKVEIVRKKPIFKEVQVTLEDHLA

SEQ ID NO: 58881 - protein, 36 aa, Artificial Sequence; identical to SEQ ID NO: 15697
  Cyclic GFR-binding peptide
  MOD_RES (2)..(2): Xaa is C or S

SEQ ID NO: 58882 - protein, 33 aa, Artificial Sequence; identical to SEQ ID NO: 15699
  Cyclic GFR-binding peptide

SEQ ID NO: 58883 - protein, 34 aa, Artificial Sequence
  Cyclic GFR-binding peptide
  MOD_RES (33)..(33): Xaa is C or S
VQLSNITVQIMEIVRKKPIFLGEMSTLEDHLAXK

SEQ ID NO: 58884 - protein, 34 aa, Artificial Sequence; identical to SEQ ID NO: 15700
  Cyclic GFR-binding peptide

SEQ ID NO: 58885 - protein, 26 aa, Artificial Sequence
  Cyclic GFR-binding peptide
HHSNITVQIMEYVRKKPKLLGEMSRL

SEQ ID NO: 58886 - protein, 34 aa, Artificial Sequence
  Cyclic GFR-binding peptide
  MOD_RES (5)..(5): Xaa is C or S
RNVQXRPTQVQLRSVKVAKVEIVRKKPIFKEVQV

SEQ ID NO: 58887 - protein, 26 aa, Artificial Sequence
  Cyclic GFR-binding peptide
VHHSNITVQIMEYVRKKPKLIGEMSR

SEQ ID NO: 58888 - protein, 37 aa, Artificial Sequence; identical to SEQ ID NO: 15701
  Cyclic GFR-binding peptide
  MOD_RES (3)..(37): Xaa is C or S

SEQ ID NO: 58889 - protein, 36 aa, Artificial Sequence; identical to SEQ ID NO: 15702
  Cyclic GFR-binding peptide
  MOD_RES (2)..(2): Xaa is C or S

SEQ ID NO: 58890 - protein, 29 aa, Artificial Sequence
  Cyclic GFR-binding peptide
LSNITVQIMEIVRKKPIFLGEMSTLEDHL

SEQ ID NO: 58891 - protein, 33 aa, Artificial Sequence
  Cyclic GFR-binding peptide
  MOD_RES (2)..(2): Xaa is C or S
QXRPTQVQLSNITVQIMEIVRKKPIFLGEMSTL

SEQ ID NO: 58892 - protein, 26 aa, Artificial Sequence
  Cyclic GFR-binding peptide
PTGQRSVKMAKVRIKPHQGQHKEVQV

SEQ ID NO: 58893 - protein, 38 aa, Artificial Sequence; identical to SEQ ID NO: 15704
  Cyclic GFR-binding peptide
  MOD_RES (2)..(2): Xaa is C or S

SEQ ID NO: 58894 - protein, 31 aa, Artificial Sequence
  Cyclic GFR-binding peptide
PTGQRPVQMRKIRIKPHQGQHKKATVLEEHS

SEQ ID NO: 58895 - protein, 32 aa, Artificial Sequence
  Cyclic GFR-binding peptide
  MOD_RES (30)..(32): Xaa is C or S
RSVKVAKVEIVRKKPIFKEVQVTLEDHLAXKX

SEQ ID NO: 58896 - protein, 40 aa, Artificial Sequence; identical to SEQ ID NO: 15707
  Cyclic GFR-binding peptide
  MOD_RES (6)..(40): Xaa is C or S

SEQ ID NO: 58897 - protein, 35 aa, Artificial Sequence
  Cyclic GFR-binding peptide
  MOD_RES (2)..(2): Xaa is C or S
KXQPSRVHHSNITVQIMEYVRKKPKLLGEMSRLEE

SEQ ID NO: 58898 - protein, 40 aa, Artificial Sequence; identical to SEQ ID NO: 15710
  Cyclic GFR-binding peptide
  MOD_RES (6)..(40): Xaa is C or S

SEQ ID NO: 58899 - protein, 28 aa, Artificial Sequence
  Cyclic GFR-binding peptide
SNITVQIMEIVRKKPIFIGEMSTLEDHL

SEQ ID NO: 58900 - protein, 26 aa, Artificial Sequence
  Cyclic GFR-binding peptide
VHHRPVQVRKIEYVRKKPKLKKATVR

SEQ ID NO: 58901 - protein, 41 aa, Artificial Sequence; identical to SEQ ID NO: 15715
  Cyclic GFR-binding peptide
  MOD_RES (6)..(40): Xaa is C or S

SEQ ID NO: 58902 - protein, 36 aa, Artificial Sequence
  Cyclic GFR-binding peptide
  MOD_RES (4)..(4): Xaa is C or S
NVQXRPTQVQLSNITVQIMEIVRKKPIFIGEMSTLE

SEQ ID NO: 58903 - protein, 28 aa, Artificial Sequence
  Cyclic GFR-binding peptide
PTEESNITMQIMRIKPHQGQHLGEMSFL

SEQ ID NO: 58904 - protein, 40 aa, Artificial Sequence; identical to SEQ ID NO: 15716
  Cyclic GFR-binding peptide
  MOD_RES (37)..(39): Xaa is C or S

SEQ ID NO: 58905 - protein, 36 aa, Artificial Sequence; identical to SEQ ID NO: 15717
  Cyclic GFR-binding peptide
  MOD_RES (35)..(35): Xaa is C or S

SEQ ID NO: 58906 - protein, 35 aa, Artificial Sequence
  Cyclic GFR-binding peptide
  MOD_RES (3)..(3): Xaa is C or S
VQXRPTQVQLSNITVQIMEIVRKKPIFIGEMSTLE

SEQ ID NO: 58907 - protein, 37 aa, Artificial Sequence; identical to SEQ ID NO: 15719
  Cyclic GFR-binding peptide
  MOD_RES (35)..(37): Xaa is C or S

SEQ ID NO: 58908 - protein, 33 aa, Artificial Sequence; identical to SEQ ID NO: 15720
  Cyclic GFR-binding peptide

SEQ ID NO: 58909 - protein, 32 aa, Artificial Sequence
  Cyclic GFR-binding peptide
  MOD_RES (1)..(1): Xaa is C or S
XVPTEESNITMQIMRIKPHQGQHLGEMSFLQH

SEQ ID NO: 58910 - protein, 28 aa, Artificial Sequence
  Cyclic GFR-binding peptide
QLSNITVQIMEIVRKKPIFLGEMSTLED

SEQ ID NO: 58911 - protein, 27 aa, Artificial Sequence
  Cyclic GFR-binding peptide
GQRPVQMRKIRIKPHQGQHKKATVLEE

SEQ ID NO: 58912 - protein, 43 aa, Artificial Sequence; identical to SEQ ID NO: 15721
  Cyclic GFR-binding peptide
  MOD_RES (7)..(41)..(43): Xaa is C or S

SEQ ID NO: 58913 - protein, 33 aa, Artificial Sequence
  Cyclic GFR-binding peptide
  MOD_RES (5)..(5): Xaa is C or S
EGLEXVPTEESNITMQIMRIKPHQGQHLGEMSF

SEQ ID NO: 58914 - protein, 45 aa, Artificial Sequence; identical to SEQ ID NO: 15722
  Cyclic GFR-binding peptide
  MOD_RES (5)..(42)..(44): Xaa is C or S

SEQ ID NO: 58915 - protein, 25 aa, Artificial Sequence
  Cyclic GFR-binding peptide
QRSVKMAKVRIKPHQGQHKEVQVLE

SEQ ID NO: 58916 - protein, 29 aa, Artificial Sequence
  Cyclic GFR-binding peptide
PTQVQLRSVKVAKVEIVRKKPIFKEVQVT

SEQ ID NO: 58917 - protein, 28 aa, Artificial Sequence
  Cyclic GFR-binding peptide
VHHSNITVQIMEYVRKKPKLLGEMSRLE

SEQ ID NO: 58918 - protein, 36 aa, Artificial Sequence
  Cyclic GFR-binding peptide
  MOD_RES (5)..(5): Xaa is C or S
EGLEXVPTGQRPVQMRKIRIKPHQGQHKKATVLEEH

SEQ ID NO: 58919 - protein, 31 aa, Artificial Sequence
  Cyclic GFR-binding peptide
  MOD_RES (31)..(31): Xaa is C or S
LSNITVQIMEIVRKKPIFIGEMSTLEDHLAX

SEQ ID NO: 58920 - protein, 34 aa, Artificial Sequence; identical to SEQ ID NO: 15726
  Cyclic GFR-binding peptide

SEQ ID NO: 58921 - protein, 37 aa, Artificial Sequence; identical to SEQ ID NO: 15727
  Cyclic GFR-binding peptide
  MOD_RES (4)..(4): Xaa is C or S

SEQ ID NO: 58922 - protein, 32 aa, Artificial Sequence
  Cyclic GFR-binding peptide
PSRVHHSNITVQIMEYVRKKPKLLGEMSRLEE

SEQ ID NO: 58923 - protein, 39 aa, Artificial Sequence; identical to SEQ ID NO: 15728
  Cyclic GFR-binding peptide
  MOD_RES (2)..(36)..(38): Xaa is C or S

SEQ ID NO: 58924 - protein, 22 aa, Artificial Sequence
  Cyclic GFR-binding peptide
SNITVQIMEIVRKKPIFLGEMS

SEQ ID NO: 58925 - protein, 33 aa, Artificial Sequence
  Cyclic GFR-binding peptide
  MOD_RES (30)..(32): Xaa is C or S
SNITVQIMEIVRKKPIFIGEMSTLEDHLAXKXE

SEQ ID NO: 58926 - protein, 27 aa, Artificial Sequence
  Cyclic GFR-binding peptide
RPVQVRKIEYVRKKPKLKKATVRLEEH

SEQ ID NO: 58927 - protein, 28 aa, Artificial Sequence
  Cyclic GFR-binding peptide
TQVQLSNITVQIMEIVRKKPIFLGEMST

SEQ ID NO: 58928 - protein, 26 aa, Artificial Sequence
  Cyclic GFR-binding peptide
TGQRPVQMRKIRIKPHQGQHKKATVL

SEQ ID NO: 58929 - protein, 31 aa, Artificial Sequence
  Cyclic GFR-binding peptide
PTEERSVKMAKVRIKPHQGQHKEVQVFLQHN

SEQ ID NO: 58930 - protein, 39 aa, Artificial Sequence; identical to SEQ ID NO: 15736
  Cyclic GFR-binding peptide
  MOD_RES (1)..(38): Xaa is C or S

SEQ ID NO: 58931 - protein, 36 aa, Artificial Sequence
  Cyclic GFR-binding peptide
  MOD_RES (34)..(36): Xaa is C or S
RVHHRPVQVRKIEYVRKKPKLKKATVRLEEHLEXAX

SEQ ID NO: 58932 - protein, 32 aa, Artificial Sequence
  Cyclic GFR-binding peptide
  MOD_RES (1)..(1): Xaa is C or S
XRPTQVQLRSVKVAKVEIVRKKPIFKEVQVTL

SEQ ID NO: 58933 - protein, 29 aa, Artificial Sequence
  Cyclic GFR-binding peptide
RPTQVQLSNITVQIMEIVRKKPIFIGEMS

SEQ ID NO: 58934 - protein, 41 aa, Artificial Sequence; identical to SEQ ID NO: 15737
  Cyclic GFR-binding peptide
  MOD_RES (3)..(40): Xaa is C or S

SEQ ID NO: 58935 - protein, 39 aa, Artificial Sequence; identical to SEQ ID NO: 15738
  Cyclic GFR-binding peptide
  MOD_RES (3)..(37)..(39): Xaa is C or S

SEQ ID NO: 58936 - protein, 28 aa, Artificial Sequence
  Cyclic GFR-binding peptide
HHSNITVQIMEYVRKKPKLLGEMSRLEE

SEQ ID NO: 58937 - protein, 38 aa, Artificial Sequence; identical to SEQ ID NO: 15739
  Cyclic GFR-binding peptide
  MOD_RES (37)..(37): Xaa is C or S

SEQ ID NO: 58938 - protein, 39 aa, Artificial Sequence; identical to SEQ ID NO: 15741
  Cyclic GFR-binding peptide
  MOD_RES (2)..(36)..(38): Xaa is C or S

SEQ ID NO: 58939 - protein, 31 aa, Artificial Sequence
  Cyclic GFR-binding peptide
  MOD_RES (2)..(2): Xaa is C or S
KXQPSRVHHSNITVQIMEYVRKKPKLLGEMS

SEQ ID NO: 58940 - protein, 40 aa, Artificial Sequence; identical to SEQ ID NO: 15744
  Cyclic GFR-binding peptide
  MOD_RES (4)..(38)..(40): Xaa is C or S

SEQ ID NO: 58941 - protein, 34 aa, Artificial Sequence; identical to SEQ ID NO: 15745
  Cyclic GFR-binding peptide

SEQ ID NO: 58942 - protein, 39 aa, Artificial Sequence; identical to SEQ ID NO: 15748
  Cyclic GFR-binding peptide
  MOD_RES (2)..(39): Xaa is C or S

SEQ ID NO: 58943 - protein, 32 aa, Artificial Sequence
  Cyclic GFR-binding peptide
  MOD_RES (29)..(31): Xaa is C or S
SNITMQIMRIKPHQGQHLGEMSFLQHNKXEXR

SEQ ID NO: 58944 - protein, 27 aa, Artificial Sequence
  Cyclic GFR-binding peptide
ERPVQMRKIRIKPHQGQHKKATVFLQH

SEQ ID NO: 58945 - protein, 42 aa, Artificial Sequence; identical to SEQ ID NO: 15749
  Cyclic GFR-binding peptide
  MOD_RES (5)..(42): Xaa is C or S

SEQ ID NO: 58946 - protein, 28 aa, Artificial Sequence
  Cyclic GFR-binding peptide
VPTGQRSVKMAKVRIKPHQGQHKEVQVL

SEQ ID NO: 58947 - protein, 36 aa, Artificial Sequence
  Cyclic GFR-binding peptide
  MOD_RES (7)..(7): Xaa is C or S
NDEGLEXVPTEERPVQMRKIRIKPHQGQHKKATVFL

SEQ ID NO: 58948 - protein, 37 aa, Artificial Sequence
  Cyclic GFR-binding peptide
  MOD_RES (34)..(36): Xaa is C or S
RVHHSNITVQIMEYVRKKPKLLGEMSRLEEHLEXAXA

SEQ ID NO: 58949 - protein, 31 aa, Artificial Sequence
  Cyclic GFR-binding peptide
  MOD_RES (31)..(31): Xaa is C or S
HSNITVQIMEYVRKKPKLLGEMSRLEEHLEX

SEQ ID NO: 58950 - protein, 38 aa, Artificial Sequence; identical to SEQ ID NO: 15750
  Cyclic GFR-binding peptide
  MOD_RES (4)..(38): Xaa is C or S

SEQ ID NO: 58951 - protein, 42 aa, Artificial Sequence; identical to SEQ ID NO: 15751
  Cyclic GFR-binding peptide
  MOD_RES (3)..(40)..(42): Xaa is C or S

SEQ ID NO: 58952 - protein, 41 aa, Artificial Sequence; identical to SEQ ID NO: 15752
  Cyclic GFR-binding peptide
  MOD_RES (7)..(41): Xaa is C or S

SEQ ID NO: 58953 - protein, 33 aa, Artificial Sequence
  Cyclic GFR-binding peptide
  MOD_RES (30)..(32): Xaa is C or S
RSVKVAKVEIVRKKPIFKEVQVTLEDHLAXKXE

SEQ ID NO: 58954 - protein, 27 aa, Artificial Sequence
  Cyclic GFR-binding peptide
VHHSNITVQIMEYVRKKPKLIGEMSRL

SEQ ID NO: 58955 - protein, 37 aa, Artificial Sequence
  Cyclic GFR-binding peptide
  MOD_RES (34)..(36): Xaa is C or S
RVHHRPVQVRKIEYVRKKPKLKKATVRLEEHLEXAXA

SEQ ID NO: 58956 - protein, 26 aa, Artificial Sequence
  Cyclic GFR-binding peptide
GQRSVKMAKVRIKPHQGQHKEVQVLE

SEQ ID NO: 58957 - protein, 40 aa, Artificial Sequence; identical to SEQ ID NO: 15754
  Cyclic GFR-binding peptide
  MOD_RES (3)..(37)..(39): Xaa is C or S

SEQ ID NO: 58958 - protein, 32 aa, Artificial Sequence
  Cyclic GFR-binding peptide
  MOD_RES (4)..(4): Xaa is C or S
GLEXVPTGQSNITMQIMRIKPHQGQHIGEMSL

SEQ ID NO: 58959 - protein, 36 aa, Artificial Sequence
  Cyclic GFR-binding peptide
  MOD_RES (6)..(6): Xaa is C or S
DEGLEXVPTGQSNITMQIMRIKPHQGQHIGEMSLEE

SEQ ID NO: 58960 - protein, 33 aa, Artificial Sequence
  Cyclic GFR-binding peptide
  MOD_RES (3)..(3): Xaa is C or S
LEXVPTEERSVKMAKVRIKPHQGQHKEVQVFLQ

SEQ ID NO: 58961 - protein, 35 aa, Artificial Sequence; identical to SEQ ID NO: 15759
  Cyclic GFR-binding peptide
  MOD_RES (1)..(35): Xaa is C or S

SEQ ID NO: 58962 - protein, 39 aa, Artificial Sequence; identical to SEQ ID NO: 15760
  Cyclic GFR-binding peptide
  MOD_RES (2)..(36)..(38): Xaa is C or S

SEQ ID NO: 58963 - protein, 29 aa, Artificial Sequence
  Cyclic GFR-binding peptide
RVHHSNITVQIMEYVRKKPKLIGEMSRLE

SEQ ID NO: 58964 - protein, 34 aa, Artificial Sequence
  Cyclic GFR-binding peptide
  MOD_RES (4)..(4): Xaa is C or S
SVKXQPSRVHHSNITVQIMEYVRKKPKLIGEMSR

SEQ ID NO: 58965 - protein, 41 aa, Artificial Sequence; identical to SEQ ID NO: 15762
  Cyclic GFR-binding peptide
  MOD_RES (2)..(39)..(41): Xaa is C or S

SEQ ID NO: 58966 - protein, 37 aa, Artificial Sequence; identical to SEQ ID NO: 15763
  Cyclic GFR-binding peptide
  MOD_RES (34)..(36): Xaa is C or S

SEQ ID NO: 58967 - protein, 37 aa, Artificial Sequence; identical to SEQ ID NO: 15764
  Cyclic GFR-binding peptide
  MOD_RES (2)..(36): Xaa is C or S

SEQ ID NO: 58968 - protein, 35 aa, Artificial Sequence
  Cyclic GFR-binding peptide
  MOD_RES (3)..(3): Xaa is C or S
VKXQPSRVHHSNITVQIMEYVRKKPKLLGEMSRLE

SEQ ID NO: 58969 - protein, 40 aa, Artificial Sequence; identical to SEQ ID NO: 15765
  Cyclic GFR-binding peptide
  MOD_RES (1)..(38)..(40): Xaa is C or S

SEQ ID NO: 58970 - protein, 44 aa, Artificial Sequence; identical to SEQ ID NO: 15767
  Cyclic GFR-binding peptide
  MOD_RES (5)..(42)..(44): Xaa is C or S

SEQ ID NO: 58971 - protein, 33 aa, Artificial Sequence
  Cyclic GFR-binding peptide
  MOD_RES (32)..(32): Xaa is C or S
HHSNITVQIMEYVRKKPKLIGEMSRLEEHLEXA

SEQ ID NO: 58972 - protein, 33 aa, Artificial Sequence
  Cyclic GFR-binding peptide
RVHHRPVQVRKIEYVRKKPKLKKATVRLEEHLE

SEQ ID NO: 58973 - protein, 29 aa, Artificial Sequence
  Cyclic GFR-binding peptide
  MOD_RES (1)..(1): Xaa is C or S
XVPTGQRSVKMAKVRIKPHQGQHKEVQVL

SEQ ID NO: 58974 - protein, 26 aa, Artificial Sequence
  Cyclic GFR-binding peptide
RVHHSNITVQIMEYVRKKPKLLGEMS

SEQ ID NO: 58975 - protein, 31 aa, Artificial Sequence
  Cyclic GFR-binding peptide
VPTEERPVQMRKIRIKPHQGQHKKATVFLQH

SEQ ID NO: 58976 - protein, 33 aa, Artificial Sequence
  Cyclic GFR-binding peptide
  MOD_RES (2)..(2): Xaa is C or S
EXVPTEERSVKMAKVRIKPHQGQHKEVQVFLQH

SEQ ID NO: 58977 - protein, 37 aa, Artificial Sequence; identical to SEQ ID NO: 15768
  Cyclic GFR-binding peptide
  MOD_RES (3)..(3): Xaa is C or S

SEQ ID NO: 58978 - protein, 37 aa, Artificial Sequence; identical to SEQ ID NO: 15769
  Cyclic GFR-binding peptide
  MOD_RES (3)..(3): Xaa is C or S

SEQ ID NO: 58979 - protein, 23 aa, Artificial Sequence
  Cyclic GFR-binding peptide
LRSVKVAKVEIVRKKPIFKEVQV

SEQ ID NO: 58980 - protein, 29 aa, Artificial Sequence
  Cyclic GFR-binding peptide
HRPVQVRKIEYVRKKPKLKKATVRLEEHL

SEQ ID NO: 58981 - protein, 41 aa, Artificial Sequence; identical to SEQ ID NO: 15771
  Cyclic GFR-binding peptide
  MOD_RES (2)..(39)..(41): Xaa is C or S

SEQ ID NO: 58982 - protein, 37 aa, Artificial Sequence; identical to SEQ ID NO: 15772
  Cyclic GFR-binding peptide
  MOD_RES (2)..(36): Xaa is C or S

SEQ ID NO: 58983 - protein, 41 aa, Artificial Sequence; identical to SEQ ID NO: 15773
  Cyclic GFR-binding peptide
  MOD_RES (3)..(40): Xaa is C or S

SEQ ID NO: 58984 - protein, 24 aa, Artificial Sequence
  Cyclic GFR-binding peptide
QLRSVKVAKVEIVRKKPIFKEVQV

SEQ ID NO: 58985 - protein, 41 aa, Artificial Sequence; identical to SEQ ID NO: 15774
  Cyclic GFR-binding peptide
  MOD_RES (4)..(38)..(40): Xaa is C or S

SEQ ID NO: 58986 - protein, 32 aa, Artificial Sequence
  Cyclic GFR-binding peptide
  MOD_RES (30)..(32): Xaa is C or S
SNITVQIMEIVRKKPIFIGEMSTLEDHLAXKX

SEQ ID NO: 58987 - protein, 40 aa, Artificial Sequence; identical to SEQ ID NO: 15776
  Cyclic GFR-binding peptide
  MOD_RES (3)..(37)..(39): Xaa is C or S

SEQ ID NO: 58988 - protein, 27 aa, Artificial Sequence
  Cyclic GFR-binding peptide
HHSNITVQIMEYVRKKPKLLGEMSRLE

SEQ ID NO: 58989 - protein, 33 aa, Artificial Sequence
  Cyclic GFR-binding peptide
  MOD_RES (30)..(32): Xaa is C or S
QRPVQMRKIRIKPHQGQHKKATVLEEHSQXEXR

SEQ ID NO: 58990 - protein, 27 aa, Artificial Sequence
  Cyclic GFR-binding peptide
PTGQRSVKMAKVRIKPHQGQHKEVQVL

SEQ ID NO: 58991 - protein, 39 aa, Artificial Sequence; identical to SEQ ID NO: 15777
  Cyclic GFR-binding peptide
  MOD_RES (37)..(39): Xaa is C or S

SEQ ID NO: 58992 - protein, 38 aa, Artificial Sequence; identical to SEQ ID NO: 15778
  Cyclic GFR-binding peptide
  MOD_RES (4)..(38): Xaa is C or S

SEQ ID NO: 58993 - protein, 39 aa, Artificial Sequence; identical to SEQ ID NO: 15779
  Cyclic GFR-binding peptide
  MOD_RES (3)..(3): Xaa is C or S

SEQ ID NO: 58994 - protein, 40 aa, Artificial Sequence; identical to SEQ ID NO: 15780
  Cyclic GFR-binding peptide
  MOD_RES (7)..(7): Xaa is C or S

SEQ ID NO: 58995 - protein, 29 aa, Artificial Sequence
  Cyclic GFR-binding peptide
HSNITVQIMEYVRKKPKLIGEMSRLEEHL

SEQ ID NO: 58996 - protein, 35 aa, Artificial Sequence; identical to SEQ ID NO: 15786
  Cyclic GFR-binding peptide

SEQ ID NO: 58997 - protein, 38 aa, Artificial Sequence; identical to SEQ ID NO: 15788
  Cyclic GFR-binding peptide
  MOD_RES (3)..(37): Xaa is C or S

SEQ ID NO: 58998 - protein, 29 aa, Artificial Sequence
  Cyclic GFR-binding peptide
QVQLSNITVQIMEIVRKKPIFLGEMSTLE

SEQ ID NO: 58999 - protein, 31 aa, Artificial Sequence
  Cyclic GFR-binding peptide
TEERPVQMRKIRIKPHQGQHKKATVFLQHNK

SEQ ID NO: 59000 - protein, 28 aa, Artificial Sequence
  Cyclic GFR-binding peptide
RVHHSNITVQIMEYVRKKPKLLGEMSRL

SEQ ID NO: 59001 - protein, 35 aa, Artificial Sequence
  Cyclic GFR-binding peptide
  MOD_RES (2)..(2): Xaa is C or S
KXQPSRVHHRPVQVRKIEYVRKKPKLKKATVRLEE

SEQ ID NO: 59002 - protein, 34 aa, Artificial Sequence
  Cyclic GFR-binding peptide
  MOD_RES (5)..(5): Xaa is C or S
EGLEXVPTGQRPVQMRKIRIKPHQGQHKKATVLE

SEQ ID NO: 59003 - protein, 39 aa, Artificial Sequence; identical to SEQ ID NO: 15796
  Cyclic GFR-binding peptide
  MOD_RES (4)..(4): Xaa is C or S

SEQ ID NO: 59004 - protein, 29 aa, Artificial Sequence
  Cyclic GFR-binding peptide
VQLRSVKVAKVEIVRKKPIFKEVQVTLED

SEQ ID NO: 59005 - protein, 31 aa, Artificial Sequence
  Cyclic GFR-binding peptide
VPTGQSNITMQIMRIKPHQGQHIGEMSLEEH

SEQ ID NO: 59006 - protein, 29 aa, Artificial Sequence
  Cyclic GFR-binding peptide
HHSNITVQIMEYVRKKPKLLGEMSRLEEH

SEQ ID NO: 59007 - protein, 32 aa, Artificial Sequence
  Cyclic GFR-binding peptide
  MOD_RES (5)..(5): Xaa is C or S
EGLEXVPTEERSVKMAKVRIKPHQGQHKEVQV

SEQ ID NO: 59008 - protein, 40 aa, Artificial Sequence; identical to SEQ ID NO: 15798
  Cyclic GFR-binding peptide
  MOD_RES (5)..(5): Xaa is C or S

SEQ ID NO: 59009 - protein, 37 aa, Artificial Sequence; identical to SEQ ID NO: 15799
  Cyclic GFR-binding peptide
  MOD_RES (36)..(36): Xaa is C or S

SEQ ID NO: 59010 - protein, 34 aa, Artificial Sequence
  Cyclic GFR-binding peptide
  MOD_RES (4)..(4): Xaa is C or S
SVKXQPSRVHHSNITVQIMEYVRKKPKLLGEMSR

SEQ ID NO: 59011 - protein, 42 aa, Artificial Sequence; identical to SEQ ID NO: 15800
  Cyclic GFR-binding peptide
  MOD_RES (7)..(41): Xaa is C or S

SEQ ID NO: 59012 - protein, 25 aa, Artificial Sequence
  Cyclic GFR-binding peptide
RSVKVAKVEIVRKKPIFKEVQVTLE

SEQ ID NO: 59013 - protein, 31 aa, Artificial Sequence
  Cyclic GFR-binding peptide
  MOD_RES (3)..(3): Xaa is C or S
LEXVPTGQRSVKMAKVRIKPHQGQHKEVQVL

SEQ ID NO: 59014 - protein, 31 aa, Artificial Sequence
  Cyclic GFR-binding peptide
SRVHHSNITVQIMEYVRKKPKLIGEMSRLEE

SEQ ID NO: 59015 - protein, 31 aa, Artificial Sequence
  Cyclic GFR-binding peptide
PTGQSNITMQIMRIKPHQGQHIGEMSLEEHS

SEQ ID NO: 59016 - protein, 30 aa, Artificial Sequence
  Cyclic GFR-binding peptide
  MOD_RES (30)..(30): Xaa is C or S
QRPVQMRKIRIKPHQGQHKKATVLEEHSQX

SEQ ID NO: 59017 - protein, 36 aa, Artificial Sequence; identical to SEQ ID NO: 15802
  Cyclic GFR-binding peptide
  MOD_RES (34)..(36): Xaa is C or S

SEQ ID NO: 59018 - protein, 41 aa, Artificial Sequence; identical to SEQ ID NO: 15804
  Cyclic GFR-binding peptide
  MOD_RES (4)..(41): Xaa is C or S

SEQ ID NO: 59019 - protein, 36 aa, Artificial Sequence; identical to SEQ ID NO: 15805
  Cyclic GFR-binding peptide
  MOD_RES (3)..(3): Xaa is C or S

SEQ ID NO: 59020 - protein, 43 aa, Artificial Sequence; identical to SEQ ID NO: 15807
  Cyclic GFR-binding peptide
  MOD_RES (5)..(42): Xaa is C or S

SEQ ID NO: 59021 - protein, 22 aa, Artificial Sequence
  Cyclic GFR-binding peptide
RPVQVRKIEIVRKKPIFKKATV

SEQ ID NO: 59022 - protein, 36 aa, Artificial Sequence; identical to SEQ ID NO: 15813
  Cyclic GFR-binding peptide
  MOD_RES (3)..(3): Xaa is C or S

SEQ ID NO: 59023 - protein, 28 aa, Artificial Sequence
  Cyclic GFR-binding peptide
SRVHHSNITVQIMEYVRKKPKLIGEMSR

SEQ ID NO: 59024 - protein, 35 aa, Artificial Sequence
  Cyclic GFR-binding peptide
  MOD_RES (32)..(34): Xaa is C or S
TEERPVQMRKIRIKPHQGQHKKATVFLQHNKXEXR

SEQ ID NO: 59025 - protein, 26 aa, Artificial Sequence
  Cyclic GFR-binding peptide
HRPVQVRKIEYVRKKPKLKKATVRLE

SEQ ID NO: 59026 - protein, 32 aa, Artificial Sequence
  Cyclic GFR-binding peptide
  MOD_RES (3)..(3): Xaa is C or S
VQXRPTQVQLRSVKVAKVEIVRKKPIFKEVQV

SEQ ID NO: 59027 - protein, 23 aa, Artificial Sequence
  Cyclic GFR-binding peptide
ERSVKMAKVRIKPHQGQHKEVQV

SEQ ID NO: 59028 - protein, 36 aa, Artificial Sequence; identical to SEQ ID NO: 15817
  Cyclic GFR-binding peptide

SEQ ID NO: 59029 - protein, 34 aa, Artificial Sequence
  Cyclic GFR-binding peptide
  MOD_RES (6)..(6): Xaa is C or S
DEGLEXVPTEESNITMQIMRIKPHQGQHLGEMSF

SEQ ID NO: 59030 - protein, 29 aa, Artificial Sequence
  Cyclic GFR-binding peptide
TGQRSVKMAKVRIKPHQGQHKEVQVLEEH

SEQ ID NO: 59031 - protein, 38 aa, Artificial Sequence
  Cyclic GFR-binding peptide
  MOD_RES (7)..(7): Xaa is C or S
NDEGLEXVPTEERPVQMRKIRIKPHQGQHKKATVFLQH

SEQ ID NO: 59032 - protein, 32 aa, Artificial Sequence
  Cyclic GFR-binding peptide
  MOD_RES (2)..(2): Xaa is C or S
EXVPTGQSNITMQIMRIKPHQGQHIGEMSLEE

SEQ ID NO: 59033 - protein, 27 aa, Artificial Sequence
  Cyclic GFR-binding peptide
SNITVQIMEYVRKKPKLLGEMSRLEEH

SEQ ID NO: 59034 - protein, 27 aa, Artificial Sequence
  Cyclic GFR-binding peptide
SNITVQIMEYVRKKPKLIGEMSRLEEH

SEQ ID NO: 59035 - protein, 42 aa, Artificial Sequence; identical to SEQ ID NO: 15820
  Cyclic GFR-binding peptide
  MOD_RES (2)..(39)..(41): Xaa is C or S

SEQ ID NO: 59036 - protein, 30 aa, Artificial Sequence
  Cyclic GFR-binding peptide
VPTEERSVKMAKVRIKPHQGQHKEVQVFLQ

SEQ ID NO: 59037 - protein, 35 aa, Artificial Sequence
  Cyclic GFR-binding peptide
  MOD_RES (34)..(34): Xaa is C or S
QVQLSNITVQIMEIVRKKPIFIGEMSTLEDHLAXK

SEQ ID NO: 59038 - protein, 29 aa, Artificial Sequence
  Cyclic GFR-binding peptide
PTGQRPVQMRKIRIKPHQGQHKKATVLEE

SEQ ID NO: 59039 - protein, 34 aa, Artificial Sequence; identical to SEQ ID NO: 15823
  Cyclic GFR-binding peptide
  MOD_RES (34)..(34): Xaa is C or S

SEQ ID NO: 59040 - protein, 35 aa, Artificial Sequence
  Cyclic GFR-binding peptide
  MOD_RES (5)..(5): Xaa is C or S
RNVQXRPTQVQLRSVKVAKVEIVRKKPIFKEVQVT

SEQ ID NO: 59041 - protein, 30 aa, Artificial Sequence
  Cyclic GFR-binding peptide
  MOD_RES (1)..(1): Xaa is C or S
XRPTQVQLSNITVQIMEIVRKKPIFIGEMS

SEQ ID NO: 59042 - protein, 33 aa, Artificial Sequence
  Cyclic GFR-binding peptide
  MOD_RES (31)..(33): Xaa is C or S
EESNITMQIMRIKPHQGQHLGEMSFLQHNKXEX

SEQ ID NO: 59043 - protein, 32 aa, Artificial Sequence
  Cyclic GFR-binding peptide
PTQVQLSNITVQIMEIVRKKPIFLGEMSTLED

SEQ ID NO: 59044 - protein, 39 aa, Artificial Sequence; identical to SEQ ID NO: 15826
  Cyclic GFR-binding peptide
  MOD_RES (3)..(3): Xaa is C or S

SEQ ID NO: 59045 - protein, 22 aa, Artificial Sequence
  Cyclic GFR-binding peptide
SNITMQIMRIKPHQGQHIGEMS

SEQ ID NO: 59046 - protein, 29 aa, Artificial Sequence
  Cyclic GFR-binding peptide
PSRVHHSNITVQIMEYVRKKPKLLGEMSR

SEQ ID NO: 59047 - protein, 37 aa, Artificial Sequence; identical to SEQ ID NO: 15829
  Cyclic GFR-binding peptide
  MOD_RES (3)..(37): Xaa is C or S

SEQ ID NO: 59048 - protein, 30 aa, Artificial Sequence
  Cyclic GFR-binding peptide
PTEERSVKMAKVRIKPHQGQHKEVQVFLQH

SEQ ID NO: 59049 - protein, 28 aa, Artificial Sequence
  Cyclic GFR-binding peptide
HHRPVQVRKIEYVRKKPKLKKATVRLEE

SEQ ID NO: 59050 - protein, 33 aa, Artificial Sequence
  Cyclic GFR-binding peptide
  MOD_RES (4)..(4): Xaa is C or S
GLEXVPTEERPVQMRKIRIKPHQGQHKKATVFL

SEQ ID NO: 59051 - protein, 34 aa, Artificial Sequence
  Cyclic GFR-binding peptide
  MOD_RES (34)..(34): Xaa is C or S
QVQLSNITVQIMEIVRKKPIFIGEMSTLEDHLAX

SEQ ID NO: 59052 - protein, 35 aa, Artificial Sequence
  Cyclic GFR-binding peptide
  MOD_RES (30)..(31): Xaa is C or S
KVVMEYQKYVKPTRGVIYLISIPSLDQPVXXPSAS

SEQ ID NO: 59053 - protein, 40 aa, Artificial Sequence; identical to SEQ ID NO: 15837
  Cyclic GFR-binding peptide
  MOD_RES (2)..(4)..(36)..(37): Xaa is C or S

SEQ ID NO: 59054 - protein, 32 aa, Artificial Sequence; identical to SEQ ID NO: 15839
  Cyclic GFR-binding peptide
  MOD_RES (31)..(32): Xaa is C or S

SEQ ID NO: 59055 - protein, 31 aa, Artificial Sequence
  Cyclic GFR-binding peptide
  MOD_RES (1)..(1): Xaa is C or S
XESVAMGEYQKYYTVVGKDIYLISIPSLKTP

SEQ ID NO: 59056 - protein, 29 aa, Artificial Sequence
  Cyclic GFR-binding peptide
  MOD_RES (26)..(26): Xaa is C or S
EYKFKIVNSSDDLYLVSIPELKTPAXTPK

SEQ ID NO: 59057 - protein, 22 aa, Artificial Sequence
  Cyclic GFR-binding peptide
EYQKYIVNSSDDIYLVSIPSLK

SEQ ID NO: 59058 - protein, 28 aa, Artificial Sequence
  Cyclic GFR-binding peptide
VMEEYKFKVVKDYEDLYLMSIPELETPV

SEQ ID NO: 59059 - protein, 37 aa, Artificial Sequence; identical to SEQ ID NO: 15845
  Cyclic GFR-binding peptide
  MOD_RES (2)..(33)..(34): Xaa is C or S

SEQ ID NO: 59060 - protein, 32 aa, Artificial Sequence
  Cyclic GFR-binding peptide
  MOD_RES (28)..(29): Xaa is C or S
IMEYQKYIKPTKGIIYLISIPSLDQSVXXPSA

SEQ ID NO: 59061 - protein, 34 aa, Artificial Sequence; identical to SEQ ID NO: 15850
  Cyclic GFR-binding peptide
  MOD_RES (1)..(33)..(34): Xaa is C or S

SEQ ID NO: 59062 - protein, 24 aa, Artificial Sequence
  Cyclic GFR-binding peptide
MDEYKFKVVKENEDLYLMSIPELE

SEQ ID NO: 59063 - protein, 35 aa, Artificial Sequence; identical to SEQ ID NO: 15854
  Cyclic GFR-binding peptide
  MOD_RES (1)..(3)..(35): Xaa is C or S

SEQ ID NO: 59064 - protein, 31 aa, Artificial Sequence; identical to SEQ ID NO: 15856
  Cyclic GFR-binding peptide
  MOD_RES (31)..(31): Xaa is C or S

SEQ ID NO: 59065 - protein, 24 aa, Artificial Sequence
  Cyclic GFR-binding peptide
NEYKFKIVNSSDDLYLVSIPELKT

SEQ ID NO: 59066 - protein, 42 aa, Artificial Sequence; identical to SEQ ID NO: 15860
  Cyclic GFR-binding peptide
  MOD_RES (2)..(4)..(36)..(37): Xaa is C or S

SEQ ID NO: 59067 - protein, 23 aa, Artificial Sequence
  Cyclic GFR-binding peptide
EEYKFKTPVGMDDLYLVSIPELK

SEQ ID NO: 59068 - protein, 32 aa, Artificial Sequence
  Cyclic GFR-binding peptide
  MOD_RES (28)..(29): Xaa is C or S
IMEYKFKIKPTKGILYLISIPELDQSVXXPSA

SEQ ID NO: 59069 - protein, 36 aa, Artificial Sequence; identical to SEQ ID NO: 15862
  Cyclic GFR-binding peptide
  MOD_RES (31)..(32): Xaa is C or S

SEQ ID NO: 59070 - protein, 26 aa, Artificial Sequence
  Cyclic GFR-binding peptide
VIMEYQKYIKPTKGIIYLISIPSLDQ

SEQ ID NO: 59071 - protein, 25 aa, Artificial Sequence
  Cyclic GFR-binding peptide
VMDEYKFKVVKENEDLYLMSIPELE

SEQ ID NO: 59072 - protein, 41 aa, Artificial Sequence; identical to SEQ ID NO: 15868
  Cyclic GFR-binding peptide
  MOD_RES (1)..(3)..(35)..(36): Xaa is C or S

SEQ ID NO: 59073 - protein, 31 aa, Artificial Sequence
  Cyclic GFR-binding peptide
  MOD_RES (30)..(31): Xaa is C or S
VVMDRYKKLVVNNAADFYLISIANLRAPVXX

SEQ ID NO: 59074 - protein, 24 aa, Artificial Sequence
  Cyclic GFR-binding peptide
MDEYQKYVVKENEDIYLMSIPSLE

SEQ ID NO: 59075 - protein, 40 aa, Artificial Sequence; identical to SEQ ID NO: 15870
  Cyclic GFR-binding peptide
  MOD_RES (1)..(3)..(35)..(36): Xaa is C or S

SEQ ID NO: 59076 - protein, 27 aa, Artificial Sequence
  Cyclic GFR-binding peptide
VAMGYHYKLYTVVGKDKYLISIPSLKT

SEQ ID NO: 59077 - protein, 26 aa, Artificial Sequence
  Cyclic GFR-binding peptide
  MOD_RES (26)..(26): Xaa is C or S
EYKFKVVNNAADLYLISIPELRAPVX

SEQ ID NO: 59078 - protein, 37 aa, Artificial Sequence; identical to SEQ ID NO: 15876
  Cyclic GFR-binding peptide
  MOD_RES (2)..(34)..(35): Xaa is C or S

SEQ ID NO: 59079 - protein, 26 aa, Artificial Sequence
  Cyclic GFR-binding peptide
ESVAMGEYQKYYTVVGKDIYLISIPS

SEQ ID NO: 59080 - protein, 26 aa, Artificial Sequence
  Cyclic GFR-binding peptide
VVMNEYQKYIVNNSSDIYLVSIPSLK

SEQ ID NO: 59081 - protein, 34 aa, Artificial Sequence
  Cyclic GFR-binding peptide
  MOD_RES (28)..(29): Xaa is C or S
VMEYKFKVKPTRGVLYLISIPELDQPVXXPSASA

SEQ ID NO: 59082 - protein, 29 aa, Artificial Sequence
  Cyclic GFR-binding peptide
  MOD_RES (1)..(1): Xaa is C or S
XESVAMGEYQKYYTVVGKDIYLISIPSLK

SEQ ID NO: 59083 - protein, 36 aa, Artificial Sequence
  Cyclic GFR-binding peptide
  MOD_RES (30)..(31): Xaa is C or S
VVMNEYQKYIVNSSDDIYLVSIPSLQTPAXXPKPVT

SEQ ID NO: 59084 - protein, 27 aa, Artificial Sequence
  Cyclic GFR-binding peptide
MNEYQKYIVNSSDDIYLVSIPSLQTPA

SEQ ID NO: 59085 - protein, 33 aa, Artificial Sequence; identical to SEQ ID NO: 15887
  Cyclic GFR-binding peptide
  MOD_RES (1)..(33): Xaa is C or S

SEQ ID NO: 59086 - protein, 30 aa, Artificial Sequence
  Cyclic GFR-binding peptide
  MOD_RES (2)..(4): Xaa is C or S
RXGXAEVVMDYHYKLVVNNAADKYLISIPS

SEQ ID NO: 59087 - protein, 36 aa, Artificial Sequence; identical to SEQ ID NO: 15888
  Cyclic GFR-binding peptide
  MOD_RES (2)..(4)..(35)..(36): Xaa is C or S

SEQ ID NO: 59088 - protein, 23 aa, Artificial Sequence
  Cyclic GFR-binding peptide
EEYKFKVVKDYEDLYLMSIPELE

SEQ ID NO: 59089 - protein, 30 aa, Artificial Sequence
  Cyclic GFR-binding peptide
ESVAMGRYKKLYTVVGKDFYLISIANLKTP

SEQ ID NO: 59090 - protein, 29 aa, Artificial Sequence
  Cyclic GFR-binding peptide
  MOD_RES (26)..(27): Xaa is C or S
EYQKYVVKENEDIYLMSIPSLETPVXXAK

SEQ ID NO: 59091 - protein, 20 aa, Artificial Sequence
  Cyclic GFR-binding peptide
EYKFKVKPTRGVLYLISIPE

SEQ ID NO: 59092 - protein, 25 aa, Artificial Sequence
  Cyclic GFR-binding peptide
NEYKFKIVNSSDDLYLVSIPELKTP

SEQ ID NO: 59093 - protein, 41 aa, Artificial Sequence; identical to SEQ ID NO: 15894
  Cyclic GFR-binding peptide
  MOD_RES (1)..(3)..(35)..(36): Xaa is C or S

SEQ ID NO: 59094 - protein, 31 aa, Artificial Sequence
  Cyclic GFR-binding peptide
  MOD_RES (28)..(29): Xaa is C or S
GEEYKFKTPVGMDDLYLVSIPELKTPVXXAK

SEQ ID NO: 59095 - protein, 23 aa, Artificial Sequence
  Cyclic GFR-binding peptide
EYKFKIVNNSSDLYLVSIPELKT

SEQ ID NO: 59096 - protein, 34 aa, Artificial Sequence; identical to SEQ ID NO: 15900
  Cyclic GFR-binding peptide
  MOD_RES (1)..(3): Xaa is C or S

SEQ ID NO: 59097 - protein, 32 aa, Artificial Sequence
  Cyclic GFR-binding peptide
  MOD_RES (29)..(30): Xaa is C or S
VMNEYQKYIVNSSDDIYLVSIPSLQTPAXXPK

SEQ ID NO: 59098 - protein, 28 aa, Artificial Sequence
  Cyclic GFR-binding peptide
SKVVMEYQKYVKPTRGVIYLISIPSLDQ

SEQ ID NO: 59099 - protein, 28 aa, Artificial Sequence
  Cyclic GFR-binding peptide
  MOD_RES (1)..(1): Xaa is C or S
XESVAMGYHYKLYTVVGKDKYLISIPSL

SEQ ID NO: 59100 - protein, 30 aa, Artificial Sequence
  Cyclic GFR-binding peptide
  MOD_RES (1)..(1): Xaa is C or S
XESVAMGRYKKLYTVVGKDFYLISIANLKT

SEQ ID NO: 59101 - protein, 40 aa, Artificial Sequence; identical to SEQ ID NO: 15908
  Cyclic GFR-binding peptide
  MOD_RES (1)..(3)..(35)..(36): Xaa is C or S

SEQ ID NO: 59102 - protein, 30 aa, Artificial Sequence
  Cyclic GFR-binding peptide
  MOD_RES (28)..(29): Xaa is C or S
MEEYQKYVVKDYEDIYLMSIPSLETPVXXA

SEQ ID NO: 59103 - protein, 32 aa, Artificial Sequence
  Cyclic GFR-binding peptide
  MOD_RES (28)..(29): Xaa is C or S
MGEYQKYYTVVGKDIYLISIPSLKTPVXXAKS

SEQ ID NO: 59104 - protein, 37 aa, Artificial Sequence; identical to SEQ ID NO: 15911
  Cyclic GFR-binding peptide
  MOD_RES (2)..(34)..(35): Xaa is C or S

SEQ ID NO: 59105 - protein, 31 aa, Artificial Sequence
  Cyclic GFR-binding peptide
  MOD_RES (27)..(28): Xaa is C or S
NEYKFKIVNSSDDLYLVSIPELKTPAXXPKP

SEQ ID NO: 59106 - protein, 38 aa, Artificial Sequence; identical to SEQ ID NO: 15913
  Cyclic GFR-binding peptide
  MOD_RES (2)..(34)..(35): Xaa is C or S

SEQ ID NO: 59107 - protein, 23 aa, Artificial Sequence
  Cyclic GFR-binding peptide
EYKFKVVKENEDLYLMSIPELET

SEQ ID NO: 59108 - protein, 34 aa, Artificial Sequence
  Cyclic GFR-binding peptide
  MOD_RES (30)..(31): Xaa is C or S
VVMEEYKFKVVKDYEDLYLMSIPELETPVXXAKP

SEQ ID NO: 59109 - protein, 24 aa, Artificial Sequence
  Cyclic GFR-binding peptide
VIMEYQKYVKPKRGVIYLISIPSL

SEQ ID NO: 59110 - protein, 22 aa, Artificial Sequence
  Cyclic GFR-binding peptide
GEYQKYYTVVGKDIYLISIPSL

SEQ ID NO: 59111 - protein, 33 aa, Artificial Sequence
  Cyclic GFR-binding peptide
  MOD_RES (28)..(29): Xaa is C or S
MEEYQKYVVKDYEDIYLMSIPSLETPVXXAKPI

SEQ ID NO: 59112 - protein, 42 aa, Artificial Sequence; identical to SEQ ID NO: 15919
  Cyclic GFR-binding peptide
  MOD_RES (2)..(4)..(36)..(37): Xaa is C or S

SEQ ID NO: 59113 - protein, 38 aa, Artificial Sequence; identical to SEQ ID NO: 15920
  Cyclic GFR-binding peptide
  MOD_RES (1)..(3)..(35)..(36): Xaa is C or S

SEQ ID NO: 59114 - protein, 25 aa, Artificial Sequence
  Cyclic GFR-binding peptide
VMNEYQKYIVNSSDDIYLVSIPSLQ

SEQ ID NO: 59115 - protein, 27 aa, Artificial Sequence
  Cyclic GFR-binding peptide
IMEYQKYVKPKRGVIYLISIPSLAQPV

SEQ ID NO: 59116 - protein, 31 aa, Artificial Sequence
  Cyclic GFR-binding peptide
  MOD_RES (29)..(30): Xaa is C or S
VMNEYQKYIVNSSDDIYLVSIPSLKTPAXXP

SEQ ID NO: 59117 - protein, 35 aa, Artificial Sequence; identical to SEQ ID NO: 15929
  Cyclic GFR-binding peptide
  MOD_RES (2)..(34)..(35): Xaa is C or S

SEQ ID NO: 59118 - protein, 33 aa, Artificial Sequence
  Cyclic GFR-binding peptide
  MOD_RES (30)..(31): Xaa is C or S
KVIMEYKFKIKPTKGILYLISIPELDQSVXXPS

SEQ ID NO: 59119 - protein, 22 aa, Artificial Sequence
  Cyclic GFR-binding peptide
EYKFKIKPTKGILYLISIPELD

SEQ ID NO: 59120 - protein, 34 aa, Artificial Sequence
  Cyclic GFR-binding peptide
  MOD_RES (2)..(4): Xaa is C or S
RXGXESVAMGRYKKLYTVVGKDFYLISIANLKTP

SEQ ID NO: 59121 - protein, 26 aa, Artificial Sequence
  Cyclic GFR-binding peptide
VVMNEYQKYIVNSSDDIYLVSIPSLK

SEQ ID NO: 59122 - protein, 41 aa, Artificial Sequence; identical to SEQ ID NO: 15931
  Cyclic GFR-binding peptide
  MOD_RES (2)..(4)..(36)..(37): Xaa is C or S

SEQ ID NO: 59123 - protein, 37 aa, Artificial Sequence; identical to SEQ ID NO: 15935
  Cyclic GFR-binding peptide
  MOD_RES (1)..(3)..(35): Xaa is C or S

SEQ ID NO: 59124 - protein, 31 aa, Artificial Sequence
  Cyclic GFR-binding peptide
  MOD_RES (27)..(27): Xaa is C or S
NEYQKYIVNSSDDIYLVSIPSLKTPAXTPKT

SEQ ID NO: 59125 - protein, 35 aa, Artificial Sequence; identical to SEQ ID NO: 15947
  Cyclic GFR-binding peptide
  MOD_RES (2)..(34): Xaa is C or S

SEQ ID NO: 59126 - protein, 31 aa, Artificial Sequence
  Cyclic GFR-binding peptide
  MOD_RES (28)..(29): Xaa is C or S
GEEYQKYTPVGMDDIYLVSIPSLKTPVXXAK

SEQ ID NO: 59127 - protein, 25 aa, Artificial Sequence
  Cyclic GFR-binding peptide
EYQKYIKPTKGIIYLISIPSLDQSV

SEQ ID NO: 59128 - protein, 35 aa, Artificial Sequence
  Cyclic GFR-binding peptide
  MOD_RES (29)..(30): Xaa is C or S
VIMEYKFKIKPTKGILYLISIPELDQSVXXPSASA

SEQ ID NO: 59129 - protein, 37 aa, Artificial Sequence; identical to SEQ ID NO: 15954
  Cyclic GFR-binding peptide
  MOD_RES (31)..(32): Xaa is C or S

SEQ ID NO: 59130 - protein, 30 aa, Artificial Sequence
  Cyclic GFR-binding peptide
  MOD_RES (1)..(1): Xaa is C or S
XSKVVMEYKFKVKPTRGVLYLISIPELDQP

SEQ ID NO: 59131 - protein, 26 aa, Artificial Sequence
  Cyclic GFR-binding peptide
EEYKFKVVKDYEDLYLMSIPELETPV

SEQ ID NO: 59132 - protein, 34 aa, Artificial Sequence
  Cyclic GFR-binding peptide
  MOD_RES (2)..(4): Xaa is C or S
RXGXGEVVMEEYQKYVVKDYEDIYLMSIPSLETP

SEQ ID NO: 59133 - protein, 32 aa, Artificial Sequence; identical to SEQ ID NO: 15956
  Cyclic GFR-binding peptide
  MOD_RES (31)..(32): Xaa is C or S

SEQ ID NO: 59134 - protein, 33 aa, Artificial Sequence
  Cyclic GFR-binding peptide
  MOD_RES (28)..(29): Xaa is C or S
MNEYQKYIVNSSDDIYLVSIPSLKTPAXXPKPV

SEQ ID NO: 59135 - protein, 39 aa, Artificial Sequence; identical to SEQ ID NO: 15960
  Cyclic GFR-binding peptide
  MOD_RES (1)..(3)..(35)..(36): Xaa is C or S

SEQ ID NO: 59136 - protein, 28 aa, Artificial Sequence
  Cyclic GFR-binding peptide
GEVVMDEYQKYVVKENEDIYLMSIPSLE

SEQ ID NO: 59137 - protein, 34 aa, Artificial Sequence; identical to SEQ ID NO: 15966
  Cyclic GFR-binding peptide
  MOD_RES (31)..(32): Xaa is C or S

SEQ ID NO: 59138 - protein, 35 aa, Artificial Sequence; identical to SEQ ID NO: 15968
  Cyclic GFR-binding peptide
  MOD_RES (1)..(34)..(35): Xaa is C or S

SEQ ID NO: 59139 - protein, 28 aa, Artificial Sequence
  Cyclic GFR-binding peptide
VVMEYQKYVKPTRGVIYLISIPSLDQPV

SEQ ID NO: 59140 - protein, 30 aa, Artificial Sequence; identical to SEQ ID NO: 1940
  Cyclic GFR-binding peptide

SEQ ID NO: 59141 - protein, 20 aa, Artificial Sequence
  Cyclic GFR-binding peptide
EYKFKTPVGMDDLYLVSIPE

SEQ ID NO: 59142 - protein, 33 aa, Artificial Sequence
  Cyclic GFR-binding peptide
  MOD_RES (29)..(30): Xaa is C or S
VMDEYKFKVVNNAADLYLISIPELRAPVXXSAP

SEQ ID NO: 59143 - protein, 30 aa, Artificial Sequence
  Cyclic GFR-binding peptide
  MOD_RES (1)..(3): Xaa is C or S
XGXAEVVMDYHYKLVVNNAADKYLISIPSL

SEQ ID NO: 59144 - protein, 37 aa, Artificial Sequence; identical to SEQ ID NO: 15978
  Cyclic GFR-binding peptide
  MOD_RES (2)..(4)..(36)..(37): Xaa is C or S

SEQ ID NO: 59145 - protein, 25 aa, Artificial Sequence
  Cyclic GFR-binding peptide
VAMGEYQKYYTVVGKDIYLISIPSL

SEQ ID NO: 59146 - protein, 35 aa, Artificial Sequence; identical to SEQ ID NO: 15980
  Cyclic GFR-binding peptide
  MOD_RES (1)..(3)..(34)..(35): Xaa is C or S

SEQ ID NO: 59147 - protein, 36 aa, Artificial Sequence; identical to SEQ ID NO: 15990
  Cyclic GFR-binding peptide
  MOD_RES (2)..(4)..(36): Xaa is C or S

SEQ ID NO: 59148 - protein, 32 aa, Artificial Sequence
  Cyclic GFR-binding peptide
  MOD_RES (29)..(30): Xaa is C or S
VVMEYQKYVKPTRGVIYLISIPSLDQPVXXPS

SEQ ID NO: 59149 - protein, 20 aa, Artificial Sequence
  Cyclic GFR-binding peptide
EYQKYVKPKRGVIYLISIPS

SEQ ID NO: 59150 - protein, 29 aa, Artificial Sequence
  Cyclic GFR-binding peptide
  MOD_RES (29)..(29): Xaa is C or S
VMNEYKFKIVNSSDDLYLVSIPELQTPAX

SEQ ID NO: 59151 - protein, 29 aa, Artificial Sequence
  Cyclic GFR-binding peptide
SRVVMNEYKFKIVNSSDDLYLVSIPELKT

SEQ ID NO: 59152 - protein, 31 aa, Artificial Sequence
  Cyclic GFR-binding peptide
  MOD_RES (28)..(29): Xaa is C or S
MDEYKFKVVNNAADLYLISIPELRAPVXXSA

SEQ ID NO: 59153 - protein, 31 aa, Artificial Sequence
  Cyclic GFR-binding peptide
  MOD_RES (2)..(2): Xaa is C or S
GXEAVSMGEEYQKYTPVGMDDIYLVSIPSLK

SEQ ID NO: 59154 - protein, 36 aa, Artificial Sequence; identical to SEQ ID NO: 16000
  Cyclic GFR-binding peptide
  MOD_RES (2)..(4)..(36): Xaa is C or S

SEQ ID NO: 59155 - protein, 39 aa, Artificial Sequence; identical to SEQ ID NO: 16002
  Cyclic GFR-binding peptide
  MOD_RES (2)..(4)..(36)..(37): Xaa is C or S

SEQ ID NO: 59156 - protein, 27 aa, Artificial Sequence
  Cyclic GFR-binding peptide
  MOD_RES (27)..(27): Xaa is C or S
GRYKKLYTVVGKDFYLISIANLKTPVX

SEQ ID NO: 59157 - protein, 35 aa, Artificial Sequence
  Cyclic GFR-binding peptide
  MOD_RES (29)..(30): Xaa is C or S
VMDEYKFKVVNNAADLYLISIPELRAPVXXSAPAA

SEQ ID NO: 59158 - protein, 33 aa, Artificial Sequence
  Cyclic GFR-binding peptide
  MOD_RES (1)..(3): Xaa is C or S
XGXGEVVMEEYKFKVVKDYEDLYLMSIPELETP

SEQ ID NO: 59159 - protein, 30 aa, Artificial Sequence; identical to SEQ ID NO: 1943
  Cyclic GFR-binding peptide

SEQ ID NO: 59160 - protein, 36 aa, Artificial Sequence; identical to SEQ ID NO: 16011
  Cyclic GFR-binding peptide
  MOD_RES (2)..(4)..(36): Xaa is C or S

SEQ ID NO: 59161 - protein, 28 aa, Artificial Sequence
  Cyclic GFR-binding peptide
VMNEYQKYIVNNSSDIYLVSIPSLKTPA

SEQ ID NO: 59162 - protein, 38 aa, Artificial Sequence; identical to SEQ ID NO: 16019
  Cyclic GFR-binding peptide
  MOD_RES (1)..(3)..(34)..(35): Xaa is C or S

SEQ ID NO: 59163 - protein, 28 aa, Artificial Sequence
  Cyclic GFR-binding peptide
VVMNEYQKYIVNSSDDIYLVSIPSLKTP

SEQ ID NO: 59164 - protein, 22 aa, Artificial Sequence
  Cyclic GFR-binding peptide
EYQKYVVKDYEDIYLMSIPSLE

SEQ ID NO: 59165 - protein, 41 aa, Artificial Sequence; identical to SEQ ID NO: 16022
  Cyclic GFR-binding peptide
  MOD_RES (2)..(4)..(36)..(37): Xaa is C or S

SEQ ID NO: 59166 - protein, 30 aa, Artificial Sequence
  Cyclic GFR-binding peptide
  MOD_RES (2)..(4): Xaa is C or S
RXGXGEVVMDEYQKYVVKENEDIYLMSIPS

SEQ ID NO: 59167 - protein, 38 aa, Artificial Sequence; identical to SEQ ID NO: 16025
  Cyclic GFR-binding peptide
  MOD_RES (32)..(33): Xaa is C or S

SEQ ID NO: 59168 - protein, 26 aa, Artificial Sequence
  Cyclic GFR-binding peptide
AEVVMDRYKKLVVNNAADFYLISIAN

SEQ ID NO: 59169 - protein, 31 aa, Artificial Sequence
  Cyclic GFR-binding peptide
  MOD_RES (2)..(2): Xaa is C or S
KXSKVIMEYQKYIKPTKGIIYLISIPSLDQS

SEQ ID NO: 59170 - protein, 32 aa, Artificial Sequence
  Cyclic GFR-binding peptide
  MOD_RES (2)..(4): Xaa is C or S
HXGXSRVVMNEYQKYIVNSSDDIYLVSIPSLK

SEQ ID NO: 59171 - protein, 21 aa, Artificial Sequence
  Cyclic GFR-binding peptide
EYKFKVKPTRGVLYLISIPEL

SEQ ID NO: 59172 - protein, 30 aa, Artificial Sequence
  Cyclic GFR-binding peptide
  MOD_RES (2)..(4): Xaa is C or S
HXGXSRVVMNEYQKYIVNSSDDIYLVSIPS

SEQ ID NO: 59173 - protein, 28 aa, Artificial Sequence
  Cyclic GFR-binding peptide
  MOD_RES (26)..(27): Xaa is C or S
EYQKYIVNSSDDIYLVSIPSLQTPAXXP

SEQ ID NO: 59174 - protein, 39 aa, Artificial Sequence; identical to SEQ ID NO: 16034
  Cyclic GFR-binding peptide
  MOD_RES (2)..(34)..(35): Xaa is C or S

SEQ ID NO: 59175 - protein, 36 aa, Artificial Sequence; identical to SEQ ID NO: 16036
  Cyclic GFR-binding peptide
  MOD_RES (2)..(34)..(35): Xaa is C or S

SEQ ID NO: 59176 - protein, 37 aa, Artificial Sequence; identical to SEQ ID NO: 16037
  Cyclic GFR-binding peptide
  MOD_RES (2)..(4)..(35)..(36): Xaa is C or S

SEQ ID NO: 59177 - protein, 29 aa, Artificial Sequence
  Cyclic GFR-binding peptide
KVVMEYKFKVKPTRGVLYLISIPELDQPV

SEQ ID NO: 59178 - protein, 36 aa, Artificial Sequence
  Cyclic GFR-binding peptide
  MOD_RES (32)..(33): Xaa is C or S
AVSMGEEYQKYTPVGMDDIYLVSIPSLKTPVXXAKG

SEQ ID NO: 59179 - protein, 31 aa, Artificial Sequence
  Cyclic GFR-binding peptide
  MOD_RES (27)..(28): Xaa is C or S
NEYQKYIVNNSSDIYLVSIPSLKTPAXXAKP

SEQ ID NO: 59180 - protein, 27 aa, Artificial Sequence
  Cyclic GFR-binding peptide
IMEYKFKVKPKRGVLYLISIPELAQPV

SEQ ID NO: 59181 - protein, 32 aa, Artificial Sequence
  Cyclic GFR-binding peptide
  MOD_RES (30)..(31): Xaa is C or S
VVMNEYQKYIVNSSDDIYLVSIPSLQTPAXXP

SEQ ID NO: 59182 - protein, 30 aa, Artificial Sequence
  Cyclic GFR-binding peptide
  MOD_RES (26)..(27): Xaa is C or S
EYKFKIVNNSSDLYLVSIPELKTPAXXAKP

SEQ ID NO: 59183 - protein, 25 aa, Artificial Sequence
  Cyclic GFR-binding peptide
SKVVMEYQKYVKPTRGVIYLISIPS

SEQ ID NO: 59184 - protein, 30 aa, Artificial Sequence
  Cyclic GFR-binding peptide
  MOD_RES (28)..(29): Xaa is C or S
MNEYKFKIVNSSDDLYLVSIPELKTPAXXP

SEQ ID NO: 59185 - protein, 25 aa, Artificial Sequence
  Cyclic GFR-binding peptide
VMNEYKFKIVNSSDDLYLVSIPELK

SEQ ID NO: 59186 - protein, 31 aa, Artificial Sequence
  Cyclic GFR-binding peptide
  MOD_RES (29)..(30): Xaa is C or S
VVMEYQKYVKPTRGVIYLISIPSLDQPVXXP

SEQ ID NO: 59187 - protein, 28 aa, Artificial Sequence
  Cyclic GFR-binding peptide
SRVVMNEYQKYIVNSSDDIYLVSIPSLK

SEQ ID NO: 59188 - protein, 40 aa, Artificial Sequence; identical to SEQ ID NO: 16054
  Cyclic GFR-binding peptide
  MOD_RES (1)..(3)..(35)..(36): Xaa is C or S

SEQ ID NO: 59189 - protein, 29 aa, Artificial Sequence
  Cyclic GFR-binding peptide
  MOD_RES (27)..(28): Xaa is C or S
MEYQKYVKPKRGVIYLISIPSLAQPVXXP

SEQ ID NO: 59190 - protein, 31 aa, Artificial Sequence; identical to SEQ ID NO: 16055
  Cyclic GFR-binding peptide

SEQ ID NO: 59191 - protein, 31 aa, Artificial Sequence; identical to SEQ ID NO: 16062
  Cyclic GFR-binding peptide

SEQ ID NO: 59192 - protein, 33 aa, Artificial Sequence; identical to SEQ ID NO: 16061
  Cyclic GFR-binding peptide
  MOD_RES (1)..(33): Xaa is C or S

SEQ ID NO: 59193 - protein, 37 aa, Artificial Sequence; identical to SEQ ID NO: 16063
  Cyclic GFR-binding peptide
  MOD_RES (32)..(33): Xaa is C or S

SEQ ID NO: 59194 - protein, 33 aa, Artificial Sequence
  Cyclic GFR-binding peptide
  MOD_RES (28)..(29): Xaa is C or S
MNEYKFKIVNSSDDLYLVSIPELKTPAXXPKPV

SEQ ID NO: 59195 - protein, 26 aa, Artificial Sequence
  Cyclic GFR-binding peptide
EEYKFKTPVGMDDLYLVSIPELKTPV

SEQ ID NO: 59196 - protein, 28 aa, Artificial Sequence
  Cyclic GFR-binding peptide
  MOD_RES (1)..(1): Xaa is C or S
XSRVVMNEYKFKIVNSSDDLYLVSIPEL

SEQ ID NO: 59197 - protein, 31 aa, Artificial Sequence
  Cyclic GFR-binding peptide
  MOD_RES (28)..(29): Xaa is C or S
MNEYKFKIVNNSSDLYLVSIPELKTPAXXAK

SEQ ID NO: 59198 - protein, 33 aa, Artificial Sequence
  Cyclic GFR-binding peptide
  MOD_RES (27)..(28): Xaa is C or S
MEYQKYVKPKRGVIYLISIPSLAQPVXXPAASA

SEQ ID NO: 59199 - protein, 32 aa, Artificial Sequence
  Cyclic GFR-binding peptide
  MOD_RES (30)..(31): Xaa is C or S
VVMDYHYKLVVNNAADKYLISIPSLRAPVXXS

SEQ ID NO: 59200 - protein, 26 aa, Artificial Sequence
  Cyclic GFR-binding peptide
KVVMEYQKYVKPTRGVIYLISIPSLD

SEQ ID NO: 59201 - protein, 32 aa, Artificial Sequence
  Cyclic GFR-binding peptide
  MOD_RES (2)..(2): Xaa is C or S
GXEAVSMGEEYKFKTPVGMDDLYLVSIPELKT

SEQ ID NO: 59202 - protein, 23 aa, Artificial Sequence
  Cyclic GFR-binding peptide
EYKFKIVNSSDDLYLVSIPELQT

SEQ ID NO: 59203 - protein, 38 aa, Artificial Sequence; identical to SEQ ID NO: 16084
  Cyclic GFR-binding peptide
  MOD_RES (2)..(34)..(35): Xaa is C or S

SEQ ID NO: 59204 - protein, 32 aa, Artificial Sequence; identical to SEQ ID NO: 16085
  Cyclic GFR-binding peptide
  MOD_RES (31)..(32): Xaa is C or S

SEQ ID NO: 59205 - protein, 31 aa, Artificial Sequence
  Cyclic GFR-binding peptide
  MOD_RES (26)..(27): Xaa is C or S
EYQKYVKPTRGVIYLISIPSLDQPVXXPSAS

SEQ ID NO: 59206 - protein, 22 aa, Artificial Sequence
  Cyclic GFR-binding peptide
EYQKYVKPTRGVIYLISIPSLD

SEQ ID NO: 59207 - protein, 34 aa, Artificial Sequence
  Cyclic GFR-binding peptide
  MOD_RES (30)..(31): Xaa is C or S
VVMDEYQKYVVKENEDIYLMSIPSLETPVXXAKP

SEQ ID NO: 59208 - protein, 34 aa, Artificial Sequence
  Cyclic GFR-binding peptide
  MOD_RES (30)..(31): Xaa is C or S
VAMGYHYKLYTVVGKDKYLISIPSLKTPVXXAKS

SEQ ID NO: 59209 - protein, 20 aa, Artificial Sequence
  Cyclic GFR-binding peptide
EYKFKTPVGMDDLYLVSIPE

SEQ ID NO: 59210 - protein, 27 aa, Artificial Sequence
  Cyclic GFR-binding peptide
VMNEYQKYIVNSSDDIYLVSIPSLQTP

SEQ ID NO: 59211 - protein, 32 aa, Artificial Sequence
  Cyclic GFR-binding peptide
  MOD_RES (26)..(27): Xaa is C or S
EYKFKVVKENEDLYLMSIPELETPVXXAKPIK

SEQ ID NO: 59212 - protein, 35 aa, Artificial Sequence; identical to SEQ ID NO: 16095
  Cyclic GFR-binding peptide
  MOD_RES (1)..(32)..(33): Xaa is C or S

SEQ ID NO: 59213 - protein, 21 aa, Artificial Sequence
  Cyclic GFR-binding peptide
DRYKKLVVNNAADFYLISIAN

SEQ ID NO: 59214 - protein, 26 aa, Artificial Sequence
  Cyclic GFR-binding peptide
  MOD_RES (26)..(26): Xaa is C or S
EYKFKIVNNSSDLYLVSIPELKTPAX

SEQ ID NO: 59215 - protein, 27 aa, Artificial Sequence
  Cyclic GFR-binding peptide
  MOD_RES (1)..(1): Xaa is C or S
XESVAMGRYKKLYTVVGKDFYLISIAN

SEQ ID NO: 59216 - protein, 33 aa, Artificial Sequence; identical to SEQ ID NO: 16099
  Cyclic GFR-binding peptide
  MOD_RES (2)..(33): Xaa is C or S

SEQ ID NO: 59217 - protein, 24 aa, Artificial Sequence
  Cyclic GFR-binding peptide
VVMNEYKFKIVNSSDDLYLVSIPE

SEQ ID NO: 59218 - protein, 33 aa, Artificial Sequence
  Cyclic GFR-binding peptide
  MOD_RES (30)..(31): Xaa is C or S
KVVMEYQKYVKPTRGVIYLISIPSLDQPVXXPS

SEQ ID NO: 59219 - protein, 37 aa, Artificial Sequence; identical to SEQ ID NO: 16100
  Cyclic GFR-binding peptide
  MOD_RES (1)..(32)..(33): Xaa is C or S

SEQ ID NO: 59220 - protein, 32 aa, Artificial Sequence
  Cyclic GFR-binding peptide
  MOD_RES (29)..(30): Xaa is C or S
VMDYHYKLVVNNAADKYLISIPSLRAPVXXSA

SEQ ID NO: 59221 - protein, 34 aa, Artificial Sequence; identical to SEQ ID NO: 16101
  Cyclic GFR-binding peptide
  MOD_RES (1)..(3): Xaa is C or S

SEQ ID NO: 59222 - protein, 29 aa, Artificial Sequence
  Cyclic GFR-binding peptide
VVMDEYQKYVVKENEDIYLMSIPSLETPV

SEQ ID NO: 59223 - protein, 28 aa, Artificial Sequence
  Cyclic GFR-binding peptide
  MOD_RES (28)..(28): Xaa is C or S
MDRYKKLVVNNAADFYLISIANLRAPVX

SEQ ID NO: 59224 - protein, 32 aa, Artificial Sequence
  Cyclic GFR-binding peptide
  MOD_RES (30)..(30): Xaa is C or S
VVMNEYKFKIVNSSDDLYLVSIPELKTPAXTP

SEQ ID NO: 59225 - protein, 31 aa, Artificial Sequence
  Cyclic GFR-binding peptide
  MOD_RES (30)..(31): Xaa is C or S
KVVMEYQKYVKPTRGVIYLISIPSLDQPVXX

SEQ ID NO: 59226 - protein, 30 aa, Artificial Sequence; identical to SEQ ID NO: 16107
  Cyclic GFR-binding peptide

SEQ ID NO: 59227 - protein, 35 aa, Artificial Sequence; identical to SEQ ID NO: 16108
  Cyclic GFR-binding peptide
  MOD_RES (33)..(34): Xaa is C or S

SEQ ID NO: 59228 - protein, 29 aa, Artificial Sequence
  Cyclic GFR-binding peptide
SKVVMEYQKYVKPTRGVIYLISIPSLDQP

SEQ ID NO: 59229 - protein, 32 aa, Artificial Sequence
  Cyclic GFR-binding peptide
  MOD_RES (28)..(29): Xaa is C or S
MDEYQKYVVKENEDIYLMSIPSLETPVXXAKP

SEQ ID NO: 59230 - protein, 36 aa, Artificial Sequence
  Cyclic GFR-binding peptide
  MOD_RES (1)..(3)..(35)..(36): Xaa is C or S
XGXGEVVMDEYKFKVVKENEDLYLMSIPELETPVXX

SEQ ID NO: 59231 - protein, 34 aa, Artificial Sequence; identical to SEQ ID NO: 16113
  Cyclic GFR-binding peptide
  MOD_RES (31)..(32): Xaa is C or S

SEQ ID NO: 59232 - protein, 27 aa, Artificial Sequence
  Cyclic GFR-binding peptide
  MOD_RES (2)..(2): Xaa is C or S
KXSKVVMEYQKYVKPTRGVIYLISIPS

SEQ ID NO: 59233 - protein, 33 aa, Artificial Sequence; identical to SEQ ID NO: 16114
  Cyclic GFR-binding peptide
  MOD_RES (1)..(3): Xaa is C or S

SEQ ID NO: 59234 - protein, 33 aa, Artificial Sequence; identical to SEQ ID NO: 16116
  Cyclic GFR-binding peptide
  MOD_RES (1)..(33): Xaa is C or S

SEQ ID NO: 59235 - protein, 28 aa, Artificial Sequence
  Cyclic GFR-binding peptide
  MOD_RES (27)..(28): Xaa is C or S
MEYQKYIKPTKGIIYLISIPSLDQSVXX

SEQ ID NO: 59236 - protein, 32 aa, Artificial Sequence
  Cyclic GFR-binding peptide
  MOD_RES (26)..(27): Xaa is C or S
EYKFKIKPTKGILYLISIPELDQSVXXPSASA

SEQ ID NO: 59237 - protein, 30 aa, Artificial Sequence
  Cyclic GFR-binding peptide
  MOD_RES (29)..(30): Xaa is C or S
VVMEYKFKVKPTRGVLYLISIPELDQPVXX

SEQ ID NO: 59238 - protein, 30 aa, Artificial Sequence
  Cyclic GFR-binding peptide
  MOD_RES (28)..(29): Xaa is C or S
MNEYQKYIVNSSDDIYLVSIPSLKTPAXXP

SEQ ID NO: 59239 - protein, 27 aa, Artificial Sequence
  Cyclic GFR-binding peptide
  MOD_RES (1)..(1): Xaa is C or S
XSRVVMNEYQKYIVNSSDDIYLVSIPS

SEQ ID NO: 59240 - protein, 34 aa, Artificial Sequence; identical to SEQ ID NO: 16126
  Cyclic GFR-binding peptide
  MOD_RES (2)..(33)..(34): Xaa is C or S

SEQ ID NO: 59241 - protein, 28 aa, Artificial Sequence
  Cyclic GFR-binding peptide
  MOD_RES (26)..(27): Xaa is C or S
EYQKYIVNNSSDIYLVSIPSLKTPAXXA

SEQ ID NO: 59242 - protein, 35 aa, Artificial Sequence; identical to SEQ ID NO: 16132
  Cyclic GFR-binding peptide
  MOD_RES (2)..(34)..(35): Xaa is C or S

SEQ ID NO: 59243 - protein, 38 aa, Artificial Sequence; identical to SEQ ID NO: 16133
  Cyclic GFR-binding peptide
  MOD_RES (1)..(3)..(34)..(35): Xaa is C or S

SEQ ID NO: 59244 - protein, 29 aa, Artificial Sequence
  Cyclic GFR-binding peptide
  MOD_RES (27)..(28): Xaa is C or S
NEYKFKIVNSSDDLYLVSIPELKTPAXXP

SEQ ID NO: 59245 - protein, 31 aa, Artificial Sequence
  Cyclic GFR-binding peptide
  MOD_RES (31)..(31): Xaa is C or S
VSMGEEYKFKTPVGMDDLYLVSIPELKTPVX

SEQ ID NO: 59246 - protein, 32 aa, Artificial Sequence
  Cyclic GFR-binding peptide
  MOD_RES (2)..(4): Xaa is C or S
RXGXAEVVMDRYKKLVVNNAADFYLISIANLR

SEQ ID NO: 59247 - protein, 28 aa, Artificial Sequence
  Cyclic GFR-binding peptide
  MOD_RES (26)..(27): Xaa is C or S
EYQKYVKPKRGVIYLISIPSLAQPVXXP

SEQ ID NO: 59248 - protein, 27 aa, Artificial Sequence
  Cyclic GFR-binding peptide
VMEYQKYVKPTRGVIYLISIPSLDQPV

SEQ ID NO: 59249 - protein, 32 aa, Artificial Sequence
  Cyclic GFR-binding peptide
  MOD_RES (29)..(30): Xaa is C or S
VMDEYQKYVVKENEDIYLMSIPSLETPVXXAK

SEQ ID NO: 59250 - protein, 25 aa, Artificial Sequence
  Cyclic GFR-binding peptide
VIMEYQKYVKPKRGVIYLISIPSLA

SEQ ID NO: 59251 - protein, 29 aa, Artificial Sequence
  Cyclic GFR-binding peptide
  MOD_RES (2)..(2): Xaa is C or S
KXSRVIMEYKFKVKPKRGVLYLISIPELA

SEQ ID NO: 59252 - protein, 31 aa, Artificial Sequence
  Cyclic GFR-binding peptide
  MOD_RES (2)..(4): Xaa is C or S
SXKXSKVIMEYKFKIKPTKGILYLISIPELD

SEQ ID NO: 59253 - protein, 36 aa, Artificial Sequence; identical to SEQ ID NO: 16141
  Cyclic GFR-binding peptide
  MOD_RES (1)..(3)..(35)..(36): Xaa is C or S

SEQ ID NO: 59254 - protein, 27 aa, Artificial Sequence
  Cyclic GFR-binding peptide
VVMDEYKFKVVKENEDLYLMSIPELET

SEQ ID NO: 59255 - protein, 40 aa, Artificial Sequence; identical to SEQ ID NO: 16142
  Cyclic GFR-binding peptide
  MOD_RES (1)..(3)..(34)..(35): Xaa is C or S

SEQ ID NO: 59256 - protein, 40 aa, Artificial Sequence; identical to SEQ ID NO: 16143
  Cyclic GFR-binding peptide
  MOD_RES (2)..(34)..(35): Xaa is C or S

SEQ ID NO: 59257 - protein, 27 aa, Artificial Sequence
  Cyclic GFR-binding peptide
  MOD_RES (27)..(27): Xaa is C or S
EEYKFKVVKDYEDLYLMSIPELETPVX

SEQ ID NO: 59258 - protein, 29 aa, Artificial Sequence
  Cyclic GFR-binding peptide
RVVMNEYKFKIVNSSDDLYLVSIPELQTP

SEQ ID NO: 59259 - protein, 27 aa, Artificial Sequence
  Cyclic GFR-binding peptide
VVMNEYKFKIVNSSDDLYLVSIPELQT

SEQ ID NO: 59260 - protein, 28 aa, Artificial Sequence
  Cyclic GFR-binding peptide
  MOD_RES (1)..(1): Xaa is C or S
XSKVVMEYQKYVKPTRGVIYLISIPSLD

SEQ ID NO: 59261 - protein, 40 aa, Artificial Sequence; identical to SEQ ID NO: 16145
  Cyclic GFR-binding peptide
  MOD_RES (2)..(4)..(36)..(37): Xaa is C or S

SEQ ID NO: 59262 - protein, 23 aa, Artificial Sequence
  Cyclic GFR-binding peptide
DYHYKLVVNNAADKYLISIPSLR

SEQ ID NO: 59263 - protein, 36 aa, Artificial Sequence; identical to SEQ ID NO: 16148
  Cyclic GFR-binding peptide
  MOD_RES (31)..(32): Xaa is C or S

SEQ ID NO: 59264 - protein, 30 aa, Artificial Sequence
  Cyclic GFR-binding peptide
  MOD_RES (1)..(3): Xaa is C or S
XGXGEVVMDEYKFKVVKENEDLYLMSIPEL

SEQ ID NO: 59265 - protein, 29 aa, Artificial Sequence
  Cyclic GFR-binding peptide
  MOD_RES (29)..(29): Xaa is C or S
AMGYHYKLYTVVGKDKYLISIPSLKTPVX

SEQ ID NO: 59266 - protein, 32 aa, Artificial Sequence
  Cyclic GFR-binding peptide
  MOD_RES (2)..(4): Xaa is C or S
SXKXSKVVMEYQKYVKPTRGVIYLISIPSLDQ

SEQ ID NO: 59267 - protein, 30 aa, Artificial Sequence
  Cyclic GFR-binding peptide
  MOD_RES (26)..(27): Xaa is C or S
EYKFKVVKENEDLYLMSIPELETPVXXAKP

SEQ ID NO: 59268 - protein, 33 aa, Artificial Sequence
  Cyclic GFR-binding peptide
  MOD_RES (27)..(28): Xaa is C or S
MEYQKYVKPTRGVIYLISIPSLDQPVXXPSASA

SEQ ID NO: 59269 - protein, 32 aa, Artificial Sequence
  Cyclic GFR-binding peptide
  MOD_RES (28)..(29): Xaa is C or S
MDEYKFKVVKENEDLYLMSIPELETPVXXAKP

SEQ ID NO: 59270 - protein, 29 aa, Artificial Sequence
  Cyclic GFR-binding peptide
GEVVMDEYKFKVVKENEDLYLMSIPELET

SEQ ID NO: 59271 - protein, 34 aa, Artificial Sequence; identical to SEQ ID NO: 16155
  Cyclic GFR-binding peptide
  MOD_RES (1)..(32)..(33): Xaa is C or S

SEQ ID NO: 59272 - protein, 35 aa, Artificial Sequence; identical to SEQ ID NO: 16159
  Cyclic GFR-binding peptide
  MOD_RES (1)..(33)..(34): Xaa is C or S

SEQ ID NO: 59273 - protein, 29 aa, Artificial Sequence
  Cyclic GFR-binding peptide
  MOD_RES (27)..(28): Xaa is C or S
NEYQKYIVNNSSDIYLVSIPSLKTPAXXA

SEQ ID NO: 59274 - protein, 29 aa, Artificial Sequence
  Cyclic GFR-binding peptide
ESVAMGEYQKYYTVVGKDIYLISIPSLKT

SEQ ID NO: 59275 - protein, 28 aa, Artificial Sequence
  Cyclic GFR-binding peptide
  MOD_RES (28)..(28): Xaa is C or S
MEEYKFKVVKDYEDLYLMSIPELETPVX

SEQ ID NO: 59276 - protein, 36 aa, Artificial Sequence; identical to SEQ ID NO: 16170
  Cyclic GFR-binding peptide
  MOD_RES (1)..(32)..(33): Xaa is C or S

SEQ ID NO: 59277 - protein, 27 aa, Artificial Sequence
  Cyclic GFR-binding peptide
KVIMEYQKYIKPTKGIIYLISIPSLDQ

SEQ ID NO: 59278 - protein, 41 aa, Artificial Sequence; identical to SEQ ID NO: 16171
  Cyclic GFR-binding peptide
  MOD_RES (2)..(4)..(36)..(37): Xaa is C or S

SEQ ID NO: 59279 - protein, 37 aa, Artificial Sequence; identical to SEQ ID NO: 16172
  Cyclic GFR-binding peptide
  MOD_RES (2)..(35)..(36): Xaa is C or S

SEQ ID NO: 59280 - protein, 35 aa, Artificial Sequence; identical to SEQ ID NO: 16174
  Cyclic GFR-binding peptide
  MOD_RES (1)..(33)..(34): Xaa is C or S

SEQ ID NO: 59281 - protein, 35 aa, Artificial Sequence
  Cyclic GFR-binding peptide
  MOD_RES (29)..(30): Xaa is C or S
VIMEYQKYVKPKRGVIYLISIPSLAQPVXXPAASA

SEQ ID NO: 59282 - protein, 31 aa, Artificial Sequence
  Cyclic GFR-binding peptide
  MOD_RES (2)..(4): Xaa is C or S
HXGXARVVMNEYQKYIVNSSDDIYLVSIPSL

SEQ ID NO: 59283 - protein, 22 aa, Artificial Sequence
  Cyclic GFR-binding peptide
MEYQKYVKPKRGVIYLISIPSL

SEQ ID NO: 59284 - protein, 30 aa, Artificial Sequence
  Cyclic GFR-binding peptide
  MOD_RES (28)..(29): Xaa is C or S
MGEYQKYYTVVGKDIYLISIPSLKTPVXXA

SEQ ID NO: 59285 - protein, 37 aa, Artificial Sequence; identical to SEQ ID NO: 16180
  Cyclic GFR-binding peptide
  MOD_RES (31)..(32): Xaa is C or S

SEQ ID NO: 59286 - protein, 39 aa, Artificial Sequence; identical to SEQ ID NO: 16181
  Cyclic GFR-binding peptide
  MOD_RES (1)..(33)..(34): Xaa is C or S

SEQ ID NO: 59287 - protein, 33 aa, Artificial Sequence
  Cyclic GFR-binding peptide
  MOD_RES (28)..(29): Xaa is C or S
MDRYKKLVVNNAADFYLISIANLRAPVXXSAPA

SEQ ID NO: 59288 - protein, 30 aa, Artificial Sequence
  Cyclic GFR-binding peptide
  MOD_RES (1)..(3): Xaa is C or S
XKXSRVIMEYKFKVKPKRGVLYLISIPELA

SEQ ID NO: 59289 - protein, 25 aa, Artificial Sequence
  Cyclic GFR-binding peptide
VAMGRYKKLYTVVGKDFYLISIANL

SEQ ID NO: 59290 - protein, 33 aa, Artificial Sequence; identical to SEQ ID NO: 16190
  Cyclic GFR-binding peptide
  MOD_RES (1)..(33): Xaa is C or S

SEQ ID NO: 59291 - protein, 34 aa, Artificial Sequence
  Cyclic GFR-binding peptide
  MOD_RES (30)..(31): Xaa is C or S
VVMNEYKFKIVNSSDDLYLVSIPELQTPAXXPKP

SEQ ID NO: 59292 - protein, 29 aa, Artificial Sequence
  Cyclic GFR-binding peptide
  MOD_RES (26)..(27): Xaa is C or S
EYQKYVVKDYEDIYLMSIPSLETPVXXAK

SEQ ID NO: 59293 - protein, 36 aa, Artificial Sequence
  Cyclic GFR-binding peptide
  MOD_RES (30)..(31): Xaa is C or S
VVMEEYQKYVVKDYEDIYLMSIPSLETPVXXAKPIS

SEQ ID NO: 59294 - protein, 20 aa, Artificial Sequence
  Cyclic GFR-binding peptide
EYKFKIKPTKGILYLISIPE

SEQ ID NO: 59295 - protein, 22 aa, Artificial Sequence
  Cyclic GFR-binding peptide
YHYKLVVNNAADKYLISIPSLR

SEQ ID NO: 59296 - protein, 37 aa, Artificial Sequence; identical to SEQ ID NO: 16197
  Cyclic GFR-binding peptide
  MOD_RES (1)..(3)..(34)..(35): Xaa is C or S

SEQ ID NO: 59297 - protein, 30 aa, Artificial Sequence
  Cyclic GFR-binding peptide
  MOD_RES (26)..(27): Xaa is C or S
EYQKYIKPTKGIIYLISIPSLDQSVXXPSA

SEQ ID NO: 59298 - protein, 30 aa, Artificial Sequence
  Cyclic GFR-binding peptide
  MOD_RES (26)..(27): Xaa is C or S
EYKFKIVNSSDDLYLVSIPELQTPAXXPKP

SEQ ID NO: 59299 - protein, 35 aa, Artificial Sequence
  Cyclic GFR-binding peptide
  MOD_RES (30)..(31): Xaa is C or S
VVMDEYKFKVVNNAADLYLISIPELRAPVXXSAPA

SEQ ID NO: 59300 - protein, 27 aa, Artificial Sequence
  Cyclic GFR-binding peptide
VMNEYKFKIVNNSSDLYLVSIPELKTP

SEQ ID NO: 59301 - protein, 29 aa, Artificial Sequence
  Cyclic GFR-binding peptide
SMGEEYQKYTPVGMDDIYLVSIPSLKTPV

SEQ ID NO: 59302 - protein, 23 aa, Artificial Sequence
  Cyclic GFR-binding peptide
EYQKYVKPTRGVIYLISIPSLDQ

SEQ ID NO: 59303 - protein, 41 aa, Artificial Sequence; identical to SEQ ID NO: 16206
  Cyclic GFR-binding peptide
  MOD_RES (1)..(3)..(35)..(36): Xaa is C or S

SEQ ID NO: 59304 - protein, 39 aa, Artificial Sequence; identical to SEQ ID NO: 16207
  Cyclic GFR-binding peptide
  MOD_RES (2)..(4)..(35)..(36): Xaa is C or S

SEQ ID NO: 59305 - protein, 26 aa, Artificial Sequence
  Cyclic GFR-binding peptide
AEVVMDEYKFKVVNNAADLYLISIPE

SEQ ID NO: 59306 - protein, 35 aa, Artificial Sequence; identical to SEQ ID NO: 16212
  Cyclic GFR-binding peptide
  MOD_RES (32)..(33): Xaa is C or S

SEQ ID NO: 59307 - protein, 38 aa, Artificial Sequence; identical to SEQ ID NO: 16213
  Cyclic GFR-binding peptide
  MOD_RES (1)..(33)..(34): Xaa is C or S

SEQ ID NO: 59308 - protein, 39 aa, Artificial Sequence; identical to SEQ ID NO: 16214
  Cyclic GFR-binding peptide
  MOD_RES (2)..(33)..(34): Xaa is C or S

SEQ ID NO: 59309 - protein, 20 aa, Artificial Sequence
  Cyclic GFR-binding peptide
EYQKYVVKDYEDIYLMSIPS

SEQ ID NO: 59310 - protein, 32 aa, Artificial Sequence
  Cyclic GFR-binding peptide
  MOD_RES (27)..(28): Xaa is C or S
DEYQKYVVKENEDIYLMSIPSLETPVXXAKPI

SEQ ID NO: 59311 - protein, 35 aa, Artificial Sequence; identical to SEQ ID NO: 16215
  Cyclic GFR-binding peptide
  MOD_RES (32)..(33): Xaa is C or S

SEQ ID NO: 59312 - protein, 26 aa, Artificial Sequence
  Cyclic GFR-binding peptide
  MOD_RES (26)..(26): Xaa is C or S
EYKFKVKPKRGVLYLISIPELAQPVX

SEQ ID NO: 59313 - protein, 33 aa, Artificial Sequence
  Cyclic GFR-binding peptide
  MOD_RES (27)..(28): Xaa is C or S
MEYKFKIKPTKGILYLISIPELDQSVXXPSASA

SEQ ID NO: 59314 - protein, 34 aa, Artificial Sequence
  Cyclic GFR-binding peptide
  MOD_RES (2)..(4): Xaa is C or S
RXGXEAVSMGEEYQKYTPVGMDDIYLVSIPSLKT

SEQ ID NO: 59315 - protein, 29 aa, Artificial Sequence
  Cyclic GFR-binding peptide
VVMEEYKFKVVKDYEDLYLMSIPELETPV

SEQ ID NO: 59316 - protein, 37 aa, Artificial Sequence; identical to SEQ ID NO: 16221
  Cyclic GFR-binding peptide
  MOD_RES (2)..(34)..(35): Xaa is C or S

SEQ ID NO: 59317 - protein, 35 aa, Artificial Sequence; identical to SEQ ID NO: 16223
  Cyclic GFR-binding peptide
  MOD_RES (31)..(32): Xaa is C or S

SEQ ID NO: 59318 - protein, 37 aa, Artificial Sequence; identical to SEQ ID NO: 16228
  Cyclic GFR-binding peptide
  MOD_RES (2)..(4)..(35)..(36): Xaa is C or S

SEQ ID NO: 59319 - protein, 26 aa, Artificial Sequence
  Cyclic GFR-binding peptide
IMEYQKYIKPTKGIIYLISIPSLDQS

SEQ ID NO: 59320 - protein, 35 aa, Artificial Sequence
  Cyclic GFR-binding peptide
  MOD_RES (30)..(31): Xaa is C or S
RVIMEYQKYVKPKRGVIYLISIPSLAQPVXXPAAS

SEQ ID NO: 59321 - protein, 32 aa, Artificial Sequence
  Cyclic GFR-binding peptide
  MOD_RES (2)..(4): Xaa is C or S
SXKXSKVIMEYKFKIKPTKGILYLISIPELDQ

SEQ ID NO: 59322 - protein, 30 aa, Artificial Sequence
  Cyclic GFR-binding peptide
  MOD_RES (27)..(27): Xaa is C or S
NEYKFKIVNSSDDLYLVSIPELKTPAXTPK

SEQ ID NO: 59323 - protein, 24 aa, Artificial Sequence
  Cyclic GFR-binding peptide
DEYKFKVVNNAADLYLISIPELRA

SEQ ID NO: 59324 - protein, 32 aa, Artificial Sequence
  Cyclic GFR-binding peptide
  MOD_RES (2)..(2): Xaa is C or S
GXGEVVMDEYQKYVVKENEDIYLMSIPSLETP

SEQ ID NO: 59325 - protein, 34 aa, Artificial Sequence
  Cyclic GFR-binding peptide
  MOD_RES (2)..(4): Xaa is C or S
HXGXAKVVMNEYKFKIVNNSSDLYLVSIPELKTP

SEQ ID NO: 59326 - protein, 23 aa, Artificial Sequence
  Cyclic GFR-binding peptide
EYKFKIKPTKGILYLISIPELDQ

SEQ ID NO: 59327 - protein, 37 aa, Artificial Sequence; identical to SEQ ID NO: 16238
  Cyclic GFR-binding peptide
  MOD_RES (1)..(33)..(34): Xaa is C or S

SEQ ID NO: 59328 - protein, 33 aa, Artificial Sequence; identical to SEQ ID NO: 16240
  Cyclic GFR-binding peptide
  MOD_RES (32)..(33): Xaa is C or S

SEQ ID NO: 59329 - protein, 29 aa, Artificial Sequence
  Cyclic GFR-binding peptide
  MOD_RES (29)..(29): Xaa is C or S
VIMEYQKYIKPTKGIIYLISIPSLDQSVX

SEQ ID NO: 59330 - protein, 30 aa, Artificial Sequence
  Cyclic GFR-binding peptide
  MOD_RES (29)..(30): Xaa is C or S
AMGEYQKYYTVVGKDIYLISIPSLKTPVXX

SEQ ID NO: 59331 - protein, 33 aa, Artificial Sequence
  Cyclic GFR-binding peptide
  MOD_RES (29)..(30): Xaa is C or S
VMEEYQKYVVKDYEDIYLMSIPSLETPVXXAKP

SEQ ID NO: 59332 - protein, 34 aa, Artificial Sequence; identical to SEQ ID NO: 16242
  Cyclic GFR-binding peptide
  MOD_RES (1)..(32)..(33): Xaa is C or S

SEQ ID NO: 59333 - protein, 20 aa, Artificial Sequence
  Cyclic GFR-binding peptide
EYQKYVKPTRGVIYLISIPS

SEQ ID NO: 59334 - protein, 26 aa, Artificial Sequence
  Cyclic GFR-binding peptide
GRYKKLYTVVGKDFYLISIANLKTPV

SEQ ID NO: 59335 - protein, 26 aa, Artificial Sequence
  Cyclic GFR-binding peptide
SRVIMEYKFKVKPKRGVLYLISIPEL

SEQ ID NO: 59336 - protein, 33 aa, Artificial Sequence; identical to SEQ ID NO: 16243
  Cyclic GFR-binding peptide
  MOD_RES (2)..(2): Xaa is C or S

SEQ ID NO: 59337 - protein, 23 aa, Artificial Sequence
  Cyclic GFR-binding peptide
EYKFKVVKDYEDLYLMSIPELET

SEQ ID NO: 59338 - protein, 32 aa, Artificial Sequence
  Cyclic GFR-binding peptide
  MOD_RES (30)..(31): Xaa is C or S
VVMDRYKKLVVNNAADFYLISIANLRAPVXXS

SEQ ID NO: 59339 - protein, 21 aa, Artificial Sequence
  Cyclic GFR-binding peptide
EYKFKVVNNAADLYLISIPEL

SEQ ID NO: 59340 - protein, 28 aa, Artificial Sequence
  Cyclic GFR-binding peptide
RVVMNEYKFKIVNSSDDLYLVSIPELQT

SEQ ID NO: 59341 - skipped

SEQ ID NO: 59342 - protein, 37 aa, Artificial Sequence; identical to SEQ ID NO: 16251
  Cyclic GFR-binding peptide
  MOD_RES (32)..(33): Xaa is C or S

SEQ ID NO: 59343 - protein, 32 aa, Artificial Sequence
  Cyclic GFR-binding peptide
  MOD_RES (29)..(29): Xaa is C or S
VMNEYKFKIVNSSDDLYLVSIPELKTPAXTPK

SEQ ID NO: 59344 - protein, 24 aa, Artificial Sequence
  Cyclic GFR-binding peptide
VVMDEYKFKVVKENEDLYLMSIPE

SEQ ID NO: 59345 - protein, 24 aa, Artificial Sequence
  Cyclic GFR-binding peptide
EYKFKVKPTRGVLYLISIPELDQP

SEQ ID NO: 59346 - protein, 31 aa, Artificial Sequence; identical to SEQ ID NO: 16254
  Cyclic GFR-binding peptide
  MOD_RES (31)..(31): Xaa is C or S

SEQ ID NO: 59347 - protein, 25 aa, Artificial Sequence
  Cyclic GFR-binding peptide
EVVMDYHYKLVVNNAADKYLISIPS

SEQ ID NO: 59348 - protein, 23 aa, Artificial Sequence
  Cyclic GFR-binding peptide
GRYKKLYTVVGKDFYLISIANLK

SEQ ID NO: 59349 - protein, 37 aa, Artificial Sequence; identical to SEQ ID NO: 16258
  Cyclic GFR-binding peptide
  MOD_RES (2)..(34)..(35): Xaa is C or S

SEQ ID NO: 59350 - protein, 26 aa, Artificial Sequence
  Cyclic GFR-binding peptide
  MOD_RES (26)..(26): Xaa is C or S
EYKFKIVNSSDDLYLVSIPELKTPAX

SEQ ID NO: 59351 - protein, 41 aa, Artificial Sequence; identical to SEQ ID NO: 16259
  Cyclic GFR-binding peptide
  MOD_RES (2)..(4)..(36)..(37): Xaa is C or S

SEQ ID NO: 59352 - protein, 31 aa, Artificial Sequence
  Cyclic GFR-binding peptide
  MOD_RES (29)..(30): Xaa is C or S
MGEEYQKYTPVGMDDIYLVSIPSLKTPVXXA

SEQ ID NO: 59353 - protein, 32 aa, Artificial Sequence
  Cyclic GFR-binding peptide
  MOD_RES (2)..(4): Xaa is C or S
HXGXAKVVMNEYQKYIVNNSSDIYLVSIPSLK

SEQ ID NO: 59354 - protein, 27 aa, Artificial Sequence
  Cyclic GFR-binding peptide
VMNEYKFKIVNSSDDLYLVSIPELKTP

SEQ ID NO: 59355 - protein, 30 aa, Artificial Sequence
  Cyclic GFR-binding peptide
  MOD_RES (29)..(30): Xaa is C or S
MGEEYQKYTPVGMDDIYLVSIPSLKTPVXX

SEQ ID NO: 59356 - protein, 26 aa, Artificial Sequence
  Cyclic GFR-binding peptide
  MOD_RES (26)..(26): Xaa is C or S
RYKKLYTVVGKDFYLISIANLKTPVX

SEQ ID NO: 59357 - protein, 31 aa, Artificial Sequence
  Cyclic GFR-binding peptide
  MOD_RES (29)..(30): Xaa is C or S
AMGEYQKYYTVVGKDIYLISIPSLKTPVXXA

SEQ ID NO: 59358 - protein, 40 aa, Artificial Sequence; identical to SEQ ID NO: 16266
  Cyclic GFR-binding peptide
  MOD_RES (1)..(3)..(35)..(36): Xaa is C or S

SEQ ID NO: 59359 - protein, 31 aa, Artificial Sequence
  Cyclic GFR-binding peptide
  MOD_RES (1)..(3): Xaa is C or S
XGXARVVMNEYQKYIVNSSDDIYLVSIPSLQ

SEQ ID NO: 59360 - protein, 23 aa, Artificial Sequence
  Cyclic GFR-binding peptide
MGYHYKLYTVVGKDKYLISIPSL

SEQ ID NO: 59361 - protein, 37 aa, Artificial Sequence; identical to SEQ ID NO: 16267
  Cyclic GFR-binding peptide
  MOD_RES (1)..(3)..(35)..(36): Xaa is C or S

SEQ ID NO: 59362 - protein, 27 aa, Artificial Sequence
  Cyclic GFR-binding peptide
SKVVMEYKFKVKPTRGVLYLISIPELD

SEQ ID NO: 59363 - protein, 31 aa, Artificial Sequence
  Cyclic GFR-binding peptide
  MOD_RES (2)..(4): Xaa is C or S
RXGXESVAMGRYKKLYTVVGKDFYLISIANL

SEQ ID NO: 59364 - protein, 31 aa, Artificial Sequence
  Cyclic GFR-binding peptide
  MOD_RES (26)..(27): Xaa is C or S
EYKFKTPVGMDDLYLVSIPELKTPVXXAKGV

SEQ ID NO: 59365 - protein, 26 aa, Artificial Sequence
  Cyclic GFR-binding peptide
MDRYKKLVVNNAADFYLISIANLRAP

SEQ ID NO: 59366 - protein, 35 aa, Artificial Sequence; identical to SEQ ID NO: 16275
  Cyclic GFR-binding peptide
  MOD_RES (1)..(3)..(34)..(35): Xaa is C or S

SEQ ID NO: 59367 - protein, 37 aa, Artificial Sequence; identical to SEQ ID NO: 16278
  Cyclic GFR-binding peptide
  MOD_RES (31)..(32): Xaa is C or S

SEQ ID NO: 59368 - protein, 27 aa, Artificial Sequence
  Cyclic GFR-binding peptide
EVVMDEYQKYVVKENEDIYLMSIPSLE

SEQ ID NO: 59369 - protein, 31 aa, Artificial Sequence
  Cyclic GFR-binding peptide
  MOD_RES (27)..(28): Xaa is C or S
GEYQKYYTVVGKDIYLISIPSLKTPVXXAKS

SEQ ID NO: 59370 - protein, 24 aa, Artificial Sequence
  Cyclic GFR-binding peptide
AMGYHYKLYTVVGKDKYLISIPSL

SEQ ID NO: 59371 - protein, 39 aa, Artificial Sequence; identical to SEQ ID NO: 16280
  Cyclic GFR-binding peptide
  MOD_RES (2)..(34): Xaa is C or S

SEQ ID NO: 59372 - protein, 34 aa, Artificial Sequence
  Cyclic GFR-binding peptide
  MOD_RES (29)..(30): Xaa is C or S
AMGRYKKLYTVVGKDFYLISIANLKTPVXXAKSA

SEQ ID NO: 59373 - protein, 37 aa, Artificial Sequence; identical to SEQ ID NO: 16285
  Cyclic GFR-binding peptide
  MOD_RES (1)..(3)..(35)..(36): Xaa is C or S

SEQ ID NO: 59374 - protein, 38 aa, Artificial Sequence; identical to SEQ ID NO: 16289
  Cyclic GFR-binding peptide
  MOD_RES (2)..(4)..(36)..(37): Xaa is C or S

SEQ ID NO: 59375 - protein, 35 aa, Artificial Sequence; identical to SEQ ID NO: 16290
  Cyclic GFR-binding peptide
  MOD_RES (2)..(4): Xaa is C or S

SEQ ID NO: 59376 - protein, 38 aa, Artificial Sequence; identical to SEQ ID NO: 16292
  Cyclic GFR-binding peptide
  MOD_RES (2)..(4)..(35)..(36): Xaa is C or S

SEQ ID NO: 59377 - protein, 39 aa, Artificial Sequence; identical to SEQ ID NO: 16295
  Cyclic GFR-binding peptide
  MOD_RES (33)..(34): Xaa is C or S

SEQ ID NO: 59378 - protein, 26 aa, Artificial Sequence
  Cyclic GFR-binding peptide
SVAMGEYQKYYTVVGKDIYLISIPSL

SEQ ID NO: 59379 - protein, 32 aa, Artificial Sequence
  Cyclic GFR-binding peptide
  MOD_RES (2)..(4): Xaa is C or S
HXGXARVVMNEYQKYIVNSSDDIYLVSIPSLQ

SEQ ID NO: 59380 - protein, 37 aa, Artificial Sequence; identical to SEQ ID NO: 16300
  Cyclic GFR-binding peptide
  MOD_RES (1)..(33)..(34): Xaa is C or S

SEQ ID NO: 59381 - protein, 32 aa, Artificial Sequence
  Cyclic GFR-binding peptide
  MOD_RES (30)..(31): Xaa is C or S
VVMEEYQKYVVKDYEDIYLMSIPSLETPVXXA

SEQ ID NO: 59382 - protein, 33 aa, Artificial Sequence; identical to SEQ ID NO: 16305
  Cyclic GFR-binding peptide
  MOD_RES (32)..(33): Xaa is C or S

SEQ ID NO: 59383 - protein, 24 aa, Artificial Sequence
  Cyclic GFR-binding peptide
MNEYKFKIVNSSDDLYLVSIPELQ

SEQ ID NO: 59384 - protein, 33 aa, Artificial Sequence
  Cyclic GFR-binding peptide
  MOD_RES (2)..(4): Xaa is C or S
RXGXESVAMGEYQKYYTVVGKDIYLISIPSLKT

SEQ ID NO: 59385 - protein, 28 aa, Artificial Sequence
  Cyclic GFR-binding peptide
SVAMGEYQKYYTVVGKDIYLISIPSLKT

SEQ ID NO: 59386 - protein, 42 aa, Artificial Sequence; identical to SEQ ID NO: 16310
  Cyclic GFR-binding peptide
  MOD_RES (2)..(4)..(36)..(37): Xaa is C or S

SEQ ID NO: 59387 - protein, 36 aa, Artificial Sequence
  Cyclic GFR-binding peptide
  MOD_RES (30)..(31): Xaa is C or S
VVMDEYKFKVVKENEDLYLMSIPELETPVXXAKPIK

SEQ ID NO: 59388 - protein, 28 aa, Artificial Sequence
  Cyclic GFR-binding peptide
  MOD_RES (27)..(28): Xaa is C or S
MEYQKYVKPTRGVIYLISIPSLDQPVXX

SEQ ID NO: 59389 - protein, 31 aa, Artificial Sequence
  Cyclic GFR-binding peptide
  MOD_RES (30)..(31): Xaa is C or S
VVMNEYKFKIVNSSDDLYLVSIPELQTPAXX

SEQ ID NO: 59390 - protein, 34 aa, Artificial Sequence; identical to SEQ ID NO: 16316
  Cyclic GFR-binding peptide
  MOD_RES (1)..(33)..(34): Xaa is C or S

SEQ ID NO: 59391 - protein, 40 aa, Artificial Sequence; identical to SEQ ID NO: 16317
  Cyclic GFR-binding peptide
  MOD_RES (2)..(4)..(36)..(37): Xaa is C or S

SEQ ID NO: 59392 - protein, 28 aa, Artificial Sequence
  Cyclic GFR-binding peptide
AMGRYKKLYTVVGKDFYLISIANLKTPV

SEQ ID NO: 59393 - protein, 32 aa, Artificial Sequence
  Cyclic GFR-binding peptide
  MOD_RES (2)..(4): Xaa is C or S
HXGXARVVMNEYKFKIVNSSDDLYLVSIPELQ

SEQ ID NO: 59394 - protein, 32 aa, Artificial Sequence
  Cyclic GFR-binding peptide
  MOD_RES (29)..(30): Xaa is C or S
VMNEYKFKIVNSSDDLYLVSIPELKTPAXXPK

SEQ ID NO: 59395 - protein, 31 aa, Artificial Sequence
  Cyclic GFR-binding peptide
  MOD_RES (1)..(3): Xaa is C or S
XGXAEVVMDEYKFKVVNNAADLYLISIPELR

SEQ ID NO: 59396 - protein, 31 aa, Artificial Sequence
  Cyclic GFR-binding peptide
  MOD_RES (28)..(29): Xaa is C or S
MGEYQKYYTVVGKDIYLISIPSLKTPVXXAK

SEQ ID NO: 59397 - protein, 27 aa, Artificial Sequence
  Cyclic GFR-binding peptide
  MOD_RES (1)..(1): Xaa is C or S
XSKVIMEYQKYIKPTKGIIYLISIPSL

SEQ ID NO: 59398 - protein, 22 aa, Artificial Sequence
  Cyclic GFR-binding peptide
EYQKYIVNNSSDIYLVSIPSLK

SEQ ID NO: 59399 - protein, 33 aa, Artificial Sequence
  Cyclic GFR-binding peptide
  MOD_RES (27)..(28): Xaa is C or S
EEYQKYTPVGMDDIYLVSIPSLKTPVXXAKGVK

SEQ ID NO: 59400 - protein, 26 aa, Artificial Sequence
  Cyclic GFR-binding peptide
GEEYKFKTPVGMDDLYLVSIPELKTP

SEQ ID NO: 59401 - protein, 38 aa, Artificial Sequence; identical to SEQ ID NO: 16320
  Cyclic GFR-binding peptide
  MOD_RES (2)..(4)..(36)..(37): Xaa is C or S

SEQ ID NO: 59402 - protein, 32 aa, Artificial Sequence
  Cyclic GFR-binding peptide
  MOD_RES (28)..(29): Xaa is C or S
IMEYQKYVKPKRGVIYLISIPSLAQPVXXPAA

SEQ ID NO: 59403 - protein, 32 aa, Artificial Sequence
  Cyclic GFR-binding peptide
  MOD_RES (26)..(27): Xaa is C or S
EYKFKVVKDYEDLYLMSIPELETPVXXAKPIS

SEQ ID NO: 59404 - protein, 32 aa, Artificial Sequence; identical to SEQ ID NO: 16325
  Cyclic GFR-binding peptide
  MOD_RES (32)..(32): Xaa is C or S

SEQ ID NO: 59405 - protein, 33 aa, Artificial Sequence
  Cyclic GFR-binding peptide
  MOD_RES (2)..(4): Xaa is C or S
RXGXGEVVMDEYQKYVVKENEDIYLMSIPSLET

SEQ ID NO: 59406 - protein, 36 aa, Artificial Sequence; identical to SEQ ID NO: 16327
  Cyclic GFR-binding peptide
  MOD_RES (2)..(34)..(35): Xaa is C or S

SEQ ID NO: 59407 - protein, 40 aa, Artificial Sequence; identical to SEQ ID NO: 16332
  Cyclic GFR-binding peptide
  MOD_RES (1)..(3)..(34)..(35): Xaa is C or S

SEQ ID NO: 59408 - protein, 29 aa, Artificial Sequence
  Cyclic GFR-binding peptide
  MOD_RES (27)..(28): Xaa is C or S
GEYQKYYTVVGKDIYLISIPSLKTPVXXA

SEQ ID NO: 59409 - protein, 23 aa, Artificial Sequence
  Cyclic GFR-binding peptide
EYQKYTPVGMDDIYLVSIPSLKT

SEQ ID NO: 59410 - protein, 27 aa, Artificial Sequence
  Cyclic GFR-binding peptide
  MOD_RES (26)..(27): Xaa is C or S
EYKFKVKPTRGVLYLISIPELDQPVXX

SEQ ID NO: 59411 - protein, 33 aa, Artificial Sequence
  Cyclic GFR-binding peptide
  MOD_RES (1)..(3): Xaa is C or S
XGXAKVVMNEYKFKIVNNSSDLYLVSIPELKTP

SEQ ID NO: 59412 - protein, 36 aa, Artificial Sequence; identical to SEQ ID NO: 16335
  Cyclic GFR-binding peptide
  MOD_RES (31)..(32): Xaa is C or S

SEQ ID NO: 59413 - protein, 26 aa, Artificial Sequence
  Cyclic GFR-binding peptide
AMGEYQKYYTVVGKDIYLISIPSLKT

SEQ ID NO: 59414 - protein, 27 aa, Artificial Sequence
  Cyclic GFR-binding peptide
VAMGEYQKYYTVVGKDIYLISIPSLKT

SEQ ID NO: 59415 - protein, 36 aa, Artificial Sequence; identical to SEQ ID NO: 16336
  Cyclic GFR-binding peptide
  MOD_RES (2)..(4)..(35)..(36): Xaa is C or S

SEQ ID NO: 59416 - protein, 38 aa, Artificial Sequence; identical to SEQ ID NO: 16339
  Cyclic GFR-binding peptide
  MOD_RES (2)..(4)..(36)..(37): Xaa is C or S

SEQ ID NO: 59417 - protein, 22 aa, Artificial Sequence
  Cyclic GFR-binding peptide
EYQKYYTVVGKDIYLISIPSLK

SEQ ID NO: 59418 - protein, 29 aa, Artificial Sequence
  Cyclic GFR-binding peptide
AEVVMDEYKFKVVNNAADLYLISIPELRA

SEQ ID NO: 59419 - protein, 31 aa, Artificial Sequence
  Cyclic GFR-binding peptide
  MOD_RES (2)..(4): Xaa is C or S
HXGXSRVVMNEYKFKIVNSSDDLYLVSIPEL

SEQ ID NO: 59420 - protein, 25 aa, Artificial Sequence
  Cyclic GFR-binding peptide
KVIMEYQKYIKPTKGIIYLISIPSL

SEQ ID NO: 59421 - protein, 40 aa, Artificial Sequence; identical to SEQ ID NO: 16343
  Cyclic GFR-binding peptide
  MOD_RES (2)..(35)..(36): Xaa is C or S

SEQ ID NO: 59422 - protein, 31 aa, Artificial Sequence
  Cyclic GFR-binding peptide
  MOD_RES (2)..(4): Xaa is C or S
RXGXGEVVMDEYKFKVVKENEDLYLMSIPEL

SEQ ID NO: 59423 - protein, 27 aa, Artificial Sequence
  Cyclic GFR-binding peptide
VAMGRYKKLYTVVGKDFYLISIANLKT

SEQ ID NO: 59424 - protein, 38 aa, Artificial Sequence; identical to SEQ ID NO: 16346
  Cyclic GFR-binding peptide
  MOD_RES (2)..(34)..(35): Xaa is C or S

SEQ ID NO: 59425 - protein, 32 aa, Artificial Sequence
  Cyclic GFR-binding peptide
  MOD_RES (30)..(31): Xaa is C or S
KVIMEYQKYIKPTKGIIYLISIPSLDQSVXXP

SEQ ID NO: 59426 - protein, 32 aa, Artificial Sequence
  Cyclic GFR-binding peptide
  MOD_RES (26)..(27): Xaa is C or S
YHYKLYTVVGKDKYLISIPSLKTPVXXAKSAK

SEQ ID NO: 59427 - protein, 21 aa, Artificial Sequence
  Cyclic GFR-binding peptide
NEYKFKIVNNSSDLYLVSIPE

SEQ ID NO: 59428 - protein, 33 aa, Artificial Sequence
  Cyclic GFR-binding peptide
  MOD_RES (29)..(30): Xaa is C or S
VMNEYKFKIVNSSDDLYLVSIPELKTPAXXPKP

SEQ ID NO: 59429 - protein, 27 aa, Artificial Sequence
  Cyclic GFR-binding peptide
  MOD_RES (2)..(2): Xaa is C or S
KXSKVIMEYQKYIKPTKGIIYLISIPS

SEQ ID NO: 59430 - protein, 38 aa, Artificial Sequence; identical to SEQ ID NO: 16348
  Cyclic GFR-binding peptide
  MOD_RES (1)..(3)..(34)..(35): Xaa is C or S

SEQ ID NO: 59431 - protein, 30 aa, Artificial Sequence
  Cyclic GFR-binding peptide
  MOD_RES (2)..(4): Xaa is C or S
SXKXSKVIMEYKFKIKPTKGILYLISIPEL

SEQ ID NO: 59432 - protein, 33 aa, Artificial Sequence
  Cyclic GFR-binding peptide
  MOD_RES (29)..(30): Xaa is C or S
VIMEYQKYIKPTKGIIYLISIPSLDQSVXXPSA

SEQ ID NO: 59433 - protein, 37 aa, Artificial Sequence; identical to SEQ ID NO: 16352
  Cyclic GFR-binding peptide
  MOD_RES (1)..(3)..(36)..(37): Xaa is C or S

SEQ ID NO: 59434 - protein, 31 aa, Artificial Sequence
  Cyclic GFR-binding peptide
  MOD_RES (2)..(2): Xaa is C or S
GXAKVVMNEYQKYIVNNSSDIYLVSIPSLKT

SEQ ID NO: 59435 - protein, 37 aa, Artificial Sequence; identical to SEQ ID NO: 16353
  Cyclic GFR-binding peptide
  MOD_RES (1)..(3)..(36)..(37): Xaa is C or S

SEQ ID NO: 59436 - protein, 28 aa, Artificial Sequence
  Cyclic GFR-binding peptide
  MOD_RES (2)..(2): Xaa is C or S
GXGEVVMDEYKFKVVKENEDLYLMSIPE

SEQ ID NO: 59437 - protein, 22 aa, Artificial Sequence
  Cyclic GFR-binding peptide
EYKFKVKPKRGVLYLISIPELA

SEQ ID NO: 59438 - protein, 25 aa, Artificial Sequence
  Cyclic GFR-binding peptide
VMEYQKYVKPTRGVIYLISIPSLDQ

SEQ ID NO: 59439 - protein, 32 aa, Artificial Sequence; identical to SEQ ID NO: 16360
  Cyclic GFR-binding peptide
  MOD_RES (32)..(32): Xaa is C or S

SEQ ID NO: 59440 - protein, 32 aa, Artificial Sequence
  Cyclic GFR-binding peptide
  MOD_RES (27)..(28): Xaa is C or S
GEYQKYYTVVGKDIYLISIPSLKTPVXXAKSA

SEQ ID NO: 59441 - protein, 33 aa, Artificial Sequence
  Cyclic GFR-binding peptide
  MOD_RES (27)..(28): Xaa is C or S
NEYQKYIVNSSDDIYLVSIPSLKTPAXXPKPVY

SEQ ID NO: 59442 - protein, 27 aa, Artificial Sequence
  Cyclic GFR-binding peptide
  MOD_RES (1)..(1): Xaa is C or S
XARVVMNEYQKYIVNSSDDIYLVSIPS

SEQ ID NO: 59443 - protein, 39 aa, Artificial Sequence; identical to SEQ ID NO: 16364
  Cyclic GFR-binding peptide
  MOD_RES (1)..(3)..(34)..(35): Xaa is C or S

SEQ ID NO: 59444 - protein, 31 aa, Artificial Sequence
  Cyclic GFR-binding peptide
  MOD_RES (26)..(26): Xaa is C or S
EYQKYIVNSSDDIYLVSIPSLKTPAXTPKTV

SEQ ID NO: 59445 - protein, 24 aa, Artificial Sequence
  Cyclic GFR-binding peptide
MEYQKYIKPTKGIIYLISIPSLDQ

SEQ ID NO: 59446 - protein, 33 aa, Artificial Sequence
  Cyclic GFR-binding peptide
  MOD_RES (29)..(30): Xaa is C or S
VMDEYKFKVVKENEDLYLMSIPELETPVXXAKP

SEQ ID NO: 59447 - protein, 23 aa, Artificial Sequence
  Cyclic GFR-binding peptide
DEYKFKVVNNAADLYLISIPELR

SEQ ID NO: 59448 - protein, 24 aa, Artificial Sequence
  Cyclic GFR-binding peptide
VMDRYKKLVVNNAADFYLISIANL

SEQ ID NO: 59449 - protein, 30 aa, Artificial Sequence
  Cyclic GFR-binding peptide
  MOD_RES (26)..(27): Xaa is C or S
EYKFKVVNNAADLYLISIPELRAPVXXSAP

SEQ ID NO: 59450 - protein, 31 aa, Artificial Sequence
  Cyclic GFR-binding peptide
  MOD_RES (28)..(29): Xaa is C or S
IMEYKFKIKPTKGILYLISIPELDQSVXXPS

SEQ ID NO: 59451 - protein, 35 aa, Artificial Sequence; identical to SEQ ID NO: 16370
  Cyclic GFR-binding peptide
  MOD_RES (2)..(33)..(34): Xaa is C or S

SEQ ID NO: 59452 - protein, 30 aa, Artificial Sequence
  Cyclic GFR-binding peptide
  MOD_RES (28)..(29): Xaa is C or S
MEEYKFKVVKDYEDLYLMSIPELETPVXXA

SEQ ID NO: 59453 - protein, 30 aa, Artificial Sequence
  Cyclic GFR-binding peptide
  MOD_RES (29)..(30): Xaa is C or S
VMNEYKFKIVNSSDDLYLVSIPELKTPAXX

SEQ ID NO: 59454 - protein, 39 aa, Artificial Sequence; identical to SEQ ID NO: 16371
  Cyclic GFR-binding peptide
  MOD_RES (1)..(3)..(35)..(36): Xaa is C or S

SEQ ID NO: 59455 - protein, 26 aa, Artificial Sequence
  Cyclic GFR-binding peptide
KVIMEYKFKIKPTKGILYLISIPELD

SEQ ID NO: 59456 - protein, 26 aa, Artificial Sequence
  Cyclic GFR-binding peptide
MGEEYKFKTPVGMDDLYLVSIPELKT

SEQ ID NO: 59457 - protein, 28 aa, Artificial Sequence
  Cyclic GFR-binding peptide
  MOD_RES (27)..(28): Xaa is C or S
DEYQKYVVKENEDIYLMSIPSLETPVXX

SEQ ID NO: 59458 - protein, 30 aa, Artificial Sequence
  Cyclic GFR-binding peptide
  MOD_RES (1)..(1): Xaa is C or S
XARVVMNEYQKYIVNSSDDIYLVSIPSLQT

SEQ ID NO: 59459 - protein, 34 aa, Artificial Sequence; identical to SEQ ID NO: 16379
  Cyclic GFR-binding peptide
  MOD_RES (2)..(4): Xaa is C or S

SEQ ID NO: 59460 - protein, 32 aa, Artificial Sequence; identical to SEQ ID NO: 16380
  Cyclic GFR-binding peptide
  MOD_RES (32)..(32): Xaa is C or S

SEQ ID NO: 59461 - protein, 35 aa, Artificial Sequence; identical to SEQ ID NO: 16384
  Cyclic GFR-binding peptide
  MOD_RES (31)..(32): Xaa is C or S

SEQ ID NO: 59462 - protein, 32 aa, Artificial Sequence; identical to SEQ ID NO: 16385
  Cyclic GFR-binding peptide
  MOD_RES (32)..(32): Xaa is C or S

SEQ ID NO: 59463 - protein, 32 aa, Artificial Sequence
  Cyclic GFR-binding peptide
  MOD_RES (27)..(28): Xaa is C or S
EEYQKYTPVGMDDIYLVSIPSLKTPVXXAKGV

SEQ ID NO: 59464 - protein, 20 aa, Artificial Sequence
  Cyclic GFR-binding peptide
EYKFKIKPTKGILYLISIPE

SEQ ID NO: 59465 - protein, 36 aa, Artificial Sequence; identical to SEQ ID NO: 16391
  Cyclic GFR-binding peptide
  MOD_RES (2)..(33)..(34): Xaa is C or S

SEQ ID NO: 59466 - protein, 27 aa, Artificial Sequence
  Cyclic GFR-binding peptide
  MOD_RES (1)..(1): Xaa is C or S
XAKVVMNEYQKYIVNNSSDIYLVSIPS

SEQ ID NO: 59467 - protein, 27 aa, Artificial Sequence
  Cyclic GFR-binding peptide
GEVVMDEYKFKVVKENEDLYLMSIPEL

SEQ ID NO: 59468 - protein, 32 aa, Artificial Sequence
  Cyclic GFR-binding peptide
  MOD_RES (1)..(3): Xaa is C or S
XGXAEVVMDEYKFKVVNNAADLYLISIPELRA

SEQ ID NO: 59469 - protein, 33 aa, Artificial Sequence
  Cyclic GFR-binding peptide
  MOD_RES (31)..(32): Xaa is C or S
VSMGEEYQKYTPVGMDDIYLVSIPSLKTPVXXA

SEQ ID NO: 59470 - protein, 26 aa, Artificial Sequence
  Cyclic GFR-binding peptide
  MOD_RES (26)..(26): Xaa is C or S
EYKFKVVKENEDLYLMSIPELETPVX

SEQ ID NO: 59471 - protein, 27 aa, Artificial Sequence
  Cyclic GFR-binding peptide
MNEYKFKIVNSSDDLYLVSIPELQTPA

SEQ ID NO: 59472 - protein, 28 aa, Artificial Sequence
  Cyclic GFR-binding peptide
  MOD_RES (28)..(28): Xaa is C or S
MGEYQKYYTVVGKDIYLISIPSLKTPVX

SEQ ID NO: 59473 - protein, 39 aa, Artificial Sequence; identical to SEQ ID NO: 16403
  Cyclic GFR-binding peptide
  MOD_RES (1)..(3)..(34)..(35): Xaa is C or S

SEQ ID NO: 59474 - protein, 32 aa, Artificial Sequence; identical to SEQ ID NO: 16407
  Cyclic GFR-binding peptide
  MOD_RES (2)..(2): Xaa is C or S

SEQ ID NO: 59475 - protein, 35 aa, Artificial Sequence; identical to SEQ ID NO: 16408
  Cyclic GFR-binding peptide
  MOD_RES (31)..(32): Xaa is C or S

SEQ ID NO: 59476 - protein, 34 aa, Artificial Sequence
  Cyclic GFR-binding peptide
  MOD_RES (28)..(29): Xaa is C or S
VMEYQKYVKPTRGVIYLISIPSLDQPVXXPSASA

SEQ ID NO: 59477 - protein, 42 aa, Artificial Sequence; identical to SEQ ID NO: 16411
  Cyclic GFR-binding peptide
  MOD_RES (2)..(4)..(36)..(37): Xaa is C or S

SEQ ID NO: 59478 - protein, 36 aa, Artificial Sequence; identical to SEQ ID NO: 16413
  Cyclic GFR-binding peptide
  MOD_RES (2)..(34)..(35): Xaa is C or S

SEQ ID NO: 59479 - protein, 28 aa, Artificial Sequence
  Cyclic GFR-binding peptide
  MOD_RES (28)..(28): Xaa is C or S
MGRYKKLYTVVGKDFYLISIANLKTPVX

SEQ ID NO: 59480 - protein, 34 aa, Artificial Sequence; identical to SEQ ID NO: 16417
  Cyclic GFR-binding peptide
  MOD_RES (1)..(32)..(33): Xaa is C or S

SEQ ID NO: 59481 - protein, 30 aa, Artificial Sequence
  Cyclic GFR-binding peptide
  MOD_RES (1)..(3): Xaa is C or S
XGXARVVMNEYKFKIVNSSDDLYLVSIPEL

SEQ ID NO: 59482 - protein, 32 aa, Artificial Sequence
  Cyclic GFR-binding peptide
  MOD_RES (1)..(3): Xaa is C or S
XKXSRVIMEYQKYVKPKRGVIYLISIPSLAQP

SEQ ID NO: 59483 - protein, 32 aa, Artificial Sequence
  Cyclic GFR-binding peptide
  MOD_RES (26)..(27): Xaa is C or S
EYQKYIVNSSDDIYLVSIPSLKTPAXXPKPVY

SEQ ID NO: 59484 - protein, 34 aa, Artificial Sequence; identical to SEQ ID NO: 16424
  Cyclic GFR-binding peptide
  MOD_RES (1)..(3): Xaa is C or S

SEQ ID NO: 59485 - protein, 30 aa, Artificial Sequence
  Cyclic GFR-binding peptide
  MOD_RES (1)..(3): Xaa is C or S
XGXEAVSMGEEYKFKTPVGMDDLYLVSIPE

SEQ ID NO: 59486 - protein, 34 aa, Artificial Sequence; identical to SEQ ID NO: 16428
  Cyclic GFR-binding peptide
  MOD_RES (31)..(31): Xaa is C or S

SEQ ID NO: 59487 - protein, 27 aa, Artificial Sequence
  Cyclic GFR-binding peptide
VMNEYQKYIVNNSSDIYLVSIPSLKTP

SEQ ID NO: 59488 - protein, 31 aa, Artificial Sequence
  Cyclic GFR-binding peptide
  MOD_RES (26)..(27): Xaa is C or S
YHYKLYTVVGKDKYLISIPSLKTPVXXAKSA

SEQ ID NO: 59489 - protein, 30 aa, Artificial Sequence; identical to SEQ ID NO: 16435
  Cyclic GFR-binding peptide

SEQ ID NO: 59490 - protein, 33 aa, Artificial Sequence; identical to SEQ ID NO: 16436
  Cyclic GFR-binding peptide
  MOD_RES (1)..(32)..(33): Xaa is C or S

SEQ ID NO: 59491 - protein, 26 aa, Artificial Sequence
  Cyclic GFR-binding peptide
SKVVMEYKFKVKPTRGVLYLISIPEL

SEQ ID NO: 59492 - protein, 21 aa, Artificial Sequence
  Cyclic GFR-binding peptide
GEYQKYYTVVGKDIYLISIPS

SEQ ID NO: 59493 - protein, 39 aa, Artificial Sequence; identical to SEQ ID NO: 16438
  Cyclic GFR-binding peptide
  MOD_RES (1)..(34)..(35): Xaa is C or S

SEQ ID NO: 59494 - protein, 28 aa, Artificial Sequence
  Cyclic GFR-binding peptide
  MOD_RES (28)..(28): Xaa is C or S
MNEYKFKIVNSSDDLYLVSIPELKTPAX

SEQ ID NO: 59495 - protein, 27 aa, Artificial Sequence
  Cyclic GFR-binding peptide
EVVMDRYKKLVVNNAADFYLISIANLR

SEQ ID NO: 59496 - protein, 21 aa, Artificial Sequence
  Cyclic GFR-binding peptide
EYQKYVKPKRGVIYLISIPSL

SEQ ID NO: 59497 - protein, 31 aa, Artificial Sequence
  Cyclic GFR-binding peptide
  MOD_RES (1)..(3): Xaa is C or S
XGXAKVVMNEYQKYIVNNSSDIYLVSIPSLK

SEQ ID NO: 59498 - protein, 38 aa, Artificial Sequence; identical to SEQ ID NO: 16445
  Cyclic GFR-binding peptide
  MOD_RES (2)..(33)..(34): Xaa is C or S

SEQ ID NO: 59499 - protein, 27 aa, Artificial Sequence
  Cyclic GFR-binding peptide
AEVVMDEYKFKVVNNAADLYLISIPEL

SEQ ID NO: 59500 - protein, 28 aa, Artificial Sequence
  Cyclic GFR-binding peptide
  MOD_RES (28)..(28): Xaa is C or S
GEEYQKYTPVGMDDIYLVSIPSLKTPVX

SEQ ID NO: 59501 - protein, 27 aa, Artificial Sequence
  Cyclic GFR-binding peptide
AEVVMDRYKKLVVNNAADFYLISIANL

SEQ ID NO: 59502 - protein, 35 aa, Artificial Sequence; identical to SEQ ID NO: 16447
  Cyclic GFR-binding peptide
  MOD_RES (1)..(33)..(34): Xaa is C or S

SEQ ID NO: 59503 - protein, 29 aa, Artificial Sequence
  Cyclic GFR-binding peptide
  MOD_RES (28)..(29): Xaa is C or S
MNEYQKYIVNSSDDIYLVSIPSLQTPAXX

SEQ ID NO: 59504 - protein, 28 aa, Artificial Sequence
  Cyclic GFR-binding peptide
  MOD_RES (27)..(28): Xaa is C or S
NEYKFKIVNSSDDLYLVSIPELKTPAXX

SEQ ID NO: 59505 - protein, 25 aa, Artificial Sequence
  Cyclic GFR-binding peptide
MNEYKFKIVNNSSDLYLVSIPELKT

SEQ ID NO: 59506 - protein, 37 aa, Artificial Sequence; identical to SEQ ID NO: 16448
  Cyclic GFR-binding peptide
  MOD_RES (2)..(34)..(35): Xaa is C or S

SEQ ID NO: 59507 - protein, 30 aa, Artificial Sequence
  Cyclic GFR-binding peptide
  MOD_RES (1)..(3): Xaa is C or S
XGXSRVVMNEYQKYIVNSSDDIYLVSIPSL

SEQ ID NO: 59508 - protein, 35 aa, Artificial Sequence; identical to SEQ ID NO: 16452
  Cyclic GFR-binding peptide
  MOD_RES (31)..(32): Xaa is C or S

SEQ ID NO: 59509 - protein, 33 aa, Artificial Sequence
  Cyclic GFR-binding peptide
  MOD_RES (2)..(4): Xaa is C or S
RXGXGEVVMEEYQKYVVKDYEDIYLMSIPSLET

SEQ ID NO: 59510 - protein, 28 aa, Artificial Sequence
  Cyclic GFR-binding peptide
VVMDEYKFKVVKENEDLYLMSIPELETP

SEQ ID NO: 59511 - protein, 41 aa, Artificial Sequence; identical to SEQ ID NO: 16459
  Cyclic GFR-binding peptide
  MOD_RES (1)..(3)..(35)..(36): Xaa is C or S

SEQ ID NO: 59512 - protein, 37 aa, Artificial Sequence; identical to SEQ ID NO: 16460
  Cyclic GFR-binding peptide
  MOD_RES (31)..(32): Xaa is C or S

SEQ ID NO: 59513 - protein, 28 aa, Artificial Sequence
  Cyclic GFR-binding peptide
  MOD_RES (1)..(1): Xaa is C or S
XSKVIMEYQKYIKPTKGIIYLISIPSLD

SEQ ID NO: 59514 - protein, 30 aa, Artificial Sequence
  Cyclic GFR-binding peptide
  MOD_RES (26)..(27): Xaa is C or S
EYQKYTPVGMDDIYLVSIPSLKTPVXXAKG

SEQ ID NO: 59515 - protein, 22 aa, Artificial Sequence
  Cyclic GFR-binding peptide
EYQKYIVNSSDDIYLVSIPSLQ

SEQ ID NO: 59516 - protein, 37 aa, Artificial Sequence; identical to SEQ ID NO: 16462
  Cyclic GFR-binding peptide
  MOD_RES (31)..(32): Xaa is C or S

SEQ ID NO: 59517 - protein, 27 aa, Artificial Sequence
  Cyclic GFR-binding peptide
VSMGEEYKFKTPVGMDDLYLVSIPELK

SEQ ID NO: 59518 - protein, 32 aa, Artificial Sequence; identical to SEQ ID NO: 16469
  Cyclic GFR-binding peptide
  MOD_RES (32)..(32): Xaa is C or S

SEQ ID NO: 59519 - protein, 29 aa, Artificial Sequence
  Cyclic GFR-binding peptide
RVVMNEYKFKIVNSSDDLYLVSIPELKTP

SEQ ID NO: 59520 - protein, 37 aa, Artificial Sequence
  Cyclic GFR-binding peptide
  MOD_RES (32)..(33): Xaa is C or S
AVSMGEEYQKYTPVGMDDIYLVSIPSLKTPVXXAKGV

SEQ ID NO: 59521 - protein, 27 aa, Artificial Sequence
  Cyclic GFR-binding peptide
  MOD_RES (26)..(27): Xaa is C or S
EYQKYIKPTKGIIYLISIPSLDQSVXX

SEQ ID NO: 59522 - protein, 29 aa, Artificial Sequence
  Cyclic GFR-binding peptide
EVVMEEYQKYVVKDYEDIYLMSIPSLETP

SEQ ID NO: 59523 - protein, 32 aa, Artificial Sequence
  Cyclic GFR-binding peptide
  MOD_RES (27)..(28): Xaa is C or S
DRYKKLVVNNAADFYLISIANLRAPVXXSAPA

SEQ ID NO: 59524 - protein, 36 aa, Artificial Sequence; identical to SEQ ID NO: 16479
  Cyclic GFR-binding peptide
  MOD_RES (2)..(35)..(36): Xaa is C or S

SEQ ID NO: 59525 - protein, 38 aa, Artificial Sequence; identical to SEQ ID NO: 16482
  Cyclic GFR-binding peptide
  MOD_RES (1)..(3)..(35)..(36): Xaa is C or S

SEQ ID NO: 59526 - protein, 37 aa, Artificial Sequence; identical to SEQ ID NO: 16483
  Cyclic GFR-binding peptide
  MOD_RES (1)..(33)..(34): Xaa is C or S

SEQ ID NO: 59527 - protein, 21 aa, Artificial Sequence
  Cyclic GFR-binding peptide
EYQKYIVNNSSDIYLVSIPSL

SEQ ID NO: 59528 - protein, 24 aa, Artificial Sequence
  Cyclic GFR-binding peptide
MGYHYKLYTVVGKDKYLISIPSLK

SEQ ID NO: 59529 - protein, 31 aa, Artificial Sequence
  Cyclic GFR-binding peptide
  MOD_RES (29)..(30): Xaa is C or S
VMDEYQKYVVKENEDIYLMSIPSLETPVXXA

SEQ ID NO: 59530 - protein, 37 aa, Artificial Sequence; identical to SEQ ID NO: 16485
  Cyclic GFR-binding peptide
  MOD_RES (2)..(33)..(34): Xaa is C or S

SEQ ID NO: 59531 - protein, 36 aa, Artificial Sequence
  Cyclic GFR-binding peptide
  MOD_RES (30)..(31): Xaa is C or S
KVVMEYKFKVKPTRGVLYLISIPELDQPVXXPSASA

SEQ ID NO: 59532 - protein, 33 aa, Artificial Sequence; identical to SEQ ID NO: 16486
  Cyclic GFR-binding peptide
  MOD_RES (31)..(32): Xaa is C or S

SEQ ID NO: 59533 - protein, 38 aa, Artificial Sequence; identical to SEQ ID NO: 16488
  Cyclic GFR-binding peptide
  MOD_RES (1)..(33)..(34): Xaa is C or S

SEQ ID NO: 59534 - protein, 29 aa, Artificial Sequence
  Cyclic GFR-binding peptide
KVVMNEYKFKIVNNSSDLYLVSIPELKTP

SEQ ID NO: 59535 - protein, 27 aa, Artificial Sequence
  Cyclic GFR-binding peptide
  MOD_RES (1)..(1): Xaa is C or S
XAEVVMDEYKFKVVNNAADLYLISIPE

SEQ ID NO: 59536 - protein, 35 aa, Artificial Sequence; identical to SEQ ID NO: 16494
  Cyclic GFR-binding peptide
  MOD_RES (32)..(32): Xaa is C or S

SEQ ID NO: 59537 - protein, 28 aa, Artificial Sequence
  Cyclic GFR-binding peptide
  MOD_RES (27)..(28): Xaa is C or S
EEYQKYVVKDYEDIYLMSIPSLETPVXX

SEQ ID NO: 59538 - protein, 31 aa, Artificial Sequence
  Cyclic GFR-binding peptide
  MOD_RES (26)..(27): Xaa is C or S
RYKKLYTVVGKDFYLISIANLKTPVXXAKSA

SEQ ID NO: 59539 - protein, 33 aa, Artificial Sequence
  Cyclic GFR-binding peptide
  MOD_RES (30)..(31): Xaa is C or S
VVMNEYKFKIVNSSDDLYLVSIPELQTPAXXPK

SEQ ID NO: 59540 - protein, 35 aa, Artificial Sequence; identical to SEQ ID NO: 16501
  Cyclic GFR-binding peptide
  MOD_RES (2)..(4): Xaa is C or S

SEQ ID NO: 59541 - protein, 30 aa, Artificial Sequence
  Cyclic GFR-binding peptide
  MOD_RES (30)..(30): Xaa is C or S
VVMNEYKFKIVNSSDDLYLVSIPELQTPAX

SEQ ID NO: 59542 - protein, 28 aa, Artificial Sequence
  Cyclic GFR-binding peptide
EAVSMGEEYQKYTPVGMDDIYLVSIPSL

SEQ ID NO: 59543 - protein, 26 aa, Artificial Sequence
  Cyclic GFR-binding peptide
  MOD_RES (26)..(26): Xaa is C or S
EYQKYTPVGMDDIYLVSIPSLKTPVX

SEQ ID NO: 59544 - protein, 40 aa, Artificial Sequence; identical to SEQ ID NO: 16508
  Cyclic GFR-binding peptide
  MOD_RES (1)..(3)..(35)..(36): Xaa is C or S

SEQ ID NO: 59545 - protein, 27 aa, Artificial Sequence
  Cyclic GFR-binding peptide
  MOD_RES (1)..(1): Xaa is C or S
XAEVVMDYHYKLVVNNAADKYLISIPS

SEQ ID NO: 59546 - protein, 40 aa, Artificial Sequence; identical to SEQ ID NO: 16511
  Cyclic GFR-binding peptide
  MOD_RES (1)..(3)..(35)..(36): Xaa is C or S

SEQ ID NO: 59547 - protein, 28 aa, Artificial Sequence
  Cyclic GFR-binding peptide
  MOD_RES (28)..(28): Xaa is C or S
MNEYQKYIVNSSDDIYLVSIPSLKTPAX

SEQ ID NO: 59548 - protein, 29 aa, Artificial Sequence
  Cyclic GFR-binding peptide
  MOD_RES (26)..(27): Xaa is C or S
EYQKYYTVVGKDIYLISIPSLKTPVXXAK

SEQ ID NO: 59549 - protein, 35 aa, Artificial Sequence
  Cyclic GFR-binding peptide
  MOD_RES (30)..(31): Xaa is C or S
VVMNEYQKYIVNNSSDIYLVSIPSLKTPAXXAKPV

SEQ ID NO: 59550 - protein, 35 aa, Artificial Sequence
  Cyclic GFR-binding peptide
  MOD_RES (29)..(30): Xaa is C or S
VMDYHYKLVVNNAADKYLISIPSLRAPVXXSAPAA

SEQ ID NO: 59551 - protein, 32 aa, Artificial Sequence; identical to SEQ ID NO: 16515
  Cyclic GFR-binding peptide
  MOD_RES (1)..(1): Xaa is C or S

SEQ ID NO: 59552 - protein, 35 aa, Artificial Sequence
  Cyclic GFR-binding peptide
  MOD_RES (29)..(30): Xaa is C or S
VMNEYQKYIVNNSSDIYLVSIPSLKTPAXXAKPVA

SEQ ID NO: 59553 - protein, 36 aa, Artificial Sequence; identical to SEQ ID NO: 16518
  Cyclic GFR-binding peptide
  MOD_RES (2)..(34)..(35): Xaa is C or S

SEQ ID NO: 59554 - protein, 32 aa, Artificial Sequence
  Cyclic GFR-binding peptide
  MOD_RES (29)..(30): Xaa is C or S
AMGYHYKLYTVVGKDKYLISIPSLKTPVXXAK

SEQ ID NO: 59555 - protein, 36 aa, Artificial Sequence; identical to SEQ ID NO: 16521
  Cyclic GFR-binding peptide
  MOD_RES (2)..(34): Xaa is C or S

SEQ ID NO: 59556 - protein, 25 aa, Artificial Sequence
  Cyclic GFR-binding peptide
EYQKYVVKENEDIYLMSIPSLETPV

SEQ ID NO: 59557 - protein, 32 aa, Artificial Sequence; identical to SEQ ID NO: 16523
  Cyclic GFR-binding peptide
  MOD_RES (1)..(1): Xaa is C or S

SEQ ID NO: 59558 - protein, 35 aa, Artificial Sequence
  Cyclic GFR-binding peptide
  MOD_RES (2)..(4): Xaa is C or S
RXGXEAVSMGEEYQKYTPVGMDDIYLVSIPSLKTP

SEQ ID NO: 59559 - protein, 29 aa, Artificial Sequence
  Cyclic GFR-binding peptide
  MOD_RES (27)..(27): Xaa is C or S
NEYKFKIVNSSDDLYLVSIPELKTPAXTP

SEQ ID NO: 59560 - protein, 34 aa, Artificial Sequence
  Cyclic GFR-binding peptide
  MOD_RES (29)..(29): Xaa is C or S
VMNEYQKYIVNSSDDIYLVSIPSLKTPAXTPKTV

SEQ ID NO: 59561 - protein, 31 aa, Artificial Sequence; identical to SEQ ID NO: 16529
  Cyclic GFR-binding peptide
  MOD_RES (31)..(31): Xaa is C or S

SEQ ID NO: 59562 - protein, 37 aa, Artificial Sequence; identical to SEQ ID NO: 16530
  Cyclic GFR-binding peptide
  MOD_RES (2)..(33)..(34): Xaa is C or S

SEQ ID NO: 59563 - protein, 33 aa, Artificial Sequence
  Cyclic GFR-binding peptide
  MOD_RES (30)..(31): Xaa is C or S
VVMDEYQKYVVKENEDIYLMSIPSLETPVXXAK

SEQ ID NO: 59564 - protein, 34 aa, Artificial Sequence
  Cyclic GFR-binding peptide
  MOD_RES (2)..(4): Xaa is C or S
HXGXAKVVMNEYQKYIVNNSSDIYLVSIPSLKTP

SEQ ID NO: 59565 - protein, 34 aa, Artificial Sequence; identical to SEQ ID NO: 16532
  Cyclic GFR-binding peptide
  MOD_RES (2)..(33)..(34): Xaa is C or S

SEQ ID NO: 59566 - protein, 34 aa, Artificial Sequence
  Cyclic GFR-binding peptide
  MOD_RES (29)..(30): Xaa is C or S
VIMEYKFKVKPKRGVLYLISIPELAQPVXXPAAS

SEQ ID NO: 59567 - protein, 41 aa, Artificial Sequence; identical to SEQ ID NO: 16533
  Cyclic GFR-binding peptide
  MOD_RES (2)..(4)..(36)..(37): Xaa is C or S

SEQ ID NO: 59568 - protein, 35 aa, Artificial Sequence; identical to SEQ ID NO: 16535
  Cyclic GFR-binding peptide
  MOD_RES (1)..(33)..(34): Xaa is C or S

SEQ ID NO: 59569 - protein, 25 aa, Artificial Sequence
  Cyclic GFR-binding peptide
DEYKFKVVNNAADLYLISIPELRAP

SEQ ID NO: 59570 - protein, 31 aa, Artificial Sequence
  Cyclic GFR-binding peptide
  MOD_RES (27)..(28): Xaa is C or S
NEYQKYIVNSSDDIYLVSIPSLKTPAXXPKP

SEQ ID NO: 59571 - protein, 35 aa, Artificial Sequence; identical to SEQ ID NO: 16539
  Cyclic GFR-binding peptide
  MOD_RES (2)..(4): Xaa is C or S

SEQ ID NO: 59572 - protein, 28 aa, Artificial Sequence
  Cyclic GFR-binding peptide
VSMGEEYQKYTPVGMDDIYLVSIPSLKT

SEQ ID NO: 59573 - protein, 40 aa, Artificial Sequence; identical to SEQ ID NO: 16540
  Cyclic GFR-binding peptide
  MOD_RES (2)..(4)..(36)..(37): Xaa is C or S

SEQ ID NO: 59574 - protein, 28 aa, Artificial Sequence
  Cyclic GFR-binding peptide
  MOD_RES (1)..(1): Xaa is C or S
XGEVVMEEYQKYVVKDYEDIYLMSIPSL

SEQ ID NO: 59575 - protein, 29 aa, Artificial Sequence
  Cyclic GFR-binding peptide
  MOD_RES (1)..(3): Xaa is C or S
XKXSRVIMEYQKYVKPKRGVIYLISIPSL

SEQ ID NO: 59576 - protein, 25 aa, Artificial Sequence
  Cyclic GFR-binding peptide
IMEYQKYVKPKRGVIYLISIPSLAQ

SEQ ID NO: 59577 - protein, 34 aa, Artificial Sequence
  Cyclic GFR-binding peptide
  MOD_RES (28)..(29): Xaa is C or S
MGEYQKYYTVVGKDIYLISIPSLKTPVXXAKSAK

SEQ ID NO: 59578 - protein, 30 aa, Artificial Sequence
  Cyclic GFR-binding peptide
  MOD_RES (26)..(27): Xaa is C or S
EYQKYIVNSSDDIYLVSIPSLKTPAXXPKP

SEQ ID NO: 59579 - protein, 32 aa, Artificial Sequence
  Cyclic GFR-binding peptide
  MOD_RES (29)..(30): Xaa is C or S
VMDEYKFKVVNNAADLYLISIPELRAPVXXSA

SEQ ID NO: 59580 - protein, 23 aa, Artificial Sequence
  Cyclic GFR-binding peptide
EYQKYVKPKRGVIYLISIPSLAQ

SEQ ID NO: 59581 - protein, 36 aa, Artificial Sequence; identical to SEQ ID NO: 16548
  Cyclic GFR-binding peptide
  MOD_RES (2)..(34)..(35): Xaa is C or S

SEQ ID NO: 59582 - protein, 38 aa, Artificial Sequence; identical to SEQ ID NO: 16549
  Cyclic GFR-binding peptide
  MOD_RES (2)..(4)..(36)..(37): Xaa is C or S

SEQ ID NO: 59583 - protein, 35 aa, Artificial Sequence; identical to SEQ ID NO: 16552
  Cyclic GFR-binding peptide
  MOD_RES (1)..(33)..(34): Xaa is C or S

SEQ ID NO: 59584 - protein, 24 aa, Artificial Sequence
  Cyclic GFR-binding peptide
DYHYKLVVNNAADKYLISIPSLRA

SEQ ID NO: 59585 - protein, 35 aa, Artificial Sequence; identical to SEQ ID NO: 16553
  Cyclic GFR-binding peptide
  MOD_RES (32)..(33): Xaa is C or S

SEQ ID NO: 59586 - protein, 31 aa, Artificial Sequence
  Cyclic GFR-binding peptide
  MOD_RES (30)..(31): Xaa is C or S
VVMDYHYKLVVNNAADKYLISIPSLRAPVXX

SEQ ID NO: 59587 - protein, 26 aa, Artificial Sequence
  Cyclic GFR-binding peptide
AVSMGEEYQKYTPVGMDDIYLVSIPS

SEQ ID NO: 59588 - protein, 36 aa, Artificial Sequence; identical to SEQ ID NO: 16558
  Cyclic GFR-binding peptide
  MOD_RES (1)..(3)..(35)..(36): Xaa is C or S

SEQ ID NO: 59589 - protein, 34 aa, Artificial Sequence; identical to SEQ ID NO: 16563
  Cyclic GFR-binding peptide
  MOD_RES (32)..(33): Xaa is C or S

SEQ ID NO: 59590 - protein, 27 aa, Artificial Sequence
  Cyclic GFR-binding peptide
SVAMGYHYKLYTVVGKDKYLISIPSLK

SEQ ID NO: 59591 - protein, 35 aa, Artificial Sequence; identical to SEQ ID NO: 16567
  Cyclic GFR-binding peptide
  MOD_RES (1)..(3)..(35): Xaa is C or S

SEQ ID NO: 59592 - protein, 33 aa, Artificial Sequence; identical to SEQ ID NO: 16569
  Cyclic GFR-binding peptide
  MOD_RES (2)..(2): Xaa is C or S

SEQ ID NO: 59593 - protein, 36 aa, Artificial Sequence; identical to SEQ ID NO: 16572
  Cyclic GFR-binding peptide
  MOD_RES (1)..(3)..(34)..(35): Xaa is C or S

SEQ ID NO: 59594 - protein, 35 aa, Artificial Sequence; identical to SEQ ID NO: 16574
  Cyclic GFR-binding peptide
  MOD_RES (2)..(4)..(35): Xaa is C or S

SEQ ID NO: 59595 - protein, 29 aa, Artificial Sequence
  Cyclic GFR-binding peptide
  MOD_RES (1)..(3): Xaa is C or S
XGXAEVVMDYHYKLVVNNAADKYLISIPS

SEQ ID NO: 59596 - protein, 22 aa, Artificial Sequence
  Cyclic GFR-binding peptide
DRYKKLVVNNAADFYLISIANL

SEQ ID NO: 59597 - protein, 34 aa, Artificial Sequence
  Cyclic GFR-binding peptide
  MOD_RES (29)..(30): Xaa is C or S
VIMEYQKYVKPKRGVIYLISIPSLAQPVXXPAAS

SEQ ID NO: 59598 - protein, 22 aa, Artificial Sequence
  Cyclic GFR-binding peptide
GYHYKLYTVVGKDKYLISIPSL

SEQ ID NO: 59599 - protein, 35 aa, Artificial Sequence; identical to SEQ ID NO: 16584
  Cyclic GFR-binding peptide
  MOD_RES (1)..(33)..(34): Xaa is C or S

SEQ ID NO: 59600 - protein, 29 aa, Artificial Sequence
  Cyclic GFR-binding peptide
VVMNEYQKYIVNSSDDIYLVSIPSLKTPA

SEQ ID NO: 59601 - protein, 30 aa, Artificial Sequence
  Cyclic GFR-binding peptide
  MOD_RES (28)..(29): Xaa is C or S
MGRYKKLYTVVGKDFYLISIANLKTPVXXA

SEQ ID NO: 59602 - protein, 39 aa, Artificial Sequence; identical to SEQ ID NO: 16593
  Cyclic GFR-binding peptide
  MOD_RES (2)..(33)..(34): Xaa is C or S

SEQ ID NO: 59603 - protein, 24 aa, Artificial Sequence
  Cyclic GFR-binding peptide
MGEEYKFKTPVGMDDLYLVSIPEL

SEQ ID NO: 59604 - protein, 34 aa, Artificial Sequence
  Cyclic GFR-binding peptide
  MOD_RES (29)..(30): Xaa is C or S
VMDEYQKYVVKENEDIYLMSIPSLETPVXXAKPI

SEQ ID NO: 59605 - protein, 25 aa, Artificial Sequence
  Cyclic GFR-binding peptide
SMGEEYKFKTPVGMDDLYLVSIPEL

SEQ ID NO: 59606 - protein, 25 aa, Artificial Sequence
  Cyclic GFR-binding peptide
NEYQKYIVNSSDDIYLVSIPSLKTP

SEQ ID NO: 59607 - protein, 40 aa, Artificial Sequence; identical to SEQ ID NO: 16594
  Cyclic GFR-binding peptide
  MOD_RES (2)..(34)..(35): Xaa is C or S

SEQ ID NO: 59608 - protein, 36 aa, Artificial Sequence; identical to SEQ ID NO: 16602
  Cyclic GFR-binding peptide
  MOD_RES (33)..(34): Xaa is C or S

SEQ ID NO: 59609 - protein, 30 aa, Artificial Sequence
  Cyclic GFR-binding peptide
AVSMGEEYKFKTPVGMDDLYLVSIPELKTP

SEQ ID NO: 59610 - protein, 24 aa, Artificial Sequence
  Cyclic GFR-binding peptide
NEYQKYIVNSSDDIYLVSIPSLKT

SEQ ID NO: 59611 - protein, 39 aa, Artificial Sequence; identical to SEQ ID NO: 16604
  Cyclic GFR-binding peptide
  MOD_RES (2)..(4)..(37)..(38): Xaa is C or S

SEQ ID NO: 59612 - protein, 29 aa, Artificial Sequence
  Cyclic GFR-binding peptide
SVAMGEYQKYYTVVGKDIYLISIPSLKTP

SEQ ID NO: 59613 - protein, 40 aa, Artificial Sequence; identical to SEQ ID NO: 16610
  Cyclic GFR-binding peptide
  MOD_RES (1)..(3)..(35): Xaa is C or S

SEQ ID NO: 59614 - protein, 27 aa, Artificial Sequence
  Cyclic GFR-binding peptide
  MOD_RES (1)..(1): Xaa is C or S
XAEVVMDRYKKLVVNNAADFYLISIAN

SEQ ID NO: 59615 - protein, 26 aa, Artificial Sequence
  Cyclic GFR-binding peptide
  MOD_RES (26)..(26): Xaa is C or S
YHYKLYTVVGKDKYLISIPSLKTPVX

SEQ ID NO: 59616 - protein, 29 aa, Artificial Sequence
  Cyclic GFR-binding peptide
  MOD_RES (1)..(3): Xaa is C or S
XGXAEVVMDEYKFKVVNNAADLYLISIPE

SEQ ID NO: 59617 - protein, 29 aa, Artificial Sequence
  Cyclic GFR-binding peptide
  MOD_RES (26)..(27): Xaa is C or S
EYQKYIVNNSSDIYLVSIPSLKTPAXXAK

SEQ ID NO: 59618 - protein, 39 aa, Artificial Sequence; identical to SEQ ID NO: 16617
  Cyclic GFR-binding peptide
  MOD_RES (2)..(4)..(35)..(36): Xaa is C or S

SEQ ID NO: 59619 - protein, 31 aa, Artificial Sequence
  Cyclic GFR-binding peptide
  MOD_RES (1)..(3): Xaa is C or S
XKXSKVVMEYKFKVKPTRGVLYLISIPELDQ

SEQ ID NO: 59620 - protein, 31 aa, Artificial Sequence
  Cyclic GFR-binding peptide
  MOD_RES (29)..(30): Xaa is C or S
VMDYHYKLVVNNAADKYLISIPSLRAPVXXS

SEQ ID NO: 59621 - protein, 28 aa, Artificial Sequence
  Cyclic GFR-binding peptide
RVIMEYQKYVKPKRGVIYLISIPSLAQP

SEQ ID NO: 59622 - protein, 31 aa, Artificial Sequence
  Cyclic GFR-binding peptide
  MOD_RES (2)..(2): Xaa is C or S
KXSRVIMEYQKYVKPKRGVIYLISIPSLAQP

SEQ ID NO: 59623 - protein, 31 aa, Artificial Sequence
  Cyclic GFR-binding peptide
  MOD_RES (27)..(28): Xaa is C or S
GYHYKLYTVVGKDKYLISIPSLKTPVXXAKS

SEQ ID NO: 59624 - protein, 33 aa, Artificial Sequence; identical to SEQ ID NO: 16626
  Cyclic GFR-binding peptide
  MOD_RES (31)..(32): Xaa is C or S

SEQ ID NO: 59625 - protein, 26 aa, Artificial Sequence
  Cyclic GFR-binding peptide
  MOD_RES (1)..(1): Xaa is C or S
XSRVIMEYQKYVKPKRGVIYLISIPS

SEQ ID NO: 59626 - protein, 27 aa, Artificial Sequence
  Cyclic GFR-binding peptide
VIMEYQKYVKPKRGVIYLISIPSLAQP

SEQ ID NO: 59627 - protein, 37 aa, Artificial Sequence; identical to SEQ ID NO: 16628
  Cyclic GFR-binding peptide
  MOD_RES (1)..(33)..(34): Xaa is C or S

SEQ ID NO: 59628 - protein, 33 aa, Artificial Sequence
  Cyclic GFR-binding peptide
  MOD_RES (29)..(30): Xaa is C or S
VMDYHYKLVVNNAADKYLISIPSLRAPVXXSAP

SEQ ID NO: 59629 - protein, 29 aa, Artificial Sequence
  Cyclic GFR-binding peptide
  MOD_RES (1)..(3): Xaa is C or S
XGXESVAMGEYQKYYTVVGKDIYLISIPS

SEQ ID NO: 59630 - protein, 29 aa, Artificial Sequence
  Cyclic GFR-binding peptide
ARVVMNEYKFKIVNSSDDLYLVSIPELQT

SEQ ID NO: 59631 - protein, 35 aa, Artificial Sequence
  Cyclic GFR-binding peptide
  MOD_RES (30)..(31): Xaa is C or S
SMGEEYQKYTPVGMDDIYLVSIPSLKTPVXXAKGV

SEQ ID NO: 59632 - protein, 38 aa, Artificial Sequence; identical to SEQ ID NO: 16629
  Cyclic GFR-binding peptide
  MOD_RES (33)..(34): Xaa is C or S

SEQ ID NO: 59633 - protein, 31 aa, Artificial Sequence; identical to SEQ ID NO: 16633
  Cyclic GFR-binding peptide
  MOD_RES (1)..(1): Xaa is C or S

SEQ ID NO: 59634 - protein, 24 aa, Artificial Sequence
  Cyclic GFR-binding peptide
KVIMEYKFKIKPTKGILYLISIPE

SEQ ID NO: 59635 - protein, 33 aa, Artificial Sequence
  Cyclic GFR-binding peptide
  MOD_RES (30)..(31): Xaa is C or S
VVMDEYKFKVVNNAADLYLISIPELRAPVXXSA

SEQ ID NO: 59636 - protein, 38 aa, Artificial Sequence; identical to SEQ ID NO: 16636
  Cyclic GFR-binding peptide
  MOD_RES (32)..(33): Xaa is C or S

SEQ ID NO: 59637 - protein, 24 aa, Artificial Sequence
  Cyclic GFR-binding peptide
KVVMEYKFKVKPTRGVLYLISIPE

SEQ ID NO: 59638 - protein, 32 aa, Artificial Sequence; identical to SEQ ID NO: 16638
  Cyclic GFR-binding peptide
  MOD_RES (31)..(32): Xaa is C or S

SEQ ID NO: 59639 - protein, 29 aa, Artificial Sequence
  Cyclic GFR-binding peptide
  MOD_RES (28)..(29): Xaa is C or S
IMEYKFKVKPKRGVLYLISIPELAQPVXX

SEQ ID NO: 59640 - protein, 28 aa, Artificial Sequence
  Cyclic GFR-binding peptide
ARVVMNEYQKYIVNSSDDIYLVSIPSLQ

SEQ ID NO: 59641 - protein, 33 aa, Artificial Sequence; identical to SEQ ID NO: 16641
  Cyclic GFR-binding peptide
  MOD_RES (1)..(33): Xaa is C or S

SEQ ID NO: 59642 - protein, 33 aa, Artificial Sequence; identical to SEQ ID NO: 16642
  Cyclic GFR-binding peptide
  MOD_RES (31)..(32): Xaa is C or S

SEQ ID NO: 59643 - protein, 25 aa, Artificial Sequence
  Cyclic GFR-binding peptide
DYHYKLVVNNAADKYLISIPSLRAP

SEQ ID NO: 59644 - protein, 31 aa, Artificial Sequence
  Cyclic GFR-binding peptide
  MOD_RES (1)..(3): Xaa is C or S
XGXESVAMGEYQKYYTVVGKDIYLISIPSLK

SEQ ID NO: 59645 - protein, 24 aa, Artificial Sequence
  Cyclic GFR-binding peptide
VMNEYQKYIVNSSDDIYLVSIPSL

SEQ ID NO: 59646 - protein, 25 aa, Artificial Sequence
  Cyclic GFR-binding peptide
VVMDEYQKYVVKENEDIYLMSIPSL

SEQ ID NO: 59647 - protein, 31 aa, Artificial Sequence; identical to SEQ ID NO: 16650
  Cyclic GFR-binding peptide
  MOD_RES (31)..(31): Xaa is C or S

SEQ ID NO: 59648 - protein, 40 aa, Artificial Sequence; identical to SEQ ID NO: 16651
  Cyclic GFR-binding peptide
  MOD_RES (2)..(34)..(35): Xaa is C or S

SEQ ID NO: 59649 - protein, 28 aa, Artificial Sequence
  Cyclic GFR-binding peptide
  MOD_RES (28)..(28): Xaa is C or S
MNEYKFKIVNNSSDLYLVSIPELKTPAX

SEQ ID NO: 59650 - protein, 34 aa, Artificial Sequence; identical to SEQ ID NO: 16653
  Cyclic GFR-binding peptide
  MOD_RES (32)..(33): Xaa is C or S

SEQ ID NO: 59651 - protein, 35 aa, Artificial Sequence; identical to SEQ ID NO: 16655
  Cyclic GFR-binding peptide
  MOD_RES (2)..(34)..(35): Xaa is C or S

SEQ ID NO: 59652 - protein, 30 aa, Artificial Sequence
  Cyclic GFR-binding peptide
  MOD_RES (28)..(29): Xaa is C or S
MDEYKFKVVNNAADLYLISIPELRAPVXXS

SEQ ID NO: 59653 - protein, 38 aa, Artificial Sequence; identical to SEQ ID NO: 16660
  Cyclic GFR-binding peptide
  MOD_RES (2)..(4)..(35)..(36): Xaa is C or S

SEQ ID NO: 59654 - protein, 33 aa, Artificial Sequence; identical to SEQ ID NO: 16663
  Cyclic GFR-binding peptide
  MOD_RES (31)..(32): Xaa is C or S

SEQ ID NO: 59655 - protein, 30 aa, Artificial Sequence
  Cyclic GFR-binding peptide
  MOD_RES (2)..(2): Xaa is C or S
GXAKVVMNEYKFKIVNNSSDLYLVSIPELK

SEQ ID NO: 59656 - protein, 29 aa, Artificial Sequence
  Cyclic GFR-binding peptide
  MOD_RES (28)..(29): Xaa is C or S
MGYHYKLYTVVGKDKYLISIPSLKTPVXX

SEQ ID NO: 59657 - protein, 33 aa, Artificial Sequence
  Cyclic GFR-binding peptide
  MOD_RES (28)..(29): Xaa is C or S
MDEYKFKVVNNAADLYLISIPELRAPVXXSAPA

SEQ ID NO: 59658 - protein, 34 aa, Artificial Sequence; identical to SEQ ID NO: 16667
  Cyclic GFR-binding peptide
  MOD_RES (1)..(3)..(34): Xaa is C or S

SEQ ID NO: 59659 - protein, 36 aa, Artificial Sequence; identical to SEQ ID NO: 16668
  Cyclic GFR-binding peptide
  MOD_RES (32)..(32): Xaa is C or S

SEQ ID NO: 59660 - protein, 34 aa, Artificial Sequence; identical to SEQ ID NO: 16669
  Cyclic GFR-binding peptide
  MOD_RES (32)..(33): Xaa is C or S

SEQ ID NO: 59661 - protein, 33 aa, Artificial Sequence; identical to SEQ ID NO: 16672
  Cyclic GFR-binding peptide
  MOD_RES (2)..(2): Xaa is C or S

SEQ ID NO: 59662 - protein, 32 aa, Artificial Sequence
  Cyclic GFR-binding peptide
  MOD_RES (26)..(26): Xaa is C or S
EYQKYIVNSSDDIYLVSIPSLKTPAXTPKTVH

SEQ ID NO: 59663 - protein, 34 aa, Artificial Sequence
  Cyclic GFR-binding peptide
  MOD_RES (30)..(30): Xaa is C or S
VVMNEYKFKIVNSSDDLYLVSIPELKTPAXTPKT

SEQ ID NO: 59664 - protein, 34 aa, Artificial Sequence; identical to SEQ ID NO: 16678
  Cyclic GFR-binding peptide
  MOD_RES (32)..(33): Xaa is C or S

SEQ ID NO: 59665 - protein, 32 aa, Artificial Sequence
  Cyclic GFR-binding peptide
  MOD_RES (29)..(30): Xaa is C or S
VMNEYQKYIVNSSDDIYLVSIPSLKTPAXXPK

SEQ ID NO: 59666 - protein, 24 aa, Artificial Sequence
  Cyclic GFR-binding peptide
EYQKYIKPTKGIIYLISIPSLDQS

SEQ ID NO: 59667 - protein, 36 aa, Artificial Sequence; identical to SEQ ID NO: 16682
  Cyclic GFR-binding peptide
  MOD_RES (1)..(3)..(34)..(35): Xaa is C or S

SEQ ID NO: 59668 - protein, 30 aa, Artificial Sequence
  Cyclic GFR-binding peptide
  MOD_RES (30)..(30): Xaa is C or S
SMGEEYKFKTPVGMDDLYLVSIPELKTPVX

SEQ ID NO: 59669 - protein, 33 aa, Artificial Sequence
  Cyclic GFR-binding peptide
  MOD_RES (2)..(4): Xaa is C or S
SXKXSRVIMEYQKYVKPKRGVIYLISIPSLAQP

SEQ ID NO: 59670 - protein, 30 aa, Artificial Sequence
  Cyclic GFR-binding peptide
  MOD_RES (2)..(4): Xaa is C or S
RXGXGEVVMDEYKFKVVKENEDLYLMSIPE

SEQ ID NO: 59671 - protein, 34 aa, Artificial Sequence
  Cyclic GFR-binding peptide
  MOD_RES (28)..(29): Xaa is C or S
GEEYQKYTPVGMDDIYLVSIPSLKTPVXXAKGVK

SEQ ID NO: 59672 - protein, 30 aa, Artificial Sequence
  Cyclic GFR-binding peptide
  MOD_RES (2)..(2): Xaa is C or S
GXEAVSMGEEYKFKTPVGMDDLYLVSIPEL

SEQ ID NO: 59673 - protein, 34 aa, Artificial Sequence; identical to SEQ ID NO: 16688
  Cyclic GFR-binding peptide
  MOD_RES (1)..(33)..(34): Xaa is C or S

SEQ ID NO: 59674 - protein, 29 aa, Artificial Sequence
  Cyclic GFR-binding peptide
AEVVMDRYKKLVVNNAADFYLISIANLRA

SEQ ID NO: 59675 - protein, 32 aa, Artificial Sequence; identical to SEQ ID NO: 16695
  Cyclic GFR-binding peptide
  MOD_RES (31)..(32): Xaa is C or S

SEQ ID NO: 59676 - protein, 28 aa, Artificial Sequence
  Cyclic GFR-binding peptide
  MOD_RES (27)..(28): Xaa is C or S
DEYKFKVVKENEDLYLMSIPELETPVXX

SEQ ID NO: 59677 - protein, 24 aa, Artificial Sequence
  Cyclic GFR-binding peptide
AMGEYQKYYTVVGKDIYLISIPSL

SEQ ID NO: 59678 - protein, 33 aa, Artificial Sequence; identical to SEQ ID NO: 16701
  Cyclic GFR-binding peptide
  MOD_RES (1)..(1): Xaa is C or S

SEQ ID NO: 59679 - protein, 25 aa, Artificial Sequence
  Cyclic GFR-binding peptide
SMGEEYQKYTPVGMDDIYLVSIPSL

SEQ ID NO: 59680 - protein, 25 aa, Artificial Sequence
  Cyclic GFR-binding peptide
EYQKYIVNSSDDIYLVSIPSLQTPA

SEQ ID NO: 59681 - protein, 30 aa, Artificial Sequence
  Cyclic GFR-binding peptide
  MOD_RES (1)..(3): Xaa is C or S
XGXEAVSMGEEYQKYTPVGMDDIYLVSIPS

SEQ ID NO: 59682 - protein, 35 aa, Artificial Sequence; identical to SEQ ID NO: 16705
  Cyclic GFR-binding peptide
  MOD_RES (1)..(33)..(34): Xaa is C or S

SEQ ID NO: 59683 - protein, 28 aa, Artificial Sequence
  Cyclic GFR-binding peptide
  MOD_RES (28)..(28): Xaa is C or S
IMEYKFKIKPTKGILYLISIPELDQSVX

SEQ ID NO: 59684 - protein, 30 aa, Artificial Sequence
  Cyclic GFR-binding peptide
  MOD_RES (2)..(2): Xaa is C or S
GXAEVVMDRYKKLVVNNAADFYLISIANLR

SEQ ID NO: 59685 - protein, 30 aa, Artificial Sequence
  Cyclic GFR-binding peptide
  MOD_RES (27)..(28): Xaa is C or S
DRYKKLVVNNAADFYLISIANLRAPVXXSA

SEQ ID NO: 59686 - protein, 33 aa, Artificial Sequence
  Cyclic GFR-binding peptide
  MOD_RES (30)..(31): Xaa is C or S
VVMNEYQKYIVNNSSDIYLVSIPSLKTPAXXAK

SEQ ID NO: 59687 - protein, 23 aa, Artificial Sequence
  Cyclic GFR-binding peptide
GYHYKLYTVVGKDKYLISIPSLK

SEQ ID NO: 59688 - protein, 30 aa, Artificial Sequence
  Cyclic GFR-binding peptide
  MOD_RES (1)..(1): Xaa is C or S
XAKVVMNEYQKYIVNNSSDIYLVSIPSLKT

SEQ ID NO: 59689 - protein, 33 aa, Artificial Sequence; identical to SEQ ID NO: 16709
  Cyclic GFR-binding peptide
  MOD_RES (1)..(32)..(33): Xaa is C or S

SEQ ID NO: 59690 - protein, 33 aa, Artificial Sequence
  Cyclic GFR-binding peptide
  MOD_RES (2)..(4): Xaa is C or S
RXGXGEVVMEEYKFKVVKDYEDLYLMSIPELET

SEQ ID NO: 59691 - protein, 37 aa, Artificial Sequence; identical to SEQ ID NO: 16713
  Cyclic GFR-binding peptide
  MOD_RES (1)..(3)..(35)..(36): Xaa is C or S

SEQ ID NO: 59692 - protein, 31 aa, Artificial Sequence
  Cyclic GFR-binding peptide
  MOD_RES (28)..(29): Xaa is C or S
MDEYKFKVVKENEDLYLMSIPELETPVXXAK

SEQ ID NO: 59693 - protein, 36 aa, Artificial Sequence
  Cyclic GFR-binding peptide
  MOD_RES (30)..(31): Xaa is C or S
RVIMEYKFKVKPKRGVLYLISIPELAQPVXXPAASA

SEQ ID NO: 59694 - protein, 33 aa, Artificial Sequence; identical to SEQ ID NO: 16715
  Cyclic GFR-binding peptide
  MOD_RES (31)..(32): Xaa is C or S

SEQ ID NO: 59695 - protein, 35 aa, Artificial Sequence
  Cyclic GFR-binding peptide
  MOD_RES (32)..(33): Xaa is C or S
AVSMGEEYQKYTPVGMDDIYLVSIPSLKTPVXXAK

SEQ ID NO: 59696 - protein, 34 aa, Artificial Sequence
  Cyclic GFR-binding peptide
  MOD_RES (29)..(30): Xaa is C or S
VMDEYKFKVVNNAADLYLISIPELRAPVXXSAPA

SEQ ID NO: 59697 - protein, 30 aa, Artificial Sequence
  Cyclic GFR-binding peptide
  MOD_RES (26)..(26): Xaa is C or S
EYQKYIVNSSDDIYLVSIPSLKTPAXTPKT

SEQ ID NO: 59698 - protein, 23 aa, Artificial Sequence
  Cyclic GFR-binding peptide
VMDEYKFKVVNNAADLYLISIPE

SEQ ID NO: 59699 - protein, 27 aa, Artificial Sequence
  Cyclic GFR-binding peptide
VMEYKFKVKPTRGVLYLISIPELDQPV

SEQ ID NO: 59700 - protein, 37 aa, Artificial Sequence; identical to SEQ ID NO: 16724
  Cyclic GFR-binding peptide
  MOD_RES (1)..(3)..(35)..(36): Xaa is C or S

SEQ ID NO: 59701 - protein, 26 aa, Artificial Sequence
  Cyclic GFR-binding peptide
  MOD_RES (26)..(26): Xaa is C or S
EYKFKVVKDYEDLYLMSIPELETPVX

SEQ ID NO: 59702 - protein, 38 aa, Artificial Sequence; identical to SEQ ID NO: 16729
  Cyclic GFR-binding peptide
  MOD_RES (2)..(34)..(35): Xaa is C or S

SEQ ID NO: 59703 - protein, 30 aa, Artificial Sequence
  Cyclic GFR-binding peptide
  MOD_RES (26)..(27): Xaa is C or S
RYKKLVVNNAADFYLISIANLRAPVXXSAP

SEQ ID NO: 59704 - protein, 23 aa, Artificial Sequence
  Cyclic GFR-binding peptide
RYKKLYTVVGKDFYLISIANLKT

SEQ ID NO: 59705 - protein, 36 aa, Artificial Sequence; identical to SEQ ID NO: 16735
  Cyclic GFR-binding peptide
  MOD_RES (1)..(32)..(33): Xaa is C or S

SEQ ID NO: 59706 - protein, 23 aa, Artificial Sequence
  Cyclic GFR-binding peptide
DEYKFKVVKENEDLYLMSIPELE

SEQ ID NO: 59707 - protein, 41 aa, Artificial Sequence; identical to SEQ ID NO: 16737
  Cyclic GFR-binding peptide
  MOD_RES (1)..(3)..(35)..(36): Xaa is C or S

SEQ ID NO: 59708 - protein, 37 aa, Artificial Sequence; identical to SEQ ID NO: 16738
  Cyclic GFR-binding peptide
  MOD_RES (31)..(32): Xaa is C or S

SEQ ID NO: 59709 - protein, 29 aa, Artificial Sequence
  Cyclic GFR-binding peptide
  MOD_RES (26)..(27): Xaa is C or S
EYKFKVKPTRGVLYLISIPELDQPVXXPS

SEQ ID NO: 59710 - protein, 39 aa, Artificial Sequence; identical to SEQ ID NO: 16740
  Cyclic GFR-binding peptide
  MOD_RES (2)..(34)..(35): Xaa is C or S

SEQ ID NO: 59711 - protein, 35 aa, Artificial Sequence; identical to SEQ ID NO: 16743
  Cyclic GFR-binding peptide
  MOD_RES (2)..(34)..(35): Xaa is C or S

SEQ ID NO: 59712 - protein, 20 aa, Artificial Sequence
  Cyclic GFR-binding peptide
EYQKYVVKENEDIYLMSIPS

SEQ ID NO: 59713 - protein, 33 aa, Artificial Sequence
  Cyclic GFR-binding peptide
  MOD_RES (27)..(28): Xaa is C or S
NEYKFKIVNSSDDLYLVSIPELKTPAXXPKPVY

SEQ ID NO: 59714 - protein, 32 aa, Artificial Sequence
  Cyclic GFR-binding peptide
  MOD_RES (32)..(32): Xaa is C or S
AVSMGEEYKFKTPVGMDDLYLVSIPELKTPVX

SEQ ID NO: 59715 - protein, 20 aa, Artificial Sequence
  Cyclic GFR-binding peptide
YHYKLYTVVGKDKYLISIPS

SEQ ID NO: 59716 - protein, 41 aa, Artificial Sequence; identical to SEQ ID NO: 16762
  Cyclic GFR-binding peptide
  MOD_RES (2)..(35)..(36): Xaa is C or S

SEQ ID NO: 59717 - protein, 31 aa, Artificial Sequence
  Cyclic GFR-binding peptide
  MOD_RES (1)..(1): Xaa is C or S
XGEVVMDEYQKYVVKENEDIYLMSIPSLETP

SEQ ID NO: 59718 - protein, 35 aa, Artificial Sequence
  Cyclic GFR-binding peptide
  MOD_RES (29)..(30): Xaa is C or S
MGEEYKFKTPVGMDDLYLVSIPELKTPVXXAKGVK

SEQ ID NO: 59719 - protein, 40 aa, Artificial Sequence; identical to SEQ ID NO: 16772
  Cyclic GFR-binding peptide
  MOD_RES (2)..(34)..(35): Xaa is C or S

SEQ ID NO: 59720 - protein, 32 aa, Artificial Sequence
  Cyclic GFR-binding peptide
  MOD_RES (27)..(28): Xaa is C or S
MEYKFKVKPTRGVLYLISIPELDQPVXXPSAS

SEQ ID NO: 59721 - protein, 38 aa, Artificial Sequence; identical to SEQ ID NO: 16773
  Cyclic GFR-binding peptide
  MOD_RES (1)..(32)..(33): Xaa is C or S

SEQ ID NO: 59722 - protein, 33 aa, Artificial Sequence
  Cyclic GFR-binding peptide
  MOD_RES (1)..(3): Xaa is C or S
XGXGEVVMDEYQKYVVKENEDIYLMSIPSLETP

SEQ ID NO: 59723 - protein, 31 aa, Artificial Sequence
  Cyclic GFR-binding peptide
  MOD_RES (2)..(4): Xaa is C or S
RXGXAEVVMDYHYKLVVNNAADKYLISIPSL

SEQ ID NO: 59724 - protein, 22 aa, Artificial Sequence
  Cyclic GFR-binding peptide
GEEYKFKTPVGMDDLYLVSIPE

SEQ ID NO: 59725 - protein, 31 aa, Artificial Sequence; identical to SEQ ID NO: 16779
  Cyclic GFR-binding peptide

SEQ ID NO: 59726 - protein, 29 aa, Artificial Sequence
  Cyclic GFR-binding peptide
  MOD_RES (27)..(28): Xaa is C or S
MEYQKYIKPTKGIIYLISIPSLDQSVXXP

SEQ ID NO: 59727 - protein, 31 aa, Artificial Sequence
  Cyclic GFR-binding peptide
  MOD_RES (1)..(3): Xaa is C or S
XGXGEVVMDEYKFKVVKENEDLYLMSIPELE

SEQ ID NO: 59728 - protein, 38 aa, Artificial Sequence; identical to SEQ ID NO: 16786
  Cyclic GFR-binding peptide
  MOD_RES (2)..(4)..(36)..(37): Xaa is C or S

SEQ ID NO: 59729 - protein, 32 aa, Artificial Sequence
  Cyclic GFR-binding peptide
  MOD_RES (29)..(30): Xaa is C or S
VVMEYKFKVKPTRGVLYLISIPELDQPVXXPS

SEQ ID NO: 59730 - protein, 33 aa, Artificial Sequence
  Cyclic GFR-binding peptide
  MOD_RES (28)..(29): Xaa is C or S
VMEYKFKVKPTRGVLYLISIPELDQPVXXPSAS

SEQ ID NO: 59731 - protein, 33 aa, Artificial Sequence
  Cyclic GFR-binding peptide
  MOD_RES (2)..(4): Xaa is C or S
HXGXSRVVMNEYKFKIVNSSDDLYLVSIPELKT

SEQ ID NO: 59732 - protein, 26 aa, Artificial Sequence
  Cyclic GFR-binding peptide
VIMEYQKYVKPKRGVIYLISIPSLAQ

SEQ ID NO: 59733 - protein, 31 aa, Artificial Sequence; identical to SEQ ID NO: 16788
  Cyclic GFR-binding peptide
  MOD_RES (1)..(1): Xaa is C or S

SEQ ID NO: 59734 - protein, 32 aa, Artificial Sequence
  Cyclic GFR-binding peptide
  MOD_RES (28)..(29): Xaa is C or S
IMEYKFKVKPKRGVLYLISIPELAQPVXXPAA

SEQ ID NO: 59735 - protein, 34 aa, Artificial Sequence; identical to SEQ ID NO: 16789
  Cyclic GFR-binding peptide
  MOD_RES (2)..(2): Xaa is C or S

SEQ ID NO: 59736 - protein, 35 aa, Artificial Sequence; identical to SEQ ID NO: 16790
  Cyclic GFR-binding peptide
  MOD_RES (2)..(34)..(35): Xaa is C or S

SEQ ID NO: 59737 - protein, 28 aa, Artificial Sequence
  Cyclic GFR-binding peptide
  MOD_RES (26)..(27): Xaa is C or S
EYQKYTPVGMDDIYLVSIPSLKTPVXXA

SEQ ID NO: 59738 - protein, 28 aa, Artificial Sequence
  Cyclic GFR-binding peptide
  MOD_RES (28)..(28): Xaa is C or S
MEEYQKYVVKDYEDIYLMSIPSLETPVX

SEQ ID NO: 59739 - protein, 33 aa, Artificial Sequence; identical to SEQ ID NO: 16793
  Cyclic GFR-binding peptide
  MOD_RES (2)..(33): Xaa is C or S

SEQ ID NO: 59740 - protein, 30 aa, Artificial Sequence
  Cyclic GFR-binding peptide
  MOD_RES (29)..(29): Xaa is C or S
VMNEYQKYIVNSSDDIYLVSIPSLKTPAXT

SEQ ID NO: 59741 - protein, 35 aa, Artificial Sequence; identical to SEQ ID NO: 16802
  Cyclic GFR-binding peptide
  MOD_RES (2)..(4): Xaa is C or S

SEQ ID NO: 59742 - protein, 29 aa, Artificial Sequence
  Cyclic GFR-binding peptide
  MOD_RES (2)..(2): Xaa is C or S
GXGEVVMDEYKFKVVKENEDLYLMSIPEL

SEQ ID NO: 59743 - protein, 33 aa, Artificial Sequence; identical to SEQ ID NO: 16803
  Cyclic GFR-binding peptide
  MOD_RES (2)..(2): Xaa is C or S

SEQ ID NO: 59744 - protein, 25 aa, Artificial Sequence
  Cyclic GFR-binding peptide
VVMEEYQKYVVKDYEDIYLMSIPSL

SEQ ID NO: 59745 - protein, 29 aa, Artificial Sequence
  Cyclic GFR-binding peptide
AVSMGEEYQKYTPVGMDDIYLVSIPSLKT

SEQ ID NO: 59746 - protein, 28 aa, Artificial Sequence
  Cyclic GFR-binding peptide
SMGEEYKFKTPVGMDDLYLVSIPELKTP

SEQ ID NO: 59747 - protein, 23 aa, Artificial Sequence
  Cyclic GFR-binding peptide
AMGRYKKLYTVVGKDFYLISIAN

SEQ ID NO: 59748 - protein, 24 aa, Artificial Sequence
  Cyclic GFR-binding peptide
YHYKLYTVVGKDKYLISIPSLKTP

SEQ ID NO: 59749 - protein, 31 aa, Artificial Sequence
  Cyclic GFR-binding peptide
  MOD_RES (29)..(30): Xaa is C or S
VMNEYKFKIVNNSSDLYLVSIPELKTPAXXA

SEQ ID NO: 59750 - protein, 33 aa, Artificial Sequence
  Cyclic GFR-binding peptide
  MOD_RES (27)..(28): Xaa is C or S
MEYQKYIKPTKGIIYLISIPSLDQSVXXPSASA

SEQ ID NO: 59751 - protein, 30 aa, Artificial Sequence
  Cyclic GFR-binding peptide
  MOD_RES (29)..(30): Xaa is C or S
AMGRYKKLYTVVGKDFYLISIANLKTPVXX

SEQ ID NO: 59752 - protein, 30 aa, Artificial Sequence; identical to SEQ ID NO: 16813
  Cyclic GFR-binding peptide

SEQ ID NO: 59753 - protein, 39 aa, Artificial Sequence; identical to SEQ ID NO: 16815
  Cyclic GFR-binding peptide
  MOD_RES (2)..(4)..(35)..(36): Xaa is C or S

SEQ ID NO: 59754 - protein, 35 aa, Artificial Sequence; identical to SEQ ID NO: 16816
  Cyclic GFR-binding peptide
  MOD_RES (1)..(33)..(34): Xaa is C or S

SEQ ID NO: 59755 - protein, 26 aa, Artificial Sequence
  Cyclic GFR-binding peptide
  MOD_RES (26)..(26): Xaa is C or S
EYQKYVKPTRGVIYLISIPSLDQPVX

SEQ ID NO: 59756 - protein, 26 aa, Artificial Sequence
  Cyclic GFR-binding peptide
MDEYKFKVVNNAADLYLISIPELRAP

SEQ ID NO: 59757 - protein, 27 aa, Artificial Sequence
  Cyclic GFR-binding peptide
SKVIMEYKFKIKPTKGILYLISIPELD

SEQ ID NO: 59758 - protein, 25 aa, Artificial Sequence
  Cyclic GFR-binding peptide
VVMEEYKFKVVKDYEDLYLMSIPEL

SEQ ID NO: 59759 - protein, 28 aa, Artificial Sequence
  Cyclic GFR-binding peptide
  MOD_RES (27)..(27): Xaa is C or S
NEYKFKIVNSSDDLYLVSIPELKTPAXT

SEQ ID NO: 59760 - protein, 35 aa, Artificial Sequence; identical to SEQ ID NO: 16822
  Cyclic GFR-binding peptide
  MOD_RES (2)..(4): Xaa is C or S

SEQ ID NO: 59761 - protein, 26 aa, Artificial Sequence
  Cyclic GFR-binding peptide
MEEYQKYVVKDYEDIYLMSIPSLETP

SEQ ID NO: 59762 - protein, 28 aa, Artificial Sequence
  Cyclic GFR-binding peptide
  MOD_RES (27)..(28): Xaa is C or S
NEYQKYIVNNSSDIYLVSIPSLKTPAXX

SEQ ID NO: 59763 - protein, 29 aa, Artificial Sequence
  Cyclic GFR-binding peptide
  MOD_RES (2)..(4): Xaa is C or S
SXKXSKVVMEYQKYVKPTRGVIYLISIPS

SEQ ID NO: 59764 - protein, 34 aa, Artificial Sequence
  Cyclic GFR-binding peptide
  MOD_RES (30)..(31): Xaa is C or S
KVIMEYKFKIKPTKGILYLISIPELDQSVXXPSA

SEQ ID NO: 59765 - protein, 32 aa, Artificial Sequence
  Cyclic GFR-binding peptide
  MOD_RES (28)..(29): Xaa is C or S
MGRYKKLYTVVGKDFYLISIANLKTPVXXAKS

SEQ ID NO: 59766 - protein, 35 aa, Artificial Sequence
  Cyclic GFR-binding peptide
  MOD_RES (29)..(30): Xaa is C or S
VMNEYKFKIVNNSSDLYLVSIPELKTPAXXAKPVA

SEQ ID NO: 59767 - protein, 36 aa, Artificial Sequence; identical to SEQ ID NO: 16828
  Cyclic GFR-binding peptide
  MOD_RES (31)..(32): Xaa is C or S

SEQ ID NO: 59768 - protein, 30 aa, Artificial Sequence
  Cyclic GFR-binding peptide
  MOD_RES (2)..(2): Xaa is C or S
GXAEVVMDEYKFKVVNNAADLYLISIPELR

SEQ ID NO: 59769 - protein, 30 aa, Artificial Sequence
  Cyclic GFR-binding peptide
  MOD_RES (2)..(4): Xaa is C or S
SXKXSKVVMEYQKYVKPTRGVIYLISIPSL

SEQ ID NO: 59770 - protein, 29 aa, Artificial Sequence
  Cyclic GFR-binding peptide
  MOD_RES (28)..(29): Xaa is C or S
VMEYKFKVKPTRGVLYLISIPELDQPVXX

SEQ ID NO: 59771 - protein, 28 aa, Artificial Sequence
  Cyclic GFR-binding peptide
  MOD_RES (27)..(27): Xaa is C or S
NEYQKYIVNSSDDIYLVSIPSLKTPAXT

SEQ ID NO: 59772 - protein, 23 aa, Artificial Sequence
  Cyclic GFR-binding peptide
VIMEYKFKIKPTKGILYLISIPE

SEQ ID NO: 59773 - protein, 30 aa, Artificial Sequence
  Cyclic GFR-binding peptide
GEVVMEEYQKYVVKDYEDIYLMSIPSLETP

SEQ ID NO: 59774 - protein, 30 aa, Artificial Sequence
  Cyclic GFR-binding peptide
  MOD_RES (1)..(1): Xaa is C or S
XSRVIMEYKFKVKPKRGVLYLISIPELAQP

SEQ ID NO: 59775 - protein, 35 aa, Artificial Sequence; identical to SEQ ID NO: 16837
  Cyclic GFR-binding peptide
  MOD_RES (1)..(3)..(35): Xaa is C or S

SEQ ID NO: 59776 - protein, 22 aa, Artificial Sequence
  Cyclic GFR-binding peptide
NEYKFKIVNNSSDLYLVSIPEL

SEQ ID NO: 59777 - protein, 30 aa, Artificial Sequence
  Cyclic GFR-binding peptide
  MOD_RES (28)..(29): Xaa is C or S
VMEYQKYVKPTRGVIYLISIPSLDQPVXXP

SEQ ID NO: 59778 - protein, 21 aa, Artificial Sequence
  Cyclic GFR-binding peptide
MEYQKYVKPKRGVIYLISIPS

SEQ ID NO: 59779 - protein, 31 aa, Artificial Sequence
  Cyclic GFR-binding peptide
  MOD_RES (30)..(31): Xaa is C or S
KVIMEYKFKIKPTKGILYLISIPELDQSVXX

SEQ ID NO: 59780 - protein, 32 aa, Artificial Sequence; identical to SEQ ID NO: 16845
  Cyclic GFR-binding peptide
  MOD_RES (32)..(32): Xaa is C or S

SEQ ID NO: 59781 - protein, 30 aa, Artificial Sequence
  Cyclic GFR-binding peptide
  MOD_RES (30)..(30): Xaa is C or S
RVIMEYQKYVKPKRGVIYLISIPSLAQPVX

SEQ ID NO: 59782 - protein, 37 aa, Artificial Sequence; identical to SEQ ID NO: 16848
  Cyclic GFR-binding peptide
  MOD_RES (31)..(31): Xaa is C or S

SEQ ID NO: 59783 - protein, 35 aa, Artificial Sequence; identical to SEQ ID NO: 16851
  Cyclic GFR-binding peptide
  MOD_RES (32)..(33): Xaa is C or S

SEQ ID NO: 59784 - protein, 40 aa, Artificial Sequence; identical to SEQ ID NO: 16852
  Cyclic GFR-binding peptide
  MOD_RES (2)..(34)..(35): Xaa is C or S

SEQ ID NO: 59785 - protein, 29 aa, Artificial Sequence
  Cyclic GFR-binding peptide
EAVSMGEEYKFKTPVGMDDLYLVSIPELK

SEQ ID NO: 59786 - protein, 34 aa, Artificial Sequence
  Cyclic GFR-binding peptide
  MOD_RES (28)..(29): Xaa is C or S
MGRYKKLYTVVGKDFYLISIANLKTPVXXAKSAK

SEQ ID NO: 59787 - protein, 40 aa, Artificial Sequence; identical to SEQ ID NO: 16854
  Cyclic GFR-binding peptide
  MOD_RES (2)..(4)..(35)..(36): Xaa is C or S

SEQ ID NO: 59788 - protein, 25 aa, Artificial Sequence
  Cyclic GFR-binding peptide
EYQKYIVNNSSDIYLVSIPSLKTPA

SEQ ID NO: 59789 - protein, 28 aa, Artificial Sequence
  Cyclic GFR-binding peptide
  MOD_RES (27)..(28): Xaa is C or S
NEYKFKIVNNSSDLYLVSIPELKTPAXX

SEQ ID NO: 59790 - protein, 36 aa, Artificial Sequence; identical to SEQ ID NO: 16860
  Cyclic GFR-binding peptide
  MOD_RES (31)..(32): Xaa is C or S

SEQ ID NO: 59791 - protein, 25 aa, Artificial Sequence
  Cyclic GFR-binding peptide
EVVMDEYKFKVVKENEDLYLMSIPE

SEQ ID NO: 59792 - protein, 31 aa, Artificial Sequence
  Cyclic GFR-binding peptide
  MOD_RES (1)..(1): Xaa is C or S
XAKVVMNEYKFKIVNNSSDLYLVSIPELKTP

SEQ ID NO: 59793 - protein, 26 aa, Artificial Sequence
  Cyclic GFR-binding peptide
SMGEEYKFKTPVGMDDLYLVSIPELK

SEQ ID NO: 59794 - protein, 26 aa, Artificial Sequence
  Cyclic GFR-binding peptide
EVVMDRYKKLVVNNAADFYLISIANL

SEQ ID NO: 59795 - protein, 30 aa, Artificial Sequence
  Cyclic GFR-binding peptide
  MOD_RES (2)..(4): Xaa is C or S
SXKXSRVIMEYQKYVKPKRGVIYLISIPSL

SEQ ID NO: 59796 - protein, 24 aa, Artificial Sequence
  Cyclic GFR-binding peptide
MNEYQKYIVNSSDDIYLVSIPSLQ

SEQ ID NO: 59797 - protein, 37 aa, Artificial Sequence; identical to SEQ ID NO: 16871
  Cyclic GFR-binding peptide
  MOD_RES (1)..(33)..(34): Xaa is C or S

SEQ ID NO: 59798 - protein, 34 aa, Artificial Sequence; identical to SEQ ID NO: 16872
  Cyclic GFR-binding peptide
  MOD_RES (2)..(33)..(34): Xaa is C or S

SEQ ID NO: 59799 - protein, 29 aa, Artificial Sequence
  Cyclic GFR-binding peptide
VVMDEYKFKVVNNAADLYLISIPELRAPV

SEQ ID NO: 59800 - protein, 42 aa, Artificial Sequence; identical to SEQ ID NO: 16875
  Cyclic GFR-binding peptide
  MOD_RES (2)..(4)..(36)..(37): Xaa is C or S

SEQ ID NO: 59801 - protein, 38 aa, Artificial Sequence; identical to SEQ ID NO: 16876
  Cyclic GFR-binding peptide
  MOD_RES (2)..(33)..(34): Xaa is C or S

SEQ ID NO: 59802 - protein, 30 aa, Artificial Sequence; identical to SEQ ID NO: 1944
  Cyclic GFR-binding peptide

SEQ ID NO: 59803 - protein, 26 aa, Artificial Sequence
  Cyclic GFR-binding peptide
MDEYKFKVVKENEDLYLMSIPELETP

SEQ ID NO: 59804 - protein, 39 aa, Artificial Sequence; identical to SEQ ID NO: 16882
  Cyclic GFR-binding peptide
  MOD_RES (2)..(34)..(35): Xaa is C or S

SEQ ID NO: 59805 - protein, 26 aa, Artificial Sequence
  Cyclic GFR-binding peptide
RVIMEYQKYVKPKRGVIYLISIPSLA

SEQ ID NO: 59806 - protein, 30 aa, Artificial Sequence
  Cyclic GFR-binding peptide
  MOD_RES (26)..(27): Xaa is C or S
EYKFKVKPKRGVLYLISIPELAQPVXXPAA

SEQ ID NO: 59807 - protein, 34 aa, Artificial Sequence; identical to SEQ ID NO: 16883
  Cyclic GFR-binding peptide
  MOD_RES (31)..(32): Xaa is C or S

SEQ ID NO: 59808 - protein, 33 aa, Artificial Sequence
  Cyclic GFR-binding peptide
  MOD_RES (2)..(4): Xaa is C or S
SXKXSKVIMEYKFKIKPTKGILYLISIPELDQS

SEQ ID NO: 59809 - protein, 34 aa, Artificial Sequence
  Cyclic GFR-binding peptide
  MOD_RES (30)..(31): Xaa is C or S
VAMGRYKKLYTVVGKDFYLISIANLKTPVXXAKS

SEQ ID NO: 59810 - protein, 29 aa, Artificial Sequence
  Cyclic GFR-binding peptide
RVIMEYKFKVKPKRGVLYLISIPELAQPV

SEQ ID NO: 59811 - protein, 24 aa, Artificial Sequence
  Cyclic GFR-binding peptide
KVVMEYQKYVKPTRGVIYLISIPS

SEQ ID NO: 59812 - protein, 40 aa, Artificial Sequence; identical to SEQ ID NO: 16885
  Cyclic GFR-binding peptide
  MOD_RES (2)..(4)..(36)..(37): Xaa is C or S

SEQ ID NO: 59813 - protein, 33 aa, Artificial Sequence; identical to SEQ ID NO: 16889
  Cyclic GFR-binding peptide
  MOD_RES (31)..(32): Xaa is C or S

SEQ ID NO: 59814 - protein, 41 aa, Artificial Sequence; identical to SEQ ID NO: 16892
  Cyclic GFR-binding peptide
  MOD_RES (2)..(4)..(36)..(37): Xaa is C or S

SEQ ID NO: 59815 - protein, 35 aa, Artificial Sequence
  Cyclic GFR-binding peptide
  MOD_RES (29)..(30): Xaa is C or S
VIMEYQKYIKPTKGIIYLISIPSLDQSVXXPSASA

SEQ ID NO: 59816 - protein, 26 aa, Artificial Sequence
  Cyclic GFR-binding peptide
IMEYKFKIKPTKGILYLISIPELDQS

SEQ ID NO: 59817 - protein, 28 aa, Artificial Sequence
  Cyclic GFR-binding peptide
  MOD_RES (1)..(1): Xaa is C or S
XARVVMNEYKFKIVNSSDDLYLVSIPEL

SEQ ID NO: 59818 - protein, 36 aa, Artificial Sequence
  Cyclic GFR-binding peptide
  MOD_RES (30)..(31): Xaa is C or S
VVMNEYQKYIVNSSDDIYLVSIPSLKTPAXXPKPVY

SEQ ID NO: 59819 - protein, 37 aa, Artificial Sequence; identical to SEQ ID NO: 16896
  Cyclic GFR-binding peptide
  MOD_RES (2)..(4)..(36)..(37): Xaa is C or S

SEQ ID NO: 59820 - protein, 39 aa, Artificial Sequence; identical to SEQ ID NO: 16898
  Cyclic GFR-binding peptide
  MOD_RES (1)..(3)..(35)..(36): Xaa is C or S

SEQ ID NO: 59821 - protein, 23 aa, Artificial Sequence
  Cyclic GFR-binding peptide
VMNEYKFKIVNSSDDLYLVSIPE

SEQ ID NO: 59822 - protein, 29 aa, Artificial Sequence
  Cyclic GFR-binding peptide
  MOD_RES (28)..(29): Xaa is C or S
MDYHYKLVVNNAADKYLISIPSLRAPVXX

SEQ ID NO: 59823 - protein, 35 aa, Artificial Sequence
  Cyclic GFR-binding peptide
  MOD_RES (29)..(30): Xaa is C or S
AMGRYKKLYTVVGKDFYLISIANLKTPVXXAKSAK

SEQ ID NO: 59824 - protein, 25 aa, Artificial Sequence
  Cyclic GFR-binding peptide
MNEYQKYIVNSSDDIYLVSIPSLKT

SEQ ID NO: 59825 - protein, 29 aa, Artificial Sequence
  Cyclic GFR-binding peptide
  MOD_RES (26)..(27): Xaa is C or S
EYQKYVKPKRGVIYLISIPSLAQPVXXPA

SEQ ID NO: 59826 - protein, 28 aa, Artificial Sequence
  Cyclic GFR-binding peptide
EVVMDEYKFKVVKENEDLYLMSIPELET

SEQ ID NO: 59827 - protein, 37 aa, Artificial Sequence; identical to SEQ ID NO: 16901
  Cyclic GFR-binding peptide
  MOD_RES (2)..(34)..(35): Xaa is C or S

SEQ ID NO: 59828 - protein, 40 aa, Artificial Sequence; identical to SEQ ID NO: 16904
  Cyclic GFR-binding peptide
  MOD_RES (2)..(4)..(37)..(38): Xaa is C or S

SEQ ID NO: 59829 - protein, 33 aa, Artificial Sequence
  Cyclic GFR-binding peptide
  MOD_RES (29)..(29): Xaa is C or S
VMNEYKFKIVNSSDDLYLVSIPELKTPAXTPKT

SEQ ID NO: 59830 - protein, 37 aa, Artificial Sequence; identical to SEQ ID NO: 16906
  Cyclic GFR-binding peptide
  MOD_RES (31)..(32): Xaa is C or S

SEQ ID NO: 59831 - protein, 31 aa, Artificial Sequence
  Cyclic GFR-binding peptide
  MOD_RES (28)..(29): Xaa is C or S
MEEYQKYVVKDYEDIYLMSIPSLETPVXXAK

SEQ ID NO: 59832 - protein, 28 aa, Artificial Sequence
  Cyclic GFR-binding peptide
EVVMDRYKKLVVNNAADFYLISIANLRA

SEQ ID NO: 59833 - protein, 35 aa, Artificial Sequence
  Cyclic GFR-binding peptide
  MOD_RES (30)..(31): Xaa is C or S
VAMGEYQKYYTVVGKDIYLISIPSLKTPVXXAKSA

SEQ ID NO: 59834 - protein, 32 aa, Artificial Sequence; identical to SEQ ID NO: 16913
  Cyclic GFR-binding peptide
  MOD_RES (1)..(32): Xaa is C or S

SEQ ID NO: 59835 - protein, 27 aa, Artificial Sequence
  Cyclic GFR-binding peptide
MDYHYKLVVNNAADKYLISIPSLRAPV

SEQ ID NO: 59836 - protein, 38 aa, Artificial Sequence; identical to SEQ ID NO: 16914
  Cyclic GFR-binding peptide
  MOD_RES (32)..(33): Xaa is C or S

SEQ ID NO: 59837 - protein, 30 aa, Artificial Sequence
  Cyclic GFR-binding peptide
  MOD_RES (27)..(27): Xaa is C or S
NEYQKYIVNSSDDIYLVSIPSLKTPAXTPK

SEQ ID NO: 59838 - protein, 33 aa, Artificial Sequence; identical to SEQ ID NO: 16916
  Cyclic GFR-binding peptide
  MOD_RES (2)..(2): Xaa is C or S

SEQ ID NO: 59839 - protein, 31 aa, Artificial Sequence
  Cyclic GFR-binding peptide
  MOD_RES (2)..(2): Xaa is C or S
GXAKVVMNEYKFKIVNNSSDLYLVSIPELKT

SEQ ID NO: 59840 - protein, 34 aa, Artificial Sequence; identical to SEQ ID NO: 16922
  Cyclic GFR-binding peptide
  MOD_RES (32)..(32): Xaa is C or S

SEQ ID NO: 59841 - protein, 27 aa, Artificial Sequence
  Cyclic GFR-binding peptide
  MOD_RES (2)..(2): Xaa is C or S
KXSRVIMEYKFKVKPKRGVLYLISIPE

SEQ ID NO: 59842 - protein, 26 aa, Artificial Sequence
  Cyclic GFR-binding peptide
DEYKFKVVKENEDLYLMSIPELETPV

SEQ ID NO: 59843 - protein, 34 aa, Artificial Sequence
  Cyclic GFR-binding peptide
  MOD_RES (28)..(29): Xaa is C or S
MNEYKFKIVNSSDDLYLVSIPELQTPAXXPKPVT

SEQ ID NO: 59844 - protein, 29 aa, Artificial Sequence
  Cyclic GFR-binding peptide
  MOD_RES (27)..(28): Xaa is C or S
DEYQKYVVKENEDIYLMSIPSLETPVXXA

SEQ ID NO: 59845 - protein, 28 aa, Artificial Sequence
  Cyclic GFR-binding peptide
  MOD_RES (27)..(28): Xaa is C or S
DRYKKLVVNNAADFYLISIANLRAPVXX

SEQ ID NO: 59846 - protein, 27 aa, Artificial Sequence
  Cyclic GFR-binding peptide
VIMEYKFKVKPKRGVLYLISIPELAQP

SEQ ID NO: 59847 - protein, 32 aa, Artificial Sequence; identical to SEQ ID NO: 16930
  Cyclic GFR-binding peptide
  MOD_RES (2)..(2): Xaa is C or S

SEQ ID NO: 59848 - protein, 37 aa, Artificial Sequence; identical to SEQ ID NO: 16931
  Cyclic GFR-binding peptide
  MOD_RES (1)..(34)..(35): Xaa is C or S

SEQ ID NO: 59849 - protein, 26 aa, Artificial Sequence
  Cyclic GFR-binding peptide
GEEYQKYTPVGMDDIYLVSIPSLKTP

SEQ ID NO: 59850 - protein, 21 aa, Artificial Sequence
  Cyclic GFR-binding peptide
EYQKYIVNSSDDIYLVSIPSL

SEQ ID NO: 59851 - protein, 21 aa, Artificial Sequence
  Cyclic GFR-binding peptide
EYQKYTPVGMDDIYLVSIPSL

SEQ ID NO: 59852 - protein, 35 aa, Artificial Sequence; identical to SEQ ID NO: 16932
  Cyclic GFR-binding peptide
  MOD_RES (2)..(34)..(35): Xaa is C or S

SEQ ID NO: 59853 - protein, 31 aa, Artificial Sequence
  Cyclic GFR-binding peptide
  MOD_RES (29)..(30): Xaa is C or S
AMGYHYKLYTVVGKDKYLISIPSLKTPVXXA

SEQ ID NO: 59854 - protein, 31 aa, Artificial Sequence
  Cyclic GFR-binding peptide
  MOD_RES (28)..(29): Xaa is C or S
IMEYQKYIKPTKGIIYLISIPSLDQSVXXPS

SEQ ID NO: 59855 - protein, 28 aa, Artificial Sequence
  Cyclic GFR-binding peptide
  MOD_RES (26)..(27): Xaa is C or S
EYKFKVVKDYEDLYLMSIPELETPVXXA

SEQ ID NO: 59856 - protein, 37 aa, Artificial Sequence; identical to SEQ ID NO: 16938
  Cyclic GFR-binding peptide
  MOD_RES (2)..(4)..(36)..(37): Xaa is C or S

SEQ ID NO: 59857 - protein, 35 aa, Artificial Sequence; identical to SEQ ID NO: 16939
  Cyclic GFR-binding peptide
  MOD_RES (1)..(3)..(35): Xaa is C or S

SEQ ID NO: 59858 - protein, 37 aa, Artificial Sequence; identical to SEQ ID NO: 16941
  Cyclic GFR-binding peptide
  MOD_RES (2)..(33)..(34): Xaa is C or S

SEQ ID NO: 59859 - protein, 34 aa, Artificial Sequence; identical to SEQ ID NO: 16943
  Cyclic GFR-binding peptide
  MOD_RES (1)..(3)..(34): Xaa is C or S

SEQ ID NO: 59860 - protein, 36 aa, Artificial Sequence
  Cyclic GFR-binding peptide
  MOD_RES (31)..(32): Xaa is C or S
VSMGEEYKFKTPVGMDDLYLVSIPELKTPVXXAKGV

SEQ ID NO: 59861 - protein, 28 aa, Artificial Sequence
  Cyclic GFR-binding peptide
  MOD_RES (2)..(2): Xaa is C or S
GXAKVVMNEYQKYIVNNSSDIYLVSIPS

SEQ ID NO: 59862 - protein, 36 aa, Artificial Sequence
  Cyclic GFR-binding peptide
  MOD_RES (30)..(31): Xaa is C or S
VVMDEYKFKVVNNAADLYLISIPELRAPVXXSAPAA

SEQ ID NO: 59863 - protein, 31 aa, Artificial Sequence
  Cyclic GFR-binding peptide
  MOD_RES (2)..(4): Xaa is C or S
SXKXSKVVMEYQKYVKPTRGVIYLISIPSLD

SEQ ID NO: 59864 - protein, 32 aa, Artificial Sequence
  Cyclic GFR-binding peptide
  MOD_RES (28)..(29): Xaa is C or S
MNEYKFKIVNNSSDLYLVSIPELKTPAXXAKP

SEQ ID NO: 59865 - protein, 28 aa, Artificial Sequence
  Cyclic GFR-binding peptide
VMDYHYKLVVNNAADKYLISIPSLRAPV

SEQ ID NO: 59866 - protein, 26 aa, Artificial Sequence
  Cyclic GFR-binding peptide
RVVMNEYQKYIVNSSDDIYLVSIPSL

SEQ ID NO: 59867 - protein, 34 aa, Artificial Sequence; identical to SEQ ID NO: 16954
  Cyclic GFR-binding peptide
  MOD_RES (1)..(3)..(34): Xaa is C or S

SEQ ID NO: 59868 - protein, 29 aa, Artificial Sequence
  Cyclic GFR-binding peptide
  MOD_RES (26)..(27): Xaa is C or S
EYQKYIVNSSDDIYLVSIPSLQTPAXXPK

SEQ ID NO: 59869 - protein, 30 aa, Artificial Sequence
  Cyclic GFR-binding peptide
  MOD_RES (2)..(4): Xaa is C or S
HXGXAKVVMNEYQKYIVNNSSDIYLVSIPS

SEQ ID NO: 59870 - protein, 24 aa, Artificial Sequence
  Cyclic GFR-binding peptide
VIMEYQKYIKPTKGIIYLISIPSL

SEQ ID NO: 59871 - protein, 32 aa, Artificial Sequence
  Cyclic GFR-binding peptide
  MOD_RES (29)..(30): Xaa is C or S
VMNEYKFKIVNSSDDLYLVSIPELQTPAXXPK

SEQ ID NO: 59872 - protein, 29 aa, Artificial Sequence
  Cyclic GFR-binding peptide
SKVIMEYKFKIKPTKGILYLISIPELDQS

SEQ ID NO: 59873 - protein, 33 aa, Artificial Sequence
  Cyclic GFR-binding peptide
  MOD_RES (30)..(31): Xaa is C or S
RVIMEYQKYVKPKRGVIYLISIPSLAQPVXXPA

SEQ ID NO: 59874 - protein, 31 aa, Artificial Sequence; identical to SEQ ID NO: 16959
  Cyclic GFR-binding peptide
  MOD_RES (1)..(1): Xaa is C or S

SEQ ID NO: 59875 - protein, 33 aa, Artificial Sequence; identical to SEQ ID NO: 16960
  Cyclic GFR-binding peptide
  MOD_RES (1)..(3): Xaa is C or S

SEQ ID NO: 59876 - protein, 32 aa, Artificial Sequence
  Cyclic GFR-binding peptide
  MOD_RES (26)..(27): Xaa is C or S
RYKKLYTVVGKDFYLISIANLKTPVXXAKSAK

SEQ ID NO: 59877 - protein, 31 aa, Artificial Sequence
  Cyclic GFR-binding peptide
  MOD_RES (28)..(29): Xaa is C or S
MNEYKFKIVNSSDDLYLVSIPELKTPAXXPK

SEQ ID NO: 59878 - protein, 32 aa, Artificial Sequence
  Cyclic GFR-binding peptide
  MOD_RES (1)..(3): Xaa is C or S
XGXSRVVMNEYQKYIVNSSDDIYLVSIPSLKT

SEQ ID NO: 59879 - protein, 30 aa, Artificial Sequence
  Cyclic GFR-binding peptide
  MOD_RES (28)..(29): Xaa is C or S
MNEYQKYIVNNSSDIYLVSIPSLKTPAXXA

SEQ ID NO: 59880 - protein, 33 aa, Artificial Sequence
  Cyclic GFR-binding peptide
  MOD_RES (27)..(28): Xaa is C or S
MEYKFKVKPKRGVLYLISIPELAQPVXXPAASA

SEQ ID NO: 59881 - protein, 24 aa, Artificial Sequence
  Cyclic GFR-binding peptide
VMEYKFKVKPTRGVLYLISIPELD

SEQ ID NO: 59882 - protein, 33 aa, Artificial Sequence; identical to SEQ ID NO: 16969
  Cyclic GFR-binding peptide
  MOD_RES (1)..(3): Xaa is C or S

SEQ ID NO: 59883 - protein, 40 aa, Artificial Sequence; identical to SEQ ID NO: 16970
  Cyclic GFR-binding peptide
  MOD_RES (2)..(4)..(36)..(37): Xaa is C or S

SEQ ID NO: 59884 - protein, 33 aa, Artificial Sequence; identical to SEQ ID NO: 16971
  Cyclic GFR-binding peptide
  MOD_RES (32)..(32): Xaa is C or S

SEQ ID NO: 59885 - protein, 31 aa, Artificial Sequence
  Cyclic GFR-binding peptide
  MOD_RES (2)..(2): Xaa is C or S
GXAEVVMDYHYKLVVNNAADKYLISIPSLRA

SEQ ID NO: 59886 - protein, 30 aa, Artificial Sequence
  Cyclic GFR-binding peptide
  MOD_RES (2)..(4): Xaa is C or S
HXGXAKVVMNEYKFKIVNNSSDLYLVSIPE

SEQ ID NO: 59887 - protein, 27 aa, Artificial Sequence
  Cyclic GFR-binding peptide
SVAMGRYKKLYTVVGKDFYLISIANLK

SEQ ID NO: 59888 - protein, 39 aa, Artificial Sequence; identical to SEQ ID NO: 16976
  Cyclic GFR-binding peptide
  MOD_RES (2)..(34): Xaa is C or S

SEQ ID NO: 59889 - protein, 28 aa, Artificial Sequence
  Cyclic GFR-binding peptide
VIMEYKFKVKPKRGVLYLISIPELAQPV

SEQ ID NO: 59890 - protein, 33 aa, Artificial Sequence
  Cyclic GFR-binding peptide
  MOD_RES (2)..(4): Xaa is C or S
RXGXESVAMGRYKKLYTVVGKDFYLISIANLKT

SEQ ID NO: 59891 - protein, 31 aa, Artificial Sequence
  Cyclic GFR-binding peptide
  MOD_RES (2)..(4): Xaa is C or S
RXGXAEVVMDRYKKLVVNNAADFYLISIANL

SEQ ID NO: 59892 - protein, 24 aa, Artificial Sequence
  Cyclic GFR-binding peptide
MGEEYQKYTPVGMDDIYLVSIPSL

SEQ ID NO: 59893 - protein, 32 aa, Artificial Sequence
  Cyclic GFR-binding peptide
  MOD_RES (1)..(3): Xaa is C or S
XKXSKVIMEYQKYIKPTKGIIYLISIPSLDQS

SEQ ID NO: 59894 - protein, 30 aa, Artificial Sequence
  Cyclic GFR-binding peptide
  MOD_RES (26)..(27): Xaa is C or S
EYQKYIVNSSDDIYLVSIPSLQTPAXXPKP

SEQ ID NO: 59895 - protein, 25 aa, Artificial Sequence
  Cyclic GFR-binding peptide
VVMNEYQKYIVNNSSDIYLVSIPSL

SEQ ID NO: 59896 - protein, 29 aa, Artificial Sequence
  Cyclic GFR-binding peptide
  MOD_RES (1)..(1): Xaa is C or S
XARVVMNEYKFKIVNSSDDLYLVSIPELQ

SEQ ID NO: 59897 - protein, 29 aa, Artificial Sequence
  Cyclic GFR-binding peptide
EAVSMGEEYQKYTPVGMDDIYLVSIPSLK

SEQ ID NO: 59898 - protein, 29 aa, Artificial Sequence
  Cyclic GFR-binding peptide
  MOD_RES (1)..(3): Xaa is C or S
XGXARVVMNEYKFKIVNSSDDLYLVSIPE

SEQ ID NO: 59899 - protein, 22 aa, Artificial Sequence
  Cyclic GFR-binding peptide
EEYKFKVVKDYEDLYLMSIPEL

SEQ ID NO: 59900 - protein, 32 aa, Artificial Sequence
  Cyclic GFR-binding peptide
  MOD_RES (30)..(31): Xaa is C or S
VVMNEYQKYIVNNSSDIYLVSIPSLKTPAXXA

SEQ ID NO: 59901 - protein, 22 aa, Artificial Sequence
  Cyclic GFR-binding peptide
EYQKYTPVGMDDIYLVSIPSLK

SEQ ID NO: 59902 - protein, 37 aa, Artificial Sequence; identical to SEQ ID NO: 16985
  Cyclic GFR-binding peptide
  MOD_RES (1)..(3)..(34)..(35): Xaa is C or S

SEQ ID NO: 59903 - protein, 31 aa, Artificial Sequence
  Cyclic GFR-binding peptide
  MOD_RES (2)..(2): Xaa is C or S
GXGEVVMDEYQKYVVKENEDIYLMSIPSLET

SEQ ID NO: 59904 - protein, 30 aa, Artificial Sequence
  Cyclic GFR-binding peptide
  MOD_RES (1)..(3): Xaa is C or S
XGXGEVVMEEYQKYVVKDYEDIYLMSIPSL

SEQ ID NO: 59905 - protein, 38 aa, Artificial Sequence; identical to SEQ ID NO: 16990
  Cyclic GFR-binding peptide
  MOD_RES (32)..(32): Xaa is C or S

SEQ ID NO: 59906 - protein, 33 aa, Artificial Sequence; identical to SEQ ID NO: 16992
  Cyclic GFR-binding peptide
  MOD_RES (1)..(32)..(33): Xaa is C or S

SEQ ID NO: 59907 - protein, 21 aa, Artificial Sequence
  Cyclic GFR-binding peptide
EYQKYVVKENEDIYLMSIPSL

SEQ ID NO: 59908 - protein, 26 aa, Artificial Sequence
  Cyclic GFR-binding peptide
  MOD_RES (26)..(26): Xaa is C or S
EYQKYIVNSSDDIYLVSIPSLKTPAX

SEQ ID NO: 59909 - protein, 32 aa, Artificial Sequence
  Cyclic GFR-binding peptide
  MOD_RES (29)..(29): Xaa is C or S
VMNEYQKYIVNSSDDIYLVSIPSLKTPAXTPK

SEQ ID NO: 59910 - protein, 35 aa, Artificial Sequence; identical to SEQ ID NO: 16998
  Cyclic GFR-binding peptide
  MOD_RES (2)..(33)..(34): Xaa is C or S

SEQ ID NO: 59911 - protein, 31 aa, Artificial Sequence
  Cyclic GFR-binding peptide
  MOD_RES (2)..(2): Xaa is C or S
GXARVVMNEYQKYIVNSSDDIYLVSIPSLQT

SEQ ID NO: 59912 - protein, 31 aa, Artificial Sequence
  Cyclic GFR-binding peptide
  MOD_RES (26)..(27): Xaa is C or S
EYKFKVVNNAADLYLISIPELRAPVXXSAPA

SEQ ID NO: 59913 - protein, 38 aa, Artificial Sequence; identical to SEQ ID NO: 17001
  Cyclic GFR-binding peptide
  MOD_RES (2)..(34)..(35): Xaa is C or S

SEQ ID NO: 59914 - protein, 30 aa, Artificial Sequence
  Cyclic GFR-binding peptide
  MOD_RES (29)..(30): Xaa is C or S
VMEEYKFKVVKDYEDLYLMSIPELETPVXX

SEQ ID NO: 59915 - protein, 30 aa, Artificial Sequence
  Cyclic GFR-binding peptide
  MOD_RES (29)..(30): Xaa is C or S
VVMEYQKYVKPTRGVIYLISIPSLDQPVXX

SEQ ID NO: 59916 - protein, 38 aa, Artificial Sequence; identical to SEQ ID NO: 17003
  Cyclic GFR-binding peptide
  MOD_RES (32)..(33): Xaa is C or S

SEQ ID NO: 59917 - protein, 32 aa, Artificial Sequence; identical to SEQ ID NO: 17005
  Cyclic GFR-binding peptide
  MOD_RES (1)..(1): Xaa is C or S

SEQ ID NO: 59918 - protein, 31 aa, Artificial Sequence
  Cyclic GFR-binding peptide
  MOD_RES (30)..(31): Xaa is C or S
VVMDEYKFKVVKENEDLYLMSIPELETPVXX

SEQ ID NO: 59919 - protein, 34 aa, Artificial Sequence
  Cyclic GFR-binding peptide
  MOD_RES (1)..(3): Xaa is C or S
XGXEAVSMGEEYKFKTPVGMDDLYLVSIPELKTP

SEQ ID NO: 59920 - protein, 35 aa, Artificial Sequence; identical to SEQ ID NO: 17008
  Cyclic GFR-binding peptide
  MOD_RES (32)..(32): Xaa is C or S

SEQ ID NO: 59921 - protein, 31 aa, Artificial Sequence
  Cyclic GFR-binding peptide
  MOD_RES (28)..(29): Xaa is C or S
MGRYKKLYTVVGKDFYLISIANLKTPVXXAK

SEQ ID NO: 59922 - protein, 38 aa, Artificial Sequence; identical to SEQ ID NO: 17009
  Cyclic GFR-binding peptide
  MOD_RES (2)..(33)..(34): Xaa is C or S

SEQ ID NO: 59923 - protein, 28 aa, Artificial Sequence
  Cyclic GFR-binding peptide
ESVAMGEYQKYYTVVGKDIYLISIPSLK

SEQ ID NO: 59924 - protein, 36 aa, Artificial Sequence; identical to SEQ ID NO: 17013
  Cyclic GFR-binding peptide
  MOD_RES (32)..(33): Xaa is C or S

SEQ ID NO: 59925 - protein, 29 aa, Artificial Sequence
  Cyclic GFR-binding peptide
VVMNEYKFKIVNSSDDLYLVSIPELKTPA

SEQ ID NO: 59926 - protein, 33 aa, Artificial Sequence
  Cyclic GFR-binding peptide
  MOD_RES (27)..(28): Xaa is C or S
EEYKFKTPVGMDDLYLVSIPELKTPVXXAKGVK

SEQ ID NO: 59927 - protein, 38 aa, Artificial Sequence; identical to SEQ ID NO: 17014
  Cyclic GFR-binding peptide
  MOD_RES (1)..(3)..(34)..(35): Xaa is C or S

SEQ ID NO: 59928 - protein, 29 aa, Artificial Sequence
  Cyclic GFR-binding peptide
  MOD_RES (29)..(29): Xaa is C or S
VMDRYKKLVVNNAADFYLISIANLRAPVX

SEQ ID NO: 59929 - protein, 31 aa, Artificial Sequence
  Cyclic GFR-binding peptide
  MOD_RES (29)..(30): Xaa is C or S
VMDEYKFKVVNNAADLYLISIPELRAPVXXS

SEQ ID NO: 59930 - protein, 29 aa, Artificial Sequence
  Cyclic GFR-binding peptide
SRVIMEYKFKVKPKRGVLYLISIPELAQP

SEQ ID NO: 59931 - protein, 33 aa, Artificial Sequence
  Cyclic GFR-binding peptide
  MOD_RES (28)..(29): Xaa is C or S
IMEYQKYVKPKRGVIYLISIPSLAQPVXXPAAS

SEQ ID NO: 59932 - protein, 28 aa, Artificial Sequence
  Cyclic GFR-binding peptide
  MOD_RES (1)..(3): Xaa is C or S
XKXSKVIMEYKFKIKPTKGILYLISIPE

SEQ ID NO: 59933 - protein, 32 aa, Artificial Sequence
  Cyclic GFR-binding peptide
  MOD_RES (30)..(31): Xaa is C or S
RVIMEYQKYVKPKRGVIYLISIPSLAQPVXXP

SEQ ID NO: 59934 - protein, 24 aa, Artificial Sequence
  Cyclic GFR-binding peptide
MNEYQKYIVNSSDDIYLVSIPSLK

SEQ ID NO: 59935 - protein, 21 aa, Artificial Sequence
  Cyclic GFR-binding peptide
MEYQKYVKPTRGVIYLISIPS

SEQ ID NO: 59936 - protein, 39 aa, Artificial Sequence; identical to SEQ ID NO: 17024
  Cyclic GFR-binding peptide
  MOD_RES (2)..(34)..(35): Xaa is C or S

SEQ ID NO: 59937 - protein, 27 aa, Artificial Sequence
  Cyclic GFR-binding peptide
  MOD_RES (27)..(27): Xaa is C or S
DEYKFKVVKENEDLYLMSIPELETPVX

SEQ ID NO: 59938 - protein, 31 aa, Artificial Sequence
  Cyclic GFR-binding peptide
  MOD_RES (1)..(1): Xaa is C or S
XARVVMNEYKFKIVNSSDDLYLVSIPELQTP

SEQ ID NO: 59939 - protein, 39 aa, Artificial Sequence; identical to SEQ ID NO: 17029
  Cyclic GFR-binding peptide
  MOD_RES (2)..(4)..(35)..(36): Xaa is C or S

SEQ ID NO: 59940 - protein, 34 aa, Artificial Sequence
  Cyclic GFR-binding peptide
  MOD_RES (30)..(31): Xaa is C or S
VVMNEYKFKIVNNSSDLYLVSIPELKTPAXXAKP

SEQ ID NO: 59941 - protein, 27 aa, Artificial Sequence
  Cyclic GFR-binding peptide
VVMNEYQKYIVNNSSDIYLVSIPSLKT

SEQ ID NO: 59942 - protein, 40 aa, Artificial Sequence; identical to SEQ ID NO: 17031
  Cyclic GFR-binding peptide
  MOD_RES (1)..(34)..(35): Xaa is C or S

SEQ ID NO: 59943 - protein, 34 aa, Artificial Sequence
  Cyclic GFR-binding peptide
  MOD_RES (30)..(30): Xaa is C or S
VVMNEYQKYIVNSSDDIYLVSIPSLKTPAXTPKT

SEQ ID NO: 59944 - protein, 24 aa, Artificial Sequence
  Cyclic GFR-binding peptide
EYKFKVKPKRGVLYLISIPELAQP

SEQ ID NO: 59945 - protein, 32 aa, Artificial Sequence
  Cyclic GFR-binding peptide
  MOD_RES (27)..(28): Xaa is C or S
NEYQKYIVNSSDDIYLVSIPSLKTPAXXPKPV

SEQ ID NO: 59946 - protein, 38 aa, Artificial Sequence; identical to SEQ ID NO: 17034
  Cyclic GFR-binding peptide
  MOD_RES (2)..(33)..(34): Xaa is C or S

SEQ ID NO: 59947 - protein, 37 aa, Artificial Sequence; identical to SEQ ID NO: 17035
  Cyclic GFR-binding peptide
  MOD_RES (31)..(32): Xaa is C or S

SEQ ID NO: 59948 - protein, 28 aa, Artificial Sequence
  Cyclic GFR-binding peptide
  MOD_RES (1)..(1): Xaa is C or S
XESVAMGRYKKLYTVVGKDFYLISIANL

SEQ ID NO: 59949 - protein, 31 aa, Artificial Sequence; identical to SEQ ID NO: 17042
  Cyclic GFR-binding peptide

SEQ ID NO: 59950 - protein, 38 aa, Artificial Sequence; identical to SEQ ID NO: 17041
  Cyclic GFR-binding peptide
  MOD_RES (2)..(34)..(35): Xaa is C or S

SEQ ID NO: 59951 - protein, 25 aa, Artificial Sequence
  Cyclic GFR-binding peptide
EEYKFKVVKDYEDLYLMSIPELETP

SEQ ID NO: 59952 - protein, 40 aa, Artificial Sequence; identical to SEQ ID NO: 17044
  Cyclic GFR-binding peptide
  MOD_RES (2)..(4)..(35)..(36): Xaa is C or S

SEQ ID NO: 59953 - protein, 27 aa, Artificial Sequence
  Cyclic GFR-binding peptide
  MOD_RES (27)..(27): Xaa is C or S
NEYQKYIVNSSDDIYLVSIPSLQTPAX

SEQ ID NO: 59954 - protein, 37 aa, Artificial Sequence; identical to SEQ ID NO: 17045
  Cyclic GFR-binding peptide
  MOD_RES (32)..(33): Xaa is C or S

SEQ ID NO: 59955 - protein, 30 aa, Artificial Sequence
  Cyclic GFR-binding peptide
  MOD_RES (30)..(30): Xaa is C or S
VVMEEYQKYVVKDYEDIYLMSIPSLETPVX

SEQ ID NO: 59956 - protein, 31 aa, Artificial Sequence; identical to SEQ ID NO: 17047
  Cyclic GFR-binding peptide

SEQ ID NO: 59957 - protein, 38 aa, Artificial Sequence; identical to SEQ ID NO: 17049
  Cyclic GFR-binding peptide
  MOD_RES (32)..(33): Xaa is C or S

SEQ ID NO: 59958 - protein, 24 aa, Artificial Sequence
  Cyclic GFR-binding peptide
RYKKLYTVVGKDFYLISIANLKTP

SEQ ID NO: 59959 - protein, 38 aa, Artificial Sequence; identical to SEQ ID NO: 17052
  Cyclic GFR-binding peptide
  MOD_RES (1)..(3)..(35)..(36): Xaa is C or S

SEQ ID NO: 59960 - protein, 33 aa, Artificial Sequence
  Cyclic GFR-binding peptide
  MOD_RES (27)..(28): Xaa is C or S
GEYQKYYTVVGKDIYLISIPSLKTPVXXAKSAK

SEQ ID NO: 59961 - protein, 37 aa, Artificial Sequence; identical to SEQ ID NO: 17053
  Cyclic GFR-binding peptide
  MOD_RES (1)..(3)..(35)..(36): Xaa is C or S

SEQ ID NO: 59962 - protein, 40 aa, Artificial Sequence; identical to SEQ ID NO: 17055
  Cyclic GFR-binding peptide
  MOD_RES (1)..(3)..(35)..(36): Xaa is C or S

SEQ ID NO: 59963 - protein, 34 aa, Artificial Sequence
  Cyclic GFR-binding peptide
  MOD_RES (2)..(4): Xaa is C or S
RXGXAEVVMDYHYKLVVNNAADKYLISIPSLRAP

SEQ ID NO: 59964 - protein, 27 aa, Artificial Sequence
  Cyclic GFR-binding peptide
  MOD_RES (26)..(27): Xaa is C or S
RYKKLVVNNAADFYLISIANLRAPVXX

SEQ ID NO: 59965 - protein, 42 aa, Artificial Sequence; identical to SEQ ID NO: 17056
  Cyclic GFR-binding peptide
  MOD_RES (2)..(4)..(36)..(37): Xaa is C or S

SEQ ID NO: 59966 - protein, 31 aa, Artificial Sequence; identical to SEQ ID NO: 17057
  Cyclic GFR-binding peptide
  MOD_RES (31)..(31): Xaa is C or S

SEQ ID NO: 59967 - protein, 27 aa, Artificial Sequence
  Cyclic GFR-binding peptide
  MOD_RES (26)..(27): Xaa is C or S
YHYKLVVNNAADKYLISIPSLRAPVXX

SEQ ID NO: 59968 - protein, 28 aa, Artificial Sequence
  Cyclic GFR-binding peptide
VVMNEYKFKIVNSSDDLYLVSIPELQTP

SEQ ID NO: 59969 - protein, 22 aa, Artificial Sequence
  Cyclic GFR-binding peptide
MGEYQKYYTVVGKDIYLISIPS

SEQ ID NO: 59970 - protein, 30 aa, Artificial Sequence
  Cyclic GFR-binding peptide
  MOD_RES (1)..(1): Xaa is C or S
XESVAMGYHYKLYTVVGKDKYLISIPSLKT

SEQ ID NO: 59971 - protein, 36 aa, Artificial Sequence; identical to SEQ ID NO: 17063
  Cyclic GFR-binding peptide
  MOD_RES (1)..(3)..(34)..(35): Xaa is C or S

SEQ ID NO: 59972 - protein, 30 aa, Artificial Sequence
  Cyclic GFR-binding peptide
AEVVMDYHYKLVVNNAADKYLISIPSLRAP

SEQ ID NO: 59973 - protein, 29 aa, Artificial Sequence
  Cyclic GFR-binding peptide
  MOD_RES (1)..(3): Xaa is C or S
XGXESVAMGRYKKLYTVVGKDFYLISIAN

SEQ ID NO: 59974 - protein, 28 aa, Artificial Sequence
  Cyclic GFR-binding peptide
SVAMGYHYKLYTVVGKDKYLISIPSLKT

SEQ ID NO: 59975 - protein, 40 aa, Artificial Sequence; identical to SEQ ID NO: 17070
  Cyclic GFR-binding peptide
  MOD_RES (1)..(3)..(36)..(37): Xaa is C or S

SEQ ID NO: 59976 - protein, 33 aa, Artificial Sequence; identical to SEQ ID NO: 17075
  Cyclic GFR-binding peptide
  MOD_RES (1)..(33): Xaa is C or S

SEQ ID NO: 59977 - protein, 34 aa, Artificial Sequence; identical to SEQ ID NO: 17076
  Cyclic GFR-binding peptide
  MOD_RES (2)..(4): Xaa is C or S

SEQ ID NO: 59978 - protein, 21 aa, Artificial Sequence
  Cyclic GFR-binding peptide
DEYKFKVVNNAADLYLISIPE

SEQ ID NO: 59979 - protein, 33 aa, Artificial Sequence
  Cyclic GFR-binding peptide
  MOD_RES (28)..(29): Xaa is C or S
GEEYQKYTPVGMDDIYLVSIPSLKTPVXXAKGV

SEQ ID NO: 59980 - protein, 29 aa, Artificial Sequence
  Cyclic GFR-binding peptide
VAMGYHYKLYTVVGKDKYLISIPSLKTPV

SEQ ID NO: 59981 - protein, 38 aa, Artificial Sequence; identical to SEQ ID NO: 17083
  Cyclic GFR-binding peptide
  MOD_RES (2)..(34): Xaa is C or S

SEQ ID NO: 59982 - protein, 35 aa, Artificial Sequence; identical to SEQ ID NO: 20692
  Cyclic GFR-binding peptide
  MOD_RES (2)..(4): Xaa is C or S

SEQ ID NO: 59983 - protein, 32 aa, Artificial Sequence
  Cyclic GFR-binding peptide
  MOD_RES (28)..(29): Xaa is C or S
GEEYQKYTPVGMDDIYLVSIPSLKTPVXXAKG

SEQ ID NO: 59984 - protein, 34 aa, Artificial Sequence; identical to SEQ ID NO: 17088
  Cyclic GFR-binding peptide
  MOD_RES (1)..(33)..(34): Xaa is C or S

SEQ ID NO: 59985 - protein, 34 aa, Artificial Sequence; identical to SEQ ID NO: 17091
  Cyclic GFR-binding peptide
  MOD_RES (32)..(33): Xaa is C or S

SEQ ID NO: 59986 - protein, 37 aa, Artificial Sequence; identical to SEQ ID NO: 17093
  Cyclic GFR-binding peptide
  MOD_RES (31)..(32): Xaa is C or S

SEQ ID NO: 59987 - protein, 25 aa, Artificial Sequence
  Cyclic GFR-binding peptide
MGEEYKFKTPVGMDDLYLVSIPELK

SEQ ID NO: 59988 - protein, 30 aa, Artificial Sequence
  Cyclic GFR-binding peptide
  MOD_RES (29)..(30): Xaa is C or S
VMDEYQKYVVKENEDIYLMSIPSLETPVXX

SEQ ID NO: 59989 - protein, 24 aa, Artificial Sequence
  Cyclic GFR-binding peptide
EEYKFKTPVGMDDLYLVSIPELKT

SEQ ID NO: 59990 - protein, 28 aa, Artificial Sequence
  Cyclic GFR-binding peptide
  MOD_RES (27)..(28): Xaa is C or S
MEYQKYVKPKRGVIYLISIPSLAQPVXX

SEQ ID NO: 59991 - protein, 40 aa, Artificial Sequence; identical to SEQ ID NO: 17100
  Cyclic GFR-binding peptide
  MOD_RES (2)..(34)..(35): Xaa is C or S

SEQ ID NO: 59992 - protein, 29 aa, Artificial Sequence
  Cyclic GFR-binding peptide
  MOD_RES (27)..(27): Xaa is C or S
NEYQKYIVNSSDDIYLVSIPSLKTPAXTP

SEQ ID NO: 59993 - protein, 24 aa, Artificial Sequence
  Cyclic GFR-binding peptide
NEYQKYIVNSSDDIYLVSIPSLQT

SEQ ID NO: 59994 - protein, 34 aa, Artificial Sequence; identical to SEQ ID NO: 17103
  Cyclic GFR-binding peptide
  MOD_RES (1)..(33)..(34): Xaa is C or S

SEQ ID NO: 59995 - protein, 36 aa, Artificial Sequence
  Cyclic GFR-binding peptide
  MOD_RES (30)..(31): Xaa is C or S
KVIMEYKFKIKPTKGILYLISIPELDQSVXXPSASA

SEQ ID NO: 59996 - protein, 35 aa, Artificial Sequence; identical to SEQ ID NO: 17106
  Cyclic GFR-binding peptide
  MOD_RES (2)..(4): Xaa is C or S

SEQ ID NO: 59997 - protein, 35 aa, Artificial Sequence
  Cyclic GFR-binding peptide
  MOD_RES (29)..(30): Xaa is C or S
MGEEYQKYTPVGMDDIYLVSIPSLKTPVXXAKGVK

SEQ ID NO: 59998 - protein, 24 aa, Artificial Sequence
  Cyclic GFR-binding peptide
VIMEYKFKVKPKRGVLYLISIPEL

SEQ ID NO: 59999 - protein, 35 aa, Artificial Sequence; identical to SEQ ID NO: 17112
  Cyclic GFR-binding peptide
  MOD_RES (1)..(3)..(35): Xaa is C or S

SEQ ID NO: 60000 - protein, 28 aa, Artificial Sequence
  Cyclic GFR-binding peptide
  MOD_RES (2)..(2): Xaa is C or S
GXAEVVMDRYKKLVVNNAADFYLISIAN

SEQ ID NO: 60001 - protein, 26 aa, Artificial Sequence
  Cyclic GFR-binding peptide
KVVMNEYQKYIVNNSSDIYLVSIPSL

SEQ ID NO: 60002 - protein, 41 aa, Artificial Sequence; identical to SEQ ID NO: 17118
  Cyclic GFR-binding peptide
  MOD_RES (1)..(3)..(35)..(36): Xaa is C or S

SEQ ID NO: 60003 - protein, 27 aa, Artificial Sequence
  Cyclic GFR-binding peptide
RVVMNEYKFKIVNSSDDLYLVSIPELK

SEQ ID NO: 60004 - protein, 39 aa, Artificial Sequence; identical to SEQ ID NO: 17134
  Cyclic GFR-binding peptide
  MOD_RES (2)..(33)..(34): Xaa is C or S

SEQ ID NO: 60005 - protein, 32 aa, Artificial Sequence
  Cyclic GFR-binding peptide
  MOD_RES (29)..(30): Xaa is C or S
VIMEYQKYIKPTKGIIYLISIPSLDQSVXXPS

SEQ ID NO: 60006 - protein, 33 aa, Artificial Sequence
  Cyclic GFR-binding peptide
  MOD_RES (28)..(29): Xaa is C or S
MGEYQKYYTVVGKDIYLISIPSLKTPVXXAKSA

SEQ ID NO: 60007 - protein, 35 aa, Artificial Sequence
  Cyclic GFR-binding peptide
  MOD_RES (29)..(30): Xaa is C or S
VMDEYQKYVVKENEDIYLMSIPSLETPVXXAKPIK

SEQ ID NO: 60008 - protein, 30 aa, Artificial Sequence
  Cyclic GFR-binding peptide
  MOD_RES (29)..(30): Xaa is C or S
VMNEYQKYIVNNSSDIYLVSIPSLKTPAXX

SEQ ID NO: 60009 - protein, 36 aa, Artificial Sequence
  Cyclic GFR-binding peptide
  MOD_RES (30)..(30): Xaa is C or S
VVMNEYKFKIVNSSDDLYLVSIPELKTPAXTPKTVH

SEQ ID NO: 60010 - protein, 39 aa, Artificial Sequence; identical to SEQ ID NO: 17138
  Cyclic GFR-binding peptide
  MOD_RES (1)..(33)..(34): Xaa is C or S

SEQ ID NO: 60011 - protein, 28 aa, Artificial Sequence
  Cyclic GFR-binding peptide
SKVIMEYQKYIKPTKGIIYLISIPSLDQ

SEQ ID NO: 60012 - protein, 33 aa, Artificial Sequence; identical to SEQ ID NO: 17143
  Cyclic GFR-binding peptide
  MOD_RES (1)..(3): Xaa is C or S

SEQ ID NO: 60013 - protein, 29 aa, Artificial Sequence
  Cyclic GFR-binding peptide
EVVMEEYKFKVVKDYEDLYLMSIPELETP

SEQ ID NO: 60014 - protein, 28 aa, Artificial Sequence
  Cyclic GFR-binding peptide
  MOD_RES (2)..(2): Xaa is C or S
GXGEVVMEEYQKYVVKDYEDIYLMSIPS

SEQ ID NO: 60015 - protein, 32 aa, Artificial Sequence
  Cyclic GFR-binding peptide
  MOD_RES (1)..(3): Xaa is C or S
XGXAEVVMDYHYKLVVNNAADKYLISIPSLRA

SEQ ID NO: 60016 - protein, 35 aa, Artificial Sequence; identical to SEQ ID NO: 17152
  Cyclic GFR-binding peptide
  MOD_RES (32)..(33): Xaa is C or S

SEQ ID NO: 60017 - protein, 28 aa, Artificial Sequence
  Cyclic GFR-binding peptide
  MOD_RES (27)..(28): Xaa is C or S
NEYQKYIVNSSDDIYLVSIPSLKTPAXX

SEQ ID NO: 60018 - protein, 24 aa, Artificial Sequence
  Cyclic GFR-binding peptide
RYKKLVVNNAADFYLISIANLRAP

SEQ ID NO: 60019 - protein, 27 aa, Artificial Sequence
  Cyclic GFR-binding peptide
VVMEEYKFKVVKDYEDLYLMSIPELET

SEQ ID NO: 60020 - protein, 27 aa, Artificial Sequence
  Cyclic GFR-binding peptide
VVMNEYQKYIVNSSDDIYLVSIPSLKT

SEQ ID NO: 60021 - protein, 23 aa, Artificial Sequence
  Cyclic GFR-binding peptide
NEYQKYIVNNSSDIYLVSIPSLK

SEQ ID NO: 60022 - protein, 28 aa, Artificial Sequence
  Cyclic GFR-binding peptide
  MOD_RES (1)..(1): Xaa is C or S
XARVVMNEYQKYIVNSSDDIYLVSIPSL

SEQ ID NO: 60023 - protein, 33 aa, Artificial Sequence
  Cyclic GFR-binding peptide
  MOD_RES (30)..(31): Xaa is C or S
RVIMEYKFKVKPKRGVLYLISIPELAQPVXXPA

SEQ ID NO: 60024 - protein, 38 aa, Artificial Sequence; identical to SEQ ID NO: 17162
  Cyclic GFR-binding peptide
  MOD_RES (1)..(32)..(33): Xaa is C or S

SEQ ID NO: 60025 - protein, 32 aa, Artificial Sequence
  Cyclic GFR-binding peptide
  MOD_RES (2)..(4): Xaa is C or S
SXKXSRVIMEYKFKVKPKRGVLYLISIPELAQ

SEQ ID NO: 60026 - protein, 32 aa, Artificial Sequence
  Cyclic GFR-binding peptide
  MOD_RES (30)..(31): Xaa is C or S
KVIMEYKFKIKPTKGILYLISIPELDQSVXXP

SEQ ID NO: 60027 - protein, 33 aa, Artificial Sequence
  Cyclic GFR-binding peptide
  MOD_RES (27)..(28): Xaa is C or S
NEYQKYIVNNSSDIYLVSIPSLKTPAXXAKPVA

SEQ ID NO: 60028 - protein, 35 aa, Artificial Sequence
  Cyclic GFR-binding peptide
  MOD_RES (30)..(31): Xaa is C or S
VVMNEYKFKIVNSSDDLYLVSIPELKTPAXXPKPV

SEQ ID NO: 60029 - protein, 27 aa, Artificial Sequence
  Cyclic GFR-binding peptide
MNEYQKYIVNSSDDIYLVSIPSLKTPA

SEQ ID NO: 60030 - protein, 23 aa, Artificial Sequence
  Cyclic GFR-binding peptide
EYQKYIKPTKGIIYLISIPSLDQ

SEQ ID NO: 60031 - protein, 35 aa, Artificial Sequence; identical to SEQ ID NO: 17167
  Cyclic GFR-binding peptide
  MOD_RES (2)..(33)..(34): Xaa is C or S

SEQ ID NO: 60032 - protein, 29 aa, Artificial Sequence
  Cyclic GFR-binding peptide
VVMNEYQKYIVNSSDDIYLVSIPSLQTPA

SEQ ID NO: 60033 - protein, 31 aa, Artificial Sequence
  Cyclic GFR-binding peptide
  MOD_RES (1)..(1): Xaa is C or S
XSRVVMNEYKFKIVNSSDDLYLVSIPELKTP

SEQ ID NO: 60034 - protein, 32 aa, Artificial Sequence
  Cyclic GFR-binding peptide
  MOD_RES (2)..(4): Xaa is C or S
RXGXAEVVMDYHYKLVVNNAADKYLISIPSLR

SEQ ID NO: 60035 - protein, 30 aa, Artificial Sequence
  Cyclic GFR-binding peptide
  MOD_RES (27)..(28): Xaa is C or S
DEYKFKVVNNAADLYLISIPELRAPVXXSA

SEQ ID NO: 60036 - protein, 28 aa, Artificial Sequence
  Cyclic GFR-binding peptide
  MOD_RES (1)..(1): Xaa is C or S
XSRVIMEYKFKVKPKRGVLYLISIPELA

SEQ ID NO: 60037 - protein, 31 aa, Artificial Sequence
  Cyclic GFR-binding peptide
  MOD_RES (29)..(30): Xaa is C or S
VMNEYKFKIVNSSDDLYLVSIPELKTPAXXP

SEQ ID NO: 60038 - protein, 24 aa, Artificial Sequence
  Cyclic GFR-binding peptide
MGEYQKYYTVVGKDIYLISIPSLK

SEQ ID NO: 60039 - protein, 36 aa, Artificial Sequence; identical to SEQ ID NO: 17181
  Cyclic GFR-binding peptide
  MOD_RES (1)..(33): Xaa is C or S

SEQ ID NO: 60040 - protein, 38 aa, Artificial Sequence; identical to SEQ ID NO: 17185
  Cyclic GFR-binding peptide
  MOD_RES (1)..(33)..(34): Xaa is C or S

SEQ ID NO: 60041 - protein, 26 aa, Artificial Sequence
  Cyclic GFR-binding peptide
MNEYKFKIVNNSSDLYLVSIPELKTP

SEQ ID NO: 60042 - protein, 28 aa, Artificial Sequence
  Cyclic GFR-binding peptide
VVMDYHYKLVVNNAADKYLISIPSLRAP

SEQ ID NO: 60043 - protein, 30 aa, Artificial Sequence
  Cyclic GFR-binding peptide
  MOD_RES (1)..(3): Xaa is C or S
XGXAKVVMNEYQKYIVNNSSDIYLVSIPSL

SEQ ID NO: 60044 - protein, 27 aa, Artificial Sequence
  Cyclic GFR-binding peptide
  MOD_RES (26)..(27): Xaa is C or S
RYKKLYTVVGKDFYLISIANLKTPVXX

SEQ ID NO: 60045 - protein, 37 aa, Artificial Sequence; identical to SEQ ID NO: 17189
  Cyclic GFR-binding peptide
  MOD_RES (2)..(4)..(36)..(37): Xaa is C or S

SEQ ID NO: 60046 - protein, 34 aa, Artificial Sequence; identical to SEQ ID NO: 17191
  Cyclic GFR-binding peptide
  MOD_RES (32)..(33): Xaa is C or S

SEQ ID NO: 60047 - protein, 27 aa, Artificial Sequence
  Cyclic GFR-binding peptide
  MOD_RES (27)..(27): Xaa is C or S
DYHYKLVVNNAADKYLISIPSLRAPVX

SEQ ID NO: 60048 - protein, 36 aa, Artificial Sequence; identical to SEQ ID NO: 17192
  Cyclic GFR-binding peptide
  MOD_RES (1)..(32)..(33): Xaa is C or S

SEQ ID NO: 60049 - protein, 37 aa, Artificial Sequence; identical to SEQ ID NO: 17194
  Cyclic GFR-binding peptide
  MOD_RES (2)..(4)..(36)..(37): Xaa is C or S

SEQ ID NO: 60050 - protein, 25 aa, Artificial Sequence
  Cyclic GFR-binding peptide
MGYHYKLYTVVGKDKYLISIPSLKT

SEQ ID NO: 60051 - protein, 33 aa, Artificial Sequence
  Cyclic GFR-binding peptide
  MOD_RES (2)..(4): Xaa is C or S
RXGXEAVSMGEEYKFKTPVGMDDLYLVSIPELK

SEQ ID NO: 60052 - protein, 20 aa, Artificial Sequence
  Cyclic GFR-binding peptide
EYQKYVVKDYEDIYLMSIPS

SEQ ID NO: 60053 - protein, 37 aa, Artificial Sequence; identical to SEQ ID NO: 17197
  Cyclic GFR-binding peptide
  MOD_RES (33)..(34): Xaa is C or S

SEQ ID NO: 60054 - protein, 33 aa, Artificial Sequence
  Cyclic GFR-binding peptide
  MOD_RES (28)..(29): Xaa is C or S
GEEYKFKTPVGMDDLYLVSIPELKTPVXXAKGV

SEQ ID NO: 60055 - protein, 31 aa, Artificial Sequence
  Cyclic GFR-binding peptide
  MOD_RES (1)..(1): Xaa is C or S
XAEVVMDEYKFKVVNNAADLYLISIPELRAP

SEQ ID NO: 60056 - protein, 37 aa, Artificial Sequence; identical to SEQ ID NO: 17207
  Cyclic GFR-binding peptide
  MOD_RES (32)..(33): Xaa is C or S

SEQ ID NO: 60057 - protein, 28 aa, Artificial Sequence
  Cyclic GFR-binding peptide
  MOD_RES (26)..(27): Xaa is C or S
EYKFKIVNNSSDLYLVSIPELKTPAXXA

SEQ ID NO: 60058 - protein, 24 aa, Artificial Sequence
  Cyclic GFR-binding peptide
EYQKYIVNSSDDIYLVSIPSLQTP

SEQ ID NO: 60059 - protein, 26 aa, Artificial Sequence
  Cyclic GFR-binding peptide
VMDEYKFKVVNNAADLYLISIPELRA

SEQ ID NO: 60060 - protein, 29 aa, Artificial Sequence
  Cyclic GFR-binding peptide
  MOD_RES (1)..(1): Xaa is C or S
XGEVVMEEYKFKVVKDYEDLYLMSIPELE

SEQ ID NO: 60061 - protein, 43 aa, Artificial Sequence; identical to SEQ ID NO: 17212
  Cyclic GFR-binding peptide
  MOD_RES (2)..(4)..(37)..(38): Xaa is C or S

SEQ ID NO: 60062 - protein, 34 aa, Artificial Sequence
  Cyclic GFR-binding peptide
  MOD_RES (29)..(30): Xaa is C or S
AMGEYQKYYTVVGKDIYLISIPSLKTPVXXAKSA

SEQ ID NO: 60063 - protein, 21 aa, Artificial Sequence
  Cyclic GFR-binding peptide
GYHYKLYTVVGKDKYLISIPS

SEQ ID NO: 60064 - protein, 28 aa, Artificial Sequence
  Cyclic GFR-binding peptide
  MOD_RES (2)..(2): Xaa is C or S
KXSRVIMEYQKYVKPKRGVIYLISIPSL

SEQ ID NO: 60065 - protein, 32 aa, Artificial Sequence; identical to SEQ ID NO: 17217
  Cyclic GFR-binding peptide
  MOD_RES (1)..(1): Xaa is C or S

SEQ ID NO: 60066 - protein, 40 aa, Artificial Sequence; identical to SEQ ID NO: 17224
  Cyclic GFR-binding peptide
  MOD_RES (2)..(34)..(35): Xaa is C or S

SEQ ID NO: 60067 - protein, 32 aa, Artificial Sequence
  Cyclic GFR-binding peptide
  MOD_RES (2)..(4): Xaa is C or S
SXKXSRVIMEYQKYVKPKRGVIYLISIPSLAQ

SEQ ID NO: 60068 - protein, 20 aa, Artificial Sequence
  Cyclic GFR-binding peptide
RYKKLYTVVGKDFYLISIAN

SEQ ID NO: 60069 - protein, 35 aa, Artificial Sequence
  Cyclic GFR-binding peptide
  MOD_RES (30)..(31): Xaa is C or S
VAMGYHYKLYTVVGKDKYLISIPSLKTPVXXAKSA

SEQ ID NO: 60070 - protein, 30 aa, Artificial Sequence
  Cyclic GFR-binding peptide
  MOD_RES (2)..(2): Xaa is C or S
GXESVAMGEYQKYYTVVGKDIYLISIPSLK

SEQ ID NO: 60071 - protein, 33 aa, Artificial Sequence
  Cyclic GFR-binding peptide
  MOD_RES (2)..(4): Xaa is C or S
SXKXSKVVMEYQKYVKPTRGVIYLISIPSLDQP

SEQ ID NO: 60072 - protein, 26 aa, Artificial Sequence
  Cyclic GFR-binding peptide
VAMGYHYKLYTVVGKDKYLISIPSLK

SEQ ID NO: 60073 - protein, 31 aa, Artificial Sequence
  Cyclic GFR-binding peptide
  MOD_RES (1)..(3): Xaa is C or S
XGXESVAMGRYKKLYTVVGKDFYLISIANLK

SEQ ID NO: 60074 - protein, 34 aa, Artificial Sequence; identical to SEQ ID NO: 17229
  Cyclic GFR-binding peptide
  MOD_RES (2)..(4): Xaa is C or S

SEQ ID NO: 60075 - protein, 27 aa, Artificial Sequence
  Cyclic GFR-binding peptide
  MOD_RES (26)..(27): Xaa is C or S
EYQKYVVKDYEDIYLMSIPSLETPVXX

SEQ ID NO: 60076 - protein, 30 aa, Artificial Sequence
  Cyclic GFR-binding peptide
  MOD_RES (26)..(27): Xaa is C or S
EYQKYVKPKRGVIYLISIPSLAQPVXXPAA

SEQ ID NO: 60077 - protein, 36 aa, Artificial Sequence; identical to SEQ ID NO: 17233
  Cyclic GFR-binding peptide
  MOD_RES (2)..(4)..(36): Xaa is C or S

SEQ ID NO: 60078 - protein, 20 aa, Artificial Sequence
  Cyclic GFR-binding peptide
RYKKLYTVVGKDFYLISIAN

SEQ ID NO: 60079 - protein, 23 aa, Artificial Sequence
  Cyclic GFR-binding peptide
MEYKFKVKPTRGVLYLISIPELD

SEQ ID NO: 60080 - protein, 30 aa, Artificial Sequence
  Cyclic GFR-binding peptide
  MOD_RES (30)..(30): Xaa is C or S
VVMNEYKFKIVNSSDDLYLVSIPELKTPAX

SEQ ID NO: 60081 - protein, 26 aa, Artificial Sequence
  Cyclic GFR-binding peptide
RVIMEYKFKVKPKRGVLYLISIPELA

SEQ ID NO: 60082 - protein, 31 aa, Artificial Sequence; identical to SEQ ID NO: 17236
  Cyclic GFR-binding peptide
  MOD_RES (31)..(31): Xaa is C or S

SEQ ID NO: 60083 - protein, 25 aa, Artificial Sequence
  Cyclic GFR-binding peptide
EYQKYIVNSSDDIYLVSIPSLKTPA

SEQ ID NO: 60084 - protein, 27 aa, Artificial Sequence
  Cyclic GFR-binding peptide
SKVIMEYQKYIKPTKGIIYLISIPSLD

SEQ ID NO: 60085 - protein, 24 aa, Artificial Sequence
  Cyclic GFR-binding peptide
VMDEYQKYVVKENEDIYLMSIPSL

SEQ ID NO: 60086 - protein, 37 aa, Artificial Sequence; identical to SEQ ID NO: 17241
  Cyclic GFR-binding peptide
  MOD_RES (1)..(32)..(33): Xaa is C or S

SEQ ID NO: 60087 - protein, 35 aa, Artificial Sequence
  Cyclic GFR-binding peptide
  MOD_RES (30)..(30): Xaa is C or S
VVMNEYQKYIVNSSDDIYLVSIPSLKTPAXTPKTV

SEQ ID NO: 60088 - protein, 23 aa, Artificial Sequence
  Cyclic GFR-binding peptide
YHYKLYTVVGKDKYLISIPSLKT

SEQ ID NO: 60089 - protein, 41 aa, Artificial Sequence; identical to SEQ ID NO: 17250
  Cyclic GFR-binding peptide
  MOD_RES (1)..(3)..(35)..(36): Xaa is C or S

SEQ ID NO: 60090 - protein, 26 aa, Artificial Sequence
  Cyclic GFR-binding peptide
NEYQKYIVNSSDDIYLVSIPSLQTPA

SEQ ID NO: 60091 - protein, 31 aa, Artificial Sequence
  Cyclic GFR-binding peptide
  MOD_RES (27)..(28): Xaa is C or S
DEYKFKVVKENEDLYLMSIPELETPVXXAKP

SEQ ID NO: 60092 - protein, 22 aa, Artificial Sequence
  Cyclic GFR-binding peptide
MDRYKKLVVNNAADFYLISIAN

SEQ ID NO: 60093 - protein, 30 aa, Artificial Sequence
  Cyclic GFR-binding peptide
  MOD_RES (1)..(3): Xaa is C or S
XGXAKVVMNEYKFKIVNNSSDLYLVSIPEL

SEQ ID NO: 60094 - protein, 31 aa, Artificial Sequence
  Cyclic GFR-binding peptide
  MOD_RES (29)..(29): Xaa is C or S
VMNEYKFKIVNSSDDLYLVSIPELKTPAXTP

SEQ ID NO: 60095 - protein, 30 aa, Artificial Sequence
  Cyclic GFR-binding peptide
  MOD_RES (30)..(30): Xaa is C or S
VAMGRYKKLYTVVGKDFYLISIANLKTPVX

SEQ ID NO: 60096 - protein, 30 aa, Artificial Sequence
  Cyclic GFR-binding peptide
  MOD_RES (2)..(2): Xaa is C or S
GXAEVVMDYHYKLVVNNAADKYLISIPSLR

SEQ ID NO: 60097 - protein, 27 aa, Artificial Sequence
  Cyclic GFR-binding peptide
  MOD_RES (26)..(27): Xaa is C or S
YHYKLYTVVGKDKYLISIPSLKTPVXX

SEQ ID NO: 60098 - protein, 31 aa, Artificial Sequence
  Cyclic GFR-binding peptide
  MOD_RES (27)..(28): Xaa is C or S
DRYKKLVVNNAADFYLISIANLRAPVXXSAP

SEQ ID NO: 60099 - protein, 39 aa, Artificial Sequence; identical to SEQ ID NO: 17262
  Cyclic GFR-binding peptide
  MOD_RES (1)..(34)..(35): Xaa is C or S

SEQ ID NO: 60100 - protein, 30 aa, Artificial Sequence
  Cyclic GFR-binding peptide
  MOD_RES (30)..(30): Xaa is C or S
VVMNEYQKYIVNSSDDIYLVSIPSLQTPAX

SEQ ID NO: 60101 - protein, 31 aa, Artificial Sequence
  Cyclic GFR-binding peptide
  MOD_RES (30)..(31): Xaa is C or S
VAMGYHYKLYTVVGKDKYLISIPSLKTPVXX

SEQ ID NO: 60102 - protein, 30 aa, Artificial Sequence; identical to SEQ ID NO: 2002
  Cyclic GFR-binding peptide

SEQ ID NO: 60103 - protein, 36 aa, Artificial Sequence; identical to SEQ ID NO: 17265
  Cyclic GFR-binding peptide
  MOD_RES (1)..(33)..(34): Xaa is C or S

SEQ ID NO: 60104 - protein, 37 aa, Artificial Sequence; identical to SEQ ID NO: 17266
  Cyclic GFR-binding peptide
  MOD_RES (1)..(3)..(35)..(36): Xaa is C or S

SEQ ID NO: 60105 - protein, 33 aa, Artificial Sequence
  Cyclic GFR-binding peptide
  MOD_RES (28)..(29): Xaa is C or S
IMEYQKYIKPTKGIIYLISIPSLDQSVXXPSAS

SEQ ID NO: 60106 - protein, 26 aa, Artificial Sequence
  Cyclic GFR-binding peptide
MNEYQKYIVNNSSDIYLVSIPSLKTP

SEQ ID NO: 60107 - protein, 20 aa, Artificial Sequence
  Cyclic GFR-binding peptide
EYQKYVVNNAADIYLISIPS

SEQ ID NO: 60108 - protein, 36 aa, Artificial Sequence; identical to SEQ ID NO: 17269
  Cyclic GFR-binding peptide
  MOD_RES (2)..(35)..(36): Xaa is C or S

SEQ ID NO: 60109 - protein, 32 aa, Artificial Sequence
  Cyclic GFR-binding peptide
  MOD_RES (28)..(28): Xaa is C or S
MNEYQKYIVNSSDDIYLVSIPSLKTPAXTPKT

SEQ ID NO: 60110 - protein, 33 aa, Artificial Sequence
  Cyclic GFR-binding peptide
  MOD_RES (2)..(4): Xaa is C or S
HXGXAKVVMNEYKFKIVNNSSDLYLVSIPELKT

SEQ ID NO: 60111 - protein, 31 aa, Artificial Sequence
  Cyclic GFR-binding peptide
  MOD_RES (2)..(2): Xaa is C or S
GXSRVVMNEYKFKIVNSSDDLYLVSIPELKT

SEQ ID NO: 60112 - protein, 32 aa, Artificial Sequence; identical to SEQ ID NO: 17273
  Cyclic GFR-binding peptide
  MOD_RES (1)..(1): Xaa is C or S

SEQ ID NO: 60113 - protein, 27 aa, Artificial Sequence
  Cyclic GFR-binding peptide
  MOD_RES (27)..(27): Xaa is C or S
MEYKFKIKPTKGILYLISIPELDQSVX

SEQ ID NO: 60114 - protein, 26 aa, Artificial Sequence
  Cyclic GFR-binding peptide
GEVVMEEYQKYVVKDYEDIYLMSIPS

SEQ ID NO: 60115 - protein, 31 aa, Artificial Sequence
  Cyclic GFR-binding peptide
  MOD_RES (28)..(29): Xaa is C or S
MNEYQKYIVNSSDDIYLVSIPSLKTPAXXPK

SEQ ID NO: 60116 - protein, 21 aa, Artificial Sequence
  Cyclic GFR-binding peptide
EYKFKIVNNSSDLYLVSIPEL

SEQ ID NO: 60117 - protein, 27 aa, Artificial Sequence
  Cyclic GFR-binding peptide
VIMEYKFKIKPTKGILYLISIPELDQS

SEQ ID NO: 60118 - protein, 30 aa, Artificial Sequence
  Cyclic GFR-binding peptide
VSMGEEYKFKTPVGMDDLYLVSIPELKTPV

SEQ ID NO: 60119 - protein, 29 aa, Artificial Sequence
  Cyclic GFR-binding peptide
  MOD_RES (27)..(28): Xaa is C or S
NEYQKYIVNSSDDIYLVSIPSLQTPAXXP

SEQ ID NO: 60120 - protein, 25 aa, Artificial Sequence
  Cyclic GFR-binding peptide
SRVIMEYQKYVKPKRGVIYLISIPS

SEQ ID NO: 60121 - protein, 36 aa, Artificial Sequence
  Cyclic GFR-binding peptide
  MOD_RES (2)..(4)..(36): Xaa is C or S
RXGXGEVVMEEYQKYVVKDYEDIYLMSIPSLETPVX

SEQ ID NO: 60122 - protein, 37 aa, Artificial Sequence; identical to SEQ ID NO: 17281
  Cyclic GFR-binding peptide
  MOD_RES (32)..(33): Xaa is C or S

SEQ ID NO: 60123 - protein, 35 aa, Artificial Sequence; identical to SEQ ID NO: 17282
  Cyclic GFR-binding peptide
  MOD_RES (2)..(4): Xaa is C or S

SEQ ID NO: 60124 - protein, 32 aa, Artificial Sequence; identical to SEQ ID NO: 17283
  Cyclic GFR-binding peptide
  MOD_RES (31)..(32): Xaa is C or S

SEQ ID NO: 60125 - protein, 26 aa, Artificial Sequence
  Cyclic GFR-binding peptide
MNEYKFKIVNSSDDLYLVSIPELQTP

SEQ ID NO: 60126 - protein, 39 aa, Artificial Sequence; identical to SEQ ID NO: 17284
  Cyclic GFR-binding peptide
  MOD_RES (1)..(3)..(35)..(36): Xaa is C or S

SEQ ID NO: 60127 - protein, 37 aa, Artificial Sequence; identical to SEQ ID NO: 17287
  Cyclic GFR-binding peptide
  MOD_RES (1)..(3)..(35)..(36): Xaa is C or S

SEQ ID NO: 60128 - protein, 33 aa, Artificial Sequence; identical to SEQ ID NO: 17288
  Cyclic GFR-binding peptide
  MOD_RES (31)..(31): Xaa is C or S

SEQ ID NO: 60129 - protein, 26 aa, Artificial Sequence
  Cyclic GFR-binding peptide
GEVVMEEYKFKVVKDYEDLYLMSIPE

SEQ ID NO: 60130 - protein, 34 aa, Artificial Sequence
  Cyclic GFR-binding peptide
  MOD_RES (2)..(4): Xaa is C or S
RXGXGEVVMDEYKFKVVKENEDLYLMSIPELETP

SEQ ID NO: 60131 - protein, 24 aa, Artificial Sequence
  Cyclic GFR-binding peptide
EYQKYVVKDYEDIYLMSIPSLETP

SEQ ID NO: 60132 - protein, 31 aa, Artificial Sequence
  Cyclic GFR-binding peptide
  MOD_RES (27)..(28): Xaa is C or S
NEYKFKIVNNSSDLYLVSIPELKTPAXXAKP

SEQ ID NO: 60133 - protein, 26 aa, Artificial Sequence
  Cyclic GFR-binding peptide
EEYQKYVVKDYEDIYLMSIPSLETPV

SEQ ID NO: 60134 - protein, 20 aa, Artificial Sequence
  Cyclic GFR-binding peptide
YHYKLYTVVGKDKYLISIPS

SEQ ID NO: 60135 - protein, 31 aa, Artificial Sequence
  Cyclic GFR-binding peptide
  MOD_RES (1)..(1): Xaa is C or S
XGEVVMDEYKFKVVKENEDLYLMSIPELETP

SEQ ID NO: 60136 - protein, 28 aa, Artificial Sequence
  Cyclic GFR-binding peptide
  MOD_RES (28)..(28): Xaa is C or S
MDEYQKYVVKENEDIYLMSIPSLETPVX

SEQ ID NO: 60137 - protein, 22 aa, Artificial Sequence
  Cyclic GFR-binding peptide
EYKFKVKPTRGVLYLISIPELD

SEQ ID NO: 60138 - protein, 35 aa, Artificial Sequence
  Cyclic GFR-binding peptide
  MOD_RES (30)..(31): Xaa is C or S
VVMNEYQKYIVNSSDDIYLVSIPSLQTPAXXPKPV

SEQ ID NO: 60139 - protein, 24 aa, Artificial Sequence
  Cyclic GFR-binding peptide
VVMEYQKYVKPTRGVIYLISIPSL

SEQ ID NO: 60140 - protein, 23 aa, Artificial Sequence
  Cyclic GFR-binding peptide
VMEEYKFKVVKDYEDLYLMSIPE

SEQ ID NO: 60141 - protein, 38 aa, Artificial Sequence; identical to SEQ ID NO: 17300
  Cyclic GFR-binding peptide
  MOD_RES (2)..(4)..(36)..(37): Xaa is C or S

SEQ ID NO: 60142 - protein, 38 aa, Artificial Sequence; identical to SEQ ID NO: 17302
  Cyclic GFR-binding peptide
  MOD_RES (1)..(3)..(35)..(36): Xaa is C or S

SEQ ID NO: 60143 - protein, 33 aa, Artificial Sequence; identical to SEQ ID NO: 17304
  Cyclic GFR-binding peptide
  MOD_RES (31)..(32): Xaa is C or S

SEQ ID NO: 60144 - protein, 29 aa, Artificial Sequence
  Cyclic GFR-binding peptide
  MOD_RES (2)..(2): Xaa is C or S
GXGEVVMDEYQKYVVKENEDIYLMSIPSL

SEQ ID NO: 60145 - protein, 34 aa, Artificial Sequence
  Cyclic GFR-binding peptide
  MOD_RES (29)..(29): Xaa is C or S
VMNEYKFKIVNSSDDLYLVSIPELKTPAXTPKTV

SEQ ID NO: 60146 - protein, 28 aa, Artificial Sequence
  Cyclic GFR-binding peptide
  MOD_RES (2)..(2): Xaa is C or S
GXARVVMNEYQKYIVNSSDDIYLVSIPS

SEQ ID NO: 60147 - protein, 36 aa, Artificial Sequence; identical to SEQ ID NO: 17307
  Cyclic GFR-binding peptide
  MOD_RES (2)..(4)..(36): Xaa is C or S

SEQ ID NO: 60148 - protein, 38 aa, Artificial Sequence; identical to SEQ ID NO: 17310
  Cyclic GFR-binding peptide
  MOD_RES (32)..(33): Xaa is C or S

SEQ ID NO: 60149 - protein, 26 aa, Artificial Sequence
  Cyclic GFR-binding peptide
MEYQKYIKPTKGIIYLISIPSLDQSV

SEQ ID NO: 60150 - protein, 38 aa, Artificial Sequence; identical to SEQ ID NO: 17313
  Cyclic GFR-binding peptide
  MOD_RES (2)..(34)..(35): Xaa is C or S

SEQ ID NO: 60151 - protein, 27 aa, Artificial Sequence
  Cyclic GFR-binding peptide
GEVVMDEYQKYVVKENEDIYLMSIPSL

SEQ ID NO: 60152 - protein, 32 aa, Artificial Sequence
  Cyclic GFR-binding peptide
  MOD_RES (28)..(29): Xaa is C or S
MNEYKFKIVNSSDDLYLVSIPELQTPAXXPKP

SEQ ID NO: 60153 - protein, 31 aa, Artificial Sequence
  Cyclic GFR-binding peptide
  MOD_RES (28)..(29): Xaa is C or S
MDEYQKYVVKENEDIYLMSIPSLETPVXXAK

SEQ ID NO: 60154 - protein, 21 aa, Artificial Sequence
  Cyclic GFR-binding peptide
YHYKLVVNNAADKYLISIPSL

SEQ ID NO: 60155 - protein, 35 aa, Artificial Sequence
  Cyclic GFR-binding peptide
  MOD_RES (29)..(30): Xaa is C or S
VVMEYKFKVKPTRGVLYLISIPELDQPVXXPSASA

SEQ ID NO: 60156 - protein, 26 aa, Artificial Sequence
  Cyclic GFR-binding peptide
DYHYKLVVNNAADKYLISIPSLRAPV

SEQ ID NO: 60157 - protein, 28 aa, Artificial Sequence
  Cyclic GFR-binding peptide
ESVAMGYHYKLYTVVGKDKYLISIPSLK

SEQ ID NO: 60158 - protein, 33 aa, Artificial Sequence
  Cyclic GFR-binding peptide
  MOD_RES (32)..(33): Xaa is C or S
ARVVMNEYQKYIVNSSDDIYLVSIPSLQTPAXX

SEQ ID NO: 60159 - protein, 29 aa, Artificial Sequence
  Cyclic GFR-binding peptide
  MOD_RES (1)..(1): Xaa is C or S
XGEVVMDEYQKYVVKENEDIYLMSIPSLE

SEQ ID NO: 60160 - protein, 32 aa, Artificial Sequence; identical to SEQ ID NO: 17322
  Cyclic GFR-binding peptide
  MOD_RES (32)..(32): Xaa is C or S

SEQ ID NO: 60161 - protein, 29 aa, Artificial Sequence
  Cyclic GFR-binding peptide
  MOD_RES (1)..(1): Xaa is C or S
XGEVVMDEYKFKVVKENEDLYLMSIPELE

SEQ ID NO: 60162 - protein, 30 aa, Artificial Sequence; identical to SEQ ID NO: 2008
  Cyclic GFR-binding peptide

SEQ ID NO: 60163 - protein, 34 aa, Artificial Sequence
  Cyclic GFR-binding peptide
  MOD_RES (2)..(4): Xaa is C or S
RXGXESVAMGEYQKYYTVVGKDIYLISIPSLKTP

SEQ ID NO: 60164 - protein, 24 aa, Artificial Sequence
  Cyclic GFR-binding peptide
VVMDYHYKLVVNNAADKYLISIPS

SEQ ID NO: 60165 - protein, 32 aa, Artificial Sequence
  Cyclic GFR-binding peptide
  MOD_RES (31)..(32): Xaa is C or S
VSMGEEYQKYTPVGMDDIYLVSIPSLKTPVXX

SEQ ID NO: 60166 - protein, 24 aa, Artificial Sequence
  Cyclic GFR-binding peptide
VMEYQKYVKPTRGVIYLISIPSLD

SEQ ID NO: 60167 - protein, 33 aa, Artificial Sequence
  Cyclic GFR-binding peptide
  MOD_RES (28)..(28): Xaa is C or S
MNEYQKYIVNSSDDIYLVSIPSLKTPAXTPKTV

SEQ ID NO: 60168 - protein, 29 aa, Artificial Sequence
  Cyclic GFR-binding peptide
VAMGRYKKLYTVVGKDFYLISIANLKTPV

SEQ ID NO: 60169 - protein, 30 aa, Artificial Sequence
  Cyclic GFR-binding peptide
  MOD_RES (28)..(29): Xaa is C or S
VMEYKFKVKPTRGVLYLISIPELDQPVXXP

SEQ ID NO: 60170 - protein, 28 aa, Artificial Sequence
  Cyclic GFR-binding peptide
  MOD_RES (2)..(2): Xaa is C or S
KXSRVIMEYKFKVKPKRGVLYLISIPEL

SEQ ID NO: 60171 - protein, 34 aa, Artificial Sequence
  Cyclic GFR-binding peptide
  MOD_RES (30)..(31): Xaa is C or S
VVMEEYQKYVVKDYEDIYLMSIPSLETPVXXAKP

SEQ ID NO: 60172 - protein, 29 aa, Artificial Sequence
  Cyclic GFR-binding peptide
  MOD_RES (1)..(3): Xaa is C or S
XGXGEVVMDEYKFKVVKENEDLYLMSIPE

SEQ ID NO: 60173 - protein, 30 aa, Artificial Sequence
  Cyclic GFR-binding peptide
  MOD_RES (30)..(30): Xaa is C or S
VAMGEYQKYYTVVGKDIYLISIPSLKTPVX

SEQ ID NO: 60174 - protein, 38 aa, Artificial Sequence
  Cyclic GFR-binding peptide
  MOD_RES (32)..(33): Xaa is C or S
AVSMGEEYKFKTPVGMDDLYLVSIPELKTPVXXAKGVK

SEQ ID NO: 60175 - protein, 34 aa, Artificial Sequence
  Cyclic GFR-binding peptide
  MOD_RES (2)..(4): Xaa is C or S
HXGXARVVMNEYKFKIVNSSDDLYLVSIPELQTP

SEQ ID NO: 60176 - protein, 41 aa, Artificial Sequence; identical to SEQ ID NO: 17339
  Cyclic GFR-binding peptide
  MOD_RES (1)..(3)..(35)..(36): Xaa is C or S

SEQ ID NO: 60177 - protein, 26 aa, Artificial Sequence
  Cyclic GFR-binding peptide
VSMGEEYQKYTPVGMDDIYLVSIPSL

SEQ ID NO: 60178 - protein, 27 aa, Artificial Sequence
  Cyclic GFR-binding peptide
  MOD_RES (1)..(1): Xaa is C or S
XSRVIMEYKFKVKPKRGVLYLISIPEL

SEQ ID NO: 60179 - protein, 29 aa, Artificial Sequence
  Cyclic GFR-binding peptide
VAMGEYQKYYTVVGKDIYLISIPSLKTPV

SEQ ID NO: 60180 - protein, 30 aa, Artificial Sequence
  Cyclic GFR-binding peptide
  MOD_RES (30)..(30): Xaa is C or S
VAMGYHYKLYTVVGKDKYLISIPSLKTPVX

SEQ ID NO: 60181 - protein, 34 aa, Artificial Sequence; identical to SEQ ID NO: 17342
  Cyclic GFR-binding peptide
  MOD_RES (1)..(3): Xaa is C or S

SEQ ID NO: 60182 - protein, 31 aa, Artificial Sequence
  Cyclic GFR-binding peptide
  MOD_RES (30)..(31): Xaa is C or S
VVMNEYQKYIVNSSDDIYLVSIPSLQTPAXX

SEQ ID NO: 60183 - protein, 32 aa, Artificial Sequence; identical to SEQ ID NO: 17343
  Cyclic GFR-binding peptide
  MOD_RES (31)..(32): Xaa is C or S

SEQ ID NO: 60184 - protein, 32 aa, Artificial Sequence; identical to SEQ ID NO: 17344
  Cyclic GFR-binding peptide
  MOD_RES (32)..(32): Xaa is C or S

SEQ ID NO: 60185 - protein, 31 aa, Artificial Sequence
  Cyclic GFR-binding peptide
  MOD_RES (1)..(3): Xaa is C or S
XGXAEVVMDYHYKLVVNNAADKYLISIPSLR

SEQ ID NO: 60186 - protein, 39 aa, Artificial Sequence; identical to SEQ ID NO: 17346
  Cyclic GFR-binding peptide
  MOD_RES (2)..(34)..(35): Xaa is C or S

SEQ ID NO: 60187 - protein, 31 aa, Artificial Sequence
  Cyclic GFR-binding peptide
  MOD_RES (2)..(2): Xaa is C or S
GXGEVVMEEYKFKVVKDYEDLYLMSIPELET

SEQ ID NO: 60188 - protein, 30 aa, Artificial Sequence
  Cyclic GFR-binding peptide
AKVVMNEYQKYIVNNSSDIYLVSIPSLKTP

SEQ ID NO: 60189 - protein, 24 aa, Artificial Sequence
  Cyclic GFR-binding peptide
VVMEEYQKYVVKDYEDIYLMSIPS

SEQ ID NO: 60190 - protein, 36 aa, Artificial Sequence
  Cyclic GFR-binding peptide
  MOD_RES (31)..(32): Xaa is C or S
VSMGEEYQKYTPVGMDDIYLVSIPSLKTPVXXAKGV

SEQ ID NO: 60191 - protein, 29 aa, Artificial Sequence
  Cyclic GFR-binding peptide
  MOD_RES (28)..(29): Xaa is C or S
MDEYQKYVVKENEDIYLMSIPSLETPVXX

SEQ ID NO: 60192 - protein, 27 aa, Artificial Sequence
  Cyclic GFR-binding peptide
  MOD_RES (1)..(1): Xaa is C or S
XGEVVMEEYKFKVVKDYEDLYLMSIPE

SEQ ID NO: 60193 - protein, 30 aa, Artificial Sequence; identical to SEQ ID NO: 17358
  Cyclic GFR-binding peptide

SEQ ID NO: 60194 - protein, 31 aa, Artificial Sequence; identical to SEQ ID NO: 17359
  Cyclic GFR-binding peptide

SEQ ID NO: 60195 - protein, 32 aa, Artificial Sequence
  Cyclic GFR-binding peptide
  MOD_RES (2)..(4): Xaa is C or S
RXGXESVAMGRYKKLYTVVGKDFYLISIANLK

SEQ ID NO: 60196 - protein, 30 aa, Artificial Sequence
  Cyclic GFR-binding peptide
  MOD_RES (1)..(3): Xaa is C or S
XGXGEVVMEEYKFKVVKDYEDLYLMSIPEL

SEQ ID NO: 60197 - protein, 30 aa, Artificial Sequence
  Cyclic GFR-binding peptide
  MOD_RES (1)..(1): Xaa is C or S
XGEVVMDEYKFKVVKENEDLYLMSIPELET

SEQ ID NO: 60198 - protein, 35 aa, Artificial Sequence; identical to SEQ ID NO: 17361
  Cyclic GFR-binding peptide
  MOD_RES (2)..(4): Xaa is C or S

SEQ ID NO: 60199 - protein, 29 aa, Artificial Sequence
  Cyclic GFR-binding peptide
  MOD_RES (2)..(2): Xaa is C or S
GXEAVSMGEEYQKYTPVGMDDIYLVSIPS

SEQ ID NO: 60200 - protein, 20 aa, Artificial Sequence
  Cyclic GFR-binding peptide
EYKFKIVNSSDDLYLVSIPE

SEQ ID NO: 60201 - protein, 25 aa, Artificial Sequence
  Cyclic GFR-binding peptide
MNEYKFKIVNSSDDLYLVSIPELKT

SEQ ID NO: 60202 - protein, 34 aa, Artificial Sequence
  Cyclic GFR-binding peptide
  MOD_RES (29)..(30): Xaa is C or S
VVMEYQKYVKPTRGVIYLISIPSLDQPVXXPSAS

SEQ ID NO: 60203 - protein, 25 aa, Artificial Sequence
  Cyclic GFR-binding peptide
KVVMEYKFKVKPTRGVLYLISIPEL

SEQ ID NO: 60204 - protein, 35 aa, Artificial Sequence; identical to SEQ ID NO: 17374
  Cyclic GFR-binding peptide
  MOD_RES (2)..(4): Xaa is C or S

SEQ ID NO: 60205 - protein, 33 aa, Artificial Sequence; identical to SEQ ID NO: 17378
  Cyclic GFR-binding peptide
  MOD_RES (32)..(33): Xaa is C or S

SEQ ID NO: 60206 - protein, 33 aa, Artificial Sequence; identical to SEQ ID NO: 17379
  Cyclic GFR-binding peptide
  MOD_RES (31)..(32): Xaa is C or S

SEQ ID NO: 60207 - protein, 36 aa, Artificial Sequence; identical to SEQ ID NO: 17383
  Cyclic GFR-binding peptide
  MOD_RES (31)..(32): Xaa is C or S

SEQ ID NO: 60208 - protein, 38 aa, Artificial Sequence
  Cyclic GFR-binding peptide
  MOD_RES (32)..(33): Xaa is C or S
AVSMGEEYQKYTPVGMDDIYLVSIPSLKTPVXXAKGVK

SEQ ID NO: 60209 - protein, 28 aa, Artificial Sequence
  Cyclic GFR-binding peptide
  MOD_RES (26)..(27): Xaa is C or S
EYKFKIVNSSDDLYLVSIPELQTPAXXP

SEQ ID NO: 60210 - protein, 34 aa, Artificial Sequence
  Cyclic GFR-binding peptide
  MOD_RES (28)..(29): Xaa is C or S
MDEYKFKVVKENEDLYLMSIPELETPVXXAKPIK

SEQ ID NO: 60211 - protein, 37 aa, Artificial Sequence; identical to SEQ ID NO: 17389
  Cyclic GFR-binding peptide
  MOD_RES (1)..(33)..(34): Xaa is C or S

SEQ ID NO: 60212 - protein, 32 aa, Artificial Sequence
  Cyclic GFR-binding peptide
  MOD_RES (2)..(4): Xaa is C or S
RXGXGEVVMEEYQKYVVKDYEDIYLMSIPSLE

SEQ ID NO: 60213 - protein, 29 aa, Artificial Sequence
  Cyclic GFR-binding peptide
  MOD_RES (29)..(29): Xaa is C or S
VVMEYKFKVKPTRGVLYLISIPELDQPVX

SEQ ID NO: 60214 - protein, 35 aa, Artificial Sequence; identical to SEQ ID NO: 17391
  Cyclic GFR-binding peptide
  MOD_RES (31)..(31): Xaa is C or S

SEQ ID NO: 60215 - protein, 37 aa, Artificial Sequence; identical to SEQ ID NO: 17392
  Cyclic GFR-binding peptide
  MOD_RES (2)..(34)..(35): Xaa is C or S

SEQ ID NO: 60216 - protein, 33 aa, Artificial Sequence; identical to SEQ ID NO: 17393
  Cyclic GFR-binding peptide
  MOD_RES (32)..(33): Xaa is C or S

SEQ ID NO: 60217 - protein, 27 aa, Artificial Sequence
  Cyclic GFR-binding peptide
MEEYKFKVVKDYEDLYLMSIPELETPV

SEQ ID NO: 60218 - protein, 30 aa, Artificial Sequence
  Cyclic GFR-binding peptide
  MOD_RES (2)..(2): Xaa is C or S
KXSRVIMEYQKYVKPKRGVIYLISIPSLAQ

SEQ ID NO: 60219 - protein, 31 aa, Artificial Sequence
  Cyclic GFR-binding peptide
  MOD_RES (2)..(4): Xaa is C or S
SXKXSKVVMEYKFKVKPTRGVLYLISIPELD

SEQ ID NO: 60220 - protein, 36 aa, Artificial Sequence
  Cyclic GFR-binding peptide
  MOD_RES (30)..(31): Xaa is C or S
VVMEEYKFKVVKDYEDLYLMSIPELETPVXXAKPIS

SEQ ID NO: 60221 - protein, 32 aa, Artificial Sequence; identical to SEQ ID NO: 17397
  Cyclic GFR-binding peptide
  MOD_RES (1)..(1): Xaa is C or S

SEQ ID NO: 60222 - protein, 27 aa, Artificial Sequence
  Cyclic GFR-binding peptide
  MOD_RES (26)..(27): Xaa is C or S
EYKFKVKPKRGVLYLISIPELAQPVXX

SEQ ID NO: 60223 - protein, 31 aa, Artificial Sequence
  Cyclic GFR-binding peptide
  MOD_RES (2)..(2): Xaa is C or S
GXSRVVMNEYQKYIVNSSDDIYLVSIPSLKT

SEQ ID NO: 60224 - protein, 28 aa, Artificial Sequence
  Cyclic GFR-binding peptide
  MOD_RES (26)..(27): Xaa is C or S
RYKKLYTVVGKDFYLISIANLKTPVXXA

SEQ ID NO: 60225 - protein, 23 aa, Artificial Sequence
  Cyclic GFR-binding peptide
MDEYQKYVVKENEDIYLMSIPSL

SEQ ID NO: 60226 - protein, 26 aa, Artificial Sequence
  Cyclic GFR-binding peptide
VAMGRYKKLYTVVGKDFYLISIANLK

SEQ ID NO: 60227 - protein, 25 aa, Artificial Sequence
  Cyclic GFR-binding peptide
RVVMNEYQKYIVNSSDDIYLVSIPS

SEQ ID NO: 60228 - protein, 35 aa, Artificial Sequence; identical to SEQ ID NO: 17405
  Cyclic GFR-binding peptide
  MOD_RES (31)..(32): Xaa is C or S

SEQ ID NO: 60229 - protein, 25 aa, Artificial Sequence
  Cyclic GFR-binding peptide
MEEYKFKVVKDYEDLYLMSIPELET

SEQ ID NO: 60230 - protein, 20 aa, Artificial Sequence
  Cyclic GFR-binding peptide
EYQKYVKPTRGVIYLISIPS

SEQ ID NO: 60231 - protein, 27 aa, Artificial Sequence
  Cyclic GFR-binding peptide
  MOD_RES (26)..(26): Xaa is C or S
EYKFKIVNSSDDLYLVSIPELKTPAXT

SEQ ID NO: 60232 - protein, 36 aa, Artificial Sequence; identical to SEQ ID NO: 17411
  Cyclic GFR-binding peptide
  MOD_RES (1)..(33)..(34): Xaa is C or S

SEQ ID NO: 60233 - protein, 32 aa, Artificial Sequence; identical to SEQ ID NO: 17414
  Cyclic GFR-binding peptide
  MOD_RES (1)..(1): Xaa is C or S

SEQ ID NO: 60234 - protein, 32 aa, Artificial Sequence
  Cyclic GFR-binding peptide
  MOD_RES (26)..(27): Xaa is C or S
EYKFKTPVGMDDLYLVSIPELKTPVXXAKGVK

SEQ ID NO: 60235 - protein, 25 aa, Artificial Sequence
  Cyclic GFR-binding peptide
EVVMDEYQKYVVKENEDIYLMSIPS

SEQ ID NO: 60236 - protein, 30 aa, Artificial Sequence
  Cyclic GFR-binding peptide
  MOD_RES (27)..(28): Xaa is C or S
EEYKFKTPVGMDDLYLVSIPELKTPVXXAK

SEQ ID NO: 60237 - protein, 28 aa, Artificial Sequence
  Cyclic GFR-binding peptide
  MOD_RES (1)..(1): Xaa is C or S
XSRVVMNEYQKYIVNSSDDIYLVSIPSL

SEQ ID NO: 60238 - protein, 31 aa, Artificial Sequence
  Cyclic GFR-binding peptide
  MOD_RES (28)..(29): Xaa is C or S
MEEYKFKVVKDYEDLYLMSIPELETPVXXAK

SEQ ID NO: 60239 - protein, 34 aa, Artificial Sequence; identical to SEQ ID NO: 17419
  Cyclic GFR-binding peptide
  MOD_RES (1)..(3): Xaa is C or S

SEQ ID NO: 60240 - protein, 36 aa, Artificial Sequence; identical to SEQ ID NO: 17418
  Cyclic GFR-binding peptide
  MOD_RES (1)..(33)..(34): Xaa is C or S

SEQ ID NO: 60241 - protein, 33 aa, Artificial Sequence; identical to SEQ ID NO: 17421
  Cyclic GFR-binding peptide
  MOD_RES (2)..(33): Xaa is C or S

SEQ ID NO: 60242 - protein, 35 aa, Artificial Sequence; identical to SEQ ID NO: 17422
  Cyclic GFR-binding peptide
  MOD_RES (31)..(32): Xaa is C or S

SEQ ID NO: 60243 - protein, 25 aa, Artificial Sequence
  Cyclic GFR-binding peptide
VVMNEYQKYIVNSSDDIYLVSIPSL

SEQ ID NO: 60244 - protein, 39 aa, Artificial Sequence; identical to SEQ ID NO: 17425
  Cyclic GFR-binding peptide
  MOD_RES (1)..(33)..(34): Xaa is C or S

SEQ ID NO: 60245 - protein, 39 aa, Artificial Sequence; identical to SEQ ID NO: 17427
  Cyclic GFR-binding peptide
  MOD_RES (2)..(4)..(37)..(38): Xaa is C or S

SEQ ID NO: 60246 - protein, 34 aa, Artificial Sequence; identical to SEQ ID NO: 17430
  Cyclic GFR-binding peptide
  MOD_RES (1)..(33)..(34): Xaa is C or S

SEQ ID NO: 60247 - protein, 34 aa, Artificial Sequence; identical to SEQ ID NO: 17431
  Cyclic GFR-binding peptide
  MOD_RES (31)..(32): Xaa is C or S

SEQ ID NO: 60248 - protein, 31 aa, Artificial Sequence
  Cyclic GFR-binding peptide
  MOD_RES (1)..(1): Xaa is C or S
XSRVVMNEYQKYIVNSSDDIYLVSIPSLKTP

SEQ ID NO: 60249 - protein, 24 aa, Artificial Sequence
  Cyclic GFR-binding peptide
VMEEYKFKVVKDYEDLYLMSIPEL

SEQ ID NO: 60250 - protein, 30 aa, Artificial Sequence
  Cyclic GFR-binding peptide
EAVSMGEEYKFKTPVGMDDLYLVSIPELKT

SEQ ID NO: 60251 - protein, 35 aa, Artificial Sequence
  Cyclic GFR-binding peptide
  MOD_RES (29)..(30): Xaa is C or S
VMNEYKFKIVNSSDDLYLVSIPELQTPAXXPKPVT

SEQ ID NO: 60252 - protein, 30 aa, Artificial Sequence
  Cyclic GFR-binding peptide
  MOD_RES (26)..(27): Xaa is C or S
EYKFKIKPTKGILYLISIPELDQSVXXPSA

SEQ ID NO: 60253 - protein, 30 aa, Artificial Sequence
  Cyclic GFR-binding peptide
  MOD_RES (28)..(29): Xaa is C or S
IMEYQKYVKPKRGVIYLISIPSLAQPVXXP

SEQ ID NO: 60254 - protein, 23 aa, Artificial Sequence
  Cyclic GFR-binding peptide
VVMEYQKYVKPTRGVIYLISIPS

SEQ ID NO: 60255 - protein, 32 aa, Artificial Sequence
  Cyclic GFR-binding peptide
  MOD_RES (26)..(27): Xaa is C or S
EYQKYIVNNSSDIYLVSIPSLKTPAXXAKPVA

SEQ ID NO: 60256 - protein, 31 aa, Artificial Sequence
  Cyclic GFR-binding peptide
  MOD_RES (26)..(27): Xaa is C or S
EYKFKVVKENEDLYLMSIPELETPVXXAKPI

SEQ ID NO: 60257 - protein, 29 aa, Artificial Sequence
  Cyclic GFR-binding peptide
  MOD_RES (1)..(1): Xaa is C or S
XSKVIMEYQKYIKPTKGIIYLISIPSLDQ

SEQ ID NO: 60258 - protein, 37 aa, Artificial Sequence; identical to SEQ ID NO: 17436
  Cyclic GFR-binding peptide
  MOD_RES (1)..(3)..(35)..(36): Xaa is C or S

SEQ ID NO: 60259 - protein, 33 aa, Artificial Sequence
  Cyclic GFR-binding peptide
  MOD_RES (28)..(29): Xaa is C or S
MDEYKFKVVKENEDLYLMSIPELETPVXXAKPI

SEQ ID NO: 60260 - protein, 37 aa, Artificial Sequence; identical to SEQ ID NO: 17439
  Cyclic GFR-binding peptide
  MOD_RES (2)..(4)..(35)..(36): Xaa is C or S

SEQ ID NO: 60261 - protein, 24 aa, Artificial Sequence
  Cyclic GFR-binding peptide
MEYQKYVKPKRGVIYLISIPSLAQ

SEQ ID NO: 60262 - protein, 27 aa, Artificial Sequence
  Cyclic GFR-binding peptide
MDEYQKYVVKENEDIYLMSIPSLETPV

SEQ ID NO: 60263 - protein, 25 aa, Artificial Sequence
  Cyclic GFR-binding peptide
VMDRYKKLVVNNAADFYLISIANLR

SEQ ID NO: 60264 - protein, 32 aa, Artificial Sequence
  Cyclic GFR-binding peptide
  MOD_RES (29)..(30): Xaa is C or S
MGEEYQKYTPVGMDDIYLVSIPSLKTPVXXAK

SEQ ID NO: 60265 - protein, 29 aa, Artificial Sequence
  Cyclic GFR-binding peptide
VVMEEYQKYVVKDYEDIYLMSIPSLETPV

SEQ ID NO: 60266 - protein, 36 aa, Artificial Sequence; identical to SEQ ID NO: 17445
  Cyclic GFR-binding peptide
  MOD_RES (32)..(33): Xaa is C or S

SEQ ID NO: 60267 - protein, 28 aa, Artificial Sequence
  Cyclic GFR-binding peptide
  MOD_RES (26)..(26): Xaa is C or S
EYQKYIVNSSDDIYLVSIPSLKTPAXTP

SEQ ID NO: 60268 - protein, 31 aa, Artificial Sequence
  Cyclic GFR-binding peptide
  MOD_RES (26)..(27): Xaa is C or S
YHYKLVVNNAADKYLISIPSLRAPVXXSAPA

SEQ ID NO: 60269 - protein, 23 aa, Artificial Sequence
  Cyclic GFR-binding peptide
EYQKYYTVVGKDIYLISIPSLKT

SEQ ID NO: 60270 - protein, 25 aa, Artificial Sequence
  Cyclic GFR-binding peptide
RVIMEYKFKVKPKRGVLYLISIPEL

SEQ ID NO: 60271 - protein, 22 aa, Artificial Sequence
  Cyclic GFR-binding peptide
MEYKFKVKPKRGVLYLISIPEL

SEQ ID NO: 60272 - protein, 33 aa, Artificial Sequence; identical to SEQ ID NO: 17453
  Cyclic GFR-binding peptide
  MOD_RES (1)..(33): Xaa is C or S

SEQ ID NO: 60273 - protein, 30 aa, Artificial Sequence
  Cyclic GFR-binding peptide
  MOD_RES (28)..(29): Xaa is C or S
GEEYKFKTPVGMDDLYLVSIPELKTPVXXA

SEQ ID NO: 60274 - protein, 31 aa, Artificial Sequence
  Cyclic GFR-binding peptide
  MOD_RES (2)..(4): Xaa is C or S
HXGXSRVVMNEYQKYIVNSSDDIYLVSIPSL

SEQ ID NO: 60275 - protein, 32 aa, Artificial Sequence; identical to SEQ ID NO: 17455
  Cyclic GFR-binding peptide
  MOD_RES (1)..(1): Xaa is C or S

SEQ ID NO: 60276 - protein, 31 aa, Artificial Sequence
  Cyclic GFR-binding peptide
  MOD_RES (1)..(1): Xaa is C or S
XESVAMGYHYKLYTVVGKDKYLISIPSLKTP

SEQ ID NO: 60277 - protein, 41 aa, Artificial Sequence; identical to SEQ ID NO: 17458
  Cyclic GFR-binding peptide
  MOD_RES (1)..(3)..(35)..(36): Xaa is C or S

SEQ ID NO: 60278 - protein, 32 aa, Artificial Sequence
  Cyclic GFR-binding peptide
  MOD_RES (26)..(27): Xaa is C or S
EYKFKVVNNAADLYLISIPELRAPVXXSAPAA

SEQ ID NO: 60279 - protein, 32 aa, Artificial Sequence
  Cyclic GFR-binding peptide
  MOD_RES (28)..(29): Xaa is C or S
MDEYKFKVVNNAADLYLISIPELRAPVXXSAP

SEQ ID NO: 60280 - protein, 40 aa, Artificial Sequence; identical to SEQ ID NO: 17463
  Cyclic GFR-binding peptide
  MOD_RES (2)..(4)..(36)..(37): Xaa is C or S

SEQ ID NO: 60281 - protein, 31 aa, Artificial Sequence
  Cyclic GFR-binding peptide
  MOD_RES (1)..(3): Xaa is C or S
XGXSRVVMNEYQKYIVNSSDDIYLVSIPSLK

SEQ ID NO: 60282 - protein, 33 aa, Artificial Sequence
  Cyclic GFR-binding peptide
  MOD_RES (2)..(2): Xaa is C or S
GXEAVSMGEEYKFKTPVGMDDLYLVSIPELKTP

SEQ ID NO: 60283 - protein, 33 aa, Artificial Sequence
  Cyclic GFR-binding peptide
  MOD_RES (27)..(28): Xaa is C or S
GRYKKLYTVVGKDFYLISIANLKTPVXXAKSAK

SEQ ID NO: 60284 - protein, 39 aa, Artificial Sequence; identical to SEQ ID NO: 17468
  Cyclic GFR-binding peptide
  MOD_RES (1)..(3)..(35)..(36): Xaa is C or S

SEQ ID NO: 60285 - protein, 29 aa, Artificial Sequence
  Cyclic GFR-binding peptide
GEVVMEEYQKYVVKDYEDIYLMSIPSLET

SEQ ID NO: 60286 - protein, 25 aa, Artificial Sequence
  Cyclic GFR-binding peptide
EYQKYVKPKRGVIYLISIPSLAQPV

SEQ ID NO: 60287 - protein, 27 aa, Artificial Sequence
  Cyclic GFR-binding peptide
  MOD_RES (27)..(27): Xaa is C or S
EEYQKYVVKDYEDIYLMSIPSLETPVX

SEQ ID NO: 60288 - protein, 36 aa, Artificial Sequence; identical to SEQ ID NO: 17470
  Cyclic GFR-binding peptide
  MOD_RES (2)..(4)..(36): Xaa is C or S

SEQ ID NO: 60289 - protein, 30 aa, Artificial Sequence
  Cyclic GFR-binding peptide
  MOD_RES (28)..(29): Xaa is C or S
IMEYKFKIKPTKGILYLISIPELDQSVXXP

SEQ ID NO: 60290 - protein, 34 aa, Artificial Sequence; identical to SEQ ID NO: 17472
  Cyclic GFR-binding peptide
  MOD_RES (2)..(34): Xaa is C or S

SEQ ID NO: 60291 - protein, 31 aa, Artificial Sequence
  Cyclic GFR-binding peptide
  MOD_RES (2)..(4): Xaa is C or S
RXGXGEVVMDEYQKYVVKENEDIYLMSIPSL

SEQ ID NO: 60292 - protein, 27 aa, Artificial Sequence
  Cyclic GFR-binding peptide
GEVVMEEYQKYVVKDYEDIYLMSIPSL

SEQ ID NO: 60293 - protein, 22 aa, Artificial Sequence
  Cyclic GFR-binding peptide
MDEYKFKVVKENEDLYLMSIPE

SEQ ID NO: 60294 - protein, 32 aa, Artificial Sequence; identical to SEQ ID NO: 17475
  Cyclic GFR-binding peptide
  MOD_RES (31)..(31): Xaa is C or S

SEQ ID NO: 60295 - protein, 23 aa, Artificial Sequence
  Cyclic GFR-binding peptide
GEEYKFKTPVGMDDLYLVSIPEL

SEQ ID NO: 60296 - protein, 41 aa, Artificial Sequence; identical to SEQ ID NO: 17481
  Cyclic GFR-binding peptide
  MOD_RES (2)..(4)..(35)..(36): Xaa is C or S

SEQ ID NO: 60297 - protein, 40 aa, Artificial Sequence; identical to SEQ ID NO: 17482
  Cyclic GFR-binding peptide
  MOD_RES (1)..(3)..(35)..(36): Xaa is C or S

SEQ ID NO: 60298 - protein, 25 aa, Artificial Sequence
  Cyclic GFR-binding peptide
IMEYQKYIKPTKGIIYLISIPSLDQ

SEQ ID NO: 60299 - protein, 34 aa, Artificial Sequence
  Cyclic GFR-binding peptide
  MOD_RES (28)..(29): Xaa is C or S
MNEYQKYIVNSSDDIYLVSIPSLQTPAXXPKPVT

SEQ ID NO: 60300 - protein, 32 aa, Artificial Sequence
  Cyclic GFR-binding peptide
  MOD_RES (30)..(30): Xaa is C or S
VVMNEYQKYIVNSSDDIYLVSIPSLKTPAXTP

SEQ ID NO: 60301 - protein, 26 aa, Artificial Sequence
  Cyclic GFR-binding peptide
VAMGEYQKYYTVVGKDIYLISIPSLK

SEQ ID NO: 60302 - protein, 36 aa, Artificial Sequence; identical to SEQ ID NO: 17486
  Cyclic GFR-binding peptide
  MOD_RES (32)..(33): Xaa is C or S

SEQ ID NO: 60303 - protein, 32 aa, Artificial Sequence; identical to SEQ ID NO: 17487
  Cyclic GFR-binding peptide

SEQ ID NO: 60304 - protein, 31 aa, Artificial Sequence
  Cyclic GFR-binding peptide
  MOD_RES (30)..(31): Xaa is C or S
VVMNEYKFKIVNSSDDLYLVSIPELKTPAXX

SEQ ID NO: 60305 - protein, 32 aa, Artificial Sequence
  Cyclic GFR-binding peptide
  MOD_RES (27)..(28): Xaa is C or S
EEYQKYVVKDYEDIYLMSIPSLETPVXXAKPI

SEQ ID NO: 60306 - protein, 33 aa, Artificial Sequence; identical to SEQ ID NO: 17494
  Cyclic GFR-binding peptide
  MOD_RES (2)..(2): Xaa is C or S

SEQ ID NO: 60307 - protein, 27 aa, Artificial Sequence
  Cyclic GFR-binding peptide
AMGRYKKLYTVVGKDFYLISIANLKTP

SEQ ID NO: 60308 - protein, 31 aa, Artificial Sequence
  Cyclic GFR-binding peptide
  MOD_RES (2)..(4): Xaa is C or S
RXGXAEVVMDEYKFKVVNNAADLYLISIPEL

SEQ ID NO: 60309 - protein, 27 aa, Artificial Sequence
  Cyclic GFR-binding peptide
MGRYKKLYTVVGKDFYLISIANLKTPV

SEQ ID NO: 60310 - protein, 28 aa, Artificial Sequence
  Cyclic GFR-binding peptide
VVMNEYKFKIVNSSDDLYLVSIPELKTP

SEQ ID NO: 60311 - protein, 34 aa, Artificial Sequence; identical to SEQ ID NO: 17501
  Cyclic GFR-binding peptide
  MOD_RES (2)..(34): Xaa is C or S

SEQ ID NO: 60312 - protein, 23 aa, Artificial Sequence
  Cyclic GFR-binding peptide
MEEYKFKVVKDYEDLYLMSIPEL

SEQ ID NO: 60313 - protein, 37 aa, Artificial Sequence; identical to SEQ ID NO: 17505
  Cyclic GFR-binding peptide
  MOD_RES (2)..(35)..(36): Xaa is C or S

SEQ ID NO: 60314 - protein, 35 aa, Artificial Sequence; identical to SEQ ID NO: 17507
  Cyclic GFR-binding peptide
  MOD_RES (32)..(33): Xaa is C or S

SEQ ID NO: 60315 - protein, 28 aa, Artificial Sequence
  Cyclic GFR-binding peptide
  MOD_RES (26)..(27): Xaa is C or S
EYKFKVVKENEDLYLMSIPELETPVXXA

SEQ ID NO: 60316 - protein, 27 aa, Artificial Sequence
  Cyclic GFR-binding peptide
AMGYHYKLYTVVGKDKYLISIPSLKTP

SEQ ID NO: 60317 - protein, 35 aa, Artificial Sequence; identical to SEQ ID NO: 17512
  Cyclic GFR-binding peptide
  MOD_RES (2)..(4): Xaa is C or S

SEQ ID NO: 60318 - protein, 26 aa, Artificial Sequence
  Cyclic GFR-binding peptide
KVVMNEYKFKIVNNSSDLYLVSIPEL

SEQ ID NO: 60319 - protein, 29 aa, Artificial Sequence
  Cyclic GFR-binding peptide
  MOD_RES (28)..(29): Xaa is C or S
MGRYKKLYTVVGKDFYLISIANLKTPVXX

SEQ ID NO: 60320 - protein, 29 aa, Artificial Sequence
  Cyclic GFR-binding peptide
  MOD_RES (27)..(28): Xaa is C or S
DYHYKLVVNNAADKYLISIPSLRAPVXXS

SEQ ID NO: 60321 - protein, 24 aa, Artificial Sequence
  Cyclic GFR-binding peptide
VMNEYQKYIVNNSSDIYLVSIPSL

SEQ ID NO: 60322 - protein, 34 aa, Artificial Sequence; identical to SEQ ID NO: 17515
  Cyclic GFR-binding peptide
  MOD_RES (1)..(33)..(34): Xaa is C or S

SEQ ID NO: 60323 - protein, 35 aa, Artificial Sequence; identical to SEQ ID NO: 17516
  Cyclic GFR-binding peptide
  MOD_RES (2)..(33)..(34): Xaa is C or S

SEQ ID NO: 60324 - protein, 32 aa, Artificial Sequence
  Cyclic GFR-binding peptide
  MOD_RES (26)..(27): Xaa is C or S
EYQKYIKPTKGIIYLISIPSLDQSVXXPSASA

SEQ ID NO: 60325 - protein, 29 aa, Artificial Sequence
  Cyclic GFR-binding peptide
  MOD_RES (29)..(29): Xaa is C or S
VMNEYKFKIVNNSSDLYLVSIPELKTPAX

SEQ ID NO: 60326 - protein, 38 aa, Artificial Sequence; identical to SEQ ID NO: 17519
  Cyclic GFR-binding peptide
  MOD_RES (2)..(33)..(34): Xaa is C or S

SEQ ID NO: 60327 - protein, 31 aa, Artificial Sequence; identical to SEQ ID NO: 17520
  Cyclic GFR-binding peptide
  MOD_RES (31)..(31): Xaa is C or S

SEQ ID NO: 60328 - protein, 33 aa, Artificial Sequence; identical to SEQ ID NO: 17523
  Cyclic GFR-binding peptide
  MOD_RES (31)..(32): Xaa is C or S

SEQ ID NO: 60329 - protein, 30 aa, Artificial Sequence
  Cyclic GFR-binding peptide
  MOD_RES (2)..(4): Xaa is C or S
HXGXARVVMNEYQKYIVNSSDDIYLVSIPS

SEQ ID NO: 60330 - protein, 26 aa, Artificial Sequence
  Cyclic GFR-binding peptide
VMNEYQKYIVNSSDDIYLVSIPSLKT

SEQ ID NO: 60331 - protein, 28 aa, Artificial Sequence
  Cyclic GFR-binding peptide
  MOD_RES (1)..(1): Xaa is C or S
XAEVVMDYHYKLVVNNAADKYLISIPSL

SEQ ID NO: 60332 - protein, 28 aa, Artificial Sequence
  Cyclic GFR-binding peptide
VMNEYQKYIVNSSDDIYLVSIPSLQTPA

SEQ ID NO: 60333 - protein, 35 aa, Artificial Sequence; identical to SEQ ID NO: 17526
  Cyclic GFR-binding peptide
  MOD_RES (1)..(34)..(35): Xaa is C or S

SEQ ID NO: 60334 - protein, 34 aa, Artificial Sequence; identical to SEQ ID NO: 17527
  Cyclic GFR-binding peptide
  MOD_RES (31)..(32): Xaa is C or S

SEQ ID NO: 60335 - protein, 26 aa, Artificial Sequence
  Cyclic GFR-binding peptide
MGYHYKLYTVVGKDKYLISIPSLKTP

SEQ ID NO: 60336 - protein, 28 aa, Artificial Sequence
  Cyclic GFR-binding peptide
VIMEYQKYIKPTKGIIYLISIPSLDQSV

SEQ ID NO: 60337 - protein, 30 aa, Artificial Sequence
  Cyclic GFR-binding peptide
  MOD_RES (26)..(27): Xaa is C or S
EYQKYYTVVGKDIYLISIPSLKTPVXXAKS

SEQ ID NO: 60338 - protein, 34 aa, Artificial Sequence; identical to SEQ ID NO: 17531
  Cyclic GFR-binding peptide
  MOD_RES (31)..(32): Xaa is C or S

SEQ ID NO: 60339 - protein, 30 aa, Artificial Sequence
  Cyclic GFR-binding peptide
  MOD_RES (26)..(27): Xaa is C or S
YHYKLVVNNAADKYLISIPSLRAPVXXSAP

SEQ ID NO: 60340 - protein, 39 aa, Artificial Sequence; identical to SEQ ID NO: 17538
  Cyclic GFR-binding peptide
  MOD_RES (1)..(33)..(34): Xaa is C or S

SEQ ID NO: 60341 - protein, 37 aa, Artificial Sequence; identical to SEQ ID NO: 17539
  Cyclic GFR-binding peptide
  MOD_RES (31)..(32): Xaa is C or S

SEQ ID NO: 60342 - protein, 26 aa, Artificial Sequence
  Cyclic GFR-binding peptide
  MOD_RES (1)..(1): Xaa is C or S
XSKVIMEYKFKIKPTKGILYLISIPE

SEQ ID NO: 60343 - protein, 39 aa, Artificial Sequence; identical to SEQ ID NO: 17543
  Cyclic GFR-binding peptide
  MOD_RES (1)..(33)..(34): Xaa is C or S

SEQ ID NO: 60344 - protein, 30 aa, Artificial Sequence
  Cyclic GFR-binding peptide
  MOD_RES (26)..(27): Xaa is C or S
EYQKYIVNNSSDIYLVSIPSLKTPAXXAKP

SEQ ID NO: 60345 - protein, 33 aa, Artificial Sequence
  Cyclic GFR-binding peptide
  MOD_RES (30)..(31): Xaa is C or S
VVMEEYQKYVVKDYEDIYLMSIPSLETPVXXAK

SEQ ID NO: 60346 - protein, 41 aa, Artificial Sequence; identical to SEQ ID NO: 17544
  Cyclic GFR-binding peptide
  MOD_RES (1)..(3)..(35): Xaa is C or S

SEQ ID NO: 60347 - protein, 38 aa, Artificial Sequence; identical to SEQ ID NO: 17545
  Cyclic GFR-binding peptide
  MOD_RES (1)..(3)..(35)..(36): Xaa is C or S

SEQ ID NO: 60348 - protein, 31 aa, Artificial Sequence
  Cyclic GFR-binding peptide
  MOD_RES (28)..(29): Xaa is C or S
IMEYQKYVKPKRGVIYLISIPSLAQPVXXPA

SEQ ID NO: 60349 - protein, 22 aa, Artificial Sequence
  Cyclic GFR-binding peptide
EYKFKVVKDYEDLYLMSIPELE

SEQ ID NO: 60350 - protein, 34 aa, Artificial Sequence; identical to SEQ ID NO: 17553
  Cyclic GFR-binding peptide
  MOD_RES (2)..(4): Xaa is C or S

SEQ ID NO: 60351 - protein, 26 aa, Artificial Sequence
  Cyclic GFR-binding peptide
VVMEEYQKYVVKDYEDIYLMSIPSLE

SEQ ID NO: 60352 - protein, 39 aa, Artificial Sequence; identical to SEQ ID NO: 17559
  Cyclic GFR-binding peptide
  MOD_RES (1)..(33)..(34): Xaa is C or S

SEQ ID NO: 60353 - protein, 27 aa, Artificial Sequence
  Cyclic GFR-binding peptide
KVVMEYKFKVKPTRGVLYLISIPELDQ

SEQ ID NO: 60354 - protein, 42 aa, Artificial Sequence; identical to SEQ ID NO: 17564
  Cyclic GFR-binding peptide
  MOD_RES (2)..(4)..(36)..(37): Xaa is C or S

SEQ ID NO: 60355 - protein, 23 aa, Artificial Sequence
  Cyclic GFR-binding peptide
GEYQKYYTVVGKDIYLISIPSLK

SEQ ID NO: 60356 - protein, 23 aa, Artificial Sequence
  Cyclic GFR-binding peptide
EYQKYIVNSSDDIYLVSIPSLKT

SEQ ID NO: 60357 - protein, 29 aa, Artificial Sequence
  Cyclic GFR-binding peptide
  MOD_RES (1)..(1): Xaa is C or S
XAEVVMDYHYKLVVNNAADKYLISIPSLR

SEQ ID NO: 60358 - protein, 29 aa, Artificial Sequence
  Cyclic GFR-binding peptide
  MOD_RES (29)..(29): Xaa is C or S
AMGRYKKLYTVVGKDFYLISIANLKTPVX

SEQ ID NO: 60359 - protein, 35 aa, Artificial Sequence; identical to SEQ ID NO: 17572
  Cyclic GFR-binding peptide
  MOD_RES (31)..(32): Xaa is C or S

SEQ ID NO: 60360 - protein, 33 aa, Artificial Sequence
  Cyclic GFR-binding peptide
  MOD_RES (1)..(3): Xaa is C or S
XGXARVVMNEYKFKIVNSSDDLYLVSIPELQTP

SEQ ID NO: 60361 - protein, 38 aa, Artificial Sequence; identical to SEQ ID NO: 17576
  Cyclic GFR-binding peptide
  MOD_RES (32)..(33): Xaa is C or S

SEQ ID NO: 60362 - protein, 36 aa, Artificial Sequence; identical to SEQ ID NO: 17579
  Cyclic GFR-binding peptide
  MOD_RES (1)..(3)..(34)..(35): Xaa is C or S

SEQ ID NO: 60363 - protein, 40 aa, Artificial Sequence; identical to SEQ ID NO: 17580
  Cyclic GFR-binding peptide
  MOD_RES (2)..(4)..(36)..(37): Xaa is C or S

SEQ ID NO: 60364 - protein, 34 aa, Artificial Sequence; identical to SEQ ID NO: 17581
  Cyclic GFR-binding peptide
  MOD_RES (2)..(34): Xaa is C or S

SEQ ID NO: 60365 - protein, 26 aa, Artificial Sequence
  Cyclic GFR-binding peptide
GEYQKYYTVVGKDIYLISIPSLKTPV

SEQ ID NO: 60366 - protein, 27 aa, Artificial Sequence
  Cyclic GFR-binding peptide
SRVIMEYQKYVKPKRGVIYLISIPSLA

SEQ ID NO: 60367 - protein, 34 aa, Artificial Sequence
  Cyclic GFR-binding peptide
  MOD_RES (30)..(31): Xaa is C or S
SMGEEYQKYTPVGMDDIYLVSIPSLKTPVXXAKG

SEQ ID NO: 60368 - protein, 23 aa, Artificial Sequence
  Cyclic GFR-binding peptide
EYKFKVKPTRGVLYLISIPELDQ

SEQ ID NO: 60369 - protein, 30 aa, Artificial Sequence
  Cyclic GFR-binding peptide
  MOD_RES (2)..(4): Xaa is C or S
RXGXESVAMGYHYKLYTVVGKDKYLISIPS

SEQ ID NO: 60370 - protein, 37 aa, Artificial Sequence; identical to SEQ ID NO: 17583
  Cyclic GFR-binding peptide
  MOD_RES (1)..(34)..(35): Xaa is C or S

SEQ ID NO: 60371 - protein, 26 aa, Artificial Sequence
  Cyclic GFR-binding peptide
VMNEYKFKIVNNSSDLYLVSIPELKT

SEQ ID NO: 60372 - protein, 28 aa, Artificial Sequence
  Cyclic GFR-binding peptide
  MOD_RES (27)..(28): Xaa is C or S
GYHYKLYTVVGKDKYLISIPSLKTPVXX

SEQ ID NO: 60373 - protein, 32 aa, Artificial Sequence
  Cyclic GFR-binding peptide
  MOD_RES (26)..(27): Xaa is C or S
EYQKYVKPTRGVIYLISIPSLDQPVXXPSASA

SEQ ID NO: 60374 - protein, 30 aa, Artificial Sequence
  Cyclic GFR-binding peptide
  MOD_RES (1)..(3): Xaa is C or S
XKXSKVIMEYKFKIKPTKGILYLISIPELD

SEQ ID NO: 60375 - protein, 31 aa, Artificial Sequence; identical to SEQ ID NO: 17589
  Cyclic GFR-binding peptide
  MOD_RES (31)..(31): Xaa is C or S

SEQ ID NO: 60376 - protein, 36 aa, Artificial Sequence; identical to SEQ ID NO: 17592
  Cyclic GFR-binding peptide
  MOD_RES (1)..(33)..(34): Xaa is C or S

SEQ ID NO: 60377 - protein, 36 aa, Artificial Sequence; identical to SEQ ID NO: 17593
  Cyclic GFR-binding peptide
  MOD_RES (31)..(32): Xaa is C or S

SEQ ID NO: 60378 - protein, 30 aa, Artificial Sequence
  Cyclic GFR-binding peptide
  MOD_RES (1)..(3): Xaa is C or S
XKXSKVVMEYQKYVKPTRGVIYLISIPSLD

SEQ ID NO: 60379 - protein, 36 aa, Artificial Sequence; identical to SEQ ID NO: 17595
  Cyclic GFR-binding peptide
  MOD_RES (31)..(32): Xaa is C or S

SEQ ID NO: 60380 - protein, 27 aa, Artificial Sequence
  Cyclic GFR-binding peptide
EVVMEEYKFKVVKDYEDLYLMSIPELE

SEQ ID NO: 60381 - protein, 35 aa, Artificial Sequence; identical to SEQ ID NO: 17599
  Cyclic GFR-binding peptide
  MOD_RES (2)..(34)..(35): Xaa is C or S

SEQ ID NO: 60382 - protein, 28 aa, Artificial Sequence
  Cyclic GFR-binding peptide
RVVMNEYKFKIVNSSDDLYLVSIPELKT

SEQ ID NO: 60383 - protein, 28 aa, Artificial Sequence
  Cyclic GFR-binding peptide
  MOD_RES (28)..(28): Xaa is C or S
GEEYKFKTPVGMDDLYLVSIPELKTPVX

SEQ ID NO: 60384 - protein, 39 aa, Artificial Sequence; identical to SEQ ID NO: 17600
  Cyclic GFR-binding peptide
  MOD_RES (1)..(3)..(35)..(36): Xaa is C or S

SEQ ID NO: 60385 - protein, 21 aa, Artificial Sequence
  Cyclic GFR-binding peptide
EYKFKVVKDYEDLYLMSIPEL

SEQ ID NO: 60386 - protein, 35 aa, Artificial Sequence; identical to SEQ ID NO: 17603
  Cyclic GFR-binding peptide
  MOD_RES (2)..(34)..(35): Xaa is C or S

SEQ ID NO: 60387 - protein, 35 aa, Artificial Sequence; identical to SEQ ID NO: 17604
  Cyclic GFR-binding peptide
  MOD_RES (2)..(34)..(35): Xaa is C or S

SEQ ID NO: 60388 - protein, 33 aa, Artificial Sequence
  Cyclic GFR-binding peptide
  MOD_RES (28)..(29): Xaa is C or S
MGRYKKLYTVVGKDFYLISIANLKTPVXXAKSA

SEQ ID NO: 60389 - protein, 39 aa, Artificial Sequence; identical to SEQ ID NO: 17607
  Cyclic GFR-binding peptide
  MOD_RES (2)..(34)..(35): Xaa is C or S

SEQ ID NO: 60390 - protein, 31 aa, Artificial Sequence; identical to SEQ ID NO: 17609
  Cyclic GFR-binding peptide
  MOD_RES (31)..(31): Xaa is C or S

SEQ ID NO: 60391 - protein, 33 aa, Artificial Sequence
  Cyclic GFR-binding peptide
  MOD_RES (27)..(27): Xaa is C or S
NEYQKYIVNSSDDIYLVSIPSLKTPAXTPKTVH

SEQ ID NO: 60392 - protein, 30 aa, Artificial Sequence
  Cyclic GFR-binding peptide
EAVSMGEEYQKYTPVGMDDIYLVSIPSLKT

SEQ ID NO: 60393 - protein, 34 aa, Artificial Sequence; identical to SEQ ID NO: 17619
  Cyclic GFR-binding peptide
  MOD_RES (32)..(33): Xaa is C or S

SEQ ID NO: 60394 - protein, 36 aa, Artificial Sequence; identical to SEQ ID NO: 17621
  Cyclic GFR-binding peptide
  MOD_RES (2)..(34)..(35): Xaa is C or S

SEQ ID NO: 60395 - protein, 29 aa, Artificial Sequence
  Cyclic GFR-binding peptide
  MOD_RES (28)..(29): Xaa is C or S
IMEYQKYVKPKRGVIYLISIPSLAQPVXX

SEQ ID NO: 60396 - protein, 20 aa, Artificial Sequence
  Cyclic GFR-binding peptide
EYKFKVKPKRGVLYLISIPE

SEQ ID NO: 60397 - protein, 29 aa, Artificial Sequence
  Cyclic GFR-binding peptide
  MOD_RES (29)..(29): Xaa is C or S
MGEEYKFKTPVGMDDLYLVSIPELKTPVX

SEQ ID NO: 60398 - protein, 25 aa, Artificial Sequence
  Cyclic GFR-binding peptide
MDYHYKLVVNNAADKYLISIPSLRA

SEQ ID NO: 60399 - protein, 24 aa, Artificial Sequence
  Cyclic GFR-binding peptide
MEYKFKVKPKRGVLYLISIPELAQ

SEQ ID NO: 60400 - protein, 41 aa, Artificial Sequence; identical to SEQ ID NO: 17629
  Cyclic GFR-binding peptide
  MOD_RES (1)..(3)..(35): Xaa is C or S

SEQ ID NO: 60401 - protein, 34 aa, Artificial Sequence; identical to SEQ ID NO: 17635
  Cyclic GFR-binding peptide
  MOD_RES (32)..(33): Xaa is C or S

SEQ ID NO: 60402 - protein, 33 aa, Artificial Sequence
  Cyclic GFR-binding peptide
  MOD_RES (30)..(31): Xaa is C or S
VVMDRYKKLVVNNAADFYLISIANLRAPVXXSA

SEQ ID NO: 60403 - protein, 37 aa, Artificial Sequence; identical to SEQ ID NO: 17637
  Cyclic GFR-binding peptide
  MOD_RES (1)..(3)..(35)..(36): Xaa is C or S

SEQ ID NO: 60404 - protein, 31 aa, Artificial Sequence
  Cyclic GFR-binding peptide
  MOD_RES (29)..(30): Xaa is C or S
MGEEYKFKTPVGMDDLYLVSIPELKTPVXXA

SEQ ID NO: 60405 - protein, 26 aa, Artificial Sequence
  Cyclic GFR-binding peptide
VMDEYQKYVVKENEDIYLMSIPSLET

SEQ ID NO: 60406 - protein, 33 aa, Artificial Sequence; identical to SEQ ID NO: 17640
  Cyclic GFR-binding peptide
  MOD_RES (1)..(33): Xaa is C or S

SEQ ID NO: 60407 - protein, 29 aa, Artificial Sequence
  Cyclic GFR-binding peptide
  MOD_RES (29)..(29): Xaa is C or S
VIMEYKFKIKPTKGILYLISIPELDQSVX

SEQ ID NO: 60408 - protein, 34 aa, Artificial Sequence
  Cyclic GFR-binding peptide
  MOD_RES (2)..(4): Xaa is C or S
HXGXSRVVMNEYQKYIVNSSDDIYLVSIPSLKTP

SEQ ID NO: 60409 - protein, 34 aa, Artificial Sequence; identical to SEQ ID NO: 17641
  Cyclic GFR-binding peptide
  MOD_RES (31)..(32): Xaa is C or S

SEQ ID NO: 60410 - protein, 39 aa, Artificial Sequence; identical to SEQ ID NO: 17645
  Cyclic GFR-binding peptide
  MOD_RES (1)..(3)..(34)..(35): Xaa is C or S

SEQ ID NO: 60411 - protein, 32 aa, Artificial Sequence
  Cyclic GFR-binding peptide
  MOD_RES (27)..(28): Xaa is C or S
MEYKFKVKPKRGVLYLISIPELAQPVXXPAAS

SEQ ID NO: 60412 - protein, 36 aa, Artificial Sequence; identical to SEQ ID NO: 17648
  Cyclic GFR-binding peptide
  MOD_RES (1)..(33)..(34): Xaa is C or S

SEQ ID NO: 60413 - protein, 29 aa, Artificial Sequence
  Cyclic GFR-binding peptide
VSMGEEYQKYTPVGMDDIYLVSIPSLKTP

SEQ ID NO: 60414 - protein, 27 aa, Artificial Sequence
  Cyclic GFR-binding peptide
MGEYQKYYTVVGKDIYLISIPSLKTPV

SEQ ID NO: 60415 - protein, 25 aa, Artificial Sequence
  Cyclic GFR-binding peptide
VIMEYQKYIKPTKGIIYLISIPSLD

SEQ ID NO: 60416 - protein, 32 aa, Artificial Sequence; identical to SEQ ID NO: 17651
  Cyclic GFR-binding peptide
  MOD_RES (1)..(1): Xaa is C or S

SEQ ID NO: 60417 - protein, 25 aa, Artificial Sequence
  Cyclic GFR-binding peptide
YHYKLYTVVGKDKYLISIPSLKTPV

SEQ ID NO: 60418 - protein, 34 aa, Artificial Sequence; identical to SEQ ID NO: 17656
  Cyclic GFR-binding peptide
  MOD_RES (33)..(34): Xaa is C or S

SEQ ID NO: 60419 - protein, 29 aa, Artificial Sequence
  Cyclic GFR-binding peptide
  MOD_RES (2)..(4): Xaa is C or S
SXKXSRVIMEYKFKVKPKRGVLYLISIPE

SEQ ID NO: 60420 - protein, 25 aa, Artificial Sequence
  Cyclic GFR-binding peptide
GRYKKLYTVVGKDFYLISIANLKTP

SEQ ID NO: 60421 - protein, 38 aa, Artificial Sequence; identical to SEQ ID NO: 17659
  Cyclic GFR-binding peptide
  MOD_RES (1)..(3)..(35): Xaa is C or S

SEQ ID NO: 60422 - protein, 31 aa, Artificial Sequence; identical to SEQ ID NO: 17660
  Cyclic GFR-binding peptide

SEQ ID NO: 60423 - protein, 28 aa, Artificial Sequence
  Cyclic GFR-binding peptide
  MOD_RES (26)..(27): Xaa is C or S
EYKFKIKPTKGILYLISIPELDQSVXXP

SEQ ID NO: 60424 - protein, 30 aa, Artificial Sequence
  Cyclic GFR-binding peptide
  MOD_RES (1)..(1): Xaa is C or S
XARVVMNEYKFKIVNSSDDLYLVSIPELQT

SEQ ID NO: 60425 - protein, 28 aa, Artificial Sequence
  Cyclic GFR-binding peptide
VVMNEYKFKIVNNSSDLYLVSIPELKTP

SEQ ID NO: 60426 - protein, 38 aa, Artificial Sequence; identical to SEQ ID NO: 17664
  Cyclic GFR-binding peptide
  MOD_RES (32)..(33): Xaa is C or S

SEQ ID NO: 60427 - protein, 32 aa, Artificial Sequence
  Cyclic GFR-binding peptide
  MOD_RES (2)..(4): Xaa is C or S
RXGXESVAMGYHYKLYTVVGKDKYLISIPSLK

SEQ ID NO: 60428 - protein, 35 aa, Artificial Sequence; identical to SEQ ID NO: 17665
  Cyclic GFR-binding peptide
  MOD_RES (31)..(32): Xaa is C or S

SEQ ID NO: 60429 - protein, 25 aa, Artificial Sequence
  Cyclic GFR-binding peptide
GEEYQKYTPVGMDDIYLVSIPSLKT

SEQ ID NO: 60430 - protein, 31 aa, Artificial Sequence
  Cyclic GFR-binding peptide
  MOD_RES (2)..(2): Xaa is C or S
GXAEVVMDEYKFKVVNNAADLYLISIPELRA

SEQ ID NO: 60431 - protein, 33 aa, Artificial Sequence
  Cyclic GFR-binding peptide
  MOD_RES (27)..(28): Xaa is C or S
DYHYKLVVNNAADKYLISIPSLRAPVXXSAPAA

SEQ ID NO: 60432 - protein, 31 aa, Artificial Sequence; identical to SEQ ID NO: 17669
  Cyclic GFR-binding peptide

SEQ ID NO: 60433 - protein, 38 aa, Artificial Sequence; identical to SEQ ID NO: 17674
  Cyclic GFR-binding peptide
  MOD_RES (2)..(34)..(35): Xaa is C or S

SEQ ID NO: 60434 - protein, 40 aa, Artificial Sequence; identical to SEQ ID NO: 17675
  Cyclic GFR-binding peptide
  MOD_RES (2)..(34)..(35): Xaa is C or S

SEQ ID NO: 60435 - protein, 29 aa, Artificial Sequence
  Cyclic GFR-binding peptide
  MOD_RES (26)..(27): Xaa is C or S
YHYKLVVNNAADKYLISIPSLRAPVXXSA

SEQ ID NO: 60436 - protein, 24 aa, Artificial Sequence
  Cyclic GFR-binding peptide
MDRYKKLVVNNAADFYLISIANLR

SEQ ID NO: 60437 - protein, 37 aa, Artificial Sequence; identical to SEQ ID NO: 17678
  Cyclic GFR-binding peptide
  MOD_RES (2)..(34)..(35): Xaa is C or S

SEQ ID NO: 60438 - protein, 26 aa, Artificial Sequence
  Cyclic GFR-binding peptide
  MOD_RES (26)..(26): Xaa is C or S
YHYKLVVNNAADKYLISIPSLRAPVX

SEQ ID NO: 60439 - protein, 29 aa, Artificial Sequence
  Cyclic GFR-binding peptide
  MOD_RES (1)..(3): Xaa is C or S
XGXGEVVMDEYQKYVVKENEDIYLMSIPS

SEQ ID NO: 60440 - protein, 28 aa, Artificial Sequence
  Cyclic GFR-binding peptide
  MOD_RES (28)..(28): Xaa is C or S
IMEYQKYVKPKRGVIYLISIPSLAQPVX

SEQ ID NO: 60441 - protein, 37 aa, Artificial Sequence; identical to SEQ ID NO: 17687
  Cyclic GFR-binding peptide
  MOD_RES (31)..(32): Xaa is C or S

SEQ ID NO: 60442 - protein, 32 aa, Artificial Sequence
  Cyclic GFR-binding peptide
  MOD_RES (30)..(31): Xaa is C or S
VAMGEYQKYYTVVGKDIYLISIPSLKTPVXXA

SEQ ID NO: 60443 - protein, 39 aa, Artificial Sequence; identical to SEQ ID NO: 17692
  Cyclic GFR-binding peptide
  MOD_RES (2)..(34)..(35): Xaa is C or S

SEQ ID NO: 60444 - protein, 31 aa, Artificial Sequence
  Cyclic GFR-binding peptide
  MOD_RES (27)..(27): Xaa is C or S
NEYKFKIVNSSDDLYLVSIPELKTPAXTPKT

SEQ ID NO: 60445 - protein, 27 aa, Artificial Sequence
  Cyclic GFR-binding peptide
  MOD_RES (26)..(27): Xaa is C or S
EYKFKIVNNSSDLYLVSIPELKTPAXX

SEQ ID NO: 60446 - protein, 35 aa, Artificial Sequence; identical to SEQ ID NO: 17697
  Cyclic GFR-binding peptide
  MOD_RES (31)..(32): Xaa is C or S

SEQ ID NO: 60447 - protein, 35 aa, Artificial Sequence
  Cyclic GFR-binding peptide
  MOD_RES (30)..(31): Xaa is C or S
VAMGRYKKLYTVVGKDFYLISIANLKTPVXXAKSA

SEQ ID NO: 60448 - protein, 28 aa, Artificial Sequence
  Cyclic GFR-binding peptide
  MOD_RES (27)..(28): Xaa is C or S
EEYQKYTPVGMDDIYLVSIPSLKTPVXX

SEQ ID NO: 60449 - protein, 30 aa, Artificial Sequence
  Cyclic GFR-binding peptide
GEVVMDEYQKYVVKENEDIYLMSIPSLETP

SEQ ID NO: 60450 - protein, 29 aa, Artificial Sequence
  Cyclic GFR-binding peptide
  MOD_RES (1)..(1): Xaa is C or S
XGEVVMEEYQKYVVKDYEDIYLMSIPSLE

SEQ ID NO: 60451 - protein, 39 aa, Artificial Sequence; identical to SEQ ID NO: 17701
  Cyclic GFR-binding peptide
  MOD_RES (2)..(4)..(36)..(37): Xaa is C or S

SEQ ID NO: 60452 - protein, 33 aa, Artificial Sequence; identical to SEQ ID NO: 17702
  Cyclic GFR-binding peptide
  MOD_RES (2)..(2): Xaa is C or S

SEQ ID NO: 60453 - protein, 37 aa, Artificial Sequence; identical to SEQ ID NO: 17705
  Cyclic GFR-binding peptide
  MOD_RES (2)..(4)..(36)..(37): Xaa is C or S

SEQ ID NO: 60454 - protein, 28 aa, Artificial Sequence
  Cyclic GFR-binding peptide
  MOD_RES (1)..(1): Xaa is C or S
XGEVVMDEYQKYVVKENEDIYLMSIPSL

SEQ ID NO: 60455 - protein, 32 aa, Artificial Sequence
  Cyclic GFR-binding peptide
  MOD_RES (1)..(3): Xaa is C or S
XGXGEVVMEEYKFKVVKDYEDLYLMSIPELET

SEQ ID NO: 60456 - protein, 28 aa, Artificial Sequence
  Cyclic GFR-binding peptide
  MOD_RES (2)..(2): Xaa is C or S
GXAKVVMNEYKFKIVNNSSDLYLVSIPE

SEQ ID NO: 60457 - protein, 34 aa, Artificial Sequence; identical to SEQ ID NO: 17710
  Cyclic GFR-binding peptide
  MOD_RES (2)..(33)..(34): Xaa is C or S

SEQ ID NO: 60458 - protein, 32 aa, Artificial Sequence
  Cyclic GFR-binding peptide
  MOD_RES (28)..(29): Xaa is C or S
MDRYKKLVVNNAADFYLISIANLRAPVXXSAP

SEQ ID NO: 60459 - protein, 35 aa, Artificial Sequence; identical to SEQ ID NO: 17717
  Cyclic GFR-binding peptide
  MOD_RES (2)..(4)..(35): Xaa is C or S

SEQ ID NO: 60460 - protein, 30 aa, Artificial Sequence
  Cyclic GFR-binding peptide
  MOD_RES (29)..(30): Xaa is C or S
VMNEYQKYIVNSSDDIYLVSIPSLQTPAXX

SEQ ID NO: 60461 - protein, 33 aa, Artificial Sequence
  Cyclic GFR-binding peptide
  MOD_RES (27)..(28): Xaa is C or S
NEYKFKIVNNSSDLYLVSIPELKTPAXXAKPVA

SEQ ID NO: 60462 - protein, 26 aa, Artificial Sequence
  Cyclic GFR-binding peptide
VMEEYKFKVVKDYEDLYLMSIPELET

SEQ ID NO: 60463 - protein, 33 aa, Artificial Sequence
  Cyclic GFR-binding peptide
  MOD_RES (2)..(4): Xaa is C or S
RXGXAEVVMDEYKFKVVNNAADLYLISIPELRA

SEQ ID NO: 60464 - protein, 28 aa, Artificial Sequence
  Cyclic GFR-binding peptide
AVSMGEEYQKYTPVGMDDIYLVSIPSLK

SEQ ID NO: 60465 - protein, 40 aa, Artificial Sequence; identical to SEQ ID NO: 17719
  Cyclic GFR-binding peptide
  MOD_RES (2)..(35)..(36): Xaa is C or S

SEQ ID NO: 60466 - protein, 31 aa, Artificial Sequence
  Cyclic GFR-binding peptide
  MOD_RES (26)..(27): Xaa is C or S
EYQKYVKPKRGVIYLISIPSLAQPVXXPAAS

SEQ ID NO: 60467 - protein, 34 aa, Artificial Sequence
  Cyclic GFR-binding peptide
  MOD_RES (29)..(30): Xaa is C or S
AMGYHYKLYTVVGKDKYLISIPSLKTPVXXAKSA

SEQ ID NO: 60468 - protein, 29 aa, Artificial Sequence
  Cyclic GFR-binding peptide
KVVMEYQKYVKPTRGVIYLISIPSLDQPV

SEQ ID NO: 60469 - protein, 25 aa, Artificial Sequence
  Cyclic GFR-binding peptide
IMEYKFKIKPTKGILYLISIPELDQ

SEQ ID NO: 60470 - protein, 35 aa, Artificial Sequence
  Cyclic GFR-binding peptide
  MOD_RES (30)..(31): Xaa is C or S
VVMDEYQKYVVKENEDIYLMSIPSLETPVXXAKPI

SEQ ID NO: 60471 - protein, 30 aa, Artificial Sequence
  Cyclic GFR-binding peptide
  MOD_RES (1)..(3): Xaa is C or S
XGXAEVVMDRYKKLVVNNAADFYLISIANL

SEQ ID NO: 60472 - protein, 27 aa, Artificial Sequence
  Cyclic GFR-binding peptide
ARVVMNEYKFKIVNSSDDLYLVSIPEL

SEQ ID NO: 60473 - protein, 39 aa, Artificial Sequence; identical to SEQ ID NO: 17728
  Cyclic GFR-binding peptide
  MOD_RES (2)..(34)..(35): Xaa is C or S

SEQ ID NO: 60474 - protein, 31 aa, Artificial Sequence
  Cyclic GFR-binding peptide
  MOD_RES (2)..(2): Xaa is C or S
KXSKVIMEYKFKIKPTKGILYLISIPELDQS

SEQ ID NO: 60475 - protein, 34 aa, Artificial Sequence
  Cyclic GFR-binding peptide
  MOD_RES (31)..(32): Xaa is C or S
VSMGEEYKFKTPVGMDDLYLVSIPELKTPVXXAK

SEQ ID NO: 60476 - protein, 38 aa, Artificial Sequence; identical to SEQ ID NO: 17732
  Cyclic GFR-binding peptide
  MOD_RES (2)..(4)..(36)..(37): Xaa is C or S

SEQ ID NO: 60477 - protein, 25 aa, Artificial Sequence
  Cyclic GFR-binding peptide
YHYKLVVNNAADKYLISIPSLRAPV

SEQ ID NO: 60478 - protein, 22 aa, Artificial Sequence
  Cyclic GFR-binding peptide
EEYKFKTPVGMDDLYLVSIPEL

SEQ ID NO: 60479 - protein, 35 aa, Artificial Sequence
  Cyclic GFR-binding peptide
  MOD_RES (30)..(31): Xaa is C or S
VVMNEYKFKIVNSSDDLYLVSIPELQTPAXXPKPV

SEQ ID NO: 60480 - protein, 23 aa, Artificial Sequence
  Cyclic GFR-binding peptide
MEYQKYVKPKRGVIYLISIPSLA

SEQ ID NO: 60481 - protein, 29 aa, Artificial Sequence
  Cyclic GFR-binding peptide
  MOD_RES (28)..(29): Xaa is C or S
MNEYQKYIVNNSSDIYLVSIPSLKTPAXX

SEQ ID NO: 60482 - protein, 26 aa, Artificial Sequence
  Cyclic GFR-binding peptide
GEVVMDEYQKYVVKENEDIYLMSIPS

SEQ ID NO: 60483 - protein, 31 aa, Artificial Sequence
  Cyclic GFR-binding peptide
  MOD_RES (2)..(4): Xaa is C or S
HXGXAKVVMNEYKFKIVNNSSDLYLVSIPEL

SEQ ID NO: 60484 - protein, 25 aa, Artificial Sequence
  Cyclic GFR-binding peptide
MNEYKFKIVNSSDDLYLVSIPELQT

SEQ ID NO: 60485 - protein, 27 aa, Artificial Sequence
  Cyclic GFR-binding peptide
VVMNEYQKYIVNSSDDIYLVSIPSLQT

SEQ ID NO: 60486 - protein, 36 aa, Artificial Sequence; identical to SEQ ID NO: 17744
  Cyclic GFR-binding peptide
  MOD_RES (31)..(32): Xaa is C or S

SEQ ID NO: 60487 - protein, 38 aa, Artificial Sequence; identical to SEQ ID NO: 17746
  Cyclic GFR-binding peptide
  MOD_RES (1)..(33)..(34): Xaa is C or S

SEQ ID NO: 60488 - protein, 28 aa, Artificial Sequence
  Cyclic GFR-binding peptide
VMDEYKFKVVNNAADLYLISIPELRAPV

SEQ ID NO: 60489 - protein, 30 aa, Artificial Sequence
  Cyclic GFR-binding peptide
  MOD_RES (2)..(4): Xaa is C or S
HXGXSRVVMNEYKFKIVNSSDDLYLVSIPE

SEQ ID NO: 60490 - protein, 23 aa, Artificial Sequence
  Cyclic GFR-binding peptide
EYKFKTPVGMDDLYLVSIPELKT

SEQ ID NO: 60491 - protein, 34 aa, Artificial Sequence; identical to SEQ ID NO: 17748
  Cyclic GFR-binding peptide
  MOD_RES (1)..(3): Xaa is C or S

SEQ ID NO: 60492 - protein, 29 aa, Artificial Sequence
  Cyclic GFR-binding peptide
  MOD_RES (26)..(27): Xaa is C or S
EYKFKVVKENEDLYLMSIPELETPVXXAK

SEQ ID NO: 60493 - protein, 31 aa, Artificial Sequence
  Cyclic GFR-binding peptide
  MOD_RES (29)..(30): Xaa is C or S
AMGRYKKLYTVVGKDFYLISIANLKTPVXXA

SEQ ID NO: 60494 - protein, 35 aa, Artificial Sequence
  Cyclic GFR-binding peptide
  MOD_RES (30)..(31): Xaa is C or S
KVIMEYQKYIKPTKGIIYLISIPSLDQSVXXPSAS

SEQ ID NO: 60495 - protein, 36 aa, Artificial Sequence; identical to SEQ ID NO: 17757
  Cyclic GFR-binding peptide
  MOD_RES (1)..(33)..(34): Xaa is C or S

SEQ ID NO: 60496 - protein, 36 aa, Artificial Sequence; identical to SEQ ID NO: 17761
  Cyclic GFR-binding peptide
  MOD_RES (1)..(3)..(35)..(36): Xaa is C or S

SEQ ID NO: 60497 - protein, 33 aa, Artificial Sequence; identical to SEQ ID NO: 17762
  Cyclic GFR-binding peptide
  MOD_RES (1)..(33): Xaa is C or S

SEQ ID NO: 60498 - protein, 32 aa, Artificial Sequence
  Cyclic GFR-binding peptide
  MOD_RES (30)..(31): Xaa is C or S
VAMGYHYKLYTVVGKDKYLISIPSLKTPVXXA

SEQ ID NO: 60499 - protein, 38 aa, Artificial Sequence; identical to SEQ ID NO: 17767
  Cyclic GFR-binding peptide
  MOD_RES (2)..(35)..(36): Xaa is C or S

SEQ ID NO: 60500 - protein, 26 aa, Artificial Sequence
  Cyclic GFR-binding peptide
MGEEYQKYTPVGMDDIYLVSIPSLKT

SEQ ID NO: 60501 - protein, 31 aa, Artificial Sequence; identical to SEQ ID NO: 17769
  Cyclic GFR-binding peptide
  MOD_RES (31)..(31): Xaa is C or S

SEQ ID NO: 60502 - protein, 22 aa, Artificial Sequence
  Cyclic GFR-binding peptide
NEYKFKIVNSSDDLYLVSIPEL

SEQ ID NO: 60503 - protein, 29 aa, Artificial Sequence
  Cyclic GFR-binding peptide
  MOD_RES (1)..(3): Xaa is C or S
XKXSKVVMEYKFKVKPTRGVLYLISIPEL

SEQ ID NO: 60504 - protein, 33 aa, Artificial Sequence
  Cyclic GFR-binding peptide
  MOD_RES (1)..(3): Xaa is C or S
XGXEAVSMGEEYKFKTPVGMDDLYLVSIPELKT

SEQ ID NO: 60505 - protein, 21 aa, Artificial Sequence
  Cyclic GFR-binding peptide
MEYKFKVKPTRGVLYLISIPE

SEQ ID NO: 60506 - protein, 24 aa, Artificial Sequence
  Cyclic GFR-binding peptide
VVMDEYKFKVVNNAADLYLISIPE

SEQ ID NO: 60507 - protein, 27 aa, Artificial Sequence
  Cyclic GFR-binding peptide
VMEEYQKYVVKDYEDIYLMSIPSLETP

SEQ ID NO: 60508 - protein, 41 aa, Artificial Sequence; identical to SEQ ID NO: 17783
  Cyclic GFR-binding peptide
  MOD_RES (2)..(4)..(35)..(36): Xaa is C or S

SEQ ID NO: 60509 - protein, 39 aa, Artificial Sequence; identical to SEQ ID NO: 17784
  Cyclic GFR-binding peptide
  MOD_RES (2)..(4)..(36)..(37): Xaa is C or S

SEQ ID NO: 60510 - protein, 34 aa, Artificial Sequence; identical to SEQ ID NO: 17786
  Cyclic GFR-binding peptide
  MOD_RES (1)..(3)..(34): Xaa is C or S

SEQ ID NO: 60511 - protein, 34 aa, Artificial Sequence; identical to SEQ ID NO: 17787
  Cyclic GFR-binding peptide
  MOD_RES (1)..(3): Xaa is C or S

SEQ ID NO: 60512 - protein, 41 aa, Artificial Sequence; identical to SEQ ID NO: 17789
  Cyclic GFR-binding peptide
  MOD_RES (2)..(4)..(36)..(37): Xaa is C or S

SEQ ID NO: 60513 - protein, 33 aa, Artificial Sequence
  Cyclic GFR-binding peptide
  MOD_RES (1)..(3): Xaa is C or S
XGXESVAMGYHYKLYTVVGKDKYLISIPSLKTP

SEQ ID NO: 60514 - protein, 20 aa, Artificial Sequence
  Cyclic GFR-binding peptide
EYQKYTPVGMDDIYLVSIPS

SEQ ID NO: 60515 - protein, 31 aa, Artificial Sequence
  Cyclic GFR-binding peptide
  MOD_RES (26)..(27): Xaa is C or S
EYKFKIKPTKGILYLISIPELDQSVXXPSAS

SEQ ID NO: 60516 - protein, 33 aa, Artificial Sequence
  Cyclic GFR-binding peptide
  MOD_RES (2)..(4): Xaa is C or S
SXKXSKVVMEYKFKVKPTRGVLYLISIPELDQP

SEQ ID NO: 60517 - protein, 34 aa, Artificial Sequence
  Cyclic GFR-binding peptide
  MOD_RES (29)..(30): Xaa is C or S
VMNEYKFKIVNNSSDLYLVSIPELKTPAXXAKPV

SEQ ID NO: 60518 - protein, 36 aa, Artificial Sequence; identical to SEQ ID NO: 17791
  Cyclic GFR-binding peptide
  MOD_RES (32)..(33): Xaa is C or S

SEQ ID NO: 60519 - protein, 22 aa, Artificial Sequence
  Cyclic GFR-binding peptide
EYKFKIVNSSDDLYLVSIPELK

SEQ ID NO: 60520 - protein, 40 aa, Artificial Sequence; identical to SEQ ID NO: 17793
  Cyclic GFR-binding peptide
  MOD_RES (2)..(4)..(36)..(37): Xaa is C or S

SEQ ID NO: 60521 - protein, 32 aa, Artificial Sequence; identical to SEQ ID NO: 17794
  Cyclic GFR-binding peptide
  MOD_RES (32)..(32): Xaa is C or S

SEQ ID NO: 60522 - protein, 38 aa, Artificial Sequence; identical to SEQ ID NO: 17798
  Cyclic GFR-binding peptide
  MOD_RES (1)..(33)..(34): Xaa is C or S

SEQ ID NO: 60523 - protein, 25 aa, Artificial Sequence
  Cyclic GFR-binding peptide
SVAMGRYKKLYTVVGKDFYLISIAN

SEQ ID NO: 60524 - protein, 30 aa, Artificial Sequence
  Cyclic GFR-binding peptide
  MOD_RES (1)..(3): Xaa is C or S
XGXARVVMNEYQKYIVNSSDDIYLVSIPSL

SEQ ID NO: 60525 - protein, 33 aa, Artificial Sequence
  Cyclic GFR-binding peptide
  MOD_RES (29)..(30): Xaa is C or S
VMNEYQKYIVNSSDDIYLVSIPSLQTPAXXPKP

SEQ ID NO: 60526 - protein, 33 aa, Artificial Sequence; identical to SEQ ID NO: 17799
  Cyclic GFR-binding peptide
  MOD_RES (1)..(1): Xaa is C or S

SEQ ID NO: 60527 - protein, 33 aa, Artificial Sequence
  Cyclic GFR-binding peptide
  MOD_RES (28)..(29): Xaa is C or S
VMEYQKYVKPTRGVIYLISIPSLDQPVXXPSAS

SEQ ID NO: 60528 - protein, 28 aa, Artificial Sequence
  Cyclic GFR-binding peptide
  MOD_RES (2)..(2): Xaa is C or S
KXSKVVMEYKFKVKPTRGVLYLISIPEL

SEQ ID NO: 60529 - protein, 33 aa, Artificial Sequence
  Cyclic GFR-binding peptide
  MOD_RES (30)..(31): Xaa is C or S
VVMEEYKFKVVKDYEDLYLMSIPELETPVXXAK

SEQ ID NO: 60530 - protein, 26 aa, Artificial Sequence
  Cyclic GFR-binding peptide
SVAMGRYKKLYTVVGKDFYLISIANL

SEQ ID NO: 60531 - protein, 33 aa, Artificial Sequence
  Cyclic GFR-binding peptide
  MOD_RES (2)..(4): Xaa is C or S
RXGXAEVVMDRYKKLVVNNAADFYLISIANLRA

SEQ ID NO: 60532 - protein, 32 aa, Artificial Sequence
  Cyclic GFR-binding peptide
  MOD_RES (1)..(3): Xaa is C or S
XGXEAVSMGEEYQKYTPVGMDDIYLVSIPSLK

SEQ ID NO: 60533 - protein, 31 aa, Artificial Sequence
  Cyclic GFR-binding peptide
  MOD_RES (26)..(27): Xaa is C or S
EYQKYTPVGMDDIYLVSIPSLKTPVXXAKGV

SEQ ID NO: 60534 - protein, 37 aa, Artificial Sequence; identical to SEQ ID NO: 17804
  Cyclic GFR-binding peptide
  MOD_RES (1)..(3)..(35)..(36): Xaa is C or S

SEQ ID NO: 60535 - protein, 35 aa, Artificial Sequence; identical to SEQ ID NO: 17803
  Cyclic GFR-binding peptide
  MOD_RES (33)..(34): Xaa is C or S

SEQ ID NO: 60536 - protein, 28 aa, Artificial Sequence
  Cyclic GFR-binding peptide
SRVIMEYQKYVKPKRGVIYLISIPSLAQ

SEQ ID NO: 60537 - protein, 41 aa, Artificial Sequence; identical to SEQ ID NO: 17805
  Cyclic GFR-binding peptide
  MOD_RES (1)..(3)..(36)..(37): Xaa is C or S

SEQ ID NO: 60538 - protein, 42 aa, Artificial Sequence; identical to SEQ ID NO: 17808
  Cyclic GFR-binding peptide
  MOD_RES (2)..(4)..(36): Xaa is C or S

SEQ ID NO: 60539 - protein, 23 aa, Artificial Sequence
  Cyclic GFR-binding peptide
EEYQKYVVKDYEDIYLMSIPSLE

SEQ ID NO: 60540 - protein, 26 aa, Artificial Sequence
  Cyclic GFR-binding peptide
  MOD_RES (26)..(26): Xaa is C or S
EYQKYVVKDYEDIYLMSIPSLETPVX

SEQ ID NO: 60541 - protein, 27 aa, Artificial Sequence
  Cyclic GFR-binding peptide
RVIMEYKFKVKPKRGVLYLISIPELAQ

SEQ ID NO: 60542 - protein, 26 aa, Artificial Sequence
  Cyclic GFR-binding peptide
  MOD_RES (26)..(26): Xaa is C or S
RYKKLVVNNAADFYLISIANLRAPVX

SEQ ID NO: 60543 - protein, 38 aa, Artificial Sequence; identical to SEQ ID NO: 17812
  Cyclic GFR-binding peptide
  MOD_RES (1)..(33): Xaa is C or S

SEQ ID NO: 60544 - protein, 40 aa, Artificial Sequence; identical to SEQ ID NO: 17817
  Cyclic GFR-binding peptide
  MOD_RES (2)..(34)..(35): Xaa is C or S

SEQ ID NO: 60545 - protein, 32 aa, Artificial Sequence
  Cyclic GFR-binding peptide
  MOD_RES (2)..(4): Xaa is C or S
HXGXSRVVMNEYKFKIVNSSDDLYLVSIPELK

SEQ ID NO: 60546 - protein, 29 aa, Artificial Sequence
  Cyclic GFR-binding peptide
  MOD_RES (28)..(29): Xaa is C or S
GEEYKFKTPVGMDDLYLVSIPELKTPVXX

SEQ ID NO: 60547 - protein, 31 aa, Artificial Sequence; identical to SEQ ID NO: 17818
  Cyclic GFR-binding peptide

SEQ ID NO: 60548 - protein, 34 aa, Artificial Sequence; identical to SEQ ID NO: 17819
  Cyclic GFR-binding peptide
  MOD_RES (1)..(3): Xaa is C or S

SEQ ID NO: 60549 - protein, 29 aa, Artificial Sequence
  Cyclic GFR-binding peptide
  MOD_RES (28)..(29): Xaa is C or S
MEEYKFKVVKDYEDLYLMSIPELETPVXX

SEQ ID NO: 60550 - protein, 26 aa, Artificial Sequence
  Cyclic GFR-binding peptide
MEYKFKIKPTKGILYLISIPELDQSV

SEQ ID NO: 60551 - protein, 23 aa, Artificial Sequence
  Cyclic GFR-binding peptide
NEYKFKIVNSSDDLYLVSIPELQ

SEQ ID NO: 60552 - protein, 33 aa, Artificial Sequence; identical to SEQ ID NO: 17824
  Cyclic GFR-binding peptide
  MOD_RES (2)..(2): Xaa is C or S

SEQ ID NO: 60553 - protein, 28 aa, Artificial Sequence
  Cyclic GFR-binding peptide
  MOD_RES (28)..(28): Xaa is C or S
MNEYQKYIVNNSSDIYLVSIPSLKTPAX

SEQ ID NO: 60554 - protein, 34 aa, Artificial Sequence; identical to SEQ ID NO: 17826
  Cyclic GFR-binding peptide
  MOD_RES (1)..(33)..(34): Xaa is C or S

SEQ ID NO: 60555 - protein, 27 aa, Artificial Sequence
  Cyclic GFR-binding peptide
AMGEYQKYYTVVGKDIYLISIPSLKTP

SEQ ID NO: 60556 - protein, 23 aa, Artificial Sequence
  Cyclic GFR-binding peptide
MGEYQKYYTVVGKDIYLISIPSL

SEQ ID NO: 60557 - protein, 30 aa, Artificial Sequence
  Cyclic GFR-binding peptide
  MOD_RES (2)..(2): Xaa is C or S
KXSRVIMEYKFKVKPKRGVLYLISIPELAQ

SEQ ID NO: 60558 - protein, 31 aa, Artificial Sequence
  Cyclic GFR-binding peptide
  MOD_RES (2)..(4): Xaa is C or S
RXGXEAVSMGEEYQKYTPVGMDDIYLVSIPS

SEQ ID NO: 60559 - protein, 29 aa, Artificial Sequence
  Cyclic GFR-binding peptide
  MOD_RES (29)..(29): Xaa is C or S
AMGEYQKYYTVVGKDIYLISIPSLKTPVX

SEQ ID NO: 60560 - protein, 25 aa, Artificial Sequence
  Cyclic GFR-binding peptide
DEYKFKVVKENEDLYLMSIPELETP

SEQ ID NO: 60561 - protein, 27 aa, Artificial Sequence
  Cyclic GFR-binding peptide
EAVSMGEEYQKYTPVGMDDIYLVSIPS

SEQ ID NO: 60562 - protein, 31 aa, Artificial Sequence
  Cyclic GFR-binding peptide
  MOD_RES (1)..(3): Xaa is C or S
XGXESVAMGYHYKLYTVVGKDKYLISIPSLK

SEQ ID NO: 60563 - protein, 25 aa, Artificial Sequence
  Cyclic GFR-binding peptide
VMEEYQKYVVKDYEDIYLMSIPSLE

SEQ ID NO: 60564 - protein, 37 aa, Artificial Sequence
  Cyclic GFR-binding peptide
  MOD_RES (31)..(32): Xaa is C or S
VSMGEEYKFKTPVGMDDLYLVSIPELKTPVXXAKGVK

SEQ ID NO: 60565 - protein, 40 aa, Artificial Sequence; identical to SEQ ID NO: 17839
  Cyclic GFR-binding peptide
  MOD_RES (1)..(3)..(34)..(35): Xaa is C or S

SEQ ID NO: 60566 - protein, 25 aa, Artificial Sequence
  Cyclic GFR-binding peptide
VVMNEYKFKIVNNSSDLYLVSIPEL

SEQ ID NO: 60567 - protein, 41 aa, Artificial Sequence; identical to SEQ ID NO: 17843
  Cyclic GFR-binding peptide
  MOD_RES (1)..(3)..(35)..(36): Xaa is C or S

SEQ ID NO: 60568 - protein, 30 aa, Artificial Sequence
  Cyclic GFR-binding peptide
  MOD_RES (29)..(30): Xaa is C or S
VMDEYKFKVVNNAADLYLISIPELRAPVXX

SEQ ID NO: 60569 - protein, 35 aa, Artificial Sequence; identical to SEQ ID NO: 17846
  Cyclic GFR-binding peptide
  MOD_RES (2)..(34): Xaa is C or S

SEQ ID NO: 60570 - protein, 32 aa, Artificial Sequence
  Cyclic GFR-binding peptide
  MOD_RES (27)..(28): Xaa is C or S
EEYKFKTPVGMDDLYLVSIPELKTPVXXAKGV

SEQ ID NO: 60571 - protein, 28 aa, Artificial Sequence
  Cyclic GFR-binding peptide
  MOD_RES (26)..(27): Xaa is C or S
EYQKYVVKDYEDIYLMSIPSLETPVXXA

SEQ ID NO: 60572 - protein, 30 aa, Artificial Sequence
  Cyclic GFR-binding peptide
  MOD_RES (2)..(2): Xaa is C or S
KXSKVVMEYQKYVKPTRGVIYLISIPSLDQ

SEQ ID NO: 60573 - protein, 31 aa, Artificial Sequence
  Cyclic GFR-binding peptide
  MOD_RES (30)..(31): Xaa is C or S
VVMNEYQKYIVNSSDDIYLVSIPSLKTPAXX

SEQ ID NO: 60574 - protein, 31 aa, Artificial Sequence; identical to SEQ ID NO: 17851
  Cyclic GFR-binding peptide
  MOD_RES (31)..(31): Xaa is C or S

SEQ ID NO: 60575 - protein, 31 aa, Artificial Sequence
  Cyclic GFR-binding peptide
  MOD_RES (2)..(2): Xaa is C or S
GXARVVMNEYKFKIVNSSDDLYLVSIPELQT

SEQ ID NO: 60576 - protein, 31 aa, Artificial Sequence
  Cyclic GFR-binding peptide
  MOD_RES (2)..(4): Xaa is C or S
HXGXARVVMNEYKFKIVNSSDDLYLVSIPEL

SEQ ID NO: 60577 - protein, 33 aa, Artificial Sequence; identical to SEQ ID NO: 17853
  Cyclic GFR-binding peptide
  MOD_RES (31)..(32): Xaa is C or S

SEQ ID NO: 60578 - protein, 25 aa, Artificial Sequence
  Cyclic GFR-binding peptide
VSMGEEYKFKTPVGMDDLYLVSIPE

SEQ ID NO: 60579 - protein, 30 aa, Artificial Sequence
  Cyclic GFR-binding peptide
  MOD_RES (2)..(4): Xaa is C or S
RXGXESVAMGRYKKLYTVVGKDFYLISIAN

SEQ ID NO: 60580 - protein, 35 aa, Artificial Sequence; identical to SEQ ID NO: 17858
  Cyclic GFR-binding peptide
  MOD_RES (1)..(3)..(35): Xaa is C or S

SEQ ID NO: 60581 - protein, 30 aa, Artificial Sequence; identical to SEQ ID NO: 17859
  Cyclic GFR-binding peptide

SEQ ID NO: 60582 - protein, 33 aa, Artificial Sequence
  Cyclic GFR-binding peptide
  MOD_RES (30)..(31): Xaa is C or S
KVIMEYQKYIKPTKGIIYLISIPSLDQSVXXPS

SEQ ID NO: 60583 - protein, 26 aa, Artificial Sequence
  Cyclic GFR-binding peptide
EVVMEEYKFKVVKDYEDLYLMSIPEL

SEQ ID NO: 60584 - protein, 33 aa, Artificial Sequence
  Cyclic GFR-binding peptide
  MOD_RES (27)..(28): Xaa is C or S
NEYQKYIVNSSDDIYLVSIPSLQTPAXXPKPVT

SEQ ID NO: 60585 - protein, 30 aa, Artificial Sequence
  Cyclic GFR-binding peptide
  MOD_RES (2)..(4): Xaa is C or S
RXGXGEVVMEEYQKYVVKDYEDIYLMSIPS

SEQ ID NO: 60586 - protein, 27 aa, Artificial Sequence
  Cyclic GFR-binding peptide
SRVVMNEYKFKIVNSSDDLYLVSIPEL

SEQ ID NO: 60587 - protein, 33 aa, Artificial Sequence
  Cyclic GFR-binding peptide
  MOD_RES (29)..(30): Xaa is C or S
MGEEYQKYTPVGMDDIYLVSIPSLKTPVXXAKG

SEQ ID NO: 60588 - protein, 23 aa, Artificial Sequence
  Cyclic GFR-binding peptide
AMGYHYKLYTVVGKDKYLISIPS

SEQ ID NO: 60589 - protein, 20 aa, Artificial Sequence
  Cyclic GFR-binding peptide
EYKFKVVKDYEDLYLMSIPE

SEQ ID NO: 60590 - protein, 32 aa, Artificial Sequence
  Cyclic GFR-binding peptide
  MOD_RES (2)..(2): Xaa is C or S
GXESVAMGEYQKYYTVVGKDIYLISIPSLKTP

SEQ ID NO: 60591 - protein, 31 aa, Artificial Sequence
  Cyclic GFR-binding peptide
  MOD_RES (27)..(28): Xaa is C or S
DEYQKYVVKENEDIYLMSIPSLETPVXXAKP

SEQ ID NO: 60592 - protein, 34 aa, Artificial Sequence; identical to SEQ ID NO: 17870
  Cyclic GFR-binding peptide
  MOD_RES (1)..(33)..(34): Xaa is C or S

SEQ ID NO: 60593 - protein, 29 aa, Artificial Sequence
  Cyclic GFR-binding peptide
VVMNEYQKYIVNNSSDIYLVSIPSLKTPA

SEQ ID NO: 60594 - protein, 38 aa, Artificial Sequence; identical to SEQ ID NO: 17874
  Cyclic GFR-binding peptide
  MOD_RES (2)..(34)..(35): Xaa is C or S

SEQ ID NO: 60595 - protein, 24 aa, Artificial Sequence
  Cyclic GFR-binding peptide
YHYKLVVNNAADKYLISIPSLRAP

SEQ ID NO: 60596 - protein, 37 aa, Artificial Sequence; identical to SEQ ID NO: 17883
  Cyclic GFR-binding peptide
  MOD_RES (31)..(32): Xaa is C or S

SEQ ID NO: 60597 - protein, 37 aa, Artificial Sequence; identical to SEQ ID NO: 17884
  Cyclic GFR-binding peptide
  MOD_RES (2)..(4)..(37): Xaa is C or S

SEQ ID NO: 60598 - protein, 23 aa, Artificial Sequence
  Cyclic GFR-binding peptide
MDRYKKLVVNNAADFYLISIANL

SEQ ID NO: 60599 - protein, 30 aa, Artificial Sequence
  Cyclic GFR-binding peptide
  MOD_RES (27)..(28): Xaa is C or S
NEYKFKIVNSSDDLYLVSIPELKTPAXXPK

SEQ ID NO: 60600 - protein, 34 aa, Artificial Sequence
  Cyclic GFR-binding peptide
  MOD_RES (28)..(29): Xaa is C or S
MDEYQKYVVKENEDIYLMSIPSLETPVXXAKPIK

SEQ ID NO: 60601 - protein, 36 aa, Artificial Sequence; identical to SEQ ID NO: 17889
  Cyclic GFR-binding peptide
  MOD_RES (32)..(33): Xaa is C or S

SEQ ID NO: 60602 - protein, 30 aa, Artificial Sequence
  Cyclic GFR-binding peptide
AEVVMDRYKKLVVNNAADFYLISIANLRAP

SEQ ID NO: 60603 - protein, 31 aa, Artificial Sequence
  Cyclic GFR-binding peptide
  MOD_RES (26)..(27): Xaa is C or S
RYKKLVVNNAADFYLISIANLRAPVXXSAPA

SEQ ID NO: 60604 - protein, 28 aa, Artificial Sequence
  Cyclic GFR-binding peptide
  MOD_RES (27)..(28): Xaa is C or S
MEYKFKVKPKRGVLYLISIPELAQPVXX

SEQ ID NO: 60605 - protein, 31 aa, Artificial Sequence
  Cyclic GFR-binding peptide
  MOD_RES (1)..(3): Xaa is C or S
XGXEAVSMGEEYKFKTPVGMDDLYLVSIPEL

SEQ ID NO: 60606 - protein, 22 aa, Artificial Sequence
  Cyclic GFR-binding peptide
EEYQKYTPVGMDDIYLVSIPSL

SEQ ID NO: 60607 - protein, 39 aa, Artificial Sequence; identical to SEQ ID NO: 17899
  Cyclic GFR-binding peptide
  MOD_RES (2)..(4)..(36)..(37): Xaa is C or S

SEQ ID NO: 60608 - protein, 30 aa, Artificial Sequence
  Cyclic GFR-binding peptide
  MOD_RES (29)..(30): Xaa is C or S
VIMEYQKYIKPTKGIIYLISIPSLDQSVXX

SEQ ID NO: 60609 - protein, 28 aa, Artificial Sequence
  Cyclic GFR-binding peptide
  MOD_RES (2)..(2): Xaa is C or S
GXARVVMNEYKFKIVNSSDDLYLVSIPE

SEQ ID NO: 60610 - protein, 37 aa, Artificial Sequence; identical to SEQ ID NO: 17907
  Cyclic GFR-binding peptide
  MOD_RES (32)..(33): Xaa is C or S

SEQ ID NO: 60611 - protein, 34 aa, Artificial Sequence
  Cyclic GFR-binding peptide
  MOD_RES (28)..(29): Xaa is C or S
MDYHYKLVVNNAADKYLISIPSLRAPVXXSAPAA

SEQ ID NO: 60612 - protein, 27 aa, Artificial Sequence
  Cyclic GFR-binding peptide
MGEEYKFKTPVGMDDLYLVSIPELKTP

SEQ ID NO: 60613 - protein, 25 aa, Artificial Sequence
  Cyclic GFR-binding peptide
KVVMNEYKFKIVNNSSDLYLVSIPE

SEQ ID NO: 60614 - protein, 24 aa, Artificial Sequence
  Cyclic GFR-binding peptide
EYKFKIVNSSDDLYLVSIPELKTP

SEQ ID NO: 60615 - protein, 34 aa, Artificial Sequence; identical to SEQ ID NO: 17918
  Cyclic GFR-binding peptide
  MOD_RES (1)..(33)..(34): Xaa is C or S

SEQ ID NO: 60616 - protein, 23 aa, Artificial Sequence
  Cyclic GFR-binding peptide
VMDEYQKYVVKENEDIYLMSIPS

SEQ ID NO: 60617 - protein, 30 aa, Artificial Sequence
  Cyclic GFR-binding peptide
  MOD_RES (26)..(27): Xaa is C or S
EYKFKIVNSSDDLYLVSIPELKTPAXXPKP

SEQ ID NO: 60618 - protein, 42 aa, Artificial Sequence; identical to SEQ ID NO: 17922
  Cyclic GFR-binding peptide
  MOD_RES (2)..(4)..(36)..(37): Xaa is C or S

SEQ ID NO: 60619 - protein, 31 aa, Artificial Sequence
  Cyclic GFR-binding peptide
  MOD_RES (30)..(31): Xaa is C or S
VVMDEYKFKVVNNAADLYLISIPELRAPVXX

SEQ ID NO: 60620 - protein, 22 aa, Artificial Sequence
  Cyclic GFR-binding peptide
MEYQKYIKPTKGIIYLISIPSL

SEQ ID NO: 60621 - protein, 23 aa, Artificial Sequence
  Cyclic GFR-binding peptide
EYQKYVVKENEDIYLMSIPSLET

SEQ ID NO: 60622 - protein, 25 aa, Artificial Sequence
  Cyclic GFR-binding peptide
DEYQKYVVKENEDIYLMSIPSLETP

SEQ ID NO: 60623 - protein, 36 aa, Artificial Sequence
  Cyclic GFR-binding peptide
  MOD_RES (30)..(31): Xaa is C or S
KVIMEYQKYIKPTKGIIYLISIPSLDQSVXXPSASA

SEQ ID NO: 60624 - protein, 38 aa, Artificial Sequence; identical to SEQ ID NO: 17932
  Cyclic GFR-binding peptide
  MOD_RES (1)..(3)..(35)..(36): Xaa is C or S

SEQ ID NO: 60625 - protein, 22 aa, Artificial Sequence
  Cyclic GFR-binding peptide
NEYQKYIVNSSDDIYLVSIPSL

SEQ ID NO: 60626 - protein, 34 aa, Artificial Sequence; identical to SEQ ID NO: 17934
  Cyclic GFR-binding peptide
  MOD_RES (2)..(2): Xaa is C or S

SEQ ID NO: 60627 - protein, 23 aa, Artificial Sequence
  Cyclic GFR-binding peptide
VMNEYQKYIVNNSSDIYLVSIPS

SEQ ID NO: 60628 - protein, 35 aa, Artificial Sequence; identical to SEQ ID NO: 17939
  Cyclic GFR-binding peptide
  MOD_RES (31)..(32): Xaa is C or S

SEQ ID NO: 60629 - protein, 27 aa, Artificial Sequence
  Cyclic GFR-binding peptide
KVVMNEYQKYIVNNSSDIYLVSIPSLK

SEQ ID NO: 60630 - protein, 22 aa, Artificial Sequence
  Cyclic GFR-binding peptide
MGRYKKLYTVVGKDFYLISIAN

SEQ ID NO: 60631 - protein, 34 aa, Artificial Sequence; identical to SEQ ID NO: 17944
  Cyclic GFR-binding peptide
  MOD_RES (31)..(32): Xaa is C or S

SEQ ID NO: 60632 - protein, 26 aa, Artificial Sequence
  Cyclic GFR-binding peptide
MNEYQKYIVNSSDDIYLVSIPSLKTP

SEQ ID NO: 60633 - protein, 29 aa, Artificial Sequence
  Cyclic GFR-binding peptide
KVVMNEYQKYIVNNSSDIYLVSIPSLKTP

SEQ ID NO: 60634 - protein, 31 aa, Artificial Sequence
  Cyclic GFR-binding peptide
  MOD_RES (30)..(31): Xaa is C or S
SMGEEYKFKTPVGMDDLYLVSIPELKTPVXX

SEQ ID NO: 60635 - protein, 27 aa, Artificial Sequence
  Cyclic GFR-binding peptide
  MOD_RES (27)..(27): Xaa is C or S
NEYKFKIVNSSDDLYLVSIPELQTPAX

SEQ ID NO: 60636 - protein, 30 aa, Artificial Sequence
  Cyclic GFR-binding peptide
GEVVMEEYKFKVVKDYEDLYLMSIPELETP

SEQ ID NO: 60637 - protein, 29 aa, Artificial Sequence
  Cyclic GFR-binding peptide
  MOD_RES (27)..(28): Xaa is C or S
EEYKFKVVKDYEDLYLMSIPELETPVXXA

SEQ ID NO: 60638 - protein, 28 aa, Artificial Sequence
  Cyclic GFR-binding peptide
SKVVMEYKFKVKPTRGVLYLISIPELDQ

SEQ ID NO: 60639 - protein, 28 aa, Artificial Sequence
  Cyclic GFR-binding peptide
VMNEYKFKIVNSSDDLYLVSIPELKTPA

SEQ ID NO: 60640 - protein, 31 aa, Artificial Sequence
  Cyclic GFR-binding peptide
  MOD_RES (1)..(3): Xaa is C or S
XGXAEVVMDRYKKLVVNNAADFYLISIANLR

SEQ ID NO: 60641 - protein, 26 aa, Artificial Sequence
  Cyclic GFR-binding peptide
ARVVMNEYKFKIVNSSDDLYLVSIPE

SEQ ID NO: 60642 - protein, 30 aa, Artificial Sequence
  Cyclic GFR-binding peptide
  MOD_RES (28)..(28): Xaa is C or S
MNEYKFKIVNSSDDLYLVSIPELKTPAXTP

SEQ ID NO: 60643 - protein, 27 aa, Artificial Sequence
  Cyclic GFR-binding peptide
  MOD_RES (27)..(27): Xaa is C or S
GEYQKYYTVVGKDIYLISIPSLKTPVX

SEQ ID NO: 60644 - protein, 39 aa, Artificial Sequence; identical to SEQ ID NO: 17956
  Cyclic GFR-binding peptide
  MOD_RES (1)..(3)..(35)..(36): Xaa is C or S

SEQ ID NO: 60645 - protein, 41 aa, Artificial Sequence; identical to SEQ ID NO: 17957
  Cyclic GFR-binding peptide
  MOD_RES (1)..(3)..(35)..(36): Xaa is C or S

SEQ ID NO: 60646 - protein, 31 aa, Artificial Sequence
  Cyclic GFR-binding peptide
  MOD_RES (28)..(29): Xaa is C or S
MNEYQKYIVNNSSDIYLVSIPSLKTPAXXAK

SEQ ID NO: 60647 - protein, 26 aa, Artificial Sequence
  Cyclic GFR-binding peptide
SRVVMNEYKFKIVNSSDDLYLVSIPE

SEQ ID NO: 60648 - protein, 29 aa, Artificial Sequence
  Cyclic GFR-binding peptide
AVSMGEEYKFKTPVGMDDLYLVSIPELKT

SEQ ID NO: 60649 - protein, 32 aa, Artificial Sequence
  Cyclic GFR-binding peptide
  MOD_RES (27)..(28): Xaa is C or S
NEYKFKIVNSSDDLYLVSIPELKTPAXXPKPV

SEQ ID NO: 60650 - protein, 30 aa, Artificial Sequence
  Cyclic GFR-binding peptide
  MOD_RES (27)..(28): Xaa is C or S
EEYQKYTPVGMDDIYLVSIPSLKTPVXXAK

SEQ ID NO: 60651 - protein, 26 aa, Artificial Sequence
  Cyclic GFR-binding peptide
SKVIMEYKFKIKPTKGILYLISIPEL

SEQ ID NO: 60652 - protein, 32 aa, Artificial Sequence
  Cyclic GFR-binding peptide
  MOD_RES (30)..(31): Xaa is C or S
VVMNEYKFKIVNNSSDLYLVSIPELKTPAXXA

SEQ ID NO: 60653 - protein, 28 aa, Artificial Sequence
  Cyclic GFR-binding peptide
  MOD_RES (27)..(28): Xaa is C or S
MEYKFKVKPTRGVLYLISIPELDQPVXX

SEQ ID NO: 60654 - protein, 35 aa, Artificial Sequence; identical to SEQ ID NO: 17968
  Cyclic GFR-binding peptide
  MOD_RES (1)..(3)..(34)..(35): Xaa is C or S

SEQ ID NO: 60655 - protein, 25 aa, Artificial Sequence
  Cyclic GFR-binding peptide
NEYQKYIVNNSSDIYLVSIPSLKTP

SEQ ID NO: 60656 - protein, 25 aa, Artificial Sequence
  Cyclic GFR-binding peptide
EYKFKVVKENEDLYLMSIPELETPV

SEQ ID NO: 60657 - protein, 31 aa, Artificial Sequence
  Cyclic GFR-binding peptide
  MOD_RES (1)..(3): Xaa is C or S
XGXSRVVMNEYKFKIVNSSDDLYLVSIPELK

SEQ ID NO: 60658 - protein, 30 aa, Artificial Sequence; identical to SEQ ID NO: 17973
  Cyclic GFR-binding peptide

SEQ ID NO: 60659 - protein, 24 aa, Artificial Sequence
  Cyclic GFR-binding peptide
MNEYQKYIVNNSSDIYLVSIPSLK

SEQ ID NO: 60660 - protein, 31 aa, Artificial Sequence
  Cyclic GFR-binding peptide
  MOD_RES (27)..(28): Xaa is C or S
MEYKFKIKPTKGILYLISIPELDQSVXXPSA

SEQ ID NO: 60661 - protein, 30 aa, Artificial Sequence
  Cyclic GFR-binding peptide
  MOD_RES (1)..(1): Xaa is C or S
XSRVVMNEYQKYIVNSSDDIYLVSIPSLKT

SEQ ID NO: 60662 - protein, 28 aa, Artificial Sequence
  Cyclic GFR-binding peptide
  MOD_RES (2)..(2): Xaa is C or S
KXSKVVMEYQKYVKPTRGVIYLISIPSL

SEQ ID NO: 60663 - protein, 29 aa, Artificial Sequence
  Cyclic GFR-binding peptide
  MOD_RES (27)..(28): Xaa is C or S
EEYQKYVVKDYEDIYLMSIPSLETPVXXA

SEQ ID NO: 60664 - protein, 37 aa, Artificial Sequence; identical to SEQ ID NO: 17976
  Cyclic GFR-binding peptide
  MOD_RES (31)..(32): Xaa is C or S

SEQ ID NO: 60665 - protein, 30 aa, Artificial Sequence
  Cyclic GFR-binding peptide
  MOD_RES (1)..(1): Xaa is C or S
XSRVIMEYQKYVKPKRGVIYLISIPSLAQP

SEQ ID NO: 60666 - protein, 28 aa, Artificial Sequence
  Cyclic GFR-binding peptide
KVIMEYQKYIKPTKGIIYLISIPSLDQS

SEQ ID NO: 60667 - protein, 24 aa, Artificial Sequence
  Cyclic GFR-binding peptide
EYKFKVVNNAADLYLISIPELRAP

SEQ ID NO: 60668 - protein, 38 aa, Artificial Sequence; identical to SEQ ID NO: 17980
  Cyclic GFR-binding peptide
  MOD_RES (1)..(33): Xaa is C or S

SEQ ID NO: 60669 - protein, 27 aa, Artificial Sequence
  Cyclic GFR-binding peptide
RVIMEYQKYVKPKRGVIYLISIPSLAQ

SEQ ID NO: 60670 - protein, 31 aa, Artificial Sequence
  Cyclic GFR-binding peptide
  MOD_RES (28)..(29): Xaa is C or S
MDYHYKLVVNNAADKYLISIPSLRAPVXXSA

SEQ ID NO: 60671 - protein, 22 aa, Artificial Sequence
  Cyclic GFR-binding peptide
EYKFKIVNSSDDLYLVSIPELQ

SEQ ID NO: 60672 - protein, 41 aa, Artificial Sequence; identical to SEQ ID NO: 17982
  Cyclic GFR-binding peptide
  MOD_RES (2)..(4)..(35)..(36): Xaa is C or S

SEQ ID NO: 60673 - protein, 34 aa, Artificial Sequence; identical to SEQ ID NO: 17983
  Cyclic GFR-binding peptide
  MOD_RES (1)..(33)..(34): Xaa is C or S

SEQ ID NO: 60674 - protein, 27 aa, Artificial Sequence
  Cyclic GFR-binding peptide
  MOD_RES (1)..(1): Xaa is C or S
XSKVVMEYQKYVKPTRGVIYLISIPSL

SEQ ID NO: 60675 - protein, 29 aa, Artificial Sequence
  Cyclic GFR-binding peptide
  MOD_RES (29)..(29): Xaa is C or S
VMEEYQKYVVKDYEDIYLMSIPSLETPVX

SEQ ID NO: 60676 - protein, 27 aa, Artificial Sequence
  Cyclic GFR-binding peptide
VSMGEEYQKYTPVGMDDIYLVSIPSLK

SEQ ID NO: 60677 - protein, 33 aa, Artificial Sequence; identical to SEQ ID NO: 17986
  Cyclic GFR-binding peptide
  MOD_RES (1)..(33): Xaa is C or S

SEQ ID NO: 60678 - protein, 25 aa, Artificial Sequence
  Cyclic GFR-binding peptide
NEYKFKIVNNSSDLYLVSIPELKTP

SEQ ID NO: 60679 - protein, 27 aa, Artificial Sequence
  Cyclic GFR-binding peptide
VMDRYKKLVVNNAADFYLISIANLRAP

SEQ ID NO: 60680 - protein, 31 aa, Artificial Sequence
  Cyclic GFR-binding peptide
  MOD_RES (27)..(28): Xaa is C or S
MEYQKYIKPTKGIIYLISIPSLDQSVXXPSA

SEQ ID NO: 60681 - protein, 28 aa, Artificial Sequence
  Cyclic GFR-binding peptide
  MOD_RES (27)..(28): Xaa is C or S
EEYKFKTPVGMDDLYLVSIPELKTPVXX

SEQ ID NO: 60682 - protein, 29 aa, Artificial Sequence
  Cyclic GFR-binding peptide
  MOD_RES (26)..(27): Xaa is C or S
EYKFKIVNSSDDLYLVSIPELKTPAXXPK

SEQ ID NO: 60683 - protein, 41 aa, Artificial Sequence; identical to SEQ ID NO: 17992
  Cyclic GFR-binding peptide
  MOD_RES (1)..(3)..(35)..(36): Xaa is C or S

SEQ ID NO: 60684 - protein, 29 aa, Artificial Sequence
  Cyclic GFR-binding peptide
  MOD_RES (2)..(2): Xaa is C or S
KXSKVVMEYQKYVKPTRGVIYLISIPSLD

SEQ ID NO: 60685 - protein, 35 aa, Artificial Sequence; identical to SEQ ID NO: 17993
  Cyclic GFR-binding peptide
  MOD_RES (2)..(34)..(35): Xaa is C or S

SEQ ID NO: 60686 - protein, 37 aa, Artificial Sequence; identical to SEQ ID NO: 17995
  Cyclic GFR-binding peptide
  MOD_RES (2)..(4)..(36)..(37): Xaa is C or S

SEQ ID NO: 60687 - protein, 25 aa, Artificial Sequence
  Cyclic GFR-binding peptide
EYQKYVVKDYEDIYLMSIPSLETPV

SEQ ID NO: 60688 - protein, 30 aa, Artificial Sequence
  Cyclic GFR-binding peptide
  MOD_RES (27)..(28): Xaa is C or S
NEYQKYIVNSSDDIYLVSIPSLKTPAXXPK

SEQ ID NO: 60689 - protein, 32 aa, Artificial Sequence
  Cyclic GFR-binding peptide
  MOD_RES (27)..(28): Xaa is C or S
MEYQKYVKPKRGVIYLISIPSLAQPVXXPAAS

SEQ ID NO: 60690 - protein, 34 aa, Artificial Sequence; identical to SEQ ID NO: 18001
  Cyclic GFR-binding peptide
  MOD_RES (2)..(34): Xaa is C or S

SEQ ID NO: 60691 - protein, 36 aa, Artificial Sequence; identical to SEQ ID NO: 18002
  Cyclic GFR-binding peptide
  MOD_RES (32)..(33): Xaa is C or S

SEQ ID NO: 60692 - protein, 21 aa, Artificial Sequence
  Cyclic GFR-binding peptide
RYKKLVVNNAADFYLISIANL

SEQ ID NO: 60693 - protein, 20 aa, Artificial Sequence
  Cyclic GFR-binding peptide
EYKFKVVNNAADLYLISIPE

SEQ ID NO: 60694 - protein, 39 aa, Artificial Sequence; identical to SEQ ID NO: 18004
  Cyclic GFR-binding peptide
  MOD_RES (2)..(4)..(35)..(36): Xaa is C or S

SEQ ID NO: 60695 - protein, 21 aa, Artificial Sequence
  Cyclic GFR-binding peptide
EYQKYYTVVGKDIYLISIPSL

SEQ ID NO: 60696 - protein, 29 aa, Artificial Sequence
  Cyclic GFR-binding peptide
  MOD_RES (26)..(27): Xaa is C or S
YHYKLYTVVGKDKYLISIPSLKTPVXXAK

SEQ ID NO: 60697 - protein, 22 aa, Artificial Sequence
  Cyclic GFR-binding peptide
DEYQKYVVKENEDIYLMSIPSL

SEQ ID NO: 60698 - protein, 39 aa, Artificial Sequence; identical to SEQ ID NO: 18006
  Cyclic GFR-binding peptide
  MOD_RES (1)..(3)..(35)..(36): Xaa is C or S

SEQ ID NO: 60699 - protein, 28 aa, Artificial Sequence
  Cyclic GFR-binding peptide
  MOD_RES (26)..(27): Xaa is C or S
EYKFKVKPTRGVLYLISIPELDQPVXXP

SEQ ID NO: 60700 - protein, 34 aa, Artificial Sequence
  Cyclic GFR-binding peptide
  MOD_RES (30)..(31): Xaa is C or S
VVMNEYQKYIVNNSSDIYLVSIPSLKTPAXXAKP

SEQ ID NO: 60701 - protein, 26 aa, Artificial Sequence
  Cyclic GFR-binding peptide
NEYKFKIVNSSDDLYLVSIPELQTPA

SEQ ID NO: 60702 - protein, 35 aa, Artificial Sequence
  Cyclic GFR-binding peptide
  MOD_RES (29)..(30): Xaa is C or S
VMEEYKFKVVKDYEDLYLMSIPELETPVXXAKPIS

SEQ ID NO: 60703 - protein, 34 aa, Artificial Sequence
  Cyclic GFR-binding peptide
  MOD_RES (2)..(4): Xaa is C or S
RXGXGEVVMEEYKFKVVKDYEDLYLMSIPELETP

SEQ ID NO: 60704 - protein, 33 aa, Artificial Sequence
  Cyclic GFR-binding peptide
  MOD_RES (30)..(31): Xaa is C or S
VVMDYHYKLVVNNAADKYLISIPSLRAPVXXSA

SEQ ID NO: 60705 - protein, 27 aa, Artificial Sequence
  Cyclic GFR-binding peptide
VMDEYKFKVVKENEDLYLMSIPELETP

SEQ ID NO: 60706 - protein, 39 aa, Artificial Sequence; identical to SEQ ID NO: 18014
  Cyclic GFR-binding peptide
  MOD_RES (2)..(4)..(36): Xaa is C or S

SEQ ID NO: 60707 - protein, 26 aa, Artificial Sequence
  Cyclic GFR-binding peptide
AVSMGEEYKFKTPVGMDDLYLVSIPE

SEQ ID NO: 60708 - protein, 37 aa, Artificial Sequence; identical to SEQ ID NO: 18019
  Cyclic GFR-binding peptide
  MOD_RES (1)..(3)..(35)..(36): Xaa is C or S

SEQ ID NO: 60709 - protein, 34 aa, Artificial Sequence; identical to SEQ ID NO: 18021
  Cyclic GFR-binding peptide
  MOD_RES (1)..(34): Xaa is C or S

SEQ ID NO: 60710 - protein, 33 aa, Artificial Sequence; identical to SEQ ID NO: 18022
  Cyclic GFR-binding peptide
  MOD_RES (2)..(2): Xaa is C or S

SEQ ID NO: 60711 - protein, 33 aa, Artificial Sequence; identical to SEQ ID NO: 18023
  Cyclic GFR-binding peptide
  MOD_RES (31)..(32): Xaa is C or S

SEQ ID NO: 60712 - protein, 28 aa, Artificial Sequence
  Cyclic GFR-binding peptide
KVIMEYKFKIKPTKGILYLISIPELDQS

SEQ ID NO: 60713 - protein, 29 aa, Artificial Sequence
  Cyclic GFR-binding peptide
  MOD_RES (29)..(29): Xaa is C or S
VMNEYQKYIVNSSDDIYLVSIPSLKTPAX

SEQ ID NO: 60714 - protein, 31 aa, Artificial Sequence
  Cyclic GFR-binding peptide
  MOD_RES (26)..(27): Xaa is C or S
EYKFKVKPTRGVLYLISIPELDQPVXXPSAS

SEQ ID NO: 60715 - protein, 22 aa, Artificial Sequence
  Cyclic GFR-binding peptide
MEYKFKIKPTKGILYLISIPEL

SEQ ID NO: 60716 - protein, 31 aa, Artificial Sequence
  Cyclic GFR-binding peptide
  MOD_RES (28)..(29): Xaa is C or S
IMEYKFKVKPKRGVLYLISIPELAQPVXXPA

SEQ ID NO: 60717 - protein, 31 aa, Artificial Sequence
  Cyclic GFR-binding peptide
  MOD_RES (2)..(2): Xaa is C or S
GXESVAMGRYKKLYTVVGKDFYLISIANLKT

SEQ ID NO: 60718 - protein, 29 aa, Artificial Sequence
  Cyclic GFR-binding peptide
  MOD_RES (1)..(3): Xaa is C or S
XKXSRVIMEYKFKVKPKRGVLYLISIPEL

SEQ ID NO: 60719 - protein, 35 aa, Artificial Sequence
  Cyclic GFR-binding peptide
  MOD_RES (29)..(30): Xaa is C or S
AMGYHYKLYTVVGKDKYLISIPSLKTPVXXAKSAK

SEQ ID NO: 60720 - protein, 30 aa, Artificial Sequence
  Cyclic GFR-binding peptide
  MOD_RES (28)..(29): Xaa is C or S
GEEYQKYTPVGMDDIYLVSIPSLKTPVXXA

SEQ ID NO: 60721 - protein, 34 aa, Artificial Sequence
  Cyclic GFR-binding peptide
  MOD_RES (30)..(31): Xaa is C or S
SMGEEYKFKTPVGMDDLYLVSIPELKTPVXXAKG

SEQ ID NO: 60722 - protein, 39 aa, Artificial Sequence; identical to SEQ ID NO: 18037
  Cyclic GFR-binding peptide
  MOD_RES (1)..(3)..(35)..(36): Xaa is C or S

SEQ ID NO: 60723 - protein, 38 aa, Artificial Sequence; identical to SEQ ID NO: 18040
  Cyclic GFR-binding peptide
  MOD_RES (1)..(3)..(35)..(36): Xaa is C or S

SEQ ID NO: 60724 - protein, 29 aa, Artificial Sequence
  Cyclic GFR-binding peptide
VVMNEYKFKIVNNSSDLYLVSIPELKTPA

SEQ ID NO: 60725 - protein, 40 aa, Artificial Sequence; identical to SEQ ID NO: 18041
  Cyclic GFR-binding peptide
  MOD_RES (2)..(34)..(35): Xaa is C or S

SEQ ID NO: 60726 - protein, 36 aa, Artificial Sequence; identical to SEQ ID NO: 18044
  Cyclic GFR-binding peptide
  MOD_RES (2)..(34)..(35): Xaa is C or S

SEQ ID NO: 60727 - protein, 29 aa, Artificial Sequence
  Cyclic GFR-binding peptide
  MOD_RES (29)..(29): Xaa is C or S
VMDEYKFKVVKENEDLYLMSIPELETPVX

SEQ ID NO: 60728 - protein, 25 aa, Artificial Sequence
  Cyclic GFR-binding peptide
VMEYKFKVKPTRGVLYLISIPELDQ

SEQ ID NO: 60729 - protein, 33 aa, Artificial Sequence
  Cyclic GFR-binding peptide
  MOD_RES (1)..(3): Xaa is C or S
XGXARVVMNEYQKYIVNSSDDIYLVSIPSLQTP

SEQ ID NO: 60730 - protein, 35 aa, Artificial Sequence; identical to SEQ ID NO: 18050
  Cyclic GFR-binding peptide
  MOD_RES (2)..(35): Xaa is C or S

SEQ ID NO: 60731 - protein, 32 aa, Artificial Sequence; identical to SEQ ID NO: 18055
  Cyclic GFR-binding peptide
  MOD_RES (31)..(32): Xaa is C or S

SEQ ID NO: 60732 - protein, 36 aa, Artificial Sequence; identical to SEQ ID NO: 18057
  Cyclic GFR-binding peptide
  MOD_RES (2)..(34)..(35): Xaa is C or S

SEQ ID NO: 60733 - protein, 36 aa, Artificial Sequence; identical to SEQ ID NO: 18058
  Cyclic GFR-binding peptide
  MOD_RES (2)..(34)..(35): Xaa is C or S

SEQ ID NO: 60734 - protein, 25 aa, Artificial Sequence
  Cyclic GFR-binding peptide
VMNEYQKYIVNNSSDIYLVSIPSLK

SEQ ID NO: 60735 - protein, 36 aa, Artificial Sequence; identical to SEQ ID NO: 18061
  Cyclic GFR-binding peptide
  MOD_RES (1)..(33): Xaa is C or S

SEQ ID NO: 60736 - protein, 39 aa, Artificial Sequence; identical to SEQ ID NO: 18063
  Cyclic GFR-binding peptide
  MOD_RES (1)..(33)..(34): Xaa is C or S

SEQ ID NO: 60737 - protein, 33 aa, Artificial Sequence; identical to SEQ ID NO: 18064
  Cyclic GFR-binding peptide
  MOD_RES (32)..(33): Xaa is C or S

SEQ ID NO: 60738 - protein, 25 aa, Artificial Sequence
  Cyclic GFR-binding peptide
MEEYQKYVVKDYEDIYLMSIPSLET

SEQ ID NO: 60739 - protein, 30 aa, Artificial Sequence
  Cyclic GFR-binding peptide
  MOD_RES (30)..(30): Xaa is C or S
KVVMEYQKYVKPTRGVIYLISIPSLDQPVX

SEQ ID NO: 60740 - protein, 27 aa, Artificial Sequence
  Cyclic GFR-binding peptide
AVSMGEEYKFKTPVGMDDLYLVSIPEL

SEQ ID NO: 60741 - protein, 31 aa, Artificial Sequence
  Cyclic GFR-binding peptide
  MOD_RES (2)..(2): Xaa is C or S
KXSKVVMEYQKYVKPTRGVIYLISIPSLDQP

SEQ ID NO: 60742 - protein, 26 aa, Artificial Sequence
  Cyclic GFR-binding peptide
  MOD_RES (1)..(1): Xaa is C or S
XSKVVMEYKFKVKPTRGVLYLISIPE

SEQ ID NO: 60743 - protein, 40 aa, Artificial Sequence; identical to SEQ ID NO: 18070
  Cyclic GFR-binding peptide
  MOD_RES (2)..(34): Xaa is C or S

SEQ ID NO: 60744 - protein, 35 aa, Artificial Sequence; identical to SEQ ID NO: 18072
  Cyclic GFR-binding peptide
  MOD_RES (1)..(3): Xaa is C or S

SEQ ID NO: 60745 - protein, 32 aa, Artificial Sequence
  Cyclic GFR-binding peptide
  MOD_RES (2)..(2): Xaa is C or S
GXGEVVMEEYQKYVVKDYEDIYLMSIPSLETP

SEQ ID NO: 60746 - protein, 36 aa, Artificial Sequence; identical to SEQ ID NO: 18075
  Cyclic GFR-binding peptide
  MOD_RES (2)..(34)..(35): Xaa is C or S

SEQ ID NO: 60747 - protein, 30 aa, Artificial Sequence
  Cyclic GFR-binding peptide
  MOD_RES (1)..(1): Xaa is C or S
XSRVVMNEYKFKIVNSSDDLYLVSIPELKT

SEQ ID NO: 60748 - protein, 21 aa, Artificial Sequence
  Cyclic GFR-binding peptide
EYQKYIKPTKGIIYLISIPSL

SEQ ID NO: 60749 - protein, 25 aa, Artificial Sequence
  Cyclic GFR-binding peptide
AMGYHYKLYTVVGKDKYLISIPSLK

SEQ ID NO: 60750 - protein, 31 aa, Artificial Sequence
  Cyclic GFR-binding peptide
  MOD_RES (2)..(4): Xaa is C or S
RXGXESVAMGEYQKYYTVVGKDIYLISIPSL

SEQ ID NO: 60751 - protein, 23 aa, Artificial Sequence
  Cyclic GFR-binding peptide
MEYQKYVKPTRGVIYLISIPSLD

SEQ ID NO: 60752 - protein, 30 aa, Artificial Sequence
  Cyclic GFR-binding peptide
  MOD_RES (30)..(30): Xaa is C or S
VVMNEYKFKIVNNSSDLYLVSIPELKTPAX

SEQ ID NO: 60753 - protein, 30 aa, Artificial Sequence
  Cyclic GFR-binding peptide
  MOD_RES (26)..(27): Xaa is C or S
EYKFKVKPTRGVLYLISIPELDQPVXXPSA

SEQ ID NO: 60754 - protein, 31 aa, Artificial Sequence
  Cyclic GFR-binding peptide
  MOD_RES (2)..(2): Xaa is C or S
KXSKVVMEYKFKVKPTRGVLYLISIPELDQP

SEQ ID NO: 60755 - protein, 33 aa, Artificial Sequence
  Cyclic GFR-binding peptide
  MOD_RES (29)..(30): Xaa is C or S
VVMEYQKYVKPTRGVIYLISIPSLDQPVXXPSA

SEQ ID NO: 60756 - protein, 26 aa, Artificial Sequence
  Cyclic GFR-binding peptide
VIMEYKFKIKPTKGILYLISIPELDQ

SEQ ID NO: 60757 - protein, 31 aa, Artificial Sequence
  Cyclic GFR-binding peptide
  MOD_RES (1)..(3): Xaa is C or S
XGXARVVMNEYKFKIVNSSDDLYLVSIPELQ

SEQ ID NO: 60758 - protein, 28 aa, Artificial Sequence
  Cyclic GFR-binding peptide
MGEEYQKYTPVGMDDIYLVSIPSLKTPV

SEQ ID NO: 60759 - protein, 32 aa, Artificial Sequence
  Cyclic GFR-binding peptide
  MOD_RES (30)..(31): Xaa is C or S
RVIMEYKFKVKPKRGVLYLISIPELAQPVXXP

SEQ ID NO: 60760 - protein, 29 aa, Artificial Sequence
  Cyclic GFR-binding peptide
  MOD_RES (26)..(26): Xaa is C or S
EYQKYIVNSSDDIYLVSIPSLKTPAXTPK

SEQ ID NO: 60761 - protein, 38 aa, Artificial Sequence; identical to SEQ ID NO: 18092
  Cyclic GFR-binding peptide
  MOD_RES (2)..(4)..(36)..(37): Xaa is C or S

SEQ ID NO: 60762 - protein, 37 aa, Artificial Sequence; identical to SEQ ID NO: 18093
  Cyclic GFR-binding peptide
  MOD_RES (2)..(4)..(35)..(36): Xaa is C or S

SEQ ID NO: 60763 - protein, 27 aa, Artificial Sequence
  Cyclic GFR-binding peptide
  MOD_RES (26)..(27): Xaa is C or S
EYKFKVVNNAADLYLISIPELRAPVXX

SEQ ID NO: 60764 - protein, 33 aa, Artificial Sequence
  Cyclic GFR-binding peptide
  MOD_RES (27)..(28): Xaa is C or S
NEYKFKIVNSSDDLYLVSIPELQTPAXXPKPVT

SEQ ID NO: 60765 - protein, 31 aa, Artificial Sequence; identical to SEQ ID NO: 18098
  Cyclic GFR-binding peptide
  MOD_RES (1)..(1): Xaa is C or S

SEQ ID NO: 60766 - protein, 33 aa, Artificial Sequence; identical to SEQ ID NO: 18104
  Cyclic GFR-binding peptide
  MOD_RES (31)..(32): Xaa is C or S

SEQ ID NO: 60767 - protein, 28 aa, Artificial Sequence
  Cyclic GFR-binding peptide
VVMNEYQKYIVNNSSDIYLVSIPSLKTP

SEQ ID NO: 60768 - protein, 24 aa, Artificial Sequence
  Cyclic GFR-binding peptide
GYHYKLYTVVGKDKYLISIPSLKT

SEQ ID NO: 60769 - protein, 33 aa, Artificial Sequence
  Cyclic GFR-binding peptide
  MOD_RES (2)..(4): Xaa is C or S
RXGXAEVVMDYHYKLVVNNAADKYLISIPSLRA

SEQ ID NO: 60770 - protein, 25 aa, Artificial Sequence
  Cyclic GFR-binding peptide
RYKKLYTVVGKDFYLISIANLKTPV

SEQ ID NO: 60771 - protein, 41 aa, Artificial Sequence; identical to SEQ ID NO: 18111
  Cyclic GFR-binding peptide
  MOD_RES (2)..(35)..(36): Xaa is C or S

SEQ ID NO: 60772 - protein, 40 aa, Artificial Sequence; identical to SEQ ID NO: 18113
  Cyclic GFR-binding peptide
  MOD_RES (2)..(4)..(37)..(38): Xaa is C or S

SEQ ID NO: 60773 - protein, 35 aa, Artificial Sequence
  Cyclic GFR-binding peptide
  MOD_RES (30)..(31): Xaa is C or S
KVIMEYKFKIKPTKGILYLISIPELDQSVXXPSAS

SEQ ID NO: 60774 - protein, 28 aa, Artificial Sequence
  Cyclic GFR-binding peptide
EVVMEEYQKYVVKDYEDIYLMSIPSLET

SEQ ID NO: 60775 - protein, 29 aa, Artificial Sequence
  Cyclic GFR-binding peptide
  MOD_RES (2)..(2): Xaa is C or S
KXSKVVMEYKFKVKPTRGVLYLISIPELD

SEQ ID NO: 60776 - protein, 37 aa, Artificial Sequence; identical to SEQ ID NO: 18117
  Cyclic GFR-binding peptide
  MOD_RES (31)..(32): Xaa is C or S

SEQ ID NO: 60777 - protein, 34 aa, Artificial Sequence
  Cyclic GFR-binding peptide
  MOD_RES (30)..(31): Xaa is C or S
VAMGEYQKYYTVVGKDIYLISIPSLKTPVXXAKS

SEQ ID NO: 60778 - protein, 41 aa, Artificial Sequence; identical to SEQ ID NO: 18119
  Cyclic GFR-binding peptide
  MOD_RES (1)..(3)..(35)..(36): Xaa is C or S

SEQ ID NO: 60779 - protein, 31 aa, Artificial Sequence
  Cyclic GFR-binding peptide
  MOD_RES (2)..(2): Xaa is C or S
GXAEVVMDRYKKLVVNNAADFYLISIANLRA

SEQ ID NO: 60780 - protein, 38 aa, Artificial Sequence; identical to SEQ ID NO: 18121
  Cyclic GFR-binding peptide
  MOD_RES (2)..(4)..(36)..(37): Xaa is C or S

SEQ ID NO: 60781 - protein, 26 aa, Artificial Sequence
  Cyclic GFR-binding peptide
EVVMDEYQKYVVKENEDIYLMSIPSL

SEQ ID NO: 60782 - protein, 40 aa, Artificial Sequence; identical to SEQ ID NO: 18127
  Cyclic GFR-binding peptide
  MOD_RES (2)..(4)..(36)..(37): Xaa is C or S

SEQ ID NO: 60783 - protein, 34 aa, Artificial Sequence
  Cyclic GFR-binding peptide
  MOD_RES (29)..(30): Xaa is C or S
VMNEYQKYIVNSSDDIYLVSIPSLQTPAXXPKPV

SEQ ID NO: 60784 - protein, 33 aa, Artificial Sequence
  Cyclic GFR-binding peptide
  MOD_RES (28)..(28): Xaa is C or S
MNEYKFKIVNSSDDLYLVSIPELKTPAXTPKTV

SEQ ID NO: 60785 - protein, 36 aa, Artificial Sequence; identical to SEQ ID NO: 18132
  Cyclic GFR-binding peptide
  MOD_RES (32)..(33): Xaa is C or S

SEQ ID NO: 60786 - protein, 31 aa, Artificial Sequence
  Cyclic GFR-binding peptide
  MOD_RES (29)..(30): Xaa is C or S
VIMEYQKYVKPKRGVIYLISIPSLAQPVXXP

SEQ ID NO: 60787 - protein, 26 aa, Artificial Sequence
  Cyclic GFR-binding peptide
MNEYQKYIVNSSDDIYLVSIPSLQTP

SEQ ID NO: 60788 - protein, 29 aa, Artificial Sequence
  Cyclic GFR-binding peptide
EVVMDRYKKLVVNNAADFYLISIANLRAP

SEQ ID NO: 60789 - protein, 34 aa, Artificial Sequence
  Cyclic GFR-binding peptide
  MOD_RES (29)..(30): Xaa is C or S
VIMEYQKYIKPTKGIIYLISIPSLDQSVXXPSAS

SEQ ID NO: 60790 - protein, 33 aa, Artificial Sequence
  Cyclic GFR-binding peptide
  MOD_RES (29)..(30): Xaa is C or S
VMNEYKFKIVNNSSDLYLVSIPELKTPAXXAKP

SEQ ID NO: 60791 - protein, 38 aa, Artificial Sequence; identical to SEQ ID NO: 18140
  Cyclic GFR-binding peptide
  MOD_RES (2)..(34): Xaa is C or S

SEQ ID NO: 60792 - protein, 33 aa, Artificial Sequence
  Cyclic GFR-binding peptide
  MOD_RES (1)..(3): Xaa is C or S
XGXSRVVMNEYQKYIVNSSDDIYLVSIPSLKTP

SEQ ID NO: 60793 - protein, 32 aa, Artificial Sequence
  Cyclic GFR-binding peptide
  MOD_RES (28)..(29): Xaa is C or S
VMEYQKYVKPTRGVIYLISIPSLDQPVXXPSA

SEQ ID NO: 60794 - protein, 40 aa, Artificial Sequence; identical to SEQ ID NO: 18143
  Cyclic GFR-binding peptide
  MOD_RES (2)..(4)..(35)..(36): Xaa is C or S

SEQ ID NO: 60795 - protein, 29 aa, Artificial Sequence
  Cyclic GFR-binding peptide
  MOD_RES (2)..(2): Xaa is C or S
GXESVAMGEYQKYYTVVGKDIYLISIPSL

SEQ ID NO: 60796 - protein, 22 aa, Artificial Sequence
  Cyclic GFR-binding peptide
MDEYQKYVVKENEDIYLMSIPS

SEQ ID NO: 60797 - protein, 28 aa, Artificial Sequence
  Cyclic GFR-binding peptide
VVMDRYKKLVVNNAADFYLISIANLRAP

SEQ ID NO: 60798 - protein, 27 aa, Artificial Sequence
  Cyclic GFR-binding peptide
VVMEYKFKVKPTRGVLYLISIPELDQP

SEQ ID NO: 60799 - protein, 35 aa, Artificial Sequence; identical to SEQ ID NO: 15836
  Cyclic GFR-binding peptide
  MOD_RES (1)..(33)..(34): Xaa is C or S

SEQ ID NO: 60800 - protein, 24 aa, Artificial Sequence
  Cyclic GFR-binding peptide
VAMGEYQKYYTVVGKDIYLISIPS

SEQ ID NO: 60801 - protein, 28 aa, Artificial Sequence
  Cyclic GFR-binding peptide
  MOD_RES (26)..(27): Xaa is C or S
EYKFKTPVGMDDLYLVSIPELKTPVXXA

SEQ ID NO: 60802 - protein, 32 aa, Artificial Sequence
  Cyclic GFR-binding peptide
  MOD_RES (2)..(2): Xaa is C or S
GXGEVVMEEYKFKVVKDYEDLYLMSIPELETP

SEQ ID NO: 60803 - protein, 32 aa, Artificial Sequence
  Cyclic GFR-binding peptide
  MOD_RES (30)..(31): Xaa is C or S
VAMGRYKKLYTVVGKDFYLISIANLKTPVXXA

SEQ ID NO: 60804 - protein, 25 aa, Artificial Sequence
  Cyclic GFR-binding peptide
MEYQKYVKPTRGVIYLISIPSLDQP

SEQ ID NO: 60805 - protein, 28 aa, Artificial Sequence
  Cyclic GFR-binding peptide
KVVMEYKFKVKPTRGVLYLISIPELDQP

SEQ ID NO: 60806 - protein, 24 aa, Artificial Sequence
  Cyclic GFR-binding peptide
VMDEYKFKVVKENEDLYLMSIPEL

SEQ ID NO: 60807 - protein, 33 aa, Artificial Sequence; identical to SEQ ID NO: 15841
  Cyclic GFR-binding peptide
  MOD_RES (31)..(32): Xaa is C or S

SEQ ID NO: 60808 - protein, 32 aa, Artificial Sequence
  Cyclic GFR-binding peptide
  MOD_RES (2)..(2): Xaa is C or S
GXSRVVMNEYKFKIVNSSDDLYLVSIPELKTP

SEQ ID NO: 60809 - protein, 40 aa, Artificial Sequence; identical to SEQ ID NO: 15846
  Cyclic GFR-binding peptide
  MOD_RES (2)..(4)..(36)..(37): Xaa is C or S

SEQ ID NO: 60810 - protein, 35 aa, Artificial Sequence
  Cyclic GFR-binding peptide
  MOD_RES (29)..(30): Xaa is C or S
VMDRYKKLVVNNAADFYLISIANLRAPVXXSAPAA

SEQ ID NO: 60811 - protein, 31 aa, Artificial Sequence
  Cyclic GFR-binding peptide
  MOD_RES (1)..(3): Xaa is C or S
XGXGEVVMDEYQKYVVKENEDIYLMSIPSLE

SEQ ID NO: 60812 - protein, 36 aa, Artificial Sequence; identical to SEQ ID NO: 15848
  Cyclic GFR-binding peptide
  MOD_RES (31)..(32): Xaa is C or S

SEQ ID NO: 60813 - protein, 20 aa, Artificial Sequence
  Cyclic GFR-binding peptide
EYQKYVVKENEDIYLMSIPS

SEQ ID NO: 60814 - protein, 34 aa, Artificial Sequence; identical to SEQ ID NO: 15858
  Cyclic GFR-binding peptide
  MOD_RES (2)..(34): Xaa is C or S

SEQ ID NO: 60815 - protein, 30 aa, Artificial Sequence; identical to SEQ ID NO: 15859
  Cyclic GFR-binding peptide

SEQ ID NO: 60816 - protein, 38 aa, Artificial Sequence; identical to SEQ ID NO: 15865
  Cyclic GFR-binding peptide
  MOD_RES (2)..(4)..(36): Xaa is C or S

SEQ ID NO: 60817 - protein, 37 aa, Artificial Sequence; identical to SEQ ID NO: 15866
  Cyclic GFR-binding peptide
  MOD_RES (31)..(32): Xaa is C or S

SEQ ID NO: 60818 - protein, 32 aa, Artificial Sequence; identical to SEQ ID NO: 15869
  Cyclic GFR-binding peptide
  MOD_RES (1)..(32): Xaa is C or S

SEQ ID NO: 60819 - protein, 37 aa, Artificial Sequence; identical to SEQ ID NO: 15871
  Cyclic GFR-binding peptide
  MOD_RES (1)..(33)..(34): Xaa is C or S

SEQ ID NO: 60820 - protein, 20 aa, Artificial Sequence
  Cyclic GFR-binding peptide
EYKFKVVKENEDLYLMSIPE

SEQ ID NO: 60821 - protein, 42 aa, Artificial Sequence; identical to SEQ ID NO: 15873
  Cyclic GFR-binding peptide
  MOD_RES (2)..(4)..(36)..(37): Xaa is C or S

SEQ ID NO: 60822 - protein, 28 aa, Artificial Sequence
  Cyclic GFR-binding peptide
MGEEYKFKTPVGMDDLYLVSIPELKTPV

SEQ ID NO: 60823 - protein, 24 aa, Artificial Sequence
  Cyclic GFR-binding peptide
EYKFKIKPTKGILYLISIPELDQS

SEQ ID NO: 60824 - protein, 41 aa, Artificial Sequence; identical to SEQ ID NO: 15875
  Cyclic GFR-binding peptide
  MOD_RES (1)..(3)..(35)..(36): Xaa is C or S

SEQ ID NO: 60825 - protein, 36 aa, Artificial Sequence; identical to SEQ ID NO: 15879
  Cyclic GFR-binding peptide
  MOD_RES (31)..(31): Xaa is C or S

SEQ ID NO: 60826 - protein, 37 aa, Artificial Sequence; identical to SEQ ID NO: 15880
  Cyclic GFR-binding peptide
  MOD_RES (1)..(33)..(34): Xaa is C or S

SEQ ID NO: 60827 - protein, 25 aa, Artificial Sequence
  Cyclic GFR-binding peptide
RVIMEYQKYVKPKRGVIYLISIPSL

SEQ ID NO: 60828 - protein, 35 aa, Artificial Sequence; identical to SEQ ID NO: 15883
  Cyclic GFR-binding peptide
  MOD_RES (1)..(32)..(33): Xaa is C or S

SEQ ID NO: 60829 - protein, 27 aa, Artificial Sequence
  Cyclic GFR-binding peptide
  MOD_RES (1)..(1): Xaa is C or S
XSKVIMEYKFKIKPTKGILYLISIPEL

SEQ ID NO: 60830 - protein, 41 aa, Artificial Sequence; identical to SEQ ID NO: 15885
  Cyclic GFR-binding peptide
  MOD_RES (2)..(4)..(36)..(37): Xaa is C or S

SEQ ID NO: 60831 - protein, 31 aa, Artificial Sequence
  Cyclic GFR-binding peptide
  MOD_RES (27)..(28): Xaa is C or S
EEYQKYTPVGMDDIYLVSIPSLKTPVXXAKG

SEQ ID NO: 60832 - protein, 29 aa, Artificial Sequence
  Cyclic GFR-binding peptide
ESVAMGYHYKLYTVVGKDKYLISIPSLKT

SEQ ID NO: 60833 - protein, 30 aa, Artificial Sequence
  Cyclic GFR-binding peptide
  MOD_RES (27)..(28): Xaa is C or S
MEYQKYVKPKRGVIYLISIPSLAQPVXXPA

SEQ ID NO: 60834 - protein, 33 aa, Artificial Sequence; identical to SEQ ID NO: 15889
  Cyclic GFR-binding peptide
  MOD_RES (2)..(2): Xaa is C or S

SEQ ID NO: 60835 - protein, 38 aa, Artificial Sequence; identical to SEQ ID NO: 15890
  Cyclic GFR-binding peptide
  MOD_RES (32)..(33): Xaa is C or S

SEQ ID NO: 60836 - protein, 36 aa, Artificial Sequence
  Cyclic GFR-binding peptide
  MOD_RES (30)..(31): Xaa is C or S
VVMDYHYKLVVNNAADKYLISIPSLRAPVXXSAPAA

SEQ ID NO: 60837 - protein, 32 aa, Artificial Sequence
  Cyclic GFR-binding peptide
  MOD_RES (27)..(27): Xaa is C or S
NEYQKYIVNSSDDIYLVSIPSLKTPAXTPKTV

SEQ ID NO: 60838 - protein, 38 aa, Artificial Sequence; identical to SEQ ID NO: 15892
  Cyclic GFR-binding peptide
  MOD_RES (1)..(3)..(35)..(36): Xaa is C or S

SEQ ID NO: 60839 - protein, 39 aa, Artificial Sequence; identical to SEQ ID NO: 15893
  Cyclic GFR-binding peptide
  MOD_RES (2)..(4)..(36)..(37): Xaa is C or S

SEQ ID NO: 60840 - protein, 29 aa, Artificial Sequence
  Cyclic GFR-binding peptide
  MOD_RES (28)..(29): Xaa is C or S
MGEYQKYYTVVGKDIYLISIPSLKTPVXX

SEQ ID NO: 60841 - protein, 35 aa, Artificial Sequence; identical to SEQ ID NO: 15896
  Cyclic GFR-binding peptide
  MOD_RES (1)..(3)..(35): Xaa is C or S

SEQ ID NO: 60842 - protein, 36 aa, Artificial Sequence; identical to SEQ ID NO: 15902
  Cyclic GFR-binding peptide
  MOD_RES (2)..(34)..(35): Xaa is C or S

SEQ ID NO: 60843 - protein, 32 aa, Artificial Sequence
  Cyclic GFR-binding peptide
  MOD_RES (26)..(27): Xaa is C or S
EYQKYVKPKRGVIYLISIPSLAQPVXXPAASA

SEQ ID NO: 60844 - protein, 35 aa, Artificial Sequence
  Cyclic GFR-binding peptide
  MOD_RES (29)..(30): Xaa is C or S
VMNEYQKYIVNSSDDIYLVSIPSLQTPAXXPKPVT

SEQ ID NO: 60845 - protein, 35 aa, Artificial Sequence
  Cyclic GFR-binding peptide
  MOD_RES (29)..(30): Xaa is C or S
VMDEYKFKVVKENEDLYLMSIPELETPVXXAKPIK

SEQ ID NO: 60846 - protein, 31 aa, Artificial Sequence; identical to SEQ ID NO: 15905
  Cyclic GFR-binding peptide

SEQ ID NO: 60847 - protein, 25 aa, Artificial Sequence
  Cyclic GFR-binding peptide
EYKFKVVKDYEDLYLMSIPELETPV

SEQ ID NO: 60848 - protein, 34 aa, Artificial Sequence; identical to SEQ ID NO: 15910
  Cyclic GFR-binding peptide
  MOD_RES (31)..(32): Xaa is C or S

SEQ ID NO: 60849 - protein, 37 aa, Artificial Sequence; identical to SEQ ID NO: 15912
  Cyclic GFR-binding peptide
  MOD_RES (2)..(4)..(36)..(37): Xaa is C or S

SEQ ID NO: 60850 - protein, 33 aa, Artificial Sequence
  Cyclic GFR-binding peptide
  MOD_RES (1)..(3): Xaa is C or S
XGXSRVVMNEYKFKIVNSSDDLYLVSIPELKTP

SEQ ID NO: 60851 - protein, 41 aa, Artificial Sequence; identical to SEQ ID NO: 15915
  Cyclic GFR-binding peptide
  MOD_RES (2)..(4)..(36)..(37): Xaa is C or S

SEQ ID NO: 60852 - protein, 29 aa, Artificial Sequence
  Cyclic GFR-binding peptide
AKVVMNEYQKYIVNNSSDIYLVSIPSLKT

SEQ ID NO: 60853 - protein, 24 aa, Artificial Sequence
  Cyclic GFR-binding peptide
MEYQKYVKPTRGVIYLISIPSLDQ

SEQ ID NO: 60854 - protein, 33 aa, Artificial Sequence; identical to SEQ ID NO: 15923
  Cyclic GFR-binding peptide
  MOD_RES (31)..(32): Xaa is C or S

SEQ ID NO: 60855 - protein, 30 aa, Artificial Sequence
  Cyclic GFR-binding peptide
  MOD_RES (2)..(4): Xaa is C or S
RXGXAEVVMDEYKFKVVNNAADLYLISIPE

SEQ ID NO: 60856 - protein, 32 aa, Artificial Sequence
  Cyclic GFR-binding peptide
  MOD_RES (27)..(28): Xaa is C or S
GRYKKLYTVVGKDFYLISIANLKTPVXXAKSA

SEQ ID NO: 60857 - protein, 31 aa, Artificial Sequence
  Cyclic GFR-binding peptide
  MOD_RES (26)..(27): Xaa is C or S
EYQKYVVKENEDIYLMSIPSLETPVXXAKPI

SEQ ID NO: 60858 - protein, 29 aa, Artificial Sequence
  Cyclic GFR-binding peptide
  MOD_RES (26)..(27): Xaa is C or S
RYKKLYTVVGKDFYLISIANLKTPVXXAK

SEQ ID NO: 60859 - protein, 27 aa, Artificial Sequence
  Cyclic GFR-binding peptide
MNEYQKYIVNNSSDIYLVSIPSLKTPA

SEQ ID NO: 60860 - protein, 24 aa, Artificial Sequence
  Cyclic GFR-binding peptide
IMEYKFKIKPTKGILYLISIPELD

SEQ ID NO: 60861 - protein, 26 aa, Artificial Sequence
  Cyclic GFR-binding peptide
VVMDEYQKYVVKENEDIYLMSIPSLE

SEQ ID NO: 60862 - protein, 34 aa, Artificial Sequence
  Cyclic GFR-binding peptide
  MOD_RES (28)..(29): Xaa is C or S
IMEYKFKIKPTKGILYLISIPELDQSVXXPSASA

SEQ ID NO: 60863 - protein, 20 aa, Artificial Sequence
  Cyclic GFR-binding peptide
EYKFKVVNNAADLYLISIPE

SEQ ID NO: 60864 - protein, 31 aa, Artificial Sequence
  Cyclic GFR-binding peptide
  MOD_RES (27)..(28): Xaa is C or S
DEYKFKVVNNAADLYLISIPELRAPVXXSAP

SEQ ID NO: 60865 - protein, 39 aa, Artificial Sequence; identical to SEQ ID NO: 15939
  Cyclic GFR-binding peptide
  MOD_RES (1)..(3)..(36)..(37): Xaa is C or S

SEQ ID NO: 60866 - protein, 33 aa, Artificial Sequence
  Cyclic GFR-binding peptide
  MOD_RES (28)..(29): Xaa is C or S
MDYHYKLVVNNAADKYLISIPSLRAPVXXSAPA

SEQ ID NO: 60867 - protein, 27 aa, Artificial Sequence
  Cyclic GFR-binding peptide
SVAMGEYQKYYTVVGKDIYLISIPSLK

SEQ ID NO: 60868 - protein, 29 aa, Artificial Sequence
  Cyclic GFR-binding peptide
GEVVMEEYKFKVVKDYEDLYLMSIPELET

SEQ ID NO: 60869 - protein, 30 aa, Artificial Sequence
  Cyclic GFR-binding peptide
AVSMGEEYQKYTPVGMDDIYLVSIPSLKTP

SEQ ID NO: 60870 - protein, 23 aa, Artificial Sequence
  Cyclic GFR-binding peptide
MEYKFKVKPKRGVLYLISIPELA

SEQ ID NO: 60871 - protein, 30 aa, Artificial Sequence
  Cyclic GFR-binding peptide
  MOD_RES (1)..(3): Xaa is C or S
XGXESVAMGYHYKLYTVVGKDKYLISIPSL

SEQ ID NO: 60872 - protein, 33 aa, Artificial Sequence; identical to SEQ ID NO: 15952
  Cyclic GFR-binding peptide
  MOD_RES (2)..(2): Xaa is C or S

SEQ ID NO: 60873 - protein, 30 aa, Artificial Sequence; identical to SEQ ID NO: 15957
  Cyclic GFR-binding peptide

SEQ ID NO: 60874 - protein, 23 aa, Artificial Sequence
  Cyclic GFR-binding peptide
MGEEYKFKTPVGMDDLYLVSIPE

SEQ ID NO: 60875 - protein, 27 aa, Artificial Sequence
  Cyclic GFR-binding peptide
  MOD_RES (27)..(27): Xaa is C or S
NEYKFKIVNSSDDLYLVSIPELKTPAX

SEQ ID NO: 60876 - protein, 35 aa, Artificial Sequence; identical to SEQ ID NO: 15964
  Cyclic GFR-binding peptide
  MOD_RES (1)..(3)..(35): Xaa is C or S

SEQ ID NO: 60877 - protein, 37 aa, Artificial Sequence
  Cyclic GFR-binding peptide
  MOD_RES (32)..(33): Xaa is C or S
AVSMGEEYKFKTPVGMDDLYLVSIPELKTPVXXAKGV

SEQ ID NO: 60878 - protein, 33 aa, Artificial Sequence
  Cyclic GFR-binding peptide
  MOD_RES (1)..(3): Xaa is C or S
XGXEAVSMGEEYQKYTPVGMDDIYLVSIPSLKT

SEQ ID NO: 60879 - protein, 30 aa, Artificial Sequence
  Cyclic GFR-binding peptide
  MOD_RES (1)..(3): Xaa is C or S
XKXSKVIMEYQKYIKPTKGIIYLISIPSLD

SEQ ID NO: 60880 - protein, 29 aa, Artificial Sequence
  Cyclic GFR-binding peptide
VSMGEEYKFKTPVGMDDLYLVSIPELKTP

SEQ ID NO: 60881 - protein, 30 aa, Artificial Sequence
  Cyclic GFR-binding peptide
  MOD_RES (27)..(28): Xaa is C or S
NEYKFKIVNNSSDLYLVSIPELKTPAXXAK

SEQ ID NO: 60882 - protein, 38 aa, Artificial Sequence; identical to SEQ ID NO: 15976
  Cyclic GFR-binding peptide
  MOD_RES (1)..(3)..(35)..(36): Xaa is C or S

SEQ ID NO: 60883 - protein, 33 aa, Artificial Sequence
  Cyclic GFR-binding peptide
  MOD_RES (29)..(30): Xaa is C or S
VMDRYKKLVVNNAADFYLISIANLRAPVXXSAP

SEQ ID NO: 60884 - protein, 21 aa, Artificial Sequence
  Cyclic GFR-binding peptide
MEYKFKIKPTKGILYLISIPE

SEQ ID NO: 60885 - protein, 38 aa, Artificial Sequence; identical to SEQ ID NO: 15981
  Cyclic GFR-binding peptide
  MOD_RES (1)..(3)..(35)..(36): Xaa is C or S

SEQ ID NO: 60886 - protein, 30 aa, Artificial Sequence
  Cyclic GFR-binding peptide
  MOD_RES (1)..(1): Xaa is C or S
XSKVVMEYQKYVKPTRGVIYLISIPSLDQP

SEQ ID NO: 60887 - protein, 29 aa, Artificial Sequence
  Cyclic GFR-binding peptide
  MOD_RES (2)..(2): Xaa is C or S
GXAEVVMDYHYKLVVNNAADKYLISIPSL

SEQ ID NO: 60888 - protein, 36 aa, Artificial Sequence; identical to SEQ ID NO: 15987
  Cyclic GFR-binding peptide
  MOD_RES (1)..(32)..(33): Xaa is C or S

SEQ ID NO: 60889 - protein, 31 aa, Artificial Sequence
  Cyclic GFR-binding peptide
  MOD_RES (30)..(31): Xaa is C or S
VVMEEYKFKVVKDYEDLYLMSIPELETPVXX

SEQ ID NO: 60890 - protein, 35 aa, Artificial Sequence
  Cyclic GFR-binding peptide
  MOD_RES (30)..(31): Xaa is C or S
VVMDEYKFKVVKENEDLYLMSIPELETPVXXAKPI

SEQ ID NO: 60891 - protein, 35 aa, Artificial Sequence; identical to SEQ ID NO: 15988
  Cyclic GFR-binding peptide
  MOD_RES (31)..(32): Xaa is C or S

SEQ ID NO: 60892 - protein, 31 aa, Artificial Sequence
  Cyclic GFR-binding peptide
  MOD_RES (31)..(31): Xaa is C or S
VSMGEEYQKYTPVGMDDIYLVSIPSLKTPVX

SEQ ID NO: 60893 - protein, 36 aa, Artificial Sequence; identical to SEQ ID NO: 15991
  Cyclic GFR-binding peptide
  MOD_RES (31)..(32): Xaa is C or S

SEQ ID NO: 60894 - protein, 40 aa, Artificial Sequence; identical to SEQ ID NO: 15992
  Cyclic GFR-binding peptide
  MOD_RES (1)..(3)..(35)..(36): Xaa is C or S

SEQ ID NO: 60895 - protein, 37 aa, Artificial Sequence; identical to SEQ ID NO: 15997
  Cyclic GFR-binding peptide
  MOD_RES (1)..(3)..(35): Xaa is C or S

SEQ ID NO: 60896 - protein, 27 aa, Artificial Sequence
  Cyclic GFR-binding peptide
GEEYKFKTPVGMDDLYLVSIPELKTPV

SEQ ID NO: 60897 - protein, 34 aa, Artificial Sequence
  Cyclic GFR-binding peptide
  MOD_RES (29)..(30): Xaa is C or S
VVMEYKFKVKPTRGVLYLISIPELDQPVXXPSAS

SEQ ID NO: 60898 - protein, 37 aa, Artificial Sequence; identical to SEQ ID NO: 15998
  Cyclic GFR-binding peptide
  MOD_RES (2)..(34): Xaa is C or S

SEQ ID NO: 60899 - protein, 32 aa, Artificial Sequence
  Cyclic GFR-binding peptide
  MOD_RES (2)..(4): Xaa is C or S
RXGXEAVSMGEEYQKYTPVGMDDIYLVSIPSL

SEQ ID NO: 60900 - protein, 30 aa, Artificial Sequence
  Cyclic GFR-binding peptide
  MOD_RES (2)..(2): Xaa is C or S
KXSKVVMEYKFKVKPTRGVLYLISIPELDQ

SEQ ID NO: 60901 - protein, 30 aa, Artificial Sequence
  Cyclic GFR-binding peptide
  MOD_RES (27)..(28): Xaa is C or S
GYHYKLYTVVGKDKYLISIPSLKTPVXXAK

SEQ ID NO: 60902 - protein, 21 aa, Artificial Sequence
  Cyclic GFR-binding peptide
EYKFKTPVGMDDLYLVSIPEL

SEQ ID NO: 60903 - protein, 31 aa, Artificial Sequence
  Cyclic GFR-binding peptide
AVSMGEEYQKYTPVGMDDIYLVSIPSLKTPV

SEQ ID NO: 60904 - protein, 35 aa, Artificial Sequence; identical to SEQ ID NO: 16003
  Cyclic GFR-binding peptide
  MOD_RES (1)..(33)..(34): Xaa is C or S

SEQ ID NO: 60905 - protein, 27 aa, Artificial Sequence
  Cyclic GFR-binding peptide
RVVMNEYKFKIVNSSDDLYLVSIPELQ

SEQ ID NO: 60906 - protein, 39 aa, Artificial Sequence; identical to SEQ ID NO: 16006
  Cyclic GFR-binding peptide
  MOD_RES (2)..(4)..(36)..(37): Xaa is C or S

SEQ ID NO: 60907 - protein, 29 aa, Artificial Sequence
  Cyclic GFR-binding peptide
  MOD_RES (26)..(27): Xaa is C or S
EYKFKVKPKRGVLYLISIPELAQPVXXPA

SEQ ID NO: 60908 - protein, 38 aa, Artificial Sequence; identical to SEQ ID NO: 16024
  Cyclic GFR-binding peptide
  MOD_RES (2)..(34)..(35): Xaa is C or S

SEQ ID NO: 60909 - protein, 37 aa, Artificial Sequence; identical to SEQ ID NO: 16027
  Cyclic GFR-binding peptide
  MOD_RES (2)..(4)..(36)..(37): Xaa is C or S

SEQ ID NO: 60910 - protein, 25 aa, Artificial Sequence
  Cyclic GFR-binding peptide
MDEYKFKVVNNAADLYLISIPELRA

SEQ ID NO: 60911 - protein, 28 aa, Artificial Sequence
  Cyclic GFR-binding peptide
AVSMGEEYKFKTPVGMDDLYLVSIPELK

SEQ ID NO: 60912 - protein, 37 aa, Artificial Sequence; identical to SEQ ID NO: 16028
  Cyclic GFR-binding peptide
  MOD_RES (2)..(4)..(35)..(36): Xaa is C or S

SEQ ID NO: 60913 - protein, 33 aa, Artificial Sequence
  Cyclic GFR-binding peptide
  MOD_RES (27)..(27): Xaa is C or S
NEYKFKIVNSSDDLYLVSIPELKTPAXTPKTVH

SEQ ID NO: 60914 - protein, 30 aa, Artificial Sequence
  Cyclic GFR-binding peptide
  MOD_RES (29)..(30): Xaa is C or S
VMDEYKFKVVKENEDLYLMSIPELETPVXX

SEQ ID NO: 60915 - protein, 35 aa, Artificial Sequence; identical to SEQ ID NO: 16031
  Cyclic GFR-binding peptide
  MOD_RES (32)..(33): Xaa is C or S

SEQ ID NO: 60916 - protein, 23 aa, Artificial Sequence
  Cyclic GFR-binding peptide
VMDRYKKLVVNNAADFYLISIAN

SEQ ID NO: 60917 - protein, 29 aa, Artificial Sequence
  Cyclic GFR-binding peptide
  MOD_RES (26)..(27): Xaa is C or S
EYKFKIVNSSDDLYLVSIPELQTPAXXPK

SEQ ID NO: 60918 - protein, 23 aa, Artificial Sequence
  Cyclic GFR-binding peptide
MGRYKKLYTVVGKDFYLISIANL

SEQ ID NO: 60919 - protein, 36 aa, Artificial Sequence; identical to SEQ ID NO: 16038
  Cyclic GFR-binding peptide
  MOD_RES (32)..(32): Xaa is C or S

SEQ ID NO: 60920 - protein, 24 aa, Artificial Sequence
  Cyclic GFR-binding peptide
VAMGYHYKLYTVVGKDKYLISIPS

SEQ ID NO: 60921 - protein, 29 aa, Artificial Sequence
  Cyclic GFR-binding peptide
  MOD_RES (27)..(28): Xaa is C or S
NEYKFKIVNSSDDLYLVSIPELQTPAXXP

SEQ ID NO: 60922 - protein, 41 aa, Artificial Sequence; identical to SEQ ID NO: 16039
  Cyclic GFR-binding peptide
  MOD_RES (2)..(4)..(36)..(37): Xaa is C or S

SEQ ID NO: 60923 - protein, 38 aa, Artificial Sequence; identical to SEQ ID NO: 16040
  Cyclic GFR-binding peptide
  MOD_RES (1)..(3)..(36)..(37): Xaa is C or S

SEQ ID NO: 60924 - protein, 40 aa, Artificial Sequence; identical to SEQ ID NO: 16042
  Cyclic GFR-binding peptide
  MOD_RES (2)..(4)..(36)..(37): Xaa is C or S

SEQ ID NO: 60925 - protein, 34 aa, Artificial Sequence; identical to SEQ ID NO: 16043
  Cyclic GFR-binding peptide
  MOD_RES (32)..(33): Xaa is C or S

SEQ ID NO: 60926 - protein, 29 aa, Artificial Sequence
  Cyclic GFR-binding peptide
  MOD_RES (28)..(29): Xaa is C or S
MDRYKKLVVNNAADFYLISIANLRAPVXX

SEQ ID NO: 60927 - protein, 25 aa, Artificial Sequence
  Cyclic GFR-binding peptide
EYKFKIVNNSSDLYLVSIPELKTPA

SEQ ID NO: 60928 - protein, 41 aa, Artificial Sequence; identical to SEQ ID NO: 16046
  Cyclic GFR-binding peptide
  MOD_RES (2)..(4)..(37)..(38): Xaa is C or S

SEQ ID NO: 60929 - protein, 36 aa, Artificial Sequence; identical to SEQ ID NO: 16048
  Cyclic GFR-binding peptide
  MOD_RES (2)..(4)..(36): Xaa is C or S

SEQ ID NO: 60930 - protein, 27 aa, Artificial Sequence
  Cyclic GFR-binding peptide
SRVVMNEYQKYIVNSSDDIYLVSIPSL

SEQ ID NO: 60931 - protein, 26 aa, Artificial Sequence
  Cyclic GFR-binding peptide
MDYHYKLVVNNAADKYLISIPSLRAP

SEQ ID NO: 60932 - protein, 30 aa, Artificial Sequence; identical to SEQ ID NO: 16049
  Cyclic GFR-binding peptide

SEQ ID NO: 60933 - protein, 33 aa, Artificial Sequence
  Cyclic GFR-binding peptide
  MOD_RES (27)..(28): Xaa is C or S
EEYQKYVVKDYEDIYLMSIPSLETPVXXAKPIS

SEQ ID NO: 60934 - protein, 32 aa, Artificial Sequence
  Cyclic GFR-binding peptide
  MOD_RES (2)..(4): Xaa is C or S
SXKXSKVVMEYKFKVKPTRGVLYLISIPELDQ

SEQ ID NO: 60935 - protein, 32 aa, Artificial Sequence
  Cyclic GFR-binding peptide
  MOD_RES (1)..(3): Xaa is C or S
XGXESVAMGYHYKLYTVVGKDKYLISIPSLKT

SEQ ID NO: 60936 - protein, 42 aa, Artificial Sequence; identical to SEQ ID NO: 16051
  Cyclic GFR-binding peptide
  MOD_RES (2)..(4)..(37)..(38): Xaa is C or S

SEQ ID NO: 60937 - protein, 33 aa, Artificial Sequence; identical to SEQ ID NO: 16053
  Cyclic GFR-binding peptide
  MOD_RES (32)..(33): Xaa is C or S

SEQ ID NO: 60938 - protein, 30 aa, Artificial Sequence
  Cyclic GFR-binding peptide
  MOD_RES (1)..(3): Xaa is C or S
XGXGEVVMDEYQKYVVKENEDIYLMSIPSL

SEQ ID NO: 60939 - protein, 28 aa, Artificial Sequence
  Cyclic GFR-binding peptide
  MOD_RES (26)..(27): Xaa is C or S
YHYKLVVNNAADKYLISIPSLRAPVXXS

SEQ ID NO: 60940 - protein, 34 aa, Artificial Sequence
  Cyclic GFR-binding peptide
  MOD_RES (29)..(30): Xaa is C or S
VMNEYKFKIVNSSDDLYLVSIPELQTPAXXPKPV

SEQ ID NO: 60941 - protein, 30 aa, Artificial Sequence
  Cyclic GFR-binding peptide
  MOD_RES (30)..(30): Xaa is C or S
VVMNEYQKYIVNNSSDIYLVSIPSLKTPAX

SEQ ID NO: 60942 - protein, 37 aa, Artificial Sequence; identical to SEQ ID NO: 16057
  Cyclic GFR-binding peptide
  MOD_RES (2)..(4)..(36): Xaa is C or S

SEQ ID NO: 60943 - protein, 34 aa, Artificial Sequence; identical to SEQ ID NO: 16059
  Cyclic GFR-binding peptide
  MOD_RES (31)..(32): Xaa is C or S

SEQ ID NO: 60944 - protein, 27 aa, Artificial Sequence
  Cyclic GFR-binding peptide
ARVVMNEYQKYIVNSSDDIYLVSIPSL

SEQ ID NO: 60945 - protein, 37 aa, Artificial Sequence; identical to SEQ ID NO: 16064
  Cyclic GFR-binding peptide
  MOD_RES (1)..(33)..(34): Xaa is C or S

SEQ ID NO: 60946 - protein, 28 aa, Artificial Sequence
  Cyclic GFR-binding peptide
VMDEYQKYVVKENEDIYLMSIPSLETPV

SEQ ID NO: 60947 - protein, 29 aa, Artificial Sequence
  Cyclic GFR-binding peptide
  MOD_RES (27)..(28): Xaa is C or S
GRYKKLYTVVGKDFYLISIANLKTPVXXA

SEQ ID NO: 60948 - protein, 35 aa, Artificial Sequence; identical to SEQ ID NO: 16067
  Cyclic GFR-binding peptide
  MOD_RES (31)..(32): Xaa is C or S

SEQ ID NO: 60949 - protein, 24 aa, Artificial Sequence
  Cyclic GFR-binding peptide
MNEYKFKIVNNSSDLYLVSIPELK

SEQ ID NO: 60950 - protein, 26 aa, Artificial Sequence
  Cyclic GFR-binding peptide
VMNEYKFKIVNSSDDLYLVSIPELQT

SEQ ID NO: 60951 - protein, 25 aa, Artificial Sequence
  Cyclic GFR-binding peptide
SVAMGEYQKYYTVVGKDIYLISIPS

SEQ ID NO: 60952 - protein, 29 aa, Artificial Sequence
  Cyclic GFR-binding peptide
  MOD_RES (1)..(1): Xaa is C or S
XAKVVMNEYQKYIVNNSSDIYLVSIPSLK

SEQ ID NO: 60953 - protein, 30 aa, Artificial Sequence
  Cyclic GFR-binding peptide
ARVVMNEYQKYIVNSSDDIYLVSIPSLQTP

SEQ ID NO: 60954 - protein, 28 aa, Artificial Sequence
  Cyclic GFR-binding peptide
  MOD_RES (1)..(1): Xaa is C or S
XGEVVMDEYKFKVVKENEDLYLMSIPEL

SEQ ID NO: 60955 - protein, 34 aa, Artificial Sequence
  Cyclic GFR-binding peptide
  MOD_RES (2)..(4): Xaa is C or S
RXGXAEVVMDRYKKLVVNNAADFYLISIANLRAP

SEQ ID NO: 60956 - protein, 28 aa, Artificial Sequence
  Cyclic GFR-binding peptide
ARVVMNEYKFKIVNSSDDLYLVSIPELQ

SEQ ID NO: 60957 - protein, 29 aa, Artificial Sequence
  Cyclic GFR-binding peptide
  MOD_RES (2)..(2): Xaa is C or S
GXSRVVMNEYKFKIVNSSDDLYLVSIPEL

SEQ ID NO: 60958 - protein, 27 aa, Artificial Sequence
  Cyclic GFR-binding peptide
MDEYKFKVVNNAADLYLISIPELRAPV

SEQ ID NO: 60959 - protein, 35 aa, Artificial Sequence; identical to SEQ ID NO: 16077
  Cyclic GFR-binding peptide
  MOD_RES (2)..(4): Xaa is C or S

SEQ ID NO: 60960 - protein, 40 aa, Artificial Sequence; identical to SEQ ID NO: 16078
  Cyclic GFR-binding peptide
  MOD_RES (1)..(3)..(35)..(36): Xaa is C or S

SEQ ID NO: 60961 - protein, 30 aa, Artificial Sequence
  Cyclic GFR-binding peptide
  MOD_RES (30)..(30): Xaa is C or S
VVMDEYQKYVVKENEDIYLMSIPSLETPVX

SEQ ID NO: 60962 - protein, 34 aa, Artificial Sequence
  Cyclic GFR-binding peptide
  MOD_RES (28)..(29): Xaa is C or S
MNEYKFKIVNNSSDLYLVSIPELKTPAXXAKPVA

SEQ ID NO: 60963 - protein, 28 aa, Artificial Sequence
  Cyclic GFR-binding peptide
  MOD_RES (28)..(28): Xaa is C or S
MGYHYKLYTVVGKDKYLISIPSLKTPVX

SEQ ID NO: 60964 - protein, 35 aa, Artificial Sequence; identical to SEQ ID NO: 16082
  Cyclic GFR-binding peptide
  MOD_RES (32)..(33): Xaa is C or S

SEQ ID NO: 60965 - protein, 38 aa, Artificial Sequence; identical to SEQ ID NO: 16087
  Cyclic GFR-binding peptide
  MOD_RES (2)..(4)..(36)..(37): Xaa is C or S

SEQ ID NO: 60966 - protein, 32 aa, Artificial Sequence
  Cyclic GFR-binding peptide
  MOD_RES (28)..(29): Xaa is C or S
MNEYKFKIVNSSDDLYLVSIPELKTPAXXPKP

SEQ ID NO: 60967 - protein, 27 aa, Artificial Sequence
  Cyclic GFR-binding peptide
MNEYKFKIVNNSSDLYLVSIPELKTPA

SEQ ID NO: 60968 - protein, 41 aa, Artificial Sequence; identical to SEQ ID NO: 16090
  Cyclic GFR-binding peptide
  MOD_RES (2)..(4)..(37)..(38): Xaa is C or S

SEQ ID NO: 60969 - protein, 25 aa, Artificial Sequence
  Cyclic GFR-binding peptide
MEYQKYIKPTKGIIYLISIPSLDQS

SEQ ID NO: 60970 - protein, 34 aa, Artificial Sequence; identical to SEQ ID NO: 16098
  Cyclic GFR-binding peptide
  MOD_RES (32)..(33): Xaa is C or S

SEQ ID NO: 60971 - protein, 29 aa, Artificial Sequence
  Cyclic GFR-binding peptide
  MOD_RES (27)..(28): Xaa is C or S
DRYKKLVVNNAADFYLISIANLRAPVXXS

SEQ ID NO: 60972 - protein, 26 aa, Artificial Sequence
  Cyclic GFR-binding peptide
NEYKFKIVNSSDDLYLVSIPELKTPA

SEQ ID NO: 60973 - protein, 30 aa, Artificial Sequence
  Cyclic GFR-binding peptide
  MOD_RES (1)..(1): Xaa is C or S
XAKVVMNEYKFKIVNNSSDLYLVSIPELKT

SEQ ID NO: 60974 - protein, 25 aa, Artificial Sequence
  Cyclic GFR-binding peptide
EYQKYTPVGMDDIYLVSIPSLKTPV

SEQ ID NO: 60975 - protein, 40 aa, Artificial Sequence; identical to SEQ ID NO: 16104
  Cyclic GFR-binding peptide
  MOD_RES (1)..(3)..(34)..(35): Xaa is C or S

SEQ ID NO: 60976 - protein, 32 aa, Artificial Sequence
  Cyclic GFR-binding peptide
  MOD_RES (1)..(3): Xaa is C or S
XGXGEVVMEEYQKYVVKDYEDIYLMSIPSLET

SEQ ID NO: 60977 - protein, 28 aa, Artificial Sequence
  Cyclic GFR-binding peptide
  MOD_RES (1)..(1): Xaa is C or S
XGEVVMEEYKFKVVKDYEDLYLMSIPEL

SEQ ID NO: 60978 - protein, 32 aa, Artificial Sequence
  Cyclic GFR-binding peptide
  MOD_RES (2)..(2): Xaa is C or S
GXAEVVMDYHYKLVVNNAADKYLISIPSLRAP

SEQ ID NO: 60979 - protein, 35 aa, Artificial Sequence; identical to SEQ ID NO: 16106
  Cyclic GFR-binding peptide
  MOD_RES (1)..(3)..(35): Xaa is C or S

SEQ ID NO: 60980 - protein, 32 aa, Artificial Sequence
  Cyclic GFR-binding peptide
  MOD_RES (2)..(4): Xaa is C or S
RXGXEAVSMGEEYKFKTPVGMDDLYLVSIPEL

SEQ ID NO: 60981 - protein, 30 aa, Artificial Sequence
  Cyclic GFR-binding peptide
  MOD_RES (30)..(30): Xaa is C or S
KVVMEYKFKVKPTRGVLYLISIPELDQPVX

SEQ ID NO: 60982 - protein, 29 aa, Artificial Sequence
  Cyclic GFR-binding peptide
  MOD_RES (26)..(27): Xaa is C or S
EYKFKVVNNAADLYLISIPELRAPVXXSA

SEQ ID NO: 60983 - protein, 32 aa, Artificial Sequence
  Cyclic GFR-binding peptide
  MOD_RES (1)..(3): Xaa is C or S
XKXSRVIMEYKFKVKPKRGVLYLISIPELAQP

SEQ ID NO: 60984 - protein, 32 aa, Artificial Sequence
  Cyclic GFR-binding peptide
  MOD_RES (26)..(27): Xaa is C or S
EYQKYIVNSSDDIYLVSIPSLQTPAXXPKPVT

SEQ ID NO: 60985 - protein, 36 aa, Artificial Sequence; identical to SEQ ID NO: 16109
  Cyclic GFR-binding peptide
  MOD_RES (31)..(32): Xaa is C or S

SEQ ID NO: 60986 - protein, 28 aa, Artificial Sequence
  Cyclic GFR-binding peptide
VIMEYKFKIKPTKGILYLISIPELDQSV

SEQ ID NO: 60987 - protein, 26 aa, Artificial Sequence
  Cyclic GFR-binding peptide
  MOD_RES (26)..(26): Xaa is C or S
EYQKYIKPTKGIIYLISIPSLDQSVX

SEQ ID NO: 60988 - protein, 32 aa, Artificial Sequence
  Cyclic GFR-binding peptide
  MOD_RES (2)..(4): Xaa is C or S
SXKXSKVIMEYQKYIKPTKGIIYLISIPSLDQ

SEQ ID NO: 60989 - protein, 37 aa, Artificial Sequence; identical to SEQ ID NO: 16115
  Cyclic GFR-binding peptide
  MOD_RES (1)..(32)..(33): Xaa is C or S

SEQ ID NO: 60990 - protein, 33 aa, Artificial Sequence
  Cyclic GFR-binding peptide
  MOD_RES (1)..(3): Xaa is C or S
XGXESVAMGEYQKYYTVVGKDIYLISIPSLKTP

SEQ ID NO: 60991 - protein, 35 aa, Artificial Sequence; identical to SEQ ID NO: 16117
  Cyclic GFR-binding peptide
  MOD_RES (31)..(32): Xaa is C or S

SEQ ID NO: 60992 - protein, 29 aa, Artificial Sequence
  Cyclic GFR-binding peptide
  MOD_RES (2)..(4): Xaa is C or S
SXKXSKVVMEYKFKVKPTRGVLYLISIPE

SEQ ID NO: 60993 - protein, 31 aa, Artificial Sequence
  Cyclic GFR-binding peptide
  MOD_RES (30)..(31): Xaa is C or S
SMGEEYQKYTPVGMDDIYLVSIPSLKTPVXX

SEQ ID NO: 60994 - protein, 30 aa, Artificial Sequence
  Cyclic GFR-binding peptide
  MOD_RES (29)..(30): Xaa is C or S
VMEEYQKYVVKDYEDIYLMSIPSLETPVXX

SEQ ID NO: 60995 - protein, 29 aa, Artificial Sequence
  Cyclic GFR-binding peptide
  MOD_RES (2)..(2): Xaa is C or S
KXSKVIMEYKFKIKPTKGILYLISIPELD

SEQ ID NO: 60996 - protein, 38 aa, Artificial Sequence; identical to SEQ ID NO: 16125
  Cyclic GFR-binding peptide
  MOD_RES (1)..(32)..(33): Xaa is C or S

SEQ ID NO: 60997 - protein, 27 aa, Artificial Sequence
  Cyclic GFR-binding peptide
  MOD_RES (1)..(1): Xaa is C or S
XGEVVMEEYQKYVVKDYEDIYLMSIPS

SEQ ID NO: 60998 - protein, 35 aa, Artificial Sequence
  Cyclic GFR-binding peptide
  MOD_RES (30)..(31): Xaa is C or S
VVMNEYQKYIVNSSDDIYLVSIPSLKTPAXXPKPV

SEQ ID NO: 60999 - protein, 39 aa, Artificial Sequence; identical to SEQ ID NO: 16131
  Cyclic GFR-binding peptide
  MOD_RES (2)..(4)..(36)..(37): Xaa is C or S

SEQ ID NO: 61000 - protein, 34 aa, Artificial Sequence; identical to SEQ ID NO: 16135
  Cyclic GFR-binding peptide
  MOD_RES (31)..(32): Xaa is C or S

SEQ ID NO: 61001 - protein, 29 aa, Artificial Sequence
  Cyclic GFR-binding peptide
EVVMDEYQKYVVKENEDIYLMSIPSLETP

SEQ ID NO: 61002 - protein, 27 aa, Artificial Sequence
  Cyclic GFR-binding peptide
SKVVMEYQKYVKPTRGVIYLISIPSLD

SEQ ID NO: 61003 - protein, 34 aa, Artificial Sequence; identical to SEQ ID NO: 16139
  Cyclic GFR-binding peptide
  MOD_RES (2)..(34): Xaa is C or S

SEQ ID NO: 61004 - protein, 36 aa, Artificial Sequence; identical to SEQ ID NO: 16140
  Cyclic GFR-binding peptide
  MOD_RES (2)..(34)..(35): Xaa is C or S

SEQ ID NO: 61005 - protein, 24 aa, Artificial Sequence
  Cyclic GFR-binding peptide
EYKFKIVNSSDDLYLVSIPELQTP

SEQ ID NO: 61006 - protein, 32 aa, Artificial Sequence; identical to SEQ ID NO: 16144
  Cyclic GFR-binding peptide
  MOD_RES (31)..(32): Xaa is C or S

SEQ ID NO: 61007 - protein, 25 aa, Artificial Sequence
  Cyclic GFR-binding peptide
MGEEYQKYTPVGMDDIYLVSIPSLK

SEQ ID NO: 61008 - protein, 33 aa, Artificial Sequence; identical to SEQ ID NO: 16149
  Cyclic GFR-binding peptide
  MOD_RES (32)..(33): Xaa is C or S

SEQ ID NO: 61009 - protein, 22 aa, Artificial Sequence
  Cyclic GFR-binding peptide
GRYKKLYTVVGKDFYLISIANL

SEQ ID NO: 61010 - protein, 23 aa, Artificial Sequence
  Cyclic GFR-binding peptide
MNEYKFKIVNNSSDLYLVSIPEL

SEQ ID NO: 61011 - protein, 42 aa, Artificial Sequence; identical to SEQ ID NO: 16152
  Cyclic GFR-binding peptide
  MOD_RES (1)..(3)..(36)..(37): Xaa is C or S

SEQ ID NO: 61012 - protein, 34 aa, Artificial Sequence
  Cyclic GFR-binding peptide
  MOD_RES (28)..(29): Xaa is C or S
IMEYKFKVKPKRGVLYLISIPELAQPVXXPAASA

SEQ ID NO: 61013 - protein, 35 aa, Artificial Sequence; identical to SEQ ID NO: 16156
  Cyclic GFR-binding peptide
  MOD_RES (1)..(33)..(34): Xaa is C or S

SEQ ID NO: 61014 - protein, 40 aa, Artificial Sequence; identical to SEQ ID NO: 16158
  Cyclic GFR-binding peptide
  MOD_RES (2)..(4)..(36)..(37): Xaa is C or S

SEQ ID NO: 61015 - protein, 22 aa, Artificial Sequence
  Cyclic GFR-binding peptide
MNEYKFKIVNNSSDLYLVSIPE

SEQ ID NO: 61016 - protein, 34 aa, Artificial Sequence; identical to SEQ ID NO: 16161
  Cyclic GFR-binding peptide
  MOD_RES (2)..(34): Xaa is C or S

SEQ ID NO: 61017 - protein, 33 aa, Artificial Sequence
  Cyclic GFR-binding peptide
  MOD_RES (30)..(30): Xaa is C or S
VVMNEYQKYIVNSSDDIYLVSIPSLKTPAXTPK

SEQ ID NO: 61018 - protein, 31 aa, Artificial Sequence
  Cyclic GFR-binding peptide
  MOD_RES (26)..(27): Xaa is C or S
EYKFKIVNNSSDLYLVSIPELKTPAXXAKPV

SEQ ID NO: 61019 - protein, 22 aa, Artificial Sequence
  Cyclic GFR-binding peptide
YHYKLYTVVGKDKYLISIPSLK

SEQ ID NO: 61020 - protein, 31 aa, Artificial Sequence
  Cyclic GFR-binding peptide
  MOD_RES (27)..(28): Xaa is C or S
NEYKFKIVNSSDDLYLVSIPELQTPAXXPKP

SEQ ID NO: 61021 - protein, 25 aa, Artificial Sequence
  Cyclic GFR-binding peptide
VVMNEYKFKIVNSSDDLYLVSIPEL

SEQ ID NO: 61022 - protein, 37 aa, Artificial Sequence; identical to SEQ ID NO: 16167
  Cyclic GFR-binding peptide
  MOD_RES (1)..(33)..(34): Xaa is C or S

SEQ ID NO: 61023 - protein, 26 aa, Artificial Sequence
  Cyclic GFR-binding peptide
VMEYQKYVKPTRGVIYLISIPSLDQP

SEQ ID NO: 61024 - protein, 26 aa, Artificial Sequence
  Cyclic GFR-binding peptide
SMGEEYQKYTPVGMDDIYLVSIPSLK

SEQ ID NO: 61025 - protein, 31 aa, Artificial Sequence
  Cyclic GFR-binding peptide
  MOD_RES (26)..(27): Xaa is C or S
EYQKYVVKDYEDIYLMSIPSLETPVXXAKPI

SEQ ID NO: 61026 - protein, 28 aa, Artificial Sequence
  Cyclic GFR-binding peptide
AMGYHYKLYTVVGKDKYLISIPSLKTPV

SEQ ID NO: 61027 - protein, 22 aa, Artificial Sequence
  Cyclic GFR-binding peptide
DEYKFKVVKENEDLYLMSIPEL

SEQ ID NO: 61028 - protein, 23 aa, Artificial Sequence
  Cyclic GFR-binding peptide
IMEYQKYIKPTKGIIYLISIPSL

SEQ ID NO: 61029 - protein, 40 aa, Artificial Sequence
  Cyclic GFR-binding peptide
  MOD_RES (1)..(3)..(35)..(36): Xaa is C or S
XGXSRVVMNEYQKYIVNSSDDIYLVSIPSLKTPAXXPKPV

SEQ ID NO: 61030 - protein, 37 aa, Artificial Sequence; identical to SEQ ID NO: 16173
  Cyclic GFR-binding peptide
  MOD_RES (32)..(33): Xaa is C or S

SEQ ID NO: 61031 - protein, 28 aa, Artificial Sequence
  Cyclic GFR-binding peptide
  MOD_RES (1)..(3): Xaa is C or S
XKXSRVIMEYKFKVKPKRGVLYLISIPE

SEQ ID NO: 61032 - protein, 35 aa, Artificial Sequence
  Cyclic GFR-binding peptide
  MOD_RES (30)..(31): Xaa is C or S
VVMNEYKFKIVNNSSDLYLVSIPELKTPAXXAKPV

SEQ ID NO: 61033 - protein, 41 aa, Artificial Sequence; identical to SEQ ID NO: 16175
  Cyclic GFR-binding peptide
  MOD_RES (2)..(4)..(36)..(37): Xaa is C or S

SEQ ID NO: 61034 - protein, 33 aa, Artificial Sequence
  Cyclic GFR-binding peptide
  MOD_RES (30)..(31): Xaa is C or S
VVMDEYKFKVVKENEDLYLMSIPELETPVXXAK

SEQ ID NO: 61035 - protein, 31 aa, Artificial Sequence; identical to SEQ ID NO: 16177
  Cyclic GFR-binding peptide
  MOD_RES (31)..(31): Xaa is C or S

SEQ ID NO: 61036 - protein, 24 aa, Artificial Sequence
  Cyclic GFR-binding peptide
VVMDEYQKYVVKENEDIYLMSIPS

SEQ ID NO: 61037 - protein, 30 aa, Artificial Sequence
  Cyclic GFR-binding peptide
  MOD_RES (29)..(30): Xaa is C or S
VIMEYKFKVKPKRGVLYLISIPELAQPVXX

SEQ ID NO: 61038 - protein, 30 aa, Artificial Sequence
  Cyclic GFR-binding peptide
  MOD_RES (2)..(2): Xaa is C or S
GXGEVVMEEYQKYVVKDYEDIYLMSIPSLE

SEQ ID NO: 61039 - protein, 25 aa, Artificial Sequence
  Cyclic GFR-binding peptide
EYKFKVVNNAADLYLISIPELRAPV

SEQ ID NO: 61040 - protein, 27 aa, Artificial Sequence
  Cyclic GFR-binding peptide
  MOD_RES (26)..(27): Xaa is C or S
EYKFKVVKENEDLYLMSIPELETPVXX

SEQ ID NO: 61041 - protein, 33 aa, Artificial Sequence; identical to SEQ ID NO: 16185
  Cyclic GFR-binding peptide
  MOD_RES (32)..(33): Xaa is C or S

SEQ ID NO: 61042 - protein, 39 aa, Artificial Sequence; identical to SEQ ID NO: 16186
  Cyclic GFR-binding peptide
  MOD_RES (1)..(3)..(34)..(35): Xaa is C or S

SEQ ID NO: 61043 - protein, 37 aa, Artificial Sequence; identical to SEQ ID NO: 16188
  Cyclic GFR-binding peptide
  MOD_RES (32)..(33): Xaa is C or S

SEQ ID NO: 61044 - protein, 37 aa, Artificial Sequence; identical to SEQ ID NO: 16189
  Cyclic GFR-binding peptide
  MOD_RES (31)..(32): Xaa is C or S

SEQ ID NO: 61045 - protein, 38 aa, Artificial Sequence; identical to SEQ ID NO: 16193
  Cyclic GFR-binding peptide
  MOD_RES (2)..(4)..(36): Xaa is C or S

SEQ ID NO: 61046 - protein, 25 aa, Artificial Sequence
  Cyclic GFR-binding peptide
KVIMEYKFKIKPTKGILYLISIPEL

SEQ ID NO: 61047 - protein, 35 aa, Artificial Sequence; identical to SEQ ID NO: 16199
  Cyclic GFR-binding peptide
  MOD_RES (32)..(33): Xaa is C or S

SEQ ID NO: 61048 - protein, 22 aa, Artificial Sequence
  Cyclic GFR-binding peptide
MDEYKFKVVNNAADLYLISIPE

SEQ ID NO: 61049 - protein, 35 aa, Artificial Sequence; identical to SEQ ID NO: 16201
  Cyclic GFR-binding peptide
  MOD_RES (32)..(33): Xaa is C or S

SEQ ID NO: 61050 - protein, 26 aa, Artificial Sequence
  Cyclic GFR-binding peptide
VSMGEEYKFKTPVGMDDLYLVSIPEL

SEQ ID NO: 61051 - protein, 35 aa, Artificial Sequence
  Cyclic GFR-binding peptide
  MOD_RES (30)..(30): Xaa is C or S
VVMNEYKFKIVNSSDDLYLVSIPELKTPAXTPKTV

SEQ ID NO: 61052 - protein, 33 aa, Artificial Sequence
  Cyclic GFR-binding peptide
  MOD_RES (29)..(30): Xaa is C or S
VIMEYKFKVKPKRGVLYLISIPELAQPVXXPAA

SEQ ID NO: 61053 - protein, 33 aa, Artificial Sequence
  Cyclic GFR-binding peptide
  MOD_RES (1)..(3): Xaa is C or S
XGXESVAMGRYKKLYTVVGKDFYLISIANLKTP

SEQ ID NO: 61054 - protein, 34 aa, Artificial Sequence; identical to SEQ ID NO: 16210
  Cyclic GFR-binding peptide
  MOD_RES (1)..(33): Xaa is C or S

SEQ ID NO: 61055 - protein, 20 aa, Artificial Sequence
  Cyclic GFR-binding peptide
EYKFKVVKDYEDLYLMSIPE

SEQ ID NO: 61056 - protein, 30 aa, Artificial Sequence
  Cyclic GFR-binding peptide
  MOD_RES (2)..(2): Xaa is C or S
GXSRVVMNEYQKYIVNSSDDIYLVSIPSLK

SEQ ID NO: 61057 - protein, 29 aa, Artificial Sequence
  Cyclic GFR-binding peptide
  MOD_RES (1)..(3): Xaa is C or S
XGXGEVVMEEYKFKVVKDYEDLYLMSIPE

SEQ ID NO: 61058 - protein, 39 aa, Artificial Sequence; identical to SEQ ID NO: 16216
  Cyclic GFR-binding peptide
  MOD_RES (2)..(34)..(35): Xaa is C or S

SEQ ID NO: 61059 - protein, 40 aa, Artificial Sequence; identical to SEQ ID NO: 16218
  Cyclic GFR-binding peptide
  MOD_RES (2)..(4)..(36)..(37): Xaa is C or S

SEQ ID NO: 61060 - protein, 30 aa, Artificial Sequence
  Cyclic GFR-binding peptide
  MOD_RES (27)..(28): Xaa is C or S
EEYQKYVVKDYEDIYLMSIPSLETPVXXAK

SEQ ID NO: 61061 - protein, 29 aa, Artificial Sequence
  Cyclic GFR-binding peptide
  MOD_RES (27)..(28): Xaa is C or S
EEYKFKTPVGMDDLYLVSIPELKTPVXXA

SEQ ID NO: 61062 - protein, 23 aa, Artificial Sequence
  Cyclic GFR-binding peptide
VVMEYKFKVKPTRGVLYLISIPE

SEQ ID NO: 61063 - protein, 35 aa, Artificial Sequence; identical to SEQ ID NO: 16222
  Cyclic GFR-binding peptide
  MOD_RES (1)..(3)..(35): Xaa is C or S

SEQ ID NO: 61064 - protein, 25 aa, Artificial Sequence
  Cyclic GFR-binding peptide
AMGEYQKYYTVVGKDIYLISIPSLK

SEQ ID NO: 61065 - protein, 36 aa, Artificial Sequence; identical to SEQ ID NO: 16224
  Cyclic GFR-binding peptide
  MOD_RES (1)..(3)..(35)..(36): Xaa is C or S

SEQ ID NO: 61066 - protein, 36 aa, Artificial Sequence; identical to SEQ ID NO: 16225
  Cyclic GFR-binding peptide
  MOD_RES (2)..(4)..(35)..(36): Xaa is C or S

SEQ ID NO: 61067 - protein, 24 aa, Artificial Sequence
  Cyclic GFR-binding peptide
VMEEYQKYVVKDYEDIYLMSIPSL

SEQ ID NO: 61068 - protein, 32 aa, Artificial Sequence
  Cyclic GFR-binding peptide
  MOD_RES (29)..(30): Xaa is C or S
VMEEYKFKVVKDYEDLYLMSIPELETPVXXAK

SEQ ID NO: 61069 - protein, 36 aa, Artificial Sequence; identical to SEQ ID NO: 16227
  Cyclic GFR-binding peptide
  MOD_RES (1)..(3)..(35)..(36): Xaa is C or S

SEQ ID NO: 61070 - protein, 37 aa, Artificial Sequence; identical to SEQ ID NO: 16233
  Cyclic GFR-binding peptide
  MOD_RES (1)..(3)..(35)..(36): Xaa is C or S

SEQ ID NO: 61071 - protein, 25 aa, Artificial Sequence
  Cyclic GFR-binding peptide
VVMEYQKYVKPTRGVIYLISIPSLD

SEQ ID NO: 61072 - protein, 30 aa, Artificial Sequence
  Cyclic GFR-binding peptide
  MOD_RES (2)..(2): Xaa is C or S
GXESVAMGRYKKLYTVVGKDFYLISIANLK

SEQ ID NO: 61073 - protein, 29 aa, Artificial Sequence
  Cyclic GFR-binding peptide
SKVIMEYQKYIKPTKGIIYLISIPSLDQS

SEQ ID NO: 61074 - protein, 26 aa, Artificial Sequence
  Cyclic GFR-binding peptide
VVMEEYKFKVVKDYEDLYLMSIPELE

SEQ ID NO: 61075 - protein, 28 aa, Artificial Sequence
  Cyclic GFR-binding peptide
EVVMDEYQKYVVKENEDIYLMSIPSLET

SEQ ID NO: 61076 - protein, 27 aa, Artificial Sequence
  Cyclic GFR-binding peptide
  MOD_RES (2)..(2): Xaa is C or S
KXSKVIMEYKFKIKPTKGILYLISIPE

SEQ ID NO: 61077 - protein, 38 aa, Artificial Sequence; identical to SEQ ID NO: 16241
  Cyclic GFR-binding peptide
  MOD_RES (1)..(3)..(35): Xaa is C or S

SEQ ID NO: 61078 - protein, 31 aa, Artificial Sequence
  Cyclic GFR-binding peptide
  MOD_RES (26)..(27): Xaa is C or S
EYQKYIKPTKGIIYLISIPSLDQSVXXPSAS

SEQ ID NO: 61079 - protein, 27 aa, Artificial Sequence
  Cyclic GFR-binding peptide
VVMNEYKFKIVNSSDDLYLVSIPELKT

SEQ ID NO: 61080 - protein, 24 aa, Artificial Sequence
  Cyclic GFR-binding peptide
VMDYHYKLVVNNAADKYLISIPSL

SEQ ID NO: 61081 - protein, 27 aa, Artificial Sequence
  Cyclic GFR-binding peptide
VVMEEYQKYVVKDYEDIYLMSIPSLET

SEQ ID NO: 61082 - protein, 28 aa, Artificial Sequence
  Cyclic GFR-binding peptide
RVIMEYKFKVKPKRGVLYLISIPELAQP

SEQ ID NO: 61083 - protein, 31 aa, Artificial Sequence
  Cyclic GFR-binding peptide
  MOD_RES (29)..(30): Xaa is C or S
VMNEYQKYIVNNSSDIYLVSIPSLKTPAXXA

SEQ ID NO: 61084 - protein, 37 aa, Artificial Sequence; identical to SEQ ID NO: 16250
  Cyclic GFR-binding peptide
  MOD_RES (32)..(33): Xaa is C or S

SEQ ID NO: 61085 - protein, 33 aa, Artificial Sequence; identical to SEQ ID NO: 16252
  Cyclic GFR-binding peptide
  MOD_RES (1)..(32)..(33): Xaa is C or S

SEQ ID NO: 61086 - protein, 26 aa, Artificial Sequence
  Cyclic GFR-binding peptide
AKVVMNEYQKYIVNNSSDIYLVSIPS

SEQ ID NO: 61087 - protein, 29 aa, Artificial Sequence
  Cyclic GFR-binding peptide
  MOD_RES (26)..(27): Xaa is C or S
RYKKLVVNNAADFYLISIANLRAPVXXSA

SEQ ID NO: 61088 - protein, 30 aa, Artificial Sequence
  Cyclic GFR-binding peptide
  MOD_RES (26)..(27): Xaa is C or S
EYKFKTPVGMDDLYLVSIPELKTPVXXAKG

SEQ ID NO: 61089 - protein, 32 aa, Artificial Sequence; identical to SEQ ID NO: 16253
  Cyclic GFR-binding peptide
  MOD_RES (2)..(2): Xaa is C or S

SEQ ID NO: 61090 - protein, 32 aa, Artificial Sequence
  Cyclic GFR-binding peptide
  MOD_RES (28)..(29): Xaa is C or S
MNEYQKYIVNSSDDIYLVSIPSLKTPAXXPKP

SEQ ID NO: 61091 - protein, 35 aa, Artificial Sequence
  Cyclic GFR-binding peptide
  MOD_RES (29)..(29): Xaa is C or S
VMNEYQKYIVNSSDDIYLVSIPSLKTPAXTPKTVH

SEQ ID NO: 61092 - protein, 40 aa, Artificial Sequence; identical to SEQ ID NO: 16255
  Cyclic GFR-binding peptide
  MOD_RES (2)..(34)..(35): Xaa is C or S

SEQ ID NO: 61093 - protein, 36 aa, Artificial Sequence; identical to SEQ ID NO: 16256
  Cyclic GFR-binding peptide
  MOD_RES (33)..(34): Xaa is C or S

SEQ ID NO: 61094 - protein, 31 aa, Artificial Sequence
  Cyclic GFR-binding peptide
  MOD_RES (1)..(1): Xaa is C or S
XEAVSMGEEYQKYTPVGMDDIYLVSIPSLKT

SEQ ID NO: 61095 - protein, 31 aa, Artificial Sequence
  Cyclic GFR-binding peptide
  MOD_RES (30)..(31): Xaa is C or S
VVMDEYQKYVVKENEDIYLMSIPSLETPVXX

SEQ ID NO: 61096 - protein, 21 aa, Artificial Sequence
  Cyclic GFR-binding peptide
NEYQKYIVNSSDDIYLVSIPS

SEQ ID NO: 61097 - protein, 42 aa, Artificial Sequence; identical to SEQ ID NO: 16260
  Cyclic GFR-binding peptide
  MOD_RES (2)..(4)..(36)..(37): Xaa is C or S

SEQ ID NO: 61098 - protein, 22 aa, Artificial Sequence
  Cyclic GFR-binding peptide
EYKFKTPVGMDDLYLVSIPELK

SEQ ID NO: 61099 - protein, 29 aa, Artificial Sequence
  Cyclic GFR-binding peptide
  MOD_RES (2)..(2): Xaa is C or S
GXSRVVMNEYQKYIVNSSDDIYLVSIPSL

SEQ ID NO: 61100 - protein, 27 aa, Artificial Sequence
  Cyclic GFR-binding peptide
  MOD_RES (1)..(1): Xaa is C or S
XAKVVMNEYKFKIVNNSSDLYLVSIPE

SEQ ID NO: 61101 - protein, 30 aa, Artificial Sequence
  Cyclic GFR-binding peptide
  MOD_RES (27)..(28): Xaa is C or S
MEYKFKVKPTRGVLYLISIPELDQPVXXPS

SEQ ID NO: 61102 - protein, 36 aa, Artificial Sequence; identical to SEQ ID NO: 16269
  Cyclic GFR-binding peptide
  MOD_RES (32)..(33): Xaa is C or S

SEQ ID NO: 61103 - protein, 32 aa, Artificial Sequence; identical to SEQ ID NO: 16271
  Cyclic GFR-binding peptide
  MOD_RES (31)..(32): Xaa is C or S

SEQ ID NO: 61104 - protein, 39 aa, Artificial Sequence; identical to SEQ ID NO: 16272
  Cyclic GFR-binding peptide
  MOD_RES (1)..(33): Xaa is C or S

SEQ ID NO: 61105 - protein, 36 aa, Artificial Sequence; identical to SEQ ID NO: 16274
  Cyclic GFR-binding peptide
  MOD_RES (31)..(32): Xaa is C or S

SEQ ID NO: 61106 - protein, 27 aa, Artificial Sequence
  Cyclic GFR-binding peptide
KVIMEYKFKIKPTKGILYLISIPELDQ

SEQ ID NO: 61107 - protein, 28 aa, Artificial Sequence
  Cyclic GFR-binding peptide
VVMNEYQKYIVNSSDDIYLVSIPSLQTP

SEQ ID NO: 61108 - protein, 33 aa, Artificial Sequence; identical to SEQ ID NO: 16282
  Cyclic GFR-binding peptide
  MOD_RES (1)..(3): Xaa is C or S

SEQ ID NO: 61109 - protein, 36 aa, Artificial Sequence; identical to SEQ ID NO: 16283
  Cyclic GFR-binding peptide
  MOD_RES (2)..(4)..(36): Xaa is C or S

SEQ ID NO: 61110 - protein, 32 aa, Artificial Sequence
  Cyclic GFR-binding peptide
  MOD_RES (27)..(28): Xaa is C or S
DYHYKLVVNNAADKYLISIPSLRAPVXXSAPA

SEQ ID NO: 61111 - protein, 32 aa, Artificial Sequence; identical to SEQ ID NO: 16286
  Cyclic GFR-binding peptide
  MOD_RES (32)..(32): Xaa is C or S

SEQ ID NO: 61112 - protein, 42 aa, Artificial Sequence; identical to SEQ ID NO: 16287
  Cyclic GFR-binding peptide
  MOD_RES (2)..(4)..(37)..(38): Xaa is C or S

SEQ ID NO: 61113 - protein, 35 aa, Artificial Sequence; identical to SEQ ID NO: 16288
  Cyclic GFR-binding peptide
  MOD_RES (2)..(4): Xaa is C or S

SEQ ID NO: 61114 - protein, 28 aa, Artificial Sequence
  Cyclic GFR-binding peptide
  MOD_RES (1)..(1): Xaa is C or S
XSKVVMEYKFKVKPTRGVLYLISIPELD

SEQ ID NO: 61115 - protein, 27 aa, Artificial Sequence
  Cyclic GFR-binding peptide
  MOD_RES (26)..(27): Xaa is C or S
EYQKYIVNSSDDIYLVSIPSLKTPAXX

SEQ ID NO: 61116 - protein, 30 aa, Artificial Sequence
  Cyclic GFR-binding peptide
  MOD_RES (30)..(30): Xaa is C or S
SMGEEYQKYTPVGMDDIYLVSIPSLKTPVX

SEQ ID NO: 61117 - protein, 34 aa, Artificial Sequence; identical to SEQ ID NO: 16291
  Cyclic GFR-binding peptide
  MOD_RES (1)..(32)..(33): Xaa is C or S

SEQ ID NO: 61118 - protein, 32 aa, Artificial Sequence; identical to SEQ ID NO: 16293
  Cyclic GFR-binding peptide
  MOD_RES (32)..(32): Xaa is C or S

SEQ ID NO: 61119 - protein, 33 aa, Artificial Sequence; identical to SEQ ID NO: 16299
  Cyclic GFR-binding peptide
  MOD_RES (32)..(33): Xaa is C or S

SEQ ID NO: 61120 - protein, 28 aa, Artificial Sequence
  Cyclic GFR-binding peptide
  MOD_RES (2)..(2): Xaa is C or S
GXAEVVMDYHYKLVVNNAADKYLISIPS

SEQ ID NO: 61121 - protein, 35 aa, Artificial Sequence; identical to SEQ ID NO: 16303
  Cyclic GFR-binding peptide
  MOD_RES (32)..(33): Xaa is C or S

SEQ ID NO: 61122 - protein, 37 aa, Artificial Sequence; identical to SEQ ID NO: 16304
  Cyclic GFR-binding peptide
  MOD_RES (2)..(4)..(36)..(37): Xaa is C or S

SEQ ID NO: 61123 - protein, 25 aa, Artificial Sequence
  Cyclic GFR-binding peptide
EYQKYVKPTRGVIYLISIPSLDQPV

SEQ ID NO: 61124 - protein, 36 aa, Artificial Sequence; identical to SEQ ID NO: 16306
  Cyclic GFR-binding peptide
  MOD_RES (2)..(34)..(35): Xaa is C or S

SEQ ID NO: 61125 - protein, 30 aa, Artificial Sequence
  Cyclic GFR-binding peptide
  MOD_RES (1)..(1): Xaa is C or S
XGEVVMDEYQKYVVKENEDIYLMSIPSLET

SEQ ID NO: 61126 - protein, 27 aa, Artificial Sequence
  Cyclic GFR-binding peptide
  MOD_RES (27)..(27): Xaa is C or S
DEYQKYVVKENEDIYLMSIPSLETPVX

SEQ ID NO: 61127 - protein, 42 aa, Artificial Sequence; identical to SEQ ID NO: 16308
  Cyclic GFR-binding peptide
  MOD_RES (2)..(4)..(36)..(37): Xaa is C or S

SEQ ID NO: 61128 - protein, 28 aa, Artificial Sequence
  Cyclic GFR-binding peptide
VVMDEYQKYVVKENEDIYLMSIPSLETP

SEQ ID NO: 61129 - protein, 38 aa, Artificial Sequence; identical to SEQ ID NO: 16311
  Cyclic GFR-binding peptide
  MOD_RES (2)..(35)..(36): Xaa is C or S

SEQ ID NO: 61130 - protein, 31 aa, Artificial Sequence
  Cyclic GFR-binding peptide
  MOD_RES (29)..(29): Xaa is C or S
VMNEYQKYIVNSSDDIYLVSIPSLKTPAXTP

SEQ ID NO: 61131 - protein, 31 aa, Artificial Sequence
  Cyclic GFR-binding peptide
  MOD_RES (27)..(28): Xaa is C or S
GRYKKLYTVVGKDFYLISIANLKTPVXXAKS

SEQ ID NO: 61132 - protein, 27 aa, Artificial Sequence
  Cyclic GFR-binding peptide
IMEYQKYIKPTKGIIYLISIPSLDQSV

SEQ ID NO: 61133 - protein, 35 aa, Artificial Sequence; identical to SEQ ID NO: 16314
  Cyclic GFR-binding peptide
  MOD_RES (2)..(4): Xaa is C or S

SEQ ID NO: 61134 - protein, 29 aa, Artificial Sequence
  Cyclic GFR-binding peptide
  MOD_RES (26)..(27): Xaa is C or S
EYQKYIKPTKGIIYLISIPSLDQSVXXPS

SEQ ID NO: 61135 - protein, 40 aa, Artificial Sequence; identical to SEQ ID NO: 16318
  Cyclic GFR-binding peptide
  MOD_RES (2)..(34)..(35): Xaa is C or S

SEQ ID NO: 61136 - protein, 21 aa, Artificial Sequence
  Cyclic GFR-binding peptide
DEYQKYVVKENEDIYLMSIPS

SEQ ID NO: 61137 - protein, 31 aa, Artificial Sequence
  Cyclic GFR-binding peptide
  MOD_RES (1)..(1): Xaa is C or S
XESVAMGRYKKLYTVVGKDFYLISIANLKTP

SEQ ID NO: 61138 - protein, 40 aa, Artificial Sequence; identical to SEQ ID NO: 16321
  Cyclic GFR-binding peptide
  MOD_RES (1)..(34)..(35): Xaa is C or S

SEQ ID NO: 61139 - protein, 39 aa, Artificial Sequence; identical to SEQ ID NO: 16322
  Cyclic GFR-binding peptide
  MOD_RES (2)..(4)..(36)..(37): Xaa is C or S

SEQ ID NO: 61140 - protein, 30 aa, Artificial Sequence
  Cyclic GFR-binding peptide
AKVVMNEYKFKIVNNSSDLYLVSIPELKTP

SEQ ID NO: 61141 - protein, 31 aa, Artificial Sequence
  Cyclic GFR-binding peptide
  MOD_RES (2)..(2): Xaa is C or S
KXSRVIMEYKFKVKPKRGVLYLISIPELAQP

SEQ ID NO: 61142 - protein, 26 aa, Artificial Sequence
  Cyclic GFR-binding peptide
IMEYKFKVKPKRGVLYLISIPELAQP

SEQ ID NO: 61143 - protein, 38 aa, Artificial Sequence; identical to SEQ ID NO: 16326
  Cyclic GFR-binding peptide
  MOD_RES (32)..(33): Xaa is C or S

SEQ ID NO: 61144 - protein, 34 aa, Artificial Sequence
  Cyclic GFR-binding peptide
  MOD_RES (29)..(30): Xaa is C or S
MGEEYQKYTPVGMDDIYLVSIPSLKTPVXXAKGV

SEQ ID NO: 61145 - protein, 28 aa, Artificial Sequence
  Cyclic GFR-binding peptide
  MOD_RES (1)..(1): Xaa is C or S
XEAVSMGEEYKFKTPVGMDDLYLVSIPE

SEQ ID NO: 61146 - protein, 31 aa, Artificial Sequence
  Cyclic GFR-binding peptide
  MOD_RES (30)..(31): Xaa is C or S
VAMGRYKKLYTVVGKDFYLISIANLKTPVXX

SEQ ID NO: 61147 - protein, 28 aa, Artificial Sequence
  Cyclic GFR-binding peptide
  MOD_RES (2)..(2): Xaa is C or S
GXESVAMGYHYKLYTVVGKDKYLISIPS

SEQ ID NO: 61148 - protein, 37 aa, Artificial Sequence; identical to SEQ ID NO: 16334
  Cyclic GFR-binding peptide
  MOD_RES (1)..(33)..(34): Xaa is C or S

SEQ ID NO: 61149 - protein, 32 aa, Artificial Sequence
  Cyclic GFR-binding peptide
  MOD_RES (28)..(29): Xaa is C or S
VMEYKFKVKPTRGVLYLISIPELDQPVXXPSA

SEQ ID NO: 61150 - protein, 28 aa, Artificial Sequence
  Cyclic GFR-binding peptide
  MOD_RES (1)..(1): Xaa is C or S
XAEVVMDRYKKLVVNNAADFYLISIANL

SEQ ID NO: 61151 - protein, 25 aa, Artificial Sequence
  Cyclic GFR-binding peptide
EVVMDRYKKLVVNNAADFYLISIAN

SEQ ID NO: 61152 - protein, 37 aa, Artificial Sequence
  Cyclic GFR-binding peptide
  MOD_RES (31)..(32): Xaa is C or S
VSMGEEYQKYTPVGMDDIYLVSIPSLKTPVXXAKGVK

SEQ ID NO: 61153 - protein, 25 aa, Artificial Sequence
  Cyclic GFR-binding peptide
GEYQKYYTVVGKDIYLISIPSLKTP

SEQ ID NO: 61154 - protein, 35 aa, Artificial Sequence; identical to SEQ ID NO: 16340
  Cyclic GFR-binding peptide
  MOD_RES (1)..(3)..(34)..(35): Xaa is C or S

SEQ ID NO: 61155 - protein, 34 aa, Artificial Sequence; identical to SEQ ID NO: 16341
  Cyclic GFR-binding peptide
  MOD_RES (1)..(3)..(34): Xaa is C or S

SEQ ID NO: 61156 - protein, 30 aa, Artificial Sequence
  Cyclic GFR-binding peptide
  MOD_RES (26)..(26): Xaa is C or S
EYKFKIVNSSDDLYLVSIPELKTPAXTPKT

SEQ ID NO: 61157 - protein, 27 aa, Artificial Sequence
  Cyclic GFR-binding peptide
  MOD_RES (1)..(1): Xaa is C or S
XESVAMGEYQKYYTVVGKDIYLISIPS

SEQ ID NO: 61158 - protein, 34 aa, Artificial Sequence; identical to SEQ ID NO: 16344
  Cyclic GFR-binding peptide
  MOD_RES (1)..(32)..(33): Xaa is C or S

SEQ ID NO: 61159 - protein, 33 aa, Artificial Sequence
  Cyclic GFR-binding peptide
  MOD_RES (29)..(30): Xaa is C or S
AMGEYQKYYTVVGKDIYLISIPSLKTPVXXAKS

SEQ ID NO: 61160 - protein, 23 aa, Artificial Sequence
  Cyclic GFR-binding peptide
NEYQKYIVNSSDDIYLVSIPSLQ

SEQ ID NO: 61161 - protein, 32 aa, Artificial Sequence
  Cyclic GFR-binding peptide
  MOD_RES (29)..(30): Xaa is C or S
VIMEYKFKIKPTKGILYLISIPELDQSVXXPS

SEQ ID NO: 61162 - protein, 27 aa, Artificial Sequence
  Cyclic GFR-binding peptide
GEVVMEEYKFKVVKDYEDLYLMSIPEL

SEQ ID NO: 61163 - protein, 29 aa, Artificial Sequence
  Cyclic GFR-binding peptide
  MOD_RES (1)..(1): Xaa is C or S
XAEVVMDRYKKLVVNNAADFYLISIANLR

SEQ ID NO: 61164 - protein, 33 aa, Artificial Sequence; identical to SEQ ID NO: 16350
  Cyclic GFR-binding peptide
  MOD_RES (2)..(2): Xaa is C or S

SEQ ID NO: 61165 - protein, 22 aa, Artificial Sequence
  Cyclic GFR-binding peptide
MEEYQKYVVKDYEDIYLMSIPS

SEQ ID NO: 61166 - protein, 30 aa, Artificial Sequence
  Cyclic GFR-binding peptide
  MOD_RES (28)..(29): Xaa is C or S
MGYHYKLYTVVGKDKYLISIPSLKTPVXXA

SEQ ID NO: 61167 - protein, 27 aa, Artificial Sequence
  Cyclic GFR-binding peptide
VIMEYQKYIKPTKGIIYLISIPSLDQS

SEQ ID NO: 61168 - protein, 31 aa, Artificial Sequence
  Cyclic GFR-binding peptide
  MOD_RES (28)..(29): Xaa is C or S
MNEYQKYIVNSSDDIYLVSIPSLQTPAXXPK

SEQ ID NO: 61169 - protein, 25 aa, Artificial Sequence
  Cyclic GFR-binding peptide
MDEYQKYVVKENEDIYLMSIPSLET

SEQ ID NO: 61170 - protein, 35 aa, Artificial Sequence; identical to SEQ ID NO: 16355
  Cyclic GFR-binding peptide
  MOD_RES (2)..(34)..(35): Xaa is C or S

SEQ ID NO: 61171 - protein, 25 aa, Artificial Sequence
  Cyclic GFR-binding peptide
EYKFKIVNSSDDLYLVSIPELQTPA

SEQ ID NO: 61172 - protein, 26 aa, Artificial Sequence
  Cyclic GFR-binding peptide
NEYQKYIVNSSDDIYLVSIPSLKTPA

SEQ ID NO: 61173 - protein, 34 aa, Artificial Sequence
  Cyclic GFR-binding peptide
  MOD_RES (30)..(31): Xaa is C or S
VVMDRYKKLVVNNAADFYLISIANLRAPVXXSAP

SEQ ID NO: 61174 - protein, 24 aa, Artificial Sequence
  Cyclic GFR-binding peptide
IMEYQKYIKPTKGIIYLISIPSLD

SEQ ID NO: 61175 - protein, 37 aa, Artificial Sequence; identical to SEQ ID NO: 16361
  Cyclic GFR-binding peptide
  MOD_RES (2)..(33)..(34): Xaa is C or S

SEQ ID NO: 61176 - protein, 28 aa, Artificial Sequence
  Cyclic GFR-binding peptide
VSMGEEYKFKTPVGMDDLYLVSIPELKT

SEQ ID NO: 61177 - protein, 34 aa, Artificial Sequence; identical to SEQ ID NO: 16362
  Cyclic GFR-binding peptide
  MOD_RES (1)..(33)..(34): Xaa is C or S

SEQ ID NO: 61178 - protein, 32 aa, Artificial Sequence
  Cyclic GFR-binding peptide
  MOD_RES (27)..(28): Xaa is C or S
DEYKFKVVNNAADLYLISIPELRAPVXXSAPA

SEQ ID NO: 61179 - protein, 40 aa, Artificial Sequence; identical to SEQ ID NO: 16363
  Cyclic GFR-binding peptide
  MOD_RES (2)..(4)..(35)..(36): Xaa is C or S

SEQ ID NO: 61180 - protein, 34 aa, Artificial Sequence; identical to SEQ ID NO: 16365
  Cyclic GFR-binding peptide
  MOD_RES (2)..(34): Xaa is C or S

SEQ ID NO: 61181 - protein, 31 aa, Artificial Sequence
  Cyclic GFR-binding peptide
  MOD_RES (26)..(27): Xaa is C or S
EYKFKIVNSSDDLYLVSIPELQTPAXXPKPV

SEQ ID NO: 61182 - protein, 38 aa, Artificial Sequence; identical to SEQ ID NO: 16366
  Cyclic GFR-binding peptide
  MOD_RES (1)..(33)..(34): Xaa is C or S

SEQ ID NO: 61183 - protein, 31 aa, Artificial Sequence
  Cyclic GFR-binding peptide
  MOD_RES (2)..(2): Xaa is C or S
GXEAVSMGEEYKFKTPVGMDDLYLVSIPELK

SEQ ID NO: 61184 - protein, 33 aa, Artificial Sequence
  Cyclic GFR-binding peptide
  MOD_RES (30)..(31): Xaa is C or S
VAMGEYQKYYTVVGKDIYLISIPSLKTPVXXAK

SEQ ID NO: 61185 - protein, 25 aa, Artificial Sequence
  Cyclic GFR-binding peptide
DRYKKLVVNNAADFYLISIANLRAP

SEQ ID NO: 61186 - protein, 23 aa, Artificial Sequence
  Cyclic GFR-binding peptide
IMEYKFKVKPKRGVLYLISIPEL

SEQ ID NO: 61187 - protein, 32 aa, Artificial Sequence
  Cyclic GFR-binding peptide
  MOD_RES (26)..(27): Xaa is C or S
YHYKLVVNNAADKYLISIPSLRAPVXXSAPAA

SEQ ID NO: 61188 - protein, 31 aa, Artificial Sequence
  Cyclic GFR-binding peptide
  MOD_RES (26)..(27): Xaa is C or S
EYQKYYTVVGKDIYLISIPSLKTPVXXAKSA

SEQ ID NO: 61189 - protein, 30 aa, Artificial Sequence
  Cyclic GFR-binding peptide
  MOD_RES (30)..(30): Xaa is C or S
VVMEEYKFKVVKDYEDLYLMSIPELETPVX

SEQ ID NO: 61190 - protein, 34 aa, Artificial Sequence; identical to SEQ ID NO: 16367
  Cyclic GFR-binding peptide
  MOD_RES (1)..(3): Xaa is C or S

SEQ ID NO: 61191 - protein, 33 aa, Artificial Sequence; identical to SEQ ID NO: 16368
  Cyclic GFR-binding peptide
  MOD_RES (1)..(33): Xaa is C or S

SEQ ID NO: 61192 - protein, 34 aa, Artificial Sequence; identical to SEQ ID NO: 16369
  Cyclic GFR-binding peptide
  MOD_RES (1)..(3): Xaa is C or S

SEQ ID NO: 61193 - protein, 32 aa, Artificial Sequence; identical to SEQ ID NO: 16372
  Cyclic GFR-binding peptide
  MOD_RES (31)..(32): Xaa is C or S

SEQ ID NO: 61194 - protein, 24 aa, Artificial Sequence
  Cyclic GFR-binding peptide
VMDEYKFKVVNNAADLYLISIPEL

SEQ ID NO: 61195 - protein, 31 aa, Artificial Sequence
  Cyclic GFR-binding peptide
  MOD_RES (28)..(29): Xaa is C or S
VMEYKFKVKPTRGVLYLISIPELDQPVXXPS

SEQ ID NO: 61196 - protein, 24 aa, Artificial Sequence
  Cyclic GFR-binding peptide
MDEYKFKVVNNAADLYLISIPELR

SEQ ID NO: 61197 - protein, 38 aa, Artificial Sequence; identical to SEQ ID NO: 16374
  Cyclic GFR-binding peptide
  MOD_RES (1)..(3)..(35)..(36): Xaa is C or S

SEQ ID NO: 61198 - protein, 25 aa, Artificial Sequence
  Cyclic GFR-binding peptide
SKVIMEYKFKIKPTKGILYLISIPE

SEQ ID NO: 61199 - protein, 35 aa, Artificial Sequence
  Cyclic GFR-binding peptide
  MOD_RES (29)..(30): Xaa is C or S
VVMEYQKYVKPTRGVIYLISIPSLDQPVXXPSASA

SEQ ID NO: 61200 - protein, 30 aa, Artificial Sequence
  Cyclic GFR-binding peptide
  MOD_RES (1)..(1): Xaa is C or S
XGEVVMEEYQKYVVKDYEDIYLMSIPSLET

SEQ ID NO: 61201 - protein, 37 aa, Artificial Sequence; identical to SEQ ID NO: 16382
  Cyclic GFR-binding peptide
  MOD_RES (31)..(32): Xaa is C or S

SEQ ID NO: 61202 - protein, 39 aa, Artificial Sequence; identical to SEQ ID NO: 16383
  Cyclic GFR-binding peptide
  MOD_RES (33)..(34): Xaa is C or S

SEQ ID NO: 61203 - protein, 31 aa, Artificial Sequence
  Cyclic GFR-binding peptide
  MOD_RES (27)..(28): Xaa is C or S
DYHYKLVVNNAADKYLISIPSLRAPVXXSAP

SEQ ID NO: 61204 - protein, 24 aa, Artificial Sequence
  Cyclic GFR-binding peptide
EYKFKVVKENEDLYLMSIPELETP

SEQ ID NO: 61205 - protein, 34 aa, Artificial Sequence; identical to SEQ ID NO: 16386
  Cyclic GFR-binding peptide
  MOD_RES (1)..(34): Xaa is C or S

SEQ ID NO: 61206 - protein, 34 aa, Artificial Sequence
  Cyclic GFR-binding peptide
  MOD_RES (28)..(29): Xaa is C or S
IMEYQKYIKPTKGIIYLISIPSLDQSVXXPSASA

SEQ ID NO: 61207 - protein, 32 aa, Artificial Sequence
  Cyclic GFR-binding peptide
  MOD_RES (1)..(3): Xaa is C or S
XKXSKVIMEYKFKIKPTKGILYLISIPELDQS

SEQ ID NO: 61208 - protein, 22 aa, Artificial Sequence
  Cyclic GFR-binding peptide
IMEYKFKIKPTKGILYLISIPE

SEQ ID NO: 61209 - protein, 35 aa, Artificial Sequence; identical to SEQ ID NO: 16388
  Cyclic GFR-binding peptide
  MOD_RES (1)..(33)..(34): Xaa is C or S

SEQ ID NO: 61210 - protein, 36 aa, Artificial Sequence; identical to SEQ ID NO: 16395
  Cyclic GFR-binding peptide
  MOD_RES (2)..(4)..(36): Xaa is C or S

SEQ ID NO: 61211 - protein, 42 aa, Artificial Sequence; identical to SEQ ID NO: 16399
  Cyclic GFR-binding peptide
  MOD_RES (1)..(3)..(36)..(37): Xaa is C or S

SEQ ID NO: 61212 - protein, 38 aa, Artificial Sequence; identical to SEQ ID NO: 16400
  Cyclic GFR-binding peptide
  MOD_RES (1)..(33)..(34): Xaa is C or S

SEQ ID NO: 61213 - protein, 31 aa, Artificial Sequence
  Cyclic GFR-binding peptide
  MOD_RES (1)..(3): Xaa is C or S
XKXSKVVMEYQKYVKPTRGVIYLISIPSLDQ

SEQ ID NO: 61214 - protein, 37 aa, Artificial Sequence; identical to SEQ ID NO: 16402
  Cyclic GFR-binding peptide
  MOD_RES (31)..(32): Xaa is C or S

SEQ ID NO: 61215 - protein, 32 aa, Artificial Sequence
  Cyclic GFR-binding peptide
  MOD_RES (2)..(2): Xaa is C or S
GXARVVMNEYKFKIVNSSDDLYLVSIPELQTP

SEQ ID NO: 61216 - protein, 26 aa, Artificial Sequence
  Cyclic GFR-binding peptide
VVMEYQKYVKPTRGVIYLISIPSLDQ

SEQ ID NO: 61217 - protein, 26 aa, Artificial Sequence
  Cyclic GFR-binding peptide
MNEYKFKIVNSSDDLYLVSIPELKTP

SEQ ID NO: 61218 - protein, 29 aa, Artificial Sequence
  Cyclic GFR-binding peptide
  MOD_RES (26)..(27): Xaa is C or S
EYKFKIVNNSSDLYLVSIPELKTPAXXAK

SEQ ID NO: 61219 - protein, 37 aa, Artificial Sequence; identical to SEQ ID NO: 16406
  Cyclic GFR-binding peptide
  MOD_RES (1)..(3)..(34)..(35): Xaa is C or S

SEQ ID NO: 61220 - protein, 30 aa, Artificial Sequence
  Cyclic GFR-binding peptide
  MOD_RES (1)..(1): Xaa is C or S
XAEVVMDEYKFKVVNNAADLYLISIPELRA

SEQ ID NO: 61221 - protein, 20 aa, Artificial Sequence
  Cyclic GFR-binding peptide
EYKFKIVNNSSDLYLVSIPE

SEQ ID NO: 61222 - protein, 33 aa, Artificial Sequence; identical to SEQ ID NO: 16414
  Cyclic GFR-binding peptide
  MOD_RES (1)..(33): Xaa is C or S

SEQ ID NO: 61223 - protein, 39 aa, Artificial Sequence; identical to SEQ ID NO: 16416
  Cyclic GFR-binding peptide
  MOD_RES (2)..(35)..(36): Xaa is C or S

SEQ ID NO: 61224 - protein, 31 aa, Artificial Sequence
  Cyclic GFR-binding peptide
  MOD_RES (29)..(30): Xaa is C or S
VMEEYKFKVVKDYEDLYLMSIPELETPVXXA

SEQ ID NO: 61225 - protein, 35 aa, Artificial Sequence; identical to SEQ ID NO: 16419
  Cyclic GFR-binding peptide
  MOD_RES (31)..(32): Xaa is C or S

SEQ ID NO: 61226 - protein, 30 aa, Artificial Sequence
  Cyclic GFR-binding peptide
  MOD_RES (1)..(1): Xaa is C or S
XEAVSMGEEYKFKTPVGMDDLYLVSIPELK

SEQ ID NO: 61227 - protein, 31 aa, Artificial Sequence
  Cyclic GFR-binding peptide
  MOD_RES (30)..(31): Xaa is C or S
KVVMEYKFKVKPTRGVLYLISIPELDQPVXX

SEQ ID NO: 61228 - protein, 38 aa, Artificial Sequence; identical to SEQ ID NO: 16421
  Cyclic GFR-binding peptide
  MOD_RES (32)..(32): Xaa is C or S

SEQ ID NO: 61229 - protein, 20 aa, Artificial Sequence
  Cyclic GFR-binding peptide
EYQKYTPVGMDDIYLVSIPS

SEQ ID NO: 61230 - protein, 31 aa, Artificial Sequence
  Cyclic GFR-binding peptide
  MOD_RES (1)..(1): Xaa is C or S
XARVVMNEYQKYIVNSSDDIYLVSIPSLQTP

SEQ ID NO: 61231 - protein, 20 aa, Artificial Sequence
  Cyclic GFR-binding peptide
EYQKYIVNSSDDIYLVSIPS

SEQ ID NO: 61232 - protein, 26 aa, Artificial Sequence
  Cyclic GFR-binding peptide
VMDYHYKLVVNNAADKYLISIPSLRA

SEQ ID NO: 61233 - protein, 21 aa, Artificial Sequence
  Cyclic GFR-binding peptide
EYKFKIKPTKGILYLISIPEL

SEQ ID NO: 61234 - protein, 22 aa, Artificial Sequence
  Cyclic GFR-binding peptide
DEYKFKVVNNAADLYLISIPEL

SEQ ID NO: 61235 - protein, 39 aa, Artificial Sequence; identical to SEQ ID NO: 16430
  Cyclic GFR-binding peptide
  MOD_RES (2)..(4)..(36)..(37): Xaa is C or S

SEQ ID NO: 61236 - protein, 37 aa, Artificial Sequence; identical to SEQ ID NO: 16431
  Cyclic GFR-binding peptide
  MOD_RES (2)..(34)..(35): Xaa is C or S

SEQ ID NO: 61237 - protein, 28 aa, Artificial Sequence
  Cyclic GFR-binding peptide
SKVIMEYKFKIKPTKGILYLISIPELDQ

SEQ ID NO: 61238 - protein, 30 aa, Artificial Sequence; identical to SEQ ID NO: 2006
  Cyclic GFR-binding peptide

SEQ ID NO: 61239 - protein, 37 aa, Artificial Sequence; identical to SEQ ID NO: 16439
  Cyclic GFR-binding peptide
  MOD_RES (1)..(3)..(34)..(35): Xaa is C or S

SEQ ID NO: 61240 - protein, 23 aa, Artificial Sequence
  Cyclic GFR-binding peptide
VIMEYKFKVKPKRGVLYLISIPE

SEQ ID NO: 61241 - protein, 36 aa, Artificial Sequence
  Cyclic GFR-binding peptide
  MOD_RES (30)..(30): Xaa is C or S
VVMNEYQKYIVNSSDDIYLVSIPSLKTPAXTPKTVH

SEQ ID NO: 61242 - protein, 36 aa, Artificial Sequence; identical to SEQ ID NO: 16441
  Cyclic GFR-binding peptide
  MOD_RES (31)..(32): Xaa is C or S

SEQ ID NO: 61243 - protein, 40 aa, Artificial Sequence; identical to SEQ ID NO: 16442
  Cyclic GFR-binding peptide
  MOD_RES (2)..(4)..(36): Xaa is C or S

SEQ ID NO: 61244 - protein, 29 aa, Artificial Sequence
  Cyclic GFR-binding peptide
VVMNEYKFKIVNSSDDLYLVSIPELQTPA

SEQ ID NO: 61245 - protein, 25 aa, Artificial Sequence
  Cyclic GFR-binding peptide
SKVVMEYKFKVKPTRGVLYLISIPE

SEQ ID NO: 61246 - protein, 26 aa, Artificial Sequence
  Cyclic GFR-binding peptide
VMNEYKFKIVNSSDDLYLVSIPELKT

SEQ ID NO: 61247 - protein, 27 aa, Artificial Sequence
  Cyclic GFR-binding peptide
  MOD_RES (26)..(27): Xaa is C or S
EYQKYVKPKRGVIYLISIPSLAQPVXX

SEQ ID NO: 61248 - protein, 31 aa, Artificial Sequence
  Cyclic GFR-binding peptide
  MOD_RES (1)..(3): Xaa is C or S
XKXSRVIMEYQKYVKPKRGVIYLISIPSLAQ

SEQ ID NO: 61249 - protein, 24 aa, Artificial Sequence
  Cyclic GFR-binding peptide
VMNEYKFKIVNSSDDLYLVSIPEL

SEQ ID NO: 61250 - protein, 24 aa, Artificial Sequence
  Cyclic GFR-binding peptide
VMNEYKFKIVNNSSDLYLVSIPEL

SEQ ID NO: 61251 - protein, 30 aa, Artificial Sequence
  Cyclic GFR-binding peptide
  MOD_RES (2)..(4): Xaa is C or S
SXKXSKVVMEYKFKVKPTRGVLYLISIPEL

SEQ ID NO: 61252 - protein, 28 aa, Artificial Sequence
  Cyclic GFR-binding peptide
GEVVMDEYKFKVVKENEDLYLMSIPELE

SEQ ID NO: 61253 - protein, 34 aa, Artificial Sequence
  Cyclic GFR-binding peptide
  MOD_RES (29)..(30): Xaa is C or S
VMEEYQKYVVKDYEDIYLMSIPSLETPVXXAKPI

SEQ ID NO: 61254 - protein, 29 aa, Artificial Sequence
  Cyclic GFR-binding peptide
  MOD_RES (1)..(3): Xaa is C or S
XGXESVAMGYHYKLYTVVGKDKYLISIPS

SEQ ID NO: 61255 - protein, 25 aa, Artificial Sequence
  Cyclic GFR-binding peptide
RYKKLVVNNAADFYLISIANLRAPV

SEQ ID NO: 61256 - protein, 25 aa, Artificial Sequence
  Cyclic GFR-binding peptide
GEEYKFKTPVGMDDLYLVSIPELKT

SEQ ID NO: 61257 - protein, 26 aa, Artificial Sequence
  Cyclic GFR-binding peptide
DEYQKYVVKENEDIYLMSIPSLETPV

SEQ ID NO: 61258 - protein, 34 aa, Artificial Sequence; identical to SEQ ID NO: 16454
  Cyclic GFR-binding peptide
  MOD_RES (31)..(32): Xaa is C or S

SEQ ID NO: 61259 - protein, 39 aa, Artificial Sequence; identical to SEQ ID NO: 16455
  Cyclic GFR-binding peptide
  MOD_RES (1)..(33)..(34): Xaa is C or S

SEQ ID NO: 61260 - protein, 36 aa, Artificial Sequence; identical to SEQ ID NO: 16456
  Cyclic GFR-binding peptide
  MOD_RES (2)..(4): Xaa is C or S

SEQ ID NO: 61261 - protein, 29 aa, Artificial Sequence
  Cyclic GFR-binding peptide
  MOD_RES (1)..(3): Xaa is C or S
XGXAKVVMNEYKFKIVNNSSDLYLVSIPE

SEQ ID NO: 61262 - protein, 25 aa, Artificial Sequence
  Cyclic GFR-binding peptide
KVVMEYQKYVKPTRGVIYLISIPSL

SEQ ID NO: 61263 - protein, 28 aa, Artificial Sequence
  Cyclic GFR-binding peptide
ESVAMGRYKKLYTVVGKDFYLISIANLK

SEQ ID NO: 61264 - protein, 24 aa, Artificial Sequence
  Cyclic GFR-binding peptide
EYQKYVKPTRGVIYLISIPSLDQP

SEQ ID NO: 61265 - protein, 32 aa, Artificial Sequence
  Cyclic GFR-binding peptide
  MOD_RES (30)..(31): Xaa is C or S
KVVMEYKFKVKPTRGVLYLISIPELDQPVXXP

SEQ ID NO: 61266 - protein, 39 aa, Artificial Sequence; identical to SEQ ID NO: 16463
  Cyclic GFR-binding peptide
  MOD_RES (2)..(34)..(35): Xaa is C or S

SEQ ID NO: 61267 - protein, 28 aa, Artificial Sequence
  Cyclic GFR-binding peptide
  MOD_RES (26)..(27): Xaa is C or S
YHYKLYTVVGKDKYLISIPSLKTPVXXA

SEQ ID NO: 61268 - protein, 27 aa, Artificial Sequence
  Cyclic GFR-binding peptide
EVVMDEYKFKVVNNAADLYLISIPELR

SEQ ID NO: 61269 - protein, 25 aa, Artificial Sequence
  Cyclic GFR-binding peptide
EEYQKYTPVGMDDIYLVSIPSLKTP

SEQ ID NO: 61270 - protein, 32 aa, Artificial Sequence
  Cyclic GFR-binding peptide
  MOD_RES (30)..(31): Xaa is C or S
SMGEEYQKYTPVGMDDIYLVSIPSLKTPVXXA

SEQ ID NO: 61271 - protein, 33 aa, Artificial Sequence; identical to SEQ ID NO: 16468
  Cyclic GFR-binding peptide
  MOD_RES (33)..(33): Xaa is C or S

SEQ ID NO: 61272 - protein, 23 aa, Artificial Sequence
  Cyclic GFR-binding peptide
VIMEYQKYIKPTKGIIYLISIPS

SEQ ID NO: 61273 - protein, 31 aa, Artificial Sequence
  Cyclic GFR-binding peptide
  MOD_RES (2)..(4): Xaa is C or S
SXKXSKVIMEYQKYIKPTKGIIYLISIPSLD

SEQ ID NO: 61274 - protein, 30 aa, Artificial Sequence
  Cyclic GFR-binding peptide
ESVAMGEYQKYYTVVGKDIYLISIPSLKTP

SEQ ID NO: 61275 - protein, 42 aa, Artificial Sequence; identical to SEQ ID NO: 16473
  Cyclic GFR-binding peptide
  MOD_RES (2)..(4)..(36)..(37): Xaa is C or S

SEQ ID NO: 61276 - protein, 40 aa, Artificial Sequence; identical to SEQ ID NO: 16478
  Cyclic GFR-binding peptide
  MOD_RES (1)..(3)..(34)..(35): Xaa is C or S

SEQ ID NO: 61277 - protein, 30 aa, Artificial Sequence
  Cyclic GFR-binding peptide
  MOD_RES (2)..(2): Xaa is C or S
GXESVAMGYHYKLYTVVGKDKYLISIPSLK

SEQ ID NO: 61278 - protein, 33 aa, Artificial Sequence
  Cyclic GFR-binding peptide
  MOD_RES (27)..(28): Xaa is C or S
DEYKFKVVKENEDLYLMSIPELETPVXXAKPIK

SEQ ID NO: 61279 - protein, 27 aa, Artificial Sequence
  Cyclic GFR-binding peptide
  MOD_RES (1)..(1): Xaa is C or S
XARVVMNEYKFKIVNSSDDLYLVSIPE

SEQ ID NO: 61280 - protein, 34 aa, Artificial Sequence; identical to SEQ ID NO: 16487
  Cyclic GFR-binding peptide
  MOD_RES (2)..(34): Xaa is C or S

SEQ ID NO: 61281 - protein, 38 aa, Artificial Sequence; identical to SEQ ID NO: 16489
  Cyclic GFR-binding peptide
  MOD_RES (1)..(3)..(36)..(37): Xaa is C or S

SEQ ID NO: 61282 - protein, 32 aa, Artificial Sequence
  Cyclic GFR-binding peptide
  MOD_RES (30)..(31): Xaa is C or S
VVMEEYKFKVVKDYEDLYLMSIPELETPVXXA

SEQ ID NO: 61283 - protein, 31 aa, Artificial Sequence; identical to SEQ ID NO: 16491
  Cyclic GFR-binding peptide

SEQ ID NO: 61284 - protein, 32 aa, Artificial Sequence
  Cyclic GFR-binding peptide
  MOD_RES (2)..(2): Xaa is C or S
GXEAVSMGEEYQKYTPVGMDDIYLVSIPSLKT

SEQ ID NO: 61285 - protein, 35 aa, Artificial Sequence
  Cyclic GFR-binding peptide
  MOD_RES (31)..(32): Xaa is C or S
VSMGEEYQKYTPVGMDDIYLVSIPSLKTPVXXAKG

SEQ ID NO: 61286 - protein, 20 aa, Artificial Sequence
  Cyclic GFR-binding peptide
EYQKYIKPTKGIIYLISIPS

SEQ ID NO: 61287 - protein, 32 aa, Artificial Sequence; identical to SEQ ID NO: 16503
  Cyclic GFR-binding peptide
  MOD_RES (31)..(32): Xaa is C or S

SEQ ID NO: 61288 - protein, 41 aa, Artificial Sequence; identical to SEQ ID NO: 16504
  Cyclic GFR-binding peptide
  MOD_RES (2)..(4)..(36)..(37): Xaa is C or S

SEQ ID NO: 61289 - protein, 35 aa, Artificial Sequence; identical to SEQ ID NO: 16505
  Cyclic GFR-binding peptide
  MOD_RES (1)..(33)..(34): Xaa is C or S

SEQ ID NO: 61290 - protein, 24 aa, Artificial Sequence
  Cyclic GFR-binding peptide
MEYKFKVKPTRGVLYLISIPELDQ

SEQ ID NO: 61291 - protein, 22 aa, Artificial Sequence
  Cyclic GFR-binding peptide
DYHYKLVVNNAADKYLISIPSL

SEQ ID NO: 61292 - protein, 32 aa, Artificial Sequence
  Cyclic GFR-binding peptide
  MOD_RES (27)..(28): Xaa is C or S
EEYKFKVVKDYEDLYLMSIPELETPVXXAKPI

SEQ ID NO: 61293 - protein, 33 aa, Artificial Sequence
  Cyclic GFR-binding peptide
  MOD_RES (30)..(31): Xaa is C or S
VVMNEYKFKIVNNSSDLYLVSIPELKTPAXXAK

SEQ ID NO: 61294 - protein, 29 aa, Artificial Sequence
  Cyclic GFR-binding peptide
  MOD_RES (27)..(28): Xaa is C or S
MEYKFKIKPTKGILYLISIPELDQSVXXP

SEQ ID NO: 61295 - protein, 27 aa, Artificial Sequence
  Cyclic GFR-binding peptide
ESVAMGYHYKLYTVVGKDKYLISIPSL

SEQ ID NO: 61296 - protein, 38 aa, Artificial Sequence; identical to SEQ ID NO: 16509
  Cyclic GFR-binding peptide
  MOD_RES (2)..(34)..(35): Xaa is C or S

SEQ ID NO: 61297 - protein, 28 aa, Artificial Sequence
  Cyclic GFR-binding peptide
EVVMDYHYKLVVNNAADKYLISIPSLRA

SEQ ID NO: 61298 - protein, 31 aa, Artificial Sequence
  Cyclic GFR-binding peptide
  MOD_RES (29)..(30): Xaa is C or S
VMNEYKFKIVNSSDDLYLVSIPELQTPAXXP

SEQ ID NO: 61299 - protein, 24 aa, Artificial Sequence
  Cyclic GFR-binding peptide
VAMGRYKKLYTVVGKDFYLISIAN

SEQ ID NO: 61300 - protein, 33 aa, Artificial Sequence
  Cyclic GFR-binding peptide
  MOD_RES (30)..(31): Xaa is C or S
VVMNEYQKYIVNSSDDIYLVSIPSLKTPAXXPK

SEQ ID NO: 61301 - protein, 24 aa, Artificial Sequence
  Cyclic GFR-binding peptide
SMGEEYKFKTPVGMDDLYLVSIPE

SEQ ID NO: 61302 - protein, 32 aa, Artificial Sequence
  Cyclic GFR-binding peptide
  MOD_RES (27)..(28): Xaa is C or S
MEYQKYVKPTRGVIYLISIPSLDQPVXXPSAS

SEQ ID NO: 61303 - protein, 29 aa, Artificial Sequence
  Cyclic GFR-binding peptide
  MOD_RES (28)..(29): Xaa is C or S
MNEYKFKIVNNSSDLYLVSIPELKTPAXX

SEQ ID NO: 61304 - protein, 38 aa, Artificial Sequence; identical to SEQ ID NO: 16512
  Cyclic GFR-binding peptide
  MOD_RES (2)..(33)..(34): Xaa is C or S

SEQ ID NO: 61305 - protein, 28 aa, Artificial Sequence
  Cyclic GFR-binding peptide
SMGEEYQKYTPVGMDDIYLVSIPSLKTP

SEQ ID NO: 61306 - protein, 33 aa, Artificial Sequence
  Cyclic GFR-binding peptide
  MOD_RES (2)..(4): Xaa is C or S
SXKXSRVIMEYKFKVKPKRGVLYLISIPELAQP

SEQ ID NO: 61307 - protein, 33 aa, Artificial Sequence
  Cyclic GFR-binding peptide
  MOD_RES (28)..(29): Xaa is C or S
MDEYQKYVVKENEDIYLMSIPSLETPVXXAKPI

SEQ ID NO: 61308 - protein, 34 aa, Artificial Sequence
  Cyclic GFR-binding peptide
  MOD_RES (32)..(33): Xaa is C or S
AVSMGEEYQKYTPVGMDDIYLVSIPSLKTPVXXA

SEQ ID NO: 61309 - protein, 31 aa, Artificial Sequence
  Cyclic GFR-binding peptide
  MOD_RES (2)..(4): Xaa is C or S
SXKXSRVIMEYKFKVKPKRGVLYLISIPELA

SEQ ID NO: 61310 - protein, 35 aa, Artificial Sequence
  Cyclic GFR-binding peptide
  MOD_RES (30)..(31): Xaa is C or S
VVMDRYKKLVVNNAADFYLISIANLRAPVXXSAPA

SEQ ID NO: 61311 - protein, 29 aa, Artificial Sequence
  Cyclic GFR-binding peptide
  MOD_RES (1)..(1): Xaa is C or S
XARVVMNEYQKYIVNSSDDIYLVSIPSLQ

SEQ ID NO: 61312 - protein, 30 aa, Artificial Sequence
  Cyclic GFR-binding peptide
  MOD_RES (28)..(29): Xaa is C or S
MDEYQKYVVKENEDIYLMSIPSLETPVXXA

SEQ ID NO: 61313 - protein, 28 aa, Artificial Sequence
  Cyclic GFR-binding peptide
  MOD_RES (27)..(28): Xaa is C or S
DEYKFKVVNNAADLYLISIPELRAPVXX

SEQ ID NO: 61314 - protein, 34 aa, Artificial Sequence; identical to SEQ ID NO: 16522
  Cyclic GFR-binding peptide
  MOD_RES (32)..(33): Xaa is C or S

SEQ ID NO: 61315 - protein, 39 aa, Artificial Sequence; identical to SEQ ID NO: 16524
  Cyclic GFR-binding peptide
  MOD_RES (1)..(3)..(35)..(36): Xaa is C or S

SEQ ID NO: 61316 - protein, 22 aa, Artificial Sequence
  Cyclic GFR-binding peptide
EYQKYIKPTKGIIYLISIPSLD

SEQ ID NO: 61317 - protein, 35 aa, Artificial Sequence
  Cyclic GFR-binding peptide
  MOD_RES (29)..(30): Xaa is C or S
VMNEYQKYIVNSSDDIYLVSIPSLKTPAXXPKPVY

SEQ ID NO: 61318 - protein, 28 aa, Artificial Sequence
  Cyclic GFR-binding peptide
  MOD_RES (1)..(3): Xaa is C or S
XKXSKVIMEYQKYIKPTKGIIYLISIPS

SEQ ID NO: 61319 - protein, 36 aa, Artificial Sequence; identical to SEQ ID NO: 16527
  Cyclic GFR-binding peptide
  MOD_RES (1)..(33)..(34): Xaa is C or S

SEQ ID NO: 61320 - protein, 34 aa, Artificial Sequence
  Cyclic GFR-binding peptide
  MOD_RES (29)..(30): Xaa is C or S
VMNEYKFKIVNSSDDLYLVSIPELKTPAXXPKPV

SEQ ID NO: 61321 - protein, 22 aa, Artificial Sequence
  Cyclic GFR-binding peptide
MEYQKYVKPTRGVIYLISIPSL

SEQ ID NO: 61322 - protein, 23 aa, Artificial Sequence
  Cyclic GFR-binding peptide
DEYQKYVVKENEDIYLMSIPSLE

SEQ ID NO: 61323 - protein, 25 aa, Artificial Sequence
  Cyclic GFR-binding peptide
EEYQKYVVKDYEDIYLMSIPSLETP

SEQ ID NO: 61324 - protein, 40 aa, Artificial Sequence; identical to SEQ ID NO: 16536
  Cyclic GFR-binding peptide
  MOD_RES (1)..(3)..(35): Xaa is C or S

SEQ ID NO: 61325 - protein, 22 aa, Artificial Sequence
  Cyclic GFR-binding peptide
NEYQKYIVNNSSDIYLVSIPSL

SEQ ID NO: 61326 - protein, 36 aa, Artificial Sequence; identical to SEQ ID NO: 16537
  Cyclic GFR-binding peptide
  MOD_RES (1)..(33)..(34): Xaa is C or S

SEQ ID NO: 61327 - protein, 32 aa, Artificial Sequence
  Cyclic GFR-binding peptide
  MOD_RES (28)..(29): Xaa is C or S
MGYHYKLYTVVGKDKYLISIPSLKTPVXXAKS

SEQ ID NO: 61328 - protein, 34 aa, Artificial Sequence; identical to SEQ ID NO: 16541
  Cyclic GFR-binding peptide
  MOD_RES (2)..(33)..(34): Xaa is C or S

SEQ ID NO: 61329 - protein, 24 aa, Artificial Sequence
  Cyclic GFR-binding peptide
EYQKYIVNSSDDIYLVSIPSLKTP

SEQ ID NO: 61330 - protein, 28 aa, Artificial Sequence
  Cyclic GFR-binding peptide
  MOD_RES (2)..(2): Xaa is C or S
GXGEVVMEEYKFKVVKDYEDLYLMSIPE

SEQ ID NO: 61331 - protein, 32 aa, Artificial Sequence
  Cyclic GFR-binding peptide
  MOD_RES (26)..(27): Xaa is C or S
EYQKYVVKDYEDIYLMSIPSLETPVXXAKPIS

SEQ ID NO: 61332 - protein, 32 aa, Artificial Sequence
  Cyclic GFR-binding peptide
  MOD_RES (2)..(2): Xaa is C or S
GXSRVVMNEYQKYIVNSSDDIYLVSIPSLKTP

SEQ ID NO: 61333 - protein, 35 aa, Artificial Sequence; identical to SEQ ID NO: 16544
  Cyclic GFR-binding peptide
  MOD_RES (2)..(34)..(35): Xaa is C or S

SEQ ID NO: 61334 - protein, 31 aa, Artificial Sequence
  Cyclic GFR-binding peptide
  MOD_RES (30)..(30): Xaa is C or S
VVMNEYQKYIVNSSDDIYLVSIPSLKTPAXT

SEQ ID NO: 61335 - protein, 35 aa, Artificial Sequence; identical to SEQ ID NO: 16547
  Cyclic GFR-binding peptide
  MOD_RES (2)..(33)..(34): Xaa is C or S

SEQ ID NO: 61336 - protein, 29 aa, Artificial Sequence
  Cyclic GFR-binding peptide
  MOD_RES (2)..(4): Xaa is C or S
SXKXSRVIMEYQKYVKPKRGVIYLISIPS

SEQ ID NO: 61337 - protein, 31 aa, Artificial Sequence
  Cyclic GFR-binding peptide
  MOD_RES (29)..(30): Xaa is C or S
VMDEYKFKVVKENEDLYLMSIPELETPVXXA

SEQ ID NO: 61338 - protein, 32 aa, Artificial Sequence; identical to SEQ ID NO: 16550
  Cyclic GFR-binding peptide
  MOD_RES (1)..(1): Xaa is C or S

SEQ ID NO: 61339 - protein, 32 aa, Artificial Sequence
  Cyclic GFR-binding peptide
  MOD_RES (1)..(3): Xaa is C or S
XGXAEVVMDRYKKLVVNNAADFYLISIANLRA

SEQ ID NO: 61340 - protein, 25 aa, Artificial Sequence
  Cyclic GFR-binding peptide
VVMEYKFKVKPTRGVLYLISIPELD

SEQ ID NO: 61341 - protein, 26 aa, Artificial Sequence
  Cyclic GFR-binding peptide
DRYKKLVVNNAADFYLISIANLRAPV

SEQ ID NO: 61342 - protein, 21 aa, Artificial Sequence
  Cyclic GFR-binding peptide
MEYKFKVKPKRGVLYLISIPE

SEQ ID NO: 61343 - protein, 30 aa, Artificial Sequence
  Cyclic GFR-binding peptide
  MOD_RES (26)..(27): Xaa is C or S
EYQKYVKPTRGVIYLISIPSLDQPVXXPSA

SEQ ID NO: 61344 - protein, 25 aa, Artificial Sequence
  Cyclic GFR-binding peptide
EVVMEEYKFKVVKDYEDLYLMSIPE

SEQ ID NO: 61345 - protein, 29 aa, Artificial Sequence
  Cyclic GFR-binding peptide
SRVVMNEYQKYIVNSSDDIYLVSIPSLKT

SEQ ID NO: 61346 - protein, 34 aa, Artificial Sequence; identical to SEQ ID NO: 16554
  Cyclic GFR-binding peptide
  MOD_RES (31)..(32): Xaa is C or S

SEQ ID NO: 61347 - protein, 38 aa, Artificial Sequence; identical to SEQ ID NO: 16555
  Cyclic GFR-binding peptide
  MOD_RES (2)..(34)..(35): Xaa is C or S

SEQ ID NO: 61348 - protein, 39 aa, Artificial Sequence; identical to SEQ ID NO: 16556
  Cyclic GFR-binding peptide
  MOD_RES (1)..(33)..(34): Xaa is C or S

SEQ ID NO: 61349 - protein, 39 aa, Artificial Sequence; identical to SEQ ID NO: 16557
  Cyclic GFR-binding peptide
  MOD_RES (1)..(3)..(34)..(35): Xaa is C or S

SEQ ID NO: 61350 - protein, 26 aa, Artificial Sequence
  Cyclic GFR-binding peptide
VIMEYKFKVKPKRGVLYLISIPELAQ

SEQ ID NO: 61351 - protein, 37 aa, Artificial Sequence; identical to SEQ ID NO: 16562
  Cyclic GFR-binding peptide
  MOD_RES (31)..(32): Xaa is C or S

SEQ ID NO: 61352 - protein, 24 aa, Artificial Sequence
  Cyclic GFR-binding peptide
EEYQKYTPVGMDDIYLVSIPSLKT

SEQ ID NO: 61353 - protein, 36 aa, Artificial Sequence
  Cyclic GFR-binding peptide
  MOD_RES (32)..(33): Xaa is C or S
AVSMGEEYKFKTPVGMDDLYLVSIPELKTPVXXAKG

SEQ ID NO: 61354 - protein, 37 aa, Artificial Sequence; identical to SEQ ID NO: 16568
  Cyclic GFR-binding peptide
  MOD_RES (2)..(4)..(36)..(37): Xaa is C or S

SEQ ID NO: 61355 - protein, 36 aa, Artificial Sequence; identical to SEQ ID NO: 16573
  Cyclic GFR-binding peptide
  MOD_RES (1)..(3)..(35): Xaa is C or S

SEQ ID NO: 61356 - protein, 28 aa, Artificial Sequence
  Cyclic GFR-binding peptide
VVMEEYKFKVVKDYEDLYLMSIPELETP

SEQ ID NO: 61357 - protein, 35 aa, Artificial Sequence
  Cyclic GFR-binding peptide
  MOD_RES (29)..(30): Xaa is C or S
AMGEYQKYYTVVGKDIYLISIPSLKTPVXXAKSAK

SEQ ID NO: 61358 - protein, 20 aa, Artificial Sequence
  Cyclic GFR-binding peptide
RYKKLVVNNAADFYLISIAN

SEQ ID NO: 61359 - protein, 34 aa, Artificial Sequence; identical to SEQ ID NO: 16578
  Cyclic GFR-binding peptide
  MOD_RES (32)..(33): Xaa is C or S

SEQ ID NO: 61360 - protein, 40 aa, Artificial Sequence; identical to SEQ ID NO: 16583
  Cyclic GFR-binding peptide
  MOD_RES (2)..(34)..(35): Xaa is C or S

SEQ ID NO: 61361 - protein, 39 aa, Artificial Sequence; identical to SEQ ID NO: 16585
  Cyclic GFR-binding peptide
  MOD_RES (1)..(3)..(35)..(36): Xaa is C or S

SEQ ID NO: 61362 - protein, 29 aa, Artificial Sequence
  Cyclic GFR-binding peptide
  MOD_RES (29)..(29): Xaa is C or S
VMNEYQKYIVNNSSDIYLVSIPSLKTPAX

SEQ ID NO: 61363 - protein, 35 aa, Artificial Sequence; identical to SEQ ID NO: 16589
  Cyclic GFR-binding peptide
  MOD_RES (32)..(33): Xaa is C or S

SEQ ID NO: 61364 - protein, 25 aa, Artificial Sequence
  Cyclic GFR-binding peptide
EYKFKVKPKRGVLYLISIPELAQPV

SEQ ID NO: 61365 - protein, 30 aa, Artificial Sequence
  Cyclic GFR-binding peptide
  MOD_RES (2)..(2): Xaa is C or S
GXARVVMNEYQKYIVNSSDDIYLVSIPSLQ

SEQ ID NO: 61366 - protein, 31 aa, Artificial Sequence
  Cyclic GFR-binding peptide
  MOD_RES (27)..(28): Xaa is C or S
EEYKFKVVKDYEDLYLMSIPELETPVXXAKP

SEQ ID NO: 61367 - protein, 25 aa, Artificial Sequence
  Cyclic GFR-binding peptide
MNEYQKYIVNSSDDIYLVSIPSLQT

SEQ ID NO: 61368 - protein, 27 aa, Artificial Sequence
  Cyclic GFR-binding peptide
MDRYKKLVVNNAADFYLISIANLRAPV

SEQ ID NO: 61369 - protein, 29 aa, Artificial Sequence
  Cyclic GFR-binding peptide
SMGEEYKFKTPVGMDDLYLVSIPELKTPV

SEQ ID NO: 61370 - protein, 26 aa, Artificial Sequence
  Cyclic GFR-binding peptide
EVVMDEYKFKVVNNAADLYLISIPEL

SEQ ID NO: 61371 - protein, 25 aa, Artificial Sequence
  Cyclic GFR-binding peptide
MEYKFKVKPTRGVLYLISIPELDQP

SEQ ID NO: 61372 - protein, 32 aa, Artificial Sequence
  Cyclic GFR-binding peptide
  MOD_RES (1)..(3): Xaa is C or S
XGXESVAMGRYKKLYTVVGKDFYLISIANLKT

SEQ ID NO: 61373 - protein, 30 aa, Artificial Sequence
  Cyclic GFR-binding peptide
  MOD_RES (1)..(1): Xaa is C or S
XESVAMGEYQKYYTVVGKDIYLISIPSLKT

SEQ ID NO: 61374 - protein, 34 aa, Artificial Sequence; identical to SEQ ID NO: 16595
  Cyclic GFR-binding peptide
  MOD_RES (31)..(32): Xaa is C or S

SEQ ID NO: 61375 - protein, 34 aa, Artificial Sequence; identical to SEQ ID NO: 16598
  Cyclic GFR-binding peptide
  MOD_RES (1)..(3): Xaa is C or S

SEQ ID NO: 61376 - protein, 40 aa, Artificial Sequence; identical to SEQ ID NO: 16599
  Cyclic GFR-binding peptide
  MOD_RES (2)..(34): Xaa is C or S

SEQ ID NO: 61377 - protein, 38 aa, Artificial Sequence; identical to SEQ ID NO: 16601
  Cyclic GFR-binding peptide
  MOD_RES (32)..(33): Xaa is C or S

SEQ ID NO: 61378 - protein, 35 aa, Artificial Sequence; identical to SEQ ID NO: 16606
  Cyclic GFR-binding peptide
  MOD_RES (2)..(34)..(35): Xaa is C or S

SEQ ID NO: 61379 - protein, 27 aa, Artificial Sequence
  Cyclic GFR-binding peptide
  MOD_RES (2)..(2): Xaa is C or S
KXSRVIMEYQKYVKPKRGVIYLISIPS

SEQ ID NO: 61380 - protein, 36 aa, Artificial Sequence; identical to SEQ ID NO: 16608
  Cyclic GFR-binding peptide
  MOD_RES (32)..(33): Xaa is C or S

SEQ ID NO: 61381 - protein, 27 aa, Artificial Sequence
  Cyclic GFR-binding peptide
KVVMEYQKYVKPTRGVIYLISIPSLDQ

SEQ ID NO: 61382 - protein, 37 aa, Artificial Sequence; identical to SEQ ID NO: 16611
  Cyclic GFR-binding peptide
  MOD_RES (1)..(3)..(34)..(35): Xaa is C or S

SEQ ID NO: 61383 - protein, 33 aa, Artificial Sequence
  Cyclic GFR-binding peptide
  MOD_RES (2)..(4): Xaa is C or S
RXGXESVAMGYHYKLYTVVGKDKYLISIPSLKT

SEQ ID NO: 61384 - protein, 35 aa, Artificial Sequence; identical to SEQ ID NO: 16612
  Cyclic GFR-binding peptide
  MOD_RES (1)..(3)..(35): Xaa is C or S

SEQ ID NO: 61385 - protein, 27 aa, Artificial Sequence
  Cyclic GFR-binding peptide
  MOD_RES (27)..(27): Xaa is C or S
MEYQKYIKPTKGIIYLISIPSLDQSVX

SEQ ID NO: 61386 - protein, 32 aa, Artificial Sequence
  Cyclic GFR-binding peptide
  MOD_RES (27)..(28): Xaa is C or S
NEYKFKIVNNSSDLYLVSIPELKTPAXXAKPV

SEQ ID NO: 61387 - protein, 32 aa, Artificial Sequence
  Cyclic GFR-binding peptide
  MOD_RES (26)..(27): Xaa is C or S
EYQKYYTVVGKDIYLISIPSLKTPVXXAKSAK

SEQ ID NO: 61388 - protein, 38 aa, Artificial Sequence; identical to SEQ ID NO: 16616
  Cyclic GFR-binding peptide
  MOD_RES (2)..(4)..(36)..(37): Xaa is C or S

SEQ ID NO: 61389 - protein, 27 aa, Artificial Sequence
  Cyclic GFR-binding peptide
  MOD_RES (26)..(26): Xaa is C or S
EYQKYIVNSSDDIYLVSIPSLKTPAXT

SEQ ID NO: 61390 - protein, 28 aa, Artificial Sequence
  Cyclic GFR-binding peptide
VIMEYQKYVKPKRGVIYLISIPSLAQPV

SEQ ID NO: 61391 - protein, 24 aa, Artificial Sequence
  Cyclic GFR-binding peptide
EYQKYTPVGMDDIYLVSIPSLKTP

SEQ ID NO: 61392 - protein, 36 aa, Artificial Sequence; identical to SEQ ID NO: 16622
  Cyclic GFR-binding peptide
  MOD_RES (31)..(32): Xaa is C or S

SEQ ID NO: 61393 - protein, 35 aa, Artificial Sequence; identical to SEQ ID NO: 16623
  Cyclic GFR-binding peptide
  MOD_RES (1)..(3)..(34)..(35): Xaa is C or S

SEQ ID NO: 61394 - protein, 21 aa, Artificial Sequence
  Cyclic GFR-binding peptide
YHYKLYTVVGKDKYLISIPSL

SEQ ID NO: 61395 - protein, 35 aa, Artificial Sequence
  Cyclic GFR-binding peptide
  MOD_RES (29)..(29): Xaa is C or S
VMNEYKFKIVNSSDDLYLVSIPELKTPAXTPKTVH

SEQ ID NO: 61396 - protein, 29 aa, Artificial Sequence
  Cyclic GFR-binding peptide
  MOD_RES (2)..(2): Xaa is C or S
GXGEVVMEEYKFKVVKDYEDLYLMSIPEL

SEQ ID NO: 61397 - protein, 32 aa, Artificial Sequence
  Cyclic GFR-binding peptide
  MOD_RES (28)..(29): Xaa is C or S
MEEYQKYVVKDYEDIYLMSIPSLETPVXXAKP

SEQ ID NO: 61398 - protein, 30 aa, Artificial Sequence
  Cyclic GFR-binding peptide
  MOD_RES (27)..(28): Xaa is C or S
MEYKFKVKPKRGVLYLISIPELAQPVXXPA

SEQ ID NO: 61399 - protein, 32 aa, Artificial Sequence
  Cyclic GFR-binding peptide
  MOD_RES (29)..(30): Xaa is C or S
VMNEYQKYIVNNSSDIYLVSIPSLKTPAXXAK

SEQ ID NO: 61400 - protein, 31 aa, Artificial Sequence
  Cyclic GFR-binding peptide
  MOD_RES (29)..(30): Xaa is C or S
VMEEYQKYVVKDYEDIYLMSIPSLETPVXXA

SEQ ID NO: 61401 - protein, 26 aa, Artificial Sequence
  Cyclic GFR-binding peptide
EVVMDYHYKLVVNNAADKYLISIPSL

SEQ ID NO: 61402 - protein, 37 aa, Artificial Sequence; identical to SEQ ID NO: 16635
  Cyclic GFR-binding peptide
  MOD_RES (2)..(4)..(37): Xaa is C or S

SEQ ID NO: 61403 - protein, 26 aa, Artificial Sequence
  Cyclic GFR-binding peptide
VVMNEYQKYIVNSSDDIYLVSIPSLQ

SEQ ID NO: 61404 - protein, 30 aa, Artificial Sequence
  Cyclic GFR-binding peptide
  MOD_RES (27)..(28): Xaa is C or S
DEYQKYVVKENEDIYLMSIPSLETPVXXAK

SEQ ID NO: 61405 - protein, 26 aa, Artificial Sequence
  Cyclic GFR-binding peptide
AMGRYKKLYTVVGKDFYLISIANLKT

SEQ ID NO: 61406 - protein, 27 aa, Artificial Sequence
  Cyclic GFR-binding peptide
  MOD_RES (1)..(1): Xaa is C or S
XGEVVMDEYQKYVVKENEDIYLMSIPS

SEQ ID NO: 61407 - protein, 37 aa, Artificial Sequence; identical to SEQ ID NO: 16639
  Cyclic GFR-binding peptide
  MOD_RES (1)..(32)..(33): Xaa is C or S

SEQ ID NO: 61408 - protein, 32 aa, Artificial Sequence; identical to SEQ ID NO: 16640
  Cyclic GFR-binding peptide
  MOD_RES (1)..(1): Xaa is C or S

SEQ ID NO: 61409 - protein, 36 aa, Artificial Sequence
  Cyclic GFR-binding peptide
  MOD_RES (30)..(31): Xaa is C or S
VVMDEYQKYVVKENEDIYLMSIPSLETPVXXAKPIK

SEQ ID NO: 61410 - protein, 32 aa, Artificial Sequence; identical to SEQ ID NO: 16647
  Cyclic GFR-binding peptide
  MOD_RES (1)..(32): Xaa is C or S

SEQ ID NO: 61411 - protein, 33 aa, Artificial Sequence
  Cyclic GFR-binding peptide
  MOD_RES (1)..(3): Xaa is C or S
XGXGEVVMEEYQKYVVKDYEDIYLMSIPSLETP

SEQ ID NO: 61412 - protein, 30 aa, Artificial Sequence
  Cyclic GFR-binding peptide
  MOD_RES (29)..(30): Xaa is C or S
VIMEYQKYVKPKRGVIYLISIPSLAQPVXX

SEQ ID NO: 61413 - protein, 41 aa, Artificial Sequence; identical to SEQ ID NO: 16648
  Cyclic GFR-binding peptide
  MOD_RES (2)..(4)..(36)..(37): Xaa is C or S

SEQ ID NO: 61414 - protein, 27 aa, Artificial Sequence
  Cyclic GFR-binding peptide
EAVSMGEEYKFKTPVGMDDLYLVSIPE

SEQ ID NO: 61415 - protein, 32 aa, Artificial Sequence; identical to SEQ ID NO: 16652
  Cyclic GFR-binding peptide
  MOD_RES (31)..(32): Xaa is C or S

SEQ ID NO: 61416 - protein, 34 aa, Artificial Sequence; identical to SEQ ID NO: 16654
  Cyclic GFR-binding peptide
  MOD_RES (33)..(34): Xaa is C or S

SEQ ID NO: 61417 - protein, 31 aa, Artificial Sequence
  Cyclic GFR-binding peptide
  MOD_RES (29)..(30): Xaa is C or S
VIMEYQKYIKPTKGIIYLISIPSLDQSVXXP

SEQ ID NO: 61418 - protein, 29 aa, Artificial Sequence
  Cyclic GFR-binding peptide
  MOD_RES (28)..(29): Xaa is C or S
GEEYQKYTPVGMDDIYLVSIPSLKTPVXX

SEQ ID NO: 61419 - protein, 28 aa, Artificial Sequence
  Cyclic GFR-binding peptide
VVMDEYKFKVVNNAADLYLISIPELRAP

SEQ ID NO: 61420 - protein, 30 aa, Artificial Sequence
  Cyclic GFR-binding peptide
  MOD_RES (26)..(27): Xaa is C or S
EYQKYVVKENEDIYLMSIPSLETPVXXAKP

SEQ ID NO: 61421 - protein, 32 aa, Artificial Sequence
  Cyclic GFR-binding peptide
  MOD_RES (26)..(27): Xaa is C or S
EYKFKIVNNSSDLYLVSIPELKTPAXXAKPVA

SEQ ID NO: 61422 - protein, 33 aa, Artificial Sequence
  Cyclic GFR-binding peptide
  MOD_RES (2)..(4): Xaa is C or S
HXGXARVVMNEYKFKIVNSSDDLYLVSIPELQT

SEQ ID NO: 61423 - protein, 32 aa, Artificial Sequence
  Cyclic GFR-binding peptide
  MOD_RES (28)..(29): Xaa is C or S
MNEYQKYIVNSSDDIYLVSIPSLQTPAXXPKP

SEQ ID NO: 61424 - protein, 28 aa, Artificial Sequence
  Cyclic GFR-binding peptide
  MOD_RES (27)..(28): Xaa is C or S
DYHYKLVVNNAADKYLISIPSLRAPVXX

SEQ ID NO: 61425 - protein, 27 aa, Artificial Sequence
  Cyclic GFR-binding peptide
AKVVMNEYQKYIVNNSSDIYLVSIPSL

SEQ ID NO: 61426 - protein, 31 aa, Artificial Sequence
  Cyclic GFR-binding peptide
EAVSMGEEYKFKTPVGMDDLYLVSIPELKTP

SEQ ID NO: 61427 - protein, 30 aa, Artificial Sequence
  Cyclic GFR-binding peptide
  MOD_RES (1)..(3): Xaa is C or S
XGXSRVVMNEYKFKIVNSSDDLYLVSIPEL

SEQ ID NO: 61428 - protein, 33 aa, Artificial Sequence
  Cyclic GFR-binding peptide
  MOD_RES (30)..(31): Xaa is C or S
VAMGYHYKLYTVVGKDKYLISIPSLKTPVXXAK

SEQ ID NO: 61429 - protein, 23 aa, Artificial Sequence
  Cyclic GFR-binding peptide
MDEYKFKVVNNAADLYLISIPEL

SEQ ID NO: 61430 - protein, 28 aa, Artificial Sequence
  Cyclic GFR-binding peptide
  MOD_RES (28)..(28): Xaa is C or S
IMEYKFKVKPKRGVLYLISIPELAQPVX

SEQ ID NO: 61431 - protein, 30 aa, Artificial Sequence
  Cyclic GFR-binding peptide
  MOD_RES (28)..(28): Xaa is C or S
MNEYQKYIVNSSDDIYLVSIPSLKTPAXTP

SEQ ID NO: 61432 - protein, 35 aa, Artificial Sequence; identical to SEQ ID NO: 16677
  Cyclic GFR-binding peptide
  MOD_RES (1)..(32)..(33): Xaa is C or S

SEQ ID NO: 61433 - protein, 32 aa, Artificial Sequence; identical to SEQ ID NO: 16680
  Cyclic GFR-binding peptide
  MOD_RES (2)..(2): Xaa is C or S

SEQ ID NO: 61434 - protein, 38 aa, Artificial Sequence; identical to SEQ ID NO: 16684
  Cyclic GFR-binding peptide
  MOD_RES (2)..(4)..(36)..(37): Xaa is C or S

SEQ ID NO: 61435 - protein, 30 aa, Artificial Sequence
  Cyclic GFR-binding peptide
  MOD_RES (26)..(27): Xaa is C or S
EYQKYVVKDYEDIYLMSIPSLETPVXXAKP

SEQ ID NO: 61436 - protein, 38 aa, Artificial Sequence; identical to SEQ ID NO: 16685
  Cyclic GFR-binding peptide
  MOD_RES (1)..(32)..(33): Xaa is C or S

SEQ ID NO: 61437 - protein, 26 aa, Artificial Sequence
  Cyclic GFR-binding peptide
  MOD_RES (26)..(26): Xaa is C or S
EYQKYIVNSSDDIYLVSIPSLQTPAX

SEQ ID NO: 61438 - protein, 36 aa, Artificial Sequence; identical to SEQ ID NO: 16686
  Cyclic GFR-binding peptide
  MOD_RES (31)..(32): Xaa is C or S

SEQ ID NO: 61439 - protein, 32 aa, Artificial Sequence
  Cyclic GFR-binding peptide
  MOD_RES (1)..(3): Xaa is C or S
XGXESVAMGEYQKYYTVVGKDIYLISIPSLKT

SEQ ID NO: 61440 - protein, 38 aa, Artificial Sequence; identical to SEQ ID NO: 16687
  Cyclic GFR-binding peptide
  MOD_RES (32)..(33): Xaa is C or S

SEQ ID NO: 61441 - protein, 33 aa, Artificial Sequence
  Cyclic GFR-binding peptide
  MOD_RES (2)..(4): Xaa is C or S
HXGXARVVMNEYQKYIVNSSDDIYLVSIPSLQT

SEQ ID NO: 61442 - protein, 37 aa, Artificial Sequence; identical to SEQ ID NO: 16691
  Cyclic GFR-binding peptide
  MOD_RES (1)..(32)..(33): Xaa is C or S

SEQ ID NO: 61443 - protein, 27 aa, Artificial Sequence
  Cyclic GFR-binding peptide
VVMDYHYKLVVNNAADKYLISIPSLRA

SEQ ID NO: 61444 - protein, 23 aa, Artificial Sequence
  Cyclic GFR-binding peptide
MEYKFKIKPTKGILYLISIPELD

SEQ ID NO: 61445 - protein, 39 aa, Artificial Sequence; identical to SEQ ID NO: 16692
  Cyclic GFR-binding peptide
  MOD_RES (1)..(3)..(35)..(36): Xaa is C or S

SEQ ID NO: 61446 - protein, 31 aa, Artificial Sequence
  Cyclic GFR-binding peptide
  MOD_RES (2)..(2): Xaa is C or S
GXGEVVMEEYQKYVVKDYEDIYLMSIPSLET

SEQ ID NO: 61447 - protein, 24 aa, Artificial Sequence
  Cyclic GFR-binding peptide
VVMEEYKFKVVKDYEDLYLMSIPE

SEQ ID NO: 61448 - protein, 37 aa, Artificial Sequence; identical to SEQ ID NO: 16694
  Cyclic GFR-binding peptide
  MOD_RES (1)..(3)..(35)..(36): Xaa is C or S

SEQ ID NO: 61449 - protein, 37 aa, Artificial Sequence; identical to SEQ ID NO: 16696
  Cyclic GFR-binding peptide
  MOD_RES (31)..(32): Xaa is C or S

SEQ ID NO: 61450 - protein, 29 aa, Artificial Sequence
  Cyclic GFR-binding peptide
  MOD_RES (2)..(2): Xaa is C or S
KXSRVIMEYQKYVKPKRGVIYLISIPSLA

SEQ ID NO: 61451 - protein, 37 aa, Artificial Sequence; identical to SEQ ID NO: 16698
  Cyclic GFR-binding peptide
  MOD_RES (1)..(3)..(35)..(36): Xaa is C or S

SEQ ID NO: 61452 - protein, 23 aa, Artificial Sequence
  Cyclic GFR-binding peptide
IMEYKFKIKPTKGILYLISIPEL

SEQ ID NO: 61453 - protein, 31 aa, Artificial Sequence; identical to SEQ ID NO: 16699
  Cyclic GFR-binding peptide

SEQ ID NO: 61454 - protein, 25 aa, Artificial Sequence
  Cyclic GFR-binding peptide
AMGRYKKLYTVVGKDFYLISIANLK

SEQ ID NO: 61455 - protein, 38 aa, Artificial Sequence; identical to SEQ ID NO: 16700
  Cyclic GFR-binding peptide
  MOD_RES (2)..(4)..(36)..(37): Xaa is C or S

SEQ ID NO: 61456 - protein, 24 aa, Artificial Sequence
  Cyclic GFR-binding peptide
VVMNEYQKYIVNSSDDIYLVSIPS

SEQ ID NO: 61457 - protein, 22 aa, Artificial Sequence
  Cyclic GFR-binding peptide
MNEYQKYIVNNSSDIYLVSIPS

SEQ ID NO: 61458 - protein, 36 aa, Artificial Sequence
  Cyclic GFR-binding peptide
  MOD_RES (30)..(31): Xaa is C or S
VVMNEYKFKIVNSSDDLYLVSIPELKTPAXXPKPVY

SEQ ID NO: 61459 - protein, 28 aa, Artificial Sequence
  Cyclic GFR-binding peptide
  MOD_RES (28)..(28): Xaa is C or S
MDEYKFKVVKENEDLYLMSIPELETPVX

SEQ ID NO: 61460 - protein, 37 aa, Artificial Sequence; identical to SEQ ID NO: 16706
  Cyclic GFR-binding peptide
  MOD_RES (32)..(33): Xaa is C or S

SEQ ID NO: 61461 - protein, 23 aa, Artificial Sequence
  Cyclic GFR-binding peptide
NEYKFKIVNNSSDLYLVSIPELK

SEQ ID NO: 61462 - protein, 26 aa, Artificial Sequence
  Cyclic GFR-binding peptide
VMEYKFKVKPTRGVLYLISIPELDQP

SEQ ID NO: 61463 - protein, 31 aa, Artificial Sequence
  Cyclic GFR-binding peptide
  MOD_RES (28)..(28): Xaa is C or S
MNEYQKYIVNSSDDIYLVSIPSLKTPAXTPK

SEQ ID NO: 61464 - protein, 36 aa, Artificial Sequence; identical to SEQ ID NO: 16716
  Cyclic GFR-binding peptide
  MOD_RES (2)..(4)..(35)..(36): Xaa is C or S

SEQ ID NO: 61465 - protein, 33 aa, Artificial Sequence
  Cyclic GFR-binding peptide
  MOD_RES (27)..(28): Xaa is C or S
EEYKFKVVKDYEDLYLMSIPELETPVXXAKPIS

SEQ ID NO: 61466 - protein, 29 aa, Artificial Sequence
  Cyclic GFR-binding peptide
  MOD_RES (28)..(29): Xaa is C or S
MEEYQKYVVKDYEDIYLMSIPSLETPVXX

SEQ ID NO: 61467 - protein, 35 aa, Artificial Sequence; identical to SEQ ID NO: 16720
  Cyclic GFR-binding peptide
  MOD_RES (2)..(4)..(35): Xaa is C or S

SEQ ID NO: 61468 - protein, 24 aa, Artificial Sequence
  Cyclic GFR-binding peptide
VIMEYKFKIKPTKGILYLISIPEL

SEQ ID NO: 61469 - protein, 31 aa, Artificial Sequence; identical to SEQ ID NO: 16722
  Cyclic GFR-binding peptide

SEQ ID NO: 61470 - protein, 29 aa, Artificial Sequence
  Cyclic GFR-binding peptide
SKVVMEYKFKVKPTRGVLYLISIPELDQP

SEQ ID NO: 61471 - protein, 21 aa, Artificial Sequence
  Cyclic GFR-binding peptide
GRYKKLYTVVGKDFYLISIAN

SEQ ID NO: 61472 - protein, 41 aa, Artificial Sequence; identical to SEQ ID NO: 16725
  Cyclic GFR-binding peptide
  MOD_RES (2)..(4)..(35)..(36): Xaa is C or S

SEQ ID NO: 61473 - protein, 31 aa, Artificial Sequence
  Cyclic GFR-binding peptide
  MOD_RES (30)..(31): Xaa is C or S
VVMNEYKFKIVNNSSDLYLVSIPELKTPAXX

SEQ ID NO: 61474 - protein, 39 aa, Artificial Sequence; identical to SEQ ID NO: 16732
  Cyclic GFR-binding peptide
  MOD_RES (2)..(4)..(36)..(37): Xaa is C or S

SEQ ID NO: 61475 - protein, 30 aa, Artificial Sequence
  Cyclic GFR-binding peptide
  MOD_RES (2)..(4): Xaa is C or S
SXKXSKVIMEYQKYIKPTKGIIYLISIPSL

SEQ ID NO: 61476 - protein, 32 aa, Artificial Sequence
  Cyclic GFR-binding peptide
  MOD_RES (2)..(2): Xaa is C or S
GXAEVVMDRYKKLVVNNAADFYLISIANLRAP

SEQ ID NO: 61477 - protein, 24 aa, Artificial Sequence
  Cyclic GFR-binding peptide
MGRYKKLYTVVGKDFYLISIANLK

SEQ ID NO: 61478 - protein, 40 aa, Artificial Sequence; identical to SEQ ID NO: 16739
  Cyclic GFR-binding peptide
  MOD_RES (1)..(3)..(35)..(36): Xaa is C or S

SEQ ID NO: 61479 - protein, 27 aa, Artificial Sequence
  Cyclic GFR-binding peptide
  MOD_RES (27)..(27): Xaa is C or S
NEYQKYIVNNSSDIYLVSIPSLKTPAX

SEQ ID NO: 61480 - protein, 40 aa, Artificial Sequence; identical to SEQ ID NO: 16741
  Cyclic GFR-binding peptide
  MOD_RES (2)..(4)..(36)..(37): Xaa is C or S

SEQ ID NO: 61481 - protein, 28 aa, Artificial Sequence
  Cyclic GFR-binding peptide
KVVMNEYQKYIVNNSSDIYLVSIPSLKT

SEQ ID NO: 61482 - protein, 35 aa, Artificial Sequence; identical to SEQ ID NO: 16744
  Cyclic GFR-binding peptide
  MOD_RES (31)..(32): Xaa is C or S

SEQ ID NO: 61483 - protein, 37 aa, Artificial Sequence; identical to SEQ ID NO: 16745
  Cyclic GFR-binding peptide
  MOD_RES (1)..(33): Xaa is C or S

SEQ ID NO: 61484 - protein, 38 aa, Artificial Sequence; identical to SEQ ID NO: 16746
  Cyclic GFR-binding peptide
  MOD_RES (1)..(3)..(35)..(36): Xaa is C or S

SEQ ID NO: 61485 - protein, 37 aa, Artificial Sequence; identical to SEQ ID NO: 16748
  Cyclic GFR-binding peptide
  MOD_RES (1)..(3)..(35)..(36): Xaa is C or S

SEQ ID NO: 61486 - protein, 35 aa, Artificial Sequence; identical to SEQ ID NO: 16750
  Cyclic GFR-binding peptide
  MOD_RES (31)..(31): Xaa is C or S

SEQ ID NO: 61487 - protein, 31 aa, Artificial Sequence
  Cyclic GFR-binding peptide
  MOD_RES (30)..(30): Xaa is C or S
VVMNEYKFKIVNSSDDLYLVSIPELKTPAXT

SEQ ID NO: 61488 - protein, 33 aa, Artificial Sequence
  Cyclic GFR-binding peptide
  MOD_RES (31)..(32): Xaa is C or S
VSMGEEYKFKTPVGMDDLYLVSIPELKTPVXXA

SEQ ID NO: 61489 - protein, 23 aa, Artificial Sequence
  Cyclic GFR-binding peptide
AMGEYQKYYTVVGKDIYLISIPS

SEQ ID NO: 61490 - protein, 30 aa, Artificial Sequence
  Cyclic GFR-binding peptide
  MOD_RES (2)..(4): Xaa is C or S
RXGXESVAMGEYQKYYTVVGKDIYLISIPS

SEQ ID NO: 61491 - protein, 31 aa, Artificial Sequence
  Cyclic GFR-binding peptide
  MOD_RES (29)..(30): Xaa is C or S
VIMEYKFKIKPTKGILYLISIPELDQSVXXP

SEQ ID NO: 61492 - protein, 40 aa, Artificial Sequence; identical to SEQ ID NO: 16756
  Cyclic GFR-binding peptide
  MOD_RES (1)..(3)..(35)..(36): Xaa is C or S

SEQ ID NO: 61493 - protein, 36 aa, Artificial Sequence; identical to SEQ ID NO: 16757
  Cyclic GFR-binding peptide
  MOD_RES (31)..(32): Xaa is C or S

SEQ ID NO: 61494 - protein, 29 aa, Artificial Sequence
  Cyclic GFR-binding peptide
RVIMEYQKYVKPKRGVIYLISIPSLAQPV

SEQ ID NO: 61495 - protein, 26 aa, Artificial Sequence
  Cyclic GFR-binding peptide
ESVAMGYHYKLYTVVGKDKYLISIPS

SEQ ID NO: 61496 - protein, 35 aa, Artificial Sequence
  Cyclic GFR-binding peptide
  MOD_RES (29)..(30): Xaa is C or S
VMNEYKFKIVNSSDDLYLVSIPELKTPAXXPKPVY

SEQ ID NO: 61497 - protein, 34 aa, Artificial Sequence
  Cyclic GFR-binding peptide
  MOD_RES (30)..(31): Xaa is C or S
VVMDYHYKLVVNNAADKYLISIPSLRAPVXXSAP

SEQ ID NO: 61498 - protein, 32 aa, Artificial Sequence
  Cyclic GFR-binding peptide
  MOD_RES (2)..(4): Xaa is C or S
RXGXAEVVMDEYKFKVVNNAADLYLISIPELR

SEQ ID NO: 61499 - protein, 31 aa, Artificial Sequence
  Cyclic GFR-binding peptide
  MOD_RES (28)..(29): Xaa is C or S
MNEYKFKIVNSSDDLYLVSIPELQTPAXXPK

SEQ ID NO: 61500 - protein, 42 aa, Artificial Sequence; identical to SEQ ID NO: 16761
  Cyclic GFR-binding peptide
  MOD_RES (2)..(4)..(36)..(37): Xaa is C or S

SEQ ID NO: 61501 - protein, 32 aa, Artificial Sequence; identical to SEQ ID NO: 16763
  Cyclic GFR-binding peptide
  MOD_RES (1)..(1): Xaa is C or S

SEQ ID NO: 61502 - protein, 30 aa, Artificial Sequence
  Cyclic GFR-binding peptide
  MOD_RES (27)..(28): Xaa is C or S
NEYQKYIVNSSDDIYLVSIPSLQTPAXXPK

SEQ ID NO: 61503 - protein, 28 aa, Artificial Sequence
  Cyclic GFR-binding peptide
  MOD_RES (1)..(1): Xaa is C or S
XEAVSMGEEYQKYTPVGMDDIYLVSIPS

SEQ ID NO: 61504 - protein, 30 aa, Artificial Sequence
  Cyclic GFR-binding peptide
  MOD_RES (27)..(28): Xaa is C or S
MEYQKYVKPTRGVIYLISIPSLDQPVXXPS

SEQ ID NO: 61505 - protein, 29 aa, Artificial Sequence
  Cyclic GFR-binding peptide
  MOD_RES (29)..(29): Xaa is C or S
VIMEYKFKVKPKRGVLYLISIPELAQPVX

SEQ ID NO: 61506 - protein, 29 aa, Artificial Sequence
  Cyclic GFR-binding peptide
  MOD_RES (2)..(4): Xaa is C or S
SXKXSKVIMEYQKYIKPTKGIIYLISIPS

SEQ ID NO: 61507 - protein, 25 aa, Artificial Sequence
  Cyclic GFR-binding peptide
VSMGEEYQKYTPVGMDDIYLVSIPS

SEQ ID NO: 61508 - protein, 39 aa, Artificial Sequence; identical to SEQ ID NO: 16766
  Cyclic GFR-binding peptide
  MOD_RES (2)..(33)..(34): Xaa is C or S

SEQ ID NO: 61509 - protein, 25 aa, Artificial Sequence
  Cyclic GFR-binding peptide
VVMDEYKFKVVKENEDLYLMSIPEL

SEQ ID NO: 61510 - protein, 27 aa, Artificial Sequence
  Cyclic GFR-binding peptide
  MOD_RES (27)..(27): Xaa is C or S
DRYKKLVVNNAADFYLISIANLRAPVX

SEQ ID NO: 61511 - protein, 39 aa, Artificial Sequence; identical to SEQ ID NO: 16771
  Cyclic GFR-binding peptide
  MOD_RES (2)..(33)..(34): Xaa is C or S

SEQ ID NO: 61512 - protein, 34 aa, Artificial Sequence; identical to SEQ ID NO: 16775
  Cyclic GFR-binding peptide
  MOD_RES (31)..(32): Xaa is C or S

SEQ ID NO: 61513 - protein, 40 aa, Artificial Sequence; identical to SEQ ID NO: 16776
  Cyclic GFR-binding peptide
  MOD_RES (2)..(4)..(36): Xaa is C or S

SEQ ID NO: 61514 - protein, 26 aa, Artificial Sequence
  Cyclic GFR-binding peptide
SRVIMEYQKYVKPKRGVIYLISIPSL

SEQ ID NO: 61515 - protein, 34 aa, Artificial Sequence; identical to SEQ ID NO: 16780
  Cyclic GFR-binding peptide
  MOD_RES (2)..(4): Xaa is C or S

SEQ ID NO: 61516 - protein, 33 aa, Artificial Sequence
  Cyclic GFR-binding peptide
  MOD_RES (27)..(28): Xaa is C or S
GYHYKLYTVVGKDKYLISIPSLKTPVXXAKSAK

SEQ ID NO: 61517 - protein, 26 aa, Artificial Sequence
  Cyclic GFR-binding peptide
VVMDEYKFKVVNNAADLYLISIPELR

SEQ ID NO: 61518 - protein, 38 aa, Artificial Sequence; identical to SEQ ID NO: 16783
  Cyclic GFR-binding peptide
  MOD_RES (2)..(34)..(35): Xaa is C or S

SEQ ID NO: 61519 - protein, 36 aa, Artificial Sequence; identical to SEQ ID NO: 16784
  Cyclic GFR-binding peptide
  MOD_RES (1)..(3)..(35)..(36): Xaa is C or S

SEQ ID NO: 61520 - protein, 27 aa, Artificial Sequence
  Cyclic GFR-binding peptide
VVMDRYKKLVVNNAADFYLISIANLRA

SEQ ID NO: 61521 - protein, 22 aa, Artificial Sequence
  Cyclic GFR-binding peptide
RYKKLYTVVGKDFYLISIANLK

SEQ ID NO: 61522 - protein, 27 aa, Artificial Sequence
  Cyclic GFR-binding peptide
  MOD_RES (1)..(1): Xaa is C or S
XSKVVMEYKFKVKPTRGVLYLISIPEL

SEQ ID NO: 61523 - protein, 32 aa, Artificial Sequence
  Cyclic GFR-binding peptide
  MOD_RES (29)..(30): Xaa is C or S
VIMEYQKYVKPKRGVIYLISIPSLAQPVXXPA

SEQ ID NO: 61524 - protein, 33 aa, Artificial Sequence
  Cyclic GFR-binding peptide
  MOD_RES (30)..(31): Xaa is C or S
KVVMEYKFKVKPTRGVLYLISIPELDQPVXXPS

SEQ ID NO: 61525 - protein, 32 aa, Artificial Sequence
  Cyclic GFR-binding peptide
  MOD_RES (27)..(28): Xaa is C or S
NEYQKYIVNSSDDIYLVSIPSLQTPAXXPKPV

SEQ ID NO: 61526 - protein, 30 aa, Artificial Sequence
  Cyclic GFR-binding peptide
  MOD_RES (27)..(28): Xaa is C or S
MEYKFKIKPTKGILYLISIPELDQSVXXPS

SEQ ID NO: 61527 - protein, 36 aa, Artificial Sequence; identical to SEQ ID NO: 16797
  Cyclic GFR-binding peptide
  MOD_RES (32)..(33): Xaa is C or S

SEQ ID NO: 61528 - protein, 36 aa, Artificial Sequence; identical to SEQ ID NO: 16798
  Cyclic GFR-binding peptide
  MOD_RES (31)..(32): Xaa is C or S

SEQ ID NO: 61529 - protein, 33 aa, Artificial Sequence
  Cyclic GFR-binding peptide
  MOD_RES (28)..(29): Xaa is C or S
IMEYKFKIKPTKGILYLISIPELDQSVXXPSAS

SEQ ID NO: 61530 - protein, 27 aa, Artificial Sequence
  Cyclic GFR-binding peptide
  MOD_RES (26)..(27): Xaa is C or S
EYQKYIVNSSDDIYLVSIPSLQTPAXX

SEQ ID NO: 61531 - protein, 31 aa, Artificial Sequence
  Cyclic GFR-binding peptide
  MOD_RES (26)..(27): Xaa is C or S
EYKFKVKPKRGVLYLISIPELAQPVXXPAAS

SEQ ID NO: 61532 - protein, 34 aa, Artificial Sequence; identical to SEQ ID NO: 16801
  Cyclic GFR-binding peptide
  MOD_RES (2)..(34): Xaa is C or S

SEQ ID NO: 61533 - protein, 36 aa, Artificial Sequence; identical to SEQ ID NO: 16804
  Cyclic GFR-binding peptide
  MOD_RES (32)..(33): Xaa is C or S

SEQ ID NO: 61534 - protein, 21 aa, Artificial Sequence
  Cyclic GFR-binding peptide
DEYKFKVVKENEDLYLMSIPE

SEQ ID NO: 61535 - protein, 28 aa, Artificial Sequence
  Cyclic GFR-binding peptide
  MOD_RES (26)..(27): Xaa is C or S
EYKFKIVNSSDDLYLVSIPELKTPAXXP

SEQ ID NO: 61536 - protein, 28 aa, Artificial Sequence
  Cyclic GFR-binding peptide
  MOD_RES (2)..(2): Xaa is C or S
GXSRVVMNEYKFKIVNSSDDLYLVSIPE

SEQ ID NO: 61537 - protein, 29 aa, Artificial Sequence
  Cyclic GFR-binding peptide
  MOD_RES (26)..(27): Xaa is C or S
EYKFKTPVGMDDLYLVSIPELKTPVXXAK

SEQ ID NO: 61538 - protein, 27 aa, Artificial Sequence
  Cyclic GFR-binding peptide
  MOD_RES (26)..(27): Xaa is C or S
EYQKYVKPTRGVIYLISIPSLDQPVXX

SEQ ID NO: 61539 - protein, 25 aa, Artificial Sequence
  Cyclic GFR-binding peptide
NEYKFKIVNSSDDLYLVSIPELQTP

SEQ ID NO: 61540 - protein, 37 aa, Artificial Sequence; identical to SEQ ID NO: 16814
  Cyclic GFR-binding peptide
  MOD_RES (2)..(34)..(35): Xaa is C or S

SEQ ID NO: 61541 - protein, 27 aa, Artificial Sequence
  Cyclic GFR-binding peptide
EVVMDYHYKLVVNNAADKYLISIPSLR

SEQ ID NO: 61542 - protein, 23 aa, Artificial Sequence
  Cyclic GFR-binding peptide
VIMEYQKYVKPKRGVIYLISIPS

SEQ ID NO: 61543 - protein, 30 aa, Artificial Sequence
  Cyclic GFR-binding peptide
  MOD_RES (30)..(30): Xaa is C or S
VVMNEYQKYIVNSSDDIYLVSIPSLKTPAX

SEQ ID NO: 61544 - protein, 30 aa, Artificial Sequence
  Cyclic GFR-binding peptide
  MOD_RES (27)..(28): Xaa is C or S
NEYQKYIVNNSSDIYLVSIPSLKTPAXXAK

SEQ ID NO: 61545 - protein, 36 aa, Artificial Sequence
  Cyclic GFR-binding peptide
  MOD_RES (30)..(31): Xaa is C or S
SMGEEYKFKTPVGMDDLYLVSIPELKTPVXXAKGVK

SEQ ID NO: 61546 - protein, 38 aa, Artificial Sequence; identical to SEQ ID NO: 16821
  Cyclic GFR-binding peptide
  MOD_RES (2)..(4)..(37)..(38): Xaa is C or S

SEQ ID NO: 61547 - protein, 32 aa, Artificial Sequence
  Cyclic GFR-binding peptide
  MOD_RES (26)..(27): Xaa is C or S
EYKFKVKPTRGVLYLISIPELDQPVXXPSASA

SEQ ID NO: 61548 - protein, 30 aa, Artificial Sequence
  Cyclic GFR-binding peptide
  MOD_RES (30)..(30): Xaa is C or S
VVMDEYKFKVVNNAADLYLISIPELRAPVX

SEQ ID NO: 61549 - protein, 29 aa, Artificial Sequence
  Cyclic GFR-binding peptide
  MOD_RES (28)..(29): Xaa is C or S
IMEYKFKIKPTKGILYLISIPELDQSVXX

SEQ ID NO: 61550 - protein, 32 aa, Artificial Sequence; identical to SEQ ID NO: 16825
  Cyclic GFR-binding peptide
  MOD_RES (1)..(1): Xaa is C or S

SEQ ID NO: 61551 - protein, 31 aa, Artificial Sequence
  Cyclic GFR-binding peptide
  MOD_RES (1)..(1): Xaa is C or S
XAKVVMNEYQKYIVNNSSDIYLVSIPSLKTP

SEQ ID NO: 61552 - protein, 34 aa, Artificial Sequence
  Cyclic GFR-binding peptide
  MOD_RES (28)..(29): Xaa is C or S
MEEYQKYVVKDYEDIYLMSIPSLETPVXXAKPIS

SEQ ID NO: 61553 - protein, 37 aa, Artificial Sequence; identical to SEQ ID NO: 16827
  Cyclic GFR-binding peptide
  MOD_RES (32)..(33): Xaa is C or S

SEQ ID NO: 61554 - protein, 30 aa, Artificial Sequence
  Cyclic GFR-binding peptide
SRVVMNEYKFKIVNSSDDLYLVSIPELKTP

SEQ ID NO: 61555 - protein, 28 aa, Artificial Sequence
  Cyclic GFR-binding peptide
GEVVMEEYQKYVVKDYEDIYLMSIPSLE

SEQ ID NO: 61556 - protein, 24 aa, Artificial Sequence
  Cyclic GFR-binding peptide
KVIMEYQKYIKPTKGIIYLISIPS

SEQ ID NO: 61557 - protein, 23 aa, Artificial Sequence
  Cyclic GFR-binding peptide
VMNEYQKYIVNSSDDIYLVSIPS

SEQ ID NO: 61558 - protein, 23 aa, Artificial Sequence
  Cyclic GFR-binding peptide
MNEYQKYIVNNSSDIYLVSIPSL

SEQ ID NO: 61559 - protein, 34 aa, Artificial Sequence
  Cyclic GFR-binding peptide
  MOD_RES (29)..(30): Xaa is C or S
VMDEYKFKVVKENEDLYLMSIPELETPVXXAKPI

SEQ ID NO: 61560 - protein, 27 aa, Artificial Sequence
  Cyclic GFR-binding peptide
  MOD_RES (26)..(27): Xaa is C or S
EYQKYTPVGMDDIYLVSIPSLKTPVXX

SEQ ID NO: 61561 - protein, 32 aa, Artificial Sequence
  Cyclic GFR-binding peptide
  MOD_RES (29)..(30): Xaa is C or S
VMDRYKKLVVNNAADFYLISIANLRAPVXXSA

SEQ ID NO: 61562 - protein, 31 aa, Artificial Sequence
  Cyclic GFR-binding peptide
  MOD_RES (1)..(3): Xaa is C or S
XGXAKVVMNEYKFKIVNNSSDLYLVSIPELK

SEQ ID NO: 61563 - protein, 27 aa, Artificial Sequence
  Cyclic GFR-binding peptide
VVMNEYKFKIVNNSSDLYLVSIPELKT

SEQ ID NO: 61564 - protein, 36 aa, Artificial Sequence; identical to SEQ ID NO: 16835
  Cyclic GFR-binding peptide
  MOD_RES (2)..(4)..(36): Xaa is C or S

SEQ ID NO: 61565 - protein, 30 aa, Artificial Sequence
  Cyclic GFR-binding peptide
  MOD_RES (28)..(29): Xaa is C or S
MDYHYKLVVNNAADKYLISIPSLRAPVXXS

SEQ ID NO: 61566 - protein, 23 aa, Artificial Sequence
  Cyclic GFR-binding peptide
MEEYQKYVVKDYEDIYLMSIPSL

SEQ ID NO: 61567 - protein, 32 aa, Artificial Sequence
  Cyclic GFR-binding peptide
  MOD_RES (2)..(2): Xaa is C or S
GXARVVMNEYQKYIVNSSDDIYLVSIPSLQTP

SEQ ID NO: 61568 - protein, 34 aa, Artificial Sequence
  Cyclic GFR-binding peptide
  MOD_RES (28)..(28): Xaa is C or S
MNEYQKYIVNSSDDIYLVSIPSLKTPAXTPKTVH

SEQ ID NO: 61569 - protein, 32 aa, Artificial Sequence
  Cyclic GFR-binding peptide
  MOD_RES (2)..(2): Xaa is C or S
GXAEVVMDEYKFKVVNNAADLYLISIPELRAP

SEQ ID NO: 61570 - protein, 39 aa, Artificial Sequence; identical to SEQ ID NO: 16844
  Cyclic GFR-binding peptide
  MOD_RES (2)..(34)..(35): Xaa is C or S

SEQ ID NO: 61571 - protein, 29 aa, Artificial Sequence
  Cyclic GFR-binding peptide
  MOD_RES (1)..(3): Xaa is C or S
XKXSKVIMEYQKYIKPTKGIIYLISIPSL

SEQ ID NO: 61572 - protein, 33 aa, Artificial Sequence
  Cyclic GFR-binding peptide
  MOD_RES (29)..(30): Xaa is C or S
AMGYHYKLYTVVGKDKYLISIPSLKTPVXXAKS

SEQ ID NO: 61573 - protein, 34 aa, Artificial Sequence
  Cyclic GFR-binding peptide
  MOD_RES (28)..(29): Xaa is C or S
MNEYQKYIVNNSSDIYLVSIPSLKTPAXXAKPVA

SEQ ID NO: 61574 - protein, 32 aa, Artificial Sequence; identical to SEQ ID NO: 16850
  Cyclic GFR-binding peptide
  MOD_RES (31)..(32): Xaa is C or S

SEQ ID NO: 61575 - protein, 23 aa, Artificial Sequence
  Cyclic GFR-binding peptide
GEEYQKYTPVGMDDIYLVSIPSL

SEQ ID NO: 61576 - protein, 30 aa, Artificial Sequence
  Cyclic GFR-binding peptide
  MOD_RES (27)..(28): Xaa is C or S
MEYQKYIKPTKGIIYLISIPSLDQSVXXPS

SEQ ID NO: 61577 - protein, 28 aa, Artificial Sequence
  Cyclic GFR-binding peptide
SRVVMNEYKFKIVNSSDDLYLVSIPELK

SEQ ID NO: 61578 - protein, 32 aa, Artificial Sequence; identical to SEQ ID NO: 16857
  Cyclic GFR-binding peptide
  MOD_RES (2)..(2): Xaa is C or S

SEQ ID NO: 61579 - protein, 33 aa, Artificial Sequence
  Cyclic GFR-binding peptide
  MOD_RES (29)..(29): Xaa is C or S
VMNEYQKYIVNSSDDIYLVSIPSLKTPAXTPKT

SEQ ID NO: 61580 - protein, 24 aa, Artificial Sequence
  Cyclic GFR-binding peptide
NEYKFKIVNSSDDLYLVSIPELQT

SEQ ID NO: 61581 - protein, 32 aa, Artificial Sequence
  Cyclic GFR-binding peptide
  MOD_RES (29)..(30): Xaa is C or S
VMNEYKFKIVNNSSDLYLVSIPELKTPAXXAK

SEQ ID NO: 61582 - protein, 29 aa, Artificial Sequence
  Cyclic GFR-binding peptide
  MOD_RES (1)..(1): Xaa is C or S
XSRVVMNEYKFKIVNSSDDLYLVSIPELK

SEQ ID NO: 61583 - protein, 21 aa, Artificial Sequence
  Cyclic GFR-binding peptide
NEYKFKIVNSSDDLYLVSIPE

SEQ ID NO: 61584 - protein, 38 aa, Artificial Sequence; identical to SEQ ID NO: 16865
  Cyclic GFR-binding peptide
  MOD_RES (2)..(34)..(35): Xaa is C or S

SEQ ID NO: 61585 - protein, 27 aa, Artificial Sequence
  Cyclic GFR-binding peptide
EVVMEEYQKYVVKDYEDIYLMSIPSLE

SEQ ID NO: 61586 - protein, 27 aa, Artificial Sequence
  Cyclic GFR-binding peptide
IMEYKFKIKPTKGILYLISIPELDQSV

SEQ ID NO: 61587 - protein, 29 aa, Artificial Sequence
  Cyclic GFR-binding peptide
  MOD_RES (1)..(1): Xaa is C or S
XESVAMGRYKKLYTVVGKDFYLISIANLK

SEQ ID NO: 61588 - protein, 36 aa, Artificial Sequence; identical to SEQ ID NO: 16867
  Cyclic GFR-binding peptide
  MOD_RES (32)..(33): Xaa is C or S

SEQ ID NO: 61589 - protein, 34 aa, Artificial Sequence
  Cyclic GFR-binding peptide
  MOD_RES (29)..(30): Xaa is C or S
VMDRYKKLVVNNAADFYLISIANLRAPVXXSAPA

SEQ ID NO: 61590 - protein, 29 aa, Artificial Sequence
  Cyclic GFR-binding peptide
  MOD_RES (1)..(1): Xaa is C or S
XESVAMGYHYKLYTVVGKDKYLISIPSLK

SEQ ID NO: 61591 - protein, 33 aa, Artificial Sequence; identical to SEQ ID NO: 16870
  Cyclic GFR-binding peptide
  MOD_RES (2)..(33): Xaa is C or S

SEQ ID NO: 61592 - protein, 32 aa, Artificial Sequence
  Cyclic GFR-binding peptide
  MOD_RES (26)..(27): Xaa is C or S
EYQKYVVKENEDIYLMSIPSLETPVXXAKPIK

SEQ ID NO: 61593 - protein, 41 aa, Artificial Sequence; identical to SEQ ID NO: 16874
  Cyclic GFR-binding peptide
  MOD_RES (2)..(4)..(36): Xaa is C or S

SEQ ID NO: 61594 - protein, 29 aa, Artificial Sequence
  Cyclic GFR-binding peptide
  MOD_RES (2)..(2): Xaa is C or S
GXESVAMGRYKKLYTVVGKDFYLISIANL

SEQ ID NO: 61595 - protein, 31 aa, Artificial Sequence
  Cyclic GFR-binding peptide
  MOD_RES (1)..(3): Xaa is C or S
XGXGEVVMEEYKFKVVKDYEDLYLMSIPELE

SEQ ID NO: 61596 - protein, 23 aa, Artificial Sequence
  Cyclic GFR-binding peptide
EYQKYIVNSSDDIYLVSIPSLQT

SEQ ID NO: 61597 - protein, 26 aa, Artificial Sequence
  Cyclic GFR-binding peptide
  MOD_RES (26)..(26): Xaa is C or S
EYQKYVKPKRGVIYLISIPSLAQPVX

SEQ ID NO: 61598 - protein, 28 aa, Artificial Sequence
  Cyclic GFR-binding peptide
  MOD_RES (28)..(28): Xaa is C or S
MNEYQKYIVNSSDDIYLVSIPSLQTPAX

SEQ ID NO: 61599 - protein, 39 aa, Artificial Sequence; identical to SEQ ID NO: 16881
  Cyclic GFR-binding peptide
  MOD_RES (1)..(3)..(36)..(37): Xaa is C or S

SEQ ID NO: 61600 - protein, 31 aa, Artificial Sequence
  Cyclic GFR-binding peptide
  MOD_RES (26)..(27): Xaa is C or S
EYKFKIVNSSDDLYLVSIPELKTPAXXPKPV

SEQ ID NO: 61601 - protein, 26 aa, Artificial Sequence
  Cyclic GFR-binding peptide
NEYQKYIVNNSSDIYLVSIPSLKTPA

SEQ ID NO: 61602 - protein, 28 aa, Artificial Sequence
  Cyclic GFR-binding peptide
  MOD_RES (28)..(28): Xaa is C or S
VMEYKFKVKPTRGVLYLISIPELDQPVX

SEQ ID NO: 61603 - protein, 32 aa, Artificial Sequence
  Cyclic GFR-binding peptide
  MOD_RES (2)..(4): Xaa is C or S
RXGXGEVVMDEYKFKVVKENEDLYLMSIPELE

SEQ ID NO: 61604 - protein, 30 aa, Artificial Sequence
  Cyclic GFR-binding peptide
  MOD_RES (28)..(29): Xaa is C or S
IMEYKFKVKPKRGVLYLISIPELAQPVXXP

SEQ ID NO: 61605 - protein, 30 aa, Artificial Sequence
  Cyclic GFR-binding peptide
  MOD_RES (2)..(2): Xaa is C or S
GXGEVVMEEYKFKVVKDYEDLYLMSIPELE

SEQ ID NO: 61606 - protein, 27 aa, Artificial Sequence
  Cyclic GFR-binding peptide
  MOD_RES (26)..(27): Xaa is C or S
EYKFKVVKDYEDLYLMSIPELETPVXX

SEQ ID NO: 61607 - protein, 27 aa, Artificial Sequence
  Cyclic GFR-binding peptide
MDEYKFKVVKENEDLYLMSIPELETPV

SEQ ID NO: 61608 - protein, 27 aa, Artificial Sequence
  Cyclic GFR-binding peptide
GEEYQKYTPVGMDDIYLVSIPSLKTPV

SEQ ID NO: 61609 - protein, 34 aa, Artificial Sequence
  Cyclic GFR-binding peptide
  MOD_RES (29)..(30): Xaa is C or S
VMEEYKFKVVKDYEDLYLMSIPELETPVXXAKPI

SEQ ID NO: 61610 - protein, 36 aa, Artificial Sequence; identical to SEQ ID NO: 16887
  Cyclic GFR-binding peptide
  MOD_RES (1)..(3)..(36): Xaa is C or S

SEQ ID NO: 61611 - protein, 29 aa, Artificial Sequence
  Cyclic GFR-binding peptide
  MOD_RES (29)..(29): Xaa is C or S
VMDYHYKLVVNNAADKYLISIPSLRAPVX

SEQ ID NO: 61612 - protein, 33 aa, Artificial Sequence
  Cyclic GFR-binding peptide
  MOD_RES (2)..(4): Xaa is C or S
RXGXEAVSMGEEYQKYTPVGMDDIYLVSIPSLK

SEQ ID NO: 61613 - protein, 24 aa, Artificial Sequence
  Cyclic GFR-binding peptide
EEYQKYVVKDYEDIYLMSIPSLET

SEQ ID NO: 61614 - protein, 34 aa, Artificial Sequence
  Cyclic GFR-binding peptide
  MOD_RES (28)..(29): Xaa is C or S
MGYHYKLYTVVGKDKYLISIPSLKTPVXXAKSAK

SEQ ID NO: 61615 - protein, 36 aa, Artificial Sequence; identical to SEQ ID NO: 16890
  Cyclic GFR-binding peptide
  MOD_RES (31)..(32): Xaa is C or S

SEQ ID NO: 61616 - protein, 29 aa, Artificial Sequence
  Cyclic GFR-binding peptide
  MOD_RES (27)..(28): Xaa is C or S
GYHYKLYTVVGKDKYLISIPSLKTPVXXA

SEQ ID NO: 61617 - protein, 32 aa, Artificial Sequence
  Cyclic GFR-binding peptide
  MOD_RES (2)..(4): Xaa is C or S
RXGXGEVVMDEYQKYVVKENEDIYLMSIPSLE

SEQ ID NO: 61618 - protein, 36 aa, Artificial Sequence
  Cyclic GFR-binding peptide
  MOD_RES (30)..(31): Xaa is C or S
RVIMEYQKYVKPKRGVIYLISIPSLAQPVXXPAASA

SEQ ID NO: 61619 - protein, 22 aa, Artificial Sequence
  Cyclic GFR-binding peptide
MEEYKFKVVKDYEDLYLMSIPE

SEQ ID NO: 61620 - protein, 28 aa, Artificial Sequence
  Cyclic GFR-binding peptide
RVVMNEYQKYIVNSSDDIYLVSIPSLQT

SEQ ID NO: 61621 - protein, 36 aa, Artificial Sequence
  Cyclic GFR-binding peptide
  MOD_RES (30)..(31): Xaa is C or S
SMGEEYQKYTPVGMDDIYLVSIPSLKTPVXXAKGVK

SEQ ID NO: 61622 - protein, 23 aa, Artificial Sequence
  Cyclic GFR-binding peptide
MDEYKFKVVKENEDLYLMSIPEL

SEQ ID NO: 61623 - protein, 33 aa, Artificial Sequence; identical to SEQ ID NO: 16899
  Cyclic GFR-binding peptide
  MOD_RES (31)..(32): Xaa is C or S

SEQ ID NO: 61624 - protein, 32 aa, Artificial Sequence
  Cyclic GFR-binding peptide
  MOD_RES (1)..(3): Xaa is C or S
XGXARVVMNEYQKYIVNSSDDIYLVSIPSLQT

SEQ ID NO: 61625 - protein, 36 aa, Artificial Sequence; identical to SEQ ID NO: 16908
  Cyclic GFR-binding peptide
  MOD_RES (1)..(3)..(36): Xaa is C or S

SEQ ID NO: 61626 - protein, 22 aa, Artificial Sequence
  Cyclic GFR-binding peptide
EEYQKYVVKDYEDIYLMSIPSL

SEQ ID NO: 61627 - protein, 31 aa, Artificial Sequence
  Cyclic GFR-binding peptide
  MOD_RES (27)..(28): Xaa is C or S
EEYKFKTPVGMDDLYLVSIPELKTPVXXAKG

SEQ ID NO: 61628 - protein, 31 aa, Artificial Sequence
  Cyclic GFR-binding peptide
  MOD_RES (28)..(29): Xaa is C or S
VMEYQKYVKPTRGVIYLISIPSLDQPVXXPS

SEQ ID NO: 61629 - protein, 36 aa, Artificial Sequence; identical to SEQ ID NO: 16915
  Cyclic GFR-binding peptide
  MOD_RES (32)..(33): Xaa is C or S

SEQ ID NO: 61630 - protein, 38 aa, Artificial Sequence; identical to SEQ ID NO: 16917
  Cyclic GFR-binding peptide
  MOD_RES (2)..(4)..(35)..(36): Xaa is C or S

SEQ ID NO: 61631 - protein, 30 aa, Artificial Sequence
  Cyclic GFR-binding peptide
  MOD_RES (29)..(29): Xaa is C or S
VMNEYKFKIVNSSDDLYLVSIPELKTPAXT

SEQ ID NO: 61632 - protein, 29 aa, Artificial Sequence
  Cyclic GFR-binding peptide
SVAMGRYKKLYTVVGKDFYLISIANLKTP

SEQ ID NO: 61633 - protein, 39 aa, Artificial Sequence; identical to SEQ ID NO: 16919
  Cyclic GFR-binding peptide
  MOD_RES (1)..(3)..(35): Xaa is C or S

SEQ ID NO: 61634 - protein, 21 aa, Artificial Sequence
  Cyclic GFR-binding peptide
EEYKFKTPVGMDDLYLVSIPE

SEQ ID NO: 61635 - protein, 35 aa, Artificial Sequence; identical to SEQ ID NO: 16923
  Cyclic GFR-binding peptide
  MOD_RES (31)..(32): Xaa is C or S

SEQ ID NO: 61636 - protein, 26 aa, Artificial Sequence
  Cyclic GFR-binding peptide
SRVVMNEYQKYIVNSSDDIYLVSIPS

SEQ ID NO: 61637 - protein, 27 aa, Artificial Sequence
  Cyclic GFR-binding peptide
MEEYQKYVVKDYEDIYLMSIPSLETPV

SEQ ID NO: 61638 - protein, 31 aa, Artificial Sequence
  Cyclic GFR-binding peptide
  MOD_RES (2)..(2): Xaa is C or S
GXGEVVMDEYKFKVVKENEDLYLMSIPELET

SEQ ID NO: 61639 - protein, 26 aa, Artificial Sequence
  Cyclic GFR-binding peptide
ARVVMNEYQKYIVNSSDDIYLVSIPS

SEQ ID NO: 61640 - protein, 31 aa, Artificial Sequence
  Cyclic GFR-binding peptide
  MOD_RES (1)..(3): Xaa is C or S
XKXSKVIMEYKFKIKPTKGILYLISIPELDQ

SEQ ID NO: 61641 - protein, 30 aa, Artificial Sequence
  Cyclic GFR-binding peptide
AEVVMDEYKFKVVNNAADLYLISIPELRAP

SEQ ID NO: 61642 - protein, 29 aa, Artificial Sequence
  Cyclic GFR-binding peptide
  MOD_RES (1)..(1): Xaa is C or S
XSRVIMEYKFKVKPKRGVLYLISIPELAQ

SEQ ID NO: 61643 - protein, 27 aa, Artificial Sequence
  Cyclic GFR-binding peptide
VMDYHYKLVVNNAADKYLISIPSLRAP

SEQ ID NO: 61644 - protein, 28 aa, Artificial Sequence
  Cyclic GFR-binding peptide
SRVIMEYKFKVKPKRGVLYLISIPELAQ

SEQ ID NO: 61645 - protein, 30 aa, Artificial Sequence
  Cyclic GFR-binding peptide
  MOD_RES (1)..(3): Xaa is C or S
XGXAEVVMDEYKFKVVNNAADLYLISIPEL

SEQ ID NO: 61646 - protein, 29 aa, Artificial Sequence
  Cyclic GFR-binding peptide
  MOD_RES (28)..(29): Xaa is C or S
MNEYQKYIVNSSDDIYLVSIPSLKTPAXX

SEQ ID NO: 61647 - protein, 33 aa, Artificial Sequence
  Cyclic GFR-binding peptide
  MOD_RES (2)..(4): Xaa is C or S
HXGXSRVVMNEYQKYIVNSSDDIYLVSIPSLKT

SEQ ID NO: 61648 - protein, 31 aa, Artificial Sequence; identical to SEQ ID NO: 16934
  Cyclic GFR-binding peptide
  MOD_RES (31)..(31): Xaa is C or S

SEQ ID NO: 61649 - protein, 20 aa, Artificial Sequence
  Cyclic GFR-binding peptide
YHYKLVVNNAADKYLISIPS

SEQ ID NO: 61650 - protein, 30 aa, Artificial Sequence
  Cyclic GFR-binding peptide
  MOD_RES (30)..(30): Xaa is C or S
RVIMEYKFKVKPKRGVLYLISIPELAQPVX

SEQ ID NO: 61651 - protein, 33 aa, Artificial Sequence
  Cyclic GFR-binding peptide
  MOD_RES (32)..(33): Xaa is C or S
AVSMGEEYKFKTPVGMDDLYLVSIPELKTPVXX

SEQ ID NO: 61652 - protein, 31 aa, Artificial Sequence
  Cyclic GFR-binding peptide
  MOD_RES (30)..(31): Xaa is C or S
VVMNEYQKYIVNNSSDIYLVSIPSLKTPAXX

SEQ ID NO: 61653 - protein, 31 aa, Artificial Sequence
  Cyclic GFR-binding peptide
  MOD_RES (1)..(1): Xaa is C or S
XEAVSMGEEYKFKTPVGMDDLYLVSIPELKT

SEQ ID NO: 61654 - protein, 24 aa, Artificial Sequence
  Cyclic GFR-binding peptide
EYQKYIVNNSSDIYLVSIPSLKTP

SEQ ID NO: 61655 - protein, 32 aa, Artificial Sequence; identical to SEQ ID NO: 16944
  Cyclic GFR-binding peptide
  MOD_RES (31)..(32): Xaa is C or S

SEQ ID NO: 61656 - protein, 37 aa, Artificial Sequence; identical to SEQ ID NO: 16945
  Cyclic GFR-binding peptide
  MOD_RES (1)..(33)..(34): Xaa is C or S

SEQ ID NO: 61657 - protein, 34 aa, Artificial Sequence; identical to SEQ ID NO: 16946
  Cyclic GFR-binding peptide
  MOD_RES (2)..(34): Xaa is C or S

SEQ ID NO: 61658 - protein, 31 aa, Artificial Sequence
  Cyclic GFR-binding peptide
  MOD_RES (2)..(4): Xaa is C or S
RXGXGEVVMEEYQKYVVKDYEDIYLMSIPSL

SEQ ID NO: 61659 - protein, 36 aa, Artificial Sequence; identical to SEQ ID NO: 16948
  Cyclic GFR-binding peptide
  MOD_RES (1)..(3)..(35)..(36): Xaa is C or S

SEQ ID NO: 61660 - protein, 32 aa, Artificial Sequence
  Cyclic GFR-binding peptide
  MOD_RES (27)..(28): Xaa is C or S
NEYQKYIVNNSSDIYLVSIPSLKTPAXXAKPV

SEQ ID NO: 61661 - protein, 28 aa, Artificial Sequence
  Cyclic GFR-binding peptide
  MOD_RES (2)..(2): Xaa is C or S
GXAEVVMDEYKFKVVNNAADLYLISIPE

SEQ ID NO: 61662 - protein, 36 aa, Artificial Sequence; identical to SEQ ID NO: 16949
  Cyclic GFR-binding peptide
  MOD_RES (1)..(33)..(34): Xaa is C or S

SEQ ID NO: 61663 - protein, 42 aa, Artificial Sequence; identical to SEQ ID NO: 16950
  Cyclic GFR-binding peptide
  MOD_RES (2)..(4)..(36)..(37): Xaa is C or S

SEQ ID NO: 61664 - protein, 32 aa, Artificial Sequence
  Cyclic GFR-binding peptide
  MOD_RES (26)..(27): Xaa is C or S
RYKKLVVNNAADFYLISIANLRAPVXXSAPAA

SEQ ID NO: 61665 - protein, 36 aa, Artificial Sequence; identical to SEQ ID NO: 16951
  Cyclic GFR-binding peptide
  MOD_RES (1)..(3)..(35)..(36): Xaa is C or S

SEQ ID NO: 61666 - protein, 29 aa, Artificial Sequence
  Cyclic GFR-binding peptide
  MOD_RES (1)..(1): Xaa is C or S
XSRVVMNEYQKYIVNSSDDIYLVSIPSLK

SEQ ID NO: 61667 - protein, 41 aa, Artificial Sequence; identical to SEQ ID NO: 16953
  Cyclic GFR-binding peptide
  MOD_RES (1)..(3)..(35)..(36): Xaa is C or S

SEQ ID NO: 61668 - protein, 31 aa, Artificial Sequence
  Cyclic GFR-binding peptide
  MOD_RES (2)..(2): Xaa is C or S
GXESVAMGYHYKLYTVVGKDKYLISIPSLKT

SEQ ID NO: 61669 - protein, 29 aa, Artificial Sequence
  Cyclic GFR-binding peptide
  MOD_RES (1)..(3): Xaa is C or S
XGXSRVVMNEYQKYIVNSSDDIYLVSIPS

SEQ ID NO: 61670 - protein, 26 aa, Artificial Sequence
  Cyclic GFR-binding peptide
  MOD_RES (1)..(1): Xaa is C or S
XSKVVMEYQKYVKPTRGVIYLISIPS

SEQ ID NO: 61671 - protein, 36 aa, Artificial Sequence; identical to SEQ ID NO: 16955
  Cyclic GFR-binding peptide
  MOD_RES (1)..(33)..(34): Xaa is C or S

SEQ ID NO: 61672 - protein, 28 aa, Artificial Sequence
  Cyclic GFR-binding peptide
  MOD_RES (1)..(1): Xaa is C or S
XAEVVMDEYKFKVVNNAADLYLISIPEL

SEQ ID NO: 61673 - protein, 33 aa, Artificial Sequence; identical to SEQ ID NO: 16956
  Cyclic GFR-binding peptide
  MOD_RES (32)..(33): Xaa is C or S

SEQ ID NO: 61674 - protein, 24 aa, Artificial Sequence
  Cyclic GFR-binding peptide
EYQKYVKPKRGVIYLISIPSLAQP

SEQ ID NO: 61675 - protein, 33 aa, Artificial Sequence
  Cyclic GFR-binding peptide
  MOD_RES (1)..(3): Xaa is C or S
XGXAKVVMNEYQKYIVNNSSDIYLVSIPSLKTP

SEQ ID NO: 61676 - protein, 34 aa, Artificial Sequence
  Cyclic GFR-binding peptide
  MOD_RES (30)..(31): Xaa is C or S
KVIMEYQKYIKPTKGIIYLISIPSLDQSVXXPSA

SEQ ID NO: 61677 - protein, 24 aa, Artificial Sequence
  Cyclic GFR-binding peptide
VVMDRYKKLVVNNAADFYLISIAN

SEQ ID NO: 61678 - protein, 31 aa, Artificial Sequence
  Cyclic GFR-binding peptide
  MOD_RES (2)..(2): Xaa is C or S
GXESVAMGEYQKYYTVVGKDIYLISIPSLKT

SEQ ID NO: 61679 - protein, 34 aa, Artificial Sequence; identical to SEQ ID NO: 16964
  Cyclic GFR-binding peptide
  MOD_RES (1)..(3): Xaa is C or S

SEQ ID NO: 61680 - protein, 24 aa, Artificial Sequence
  Cyclic GFR-binding peptide
EYKFKVVKDYEDLYLMSIPELETP

SEQ ID NO: 61681 - protein, 37 aa, Artificial Sequence; identical to SEQ ID NO: 16967
  Cyclic GFR-binding peptide
  MOD_RES (2)..(4)..(35)..(36): Xaa is C or S

SEQ ID NO: 61682 - protein, 36 aa, Artificial Sequence; identical to SEQ ID NO: 16968
  Cyclic GFR-binding peptide
  MOD_RES (32)..(33): Xaa is C or S

SEQ ID NO: 61683 - protein, 32 aa, Artificial Sequence; identical to SEQ ID NO: 16972
  Cyclic GFR-binding peptide
  MOD_RES (1)..(32): Xaa is C or S

SEQ ID NO: 61684 - protein, 37 aa, Artificial Sequence; identical to SEQ ID NO: 16974
  Cyclic GFR-binding peptide
  MOD_RES (2)..(34)..(35): Xaa is C or S

SEQ ID NO: 61685 - protein, 33 aa, Artificial Sequence; identical to SEQ ID NO: 16975
  Cyclic GFR-binding peptide
  MOD_RES (2)..(33): Xaa is C or S

SEQ ID NO: 61686 - protein, 31 aa, Artificial Sequence
  Cyclic GFR-binding peptide
  MOD_RES (2)..(4): Xaa is C or S
RXGXGEVVMEEYKFKVVKDYEDLYLMSIPEL

SEQ ID NO: 61687 - protein, 30 aa, Artificial Sequence
  Cyclic GFR-binding peptide
  MOD_RES (27)..(28): Xaa is C or S
DEYKFKVVKENEDLYLMSIPELETPVXXAK

SEQ ID NO: 61688 - protein, 22 aa, Artificial Sequence
  Cyclic GFR-binding peptide
EYKFKVVKENEDLYLMSIPELE

SEQ ID NO: 61689 - protein, 25 aa, Artificial Sequence
  Cyclic GFR-binding peptide
MEYKFKIKPTKGILYLISIPELDQS

SEQ ID NO: 61690 - protein, 27 aa, Artificial Sequence
  Cyclic GFR-binding peptide
AVSMGEEYQKYTPVGMDDIYLVSIPSL

SEQ ID NO: 61691 - protein, 28 aa, Artificial Sequence
  Cyclic GFR-binding peptide
  MOD_RES (28)..(28): Xaa is C or S
MDYHYKLVVNNAADKYLISIPSLRAPVX

SEQ ID NO: 61692 - protein, 30 aa, Artificial Sequence; identical to SEQ ID NO: 1945
  Cyclic GFR-binding peptide

SEQ ID NO: 61693 - protein, 32 aa, Artificial Sequence
  Cyclic GFR-binding peptide
  MOD_RES (30)..(31): Xaa is C or S
KVVMEYQKYVKPTRGVIYLISIPSLDQPVXXP

SEQ ID NO: 61694 - protein, 27 aa, Artificial Sequence
  Cyclic GFR-binding peptide
VMNEYKFKIVNSSDDLYLVSIPELQTP

SEQ ID NO: 61695 - protein, 33 aa, Artificial Sequence
  Cyclic GFR-binding peptide
  MOD_RES (29)..(30): Xaa is C or S
VIMEYQKYVKPKRGVIYLISIPSLAQPVXXPAA

SEQ ID NO: 61696 - protein, 31 aa, Artificial Sequence
  Cyclic GFR-binding peptide
  MOD_RES (1)..(3): Xaa is C or S
XKXSRVIMEYKFKVKPKRGVLYLISIPELAQ

SEQ ID NO: 61697 - protein, 35 aa, Artificial Sequence; identical to SEQ ID NO: 16981
  Cyclic GFR-binding peptide
  MOD_RES (31)..(32): Xaa is C or S

SEQ ID NO: 61698 - protein, 32 aa, Artificial Sequence
  Cyclic GFR-binding peptide
  MOD_RES (29)..(30): Xaa is C or S
VIMEYKFKVKPKRGVLYLISIPELAQPVXXPA

SEQ ID NO: 61699 - protein, 24 aa, Artificial Sequence
  Cyclic GFR-binding peptide
EEYKFKVVKDYEDLYLMSIPELET

SEQ ID NO: 61700 - protein, 29 aa, Artificial Sequence
  Cyclic GFR-binding peptide
SVAMGYHYKLYTVVGKDKYLISIPSLKTP

SEQ ID NO: 61701 - protein, 25 aa, Artificial Sequence
  Cyclic GFR-binding peptide
EVVMEEYQKYVVKDYEDIYLMSIPS

SEQ ID NO: 61702 - protein, 28 aa, Artificial Sequence
  Cyclic GFR-binding peptide
  MOD_RES (1)..(1): Xaa is C or S
XSRVIMEYQKYVKPKRGVIYLISIPSLA

SEQ ID NO: 61703 - protein, 30 aa, Artificial Sequence
  Cyclic GFR-binding peptide
  MOD_RES (28)..(29): Xaa is C or S
MDRYKKLVVNNAADFYLISIANLRAPVXXS

SEQ ID NO: 61704 - protein, 29 aa, Artificial Sequence
  Cyclic GFR-binding peptide
  MOD_RES (28)..(28): Xaa is C or S
MNEYQKYIVNSSDDIYLVSIPSLKTPAXT

SEQ ID NO: 61705 - protein, 30 aa, Artificial Sequence
  Cyclic GFR-binding peptide
  MOD_RES (29)..(30): Xaa is C or S
MGEEYKFKTPVGMDDLYLVSIPELKTPVXX

SEQ ID NO: 61706 - protein, 35 aa, Artificial Sequence; identical to SEQ ID NO: 16986
  Cyclic GFR-binding peptide
  MOD_RES (1)..(3)..(35): Xaa is C or S

SEQ ID NO: 61707 - protein, 30 aa, Artificial Sequence
  Cyclic GFR-binding peptide
  MOD_RES (26)..(27): Xaa is C or S
YHYKLYTVVGKDKYLISIPSLKTPVXXAKS

SEQ ID NO: 61708 - protein, 34 aa, Artificial Sequence; identical to SEQ ID NO: 16987
  Cyclic GFR-binding peptide
  MOD_RES (1)..(33)..(34): Xaa is C or S

SEQ ID NO: 61709 - protein, 31 aa, Artificial Sequence
  Cyclic GFR-binding peptide
  MOD_RES (29)..(30): Xaa is C or S
VVMEYKFKVKPTRGVLYLISIPELDQPVXXP

SEQ ID NO: 61710 - protein, 30 aa, Artificial Sequence
  Cyclic GFR-binding peptide
  MOD_RES (1)..(3): Xaa is C or S
XKXSKVVMEYKFKVKPTRGVLYLISIPELD

SEQ ID NO: 61711 - protein, 34 aa, Artificial Sequence
  Cyclic GFR-binding peptide
  MOD_RES (30)..(31): Xaa is C or S
RVIMEYQKYVKPKRGVIYLISIPSLAQPVXXPAA

SEQ ID NO: 61712 - protein, 34 aa, Artificial Sequence
  Cyclic GFR-binding peptide
  MOD_RES (2)..(4): Xaa is C or S
RXGXAEVVMDEYKFKVVNNAADLYLISIPELRAP

SEQ ID NO: 61713 - protein, 34 aa, Artificial Sequence
  Cyclic GFR-binding peptide
  MOD_RES (2)..(4): Xaa is C or S
HXGXARVVMNEYQKYIVNSSDDIYLVSIPSLQTP

SEQ ID NO: 61714 - protein, 29 aa, Artificial Sequence
  Cyclic GFR-binding peptide
  MOD_RES (28)..(28): Xaa is C or S
MNEYKFKIVNSSDDLYLVSIPELKTPAXT

SEQ ID NO: 61715 - protein, 38 aa, Artificial Sequence; identical to SEQ ID NO: 17002
  Cyclic GFR-binding peptide
  MOD_RES (32)..(33): Xaa is C or S

SEQ ID NO: 61716 - protein, 26 aa, Artificial Sequence
  Cyclic GFR-binding peptide
AEVVMDYHYKLVVNNAADKYLISIPS

SEQ ID NO: 61717 - protein, 27 aa, Artificial Sequence
  Cyclic GFR-binding peptide
  MOD_RES (27)..(27): Xaa is C or S
GYHYKLYTVVGKDKYLISIPSLKTPVX

SEQ ID NO: 61718 - protein, 41 aa, Artificial Sequence; identical to SEQ ID NO: 17004
  Cyclic GFR-binding peptide
  MOD_RES (1)..(3)..(35)..(36): Xaa is C or S

SEQ ID NO: 61719 - protein, 31 aa, Artificial Sequence
  Cyclic GFR-binding peptide
  MOD_RES (1)..(1): Xaa is C or S
XGEVVMEEYKFKVVKDYEDLYLMSIPELETP

SEQ ID NO: 61720 - protein, 34 aa, Artificial Sequence
  Cyclic GFR-binding peptide
  MOD_RES (32)..(33): Xaa is C or S
AVSMGEEYKFKTPVGMDDLYLVSIPELKTPVXXA

SEQ ID NO: 61721 - protein, 39 aa, Artificial Sequence; identical to SEQ ID NO: 17006
  Cyclic GFR-binding peptide
  MOD_RES (1)..(33)..(34): Xaa is C or S

SEQ ID NO: 61722 - protein, 42 aa, Artificial Sequence; identical to SEQ ID NO: 17007
  Cyclic GFR-binding peptide
  MOD_RES (2)..(4)..(36)..(37): Xaa is C or S

SEQ ID NO: 61723 - protein, 34 aa, Artificial Sequence
  Cyclic GFR-binding peptide
  MOD_RES (2)..(4): Xaa is C or S
RXGXGEVVMDEYQKYVVKENEDIYLMSIPSLETP

SEQ ID NO: 61724 - protein, 35 aa, Artificial Sequence; identical to SEQ ID NO: 17012
  Cyclic GFR-binding peptide
  MOD_RES (31)..(32): Xaa is C or S

SEQ ID NO: 61725 - protein, 31 aa, Artificial Sequence
  Cyclic GFR-binding peptide
  MOD_RES (26)..(27): Xaa is C or S
EYQKYIVNNSSDIYLVSIPSLKTPAXXAKPV

SEQ ID NO: 61726 - protein, 30 aa, Artificial Sequence
  Cyclic GFR-binding peptide
GEVVMDEYKFKVVKENEDLYLMSIPELETP

SEQ ID NO: 61727 - protein, 33 aa, Artificial Sequence; identical to SEQ ID NO: 17016
  Cyclic GFR-binding peptide
  MOD_RES (2)..(2): Xaa is C or S

SEQ ID NO: 61728 - protein, 33 aa, Artificial Sequence; identical to SEQ ID NO: 17017
  Cyclic GFR-binding peptide
  MOD_RES (31)..(32): Xaa is C or S

SEQ ID NO: 61729 - protein, 34 aa, Artificial Sequence; identical to SEQ ID NO: 17018
  Cyclic GFR-binding peptide
  MOD_RES (31)..(32): Xaa is C or S

SEQ ID NO: 61730 - protein, 28 aa, Artificial Sequence
  Cyclic GFR-binding peptide
VVMEEYQKYVVKDYEDIYLMSIPSLETP

SEQ ID NO: 61731 - protein, 26 aa, Artificial Sequence
  Cyclic GFR-binding peptide
EVVMEEYQKYVVKDYEDIYLMSIPSL

SEQ ID NO: 61732 - protein, 34 aa, Artificial Sequence
  Cyclic GFR-binding peptide
  MOD_RES (28)..(29): Xaa is C or S
MNEYQKYIVNSSDDIYLVSIPSLKTPAXXPKPVY

SEQ ID NO: 61733 - protein, 33 aa, Artificial Sequence
  Cyclic GFR-binding peptide
  MOD_RES (29)..(30): Xaa is C or S
VMNEYQKYIVNNSSDIYLVSIPSLKTPAXXAKP

SEQ ID NO: 61734 - protein, 25 aa, Artificial Sequence
  Cyclic GFR-binding peptide
VVMDRYKKLVVNNAADFYLISIANL

SEQ ID NO: 61735 - protein, 41 aa, Artificial Sequence; identical to SEQ ID NO: 17022
  Cyclic GFR-binding peptide
  MOD_RES (2)..(4)..(35)..(36): Xaa is C or S

SEQ ID NO: 61736 - protein, 27 aa, Artificial Sequence
  Cyclic GFR-binding peptide
  MOD_RES (26)..(27): Xaa is C or S
EYKFKIVNSSDDLYLVSIPELKTPAXX

SEQ ID NO: 61737 - protein, 33 aa, Artificial Sequence
  Cyclic GFR-binding peptide
  MOD_RES (28)..(29): Xaa is C or S
MNEYKFKIVNNSSDLYLVSIPELKTPAXXAKPV

SEQ ID NO: 61738 - protein, 29 aa, Artificial Sequence
  Cyclic GFR-binding peptide
  MOD_RES (2)..(2): Xaa is C or S
GXAKVVMNEYQKYIVNNSSDIYLVSIPSL

SEQ ID NO: 61739 - protein, 31 aa, Artificial Sequence
  Cyclic GFR-binding peptide
  MOD_RES (1)..(3): Xaa is C or S
XGXGEVVMEEYQKYVVKDYEDIYLMSIPSLE

SEQ ID NO: 61740 - protein, 38 aa, Artificial Sequence; identical to SEQ ID NO: 17026
  Cyclic GFR-binding peptide
  MOD_RES (2)..(4)..(36)..(37): Xaa is C or S

SEQ ID NO: 61741 - protein, 32 aa, Artificial Sequence; identical to SEQ ID NO: 17027
  Cyclic GFR-binding peptide
  MOD_RES (31)..(32): Xaa is C or S

SEQ ID NO: 61742 - protein, 21 aa, Artificial Sequence
  Cyclic GFR-binding peptide
NEYQKYIVNNSSDIYLVSIPS

SEQ ID NO: 61743 - protein, 30 aa, Artificial Sequence; identical to SEQ ID NO: 2007
  Cyclic GFR-binding peptide

SEQ ID NO: 61744 - protein, 37 aa, Artificial Sequence; identical to SEQ ID NO: 17033
  Cyclic GFR-binding peptide
  MOD_RES (1)..(33)..(34): Xaa is C or S

SEQ ID NO: 61745 - protein, 26 aa, Artificial Sequence
  Cyclic GFR-binding peptide
NEYKFKIVNNSSDLYLVSIPELKTPA

SEQ ID NO: 61746 - protein, 36 aa, Artificial Sequence
  Cyclic GFR-binding peptide
  MOD_RES (30)..(31): Xaa is C or S
VAMGEYQKYYTVVGKDIYLISIPSLKTPVXXAKSAK

SEQ ID NO: 61747 - protein, 36 aa, Artificial Sequence; identical to SEQ ID NO: 17040
  Cyclic GFR-binding peptide
  MOD_RES (1)..(33)..(34): Xaa is C or S

SEQ ID NO: 61748 - protein, 26 aa, Artificial Sequence
  Cyclic GFR-binding peptide
KVIMEYQKYIKPTKGIIYLISIPSLD

SEQ ID NO: 61749 - protein, 30 aa, Artificial Sequence
  Cyclic GFR-binding peptide
  MOD_RES (2)..(4): Xaa is C or S
SXKXSRVIMEYKFKVKPKRGVLYLISIPEL

SEQ ID NO: 61750 - protein, 30 aa, Artificial Sequence
  Cyclic GFR-binding peptide
  MOD_RES (28)..(29): Xaa is C or S
MNEYQKYIVNSSDDIYLVSIPSLQTPAXXP

SEQ ID NO: 61751 - protein, 32 aa, Artificial Sequence
  Cyclic GFR-binding peptide
  MOD_RES (28)..(28): Xaa is C or S
MNEYKFKIVNSSDDLYLVSIPELKTPAXTPKT

SEQ ID NO: 61752 - protein, 32 aa, Artificial Sequence
  Cyclic GFR-binding peptide
  MOD_RES (1)..(3): Xaa is C or S
XGXAKVVMNEYKFKIVNNSSDLYLVSIPELKT

SEQ ID NO: 61753 - protein, 31 aa, Artificial Sequence; identical to SEQ ID NO: 17043
  Cyclic GFR-binding peptide
  MOD_RES (31)..(31): Xaa is C or S

SEQ ID NO: 61754 - protein, 25 aa, Artificial Sequence
  Cyclic GFR-binding peptide
NEYQKYIVNSSDDIYLVSIPSLQTP

SEQ ID NO: 61755 - protein, 22 aa, Artificial Sequence
  Cyclic GFR-binding peptide
MEYKFKVKPTRGVLYLISIPEL

SEQ ID NO: 61756 - protein, 33 aa, Artificial Sequence
  Cyclic GFR-binding peptide
  MOD_RES (27)..(28): Xaa is C or S
DEYQKYVVKENEDIYLMSIPSLETPVXXAKPIK

SEQ ID NO: 61757 - protein, 29 aa, Artificial Sequence
  Cyclic GFR-binding peptide
  MOD_RES (26)..(27): Xaa is C or S
EYQKYIVNSSDDIYLVSIPSLKTPAXXPK

SEQ ID NO: 61758 - protein, 36 aa, Artificial Sequence; identical to SEQ ID NO: 17048
  Cyclic GFR-binding peptide
  MOD_RES (2)..(34)..(35): Xaa is C or S

SEQ ID NO: 61759 - protein, 32 aa, Artificial Sequence
  Cyclic GFR-binding peptide
  MOD_RES (1)..(1): Xaa is C or S
XEAVSMGEEYQKYTPVGMDDIYLVSIPSLKTP

SEQ ID NO: 61760 - protein, 27 aa, Artificial Sequence
  Cyclic GFR-binding peptide
AKVVMNEYKFKIVNNSSDLYLVSIPEL

SEQ ID NO: 61761 - protein, 35 aa, Artificial Sequence
  Cyclic GFR-binding peptide
  MOD_RES (31)..(32): Xaa is C or S
VSMGEEYKFKTPVGMDDLYLVSIPELKTPVXXAKG

SEQ ID NO: 61762 - protein, 24 aa, Artificial Sequence
  Cyclic GFR-binding peptide
IMEYQKYVKPKRGVIYLISIPSLA

SEQ ID NO: 61763 - protein, 33 aa, Artificial Sequence
  Cyclic GFR-binding peptide
  MOD_RES (1)..(3): Xaa is C or S
XGXGEVVMDEYKFKVVKENEDLYLMSIPELETP

SEQ ID NO: 61764 - protein, 29 aa, Artificial Sequence
  Cyclic GFR-binding peptide
  MOD_RES (27)..(28): Xaa is C or S
NEYKFKIVNNSSDLYLVSIPELKTPAXXA

SEQ ID NO: 61765 - protein, 22 aa, Artificial Sequence
  Cyclic GFR-binding peptide
EYKFKIVNNSSDLYLVSIPELK

SEQ ID NO: 61766 - protein, 24 aa, Artificial Sequence
  Cyclic GFR-binding peptide
IMEYKFKVKPKRGVLYLISIPELA

SEQ ID NO: 61767 - protein, 40 aa, Artificial Sequence; identical to SEQ ID NO: 17064
  Cyclic GFR-binding peptide
  MOD_RES (1)..(3)..(34)..(35): Xaa is C or S

SEQ ID NO: 61768 - protein, 31 aa, Artificial Sequence
  Cyclic GFR-binding peptide
  MOD_RES (27)..(28): Xaa is C or S
NEYQKYIVNSSDDIYLVSIPSLQTPAXXPKP

SEQ ID NO: 61769 - protein, 34 aa, Artificial Sequence
  Cyclic GFR-binding peptide
  MOD_RES (2)..(4): Xaa is C or S
RXGXESVAMGYHYKLYTVVGKDKYLISIPSLKTP

SEQ ID NO: 61770 - protein, 30 aa, Artificial Sequence; identical to SEQ ID NO: 17067
  Cyclic GFR-binding peptide

SEQ ID NO: 61771 - protein, 30 aa, Artificial Sequence
  Cyclic GFR-binding peptide
  MOD_RES (29)..(30): Xaa is C or S
VIMEYKFKIKPTKGILYLISIPELDQSVXX

SEQ ID NO: 61772 - protein, 30 aa, Artificial Sequence
  Cyclic GFR-binding peptide
  MOD_RES (28)..(29): Xaa is C or S
MNEYKFKIVNSSDDLYLVSIPELQTPAXXP

SEQ ID NO: 61773 - protein, 27 aa, Artificial Sequence
  Cyclic GFR-binding peptide
VVMDEYKFKVVNNAADLYLISIPELRA

SEQ ID NO: 61774 - protein, 36 aa, Artificial Sequence; identical to SEQ ID NO: 17069
  Cyclic GFR-binding peptide
  MOD_RES (1)..(3)..(35)..(36): Xaa is C or S

SEQ ID NO: 61775 - protein, 38 aa, Artificial Sequence; identical to SEQ ID NO: 17071
  Cyclic GFR-binding peptide
  MOD_RES (1)..(3)..(35)..(36): Xaa is C or S

SEQ ID NO: 61776 - protein, 25 aa, Artificial Sequence
  Cyclic GFR-binding peptide
EEYKFKTPVGMDDLYLVSIPELKTP

SEQ ID NO: 61777 - protein, 29 aa, Artificial Sequence
  Cyclic GFR-binding peptide
  MOD_RES (29)..(29): Xaa is C or S
VMDEYKFKVVNNAADLYLISIPELRAPVX

SEQ ID NO: 61778 - protein, 25 aa, Artificial Sequence
  Cyclic GFR-binding peptide
MEYQKYVKPKRGVIYLISIPSLAQP

SEQ ID NO: 61779 - protein, 28 aa, Artificial Sequence
  Cyclic GFR-binding peptide
  MOD_RES (1)..(3): Xaa is C or S
XKXSKVVMEYQKYVKPTRGVIYLISIPS

SEQ ID NO: 61780 - protein, 23 aa, Artificial Sequence
  Cyclic GFR-binding peptide
MDYHYKLVVNNAADKYLISIPSL

SEQ ID NO: 61781 - protein, 29 aa, Artificial Sequence
  Cyclic GFR-binding peptide
  MOD_RES (1)..(1): Xaa is C or S
XSKVIMEYKFKIKPTKGILYLISIPELDQ

SEQ ID NO: 61782 - protein, 34 aa, Artificial Sequence; identical to SEQ ID NO: 17079
  Cyclic GFR-binding peptide
  MOD_RES (32)..(33): Xaa is C or S

SEQ ID NO: 61783 - protein, 35 aa, Artificial Sequence; identical to SEQ ID NO: 17081
  Cyclic GFR-binding peptide
  MOD_RES (2)..(33)..(34): Xaa is C or S

SEQ ID NO: 61784 - protein, 25 aa, Artificial Sequence
  Cyclic GFR-binding peptide
VMDEYKFKVVNNAADLYLISIPELR

SEQ ID NO: 61785 - protein, 41 aa, Artificial Sequence; identical to SEQ ID NO: 17084
  Cyclic GFR-binding peptide
  MOD_RES (2)..(4)..(36)..(37): Xaa is C or S

SEQ ID NO: 61786 - protein, 31 aa, Artificial Sequence; identical to SEQ ID NO: 17086
  Cyclic GFR-binding peptide
  MOD_RES (31)..(31): Xaa is C or S

SEQ ID NO: 61787 - protein, 23 aa, Artificial Sequence
  Cyclic GFR-binding peptide
VMNEYKFKIVNNSSDLYLVSIPE

SEQ ID NO: 61788 - protein, 32 aa, Artificial Sequence
  Cyclic GFR-binding peptide
  MOD_RES (31)..(32): Xaa is C or S
VSMGEEYKFKTPVGMDDLYLVSIPELKTPVXX

SEQ ID NO: 61789 - protein, 24 aa, Artificial Sequence
  Cyclic GFR-binding peptide
MNEYKFKIVNSSDDLYLVSIPELK

SEQ ID NO: 61790 - protein, 33 aa, Artificial Sequence
  Cyclic GFR-binding peptide
  MOD_RES (28)..(29): Xaa is C or S
IMEYKFKVKPKRGVLYLISIPELAQPVXXPAAS

SEQ ID NO: 61791 - protein, 34 aa, Artificial Sequence; identical to SEQ ID NO: 17094
  Cyclic GFR-binding peptide
  MOD_RES (31)..(32): Xaa is C or S

SEQ ID NO: 61792 - protein, 38 aa, Artificial Sequence; identical to SEQ ID NO: 17095
  Cyclic GFR-binding peptide
  MOD_RES (2)..(4)..(35)..(36): Xaa is C or S

SEQ ID NO: 61793 - protein, 35 aa, Artificial Sequence; identical to SEQ ID NO: 17097
  Cyclic GFR-binding peptide
  MOD_RES (2)..(35): Xaa is C or S

SEQ ID NO: 61794 - protein, 43 aa, Artificial Sequence; identical to SEQ ID NO: 17099
  Cyclic GFR-binding peptide
  MOD_RES (2)..(4)..(37)..(38): Xaa is C or S

SEQ ID NO: 61795 - protein, 32 aa, Artificial Sequence
  Cyclic GFR-binding peptide
  MOD_RES (30)..(31): Xaa is C or S
SMGEEYKFKTPVGMDDLYLVSIPELKTPVXXA

SEQ ID NO: 61796 - protein, 40 aa, Artificial Sequence; identical to SEQ ID NO: 17101
  Cyclic GFR-binding peptide
  MOD_RES (2)..(34)..(35): Xaa is C or S

SEQ ID NO: 61797 - protein, 26 aa, Artificial Sequence
  Cyclic GFR-binding peptide
  MOD_RES (26)..(26): Xaa is C or S
EYKFKTPVGMDDLYLVSIPELKTPVX

SEQ ID NO: 61798 - protein, 26 aa, Artificial Sequence
  Cyclic GFR-binding peptide
  MOD_RES (26)..(26): Xaa is C or S
EYKFKVKPTRGVLYLISIPELDQPVX

SEQ ID NO: 61799 - protein, 32 aa, Artificial Sequence
  Cyclic GFR-binding peptide
  MOD_RES (2)..(4): Xaa is C or S
RXGXGEVVMEEYKFKVVKDYEDLYLMSIPELE

SEQ ID NO: 61800 - protein, 29 aa, Artificial Sequence
  Cyclic GFR-binding peptide
  MOD_RES (29)..(29): Xaa is C or S
VIMEYQKYVKPKRGVIYLISIPSLAQPVX

SEQ ID NO: 61801 - protein, 34 aa, Artificial Sequence
  Cyclic GFR-binding peptide
  MOD_RES (28)..(29): Xaa is C or S
MNEYKFKIVNSSDDLYLVSIPELKTPAXXPKPVY

SEQ ID NO: 61802 - protein, 40 aa, Artificial Sequence; identical to SEQ ID NO: 17111
  Cyclic GFR-binding peptide
  MOD_RES (1)..(3)..(35)..(36): Xaa is C or S

SEQ ID NO: 61803 - protein, 32 aa, Artificial Sequence
  Cyclic GFR-binding peptide
  MOD_RES (27)..(28): Xaa is C or S
GYHYKLYTVVGKDKYLISIPSLKTPVXXAKSA

SEQ ID NO: 61804 - protein, 30 aa, Artificial Sequence
  Cyclic GFR-binding peptide
  MOD_RES (28)..(29): Xaa is C or S
IMEYQKYIKPTKGIIYLISIPSLDQSVXXP

SEQ ID NO: 61805 - protein, 34 aa, Artificial Sequence
  Cyclic GFR-binding peptide
  MOD_RES (29)..(30): Xaa is C or S
MGEEYKFKTPVGMDDLYLVSIPELKTPVXXAKGV

SEQ ID NO: 61806 - protein, 31 aa, Artificial Sequence
  Cyclic GFR-binding peptide
  MOD_RES (27)..(28): Xaa is C or S
EEYQKYVVKDYEDIYLMSIPSLETPVXXAKP

SEQ ID NO: 61807 - protein, 33 aa, Artificial Sequence
  Cyclic GFR-binding peptide
  MOD_RES (28)..(29): Xaa is C or S
MNEYQKYIVNNSSDIYLVSIPSLKTPAXXAKPV

SEQ ID NO: 61808 - protein, 28 aa, Artificial Sequence
  Cyclic GFR-binding peptide
AEVVMDRYKKLVVNNAADFYLISIANLR

SEQ ID NO: 61809 - protein, 28 aa, Artificial Sequence
  Cyclic GFR-binding peptide
  MOD_RES (26)..(27): Xaa is C or S
EYQKYVKPTRGVIYLISIPSLDQPVXXP

SEQ ID NO: 61810 - protein, 29 aa, Artificial Sequence
  Cyclic GFR-binding peptide
  MOD_RES (26)..(27): Xaa is C or S
EYKFKIKPTKGILYLISIPELDQSVXXPS

SEQ ID NO: 61811 - protein, 35 aa, Artificial Sequence; identical to SEQ ID NO: 17122
  Cyclic GFR-binding peptide
  MOD_RES (31)..(32): Xaa is C or S

SEQ ID NO: 61812 - protein, 26 aa, Artificial Sequence
  Cyclic GFR-binding peptide
GEVVMDEYKFKVVKENEDLYLMSIPE

SEQ ID NO: 61813 - protein, 31 aa, Artificial Sequence; identical to SEQ ID NO: 17124
  Cyclic GFR-binding peptide
  MOD_RES (31)..(31): Xaa is C or S

SEQ ID NO: 61814 - protein, 34 aa, Artificial Sequence; identical to SEQ ID NO: 17126
  Cyclic GFR-binding peptide
  MOD_RES (31)..(31): Xaa is C or S

SEQ ID NO: 61815 - protein, 33 aa, Artificial Sequence; identical to SEQ ID NO: 17128
  Cyclic GFR-binding peptide
  MOD_RES (32)..(33): Xaa is C or S

SEQ ID NO: 61816 - protein, 37 aa, Artificial Sequence; identical to SEQ ID NO: 17129
  Cyclic GFR-binding peptide
  MOD_RES (32)..(33): Xaa is C or S

SEQ ID NO: 61817 - protein, 29 aa, Artificial Sequence
  Cyclic GFR-binding peptide
  MOD_RES (2)..(2): Xaa is C or S
GXGEVVMEEYQKYVVKDYEDIYLMSIPSL

SEQ ID NO: 61818 - protein, 30 aa, Artificial Sequence
  Cyclic GFR-binding peptide
  MOD_RES (2)..(4): Xaa is C or S
RXGXAEVVMDRYKKLVVNNAADFYLISIAN

SEQ ID NO: 61819 - protein, 37 aa, Artificial Sequence; identical to SEQ ID NO: 17130
  Cyclic GFR-binding peptide
  MOD_RES (2)..(4)..(36)..(37): Xaa is C or S

SEQ ID NO: 61820 - protein, 38 aa, Artificial Sequence; identical to SEQ ID NO: 17132
  Cyclic GFR-binding peptide
  MOD_RES (32)..(33): Xaa is C or S

SEQ ID NO: 61821 - protein, 41 aa, Artificial Sequence; identical to SEQ ID NO: 17135
  Cyclic GFR-binding peptide
  MOD_RES (2)..(4)..(36): Xaa is C or S

SEQ ID NO: 61822 - protein, 29 aa, Artificial Sequence
  Cyclic GFR-binding peptide
  MOD_RES (1)..(3): Xaa is C or S
XGXAEVVMDRYKKLVVNNAADFYLISIAN

SEQ ID NO: 61823 - protein, 31 aa, Artificial Sequence
  Cyclic GFR-binding peptide
  MOD_RES (26)..(27): Xaa is C or S
EYQKYIVNSSDDIYLVSIPSLQTPAXXPKPV

SEQ ID NO: 61824 - protein, 30 aa, Artificial Sequence
  Cyclic GFR-binding peptide
  MOD_RES (29)..(30): Xaa is C or S
VMNEYQKYIVNSSDDIYLVSIPSLKTPAXX

SEQ ID NO: 61825 - protein, 20 aa, Artificial Sequence
  Cyclic GFR-binding peptide
EYQKYIVNNSSDIYLVSIPS

SEQ ID NO: 61826 - protein, 34 aa, Artificial Sequence; identical to SEQ ID NO: 17139
  Cyclic GFR-binding peptide
  MOD_RES (1)..(3): Xaa is C or S

SEQ ID NO: 61827 - protein, 31 aa, Artificial Sequence
  Cyclic GFR-binding peptide
  MOD_RES (2)..(4): Xaa is C or S
RXGXEAVSMGEEYKFKTPVGMDDLYLVSIPE

SEQ ID NO: 61828 - protein, 24 aa, Artificial Sequence
  Cyclic GFR-binding peptide
SMGEEYQKYTPVGMDDIYLVSIPS

SEQ ID NO: 61829 - protein, 38 aa, Artificial Sequence; identical to SEQ ID NO: 17141
  Cyclic GFR-binding peptide
  MOD_RES (2)..(34)..(35): Xaa is C or S

SEQ ID NO: 61830 - protein, 32 aa, Artificial Sequence; identical to SEQ ID NO: 17142
  Cyclic GFR-binding peptide
  MOD_RES (31)..(32): Xaa is C or S

SEQ ID NO: 61831 - protein, 23 aa, Artificial Sequence
  Cyclic GFR-binding peptide
VMEYQKYVKPTRGVIYLISIPSL

SEQ ID NO: 61832 - protein, 24 aa, Artificial Sequence
  Cyclic GFR-binding peptide
VVMNEYQKYIVNNSSDIYLVSIPS

SEQ ID NO: 61833 - protein, 22 aa, Artificial Sequence
  Cyclic GFR-binding peptide
EYQKYVKPKRGVIYLISIPSLA

SEQ ID NO: 61834 - protein, 34 aa, Artificial Sequence; identical to SEQ ID NO: 17146
  Cyclic GFR-binding peptide
  MOD_RES (1)..(3)..(34): Xaa is C or S

SEQ ID NO: 61835 - protein, 30 aa, Artificial Sequence
  Cyclic GFR-binding peptide
  MOD_RES (26)..(27): Xaa is C or S
RYKKLYTVVGKDFYLISIANLKTPVXXAKS

SEQ ID NO: 61836 - protein, 40 aa, Artificial Sequence; identical to SEQ ID NO: 17147
  Cyclic GFR-binding peptide
  MOD_RES (2)..(4)..(35)..(36): Xaa is C or S

SEQ ID NO: 61837 - protein, 21 aa, Artificial Sequence
  Cyclic GFR-binding peptide
EYKFKIVNSSDDLYLVSIPEL

SEQ ID NO: 61838 - protein, 39 aa, Artificial Sequence; identical to SEQ ID NO: 17149
  Cyclic GFR-binding peptide
  MOD_RES (2)..(4)..(36)..(37): Xaa is C or S

SEQ ID NO: 61839 - protein, 29 aa, Artificial Sequence
  Cyclic GFR-binding peptide
EVVMDEYKFKVVNNAADLYLISIPELRAP

SEQ ID NO: 61840 - protein, 32 aa, Artificial Sequence
  Cyclic GFR-binding peptide
  MOD_RES (29)..(30): Xaa is C or S
AMGEYQKYYTVVGKDIYLISIPSLKTPVXXAK

SEQ ID NO: 61841 - protein, 28 aa, Artificial Sequence
  Cyclic GFR-binding peptide
EVVMDEYKFKVVNNAADLYLISIPELRA

SEQ ID NO: 61842 - protein, 27 aa, Artificial Sequence
  Cyclic GFR-binding peptide
  MOD_RES (26)..(27): Xaa is C or S
EYQKYVVKENEDIYLMSIPSLETPVXX

SEQ ID NO: 61843 - protein, 29 aa, Artificial Sequence
  Cyclic GFR-binding peptide
  MOD_RES (2)..(2): Xaa is C or S
GXAEVVMDRYKKLVVNNAADFYLISIANL

SEQ ID NO: 61844 - protein, 36 aa, Artificial Sequence
  Cyclic GFR-binding peptide
  MOD_RES (30)..(31): Xaa is C or S
KVVMEYQKYVKPTRGVIYLISIPSLDQPVXXPSASA

SEQ ID NO: 61845 - protein, 36 aa, Artificial Sequence
  Cyclic GFR-binding peptide
  MOD_RES (30)..(31): Xaa is C or S
VAMGYHYKLYTVVGKDKYLISIPSLKTPVXXAKSAK

SEQ ID NO: 61846 - protein, 27 aa, Artificial Sequence
  Cyclic GFR-binding peptide
  MOD_RES (1)..(1): Xaa is C or S
XGEVVMDEYKFKVVKENEDLYLMSIPE

SEQ ID NO: 61847 - protein, 41 aa, Artificial Sequence; identical to SEQ ID NO: 17158
  Cyclic GFR-binding peptide
  MOD_RES (2)..(4)..(35)..(36): Xaa is C or S

SEQ ID NO: 61848 - protein, 34 aa, Artificial Sequence; identical to SEQ ID NO: 17159
  Cyclic GFR-binding peptide
  MOD_RES (32)..(33): Xaa is C or S

SEQ ID NO: 61849 - protein, 35 aa, Artificial Sequence
  Cyclic GFR-binding peptide
  MOD_RES (30)..(31): Xaa is C or S
VVMDYHYKLVVNNAADKYLISIPSLRAPVXXSAPA

SEQ ID NO: 61850 - protein, 37 aa, Artificial Sequence; identical to SEQ ID NO: 17163
  Cyclic GFR-binding peptide
  MOD_RES (32)..(33): Xaa is C or S

SEQ ID NO: 61851 - protein, 40 aa, Artificial Sequence; identical to SEQ ID NO: 17164
  Cyclic GFR-binding peptide
  MOD_RES (2)..(4)..(36)..(37): Xaa is C or S

SEQ ID NO: 61852 - protein, 28 aa, Artificial Sequence
  Cyclic GFR-binding peptide
EVVMEEYKFKVVKDYEDLYLMSIPELET

SEQ ID NO: 61853 - protein, 30 aa, Artificial Sequence
  Cyclic GFR-binding peptide
  MOD_RES (27)..(28): Xaa is C or S
DYHYKLVVNNAADKYLISIPSLRAPVXXSA

SEQ ID NO: 61854 - protein, 26 aa, Artificial Sequence
  Cyclic GFR-binding peptide
VVMDYHYKLVVNNAADKYLISIPSLR

SEQ ID NO: 61855 - protein, 35 aa, Artificial Sequence; identical to SEQ ID NO: 17172
  Cyclic GFR-binding peptide
  MOD_RES (2)..(34)..(35): Xaa is C or S

SEQ ID NO: 61856 - protein, 34 aa, Artificial Sequence; identical to SEQ ID NO: 17173
  Cyclic GFR-binding peptide
  MOD_RES (1)..(33)..(34): Xaa is C or S

SEQ ID NO: 61857 - protein, 33 aa, Artificial Sequence
  Cyclic GFR-binding peptide
  MOD_RES (1)..(3): Xaa is C or S
XGXAEVVMDRYKKLVVNNAADFYLISIANLRAP

SEQ ID NO: 61858 - protein, 29 aa, Artificial Sequence
  Cyclic GFR-binding peptide
  MOD_RES (1)..(1): Xaa is C or S
XSKVVMEYQKYVKPTRGVIYLISIPSLDQ

SEQ ID NO: 61859 - protein, 27 aa, Artificial Sequence
  Cyclic GFR-binding peptide
  MOD_RES (1)..(1): Xaa is C or S
XESVAMGYHYKLYTVVGKDKYLISIPS

SEQ ID NO: 61860 - protein, 31 aa, Artificial Sequence
  Cyclic GFR-binding peptide
  MOD_RES (29)..(30): Xaa is C or S
VMDRYKKLVVNNAADFYLISIANLRAPVXXS

SEQ ID NO: 61861 - protein, 36 aa, Artificial Sequence; identical to SEQ ID NO: 17179
  Cyclic GFR-binding peptide
  MOD_RES (31)..(32): Xaa is C or S

SEQ ID NO: 61862 - protein, 25 aa, Artificial Sequence
  Cyclic GFR-binding peptide
EYQKYYTVVGKDIYLISIPSLKTPV

SEQ ID NO: 61863 - protein, 27 aa, Artificial Sequence
  Cyclic GFR-binding peptide
  MOD_RES (27)..(27): Xaa is C or S
NEYKFKIVNNSSDLYLVSIPELKTPAX

SEQ ID NO: 61864 - protein, 38 aa, Artificial Sequence; identical to SEQ ID NO: 17187
  Cyclic GFR-binding peptide
  MOD_RES (1)..(3)..(35)..(36): Xaa is C or S

SEQ ID NO: 61865 - protein, 36 aa, Artificial Sequence; identical to SEQ ID NO: 17188
  Cyclic GFR-binding peptide
  MOD_RES (2)..(33)..(34): Xaa is C or S

SEQ ID NO: 61866 - protein, 32 aa, Artificial Sequence
  Cyclic GFR-binding peptide
  MOD_RES (2)..(2): Xaa is C or S
GXAKVVMNEYQKYIVNNSSDIYLVSIPSLKTP

SEQ ID NO: 61867 - protein, 26 aa, Artificial Sequence
  Cyclic GFR-binding peptide
MGRYKKLYTVVGKDFYLISIANLKTP

SEQ ID NO: 61868 - protein, 38 aa, Artificial Sequence; identical to SEQ ID NO: 17190
  Cyclic GFR-binding peptide
  MOD_RES (2)..(4)..(36)..(37): Xaa is C or S

SEQ ID NO: 61869 - protein, 39 aa, Artificial Sequence; identical to SEQ ID NO: 17195
  Cyclic GFR-binding peptide
  MOD_RES (1)..(3)..(35)..(36): Xaa is C or S

SEQ ID NO: 61870 - protein, 23 aa, Artificial Sequence
  Cyclic GFR-binding peptide
DRYKKLVVNNAADFYLISIANLR

SEQ ID NO: 61871 - protein, 23 aa, Artificial Sequence
  Cyclic GFR-binding peptide
EYQKYVVKDYEDIYLMSIPSLET

SEQ ID NO: 61872 - protein, 28 aa, Artificial Sequence
  Cyclic GFR-binding peptide
RVVMNEYQKYIVNSSDDIYLVSIPSLKT

SEQ ID NO: 61873 - protein, 24 aa, Artificial Sequence
  Cyclic GFR-binding peptide
EYQKYVVKENEDIYLMSIPSLETP

SEQ ID NO: 61874 - protein, 24 aa, Artificial Sequence
  Cyclic GFR-binding peptide
MEYKFKIKPTKGILYLISIPELDQ

SEQ ID NO: 61875 - protein, 33 aa, Artificial Sequence; identical to SEQ ID NO: 17204
  Cyclic GFR-binding peptide
  MOD_RES (1)..(3): Xaa is C or S

SEQ ID NO: 61876 - protein, 26 aa, Artificial Sequence
  Cyclic GFR-binding peptide
VVMEYKFKVKPTRGVLYLISIPELDQ

SEQ ID NO: 61877 - protein, 36 aa, Artificial Sequence; identical to SEQ ID NO: 17205
  Cyclic GFR-binding peptide
  MOD_RES (31)..(32): Xaa is C or S

SEQ ID NO: 61878 - protein, 38 aa, Artificial Sequence; identical to SEQ ID NO: 17206
  Cyclic GFR-binding peptide
  MOD_RES (1)..(33)..(34): Xaa is C or S

SEQ ID NO: 61879 - protein, 27 aa, Artificial Sequence
  Cyclic GFR-binding peptide
KVVMNEYKFKIVNNSSDLYLVSIPELK

SEQ ID NO: 61880 - protein, 41 aa, Artificial Sequence; identical to SEQ ID NO: 17209
  Cyclic GFR-binding peptide
  MOD_RES (2)..(4)..(36)..(37): Xaa is C or S

SEQ ID NO: 61881 - protein, 35 aa, Artificial Sequence; identical to SEQ ID NO: 17211
  Cyclic GFR-binding peptide
  MOD_RES (1)..(32)..(33): Xaa is C or S

SEQ ID NO: 61882 - protein, 33 aa, Artificial Sequence
  Cyclic GFR-binding peptide
  MOD_RES (28)..(29): Xaa is C or S
MNEYQKYIVNSSDDIYLVSIPSLQTPAXXPKPV

SEQ ID NO: 61883 - protein, 32 aa, Artificial Sequence
  Cyclic GFR-binding peptide
  MOD_RES (28)..(29): Xaa is C or S
GEEYKFKTPVGMDDLYLVSIPELKTPVXXAKG

SEQ ID NO: 61884 - protein, 32 aa, Artificial Sequence
  Cyclic GFR-binding peptide
  MOD_RES (2)..(2): Xaa is C or S
GXESVAMGRYKKLYTVVGKDFYLISIANLKTP

SEQ ID NO: 61885 - protein, 39 aa, Artificial Sequence; identical to SEQ ID NO: 17218
  Cyclic GFR-binding peptide
  MOD_RES (2)..(34)..(35): Xaa is C or S

SEQ ID NO: 61886 - protein, 28 aa, Artificial Sequence
  Cyclic GFR-binding peptide
AMGEYQKYYTVVGKDIYLISIPSLKTPV

SEQ ID NO: 61887 - protein, 29 aa, Artificial Sequence
  Cyclic GFR-binding peptide
RVVMNEYQKYIVNSSDDIYLVSIPSLKTP

SEQ ID NO: 61888 - protein, 27 aa, Artificial Sequence
  Cyclic GFR-binding peptide
  MOD_RES (27)..(27): Xaa is C or S
DEYKFKVVNNAADLYLISIPELRAPVX

SEQ ID NO: 61889 - protein, 21 aa, Artificial Sequence
  Cyclic GFR-binding peptide
EYQKYVVKDYEDIYLMSIPSL

SEQ ID NO: 61890 - protein, 29 aa, Artificial Sequence
  Cyclic GFR-binding peptide
  MOD_RES (27)..(28): Xaa is C or S
DEYKFKVVKENEDLYLMSIPELETPVXXA

SEQ ID NO: 61891 - protein, 31 aa, Artificial Sequence
  Cyclic GFR-binding peptide
  MOD_RES (30)..(31): Xaa is C or S
KVIMEYQKYIKPTKGIIYLISIPSLDQSVXX

SEQ ID NO: 61892 - protein, 29 aa, Artificial Sequence
  Cyclic GFR-binding peptide
ARVVMNEYQKYIVNSSDDIYLVSIPSLQT

SEQ ID NO: 61893 - protein, 35 aa, Artificial Sequence; identical to SEQ ID NO: 17230
  Cyclic GFR-binding peptide
  MOD_RES (2)..(34)..(35): Xaa is C or S

SEQ ID NO: 61894 - protein, 25 aa, Artificial Sequence
  Cyclic GFR-binding peptide
EYKFKVKPTRGVLYLISIPELDQPV

SEQ ID NO: 61895 - protein, 26 aa, Artificial Sequence
  Cyclic GFR-binding peptide
VMDRYKKLVVNNAADFYLISIANLRA

SEQ ID NO: 61896 - protein, 29 aa, Artificial Sequence
  Cyclic GFR-binding peptide
  MOD_RES (28)..(29): Xaa is C or S
MDEYKFKVVKENEDLYLMSIPELETPVXX

SEQ ID NO: 61897 - protein, 35 aa, Artificial Sequence
  Cyclic GFR-binding peptide
  MOD_RES (29)..(30): Xaa is C or S
VIMEYKFKVKPKRGVLYLISIPELAQPVXXPAASA

SEQ ID NO: 61898 - protein, 33 aa, Artificial Sequence
  Cyclic GFR-binding peptide
  MOD_RES (2)..(4): Xaa is C or S
HXGXAKVVMNEYQKYIVNNSSDIYLVSIPSLKT

SEQ ID NO: 61899 - protein, 31 aa, Artificial Sequence
  Cyclic GFR-binding peptide
EAVSMGEEYQKYTPVGMDDIYLVSIPSLKTP

SEQ ID NO: 61900 - protein, 32 aa, Artificial Sequence
  Cyclic GFR-binding peptide
  MOD_RES (1)..(3): Xaa is C or S
XKXSKVVMEYQKYVKPTRGVIYLISIPSLDQP

SEQ ID NO: 61901 - protein, 23 aa, Artificial Sequence
  Cyclic GFR-binding peptide
VMEYKFKVKPTRGVLYLISIPEL

SEQ ID NO: 61902 - protein, 33 aa, Artificial Sequence
  Cyclic GFR-binding peptide
  MOD_RES (28)..(29): Xaa is C or S
MNEYKFKIVNSSDDLYLVSIPELQTPAXXPKPV

SEQ ID NO: 61903 - protein, 33 aa, Artificial Sequence
  Cyclic GFR-binding peptide
  MOD_RES (29)..(30): Xaa is C or S
VMDEYQKYVVKENEDIYLMSIPSLETPVXXAKP

SEQ ID NO: 61904 - protein, 25 aa, Artificial Sequence
  Cyclic GFR-binding peptide
KVVMNEYQKYIVNNSSDIYLVSIPS

SEQ ID NO: 61905 - protein, 36 aa, Artificial Sequence; identical to SEQ ID NO: 17245
  Cyclic GFR-binding peptide
  MOD_RES (2)..(4)..(36): Xaa is C or S

SEQ ID NO: 61906 - protein, 26 aa, Artificial Sequence
  Cyclic GFR-binding peptide
MEYQKYVKPTRGVIYLISIPSLDQPV

SEQ ID NO: 61907 - protein, 34 aa, Artificial Sequence; identical to SEQ ID NO: 17246
  Cyclic GFR-binding peptide
  MOD_RES (31)..(32): Xaa is C or S

SEQ ID NO: 61908 - protein, 33 aa, Artificial Sequence; identical to SEQ ID NO: 17247
  Cyclic GFR-binding peptide
  MOD_RES (2)..(33): Xaa is C or S

SEQ ID NO: 61909 - protein, 37 aa, Artificial Sequence; identical to SEQ ID NO: 17248
  Cyclic GFR-binding peptide
  MOD_RES (33)..(34): Xaa is C or S

SEQ ID NO: 61910 - protein, 33 aa, Artificial Sequence; identical to SEQ ID NO: 17249
  Cyclic GFR-binding peptide
  MOD_RES (1)..(33): Xaa is C or S

SEQ ID NO: 61911 - protein, 31 aa, Artificial Sequence; identical to SEQ ID NO: 17252
  Cyclic GFR-binding peptide
  MOD_RES (31)..(31): Xaa is C or S

SEQ ID NO: 61912 - protein, 33 aa, Artificial Sequence
  Cyclic GFR-binding peptide
  MOD_RES (30)..(31): Xaa is C or S
VVMNEYKFKIVNSSDDLYLVSIPELKTPAXXPK

SEQ ID NO: 61913 - protein, 33 aa, Artificial Sequence; identical to SEQ ID NO: 17254
  Cyclic GFR-binding peptide
  MOD_RES (1)..(33): Xaa is C or S

SEQ ID NO: 61914 - protein, 41 aa, Artificial Sequence; identical to SEQ ID NO: 17259
  Cyclic GFR-binding peptide
  MOD_RES (1)..(3)..(36)..(37): Xaa is C or S

SEQ ID NO: 61915 - protein, 33 aa, Artificial Sequence
  Cyclic GFR-binding peptide
  MOD_RES (30)..(31): Xaa is C or S
VVMNEYQKYIVNSSDDIYLVSIPSLQTPAXXPK

SEQ ID NO: 61916 - protein, 31 aa, Artificial Sequence
  Cyclic GFR-binding peptide
  MOD_RES (26)..(26): Xaa is C or S
EYKFKIVNSSDDLYLVSIPELKTPAXTPKTV

SEQ ID NO: 61917 - protein, 33 aa, Artificial Sequence
  Cyclic GFR-binding peptide
  MOD_RES (30)..(31): Xaa is C or S
SMGEEYQKYTPVGMDDIYLVSIPSLKTPVXXAK

SEQ ID NO: 61918 - protein, 34 aa, Artificial Sequence; identical to SEQ ID NO: 17261
  Cyclic GFR-binding peptide
  MOD_RES (2)..(33)..(34): Xaa is C or S

SEQ ID NO: 61919 - protein, 36 aa, Artificial Sequence; identical to SEQ ID NO: 17263
  Cyclic GFR-binding peptide
  MOD_RES (1)..(33)..(34): Xaa is C or S

SEQ ID NO: 61920 - protein, 35 aa, Artificial Sequence
  Cyclic GFR-binding peptide
  MOD_RES (30)..(31): Xaa is C or S
RVIMEYKFKVKPKRGVLYLISIPELAQPVXXPAAS

SEQ ID NO: 61921 - protein, 37 aa, Artificial Sequence; identical to SEQ ID NO: 17268
  Cyclic GFR-binding peptide
  MOD_RES (32)..(32): Xaa is C or S

SEQ ID NO: 61922 - protein, 38 aa, Artificial Sequence; identical to SEQ ID NO: 17267
  Cyclic GFR-binding peptide
  MOD_RES (2)..(34)..(35): Xaa is C or S

SEQ ID NO: 61923 - protein, 34 aa, Artificial Sequence
  Cyclic GFR-binding peptide
  MOD_RES (31)..(32): Xaa is C or S
VSMGEEYQKYTPVGMDDIYLVSIPSLKTPVXXAK

SEQ ID NO: 61924 - protein, 33 aa, Artificial Sequence
  Cyclic GFR-binding peptide
  MOD_RES (29)..(30): Xaa is C or S
VIMEYKFKIKPTKGILYLISIPELDQSVXXPSA

SEQ ID NO: 61925 - protein, 34 aa, Artificial Sequence
  Cyclic GFR-binding peptide
  MOD_RES (28)..(28): Xaa is C or S
MNEYKFKIVNSSDDLYLVSIPELKTPAXTPKTVH

SEQ ID NO: 61926 - protein, 28 aa, Artificial Sequence
  Cyclic GFR-binding peptide
  MOD_RES (26)..(27): Xaa is C or S
EYQKYIKPTKGIIYLISIPSLDQSVXXP

SEQ ID NO: 61927 - protein, 24 aa, Artificial Sequence
  Cyclic GFR-binding peptide
GEEYKFKTPVGMDDLYLVSIPELK

SEQ ID NO: 61928 - protein, 33 aa, Artificial Sequence
  Cyclic GFR-binding peptide
  MOD_RES (30)..(31): Xaa is C or S
VAMGRYKKLYTVVGKDFYLISIANLKTPVXXAK

SEQ ID NO: 61929 - protein, 37 aa, Artificial Sequence; identical to SEQ ID NO: 17279
  Cyclic GFR-binding peptide
  MOD_RES (1)..(33): Xaa is C or S

SEQ ID NO: 61930 - protein, 26 aa, Artificial Sequence
  Cyclic GFR-binding peptide
VVMNEYKFKIVNSSDDLYLVSIPELK

SEQ ID NO: 61931 - protein, 27 aa, Artificial Sequence
  Cyclic GFR-binding peptide
ESVAMGRYKKLYTVVGKDFYLISIANL

SEQ ID NO: 61932 - protein, 37 aa, Artificial Sequence; identical to SEQ ID NO: 17285
  Cyclic GFR-binding peptide
  MOD_RES (31)..(32): Xaa is C or S

SEQ ID NO: 61933 - protein, 34 aa, Artificial Sequence; identical to SEQ ID NO: 17291
  Cyclic GFR-binding peptide
  MOD_RES (1)..(3): Xaa is C or S

SEQ ID NO: 61934 - protein, 25 aa, Artificial Sequence
  Cyclic GFR-binding peptide
MDRYKKLVVNNAADFYLISIANLRA

SEQ ID NO: 61935 - protein, 33 aa, Artificial Sequence; identical to SEQ ID NO: 17292
  Cyclic GFR-binding peptide
  MOD_RES (32)..(33): Xaa is C or S

SEQ ID NO: 61936 - protein, 21 aa, Artificial Sequence
  Cyclic GFR-binding peptide
EEYQKYTPVGMDDIYLVSIPS

SEQ ID NO: 61937 - protein, 26 aa, Artificial Sequence
  Cyclic GFR-binding peptide
DEYKFKVVNNAADLYLISIPELRAPV

SEQ ID NO: 61938 - protein, 28 aa, Artificial Sequence
  Cyclic GFR-binding peptide
VVMEYKFKVKPTRGVLYLISIPELDQPV

SEQ ID NO: 61939 - protein, 28 aa, Artificial Sequence
  Cyclic GFR-binding peptide
  MOD_RES (27)..(28): Xaa is C or S
MEYKFKIKPTKGILYLISIPELDQSVXX

SEQ ID NO: 61940 - protein, 31 aa, Artificial Sequence
  Cyclic GFR-binding peptide
  MOD_RES (29)..(30): Xaa is C or S
VMNEYQKYIVNSSDDIYLVSIPSLQTPAXXP

SEQ ID NO: 61941 - protein, 36 aa, Artificial Sequence; identical to SEQ ID NO: 17295
  Cyclic GFR-binding peptide
  MOD_RES (2)..(4)..(35)..(36): Xaa is C or S

SEQ ID NO: 61942 - protein, 29 aa, Artificial Sequence
  Cyclic GFR-binding peptide
  MOD_RES (1)..(1): Xaa is C or S
XEAVSMGEEYQKYTPVGMDDIYLVSIPSL

SEQ ID NO: 61943 - protein, 28 aa, Artificial Sequence
  Cyclic GFR-binding peptide
  MOD_RES (1)..(3): Xaa is C or S
XKXSRVIMEYQKYVKPKRGVIYLISIPS

SEQ ID NO: 61944 - protein, 29 aa, Artificial Sequence
  Cyclic GFR-binding peptide
GEVVMDEYQKYVVKENEDIYLMSIPSLET

SEQ ID NO: 61945 - protein, 35 aa, Artificial Sequence; identical to SEQ ID NO: 17296
  Cyclic GFR-binding peptide
  MOD_RES (2)..(4)..(35): Xaa is C or S

SEQ ID NO: 61946 - protein, 30 aa, Artificial Sequence
  Cyclic GFR-binding peptide
  MOD_RES (2)..(2): Xaa is C or S
GXGEVVMDEYKFKVVKENEDLYLMSIPELE

SEQ ID NO: 61947 - protein, 29 aa, Artificial Sequence
  Cyclic GFR-binding peptide
  MOD_RES (28)..(29): Xaa is C or S
MDEYKFKVVNNAADLYLISIPELRAPVXX

SEQ ID NO: 61948 - protein, 39 aa, Artificial Sequence; identical to SEQ ID NO: 17303
  Cyclic GFR-binding peptide
  MOD_RES (2)..(33)..(34): Xaa is C or S

SEQ ID NO: 61949 - protein, 31 aa, Artificial Sequence
  Cyclic GFR-binding peptide
  MOD_RES (27)..(28): Xaa is C or S
MEYKFKVKPKRGVLYLISIPELAQPVXXPAA

SEQ ID NO: 61950 - protein, 30 aa, Artificial Sequence; identical to SEQ ID NO: 21042
  Cyclic GFR-binding peptide

SEQ ID NO: 61951 - protein, 28 aa, Artificial Sequence
  Cyclic GFR-binding peptide
  MOD_RES (27)..(28): Xaa is C or S
EEYKFKVVKDYEDLYLMSIPELETPVXX

SEQ ID NO: 61952 - protein, 27 aa, Artificial Sequence
  Cyclic GFR-binding peptide
  MOD_RES (26)..(27): Xaa is C or S
EYQKYIVNNSSDIYLVSIPSLKTPAXX

SEQ ID NO: 61953 - protein, 33 aa, Artificial Sequence; identical to SEQ ID NO: 17315
  Cyclic GFR-binding peptide
  MOD_RES (2)..(2): Xaa is C or S

SEQ ID NO: 61954 - protein, 36 aa, Artificial Sequence; identical to SEQ ID NO: 17316
  Cyclic GFR-binding peptide
  MOD_RES (1)..(34)..(35): Xaa is C or S

SEQ ID NO: 61955 - protein, 38 aa, Artificial Sequence; identical to SEQ ID NO: 17317
  Cyclic GFR-binding peptide
  MOD_RES (1)..(33)..(34): Xaa is C or S

SEQ ID NO: 61956 - protein, 26 aa, Artificial Sequence
  Cyclic GFR-binding peptide
RVVMNEYKFKIVNSSDDLYLVSIPEL

SEQ ID NO: 61957 - protein, 29 aa, Artificial Sequence
  Cyclic GFR-binding peptide
  MOD_RES (2)..(2): Xaa is C or S
GXARVVMNEYQKYIVNSSDDIYLVSIPSL

SEQ ID NO: 61958 - protein, 29 aa, Artificial Sequence
  Cyclic GFR-binding peptide
ESVAMGRYKKLYTVVGKDFYLISIANLKT

SEQ ID NO: 61959 - protein, 27 aa, Artificial Sequence
  Cyclic GFR-binding peptide
ESVAMGEYQKYYTVVGKDIYLISIPSL

SEQ ID NO: 61960 - protein, 30 aa, Artificial Sequence
  Cyclic GFR-binding peptide
  MOD_RES (30)..(30): Xaa is C or S
KVIMEYQKYIKPTKGIIYLISIPSLDQSVX

SEQ ID NO: 61961 - protein, 31 aa, Artificial Sequence
  Cyclic GFR-binding peptide
  MOD_RES (2)..(4): Xaa is C or S
RXGXESVAMGYHYKLYTVVGKDKYLISIPSL

SEQ ID NO: 61962 - protein, 34 aa, Artificial Sequence; identical to SEQ ID NO: 17321
  Cyclic GFR-binding peptide
  MOD_RES (1)..(3): Xaa is C or S

SEQ ID NO: 61963 - protein, 30 aa, Artificial Sequence
  Cyclic GFR-binding peptide
  MOD_RES (1)..(1): Xaa is C or S
XSKVIMEYQKYIKPTKGIIYLISIPSLDQS

SEQ ID NO: 61964 - protein, 30 aa, Artificial Sequence
  Cyclic GFR-binding peptide
ESVAMGYHYKLYTVVGKDKYLISIPSLKTP

SEQ ID NO: 61965 - protein, 40 aa, Artificial Sequence; identical to SEQ ID NO: 17328
  Cyclic GFR-binding peptide
  MOD_RES (1)..(3)..(36)..(37): Xaa is C or S

SEQ ID NO: 61966 - protein, 38 aa, Artificial Sequence; identical to SEQ ID NO: 17329
  Cyclic GFR-binding peptide
  MOD_RES (1)..(3)..(34)..(35): Xaa is C or S

SEQ ID NO: 61967 - protein, 32 aa, Artificial Sequence
  Cyclic GFR-binding peptide
  MOD_RES (30)..(31): Xaa is C or S
VVMDEYQKYVVKENEDIYLMSIPSLETPVXXA

SEQ ID NO: 61968 - protein, 27 aa, Artificial Sequence
  Cyclic GFR-binding peptide
VMDEYQKYVVKENEDIYLMSIPSLETP

SEQ ID NO: 61969 - protein, 34 aa, Artificial Sequence; identical to SEQ ID NO: 17332
  Cyclic GFR-binding peptide
  MOD_RES (2)..(4): Xaa is C or S

SEQ ID NO: 61970 - protein, 29 aa, Artificial Sequence
  Cyclic GFR-binding peptide
  MOD_RES (1)..(3): Xaa is C or S
XGXSRVVMNEYKFKIVNSSDDLYLVSIPE

SEQ ID NO: 61971 - protein, 29 aa, Artificial Sequence
  Cyclic GFR-binding peptide
  MOD_RES (28)..(29): Xaa is C or S
VMEYQKYVKPTRGVIYLISIPSLDQPVXX

SEQ ID NO: 61972 - protein, 26 aa, Artificial Sequence
  Cyclic GFR-binding peptide
  MOD_RES (1)..(1): Xaa is C or S
XSKVIMEYQKYIKPTKGIIYLISIPS

SEQ ID NO: 61973 - protein, 29 aa, Artificial Sequence
  Cyclic GFR-binding peptide
  MOD_RES (2)..(2): Xaa is C or S
GXARVVMNEYKFKIVNSSDDLYLVSIPEL

SEQ ID NO: 61974 - protein, 38 aa, Artificial Sequence; identical to SEQ ID NO: 17341
  Cyclic GFR-binding peptide
  MOD_RES (1)..(33)..(34): Xaa is C or S

SEQ ID NO: 61975 - protein, 29 aa, Artificial Sequence
  Cyclic GFR-binding peptide
  MOD_RES (27)..(28): Xaa is C or S
EEYQKYTPVGMDDIYLVSIPSLKTPVXXA

SEQ ID NO: 61976 - protein, 28 aa, Artificial Sequence
  Cyclic GFR-binding peptide
AKVVMNEYQKYIVNNSSDIYLVSIPSLK

SEQ ID NO: 61977 - protein, 31 aa, Artificial Sequence; identical to SEQ ID NO: 17347
  Cyclic GFR-binding peptide

SEQ ID NO: 61978 - protein, 35 aa, Artificial Sequence; identical to SEQ ID NO: 17348
  Cyclic GFR-binding peptide
  MOD_RES (2)..(4): Xaa is C or S

SEQ ID NO: 61979 - protein, 23 aa, Artificial Sequence
  Cyclic GFR-binding peptide
MGEEYQKYTPVGMDDIYLVSIPS

SEQ ID NO: 61980 - protein, 38 aa, Artificial Sequence; identical to SEQ ID NO: 17351
  Cyclic GFR-binding peptide
  MOD_RES (1)..(33)..(34): Xaa is C or S

SEQ ID NO: 61981 - protein, 31 aa, Artificial Sequence
  Cyclic GFR-binding peptide
  MOD_RES (28)..(29): Xaa is C or S
MGYHYKLYTVVGKDKYLISIPSLKTPVXXAK

SEQ ID NO: 61982 - protein, 32 aa, Artificial Sequence
  Cyclic GFR-binding peptide
  MOD_RES (28)..(29): Xaa is C or S
MNEYQKYIVNNSSDIYLVSIPSLKTPAXXAKP

SEQ ID NO: 61983 - protein, 26 aa, Artificial Sequence
  Cyclic GFR-binding peptide
SKVIMEYQKYIKPTKGIIYLISIPSL

SEQ ID NO: 61984 - protein, 28 aa, Artificial Sequence
  Cyclic GFR-binding peptide
  MOD_RES (28)..(28): Xaa is C or S
MDEYKFKVVNNAADLYLISIPELRAPVX

SEQ ID NO: 61985 - protein, 28 aa, Artificial Sequence
  Cyclic GFR-binding peptide
VMNEYKFKIVNNSSDLYLVSIPELKTPA

SEQ ID NO: 61986 - protein, 34 aa, Artificial Sequence
  Cyclic GFR-binding peptide
  MOD_RES (28)..(29): Xaa is C or S
MEEYKFKVVKDYEDLYLMSIPELETPVXXAKPIS

SEQ ID NO: 61987 - protein, 37 aa, Artificial Sequence; identical to SEQ ID NO: 17353
  Cyclic GFR-binding peptide
  MOD_RES (2)..(34)..(35): Xaa is C or S

SEQ ID NO: 61988 - protein, 36 aa, Artificial Sequence; identical to SEQ ID NO: 17354
  Cyclic GFR-binding peptide
  MOD_RES (1)..(3)..(35): Xaa is C or S

SEQ ID NO: 61989 - protein, 27 aa, Artificial Sequence
  Cyclic GFR-binding peptide
MGYHYKLYTVVGKDKYLISIPSLKTPV

SEQ ID NO: 61990 - protein, 29 aa, Artificial Sequence
  Cyclic GFR-binding peptide
  MOD_RES (28)..(29): Xaa is C or S
IMEYQKYIKPTKGIIYLISIPSLDQSVXX

SEQ ID NO: 61991 - protein, 30 aa, Artificial Sequence
  Cyclic GFR-binding peptide
  MOD_RES (28)..(29): Xaa is C or S
MNEYKFKIVNNSSDLYLVSIPELKTPAXXA

SEQ ID NO: 61992 - protein, 41 aa, Artificial Sequence; identical to SEQ ID NO: 17362
  Cyclic GFR-binding peptide
  MOD_RES (2)..(4)..(36)..(37): Xaa is C or S

SEQ ID NO: 61993 - protein, 26 aa, Artificial Sequence
  Cyclic GFR-binding peptide
EVVMDEYKFKVVKENEDLYLMSIPEL

SEQ ID NO: 61994 - protein, 26 aa, Artificial Sequence
  Cyclic GFR-binding peptide
MDEYQKYVVKENEDIYLMSIPSLETP

SEQ ID NO: 61995 - protein, 26 aa, Artificial Sequence
  Cyclic GFR-binding peptide
GYHYKLYTVVGKDKYLISIPSLKTPV

SEQ ID NO: 61996 - protein, 31 aa, Artificial Sequence; identical to SEQ ID NO: 17363
  Cyclic GFR-binding peptide
  MOD_RES (31)..(31): Xaa is C or S

SEQ ID NO: 61997 - protein, 35 aa, Artificial Sequence; identical to SEQ ID NO: 17365
  Cyclic GFR-binding peptide
  MOD_RES (1)..(3)..(34)..(35): Xaa is C or S

SEQ ID NO: 61998 - protein, 36 aa, Artificial Sequence; identical to SEQ ID NO: 17366
  Cyclic GFR-binding peptide
  MOD_RES (2)..(33)..(34): Xaa is C or S

SEQ ID NO: 61999 - protein, 33 aa, Artificial Sequence
  Cyclic GFR-binding peptide
  MOD_RES (29)..(30): Xaa is C or S
VMEEYKFKVVKDYEDLYLMSIPELETPVXXAKP

SEQ ID NO: 62000 - protein, 39 aa, Artificial Sequence; identical to SEQ ID NO: 17368
  Cyclic GFR-binding peptide
  MOD_RES (1)..(33)..(34): Xaa is C or S

SEQ ID NO: 62001 - protein, 29 aa, Artificial Sequence
  Cyclic GFR-binding peptide
  MOD_RES (1)..(3): Xaa is C or S
XGXARVVMNEYQKYIVNSSDDIYLVSIPS

SEQ ID NO: 62002 - protein, 32 aa, Artificial Sequence
  Cyclic GFR-binding peptide
  MOD_RES (30)..(31): Xaa is C or S
VVMNEYKFKIVNSSDDLYLVSIPELQTPAXXP

SEQ ID NO: 62003 - protein, 33 aa, Artificial Sequence; identical to SEQ ID NO: 17375
  Cyclic GFR-binding peptide
  MOD_RES (33)..(33): Xaa is C or S

SEQ ID NO: 62004 - protein, 28 aa, Artificial Sequence
  Cyclic GFR-binding peptide
VAMGEYQKYYTVVGKDIYLISIPSLKTP

SEQ ID NO: 62005 - protein, 25 aa, Artificial Sequence
  Cyclic GFR-binding peptide
SVAMGYHYKLYTVVGKDKYLISIPS

SEQ ID NO: 62006 - protein, 38 aa, Artificial Sequence; identical to SEQ ID NO: 17380
  Cyclic GFR-binding peptide
  MOD_RES (32)..(33): Xaa is C or S

SEQ ID NO: 62007 - protein, 29 aa, Artificial Sequence
  Cyclic GFR-binding peptide
  MOD_RES (1)..(1): Xaa is C or S
XAKVVMNEYKFKIVNNSSDLYLVSIPELK

SEQ ID NO: 62008 - protein, 26 aa, Artificial Sequence
  Cyclic GFR-binding peptide
VVMNEYKFKIVNSSDDLYLVSIPELQ

SEQ ID NO: 62009 - protein, 20 aa, Artificial Sequence
  Cyclic GFR-binding peptide
EYKFKIVNNSSDLYLVSIPE

SEQ ID NO: 62010 - protein, 27 aa, Artificial Sequence
  Cyclic GFR-binding peptide
  MOD_RES (1)..(1): Xaa is C or S
XSRVVMNEYKFKIVNSSDDLYLVSIPE

SEQ ID NO: 62011 - protein, 23 aa, Artificial Sequence
  Cyclic GFR-binding peptide
EYQKYIVNNSSDIYLVSIPSLKT

SEQ ID NO: 62012 - protein, 29 aa, Artificial Sequence
  Cyclic GFR-binding peptide
  MOD_RES (1)..(3): Xaa is C or S
XKXSKVVMEYQKYVKPTRGVIYLISIPSL

SEQ ID NO: 62013 - protein, 32 aa, Artificial Sequence
  Cyclic GFR-binding peptide
  MOD_RES (27)..(28): Xaa is C or S
NEYKFKIVNSSDDLYLVSIPELQTPAXXPKPV

SEQ ID NO: 62014 - protein, 27 aa, Artificial Sequence
  Cyclic GFR-binding peptide
  MOD_RES (27)..(27): Xaa is C or S
MEYQKYVKPTRGVIYLISIPSLDQPVX

SEQ ID NO: 62015 - protein, 38 aa, Artificial Sequence; identical to SEQ ID NO: 17406
  Cyclic GFR-binding peptide
  MOD_RES (1)..(33)..(34): Xaa is C or S

SEQ ID NO: 62016 - protein, 32 aa, Artificial Sequence; identical to SEQ ID NO: 17408
  Cyclic GFR-binding peptide
  MOD_RES (32)..(32): Xaa is C or S

SEQ ID NO: 62017 - protein, 29 aa, Artificial Sequence
  Cyclic GFR-binding peptide
SRVIMEYQKYVKPKRGVIYLISIPSLAQP

SEQ ID NO: 62018 - protein, 21 aa, Artificial Sequence
  Cyclic GFR-binding peptide
MEYQKYIKPTKGIIYLISIPS

SEQ ID NO: 62019 - protein, 25 aa, Artificial Sequence
  Cyclic GFR-binding peptide
VMNEYKFKIVNSSDDLYLVSIPELQ

SEQ ID NO: 62020 - protein, 25 aa, Artificial Sequence
  Cyclic GFR-binding peptide
VMNEYQKYIVNSSDDIYLVSIPSLK

SEQ ID NO: 62021 - protein, 28 aa, Artificial Sequence
  Cyclic GFR-binding peptide
KVVMEYQKYVKPTRGVIYLISIPSLDQP

SEQ ID NO: 62022 - protein, 36 aa, Artificial Sequence; identical to SEQ ID NO: 17416
  Cyclic GFR-binding peptide
  MOD_RES (1)..(33)..(34): Xaa is C or S

SEQ ID NO: 62023 - protein, 36 aa, Artificial Sequence
  Cyclic GFR-binding peptide
  MOD_RES (30)..(31): Xaa is C or S
VVMNEYKFKIVNSSDDLYLVSIPELQTPAXXPKPVT

SEQ ID NO: 62024 - protein, 32 aa, Artificial Sequence; identical to SEQ ID NO: 17417
  Cyclic GFR-binding peptide
  MOD_RES (2)..(2): Xaa is C or S

SEQ ID NO: 62025 - protein, 31 aa, Artificial Sequence
  Cyclic GFR-binding peptide
  MOD_RES (28)..(28): Xaa is C or S
MNEYKFKIVNSSDDLYLVSIPELKTPAXTPK

SEQ ID NO: 62026 - protein, 33 aa, Artificial Sequence; identical to SEQ ID NO: 17420
  Cyclic GFR-binding peptide
  MOD_RES (1)..(32)..(33): Xaa is C or S

SEQ ID NO: 62027 - protein, 33 aa, Artificial Sequence
  Cyclic GFR-binding peptide
  MOD_RES (2)..(4): Xaa is C or S
RXGXGEVVMDEYKFKVVKENEDLYLMSIPELET

SEQ ID NO: 62028 - protein, 29 aa, Artificial Sequence
  Cyclic GFR-binding peptide
KVIMEYQKYIKPTKGIIYLISIPSLDQSV

SEQ ID NO: 62029 - protein, 27 aa, Artificial Sequence
  Cyclic GFR-binding peptide
MNEYKFKIVNSSDDLYLVSIPELKTPA

SEQ ID NO: 62030 - protein, 29 aa, Artificial Sequence
  Cyclic GFR-binding peptide
  MOD_RES (27)..(28): Xaa is C or S
MEYQKYVKPTRGVIYLISIPSLDQPVXXP

SEQ ID NO: 62031 - protein, 30 aa, Artificial Sequence
  Cyclic GFR-binding peptide
  MOD_RES (1)..(1): Xaa is C or S
XGEVVMEEYKFKVVKDYEDLYLMSIPELET

SEQ ID NO: 62032 - protein, 33 aa, Artificial Sequence; identical to SEQ ID NO: 17432
  Cyclic GFR-binding peptide
  MOD_RES (31)..(32): Xaa is C or S

SEQ ID NO: 62033 - protein, 32 aa, Artificial Sequence
  Cyclic GFR-binding peptide
  MOD_RES (27)..(28): Xaa is C or S
MEYKFKIKPTKGILYLISIPELDQSVXXPSAS

SEQ ID NO: 62034 - protein, 28 aa, Artificial Sequence
  Cyclic GFR-binding peptide
  MOD_RES (2)..(2): Xaa is C or S
GXESVAMGRYKKLYTVVGKDFYLISIAN

SEQ ID NO: 62035 - protein, 37 aa, Artificial Sequence; identical to SEQ ID NO: 17437
  Cyclic GFR-binding peptide
  MOD_RES (2)..(34)..(35): Xaa is C or S

SEQ ID NO: 62036 - protein, 30 aa, Artificial Sequence
  Cyclic GFR-binding peptide
  MOD_RES (30)..(30): Xaa is C or S
VVMDEYKFKVVKENEDLYLMSIPELETPVX

SEQ ID NO: 62037 - protein, 30 aa, Artificial Sequence
  Cyclic GFR-binding peptide
  MOD_RES (29)..(30): Xaa is C or S
VMDYHYKLVVNNAADKYLISIPSLRAPVXX

SEQ ID NO: 62038 - protein, 32 aa, Artificial Sequence
  Cyclic GFR-binding peptide
  MOD_RES (1)..(3): Xaa is C or S
XGXSRVVMNEYKFKIVNSSDDLYLVSIPELKT

SEQ ID NO: 62039 - protein, 32 aa, Artificial Sequence
  Cyclic GFR-binding peptide
  MOD_RES (29)..(30): Xaa is C or S
VMEEYQKYVVKDYEDIYLMSIPSLETPVXXAK

SEQ ID NO: 62040 - protein, 25 aa, Artificial Sequence
  Cyclic GFR-binding peptide
VMEEYKFKVVKDYEDLYLMSIPELE

SEQ ID NO: 62041 - protein, 32 aa, Artificial Sequence; identical to SEQ ID NO: 17451
  Cyclic GFR-binding peptide
  MOD_RES (32)..(32): Xaa is C or S

SEQ ID NO: 62042 - protein, 27 aa, Artificial Sequence
  Cyclic GFR-binding peptide
VVMDEYQKYVVKENEDIYLMSIPSLET

SEQ ID NO: 62043 - protein, 31 aa, Artificial Sequence
  Cyclic GFR-binding peptide
  MOD_RES (30)..(31): Xaa is C or S
VAMGEYQKYYTVVGKDIYLISIPSLKTPVXX

SEQ ID NO: 62044 - protein, 31 aa, Artificial Sequence
  Cyclic GFR-binding peptide
  MOD_RES (27)..(28): Xaa is C or S
MEYKFKVKPTRGVLYLISIPELDQPVXXPSA

SEQ ID NO: 62045 - protein, 23 aa, Artificial Sequence
  Cyclic GFR-binding peptide
MNEYKFKIVNSSDDLYLVSIPEL

SEQ ID NO: 62046 - protein, 27 aa, Artificial Sequence
  Cyclic GFR-binding peptide
SRVIMEYKFKVKPKRGVLYLISIPELA

SEQ ID NO: 62047 - protein, 35 aa, Artificial Sequence
  Cyclic GFR-binding peptide
  MOD_RES (30)..(31): Xaa is C or S
SMGEEYKFKTPVGMDDLYLVSIPELKTPVXXAKGV

SEQ ID NO: 62048 - protein, 33 aa, Artificial Sequence
  Cyclic GFR-binding peptide
  MOD_RES (29)..(30): Xaa is C or S
MGEEYKFKTPVGMDDLYLVSIPELKTPVXXAKG

SEQ ID NO: 62049 - protein, 35 aa, Artificial Sequence
  Cyclic GFR-binding peptide
  MOD_RES (30)..(31): Xaa is C or S
KVVMEYKFKVKPTRGVLYLISIPELDQPVXXPSAS

SEQ ID NO: 62050 - protein, 36 aa, Artificial Sequence; identical to SEQ ID NO: 17457
  Cyclic GFR-binding peptide
  MOD_RES (2)..(34): Xaa is C or S

SEQ ID NO: 62051 - protein, 39 aa, Artificial Sequence; identical to SEQ ID NO: 17459
  Cyclic GFR-binding peptide
  MOD_RES (1)..(33): Xaa is C or S

SEQ ID NO: 62052 - protein, 34 aa, Artificial Sequence; identical to SEQ ID NO: 17464
  Cyclic GFR-binding peptide
  MOD_RES (2)..(34): Xaa is C or S

SEQ ID NO: 62053 - protein, 28 aa, Artificial Sequence
  Cyclic GFR-binding peptide
VAMGRYKKLYTVVGKDFYLISIANLKTP

SEQ ID NO: 62054 - protein, 22 aa, Artificial Sequence
  Cyclic GFR-binding peptide
MNEYQKYIVNSSDDIYLVSIPS

SEQ ID NO: 62055 - protein, 32 aa, Artificial Sequence
  Cyclic GFR-binding peptide
  MOD_RES (27)..(27): Xaa is C or S
NEYKFKIVNSSDDLYLVSIPELKTPAXTPKTV

SEQ ID NO: 62056 - protein, 32 aa, Artificial Sequence; identical to SEQ ID NO: 17467
  Cyclic GFR-binding peptide
  MOD_RES (32)..(32): Xaa is C or S

SEQ ID NO: 62057 - protein, 34 aa, Artificial Sequence; identical to SEQ ID NO: 17471
  Cyclic GFR-binding peptide
  MOD_RES (2)..(34): Xaa is C or S

SEQ ID NO: 62058 - protein, 30 aa, Artificial Sequence
  Cyclic GFR-binding peptide
  MOD_RES (27)..(28): Xaa is C or S
NEYKFKIVNSSDDLYLVSIPELQTPAXXPK

SEQ ID NO: 62059 - protein, 30 aa, Artificial Sequence; identical to SEQ ID NO: 17473
  Cyclic GFR-binding peptide

SEQ ID NO: 62060 - protein, 29 aa, Artificial Sequence
  Cyclic GFR-binding peptide
  MOD_RES (2)..(2): Xaa is C or S
GXAEVVMDEYKFKVVNNAADLYLISIPEL

SEQ ID NO: 62061 - protein, 36 aa, Artificial Sequence; identical to SEQ ID NO: 17474
  Cyclic GFR-binding peptide
  MOD_RES (2)..(4)..(36): Xaa is C or S

SEQ ID NO: 62062 - protein, 29 aa, Artificial Sequence
  Cyclic GFR-binding peptide
  MOD_RES (26)..(27): Xaa is C or S
EYQKYTPVGMDDIYLVSIPSLKTPVXXAK

SEQ ID NO: 62063 - protein, 29 aa, Artificial Sequence
  Cyclic GFR-binding peptide
  MOD_RES (27)..(28): Xaa is C or S
DEYKFKVVNNAADLYLISIPELRAPVXXS

SEQ ID NO: 62064 - protein, 39 aa, Artificial Sequence; identical to SEQ ID NO: 17477
  Cyclic GFR-binding peptide
  MOD_RES (1)..(3)..(35)..(36): Xaa is C or S

SEQ ID NO: 62065 - protein, 28 aa, Artificial Sequence
  Cyclic GFR-binding peptide
  MOD_RES (28)..(28): Xaa is C or S
MNEYKFKIVNSSDDLYLVSIPELQTPAX

SEQ ID NO: 62066 - protein, 34 aa, Artificial Sequence; identical to SEQ ID NO: 17484
  Cyclic GFR-binding peptide
  MOD_RES (31)..(32): Xaa is C or S

SEQ ID NO: 62067 - protein, 23 aa, Artificial Sequence
  Cyclic GFR-binding peptide
YHYKLVVNNAADKYLISIPSLRA

SEQ ID NO: 62068 - protein, 25 aa, Artificial Sequence
  Cyclic GFR-binding peptide
EYKFKIKPTKGILYLISIPELDQSV

SEQ ID NO: 62069 - protein, 28 aa, Artificial Sequence
  Cyclic GFR-binding peptide
AEVVMDEYKFKVVNNAADLYLISIPELR

SEQ ID NO: 62070 - protein, 34 aa, Artificial Sequence
  Cyclic GFR-binding peptide
  MOD_RES (29)..(30): Xaa is C or S
VMNEYQKYIVNSSDDIYLVSIPSLKTPAXXPKPV

SEQ ID NO: 62071 - protein, 34 aa, Artificial Sequence; identical to SEQ ID NO: 17496
  Cyclic GFR-binding peptide
  MOD_RES (2)..(34): Xaa is C or S

SEQ ID NO: 62072 - protein, 31 aa, Artificial Sequence
  Cyclic GFR-binding peptide
  MOD_RES (27)..(28): Xaa is C or S
MEYQKYVKPKRGVIYLISIPSLAQPVXXPAA

SEQ ID NO: 62073 - protein, 35 aa, Artificial Sequence; identical to SEQ ID NO: 17498
  Cyclic GFR-binding peptide
  MOD_RES (1)..(33): Xaa is C or S

SEQ ID NO: 62074 - protein, 25 aa, Artificial Sequence
  Cyclic GFR-binding peptide
MGRYKKLYTVVGKDFYLISIANLKT

SEQ ID NO: 62075 - protein, 42 aa, Artificial Sequence; identical to SEQ ID NO: 17502
  Cyclic GFR-binding peptide
  MOD_RES (2)..(4)..(36)..(37): Xaa is C or S

SEQ ID NO: 62076 - protein, 33 aa, Artificial Sequence; identical to SEQ ID NO: 17504
  Cyclic GFR-binding peptide
  MOD_RES (31)..(32): Xaa is C or S

SEQ ID NO: 62077 - protein, 23 aa, Artificial Sequence
  Cyclic GFR-binding peptide
NEYKFKIVNSSDDLYLVSIPELK

SEQ ID NO: 62078 - protein, 29 aa, Artificial Sequence
  Cyclic GFR-binding peptide
VVMDEYKFKVVKENEDLYLMSIPELETPV

SEQ ID NO: 62079 - protein, 35 aa, Artificial Sequence; identical to SEQ ID NO: 17506
  Cyclic GFR-binding peptide
  MOD_RES (31)..(32): Xaa is C or S

SEQ ID NO: 62080 - protein, 22 aa, Artificial Sequence
  Cyclic GFR-binding peptide
GEEYQKYTPVGMDDIYLVSIPS

SEQ ID NO: 62081 - protein, 34 aa, Artificial Sequence
  Cyclic GFR-binding peptide
  MOD_RES (1)..(3): Xaa is C or S
XGXEAVSMGEEYQKYTPVGMDDIYLVSIPSLKTP

SEQ ID NO: 62082 - protein, 38 aa, Artificial Sequence; identical to SEQ ID NO: 17513
  Cyclic GFR-binding peptide
  MOD_RES (1)..(34)..(35): Xaa is C or S

SEQ ID NO: 62083 - protein, 20 aa, Artificial Sequence
  Cyclic GFR-binding peptide
EYQKYIVNSSDDIYLVSIPS

SEQ ID NO: 62084 - protein, 33 aa, Artificial Sequence; identical to SEQ ID NO: 17514
  Cyclic GFR-binding peptide
  MOD_RES (32)..(33): Xaa is C or S

SEQ ID NO: 62085 - protein, 20 aa, Artificial Sequence
  Cyclic GFR-binding peptide
EYQKYVKPKRGVIYLISIPS

SEQ ID NO: 62086 - protein, 33 aa, Artificial Sequence
  Cyclic GFR-binding peptide
  MOD_RES (2)..(4): Xaa is C or S
SXKXSKVIMEYQKYIKPTKGIIYLISIPSLDQS

SEQ ID NO: 62087 - protein, 26 aa, Artificial Sequence
  Cyclic GFR-binding peptide
MEEYKFKVVKDYEDLYLMSIPELETP

SEQ ID NO: 62088 - protein, 38 aa, Artificial Sequence; identical to SEQ ID NO: 17518
  Cyclic GFR-binding peptide
  MOD_RES (1)..(33)..(34): Xaa is C or S

SEQ ID NO: 62089 - protein, 30 aa, Artificial Sequence
  Cyclic GFR-binding peptide
  MOD_RES (1)..(3): Xaa is C or S
XGXESVAMGEYQKYYTVVGKDIYLISIPSL

SEQ ID NO: 62090 - protein, 25 aa, Artificial Sequence
  Cyclic GFR-binding peptide
VMDYHYKLVVNNAADKYLISIPSLR

SEQ ID NO: 62091 - protein, 25 aa, Artificial Sequence
  Cyclic GFR-binding peptide
MGEYQKYYTVVGKDIYLISIPSLKT

SEQ ID NO: 62092 - protein, 34 aa, Artificial Sequence
  Cyclic GFR-binding peptide
  MOD_RES (30)..(31): Xaa is C or S
VVMDEYKFKVVKENEDLYLMSIPELETPVXXAKP

SEQ ID NO: 62093 - protein, 25 aa, Artificial Sequence
  Cyclic GFR-binding peptide
VVMDEYKFKVVNNAADLYLISIPEL

SEQ ID NO: 62094 - protein, 39 aa, Artificial Sequence; identical to SEQ ID NO: 17524
  Cyclic GFR-binding peptide
  MOD_RES (1)..(3)..(35)..(36): Xaa is C or S

SEQ ID NO: 62095 - protein, 29 aa, Artificial Sequence
  Cyclic GFR-binding peptide
  MOD_RES (29)..(29): Xaa is C or S
VMNEYQKYIVNSSDDIYLVSIPSLQTPAX

SEQ ID NO: 62096 - protein, 36 aa, Artificial Sequence; identical to SEQ ID NO: 17525
  Cyclic GFR-binding peptide
  MOD_RES (2)..(34)..(35): Xaa is C or S

SEQ ID NO: 62097 - protein, 32 aa, Artificial Sequence
  Cyclic GFR-binding peptide
  MOD_RES (1)..(3): Xaa is C or S
XKXSKVVMEYKFKVKPTRGVLYLISIPELDQP

SEQ ID NO: 62098 - protein, 31 aa, Artificial Sequence; identical to SEQ ID NO: 17528
  Cyclic GFR-binding peptide
  MOD_RES (31)..(31): Xaa is C or S

SEQ ID NO: 62099 - protein, 24 aa, Artificial Sequence
  Cyclic GFR-binding peptide
AMGRYKKLYTVVGKDFYLISIANL

SEQ ID NO: 62100 - protein, 28 aa, Artificial Sequence
  Cyclic GFR-binding peptide
AKVVMNEYKFKIVNNSSDLYLVSIPELK

SEQ ID NO: 62101 - protein, 25 aa, Artificial Sequence
  Cyclic GFR-binding peptide
VIMEYKFKVKPKRGVLYLISIPELA

SEQ ID NO: 62102 - protein, 26 aa, Artificial Sequence
  Cyclic GFR-binding peptide
KVVMEYKFKVKPTRGVLYLISIPELD

SEQ ID NO: 62103 - protein, 30 aa, Artificial Sequence
  Cyclic GFR-binding peptide
  MOD_RES (27)..(28): Xaa is C or S
GRYKKLYTVVGKDFYLISIANLKTPVXXAK

SEQ ID NO: 62104 - protein, 32 aa, Artificial Sequence
  Cyclic GFR-binding peptide
  MOD_RES (29)..(30): Xaa is C or S
VMDEYKFKVVKENEDLYLMSIPELETPVXXAK

SEQ ID NO: 62105 - protein, 23 aa, Artificial Sequence
  Cyclic GFR-binding peptide
MEYQKYIKPTKGIIYLISIPSLD

SEQ ID NO: 62106 - protein, 39 aa, Artificial Sequence; identical to SEQ ID NO: 17533
  Cyclic GFR-binding peptide
  MOD_RES (2)..(4)..(36)..(37): Xaa is C or S

SEQ ID NO: 62107 - protein, 29 aa, Artificial Sequence
  Cyclic GFR-binding peptide
  MOD_RES (28)..(29): Xaa is C or S
MNEYKFKIVNSSDDLYLVSIPELKTPAXX

SEQ ID NO: 62108 - protein, 22 aa, Artificial Sequence
  Cyclic GFR-binding peptide
EYKFKVVNNAADLYLISIPELR

SEQ ID NO: 62109 - protein, 25 aa, Artificial Sequence
  Cyclic GFR-binding peptide
EYKFKTPVGMDDLYLVSIPELKTPV

SEQ ID NO: 62110 - protein, 26 aa, Artificial Sequence
  Cyclic GFR-binding peptide
VVMDEYKFKVVKENEDLYLMSIPELE

SEQ ID NO: 62111 - protein, 28 aa, Artificial Sequence
  Cyclic GFR-binding peptide
  MOD_RES (28)..(28): Xaa is C or S
IMEYQKYIKPTKGIIYLISIPSLDQSVX

SEQ ID NO: 62112 - protein, 36 aa, Artificial Sequence; identical to SEQ ID NO: 17541
  Cyclic GFR-binding peptide
  MOD_RES (1)..(33)..(34): Xaa is C or S

SEQ ID NO: 62113 - protein, 22 aa, Artificial Sequence
  Cyclic GFR-binding peptide
IMEYQKYVKPKRGVIYLISIPS

SEQ ID NO: 62114 - protein, 34 aa, Artificial Sequence
  Cyclic GFR-binding peptide
  MOD_RES (28)..(29): Xaa is C or S
MDEYKFKVVNNAADLYLISIPELRAPVXXSAPAA

SEQ ID NO: 62115 - protein, 31 aa, Artificial Sequence
  Cyclic GFR-binding peptide
  MOD_RES (30)..(31): Xaa is C or S
VVMEEYQKYVVKDYEDIYLMSIPSLETPVXX

SEQ ID NO: 62116 - protein, 26 aa, Artificial Sequence
  Cyclic GFR-binding peptide
  MOD_RES (26)..(26): Xaa is C or S
EYQKYIVNNSSDIYLVSIPSLKTPAX

SEQ ID NO: 62117 - protein, 36 aa, Artificial Sequence; identical to SEQ ID NO: 17551
  Cyclic GFR-binding peptide
  MOD_RES (2)..(4)..(36): Xaa is C or S

SEQ ID NO: 62118 - protein, 21 aa, Artificial Sequence
  Cyclic GFR-binding peptide
DYHYKLVVNNAADKYLISIPS

SEQ ID NO: 62119 - protein, 38 aa, Artificial Sequence; identical to SEQ ID NO: 17557
  Cyclic GFR-binding peptide
  MOD_RES (2)..(4)..(35)..(36): Xaa is C or S

SEQ ID NO: 62120 - protein, 36 aa, Artificial Sequence; identical to SEQ ID NO: 17560
  Cyclic GFR-binding peptide
  MOD_RES (1)..(3)..(35)..(36): Xaa is C or S

SEQ ID NO: 62121 - protein, 39 aa, Artificial Sequence; identical to SEQ ID NO: 17561
  Cyclic GFR-binding peptide
  MOD_RES (2)..(34)..(35): Xaa is C or S

SEQ ID NO: 62122 - protein, 37 aa, Artificial Sequence; identical to SEQ ID NO: 17562
  Cyclic GFR-binding peptide
  MOD_RES (2)..(34)..(35): Xaa is C or S

SEQ ID NO: 62123 - protein, 33 aa, Artificial Sequence
  Cyclic GFR-binding peptide
  MOD_RES (1)..(3): Xaa is C or S
XGXAEVVMDEYKFKVVNNAADLYLISIPELRAP

SEQ ID NO: 62124 - protein, 28 aa, Artificial Sequence
  Cyclic GFR-binding peptide
  MOD_RES (28)..(28): Xaa is C or S
VMEYQKYVKPTRGVIYLISIPSLDQPVX

SEQ ID NO: 62125 - protein, 32 aa, Artificial Sequence
  Cyclic GFR-binding peptide
  MOD_RES (30)..(31): Xaa is C or S
VVMDEYKFKVVKENEDLYLMSIPELETPVXXA

SEQ ID NO: 62126 - protein, 32 aa, Artificial Sequence
  Cyclic GFR-binding peptide
  MOD_RES (1)..(3): Xaa is C or S
XGXARVVMNEYKFKIVNSSDDLYLVSIPELQT

SEQ ID NO: 62127 - protein, 24 aa, Artificial Sequence
  Cyclic GFR-binding peptide
DRYKKLVVNNAADFYLISIANLRA

SEQ ID NO: 62128 - protein, 23 aa, Artificial Sequence
  Cyclic GFR-binding peptide
EYKFKVVNNAADLYLISIPELRA

SEQ ID NO: 62129 - protein, 30 aa, Artificial Sequence
  Cyclic GFR-binding peptide
  MOD_RES (2)..(4): Xaa is C or S
HXGXARVVMNEYKFKIVNSSDDLYLVSIPE

SEQ ID NO: 62130 - protein, 34 aa, Artificial Sequence
  Cyclic GFR-binding peptide
  MOD_RES (30)..(31): Xaa is C or S
KVVMEYQKYVKPTRGVIYLISIPSLDQPVXXPSA

SEQ ID NO: 62131 - protein, 21 aa, Artificial Sequence
  Cyclic GFR-binding peptide
EEYQKYVVKDYEDIYLMSIPS

SEQ ID NO: 62132 - protein, 33 aa, Artificial Sequence; identical to SEQ ID NO: 17582
  Cyclic GFR-binding peptide
  MOD_RES (31)..(32): Xaa is C or S

SEQ ID NO: 62133 - protein, 32 aa, Artificial Sequence
  Cyclic GFR-binding peptide
  MOD_RES (30)..(31): Xaa is C or S
VVMDEYKFKVVNNAADLYLISIPELRAPVXXS

SEQ ID NO: 62134 - protein, 26 aa, Artificial Sequence
  Cyclic GFR-binding peptide
VVMDRYKKLVVNNAADFYLISIANLR

SEQ ID NO: 62135 - protein, 22 aa, Artificial Sequence
  Cyclic GFR-binding peptide
MDYHYKLVVNNAADKYLISIPS

SEQ ID NO: 62136 - protein, 39 aa, Artificial Sequence; identical to SEQ ID NO: 17586
  Cyclic GFR-binding peptide
  MOD_RES (1)..(33)..(34): Xaa is C or S

SEQ ID NO: 62137 - protein, 27 aa, Artificial Sequence
  Cyclic GFR-binding peptide
RVVMNEYQKYIVNSSDDIYLVSIPSLQ

SEQ ID NO: 62138 - protein, 32 aa, Artificial Sequence
  Cyclic GFR-binding peptide
  MOD_RES (27)..(28): Xaa is C or S
MEYQKYIKPTKGIIYLISIPSLDQSVXXPSAS

SEQ ID NO: 62139 - protein, 29 aa, Artificial Sequence
  Cyclic GFR-binding peptide
  MOD_RES (26)..(27): Xaa is C or S
EYKFKVVKDYEDLYLMSIPELETPVXXAK

SEQ ID NO: 62140 - protein, 36 aa, Artificial Sequence; identical to SEQ ID NO: 17597
  Cyclic GFR-binding peptide
  MOD_RES (1)..(3)..(35)..(36): Xaa is C or S

SEQ ID NO: 62141 - protein, 27 aa, Artificial Sequence
  Cyclic GFR-binding peptide
VMNEYQKYIVNSSDDIYLVSIPSLKTP

SEQ ID NO: 62142 - protein, 34 aa, Artificial Sequence
  Cyclic GFR-binding peptide
  MOD_RES (2)..(4): Xaa is C or S
RXGXEAVSMGEEYKFKTPVGMDDLYLVSIPELKT

SEQ ID NO: 62143 - protein, 36 aa, Artificial Sequence; identical to SEQ ID NO: 17598
  Cyclic GFR-binding peptide
  MOD_RES (2)..(34)..(35): Xaa is C or S

SEQ ID NO: 62144 - protein, 25 aa, Artificial Sequence
  Cyclic GFR-binding peptide
MNEYQKYIVNNSSDIYLVSIPSLKT

SEQ ID NO: 62145 - protein, 29 aa, Artificial Sequence
  Cyclic GFR-binding peptide
  MOD_RES (28)..(29): Xaa is C or S
MNEYKFKIVNSSDDLYLVSIPELQTPAXX

SEQ ID NO: 62146 - protein, 35 aa, Artificial Sequence; identical to SEQ ID NO: 17606
  Cyclic GFR-binding peptide
  MOD_RES (2)..(34)..(35): Xaa is C or S

SEQ ID NO: 62147 - protein, 36 aa, Artificial Sequence; identical to SEQ ID NO: 17608
  Cyclic GFR-binding peptide
  MOD_RES (31)..(32): Xaa is C or S

SEQ ID NO: 62148 - protein, 33 aa, Artificial Sequence
  Cyclic GFR-binding peptide
  MOD_RES (27)..(28): Xaa is C or S
DEYKFKVVNNAADLYLISIPELRAPVXXSAPAA

SEQ ID NO: 62149 - protein, 35 aa, Artificial Sequence; identical to SEQ ID NO: 17610
  Cyclic GFR-binding peptide
  MOD_RES (1)..(3)..(35): Xaa is C or S

SEQ ID NO: 62150 - protein, 32 aa, Artificial Sequence; identical to SEQ ID NO: 17611
  Cyclic GFR-binding peptide

SEQ ID NO: 62151 - protein, 25 aa, Artificial Sequence
  Cyclic GFR-binding peptide
EYKFKIVNSSDDLYLVSIPELKTPA

SEQ ID NO: 62152 - protein, 36 aa, Artificial Sequence
  Cyclic GFR-binding peptide
  MOD_RES (30)..(31): Xaa is C or S
VAMGRYKKLYTVVGKDFYLISIANLKTPVXXAKSAK

SEQ ID NO: 62153 - protein, 36 aa, Artificial Sequence; identical to SEQ ID NO: 17614
  Cyclic GFR-binding peptide
  MOD_RES (2)..(4)..(36): Xaa is C or S

SEQ ID NO: 62154 - protein, 29 aa, Artificial Sequence
  Cyclic GFR-binding peptide
  MOD_RES (27)..(28): Xaa is C or S
MEYKFKVKPTRGVLYLISIPELDQPVXXP

SEQ ID NO: 62155 - protein, 32 aa, Artificial Sequence; identical to SEQ ID NO: 17618
  Cyclic GFR-binding peptide
  MOD_RES (31)..(32): Xaa is C or S

SEQ ID NO: 62156 - protein, 35 aa, Artificial Sequence; identical to SEQ ID NO: 17624
  Cyclic GFR-binding peptide
  MOD_RES (31)..(32): Xaa is C or S

SEQ ID NO: 62157 - protein, 29 aa, Artificial Sequence
  Cyclic GFR-binding peptide
  MOD_RES (27)..(28): Xaa is C or S
MEYKFKVKPKRGVLYLISIPELAQPVXXP

SEQ ID NO: 62158 - protein, 26 aa, Artificial Sequence
  Cyclic GFR-binding peptide
MEYKFKVKPTRGVLYLISIPELDQPV

SEQ ID NO: 62159 - protein, 35 aa, Artificial Sequence; identical to SEQ ID NO: 17627
  Cyclic GFR-binding peptide
  MOD_RES (1)..(33): Xaa is C or S

SEQ ID NO: 62160 - protein, 28 aa, Artificial Sequence
  Cyclic GFR-binding peptide
  MOD_RES (27)..(28): Xaa is C or S
NEYQKYIVNSSDDIYLVSIPSLQTPAXX

SEQ ID NO: 62161 - protein, 39 aa, Artificial Sequence; identical to SEQ ID NO: 17628
  Cyclic GFR-binding peptide
  MOD_RES (1)..(33)..(34): Xaa is C or S

SEQ ID NO: 62162 - protein, 20 aa, Artificial Sequence
  Cyclic GFR-binding peptide
EYKFKVKPTRGVLYLISIPE

SEQ ID NO: 62163 - protein, 31 aa, Artificial Sequence
  Cyclic GFR-binding peptide
  MOD_RES (26)..(27): Xaa is C or S
EYKFKVVKDYEDLYLMSIPELETPVXXAKPI

SEQ ID NO: 62164 - protein, 29 aa, Artificial Sequence
  Cyclic GFR-binding peptide
  MOD_RES (29)..(29): Xaa is C or S
VVMEYQKYVKPTRGVIYLISIPSLDQPVX

SEQ ID NO: 62165 - protein, 37 aa, Artificial Sequence; identical to SEQ ID NO: 17633
  Cyclic GFR-binding peptide
  MOD_RES (1)..(32)..(33): Xaa is C or S

SEQ ID NO: 62166 - protein, 27 aa, Artificial Sequence
  Cyclic GFR-binding peptide
  MOD_RES (26)..(27): Xaa is C or S
EYKFKTPVGMDDLYLVSIPELKTPVXX

SEQ ID NO: 62167 - protein, 23 aa, Artificial Sequence
  Cyclic GFR-binding peptide
VMDYHYKLVVNNAADKYLISIPS

SEQ ID NO: 62168 - protein, 29 aa, Artificial Sequence
  Cyclic GFR-binding peptide
  MOD_RES (29)..(29): Xaa is C or S
VMEEYKFKVVKDYEDLYLMSIPELETPVX

SEQ ID NO: 62169 - protein, 24 aa, Artificial Sequence
  Cyclic GFR-binding peptide
EYQKYYTVVGKDIYLISIPSLKTP

SEQ ID NO: 62170 - protein, 34 aa, Artificial Sequence; identical to SEQ ID NO: 17644
  Cyclic GFR-binding peptide
  MOD_RES (32)..(33): Xaa is C or S

SEQ ID NO: 62171 - protein, 27 aa, Artificial Sequence
  Cyclic GFR-binding peptide
  MOD_RES (1)..(1): Xaa is C or S
XSRVIMEYQKYVKPKRGVIYLISIPSL

SEQ ID NO: 62172 - protein, 35 aa, Artificial Sequence; identical to SEQ ID NO: 17650
  Cyclic GFR-binding peptide
  MOD_RES (2)..(4)..(35): Xaa is C or S

SEQ ID NO: 62173 - protein, 34 aa, Artificial Sequence
  Cyclic GFR-binding peptide
  MOD_RES (28)..(29): Xaa is C or S
MDRYKKLVVNNAADFYLISIANLRAPVXXSAPAA

SEQ ID NO: 62174 - protein, 35 aa, Artificial Sequence; identical to SEQ ID NO: 17652
  Cyclic GFR-binding peptide
  MOD_RES (1)..(3)..(35): Xaa is C or S

SEQ ID NO: 62175 - protein, 29 aa, Artificial Sequence
  Cyclic GFR-binding peptide
  MOD_RES (1)..(3): Xaa is C or S
XGXGEVVMEEYQKYVVKDYEDIYLMSIPS

SEQ ID NO: 62176 - protein, 34 aa, Artificial Sequence; identical to SEQ ID NO: 17653
  Cyclic GFR-binding peptide
  MOD_RES (31)..(32): Xaa is C or S

SEQ ID NO: 62177 - protein, 20 aa, Artificial Sequence
  Cyclic GFR-binding peptide
EYKFKIVNSSDDLYLVSIPE

SEQ ID NO: 62178 - protein, 36 aa, Artificial Sequence; identical to SEQ ID NO: 17654
  Cyclic GFR-binding peptide
  MOD_RES (2)..(4)..(35)..(36): Xaa is C or S

SEQ ID NO: 62179 - protein, 26 aa, Artificial Sequence
  Cyclic GFR-binding peptide
MGEYQKYYTVVGKDIYLISIPSLKTP

SEQ ID NO: 62180 - protein, 28 aa, Artificial Sequence
  Cyclic GFR-binding peptide
  MOD_RES (1)..(3): Xaa is C or S
XKXSKVVMEYKFKVKPTRGVLYLISIPE

SEQ ID NO: 62181 - protein, 39 aa, Artificial Sequence; identical to SEQ ID NO: 17658
  Cyclic GFR-binding peptide
  MOD_RES (2)..(4)..(36)..(37): Xaa is C or S

SEQ ID NO: 62182 - protein, 30 aa, Artificial Sequence
  Cyclic GFR-binding peptide
  MOD_RES (30)..(30): Xaa is C or S
VVMDRYKKLVVNNAADFYLISIANLRAPVX

SEQ ID NO: 62183 - protein, 28 aa, Artificial Sequence
  Cyclic GFR-binding peptide
  MOD_RES (26)..(27): Xaa is C or S
EYKFKVKPKRGVLYLISIPELAQPVXXP

SEQ ID NO: 62184 - protein, 33 aa, Artificial Sequence
  Cyclic GFR-binding peptide
  MOD_RES (2)..(2): Xaa is C or S
GXEAVSMGEEYQKYTPVGMDDIYLVSIPSLKTP

SEQ ID NO: 62185 - protein, 22 aa, Artificial Sequence
  Cyclic GFR-binding peptide
VMEYKFKVKPTRGVLYLISIPE

SEQ ID NO: 62186 - protein, 29 aa, Artificial Sequence
  Cyclic GFR-binding peptide
AKVVMNEYKFKIVNNSSDLYLVSIPELKT

SEQ ID NO: 62187 - protein, 32 aa, Artificial Sequence; identical to SEQ ID NO: 17667
  Cyclic GFR-binding peptide
  MOD_RES (1)..(32): Xaa is C or S

SEQ ID NO: 62188 - protein, 37 aa, Artificial Sequence; identical to SEQ ID NO: 17670
  Cyclic GFR-binding peptide
  MOD_RES (1)..(33)..(34): Xaa is C or S

SEQ ID NO: 62189 - protein, 29 aa, Artificial Sequence
  Cyclic GFR-binding peptide
  MOD_RES (1)..(1): Xaa is C or S
XSRVIMEYQKYVKPKRGVIYLISIPSLAQ

SEQ ID NO: 62190 - protein, 34 aa, Artificial Sequence
  Cyclic GFR-binding peptide
  MOD_RES (30)..(31): Xaa is C or S
KVVMEYKFKVKPTRGVLYLISIPELDQPVXXPSA

SEQ ID NO: 62191 - protein, 32 aa, Artificial Sequence; identical to SEQ ID NO: 17679
  Cyclic GFR-binding peptide
  MOD_RES (31)..(32): Xaa is C or S

SEQ ID NO: 62192 - protein, 20 aa, Artificial Sequence
  Cyclic GFR-binding peptide
YHYKLVVNNAADKYLISIPS

SEQ ID NO: 62193 - protein, 33 aa, Artificial Sequence; identical to SEQ ID NO: 17680
  Cyclic GFR-binding peptide
  MOD_RES (1)..(33): Xaa is C or S

SEQ ID NO: 62194 - protein, 32 aa, Artificial Sequence
  Cyclic GFR-binding peptide
  MOD_RES (2)..(4): Xaa is C or S
HXGXAKVVMNEYKFKIVNNSSDLYLVSIPELK

SEQ ID NO: 62195 - protein, 38 aa, Artificial Sequence; identical to SEQ ID NO: 17686
  Cyclic GFR-binding peptide
  MOD_RES (1)..(3)..(34)..(35): Xaa is C or S

SEQ ID NO: 62196 - protein, 24 aa, Artificial Sequence
  Cyclic GFR-binding peptide
GEYQKYYTVVGKDIYLISIPSLKT

SEQ ID NO: 62197 - protein, 32 aa, Artificial Sequence
  Cyclic GFR-binding peptide
  MOD_RES (1)..(3): Xaa is C or S
XGXGEVVMDEYKFKVVKENEDLYLMSIPELET

SEQ ID NO: 62198 - protein, 29 aa, Artificial Sequence
  Cyclic GFR-binding peptide
  MOD_RES (26)..(27): Xaa is C or S
EYQKYVKPTRGVIYLISIPSLDQPVXXPS

SEQ ID NO: 62199 - protein, 33 aa, Artificial Sequence; identical to SEQ ID NO: 17693
  Cyclic GFR-binding peptide
  MOD_RES (1)..(33): Xaa is C or S

SEQ ID NO: 62200 - protein, 20 aa, Artificial Sequence
  Cyclic GFR-binding peptide
EYQKYYTVVGKDIYLISIPS

SEQ ID NO: 62201 - protein, 26 aa, Artificial Sequence
  Cyclic GFR-binding peptide
MEYKFKVKPKRGVLYLISIPELAQPV

SEQ ID NO: 62202 - protein, 28 aa, Artificial Sequence
  Cyclic GFR-binding peptide
  MOD_RES (2)..(2): Xaa is C or S
GXESVAMGEYQKYYTVVGKDIYLISIPS

SEQ ID NO: 62203 - protein, 28 aa, Artificial Sequence
  Cyclic GFR-binding peptide
VMDRYKKLVVNNAADFYLISIANLRAPV

SEQ ID NO: 62204 - protein, 21 aa, Artificial Sequence
  Cyclic GFR-binding peptide
EYQKYVKPTRGVIYLISIPSL

SEQ ID NO: 62205 - protein, 27 aa, Artificial Sequence
  Cyclic GFR-binding peptide
  MOD_RES (27)..(27): Xaa is C or S
NEYQKYIVNSSDDIYLVSIPSLKTPAX

SEQ ID NO: 62206 - protein, 39 aa, Artificial Sequence; identical to SEQ ID NO: 17703
  Cyclic GFR-binding peptide
  MOD_RES (1)..(3)..(35): Xaa is C or S

SEQ ID NO: 62207 - protein, 34 aa, Artificial Sequence
  Cyclic GFR-binding peptide
  MOD_RES (30)..(31): Xaa is C or S
VVMNEYQKYIVNSSDDIYLVSIPSLQTPAXXPKP

SEQ ID NO: 62208 - protein, 36 aa, Artificial Sequence; identical to SEQ ID NO: 17708
  Cyclic GFR-binding peptide
  MOD_RES (1)..(3)..(35)..(36): Xaa is C or S

SEQ ID NO: 62209 - protein, 31 aa, Artificial Sequence
  Cyclic GFR-binding peptide
  MOD_RES (28)..(29): Xaa is C or S
MDRYKKLVVNNAADFYLISIANLRAPVXXSA

SEQ ID NO: 62210 - protein, 25 aa, Artificial Sequence
  Cyclic GFR-binding peptide
MEYKFKVKPKRGVLYLISIPELAQP

SEQ ID NO: 62211 - protein, 35 aa, Artificial Sequence; identical to SEQ ID NO: 17711
  Cyclic GFR-binding peptide
  MOD_RES (1)..(3)..(35): Xaa is C or S

SEQ ID NO: 62212 - protein, 24 aa, Artificial Sequence
  Cyclic GFR-binding peptide
MEEYKFKVVKDYEDLYLMSIPELE

SEQ ID NO: 62213 - protein, 30 aa, Artificial Sequence
  Cyclic GFR-binding peptide
  MOD_RES (1)..(3): Xaa is C or S
XGXESVAMGRYKKLYTVVGKDFYLISIANL

SEQ ID NO: 62214 - protein, 28 aa, Artificial Sequence
  Cyclic GFR-binding peptide
  MOD_RES (1)..(1): Xaa is C or S
XSKVIMEYKFKIKPTKGILYLISIPELD

SEQ ID NO: 62215 - protein, 27 aa, Artificial Sequence
  Cyclic GFR-binding peptide
  MOD_RES (2)..(2): Xaa is C or S
KXSKVVMEYKFKVKPTRGVLYLISIPE

SEQ ID NO: 62216 - protein, 37 aa, Artificial Sequence; identical to SEQ ID NO: 17721
  Cyclic GFR-binding peptide
  MOD_RES (2)..(33)..(34): Xaa is C or S

SEQ ID NO: 62217 - protein, 27 aa, Artificial Sequence
  Cyclic GFR-binding peptide
  MOD_RES (26)..(27): Xaa is C or S
EYKFKIVNSSDDLYLVSIPELQTPAXX

SEQ ID NO: 62218 - protein, 20 aa, Artificial Sequence
  Cyclic GFR-binding peptide
EYKFKVKPKRGVLYLISIPE

SEQ ID NO: 62219 - protein, 39 aa, Artificial Sequence; identical to SEQ ID NO: 17723
  Cyclic GFR-binding peptide
  MOD_RES (1)..(33)..(34): Xaa is C or S

SEQ ID NO: 62220 - protein, 31 aa, Artificial Sequence
  Cyclic GFR-binding peptide
  MOD_RES (1)..(3): Xaa is C or S
XGXEAVSMGEEYQKYTPVGMDDIYLVSIPSL

SEQ ID NO: 62221 - protein, 30 aa, Artificial Sequence
  Cyclic GFR-binding peptide
  MOD_RES (1)..(1): Xaa is C or S
XSKVIMEYKFKIKPTKGILYLISIPELDQS

SEQ ID NO: 62222 - protein, 28 aa, Artificial Sequence
  Cyclic GFR-binding peptide
  MOD_RES (26)..(27): Xaa is C or S
EYQKYIVNSSDDIYLVSIPSLKTPAXXP

SEQ ID NO: 62223 - protein, 20 aa, Artificial Sequence
  Cyclic GFR-binding peptide
EYQKYYTVVGKDIYLISIPS

SEQ ID NO: 62224 - protein, 33 aa, Artificial Sequence; identical to SEQ ID NO: 17725
  Cyclic GFR-binding peptide
  MOD_RES (31)..(31): Xaa is C or S

SEQ ID NO: 62225 - protein, 27 aa, Artificial Sequence
  Cyclic GFR-binding peptide
VMDEYKFKVVNNAADLYLISIPELRAP

SEQ ID NO: 62226 - protein, 23 aa, Artificial Sequence
  Cyclic GFR-binding peptide
MNEYQKYIVNSSDDIYLVSIPSL

SEQ ID NO: 62227 - protein, 24 aa, Artificial Sequence
  Cyclic GFR-binding peptide
GRYKKLYTVVGKDFYLISIANLKT

SEQ ID NO: 62228 - protein, 37 aa, Artificial Sequence; identical to SEQ ID NO: 17729
  Cyclic GFR-binding peptide
  MOD_RES (2)..(4)..(36): Xaa is C or S

SEQ ID NO: 62229 - protein, 28 aa, Artificial Sequence
  Cyclic GFR-binding peptide
VMNEYKFKIVNSSDDLYLVSIPELQTPA

SEQ ID NO: 62230 - protein, 39 aa, Artificial Sequence; identical to SEQ ID NO: 17731
  Cyclic GFR-binding peptide
  MOD_RES (2)..(4)..(36)..(37): Xaa is C or S

SEQ ID NO: 62231 - protein, 26 aa, Artificial Sequence
  Cyclic GFR-binding peptide
AKVVMNEYKFKIVNNSSDLYLVSIPE

SEQ ID NO: 62232 - protein, 35 aa, Artificial Sequence; identical to SEQ ID NO: 17733
  Cyclic GFR-binding peptide
  MOD_RES (32)..(33): Xaa is C or S

SEQ ID NO: 62233 - protein, 34 aa, Artificial Sequence; identical to SEQ ID NO: 17736
  Cyclic GFR-binding peptide
  MOD_RES (1)..(33)..(34): Xaa is C or S

SEQ ID NO: 62234 - protein, 32 aa, Artificial Sequence
  Cyclic GFR-binding peptide
  MOD_RES (2)..(2): Xaa is C or S
GXGEVVMDEYKFKVVKENEDLYLMSIPELETP

SEQ ID NO: 62235 - protein, 25 aa, Artificial Sequence
  Cyclic GFR-binding peptide
VVMDYHYKLVVNNAADKYLISIPSL

SEQ ID NO: 62236 - protein, 37 aa, Artificial Sequence; identical to SEQ ID NO: 17738
  Cyclic GFR-binding peptide
  MOD_RES (32)..(32): Xaa is C or S

SEQ ID NO: 62237 - protein, 23 aa, Artificial Sequence
  Cyclic GFR-binding peptide
EYKFKIVNSSDDLYLVSIPELKT

SEQ ID NO: 62238 - protein, 31 aa, Artificial Sequence
  Cyclic GFR-binding peptide
  MOD_RES (2)..(4): Xaa is C or S
HXGXAKVVMNEYQKYIVNNSSDIYLVSIPSL

SEQ ID NO: 62239 - protein, 35 aa, Artificial Sequence; identical to SEQ ID NO: 17741
  Cyclic GFR-binding peptide
  MOD_RES (32)..(33): Xaa is C or S

SEQ ID NO: 62240 - protein, 29 aa, Artificial Sequence
  Cyclic GFR-binding peptide
  MOD_RES (2)..(2): Xaa is C or S
KXSKVIMEYQKYIKPTKGIIYLISIPSLD

SEQ ID NO: 62241 - protein, 33 aa, Artificial Sequence
  Cyclic GFR-binding peptide
  MOD_RES (29)..(30): Xaa is C or S
AMGRYKKLYTVVGKDFYLISIANLKTPVXXAKS

SEQ ID NO: 62242 - protein, 37 aa, Artificial Sequence; identical to SEQ ID NO: 17747
  Cyclic GFR-binding peptide
  MOD_RES (1)..(33)..(34): Xaa is C or S

SEQ ID NO: 62243 - protein, 32 aa, Artificial Sequence
  Cyclic GFR-binding peptide
  MOD_RES (1)..(1): Xaa is C or S
XEAVSMGEEYKFKTPVGMDDLYLVSIPELKTP

SEQ ID NO: 62244 - protein, 25 aa, Artificial Sequence
  Cyclic GFR-binding peptide
EVVMDEYKFKVVNNAADLYLISIPE

SEQ ID NO: 62245 - protein, 35 aa, Artificial Sequence; identical to SEQ ID NO: 17750
  Cyclic GFR-binding peptide
  MOD_RES (1)..(32)..(33): Xaa is C or S

SEQ ID NO: 62246 - protein, 33 aa, Artificial Sequence
  Cyclic GFR-binding peptide
  MOD_RES (1)..(3): Xaa is C or S
XGXAEVVMDYHYKLVVNNAADKYLISIPSLRAP

SEQ ID NO: 62247 - protein, 20 aa, Artificial Sequence
  Cyclic GFR-binding peptide
EYKFKVVKENEDLYLMSIPE

SEQ ID NO: 62248 - protein, 34 aa, Artificial Sequence; identical to SEQ ID NO: 17752
  Cyclic GFR-binding peptide
  MOD_RES (2)..(34): Xaa is C or S

SEQ ID NO: 62249 - protein, 23 aa, Artificial Sequence
  Cyclic GFR-binding peptide
VMDEYKFKVVKENEDLYLMSIPE

SEQ ID NO: 62250 - protein, 28 aa, Artificial Sequence
  Cyclic GFR-binding peptide
  MOD_RES (2)..(2): Xaa is C or S
GXSRVVMNEYQKYIVNSSDDIYLVSIPS

SEQ ID NO: 62251 - protein, 34 aa, Artificial Sequence; identical to SEQ ID NO: 17753
  Cyclic GFR-binding peptide
  MOD_RES (1)..(32)..(33): Xaa is C or S

SEQ ID NO: 62252 - protein, 28 aa, Artificial Sequence
  Cyclic GFR-binding peptide
  MOD_RES (26)..(27): Xaa is C or S
EYQKYVVKENEDIYLMSIPSLETPVXXA

SEQ ID NO: 62253 - protein, 33 aa, Artificial Sequence; identical to SEQ ID NO: 17760
  Cyclic GFR-binding peptide
  MOD_RES (31)..(32): Xaa is C or S

SEQ ID NO: 62254 - protein, 29 aa, Artificial Sequence
  Cyclic GFR-binding peptide
EVVMDEYKFKVVKENEDLYLMSIPELETP

SEQ ID NO: 62255 - protein, 38 aa, Artificial Sequence; identical to SEQ ID NO: 17765
  Cyclic GFR-binding peptide
  MOD_RES (1)..(33)..(34): Xaa is C or S

SEQ ID NO: 62256 - protein, 34 aa, Artificial Sequence
  Cyclic GFR-binding peptide
  MOD_RES (1)..(33)..(34): Xaa is C or S
XESVAMGEYQKYYTVVGKDIYLISIPSLKTPVXX

SEQ ID NO: 62257 - protein, 32 aa, Artificial Sequence
  Cyclic GFR-binding peptide
  MOD_RES (30)..(31): Xaa is C or S
VVMNEYKFKIVNSSDDLYLVSIPELKTPAXXP

SEQ ID NO: 62258 - protein, 36 aa, Artificial Sequence; identical to SEQ ID NO: 17770
  Cyclic GFR-binding peptide
  MOD_RES (1)..(3)..(34)..(35): Xaa is C or S

SEQ ID NO: 62259 - protein, 30 aa, Artificial Sequence
  Cyclic GFR-binding peptide
  MOD_RES (27)..(28): Xaa is C or S
GEYQKYYTVVGKDIYLISIPSLKTPVXXAK

SEQ ID NO: 62260 - protein, 28 aa, Artificial Sequence
  Cyclic GFR-binding peptide
  MOD_RES (27)..(28): Xaa is C or S
GRYKKLYTVVGKDFYLISIANLKTPVXX

SEQ ID NO: 62261 - protein, 26 aa, Artificial Sequence
  Cyclic GFR-binding peptide
ESVAMGRYKKLYTVVGKDFYLISIAN

SEQ ID NO: 62262 - protein, 31 aa, Artificial Sequence; identical to SEQ ID NO: 17773
  Cyclic GFR-binding peptide
  MOD_RES (1)..(1): Xaa is C or S

SEQ ID NO: 62263 - protein, 24 aa, Artificial Sequence
  Cyclic GFR-binding peptide
EYKFKIVNNSSDLYLVSIPELKTP

SEQ ID NO: 62264 - protein, 22 aa, Artificial Sequence
  Cyclic GFR-binding peptide
VMEYQKYVKPTRGVIYLISIPS

SEQ ID NO: 62265 - protein, 33 aa, Artificial Sequence; identical to SEQ ID NO: 17774
  Cyclic GFR-binding peptide
  MOD_RES (1)..(32)..(33): Xaa is C or S

SEQ ID NO: 62266 - protein, 30 aa, Artificial Sequence
  Cyclic GFR-binding peptide
SRVVMNEYQKYIVNSSDDIYLVSIPSLKTP

SEQ ID NO: 62267 - protein, 31 aa, Artificial Sequence
  Cyclic GFR-binding peptide
  MOD_RES (26)..(27): Xaa is C or S
EYQKYIVNSSDDIYLVSIPSLKTPAXXPKPV

SEQ ID NO: 62268 - protein, 32 aa, Artificial Sequence
  Cyclic GFR-binding peptide
  MOD_RES (1)..(3): Xaa is C or S
XGXEAVSMGEEYKFKTPVGMDDLYLVSIPELK

SEQ ID NO: 62269 - protein, 34 aa, Artificial Sequence
  Cyclic GFR-binding peptide
  MOD_RES (29)..(30): Xaa is C or S
VIMEYKFKIKPTKGILYLISIPELDQSVXXPSAS

SEQ ID NO: 62270 - protein, 28 aa, Artificial Sequence
  Cyclic GFR-binding peptide
GEVVMEEYKFKVVKDYEDLYLMSIPELE

SEQ ID NO: 62271 - protein, 26 aa, Artificial Sequence
  Cyclic GFR-binding peptide
VMEEYQKYVVKDYEDIYLMSIPSLET

SEQ ID NO: 62272 - protein, 29 aa, Artificial Sequence
  Cyclic GFR-binding peptide
EVVMDYHYKLVVNNAADKYLISIPSLRAP

SEQ ID NO: 62273 - protein, 31 aa, Artificial Sequence
  Cyclic GFR-binding peptide
  MOD_RES (29)..(30): Xaa is C or S
VIMEYKFKVKPKRGVLYLISIPELAQPVXXP

SEQ ID NO: 62274 - protein, 36 aa, Artificial Sequence; identical to SEQ ID NO: 17796
  Cyclic GFR-binding peptide
  MOD_RES (2)..(33)..(34): Xaa is C or S

SEQ ID NO: 62275 - protein, 37 aa, Artificial Sequence; identical to SEQ ID NO: 17797
  Cyclic GFR-binding peptide
  MOD_RES (1)..(33)..(34): Xaa is C or S

SEQ ID NO: 62276 - protein, 32 aa, Artificial Sequence
  Cyclic GFR-binding peptide
  MOD_RES (2)..(4): Xaa is C or S
RXGXESVAMGEYQKYYTVVGKDIYLISIPSLK

SEQ ID NO: 62277 - protein, 31 aa, Artificial Sequence
  Cyclic GFR-binding peptide
  MOD_RES (1)..(1): Xaa is C or S
XGEVVMEEYQKYVVKDYEDIYLMSIPSLETP

SEQ ID NO: 62278 - protein, 29 aa, Artificial Sequence
  Cyclic GFR-binding peptide
  MOD_RES (2)..(2): Xaa is C or S
GXEAVSMGEEYKFKTPVGMDDLYLVSIPE

SEQ ID NO: 62279 - protein, 35 aa, Artificial Sequence
  Cyclic GFR-binding peptide
  MOD_RES (29)..(30): Xaa is C or S
VMEEYQKYVVKDYEDIYLMSIPSLETPVXXAKPIS

SEQ ID NO: 62280 - protein, 32 aa, Artificial Sequence
  Cyclic GFR-binding peptide
  MOD_RES (29)..(30): Xaa is C or S
MGEEYKFKTPVGMDDLYLVSIPELKTPVXXAK

SEQ ID NO: 62281 - protein, 35 aa, Artificial Sequence; identical to SEQ ID NO: 17802
  Cyclic GFR-binding peptide
  MOD_RES (32)..(33): Xaa is C or S

SEQ ID NO: 62282 - protein, 25 aa, Artificial Sequence
  Cyclic GFR-binding peptide
IMEYKFKVKPKRGVLYLISIPELAQ

SEQ ID NO: 62283 - protein, 28 aa, Artificial Sequence
  Cyclic GFR-binding peptide
  MOD_RES (26)..(26): Xaa is C or S
EYKFKIVNSSDDLYLVSIPELKTPAXTP

SEQ ID NO: 62284 - protein, 22 aa, Artificial Sequence
  Cyclic GFR-binding peptide
EYQKYVVKENEDIYLMSIPSLE

SEQ ID NO: 62285 - protein, 34 aa, Artificial Sequence
  Cyclic GFR-binding peptide
  MOD_RES (30)..(31): Xaa is C or S
VVMDEYKFKVVNNAADLYLISIPELRAPVXXSAP

SEQ ID NO: 62286 - protein, 42 aa, Artificial Sequence; identical to SEQ ID NO: 17807
  Cyclic GFR-binding peptide
  MOD_RES (2)..(4)..(36): Xaa is C or S

SEQ ID NO: 62287 - protein, 31 aa, Artificial Sequence
  Cyclic GFR-binding peptide
  MOD_RES (1)..(1): Xaa is C or S
XAEVVMDRYKKLVVNNAADFYLISIANLRAP

SEQ ID NO: 62288 - protein, 31 aa, Artificial Sequence
  Cyclic GFR-binding peptide
  MOD_RES (1)..(1): Xaa is C or S
XAEVVMDYHYKLVVNNAADKYLISIPSLRAP

SEQ ID NO: 62289 - protein, 24 aa, Artificial Sequence
  Cyclic GFR-binding peptide
MEEYQKYVVKDYEDIYLMSIPSLE

SEQ ID NO: 62290 - protein, 40 aa, Artificial Sequence; identical to SEQ ID NO: 17810
  Cyclic GFR-binding peptide
  MOD_RES (2)..(4)..(35)..(36): Xaa is C or S

SEQ ID NO: 62291 - protein, 30 aa, Artificial Sequence
  Cyclic GFR-binding peptide
ARVVMNEYKFKIVNSSDDLYLVSIPELQTP

SEQ ID NO: 62292 - protein, 32 aa, Artificial Sequence
  Cyclic GFR-binding peptide
  MOD_RES (2)..(2): Xaa is C or S
GXAKVVMNEYKFKIVNNSSDLYLVSIPELKTP

SEQ ID NO: 62293 - protein, 35 aa, Artificial Sequence
  Cyclic GFR-binding peptide
  MOD_RES (30)..(31): Xaa is C or S
VVMEEYQKYVVKDYEDIYLMSIPSLETPVXXAKPI

SEQ ID NO: 62294 - protein, 30 aa, Artificial Sequence; identical to SEQ ID NO: 17813
  Cyclic GFR-binding peptide

SEQ ID NO: 62295 - protein, 30 aa, Artificial Sequence
  Cyclic GFR-binding peptide
  MOD_RES (29)..(30): Xaa is C or S
VMDRYKKLVVNNAADFYLISIANLRAPVXX

SEQ ID NO: 62296 - protein, 39 aa, Artificial Sequence; identical to SEQ ID NO: 17814
  Cyclic GFR-binding peptide
  MOD_RES (2)..(4)..(35)..(36): Xaa is C or S

SEQ ID NO: 62297 - protein, 38 aa, Artificial Sequence; identical to SEQ ID NO: 17816
  Cyclic GFR-binding peptide
  MOD_RES (33)..(34): Xaa is C or S

SEQ ID NO: 62298 - protein, 26 aa, Artificial Sequence
  Cyclic GFR-binding peptide
  MOD_RES (1)..(1): Xaa is C or S
XSRVIMEYKFKVKPKRGVLYLISIPE

SEQ ID NO: 62299 - protein, 32 aa, Artificial Sequence
  Cyclic GFR-binding peptide
  MOD_RES (2)..(2): Xaa is C or S
GXESVAMGYHYKLYTVVGKDKYLISIPSLKTP

SEQ ID NO: 62300 - protein, 29 aa, Artificial Sequence
  Cyclic GFR-binding peptide
  MOD_RES (2)..(4): Xaa is C or S
SXKXSKVIMEYKFKIKPTKGILYLISIPE

SEQ ID NO: 62301 - protein, 20 aa, Artificial Sequence
  Cyclic GFR-binding peptide
EYQKYIVNNSSDIYLVSIPS

SEQ ID NO: 62302 - protein, 21 aa, Artificial Sequence
  Cyclic GFR-binding peptide
EEYKFKVVKDYEDLYLMSIPE

SEQ ID NO: 62303 - protein, 34 aa, Artificial Sequence; identical to SEQ ID NO: 17828
  Cyclic GFR-binding peptide
  MOD_RES (31)..(32): Xaa is C or S

SEQ ID NO: 62304 - protein, 36 aa, Artificial Sequence; identical to SEQ ID NO: 17827
  Cyclic GFR-binding peptide
  MOD_RES (1)..(32)..(33): Xaa is C or S

SEQ ID NO: 62305 - protein, 36 aa, Artificial Sequence; identical to SEQ ID NO: 17830
  Cyclic GFR-binding peptide
  MOD_RES (1)..(33)..(34): Xaa is C or S

SEQ ID NO: 62306 - protein, 30 aa, Artificial Sequence
  Cyclic GFR-binding peptide
  MOD_RES (30)..(30): Xaa is C or S
KVIMEYKFKIKPTKGILYLISIPELDQSVX

SEQ ID NO: 62307 - protein, 23 aa, Artificial Sequence
  Cyclic GFR-binding peptide
NEYQKYIVNSSDDIYLVSIPSLK

SEQ ID NO: 62308 - protein, 38 aa, Artificial Sequence; identical to SEQ ID NO: 17834
  Cyclic GFR-binding peptide
  MOD_RES (1)..(32)..(33): Xaa is C or S

SEQ ID NO: 62309 - protein, 36 aa, Artificial Sequence; identical to SEQ ID NO: 17836
  Cyclic GFR-binding peptide
  MOD_RES (2)..(4)..(36): Xaa is C or S

SEQ ID NO: 62310 - protein, 34 aa, Artificial Sequence; identical to SEQ ID NO: 17837
  Cyclic GFR-binding peptide
  MOD_RES (32)..(33): Xaa is C or S

SEQ ID NO: 62311 - protein, 28 aa, Artificial Sequence
  Cyclic GFR-binding peptide
KVVMNEYKFKIVNNSSDLYLVSIPELKT

SEQ ID NO: 62312 - protein, 29 aa, Artificial Sequence
  Cyclic GFR-binding peptide
KVIMEYKFKIKPTKGILYLISIPELDQSV

SEQ ID NO: 62313 - protein, 21 aa, Artificial Sequence
  Cyclic GFR-binding peptide
RYKKLYTVVGKDFYLISIANL

SEQ ID NO: 62314 - protein, 36 aa, Artificial Sequence
  Cyclic GFR-binding peptide
  MOD_RES (30)..(31): Xaa is C or S
VVMNEYQKYIVNNSSDIYLVSIPSLKTPAXXAKPVA

SEQ ID NO: 62315 - protein, 30 aa, Artificial Sequence
  Cyclic GFR-binding peptide
  MOD_RES (2)..(4): Xaa is C or S
RXGXGEVVMEEYKFKVVKDYEDLYLMSIPE

SEQ ID NO: 62316 - protein, 36 aa, Artificial Sequence; identical to SEQ ID NO: 17848
  Cyclic GFR-binding peptide
  MOD_RES (1)..(32)..(33): Xaa is C or S

SEQ ID NO: 62317 - protein, 35 aa, Artificial Sequence; identical to SEQ ID NO: 17850
  Cyclic GFR-binding peptide
  MOD_RES (1)..(32)..(33): Xaa is C or S

SEQ ID NO: 62318 - protein, 31 aa, Artificial Sequence
  Cyclic GFR-binding peptide
  MOD_RES (1)..(3): Xaa is C or S
XKXSKVIMEYQKYIKPTKGIIYLISIPSLDQ

SEQ ID NO: 62319 - protein, 40 aa, Artificial Sequence; identical to SEQ ID NO: 17854
  Cyclic GFR-binding peptide
  MOD_RES (1)..(3)..(35)..(36): Xaa is C or S

SEQ ID NO: 62320 - protein, 29 aa, Artificial Sequence
  Cyclic GFR-binding peptide
VVMDRYKKLVVNNAADFYLISIANLRAPV

SEQ ID NO: 62321 - protein, 26 aa, Artificial Sequence
  Cyclic GFR-binding peptide
VMDEYKFKVVKENEDLYLMSIPELET

SEQ ID NO: 62322 - protein, 24 aa, Artificial Sequence
  Cyclic GFR-binding peptide
DEYKFKVVKENEDLYLMSIPELET

SEQ ID NO: 62323 - protein, 39 aa, Artificial Sequence; identical to SEQ ID NO: 17857
  Cyclic GFR-binding peptide
  MOD_RES (2)..(4)..(36)..(37): Xaa is C or S

SEQ ID NO: 62324 - protein, 33 aa, Artificial Sequence
  Cyclic GFR-binding peptide
  MOD_RES (27)..(28): Xaa is C or S
MEYKFKVKPTRGVLYLISIPELDQPVXXPSASA

SEQ ID NO: 62325 - protein, 36 aa, Artificial Sequence; identical to SEQ ID NO: 17860
  Cyclic GFR-binding peptide
  MOD_RES (1)..(33)..(34): Xaa is C or S

SEQ ID NO: 62326 - protein, 38 aa, Artificial Sequence; identical to SEQ ID NO: 17861
  Cyclic GFR-binding peptide
  MOD_RES (32)..(33): Xaa is C or S

SEQ ID NO: 62327 - protein, 33 aa, Artificial Sequence
  Cyclic GFR-binding peptide
  MOD_RES (29)..(30): Xaa is C or S
VMNEYQKYIVNSSDDIYLVSIPSLKTPAXXPKP

SEQ ID NO: 62328 - protein, 37 aa, Artificial Sequence; identical to SEQ ID NO: 17863
  Cyclic GFR-binding peptide
  MOD_RES (1)..(3)..(35)..(36): Xaa is C or S

SEQ ID NO: 62329 - protein, 38 aa, Artificial Sequence; identical to SEQ ID NO: 17862
  Cyclic GFR-binding peptide
  MOD_RES (1)..(3)..(35)..(36): Xaa is C or S

SEQ ID NO: 62330 - protein, 28 aa, Artificial Sequence
  Cyclic GFR-binding peptide
  MOD_RES (26)..(27): Xaa is C or S
EYKFKVVNNAADLYLISIPELRAPVXXS

SEQ ID NO: 62331 - protein, 31 aa, Artificial Sequence; identical to SEQ ID NO: 17866
  Cyclic GFR-binding peptide

SEQ ID NO: 62332 - protein, 36 aa, Artificial Sequence
  Cyclic GFR-binding peptide
  MOD_RES (30)..(31): Xaa is C or S
VVMDRYKKLVVNNAADFYLISIANLRAPVXXSAPAA

SEQ ID NO: 62333 - protein, 23 aa, Artificial Sequence
  Cyclic GFR-binding peptide
EEYQKYTPVGMDDIYLVSIPSLK

SEQ ID NO: 62334 - protein, 33 aa, Artificial Sequence
  Cyclic GFR-binding peptide
  MOD_RES (29)..(30): Xaa is C or S
VVMEYKFKVKPTRGVLYLISIPELDQPVXXPSA

SEQ ID NO: 62335 - protein, 37 aa, Artificial Sequence; identical to SEQ ID NO: 17868
  Cyclic GFR-binding peptide
  MOD_RES (32)..(33): Xaa is C or S

SEQ ID NO: 62336 - protein, 29 aa, Artificial Sequence
  Cyclic GFR-binding peptide
  MOD_RES (29)..(29): Xaa is C or S
VMDEYQKYVVKENEDIYLMSIPSLETPVX

SEQ ID NO: 62337 - protein, 33 aa, Artificial Sequence
  Cyclic GFR-binding peptide
  MOD_RES (29)..(30): Xaa is C or S
VMNEYKFKIVNSSDDLYLVSIPELQTPAXXPKP

SEQ ID NO: 62338 - protein, 32 aa, Artificial Sequence
  Cyclic GFR-binding peptide
  MOD_RES (26)..(27): Xaa is C or S
EYKFKVKPKRGVLYLISIPELAQPVXXPAASA

SEQ ID NO: 62339 - protein, 31 aa, Artificial Sequence; identical to SEQ ID NO: 17873
  Cyclic GFR-binding peptide

SEQ ID NO: 62340 - protein, 32 aa, Artificial Sequence
  Cyclic GFR-binding peptide
  MOD_RES (1)..(3): Xaa is C or S
XGXAKVVMNEYQKYIVNNSSDIYLVSIPSLKT

SEQ ID NO: 62341 - protein, 28 aa, Artificial Sequence
  Cyclic GFR-binding peptide
  MOD_RES (26)..(27): Xaa is C or S
RYKKLVVNNAADFYLISIANLRAPVXXS

SEQ ID NO: 62342 - protein, 28 aa, Artificial Sequence
  Cyclic GFR-binding peptide
VAMGYHYKLYTVVGKDKYLISIPSLKTP

SEQ ID NO: 62343 - protein, 35 aa, Artificial Sequence; identical to SEQ ID NO: 17878
  Cyclic GFR-binding peptide
  MOD_RES (2)..(4): Xaa is C or S

SEQ ID NO: 62344 - protein, 34 aa, Artificial Sequence; identical to SEQ ID NO: 17880
  Cyclic GFR-binding peptide
  MOD_RES (2)..(34): Xaa is C or S

SEQ ID NO: 62345 - protein, 35 aa, Artificial Sequence
  Cyclic GFR-binding peptide
  MOD_RES (32)..(33): Xaa is C or S
AVSMGEEYKFKTPVGMDDLYLVSIPELKTPVXXAK

SEQ ID NO: 62346 - protein, 28 aa, Artificial Sequence
  Cyclic GFR-binding peptide
  MOD_RES (26)..(27): Xaa is C or S
EYQKYYTVVGKDIYLISIPSLKTPVXXA

SEQ ID NO: 62347 - protein, 30 aa, Artificial Sequence
  Cyclic GFR-binding peptide
  MOD_RES (1)..(1): Xaa is C or S
XAEVVMDYHYKLVVNNAADKYLISIPSLRA

SEQ ID NO: 62348 - protein, 30 aa, Artificial Sequence
  Cyclic GFR-binding peptide
  MOD_RES (29)..(30): Xaa is C or S
AMGYHYKLYTVVGKDKYLISIPSLKTPVXX

SEQ ID NO: 62349 - protein, 38 aa, Artificial Sequence; identical to SEQ ID NO: 17885
  Cyclic GFR-binding peptide
  MOD_RES (1)..(32)..(33): Xaa is C or S

SEQ ID NO: 62350 - protein, 31 aa, Artificial Sequence; identical to SEQ ID NO: 17886
  Cyclic GFR-binding peptide
  MOD_RES (31)..(31): Xaa is C or S

SEQ ID NO: 62351 - protein, 25 aa, Artificial Sequence
  Cyclic GFR-binding peptide
VIMEYKFKIKPTKGILYLISIPELD

SEQ ID NO: 62352 - protein, 36 aa, Artificial Sequence; identical to SEQ ID NO: 17887
  Cyclic GFR-binding peptide
  MOD_RES (2)..(4): Xaa is C or S

SEQ ID NO: 62353 - protein, 26 aa, Artificial Sequence
  Cyclic GFR-binding peptide
  MOD_RES (26)..(26): Xaa is C or S
EYQKYVVKENEDIYLMSIPSLETPVX

SEQ ID NO: 62354 - protein, 32 aa, Artificial Sequence; identical to SEQ ID NO: 17891
  Cyclic GFR-binding peptide
  MOD_RES (31)..(31): Xaa is C or S

SEQ ID NO: 62355 - protein, 22 aa, Artificial Sequence
  Cyclic GFR-binding peptide
IMEYQKYIKPTKGIIYLISIPS

SEQ ID NO: 62356 - protein, 34 aa, Artificial Sequence
  Cyclic GFR-binding peptide
  MOD_RES (28)..(29): Xaa is C or S
GEEYKFKTPVGMDDLYLVSIPELKTPVXXAKGVK

SEQ ID NO: 62357 - protein, 34 aa, Artificial Sequence; identical to SEQ ID NO: 17894
  Cyclic GFR-binding peptide
  MOD_RES (1)..(33): Xaa is C or S

SEQ ID NO: 62358 - protein, 22 aa, Artificial Sequence
  Cyclic GFR-binding peptide
IMEYKFKVKPKRGVLYLISIPE

SEQ ID NO: 62359 - protein, 27 aa, Artificial Sequence
  Cyclic GFR-binding peptide
  MOD_RES (27)..(27): Xaa is C or S
MEYKFKVKPKRGVLYLISIPELAQPVX

SEQ ID NO: 62360 - protein, 31 aa, Artificial Sequence; identical to SEQ ID NO: 17895
  Cyclic GFR-binding peptide
  MOD_RES (31)..(31): Xaa is C or S

SEQ ID NO: 62361 - protein, 27 aa, Artificial Sequence
  Cyclic GFR-binding peptide
EVVMDEYKFKVVKENEDLYLMSIPELE

SEQ ID NO: 62362 - protein, 26 aa, Artificial Sequence
  Cyclic GFR-binding peptide
SVAMGYHYKLYTVVGKDKYLISIPSL

SEQ ID NO: 62363 - protein, 27 aa, Artificial Sequence
  Cyclic GFR-binding peptide
VMEEYKFKVVKDYEDLYLMSIPELETP

SEQ ID NO: 62364 - protein, 35 aa, Artificial Sequence
  Cyclic GFR-binding peptide
  MOD_RES (2)..(4): Xaa is C or S
RXGXEAVSMGEEYKFKTPVGMDDLYLVSIPELKTP

SEQ ID NO: 62365 - protein, 37 aa, Artificial Sequence; identical to SEQ ID NO: 17898
  Cyclic GFR-binding peptide
  MOD_RES (32)..(33): Xaa is C or S

SEQ ID NO: 62366 - protein, 27 aa, Artificial Sequence
  Cyclic GFR-binding peptide
SMGEEYQKYTPVGMDDIYLVSIPSLKT

SEQ ID NO: 62367 - protein, 20 aa, Artificial Sequence
  Cyclic GFR-binding peptide
EYKFKYTVVGKDLYLISIPE

SEQ ID NO: 62368 - protein, 36 aa, Artificial Sequence; identical to SEQ ID NO: 17905
  Cyclic GFR-binding peptide
  MOD_RES (1)..(34)..(35): Xaa is C or S

SEQ ID NO: 62369 - protein, 25 aa, Artificial Sequence
  Cyclic GFR-binding peptide
SKVIMEYQKYIKPTKGIIYLISIPS

SEQ ID NO: 62370 - protein, 32 aa, Artificial Sequence
  Cyclic GFR-binding peptide
  MOD_RES (28)..(29): Xaa is C or S
MDYHYKLVVNNAADKYLISIPSLRAPVXXSAP

SEQ ID NO: 62371 - protein, 32 aa, Artificial Sequence
  Cyclic GFR-binding peptide
  MOD_RES (1)..(3): Xaa is C or S
XGXGEVVMDEYQKYVVKENEDIYLMSIPSLET

SEQ ID NO: 62372 - protein, 34 aa, Artificial Sequence
  Cyclic GFR-binding peptide
  MOD_RES (30)..(31): Xaa is C or S
VVMNEYKFKIVNSSDDLYLVSIPELKTPAXXPKP

SEQ ID NO: 62373 - protein, 30 aa, Artificial Sequence
  Cyclic GFR-binding peptide
  MOD_RES (2)..(2): Xaa is C or S
GXARVVMNEYKFKIVNSSDDLYLVSIPELQ

SEQ ID NO: 62374 - protein, 33 aa, Artificial Sequence; identical to SEQ ID NO: 17914
  Cyclic GFR-binding peptide
  MOD_RES (2)..(2): Xaa is C or S

SEQ ID NO: 62375 - protein, 37 aa, Artificial Sequence; identical to SEQ ID NO: 17915
  Cyclic GFR-binding peptide
  MOD_RES (2)..(4)..(36)..(37): Xaa is C or S

SEQ ID NO: 62376 - protein, 40 aa, Artificial Sequence; identical to SEQ ID NO: 17916
  Cyclic GFR-binding peptide
  MOD_RES (2)..(34)..(35): Xaa is C or S

SEQ ID NO: 62377 - protein, 39 aa, Artificial Sequence; identical to SEQ ID NO: 17919
  Cyclic GFR-binding peptide
  MOD_RES (2)..(34)..(35): Xaa is C or S

SEQ ID NO: 62378 - protein, 31 aa, Artificial Sequence
  Cyclic GFR-binding peptide
  MOD_RES (30)..(31): Xaa is C or S
RVIMEYKFKVKPKRGVLYLISIPELAQPVXX

SEQ ID NO: 62379 - protein, 29 aa, Artificial Sequence
  Cyclic GFR-binding peptide
  MOD_RES (1)..(1): Xaa is C or S
XSKVVMEYKFKVKPTRGVLYLISIPELDQ

SEQ ID NO: 62380 - protein, 35 aa, Artificial Sequence; identical to SEQ ID NO: 17920
  Cyclic GFR-binding peptide
  MOD_RES (1)..(33)..(34): Xaa is C or S

SEQ ID NO: 62381 - protein, 30 aa, Artificial Sequence; identical to SEQ ID NO: 17923
  Cyclic GFR-binding peptide

SEQ ID NO: 62382 - protein, 29 aa, Artificial Sequence
  Cyclic GFR-binding peptide
VVMDYHYKLVVNNAADKYLISIPSLRAPV

SEQ ID NO: 62383 - protein, 36 aa, Artificial Sequence; identical to SEQ ID NO: 17924
  Cyclic GFR-binding peptide
  MOD_RES (2)..(33)..(34): Xaa is C or S

SEQ ID NO: 62384 - protein, 26 aa, Artificial Sequence
  Cyclic GFR-binding peptide
  MOD_RES (26)..(26): Xaa is C or S
EYKFKIKPTKGILYLISIPELDQSVX

SEQ ID NO: 62385 - protein, 35 aa, Artificial Sequence
  Cyclic GFR-binding peptide
  MOD_RES (30)..(31): Xaa is C or S
VVMEEYKFKVVKDYEDLYLMSIPELETPVXXAKPI

SEQ ID NO: 62386 - protein, 27 aa, Artificial Sequence
  Cyclic GFR-binding peptide
RVVMNEYQKYIVNSSDDIYLVSIPSLK

SEQ ID NO: 62387 - protein, 31 aa, Artificial Sequence
  Cyclic GFR-binding peptide
  MOD_RES (27)..(28): Xaa is C or S
MEYQKYVKPTRGVIYLISIPSLDQPVXXPSA

SEQ ID NO: 62388 - protein, 33 aa, Artificial Sequence
  Cyclic GFR-binding peptide
  MOD_RES (28)..(29): Xaa is C or S
MGYHYKLYTVVGKDKYLISIPSLKTPVXXAKSA

SEQ ID NO: 62389 - protein, 27 aa, Artificial Sequence
  Cyclic GFR-binding peptide
  MOD_RES (27)..(27): Xaa is C or S
EEYKFKTPVGMDDLYLVSIPELKTPVX

SEQ ID NO: 62390 - protein, 36 aa, Artificial Sequence; identical to SEQ ID NO: 17931
  Cyclic GFR-binding peptide
  MOD_RES (1)..(3)..(35)..(36): Xaa is C or S

SEQ ID NO: 62391 - protein, 28 aa, Artificial Sequence
  Cyclic GFR-binding peptide
  MOD_RES (1)..(1): Xaa is C or S
XESVAMGEYQKYYTVVGKDIYLISIPSL

SEQ ID NO: 62392 - protein, 37 aa, Artificial Sequence; identical to SEQ ID NO: 17933
  Cyclic GFR-binding peptide
  MOD_RES (31)..(31): Xaa is C or S

SEQ ID NO: 62393 - protein, 26 aa, Artificial Sequence
  Cyclic GFR-binding peptide
MEYQKYVKPKRGVIYLISIPSLAQPV

SEQ ID NO: 62394 - protein, 30 aa, Artificial Sequence
  Cyclic GFR-binding peptide
  MOD_RES (1)..(1): Xaa is C or S
XAEVVMDRYKKLVVNNAADFYLISIANLRA

SEQ ID NO: 62395 - protein, 35 aa, Artificial Sequence; identical to SEQ ID NO: 17935
  Cyclic GFR-binding peptide
  MOD_RES (1)..(33)..(34): Xaa is C or S

SEQ ID NO: 62396 - protein, 38 aa, Artificial Sequence; identical to SEQ ID NO: 17937
  Cyclic GFR-binding peptide
  MOD_RES (2)..(4)..(35)..(36): Xaa is C or S

SEQ ID NO: 62397 - protein, 35 aa, Artificial Sequence; identical to SEQ ID NO: 17938
  Cyclic GFR-binding peptide
  MOD_RES (1)..(33)..(34): Xaa is C or S

SEQ ID NO: 62398 - protein, 24 aa, Artificial Sequence
  Cyclic GFR-binding peptide
VVMNEYKFKIVNNSSDLYLVSIPE

SEQ ID NO: 62399 - protein, 28 aa, Artificial Sequence
  Cyclic GFR-binding peptide
EAVSMGEEYKFKTPVGMDDLYLVSIPEL

SEQ ID NO: 62400 - protein, 32 aa, Artificial Sequence; identical to SEQ ID NO: 17943
  Cyclic GFR-binding peptide
  MOD_RES (1)..(1): Xaa is C or S

SEQ ID NO: 62401 - protein, 32 aa, Artificial Sequence; identical to SEQ ID NO: 17945
  Cyclic GFR-binding peptide
  MOD_RES (32)..(32): Xaa is C or S

SEQ ID NO: 62402 - protein, 28 aa, Artificial Sequence
  Cyclic GFR-binding peptide
VMEEYQKYVVKDYEDIYLMSIPSLETPV

SEQ ID NO: 62403 - protein, 23 aa, Artificial Sequence
  Cyclic GFR-binding peptide
IMEYQKYVKPKRGVIYLISIPSL

SEQ ID NO: 62404 - protein, 29 aa, Artificial Sequence
  Cyclic GFR-binding peptide
  MOD_RES (29)..(29): Xaa is C or S
VMNEYKFKIVNSSDDLYLVSIPELKTPAX

SEQ ID NO: 62405 - protein, 23 aa, Artificial Sequence
  Cyclic GFR-binding peptide
EYKFKVKPKRGVLYLISIPELAQ

SEQ ID NO: 62406 - protein, 32 aa, Artificial Sequence
  Cyclic GFR-binding peptide
  MOD_RES (27)..(28): Xaa is C or S
DEYKFKVVKENEDLYLMSIPELETPVXXAKPI

SEQ ID NO: 62407 - protein, 37 aa, Artificial Sequence; identical to SEQ ID NO: 17949
  Cyclic GFR-binding peptide
  MOD_RES (1)..(3)..(34)..(35): Xaa is C or S

SEQ ID NO: 62408 - protein, 23 aa, Artificial Sequence
  Cyclic GFR-binding peptide
RYKKLVVNNAADFYLISIANLRA

SEQ ID NO: 62409 - protein, 28 aa, Artificial Sequence
  Cyclic GFR-binding peptide
  MOD_RES (27)..(28): Xaa is C or S
GEYQKYYTVVGKDIYLISIPSLKTPVXX

SEQ ID NO: 62410 - protein, 21 aa, Artificial Sequence
  Cyclic GFR-binding peptide
EYKFKVKPKRGVLYLISIPEL

SEQ ID NO: 62411 - protein, 30 aa, Artificial Sequence
  Cyclic GFR-binding peptide
  MOD_RES (27)..(28): Xaa is C or S
EEYKFKVVKDYEDLYLMSIPELETPVXXAK

SEQ ID NO: 62412 - protein, 27 aa, Artificial Sequence
  Cyclic GFR-binding peptide
VVMEYQKYVKPTRGVIYLISIPSLDQP

SEQ ID NO: 62413 - protein, 28 aa, Artificial Sequence
  Cyclic GFR-binding peptide
  MOD_RES (27)..(28): Xaa is C or S
NEYKFKIVNSSDDLYLVSIPELQTPAXX

SEQ ID NO: 62414 - protein, 34 aa, Artificial Sequence
  Cyclic GFR-binding peptide
  MOD_RES (28)..(29): Xaa is C or S
IMEYQKYVKPKRGVIYLISIPSLAQPVXXPAASA

SEQ ID NO: 62415 - protein, 36 aa, Artificial Sequence; identical to SEQ ID NO: 17952
  Cyclic GFR-binding peptide
  MOD_RES (32)..(33): Xaa is C or S

SEQ ID NO: 62416 - protein, 35 aa, Artificial Sequence; identical to SEQ ID NO: 17955
  Cyclic GFR-binding peptide
  MOD_RES (32)..(33): Xaa is C or S

SEQ ID NO: 62417 - protein, 26 aa, Artificial Sequence
  Cyclic GFR-binding peptide
VMNEYQKYIVNNSSDIYLVSIPSLKT

SEQ ID NO: 62418 - protein, 24 aa, Artificial Sequence
  Cyclic GFR-binding peptide
NEYKFKIVNNSSDLYLVSIPELKT

SEQ ID NO: 62419 - protein, 36 aa, Artificial Sequence; identical to SEQ ID NO: 17961
  Cyclic GFR-binding peptide
  MOD_RES (1)..(3)..(35)..(36): Xaa is C or S

SEQ ID NO: 62420 - protein, 37 aa, Artificial Sequence; identical to SEQ ID NO: 17967
  Cyclic GFR-binding peptide
  MOD_RES (32)..(33): Xaa is C or S

SEQ ID NO: 62421 - protein, 27 aa, Artificial Sequence
  Cyclic GFR-binding peptide
  MOD_RES (27)..(27): Xaa is C or S
MEYKFKVKPTRGVLYLISIPELDQPVX

SEQ ID NO: 62422 - protein, 30 aa, Artificial Sequence
  Cyclic GFR-binding peptide
  MOD_RES (29)..(30): Xaa is C or S
VMNEYKFKIVNNSSDLYLVSIPELKTPAXX

SEQ ID NO: 62423 - protein, 24 aa, Artificial Sequence
  Cyclic GFR-binding peptide
GEEYQKYTPVGMDDIYLVSIPSLK

SEQ ID NO: 62424 - protein, 24 aa, Artificial Sequence
  Cyclic GFR-binding peptide
MDYHYKLVVNNAADKYLISIPSLR

SEQ ID NO: 62425 - protein, 33 aa, Artificial Sequence
  Cyclic GFR-binding peptide
  MOD_RES (32)..(33): Xaa is C or S
AVSMGEEYQKYTPVGMDDIYLVSIPSLKTPVXX

SEQ ID NO: 62426 - protein, 28 aa, Artificial Sequence
  Cyclic GFR-binding peptide
  MOD_RES (2)..(2): Xaa is C or S
KXSKVIMEYQKYIKPTKGIIYLISIPSL

SEQ ID NO: 62427 - protein, 30 aa, Artificial Sequence
  Cyclic GFR-binding peptide
  MOD_RES (2)..(2): Xaa is C or S
GXAKVVMNEYQKYIVNNSSDIYLVSIPSLK

SEQ ID NO: 62428 - protein, 33 aa, Artificial Sequence; identical to SEQ ID NO: 17972
  Cyclic GFR-binding peptide
  MOD_RES (31)..(32): Xaa is C or S

SEQ ID NO: 62429 - protein, 25 aa, Artificial Sequence
  Cyclic GFR-binding peptide
MDEYKFKVVKENEDLYLMSIPELET

SEQ ID NO: 62430 - protein, 32 aa, Artificial Sequence; identical to SEQ ID NO: 17975
  Cyclic GFR-binding peptide
  MOD_RES (32)..(32): Xaa is C or S

SEQ ID NO: 62431 - protein, 32 aa, Artificial Sequence
  Cyclic GFR-binding peptide
  MOD_RES (28)..(29): Xaa is C or S
MEEYKFKVVKDYEDLYLMSIPELETPVXXAKP

SEQ ID NO: 62432 - protein, 24 aa, Artificial Sequence
  Cyclic GFR-binding peptide
EYKFKTPVGMDDLYLVSIPELKTP

SEQ ID NO: 62433 - protein, 30 aa, Artificial Sequence
  Cyclic GFR-binding peptide
  MOD_RES (2)..(2): Xaa is C or S
KXSKVIMEYKFKIKPTKGILYLISIPELDQ

SEQ ID NO: 62434 - protein, 25 aa, Artificial Sequence
  Cyclic GFR-binding peptide
VMDEYQKYVVKENEDIYLMSIPSLE

SEQ ID NO: 62435 - protein, 22 aa, Artificial Sequence
  Cyclic GFR-binding peptide
RYKKLVVNNAADFYLISIANLR

SEQ ID NO: 62436 - protein, 32 aa, Artificial Sequence; identical to SEQ ID NO: 17981
  Cyclic GFR-binding peptide
  MOD_RES (31)..(32): Xaa is C or S

SEQ ID NO: 62437 - protein, 27 aa, Artificial Sequence
  Cyclic GFR-binding peptide
  MOD_RES (26)..(27): Xaa is C or S
EYKFKIKPTKGILYLISIPELDQSVXX

SEQ ID NO: 62438 - protein, 25 aa, Artificial Sequence
  Cyclic GFR-binding peptide
VMNEYKFKIVNNSSDLYLVSIPELK

SEQ ID NO: 62439 - protein, 24 aa, Artificial Sequence
  Cyclic GFR-binding peptide
NEYQKYIVNNSSDIYLVSIPSLKT

SEQ ID NO: 62440 - protein, 37 aa, Artificial Sequence; identical to SEQ ID NO: 17984
  Cyclic GFR-binding peptide
  MOD_RES (2)..(4)..(36)..(37): Xaa is C or S

SEQ ID NO: 62441 - protein, 36 aa, Artificial Sequence; identical to SEQ ID NO: 17985
  Cyclic GFR-binding peptide
  MOD_RES (31)..(31): Xaa is C or S

SEQ ID NO: 62442 - protein, 30 aa, Artificial Sequence
  Cyclic GFR-binding peptide
  MOD_RES (1)..(3): Xaa is C or S
XKXSRVIMEYQKYVKPKRGVIYLISIPSLA

SEQ ID NO: 62443 - protein, 33 aa, Artificial Sequence; identical to SEQ ID NO: 17987
  Cyclic GFR-binding peptide
  MOD_RES (31)..(32): Xaa is C or S

SEQ ID NO: 62444 - protein, 39 aa, Artificial Sequence; identical to SEQ ID NO: 17988
  Cyclic GFR-binding peptide
  MOD_RES (2)..(34)..(35): Xaa is C or S

SEQ ID NO: 62445 - protein, 38 aa, Artificial Sequence; identical to SEQ ID NO: 17989
  Cyclic GFR-binding peptide
  MOD_RES (1)..(34)..(35): Xaa is C or S

SEQ ID NO: 62446 - protein, 28 aa, Artificial Sequence
  Cyclic GFR-binding peptide
  MOD_RES (2)..(2): Xaa is C or S
GXGEVVMDEYQKYVVKENEDIYLMSIPS

SEQ ID NO: 62447 - protein, 29 aa, Artificial Sequence
  Cyclic GFR-binding peptide
AEVVMDYHYKLVVNNAADKYLISIPSLRA

SEQ ID NO: 62448 - protein, 24 aa, Artificial Sequence
  Cyclic GFR-binding peptide
RVIMEYKFKVKPKRGVLYLISIPE

SEQ ID NO: 62449 - protein, 33 aa, Artificial Sequence
  Cyclic GFR-binding peptide
  MOD_RES (27)..(28): Xaa is C or S
DRYKKLVVNNAADFYLISIANLRAPVXXSAPAA

SEQ ID NO: 62450 - protein, 31 aa, Artificial Sequence
  Cyclic GFR-binding peptide
AVSMGEEYKFKTPVGMDDLYLVSIPELKTPV

SEQ ID NO: 62451 - protein, 33 aa, Artificial Sequence; identical to SEQ ID NO: 17997
  Cyclic GFR-binding peptide
  MOD_RES (2)..(2): Xaa is C or S

SEQ ID NO: 62452 - protein, 32 aa, Artificial Sequence; identical to SEQ ID NO: 17998
  Cyclic GFR-binding peptide
  MOD_RES (1)..(32): Xaa is C or S

SEQ ID NO: 62453 - protein, 20 aa, Artificial Sequence
  Cyclic GFR-binding peptide
EYQKYIKPTKGIIYLISIPS

SEQ ID NO: 62454 - protein, 30 aa, Artificial Sequence
  Cyclic GFR-binding peptide
  MOD_RES (28)..(29): Xaa is C or S
MDEYKFKVVKENEDLYLMSIPELETPVXXA

SEQ ID NO: 62455 - protein, 36 aa, Artificial Sequence
  Cyclic GFR-binding peptide
  MOD_RES (30)..(31): Xaa is C or S
VVMNEYKFKIVNNSSDLYLVSIPELKTPAXXAKPVA

SEQ ID NO: 62456 - protein, 26 aa, Artificial Sequence
  Cyclic GFR-binding peptide
VVMNEYKFKIVNNSSDLYLVSIPELK

SEQ ID NO: 62457 - protein, 26 aa, Artificial Sequence
  Cyclic GFR-binding peptide
AMGYHYKLYTVVGKDKYLISIPSLKT

SEQ ID NO: 62458 - protein, 32 aa, Artificial Sequence
  Cyclic GFR-binding peptide
  MOD_RES (26)..(27): Xaa is C or S
EYQKYTPVGMDDIYLVSIPSLKTPVXXAKGVK

SEQ ID NO: 62459 - protein, 26 aa, Artificial Sequence
  Cyclic GFR-binding peptide
VMNEYQKYIVNSSDDIYLVSIPSLQT

SEQ ID NO: 62460 - protein, 28 aa, Artificial Sequence
  Cyclic GFR-binding peptide
VMDEYKFKVVKENEDLYLMSIPELETPV

SEQ ID NO: 62461 - protein, 25 aa, Artificial Sequence
  Cyclic GFR-binding peptide
SRVIMEYKFKVKPKRGVLYLISIPE

SEQ ID NO: 62462 - protein, 38 aa, Artificial Sequence; identical to SEQ ID NO: 18007
  Cyclic GFR-binding peptide
  MOD_RES (1)..(33)..(34): Xaa is C or S

SEQ ID NO: 62463 - protein, 33 aa, Artificial Sequence
  Cyclic GFR-binding peptide
  MOD_RES (30)..(30): Xaa is C or S
VVMNEYKFKIVNSSDDLYLVSIPELKTPAXTPK

SEQ ID NO: 62464 - protein, 28 aa, Artificial Sequence
  Cyclic GFR-binding peptide
  MOD_RES (1)..(1): Xaa is C or S
XAKVVMNEYQKYIVNNSSDIYLVSIPSL

SEQ ID NO: 62465 - protein, 25 aa, Artificial Sequence
  Cyclic GFR-binding peptide
GYHYKLYTVVGKDKYLISIPSLKTP

SEQ ID NO: 62466 - protein, 24 aa, Artificial Sequence
  Cyclic GFR-binding peptide
DEYQKYVVKENEDIYLMSIPSLET

SEQ ID NO: 62467 - protein, 34 aa, Artificial Sequence
  Cyclic GFR-binding peptide
  MOD_RES (30)..(31): Xaa is C or S
RVIMEYKFKVKPKRGVLYLISIPELAQPVXXPAA

SEQ ID NO: 62468 - protein, 28 aa, Artificial Sequence
  Cyclic GFR-binding peptide
VMNEYQKYIVNSSDDIYLVSIPSLKTPA

SEQ ID NO: 62469 - protein, 29 aa, Artificial Sequence
  Cyclic GFR-binding peptide
  MOD_RES (2)..(2): Xaa is C or S
GXESVAMGYHYKLYTVVGKDKYLISIPSL

SEQ ID NO: 62470 - protein, 30 aa, Artificial Sequence
  Cyclic GFR-binding peptide
  MOD_RES (29)..(30): Xaa is C or S
VMNEYKFKIVNSSDDLYLVSIPELQTPAXX

SEQ ID NO: 62471 - protein, 29 aa, Artificial Sequence
  Cyclic GFR-binding peptide
  MOD_RES (27)..(28): Xaa is C or S
NEYQKYIVNSSDDIYLVSIPSLKTPAXXP

SEQ ID NO: 62472 - protein, 29 aa, Artificial Sequence
  Cyclic GFR-binding peptide
RVVMNEYQKYIVNSSDDIYLVSIPSLQTP

SEQ ID NO: 62473 - protein, 30 aa, Artificial Sequence
  Cyclic GFR-binding peptide
VSMGEEYQKYTPVGMDDIYLVSIPSLKTPV

SEQ ID NO: 62474 - protein, 29 aa, Artificial Sequence
  Cyclic GFR-binding peptide
  MOD_RES (1)..(3): Xaa is C or S
XGXAKVVMNEYQKYIVNNSSDIYLVSIPS

SEQ ID NO: 62475 - protein, 27 aa, Artificial Sequence
  Cyclic GFR-binding peptide
  MOD_RES (27)..(27): Xaa is C or S
EEYQKYTPVGMDDIYLVSIPSLKTPVX

SEQ ID NO: 62476 - protein, 27 aa, Artificial Sequence
  Cyclic GFR-binding peptide
MGEEYQKYTPVGMDDIYLVSIPSLKTP

SEQ ID NO: 62477 - protein, 35 aa, Artificial Sequence; identical to SEQ ID NO: 18024
  Cyclic GFR-binding peptide
  MOD_RES (1)..(3): Xaa is C or S

SEQ ID NO: 62478 - protein, 32 aa, Artificial Sequence; identical to SEQ ID NO: 18025
  Cyclic GFR-binding peptide
  MOD_RES (1)..(1): Xaa is C or S

SEQ ID NO: 62479 - protein, 38 aa, Artificial Sequence; identical to SEQ ID NO: 18026
  Cyclic GFR-binding peptide
  MOD_RES (1)..(33)..(34): Xaa is C or S

SEQ ID NO: 62480 - protein, 26 aa, Artificial Sequence
  Cyclic GFR-binding peptide
SKVVMEYQKYVKPTRGVIYLISIPSL

SEQ ID NO: 62481 - protein, 26 aa, Artificial Sequence
  Cyclic GFR-binding peptide
  MOD_RES (26)..(26): Xaa is C or S
EYQKYYTVVGKDIYLISIPSLKTPVX

SEQ ID NO: 62482 - protein, 39 aa, Artificial Sequence; identical to SEQ ID NO: 18032
  Cyclic GFR-binding peptide
  MOD_RES (1)..(3)..(34)..(35): Xaa is C or S

SEQ ID NO: 62483 - protein, 33 aa, Artificial Sequence; identical to SEQ ID NO: 18033
  Cyclic GFR-binding peptide
  MOD_RES (32)..(32): Xaa is C or S

SEQ ID NO: 62484 - protein, 32 aa, Artificial Sequence; identical to SEQ ID NO: 18035
  Cyclic GFR-binding peptide
  MOD_RES (1)..(1): Xaa is C or S

SEQ ID NO: 62485 - protein, 23 aa, Artificial Sequence
  Cyclic GFR-binding peptide
VMEEYQKYVVKDYEDIYLMSIPS

SEQ ID NO: 62486 - protein, 35 aa, Artificial Sequence; identical to SEQ ID NO: 18038
  Cyclic GFR-binding peptide
  MOD_RES (31)..(32): Xaa is C or S

SEQ ID NO: 62487 - protein, 37 aa, Artificial Sequence; identical to SEQ ID NO: 18039
  Cyclic GFR-binding peptide
  MOD_RES (2)..(34)..(35): Xaa is C or S

SEQ ID NO: 62488 - protein, 22 aa, Artificial Sequence
  Cyclic GFR-binding peptide
MGYHYKLYTVVGKDKYLISIPS

SEQ ID NO: 62489 - protein, 36 aa, Artificial Sequence; identical to SEQ ID NO: 18042
  Cyclic GFR-binding peptide
  MOD_RES (1)..(3)..(34)..(35): Xaa is C or S

SEQ ID NO: 62490 - protein, 33 aa, Artificial Sequence; identical to SEQ ID NO: 18045
  Cyclic GFR-binding peptide
  MOD_RES (32)..(33): Xaa is C or S

SEQ ID NO: 62491 - protein, 36 aa, Artificial Sequence; identical to SEQ ID NO: 18047
  Cyclic GFR-binding peptide
  MOD_RES (2)..(33)..(34): Xaa is C or S

SEQ ID NO: 62492 - protein, 24 aa, Artificial Sequence
  Cyclic GFR-binding peptide
RVIMEYQKYVKPKRGVIYLISIPS

SEQ ID NO: 62493 - protein, 29 aa, Artificial Sequence
  Cyclic GFR-binding peptide
  MOD_RES (2)..(2): Xaa is C or S
GXAKVVMNEYKFKIVNNSSDLYLVSIPEL

SEQ ID NO: 62494 - protein, 29 aa, Artificial Sequence
  Cyclic GFR-binding peptide
  MOD_RES (1)..(3): Xaa is C or S
XKXSKVIMEYKFKIKPTKGILYLISIPEL

SEQ ID NO: 62495 - protein, 35 aa, Artificial Sequence; identical to SEQ ID NO: 18051
  Cyclic GFR-binding peptide
  MOD_RES (2)..(4)..(35): Xaa is C or S

SEQ ID NO: 62496 - protein, 24 aa, Artificial Sequence
  Cyclic GFR-binding peptide
VVMEYKFKVKPTRGVLYLISIPEL

SEQ ID NO: 62497 - protein, 30 aa, Artificial Sequence
  Cyclic GFR-binding peptide
  MOD_RES (2)..(2): Xaa is C or S
GXGEVVMDEYQKYVVKENEDIYLMSIPSLE

SEQ ID NO: 62498 - protein, 36 aa, Artificial Sequence; identical to SEQ ID NO: 18053
  Cyclic GFR-binding peptide
  MOD_RES (32)..(33): Xaa is C or S

SEQ ID NO: 62499 - protein, 37 aa, Artificial Sequence; identical to SEQ ID NO: 18054
  Cyclic GFR-binding peptide
  MOD_RES (2)..(34): Xaa is C or S

SEQ ID NO: 62500 - protein, 21 aa, Artificial Sequence
  Cyclic GFR-binding peptide
EYKFKVVKENEDLYLMSIPEL

SEQ ID NO: 62501 - protein, 33 aa, Artificial Sequence
  Cyclic GFR-binding peptide
  MOD_RES (30)..(31): Xaa is C or S
SMGEEYKFKTPVGMDDLYLVSIPELKTPVXXAK

SEQ ID NO: 62502 - protein, 32 aa, Artificial Sequence
  Cyclic GFR-binding peptide
  MOD_RES (26)..(26): Xaa is C or S
EYKFKIVNSSDDLYLVSIPELKTPAXTPKTVH

SEQ ID NO: 62503 - protein, 32 aa, Artificial Sequence
  Cyclic GFR-binding peptide
  MOD_RES (26)..(27): Xaa is C or S
EYKFKIVNSSDDLYLVSIPELQTPAXXPKPVT

SEQ ID NO: 62504 - protein, 39 aa, Artificial Sequence; identical to SEQ ID NO: 18062
  Cyclic GFR-binding peptide
  MOD_RES (1)..(3)..(35)..(36): Xaa is C or S

SEQ ID NO: 62505 - protein, 31 aa, Artificial Sequence
  Cyclic GFR-binding peptide
  MOD_RES (2)..(4): Xaa is C or S
SXKXSRVIMEYQKYVKPKRGVIYLISIPSLA

SEQ ID NO: 62506 - protein, 27 aa, Artificial Sequence
  Cyclic GFR-binding peptide
  MOD_RES (27)..(27): Xaa is C or S
MEYQKYVKPKRGVIYLISIPSLAQPVX

SEQ ID NO: 62507 - protein, 39 aa, Artificial Sequence; identical to SEQ ID NO: 18066
  Cyclic GFR-binding peptide
  MOD_RES (2)..(34)..(35): Xaa is C or S

SEQ ID NO: 62508 - protein, 30 aa, Artificial Sequence
  Cyclic GFR-binding peptide
  MOD_RES (2)..(2): Xaa is C or S
GXSRVVMNEYKFKIVNSSDDLYLVSIPELK

SEQ ID NO: 62509 - protein, 37 aa, Artificial Sequence; identical to SEQ ID NO: 18069
  Cyclic GFR-binding peptide
  MOD_RES (2)..(4)..(36)..(37): Xaa is C or S

SEQ ID NO: 62510 - protein, 25 aa, Artificial Sequence
  Cyclic GFR-binding peptide
RVVMNEYKFKIVNSSDDLYLVSIPE

SEQ ID NO: 62511 - protein, 26 aa, Artificial Sequence
  Cyclic GFR-binding peptide
  MOD_RES (26)..(26): Xaa is C or S
EYKFKIVNSSDDLYLVSIPELQTPAX

SEQ ID NO: 62512 - protein, 30 aa, Artificial Sequence
  Cyclic GFR-binding peptide
  MOD_RES (2)..(2): Xaa is C or S
GXEAVSMGEEYQKYTPVGMDDIYLVSIPSL

SEQ ID NO: 62513 - protein, 29 aa, Artificial Sequence
  Cyclic GFR-binding peptide
  MOD_RES (1)..(1): Xaa is C or S
XAEVVMDEYKFKVVNNAADLYLISIPELR

SEQ ID NO: 62514 - protein, 32 aa, Artificial Sequence
  Cyclic GFR-binding peptide
  MOD_RES (26)..(27): Xaa is C or S
EYKFKIVNSSDDLYLVSIPELKTPAXXPKPVY

SEQ ID NO: 62515 - protein, 22 aa, Artificial Sequence
  Cyclic GFR-binding peptide
MNEYKFKIVNSSDDLYLVSIPE

SEQ ID NO: 62516 - protein, 39 aa, Artificial Sequence; identical to SEQ ID NO: 18074
  Cyclic GFR-binding peptide
  MOD_RES (1)..(33)..(34): Xaa is C or S

SEQ ID NO: 62517 - protein, 29 aa, Artificial Sequence
  Cyclic GFR-binding peptide
  MOD_RES (29)..(29): Xaa is C or S
MGEEYQKYTPVGMDDIYLVSIPSLKTPVX

SEQ ID NO: 62518 - protein, 31 aa, Artificial Sequence; identical to SEQ ID NO: 18076
  Cyclic GFR-binding peptide
  MOD_RES (31)..(31): Xaa is C or S

SEQ ID NO: 62519 - protein, 28 aa, Artificial Sequence
  Cyclic GFR-binding peptide
  MOD_RES (2)..(2): Xaa is C or S
KXSKVIMEYKFKIKPTKGILYLISIPEL

SEQ ID NO: 62520 - protein, 32 aa, Artificial Sequence
  Cyclic GFR-binding peptide
  MOD_RES (30)..(31): Xaa is C or S
VVMNEYQKYIVNSSDDIYLVSIPSLKTPAXXP

SEQ ID NO: 62521 - protein, 34 aa, Artificial Sequence
  Cyclic GFR-binding peptide
  MOD_RES (29)..(30): Xaa is C or S
VMDYHYKLVVNNAADKYLISIPSLRAPVXXSAPA

SEQ ID NO: 62522 - protein, 34 aa, Artificial Sequence
  Cyclic GFR-binding peptide
  MOD_RES (30)..(31): Xaa is C or S
VVMNEYQKYIVNSSDDIYLVSIPSLKTPAXXPKP

SEQ ID NO: 62523 - protein, 30 aa, Artificial Sequence
  Cyclic GFR-binding peptide
  MOD_RES (1)..(1): Xaa is C or S
XEAVSMGEEYQKYTPVGMDDIYLVSIPSLK

SEQ ID NO: 62524 - protein, 34 aa, Artificial Sequence
  Cyclic GFR-binding peptide
  MOD_RES (2)..(4): Xaa is C or S
HXGXSRVVMNEYKFKIVNSSDDLYLVSIPELKTP

SEQ ID NO: 62525 - protein, 32 aa, Artificial Sequence
  Cyclic GFR-binding peptide
  MOD_RES (32)..(32): Xaa is C or S
AVSMGEEYQKYTPVGMDDIYLVSIPSLKTPVX

SEQ ID NO: 62526 - protein, 40 aa, Artificial Sequence; identical to SEQ ID NO: 18081
  Cyclic GFR-binding peptide
  MOD_RES (1)..(3)..(35)..(36): Xaa is C or S

SEQ ID NO: 62527 - protein, 35 aa, Artificial Sequence; identical to SEQ ID NO: 18083
  Cyclic GFR-binding peptide
  MOD_RES (1)..(3)..(35): Xaa is C or S

SEQ ID NO: 62528 - protein, 30 aa, Artificial Sequence
  Cyclic GFR-binding peptide
  MOD_RES (26)..(27): Xaa is C or S
EYKFKVVKDYEDLYLMSIPELETPVXXAKP

SEQ ID NO: 62529 - protein, 33 aa, Artificial Sequence
  Cyclic GFR-binding peptide
  MOD_RES (28)..(29): Xaa is C or S
MEEYKFKVVKDYEDLYLMSIPELETPVXXAKPI

SEQ ID NO: 62530 - protein, 29 aa, Artificial Sequence
  Cyclic GFR-binding peptide
  MOD_RES (1)..(1): Xaa is C or S
XEAVSMGEEYKFKTPVGMDDLYLVSIPEL

SEQ ID NO: 62531 - protein, 32 aa, Artificial Sequence; identical to SEQ ID NO: 18087
  Cyclic GFR-binding peptide
  MOD_RES (31)..(32): Xaa is C or S

SEQ ID NO: 62532 - protein, 35 aa, Artificial Sequence; identical to SEQ ID NO: 18088
  Cyclic GFR-binding peptide
  MOD_RES (2)..(4): Xaa is C or S

SEQ ID NO: 62533 - protein, 20 aa, Artificial Sequence
  Cyclic GFR-binding peptide
RYKKLVVNNAADFYLISIAN

SEQ ID NO: 62534 - protein, 39 aa, Artificial Sequence; identical to SEQ ID NO: 18094
  Cyclic GFR-binding peptide
  MOD_RES (2)..(4)..(36)..(37): Xaa is C or S

SEQ ID NO: 62535 - protein, 26 aa, Artificial Sequence
  Cyclic GFR-binding peptide
IMEYQKYVKPKRGVIYLISIPSLAQP

SEQ ID NO: 62536 - protein, 39 aa, Artificial Sequence; identical to SEQ ID NO: 18097
  Cyclic GFR-binding peptide
  MOD_RES (1)..(33)..(34): Xaa is C or S

SEQ ID NO: 62537 - protein, 26 aa, Artificial Sequence
  Cyclic GFR-binding peptide
EEYQKYTPVGMDDIYLVSIPSLKTPV

SEQ ID NO: 62538 - protein, 31 aa, Artificial Sequence
  Cyclic GFR-binding peptide
  MOD_RES (30)..(31): Xaa is C or S
RVIMEYQKYVKPKRGVIYLISIPSLAQPVXX

SEQ ID NO: 62539 - protein, 32 aa, Artificial Sequence; identical to SEQ ID NO: 18100
  Cyclic GFR-binding peptide
  MOD_RES (31)..(32): Xaa is C or S

SEQ ID NO: 62540 - protein, 27 aa, Artificial Sequence
  Cyclic GFR-binding peptide
AEVVMDYHYKLVVNNAADKYLISIPSL

SEQ ID NO: 62541 - protein, 39 aa, Artificial Sequence; identical to SEQ ID NO: 18103
  Cyclic GFR-binding peptide
  MOD_RES (2)..(4)..(36): Xaa is C or S

SEQ ID NO: 62542 - protein, 30 aa, Artificial Sequence
  Cyclic GFR-binding peptide
  MOD_RES (30)..(30): Xaa is C or S
VVMDYHYKLVVNNAADKYLISIPSLRAPVX

SEQ ID NO: 62543 - protein, 28 aa, Artificial Sequence
  Cyclic GFR-binding peptide
SVAMGRYKKLYTVVGKDFYLISIANLKT

SEQ ID NO: 62544 - protein, 31 aa, Artificial Sequence; identical to SEQ ID NO: 18108
  Cyclic GFR-binding peptide
  MOD_RES (1)..(1): Xaa is C or S

SEQ ID NO: 62545 - protein, 36 aa, Artificial Sequence; identical to SEQ ID NO: 18110
  Cyclic GFR-binding peptide
  MOD_RES (1)..(3)..(35)..(36): Xaa is C or S

SEQ ID NO: 62546 - protein, 34 aa, Artificial Sequence
  Cyclic GFR-binding peptide
  MOD_RES (29)..(30): Xaa is C or S
VMNEYQKYIVNNSSDIYLVSIPSLKTPAXXAKPV

SEQ ID NO: 62547 - protein, 39 aa, Artificial Sequence; identical to SEQ ID NO: 18114
  Cyclic GFR-binding peptide
  MOD_RES (2)..(35)..(36): Xaa is C or S

SEQ ID NO: 62548 - protein, 32 aa, Artificial Sequence
  Cyclic GFR-binding peptide
  MOD_RES (29)..(30): Xaa is C or S
AMGRYKKLYTVVGKDFYLISIANLKTPVXXAK

SEQ ID NO: 62549 - protein, 27 aa, Artificial Sequence
  Cyclic GFR-binding peptide
SMGEEYKFKTPVGMDDLYLVSIPELKT

SEQ ID NO: 62550 - protein, 38 aa, Artificial Sequence; identical to SEQ ID NO: 18124
  Cyclic GFR-binding peptide
  MOD_RES (1)..(3)..(35)..(36): Xaa is C or S

SEQ ID NO: 62551 - protein, 33 aa, Artificial Sequence; identical to SEQ ID NO: 18128
  Cyclic GFR-binding peptide
  MOD_RES (32)..(33): Xaa is C or S

SEQ ID NO: 62552 - protein, 38 aa, Artificial Sequence; identical to SEQ ID NO: 18129
  Cyclic GFR-binding peptide
  MOD_RES (2)..(4)..(36)..(37): Xaa is C or S

SEQ ID NO: 62553 - protein, 37 aa, Artificial Sequence; identical to SEQ ID NO: 18130
  Cyclic GFR-binding peptide
  MOD_RES (2)..(4)..(36)..(37): Xaa is C or S

SEQ ID NO: 62554 - protein, 38 aa, Artificial Sequence; identical to SEQ ID NO: 18131
  Cyclic GFR-binding peptide
  MOD_RES (2)..(4)..(37)..(38): Xaa is C or S

SEQ ID NO: 62555 - protein, 34 aa, Artificial Sequence; identical to SEQ ID NO: 18134
  Cyclic GFR-binding peptide
  MOD_RES (1)..(3): Xaa is C or S

SEQ ID NO: 62556 - protein, 34 aa, Artificial Sequence; identical to SEQ ID NO: 18135
  Cyclic GFR-binding peptide
  MOD_RES (31)..(32): Xaa is C or S

SEQ ID NO: 62557 - protein, 30 aa, Artificial Sequence; identical to SEQ ID NO: 18136
  Cyclic GFR-binding peptide

SEQ ID NO: 62558 - protein, 28 aa, Artificial Sequence
  Cyclic GFR-binding peptide
AEVVMDYHYKLVVNNAADKYLISIPSLR

SEQ ID NO: 62559 - protein, 40 aa, Artificial Sequence; identical to SEQ ID NO: 18137
  Cyclic GFR-binding peptide
  MOD_RES (2)..(34)..(35): Xaa is C or S

SEQ ID NO: 62560 - protein, 34 aa, Artificial Sequence; identical to SEQ ID NO: 18139
  Cyclic GFR-binding peptide
  MOD_RES (32)..(32): Xaa is C or S

SEQ ID NO: 62561 - protein, 25 aa, Artificial Sequence
  Cyclic GFR-binding peptide
VAMGYHYKLYTVVGKDKYLISIPSL

SEQ ID NO: 62562 - protein, 30 aa, Artificial Sequence
  Cyclic GFR-binding peptide
  MOD_RES (2)..(2): Xaa is C or S
KXSKVIMEYQKYIKPTKGIIYLISIPSLDQ

SEQ ID NO: 62563 - protein, 27 aa, Artificial Sequence
  Cyclic GFR-binding peptide
  MOD_RES (26)..(27): Xaa is C or S
EYQKYYTVVGKDIYLISIPSLKTPVXX

SEQ ID NO: 62564 - protein, 37 aa, Artificial Sequence; identical to SEQ ID NO: 18144
  Cyclic GFR-binding peptide
  MOD_RES (31)..(32): Xaa is C or S

SEQ ID NO: 62565 - protein, 28 aa, Artificial Sequence
  Cyclic GFR-binding peptide
  MOD_RES (1)..(1): Xaa is C or S
XAKVVMNEYKFKIVNNSSDLYLVSIPEL

SEQ ID NO: 62566 - protein, 37 aa, Artificial Sequence; identical to SEQ ID NO: 18145
  Cyclic GFR-binding peptide
  MOD_RES (2)..(34)..(35): Xaa is C or S

SEQ ID NO: 62567 - protein, 35 aa, Artificial Sequence
  Cyclic GFR-binding peptide
  MOD_RES (5)..(6): Xaa is C or S
SASPXXVPQDLSPISILYIVGRTPKVYKQYEMVVK

SEQ ID NO: 62568 - protein, 40 aa, Artificial Sequence; identical to SEQ ID NO: 18150
  Cyclic GFR-binding peptide
  MOD_RES (4)..(5)..(37)..(39): Xaa is C or S

SEQ ID NO: 62569 - protein, 32 aa, Artificial Sequence; identical to SEQ ID NO: 18152
  Cyclic GFR-binding peptide
  MOD_RES (1)..(2): Xaa is C or S

SEQ ID NO: 62570 - protein, 31 aa, Artificial Sequence
  Cyclic GFR-binding peptide
  MOD_RES (31)..(31): Xaa is C or S
PTKLSPISILYIDKGVVTYYKQYEGMAVSEX

SEQ ID NO: 62571 - protein, 29 aa, Artificial Sequence
  Cyclic GFR-binding peptide
  MOD_RES (4)..(4): Xaa is C or S
KPTXAPTKLEPISVLYLDDSSNVIKFKYE

SEQ ID NO: 62572 - protein, 22 aa, Artificial Sequence
  Cyclic GFR-binding peptide
KLSPISVLYIDDSSNVIYKQYE

SEQ ID NO: 62573 - protein, 28 aa, Artificial Sequence
  Cyclic GFR-binding peptide
VPTELEPISMLYLDEYDKVVKFKYEEMV

SEQ ID NO: 62574 - protein, 37 aa, Artificial Sequence; identical to SEQ ID NO: 18158
  Cyclic GFR-binding peptide
  MOD_RES (4)..(5)..(36): Xaa is C or S

SEQ ID NO: 62575 - protein, 32 aa, Artificial Sequence
  Cyclic GFR-binding peptide
  MOD_RES (4)..(5): Xaa is C or S
ASPXXVSQDLSPISILYIIGKTPKIYKQYEMI

SEQ ID NO: 62576 - protein, 34 aa, Artificial Sequence; identical to SEQ ID NO: 18163
  Cyclic GFR-binding peptide
  MOD_RES (1)..(2)..(34): Xaa is C or S

SEQ ID NO: 62577 - protein, 24 aa, Artificial Sequence
  Cyclic GFR-binding peptide
ELEPISMLYLDENEKVVKFKYEDM

SEQ ID NO: 62578 - protein, 35 aa, Artificial Sequence; identical to SEQ ID NO: 18167
  Cyclic GFR-binding peptide
  MOD_RES (1)..(33)..(35): Xaa is C or S

SEQ ID NO: 62579 - protein, 31 aa, Artificial Sequence; identical to SEQ ID NO: 18169
  Cyclic GFR-binding peptide
  MOD_RES (1)..(1): Xaa is C or S

SEQ ID NO: 62580 - protein, 24 aa, Artificial Sequence
  Cyclic GFR-binding peptide
TKLEPISVLYLDDSSNVIKFKYEN

SEQ ID NO: 62581 - protein, 42 aa, Artificial Sequence; identical to SEQ ID NO: 18173
  Cyclic GFR-binding peptide
  MOD_RES (6)..(7)..(39)..(41): Xaa is C or S

SEQ ID NO: 62582 - protein, 23 aa, Artificial Sequence
  Cyclic GFR-binding peptide
KLEPISVLYLDDMGVPTKFKYEE

SEQ ID NO: 62583 - protein, 32 aa, Artificial Sequence
  Cyclic GFR-binding peptide
  MOD_RES (4)..(5): Xaa is C or S
ASPXXVSQDLEPISILYLIGKTPKIKFKYEMI

SEQ ID NO: 62584 - protein, 36 aa, Artificial Sequence; identical to SEQ ID NO: 18175
  Cyclic GFR-binding peptide
  MOD_RES (5)..(6): Xaa is C or S

SEQ ID NO: 62585 - protein, 26 aa, Artificial Sequence
  Cyclic GFR-binding peptide
QDLSPISILYIIGKTPKIYKQYEMIV

SEQ ID NO: 62586 - protein, 25 aa, Artificial Sequence
  Cyclic GFR-binding peptide
ELEPISMLYLDENEKVVKFKYEDMV

SEQ ID NO: 62587 - protein, 41 aa, Artificial Sequence; identical to SEQ ID NO: 18181
  Cyclic GFR-binding peptide
  MOD_RES (6)..(7)..(39)..(41): Xaa is C or S

SEQ ID NO: 62588 - protein, 31 aa, Artificial Sequence
  Cyclic GFR-binding peptide
  MOD_RES (1)..(2): Xaa is C or S
XXVPARLNAISILYFDAANNVVLKKYRDMVV

SEQ ID NO: 62589 - protein, 24 aa, Artificial Sequence
  Cyclic GFR-binding peptide
ELSPISMLYIDENEKVVYKQYEDM

SEQ ID NO: 62590 - protein, 40 aa, Artificial Sequence; identical to SEQ ID NO: 18183
  Cyclic GFR-binding peptide
  MOD_RES (5)..(6)..(38)..(40): Xaa is C or S

SEQ ID NO: 62591 - protein, 27 aa, Artificial Sequence
  Cyclic GFR-binding peptide
TKLSPISILYKDKGVVTYLKYHYGMAV

SEQ ID NO: 62592 - protein, 26 aa, Artificial Sequence
  Cyclic GFR-binding peptide
  MOD_RES (1)..(1): Xaa is C or S
XVPARLEPISILYLDAANNVVKFKYE

SEQ ID NO: 62593 - protein, 37 aa, Artificial Sequence; identical to SEQ ID NO: 18189
  Cyclic GFR-binding peptide
  MOD_RES (3)..(4)..(36): Xaa is C or S

SEQ ID NO: 62594 - protein, 26 aa, Artificial Sequence
  Cyclic GFR-binding peptide
SPISILYIDKGVVTYYKQYEGMAVSE

SEQ ID NO: 62595 - protein, 26 aa, Artificial Sequence
  Cyclic GFR-binding peptide
KLSPISVLYIDSSNNVIYKQYENMVV

SEQ ID NO: 62596 - protein, 34 aa, Artificial Sequence
  Cyclic GFR-binding peptide
  MOD_RES (6)..(7): Xaa is C or S
ASASPXXVPQDLEPISILYLVGRTPKVKFKYEMV

SEQ ID NO: 62597 - protein, 29 aa, Artificial Sequence
  Cyclic GFR-binding peptide
  MOD_RES (29)..(29): Xaa is C or S
KLSPISILYIDKGVVTYYKQYEGMAVSEX

SEQ ID NO: 62598 - protein, 36 aa, Artificial Sequence
  Cyclic GFR-binding peptide
  MOD_RES (6)..(7): Xaa is C or S
TVPKPXXAPTQLSPISVLYIDDSSNVIYKQYENMVV

SEQ ID NO: 62599 - protein, 27 aa, Artificial Sequence
  Cyclic GFR-binding peptide
APTQLSPISVLYIDDSSNVIYKQYENM

SEQ ID NO: 62600 - protein, 33 aa, Artificial Sequence; identical to SEQ ID NO: 18200
  Cyclic GFR-binding peptide
  MOD_RES (1)..(33): Xaa is C or S

SEQ ID NO: 62601 - protein, 30 aa, Artificial Sequence
  Cyclic GFR-binding peptide
  MOD_RES (27)..(29): Xaa is C or S
SPISILYKDAANNVVLKYHYDMVVEAXGXR

SEQ ID NO: 62602 - protein, 36 aa, Artificial Sequence; identical to SEQ ID NO: 18201
  Cyclic GFR-binding peptide
  MOD_RES (1)..(2)..(33)..(35): Xaa is C or S

SEQ ID NO: 62603 - protein, 23 aa, Artificial Sequence
  Cyclic GFR-binding peptide
ELEPISMLYLDEYDKVVKFKYEE

SEQ ID NO: 62604 - protein, 30 aa, Artificial Sequence
  Cyclic GFR-binding peptide
PTKLNAISILYFDKGVVTYLKKYRGMAVSE

SEQ ID NO: 62605 - protein, 29 aa, Artificial Sequence
  Cyclic GFR-binding peptide
  MOD_RES (3)..(4): Xaa is C or S
KAXXVPTELSPISMLYIDENEKVVYKQYE

SEQ ID NO: 62606 - protein, 20 aa, Artificial Sequence
  Cyclic GFR-binding peptide
EPISILYLVGRTPKVKFKYE

SEQ ID NO: 62607 - protein, 25 aa, Artificial Sequence
  Cyclic GFR-binding peptide
PTKLEPISVLYLDDSSNVIKFKYEN

SEQ ID NO: 62608 - protein, 41 aa, Artificial Sequence; identical to SEQ ID NO: 18207
  Cyclic GFR-binding peptide
  MOD_RES (6)..(7)..(39)..(41): Xaa is C or S

SEQ ID NO: 62609 - protein, 31 aa, Artificial Sequence
  Cyclic GFR-binding peptide
  MOD_RES (3)..(4): Xaa is C or S
KAXXVPTKLEPISVLYLDDMGVPTKFKYEEG

SEQ ID NO: 62610 - protein, 23 aa, Artificial Sequence
  Cyclic GFR-binding peptide
TKLEPISVLYLDSSNNVIKFKYE

SEQ ID NO: 62611 - protein, 34 aa, Artificial Sequence; identical to SEQ ID NO: 18213
  Cyclic GFR-binding peptide
  MOD_RES (32)..(34): Xaa is C or S

SEQ ID NO: 62612 - protein, 32 aa, Artificial Sequence
  Cyclic GFR-binding peptide
  MOD_RES (3)..(4): Xaa is C or S
KPXXAPTQLSPISVLYIDDSSNVIYKQYENMV

SEQ ID NO: 62613 - protein, 28 aa, Artificial Sequence
  Cyclic GFR-binding peptide
QDLSPISILYIVGRTPKVYKQYEMVVKS

SEQ ID NO: 62614 - protein, 28 aa, Artificial Sequence
  Cyclic GFR-binding peptide
  MOD_RES (28)..(28): Xaa is C or S
LSPISILYKDKGVVTYLKYHYGMAVSEX

SEQ ID NO: 62615 - protein, 30 aa, Artificial Sequence
  Cyclic GFR-binding peptide
  MOD_RES (30)..(30): Xaa is C or S
TKLNAISILYFDKGVVTYLKKYRGMAVSEX

SEQ ID NO: 62616 - protein, 40 aa, Artificial Sequence; identical to SEQ ID NO: 18221
  Cyclic GFR-binding peptide
  MOD_RES (5)..(6)..(38)..(40): Xaa is C or S

SEQ ID NO: 62617 - protein, 30 aa, Artificial Sequence
  Cyclic GFR-binding peptide
  MOD_RES (2)..(3): Xaa is C or S
AXXVPTELSPISMLYIDEYDKVVYKQYEEM

SEQ ID NO: 62618 - protein, 32 aa, Artificial Sequence
  Cyclic GFR-binding peptide
  MOD_RES (4)..(5): Xaa is C or S
SKAXXVPTKLSPISILYIDKGVVTYYKQYEGM

SEQ ID NO: 62619 - protein, 37 aa, Artificial Sequence; identical to SEQ ID NO: 18224
  Cyclic GFR-binding peptide
  MOD_RES (3)..(4)..(36): Xaa is C or S

SEQ ID NO: 62620 - protein, 31 aa, Artificial Sequence
  Cyclic GFR-binding peptide
  MOD_RES (4)..(5): Xaa is C or S
PKPXXAPTKLEPISVLYLDDSSNVIKFKYEN

SEQ ID NO: 62621 - protein, 38 aa, Artificial Sequence; identical to SEQ ID NO: 18226
  Cyclic GFR-binding peptide
  MOD_RES (4)..(5)..(37): Xaa is C or S

SEQ ID NO: 62622 - protein, 23 aa, Artificial Sequence
  Cyclic GFR-binding peptide
TELEPISMLYLDENEKVVKFKYE

SEQ ID NO: 62623 - protein, 34 aa, Artificial Sequence
  Cyclic GFR-binding peptide
  MOD_RES (4)..(5): Xaa is C or S
PKAXXVPTELEPISMLYLDEYDKVVKFKYEEMVV

SEQ ID NO: 62624 - protein, 24 aa, Artificial Sequence
  Cyclic GFR-binding peptide
LSPISILYIVGRKPKVYKQYEMIV

SEQ ID NO: 62625 - protein, 22 aa, Artificial Sequence
  Cyclic GFR-binding peptide
LSPISILYIDKGVVTYYKQYEG

SEQ ID NO: 62626 - protein, 33 aa, Artificial Sequence
  Cyclic GFR-binding peptide
  MOD_RES (5)..(6): Xaa is C or S
IPKAXXVPTELSPISMLYIDEYDKVVYKQYEEM

SEQ ID NO: 62627 - protein, 42 aa, Artificial Sequence; identical to SEQ ID NO: 18231
  Cyclic GFR-binding peptide
  MOD_RES (6)..(7)..(39)..(41): Xaa is C or S

SEQ ID NO: 62628 - protein, 38 aa, Artificial Sequence; identical to SEQ ID NO: 18232
  Cyclic GFR-binding peptide
  MOD_RES (3)..(4)..(36)..(38): Xaa is C or S

SEQ ID NO: 62629 - protein, 25 aa, Artificial Sequence
  Cyclic GFR-binding peptide
QLSPISVLYIDDSSNVIYKQYENMV

SEQ ID NO: 62630 - protein, 27 aa, Artificial Sequence
  Cyclic GFR-binding peptide
VPQALSPISILYIVGRKPKVYKQYEMI

SEQ ID NO: 62631 - protein, 31 aa, Artificial Sequence
  Cyclic GFR-binding peptide
  MOD_RES (2)..(3): Xaa is C or S
PXXAPTKLSPISVLYIDDSSNVIYKQYENMV

SEQ ID NO: 62632 - protein, 35 aa, Artificial Sequence; identical to SEQ ID NO: 18241
  Cyclic GFR-binding peptide
  MOD_RES (1)..(2)..(34): Xaa is C or S

SEQ ID NO: 62633 - protein, 33 aa, Artificial Sequence
  Cyclic GFR-binding peptide
  MOD_RES (3)..(4): Xaa is C or S
SPXXVSQDLEPISILYLIGKTPKIKFKYEMIVK

SEQ ID NO: 62634 - protein, 22 aa, Artificial Sequence
  Cyclic GFR-binding peptide
DLEPISILYLIGKTPKIKFKYE

SEQ ID NO: 62635 - protein, 34 aa, Artificial Sequence
  Cyclic GFR-binding peptide
  MOD_RES (31)..(33): Xaa is C or S
PTKLNAISILYFDKGVVTYLKKYRGMAVSEXGXR

SEQ ID NO: 62636 - protein, 26 aa, Artificial Sequence
  Cyclic GFR-binding peptide
KLSPISVLYIDDSSNVIYKQYENMVV

SEQ ID NO: 62637 - protein, 41 aa, Artificial Sequence; identical to SEQ ID NO: 18243
  Cyclic GFR-binding peptide
  MOD_RES (5)..(6)..(38)..(40): Xaa is C or S

SEQ ID NO: 62638 - protein, 37 aa, Artificial Sequence; identical to SEQ ID NO: 18247
  Cyclic GFR-binding peptide
  MOD_RES (3)..(35)..(37): Xaa is C or S

SEQ ID NO: 62639 - protein, 31 aa, Artificial Sequence
  Cyclic GFR-binding peptide
  MOD_RES (5)..(5): Xaa is C or S
TKPTXAPTKLSPISVLYIDDSSNVIYKQYEN

SEQ ID NO: 62640 - protein, 35 aa, Artificial Sequence; identical to SEQ ID NO: 18259
  Cyclic GFR-binding peptide
  MOD_RES (2)..(34): Xaa is C or S

SEQ ID NO: 62641 - protein, 31 aa, Artificial Sequence
  Cyclic GFR-binding peptide
  MOD_RES (3)..(4): Xaa is C or S
KAXXVPTKLSPISVLYIDDMGVPTYKQYEEG

SEQ ID NO: 62642 - protein, 25 aa, Artificial Sequence
  Cyclic GFR-binding peptide
VSQDLSPISILYIIGKTPKIYKQYE

SEQ ID NO: 62643 - protein, 35 aa, Artificial Sequence
  Cyclic GFR-binding peptide
  MOD_RES (6)..(7): Xaa is C or S
ASASPXXVSQDLEPISILYLIGKTPKIKFKYEMIV

SEQ ID NO: 62644 - protein, 37 aa, Artificial Sequence; identical to SEQ ID NO: 18266
  Cyclic GFR-binding peptide
  MOD_RES (6)..(7): Xaa is C or S

SEQ ID NO: 62645 - protein, 30 aa, Artificial Sequence
  Cyclic GFR-binding peptide
  MOD_RES (30)..(30): Xaa is C or S
PQDLEPISILYLVGRTPKVKFKYEMVVKSX

SEQ ID NO: 62646 - protein, 26 aa, Artificial Sequence
  Cyclic GFR-binding peptide
VPTELEPISMLYLDEYDKVVKFKYEE

SEQ ID NO: 62647 - protein, 34 aa, Artificial Sequence
  Cyclic GFR-binding peptide
  MOD_RES (31)..(33): Xaa is C or S
PTELSPISMLYIDEYDKVVYKQYEEMVVEGXGXR

SEQ ID NO: 62648 - protein, 32 aa, Artificial Sequence; identical to SEQ ID NO: 18268
  Cyclic GFR-binding peptide
  MOD_RES (1)..(2): Xaa is C or S

SEQ ID NO: 62649 - protein, 33 aa, Artificial Sequence
  Cyclic GFR-binding peptide
  MOD_RES (5)..(6): Xaa is C or S
VPKPXXAPTKLSPISVLYIDDSSNVIYKQYENM

SEQ ID NO: 62650 - protein, 39 aa, Artificial Sequence; identical to SEQ ID NO: 18272
  Cyclic GFR-binding peptide
  MOD_RES (4)..(5)..(37)..(39): Xaa is C or S

SEQ ID NO: 62651 - protein, 28 aa, Artificial Sequence
  Cyclic GFR-binding peptide
ELSPISMLYIDENEKVVYKQYEDMVVEG

SEQ ID NO: 62652 - protein, 34 aa, Artificial Sequence; identical to SEQ ID NO: 18278
  Cyclic GFR-binding peptide
  MOD_RES (3)..(4): Xaa is C or S

SEQ ID NO: 62653 - protein, 35 aa, Artificial Sequence; identical to SEQ ID NO: 18280
  Cyclic GFR-binding peptide
  MOD_RES (1)..(2)..(35): Xaa is C or S

SEQ ID NO: 62654 - protein, 28 aa, Artificial Sequence
  Cyclic GFR-binding peptide
VPQDLSPISILYIVGRTPKVYKQYEMVV

SEQ ID NO: 62655 - protein, 30 aa, Artificial Sequence; identical to SEQ ID NO: 885
  Cyclic GFR-binding peptide

SEQ ID NO: 62656 - protein, 20 aa, Artificial Sequence
  Cyclic GFR-binding peptide
EPISVLYLDDMGVPTKFKYE

SEQ ID NO: 62657 - protein, 33 aa, Artificial Sequence
  Cyclic GFR-binding peptide
  MOD_RES (4)..(5): Xaa is C or S
PASXXVPARLEPISILYLDAANNVVKFKYEDMV

SEQ ID NO: 62658 - protein, 30 aa, Artificial Sequence
  Cyclic GFR-binding peptide
  MOD_RES (28)..(30): Xaa is C or S
LSPISILYKDAANNVVLKYHYDMVVEAXGX

SEQ ID NO: 62659 - protein, 37 aa, Artificial Sequence; identical to SEQ ID NO: 18290
  Cyclic GFR-binding peptide
  MOD_RES (1)..(2)..(34)..(36): Xaa is C or S

SEQ ID NO: 62660 - protein, 25 aa, Artificial Sequence
  Cyclic GFR-binding peptide
LSPISILYIDKGVVTYYKQYEGMAV

SEQ ID NO: 62661 - protein, 35 aa, Artificial Sequence; identical to SEQ ID NO: 18292
  Cyclic GFR-binding peptide
  MOD_RES (1)..(2)..(33)..(35): Xaa is C or S

SEQ ID NO: 62662 - protein, 36 aa, Artificial Sequence; identical to SEQ ID NO: 18302
  Cyclic GFR-binding peptide
  MOD_RES (1)..(33)..(35): Xaa is C or S

SEQ ID NO: 62663 - protein, 32 aa, Artificial Sequence
  Cyclic GFR-binding peptide
  MOD_RES (3)..(4): Xaa is C or S
SPXXVPQDLSPISILYIVGRTPKVYKQYEMVV

SEQ ID NO: 62664 - protein, 20 aa, Artificial Sequence
  Cyclic GFR-binding peptide
SPISILYIVGRKPKVYKQYE

SEQ ID NO: 62665 - protein, 29 aa, Artificial Sequence
  Cyclic GFR-binding peptide
  MOD_RES (1)..(1): Xaa is C or S
XAPTQLEPISVLYLDDSSNVIKFKYENMV

SEQ ID NO: 62666 - protein, 29 aa, Artificial Sequence
  Cyclic GFR-binding peptide
TKLEPISVLYLDDSSNVIKFKYENMVVRS

SEQ ID NO: 62667 - protein, 31 aa, Artificial Sequence
  Cyclic GFR-binding peptide
  MOD_RES (3)..(4): Xaa is C or S
ASXXVPARLEPISILYLDAANNVVKFKYEDM

SEQ ID NO: 62668 - protein, 31 aa, Artificial Sequence
  Cyclic GFR-binding peptide
  MOD_RES (30)..(30): Xaa is C or S
KLSPISVLYIDDMGVPTYKQYEEGMSVAEXG

SEQ ID NO: 62669 - protein, 36 aa, Artificial Sequence; identical to SEQ ID NO: 18312
  Cyclic GFR-binding peptide
  MOD_RES (1)..(33)..(35): Xaa is C or S

SEQ ID NO: 62670 - protein, 39 aa, Artificial Sequence; identical to SEQ ID NO: 18314
  Cyclic GFR-binding peptide
  MOD_RES (3)..(4)..(36)..(38): Xaa is C or S

SEQ ID NO: 62671 - protein, 27 aa, Artificial Sequence
  Cyclic GFR-binding peptide
  MOD_RES (1)..(1): Xaa is C or S
XVPTKLNAISILYFDKGVVTYLKKYRG

SEQ ID NO: 62672 - protein, 35 aa, Artificial Sequence
  Cyclic GFR-binding peptide
  MOD_RES (6)..(7): Xaa is C or S
AAPASXXVPARLEPISILYLDAANNVVKFKYEDMV

SEQ ID NO: 62673 - protein, 33 aa, Artificial Sequence
  Cyclic GFR-binding peptide
  MOD_RES (31)..(33): Xaa is C or S
PTELEPISMLYLDEYDKVVKFKYEEMVVEGXGX

SEQ ID NO: 62674 - protein, 30 aa, Artificial Sequence; identical to SEQ ID NO: 888
  Cyclic GFR-binding peptide

SEQ ID NO: 62675 - protein, 36 aa, Artificial Sequence; identical to SEQ ID NO: 18323
  Cyclic GFR-binding peptide
  MOD_RES (1)..(33)..(35): Xaa is C or S

SEQ ID NO: 62676 - protein, 28 aa, Artificial Sequence
  Cyclic GFR-binding peptide
APTKLSPISVLYIDSSNNVIYKQYENMV

SEQ ID NO: 62677 - protein, 38 aa, Artificial Sequence; identical to SEQ ID NO: 18331
  Cyclic GFR-binding peptide
  MOD_RES (4)..(5)..(36)..(38): Xaa is C or S

SEQ ID NO: 62678 - protein, 28 aa, Artificial Sequence
  Cyclic GFR-binding peptide
PTKLSPISVLYIDDSSNVIYKQYENMVV

SEQ ID NO: 62679 - protein, 22 aa, Artificial Sequence
  Cyclic GFR-binding peptide
ELSPISMLYIDEYDKVVYKQYE

SEQ ID NO: 62680 - protein, 41 aa, Artificial Sequence; identical to SEQ ID NO: 18333
  Cyclic GFR-binding peptide
  MOD_RES (5)..(6)..(38)..(40): Xaa is C or S

SEQ ID NO: 62681 - protein, 30 aa, Artificial Sequence
  Cyclic GFR-binding peptide
  MOD_RES (27)..(29): Xaa is C or S
SPISMLYIDENEKVVYKQYEDMVVEGXGXR

SEQ ID NO: 62682 - protein, 38 aa, Artificial Sequence; identical to SEQ ID NO: 18336
  Cyclic GFR-binding peptide
  MOD_RES (6)..(7): Xaa is C or S

SEQ ID NO: 62683 - protein, 26 aa, Artificial Sequence
  Cyclic GFR-binding peptide
NAISILYFDAANNVVLKKYRDMVVEA

SEQ ID NO: 62684 - protein, 31 aa, Artificial Sequence
  Cyclic GFR-binding peptide
  MOD_RES (30)..(30): Xaa is C or S
SQDLSPISILYIIGKTPKIYKQYEMIVKSXK

SEQ ID NO: 62685 - protein, 32 aa, Artificial Sequence
  Cyclic GFR-binding peptide
  MOD_RES (29)..(31): Xaa is C or S
KLSPISVLYIDDSSNVIYKQYENMVVRSXGXH

SEQ ID NO: 62686 - protein, 21 aa, Artificial Sequence
  Cyclic GFR-binding peptide
LEPISILYLVGRTPKVKFKYE

SEQ ID NO: 62687 - protein, 30 aa, Artificial Sequence
  Cyclic GFR-binding peptide
  MOD_RES (27)..(29): Xaa is C or S
SPISVLYIDDSSNVIYKQYENMVVRSXGXH

SEQ ID NO: 62688 - protein, 28 aa, Artificial Sequence
  Cyclic GFR-binding peptide
  MOD_RES (2)..(3): Xaa is C or S
PXXAPTQLSPISVLYIDDSSNVIYKQYE

SEQ ID NO: 62689 - protein, 39 aa, Artificial Sequence; identical to SEQ ID NO: 18345
  Cyclic GFR-binding peptide
  MOD_RES (5)..(6)..(38): Xaa is C or S

SEQ ID NO: 62690 - protein, 36 aa, Artificial Sequence; identical to SEQ ID NO: 18347
  Cyclic GFR-binding peptide
  MOD_RES (2)..(3)..(35): Xaa is C or S

SEQ ID NO: 62691 - protein, 37 aa, Artificial Sequence; identical to SEQ ID NO: 18348
  Cyclic GFR-binding peptide
  MOD_RES (2)..(3)..(34)..(36): Xaa is C or S

SEQ ID NO: 62692 - protein, 29 aa, Artificial Sequence
  Cyclic GFR-binding peptide
VPQDLEPISILYLVGRTPKVKFKYEMVVK

SEQ ID NO: 62693 - protein, 36 aa, Artificial Sequence
  Cyclic GFR-binding peptide
  MOD_RES (4)..(5): Xaa is C or S
GKAXXVPTKLSPISVLYIDDMGVPTYKQYEEGMSVA

SEQ ID NO: 62694 - protein, 31 aa, Artificial Sequence
  Cyclic GFR-binding peptide
  MOD_RES (4)..(5): Xaa is C or S
PKAXXAPTKLSPISVLYIDSSNNVIYKQYEN

SEQ ID NO: 62695 - protein, 27 aa, Artificial Sequence
  Cyclic GFR-binding peptide
VPQALEPISILYLVGRKPKVKFKYEMI

SEQ ID NO: 62696 - protein, 32 aa, Artificial Sequence
  Cyclic GFR-binding peptide
  MOD_RES (2)..(3): Xaa is C or S
PXXAPTQLSPISVLYIDDSSNVIYKQYENMVV

SEQ ID NO: 62697 - protein, 30 aa, Artificial Sequence
  Cyclic GFR-binding peptide
  MOD_RES (4)..(5): Xaa is C or S
PKAXXAPTKLEPISVLYLDSSNNVIKFKYE

SEQ ID NO: 62698 - protein, 25 aa, Artificial Sequence
  Cyclic GFR-binding peptide
SPISILYIVGRTPKVYKQYEMVVKS

SEQ ID NO: 62699 - protein, 30 aa, Artificial Sequence
  Cyclic GFR-binding peptide
  MOD_RES (2)..(3): Xaa is C or S
PXXAPTKLEPISVLYLDDSSNVIKFKYENM

SEQ ID NO: 62700 - protein, 25 aa, Artificial Sequence
  Cyclic GFR-binding peptide
KLEPISVLYLDDSSNVIKFKYENMV

SEQ ID NO: 62701 - protein, 31 aa, Artificial Sequence
  Cyclic GFR-binding peptide
  MOD_RES (2)..(3): Xaa is C or S
PXXVPQDLSPISILYIVGRTPKVYKQYEMVV

SEQ ID NO: 62702 - protein, 28 aa, Artificial Sequence
  Cyclic GFR-binding peptide
KLSPISVLYIDDSSNVIYKQYENMVVRS

SEQ ID NO: 62703 - protein, 40 aa, Artificial Sequence; identical to SEQ ID NO: 18365
  Cyclic GFR-binding peptide
  MOD_RES (5)..(6)..(38)..(40): Xaa is C or S

SEQ ID NO: 62704 - protein, 29 aa, Artificial Sequence
  Cyclic GFR-binding peptide
  MOD_RES (2)..(3): Xaa is C or S
PXXVPQALSPISILYIVGRKPKVYKQYEM

SEQ ID NO: 62705 - protein, 31 aa, Artificial Sequence; identical to SEQ ID NO: 18366
  Cyclic GFR-binding peptide

SEQ ID NO: 62706 - protein, 31 aa, Artificial Sequence; identical to SEQ ID NO: 18373
  Cyclic GFR-binding peptide

SEQ ID NO: 62707 - protein, 33 aa, Artificial Sequence; identical to SEQ ID NO: 18372
  Cyclic GFR-binding peptide
  MOD_RES (1)..(33): Xaa is C or S

SEQ ID NO: 62708 - protein, 37 aa, Artificial Sequence; identical to SEQ ID NO: 18374
  Cyclic GFR-binding peptide
  MOD_RES (5)..(6): Xaa is C or S

SEQ ID NO: 62709 - protein, 33 aa, Artificial Sequence
  Cyclic GFR-binding peptide
  MOD_RES (5)..(6): Xaa is C or S
VPKPXXAPTKLEPISVLYLDDSSNVIKFKYENM

SEQ ID NO: 62710 - protein, 26 aa, Artificial Sequence
  Cyclic GFR-binding peptide
VPTKLEPISVLYLDDMGVPTKFKYEE

SEQ ID NO: 62711 - protein, 28 aa, Artificial Sequence
  Cyclic GFR-binding peptide
  MOD_RES (28)..(28): Xaa is C or S
LEPISVLYLDDSSNVIKFKYENMVVRSX

SEQ ID NO: 62712 - protein, 31 aa, Artificial Sequence
  Cyclic GFR-binding peptide
  MOD_RES (3)..(4): Xaa is C or S
KAXXAPTKLEPISVLYLDSSNNVIKFKYENM

SEQ ID NO: 62713 - protein, 33 aa, Artificial Sequence
  Cyclic GFR-binding peptide
  MOD_RES (6)..(7): Xaa is C or S
ASAAPXXVPQALSPISILYIVGRKPKVYKQYEM

SEQ ID NO: 62714 - protein, 32 aa, Artificial Sequence
  Cyclic GFR-binding peptide
  MOD_RES (2)..(3): Xaa is C or S
SXXVPARLSPISILYKDAANNVVLKYHYDMVV

SEQ ID NO: 62715 - protein, 26 aa, Artificial Sequence
  Cyclic GFR-binding peptide
DLSPISILYIVGRTPKVYKQYEMVVK

SEQ ID NO: 62716 - protein, 32 aa, Artificial Sequence
  Cyclic GFR-binding peptide
  MOD_RES (31)..(31): Xaa is C or S
TKLEPISVLYLDDMGVPTKFKYEEGMSVAEXG

SEQ ID NO: 62717 - protein, 23 aa, Artificial Sequence
  Cyclic GFR-binding peptide
TQLEPISVLYLDDSSNVIKFKYE

SEQ ID NO: 62718 - protein, 38 aa, Artificial Sequence; identical to SEQ ID NO: 18394
  Cyclic GFR-binding peptide
  MOD_RES (4)..(5)..(37): Xaa is C or S

SEQ ID NO: 62719 - protein, 32 aa, Artificial Sequence; identical to SEQ ID NO: 18395
  Cyclic GFR-binding peptide
  MOD_RES (1)..(2): Xaa is C or S

SEQ ID NO: 62720 - protein, 31 aa, Artificial Sequence
  Cyclic GFR-binding peptide
  MOD_RES (5)..(6): Xaa is C or S
SASPXXVPQDLSPISILYIVGRTPKVYKQYE

SEQ ID NO: 62721 - protein, 22 aa, Artificial Sequence
  Cyclic GFR-binding peptide
DLSPISILYIVGRTPKVYKQYE

SEQ ID NO: 62722 - protein, 34 aa, Artificial Sequence
  Cyclic GFR-binding peptide
  MOD_RES (4)..(5): Xaa is C or S
PKAXXVPTELSPISMLYIDENEKVVYKQYEDMVV

SEQ ID NO: 62723 - protein, 34 aa, Artificial Sequence
  Cyclic GFR-binding peptide
  MOD_RES (4)..(5): Xaa is C or S
SKAXXVPTKLSPISILYKDKGVVTYLKYHYGMAV

SEQ ID NO: 62724 - protein, 20 aa, Artificial Sequence
  Cyclic GFR-binding peptide
EPISVLYLDDMGVPTKFKYE

SEQ ID NO: 62725 - protein, 27 aa, Artificial Sequence
  Cyclic GFR-binding peptide
PTQLSPISVLYIDDSSNVIYKQYENMV

SEQ ID NO: 62726 - protein, 32 aa, Artificial Sequence
  Cyclic GFR-binding peptide
  MOD_RES (6)..(7): Xaa is C or S
KIPKAXXVPTELEPISMLYLDENEKVVKFKYE

SEQ ID NO: 62727 - protein, 35 aa, Artificial Sequence; identical to SEQ ID NO: 18405
  Cyclic GFR-binding peptide
  MOD_RES (3)..(4)..(35): Xaa is C or S

SEQ ID NO: 62728 - protein, 21 aa, Artificial Sequence
  Cyclic GFR-binding peptide
NAISILYFDAANNVVLKKYRD

SEQ ID NO: 62729 - protein, 26 aa, Artificial Sequence
  Cyclic GFR-binding peptide
  MOD_RES (1)..(1): Xaa is C or S
XAPTKLEPISVLYLDSSNNVIKFKYE

SEQ ID NO: 62730 - protein, 27 aa, Artificial Sequence
  Cyclic GFR-binding peptide
  MOD_RES (27)..(27): Xaa is C or S
NAISILYFDKGVVTYLKKYRGMAVSEX

SEQ ID NO: 62731 - protein, 33 aa, Artificial Sequence; identical to SEQ ID NO: 18409
  Cyclic GFR-binding peptide
  MOD_RES (1)..(32): Xaa is C or S

SEQ ID NO: 62732 - protein, 24 aa, Artificial Sequence
  Cyclic GFR-binding peptide
EPISVLYLDDSSNVIKFKYENMVV

SEQ ID NO: 62733 - protein, 33 aa, Artificial Sequence
  Cyclic GFR-binding peptide
  MOD_RES (3)..(4): Xaa is C or S
SPXXVPQDLSPISILYIVGRTPKVYKQYEMVVK

SEQ ID NO: 62734 - protein, 37 aa, Artificial Sequence; identical to SEQ ID NO: 18410
  Cyclic GFR-binding peptide
  MOD_RES (5)..(6)..(37): Xaa is C or S

SEQ ID NO: 62735 - protein, 32 aa, Artificial Sequence
  Cyclic GFR-binding peptide
  MOD_RES (3)..(4): Xaa is C or S
ASXXVPARLSPISILYKDAANNVVLKYHYDMV

SEQ ID NO: 62736 - protein, 34 aa, Artificial Sequence; identical to SEQ ID NO: 18411
  Cyclic GFR-binding peptide
  MOD_RES (32)..(34): Xaa is C or S

SEQ ID NO: 62737 - protein, 29 aa, Artificial Sequence
  Cyclic GFR-binding peptide
VPTELSPISMLYIDENEKVVYKQYEDMVV

SEQ ID NO: 62738 - protein, 28 aa, Artificial Sequence
  Cyclic GFR-binding peptide
  MOD_RES (1)..(1): Xaa is C or S
XVPARLNAISILYFDAANNVVLKKYRDM

SEQ ID NO: 62739 - protein, 32 aa, Artificial Sequence
  Cyclic GFR-binding peptide
  MOD_RES (3)..(3): Xaa is C or S
PTXAPTKLEPISVLYLDDSSNVIKFKYENMVV

SEQ ID NO: 62740 - protein, 31 aa, Artificial Sequence
  Cyclic GFR-binding peptide
  MOD_RES (1)..(2): Xaa is C or S
XXVPQDLSPISILYIVGRTPKVYKQYEMVVK

SEQ ID NO: 62741 - protein, 30 aa, Artificial Sequence; identical to SEQ ID NO: 18417
  Cyclic GFR-binding peptide

SEQ ID NO: 62742 - protein, 35 aa, Artificial Sequence; identical to SEQ ID NO: 18418
  Cyclic GFR-binding peptide
  MOD_RES (2)..(3): Xaa is C or S

SEQ ID NO: 62743 - protein, 29 aa, Artificial Sequence
  Cyclic GFR-binding peptide
PQDLSPISILYIVGRTPKVYKQYEMVVKS

SEQ ID NO: 62744 - protein, 32 aa, Artificial Sequence
  Cyclic GFR-binding peptide
  MOD_RES (4)..(5): Xaa is C or S
PKAXXVPTELSPISMLYIDENEKVVYKQYEDM

SEQ ID NO: 62745 - protein, 36 aa, Artificial Sequence; identical to SEQ ID NO: 18422
  Cyclic GFR-binding peptide
  MOD_RES (1)..(2)..(34)..(36): Xaa is C or S

SEQ ID NO: 62746 - protein, 34 aa, Artificial Sequence; identical to SEQ ID NO: 18424
  Cyclic GFR-binding peptide
  MOD_RES (3)..(4): Xaa is C or S

SEQ ID NO: 62747 - protein, 27 aa, Artificial Sequence
  Cyclic GFR-binding peptide
  MOD_RES (26)..(26): Xaa is C or S
SPISILYIVGRTPKVYKQYEMVVKSXK

SEQ ID NO: 62748 - protein, 33 aa, Artificial Sequence; identical to SEQ ID NO: 18425
  Cyclic GFR-binding peptide
  MOD_RES (31)..(33): Xaa is C or S

SEQ ID NO: 62749 - protein, 33 aa, Artificial Sequence; identical to SEQ ID NO: 18427
  Cyclic GFR-binding peptide
  MOD_RES (1)..(33): Xaa is C or S

SEQ ID NO: 62750 - protein, 28 aa, Artificial Sequence
  Cyclic GFR-binding peptide
  MOD_RES (1)..(2): Xaa is C or S
XXVSQDLSPISILYIIGKTPKIYKQYEM

SEQ ID NO: 62751 - protein, 32 aa, Artificial Sequence
  Cyclic GFR-binding peptide
  MOD_RES (6)..(7): Xaa is C or S
ASASPXXVSQDLEPISILYLIGKTPKIKFKYE

SEQ ID NO: 62752 - protein, 30 aa, Artificial Sequence
  Cyclic GFR-binding peptide
  MOD_RES (1)..(2): Xaa is C or S
XXVPQDLEPISILYLVGRTPKVKFKYEMVV

SEQ ID NO: 62753 - protein, 30 aa, Artificial Sequence
  Cyclic GFR-binding peptide
  MOD_RES (2)..(3): Xaa is C or S
PXXAPTKLSPISVLYIDDSSNVIYKQYENM

SEQ ID NO: 62754 - protein, 27 aa, Artificial Sequence
  Cyclic GFR-binding peptide
  MOD_RES (27)..(27): Xaa is C or S
SPISVLYIDDSSNVIYKQYENMVVRSX

SEQ ID NO: 62755 - protein, 34 aa, Artificial Sequence; identical to SEQ ID NO: 18437
  Cyclic GFR-binding peptide
  MOD_RES (1)..(2)..(33): Xaa is C or S

SEQ ID NO: 62756 - protein, 28 aa, Artificial Sequence
  Cyclic GFR-binding peptide
  MOD_RES (2)..(3): Xaa is C or S
AXXAPTKLSPISVLYIDSSNNVIYKQYE

SEQ ID NO: 62757 - protein, 35 aa, Artificial Sequence; identical to SEQ ID NO: 18443
  Cyclic GFR-binding peptide
  MOD_RES (1)..(2)..(34): Xaa is C or S

SEQ ID NO: 62758 - protein, 38 aa, Artificial Sequence; identical to SEQ ID NO: 18444
  Cyclic GFR-binding peptide
  MOD_RES (4)..(5)..(36)..(38): Xaa is C or S

SEQ ID NO: 62759 - protein, 29 aa, Artificial Sequence
  Cyclic GFR-binding peptide
  MOD_RES (2)..(3): Xaa is C or S
PXXAPTKLEPISVLYLDDSSNVIKFKYEN

SEQ ID NO: 62760 - protein, 31 aa, Artificial Sequence
  Cyclic GFR-binding peptide
  MOD_RES (1)..(1): Xaa is C or S
XVPTKLEPISVLYLDDMGVPTKFKYEEGMSV

SEQ ID NO: 62761 - protein, 32 aa, Artificial Sequence
  Cyclic GFR-binding peptide
  MOD_RES (29)..(31): Xaa is C or S
RLNAISILYFDAANNVVLKKYRDMVVEAXGXR

SEQ ID NO: 62762 - protein, 28 aa, Artificial Sequence
  Cyclic GFR-binding peptide
  MOD_RES (2)..(3): Xaa is C or S
PXXVPQALSPISILYIVGRKPKVYKQYE

SEQ ID NO: 62763 - protein, 27 aa, Artificial Sequence
  Cyclic GFR-binding peptide
VPQDLSPISILYIVGRTPKVYKQYEMV

SEQ ID NO: 62764 - protein, 32 aa, Artificial Sequence
  Cyclic GFR-binding peptide
  MOD_RES (3)..(4): Xaa is C or S
KAXXVPTELSPISMLYIDENEKVVYKQYEDMV

SEQ ID NO: 62765 - protein, 25 aa, Artificial Sequence
  Cyclic GFR-binding peptide
ALSPISILYIVGRKPKVYKQYEMIV

SEQ ID NO: 62766 - protein, 29 aa, Artificial Sequence
  Cyclic GFR-binding peptide
  MOD_RES (28)..(28): Xaa is C or S
ALEPISILYLVGRKPKVKFKYEMIVRSXK

SEQ ID NO: 62767 - protein, 31 aa, Artificial Sequence
  Cyclic GFR-binding peptide
  MOD_RES (28)..(30): Xaa is C or S
DLEPISILYLIGKTPKIKFKYEMIVKSXKXS

SEQ ID NO: 62768 - protein, 36 aa, Artificial Sequence; identical to SEQ ID NO: 18452
  Cyclic GFR-binding peptide
  MOD_RES (1)..(2)..(34)..(36): Xaa is C or S

SEQ ID NO: 62769 - protein, 27 aa, Artificial Sequence
  Cyclic GFR-binding peptide
TELEPISMLYLDENEKVVKFKYEDMVV

SEQ ID NO: 62770 - protein, 40 aa, Artificial Sequence; identical to SEQ ID NO: 18453
  Cyclic GFR-binding peptide
  MOD_RES (6)..(7)..(38)..(40): Xaa is C or S

SEQ ID NO: 62771 - protein, 40 aa, Artificial Sequence; identical to SEQ ID NO: 18454
  Cyclic GFR-binding peptide
  MOD_RES (6)..(7)..(39): Xaa is C or S

SEQ ID NO: 62772 - protein, 27 aa, Artificial Sequence
  Cyclic GFR-binding peptide
  MOD_RES (1)..(1): Xaa is C or S
XVPTELEPISMLYLDEYDKVVKFKYEE

SEQ ID NO: 62773 - protein, 29 aa, Artificial Sequence
  Cyclic GFR-binding peptide
PTQLEPISVLYLDDSSNVIKFKYENMVVR

SEQ ID NO: 62774 - protein, 27 aa, Artificial Sequence
  Cyclic GFR-binding peptide
TQLEPISVLYLDDSSNVIKFKYENMVV

SEQ ID NO: 62775 - protein, 28 aa, Artificial Sequence
  Cyclic GFR-binding peptide
  MOD_RES (28)..(28): Xaa is C or S
DLSPISILYIVGRTPKVYKQYEMVVKSX

SEQ ID NO: 62776 - protein, 40 aa, Artificial Sequence; identical to SEQ ID NO: 18456
  Cyclic GFR-binding peptide
  MOD_RES (4)..(5)..(37)..(39): Xaa is C or S

SEQ ID NO: 62777 - protein, 23 aa, Artificial Sequence
  Cyclic GFR-binding peptide
RLSPISILYKDAANNVVLKYHYD

SEQ ID NO: 62778 - protein, 36 aa, Artificial Sequence; identical to SEQ ID NO: 18459
  Cyclic GFR-binding peptide
  MOD_RES (5)..(6): Xaa is C or S

SEQ ID NO: 62779 - protein, 30 aa, Artificial Sequence
  Cyclic GFR-binding peptide
  MOD_RES (28)..(30): Xaa is C or S
LEPISMLYLDENEKVVKFKYEDMVVEGXGX

SEQ ID NO: 62780 - protein, 29 aa, Artificial Sequence
  Cyclic GFR-binding peptide
  MOD_RES (1)..(1): Xaa is C or S
XVPTKLSPISILYKDKGVVTYLKYHYGMA

SEQ ID NO: 62781 - protein, 32 aa, Artificial Sequence
  Cyclic GFR-binding peptide
  MOD_RES (29)..(31): Xaa is C or S
QDLSPISILYIVGRTPKVYKQYEMVVKSXKXS

SEQ ID NO: 62782 - protein, 30 aa, Artificial Sequence
  Cyclic GFR-binding peptide
  MOD_RES (4)..(5): Xaa is C or S
PKAXXVPTELEPISMLYLDENEKVVKFKYE

SEQ ID NO: 62783 - protein, 33 aa, Artificial Sequence
  Cyclic GFR-binding peptide
  MOD_RES (6)..(7): Xaa is C or S
ASASPXXVPQDLSPISILYIVGRTPKVYKQYEM

SEQ ID NO: 62784 - protein, 32 aa, Artificial Sequence
  Cyclic GFR-binding peptide
  MOD_RES (4)..(5): Xaa is C or S
PKAXXVPTELEPISMLYLDENEKVVKFKYEDM

SEQ ID NO: 62785 - protein, 29 aa, Artificial Sequence
  Cyclic GFR-binding peptide
TELEPISMLYLDENEKVVKFKYEDMVVEG

SEQ ID NO: 62786 - protein, 34 aa, Artificial Sequence; identical to SEQ ID NO: 18466
  Cyclic GFR-binding peptide
  MOD_RES (2)..(3)..(34): Xaa is C or S

SEQ ID NO: 62787 - protein, 35 aa, Artificial Sequence; identical to SEQ ID NO: 18470
  Cyclic GFR-binding peptide
  MOD_RES (2)..(3)..(35): Xaa is C or S

SEQ ID NO: 62788 - protein, 29 aa, Artificial Sequence
  Cyclic GFR-binding peptide
  MOD_RES (2)..(3): Xaa is C or S
AXXAPTKLSPISVLYIDSSNNVIYKQYEN

SEQ ID NO: 62789 - protein, 29 aa, Artificial Sequence
  Cyclic GFR-binding peptide
TKLSPISILYIDKGVVTYYKQYEGMAVSE

SEQ ID NO: 62790 - protein, 28 aa, Artificial Sequence
  Cyclic GFR-binding peptide
  MOD_RES (1)..(1): Xaa is C or S
XVPTELEPISMLYLDEYDKVVKFKYEEM

SEQ ID NO: 62791 - protein, 36 aa, Artificial Sequence; identical to SEQ ID NO: 18481
  Cyclic GFR-binding peptide
  MOD_RES (4)..(5)..(36): Xaa is C or S

SEQ ID NO: 62792 - protein, 27 aa, Artificial Sequence
  Cyclic GFR-binding peptide
QDLSPISILYIIGKTPKIYKQYEMIVK

SEQ ID NO: 62793 - protein, 41 aa, Artificial Sequence; identical to SEQ ID NO: 18482
  Cyclic GFR-binding peptide
  MOD_RES (5)..(6)..(38)..(40): Xaa is C or S

SEQ ID NO: 62794 - protein, 37 aa, Artificial Sequence; identical to SEQ ID NO: 18484
  Cyclic GFR-binding peptide
  MOD_RES (2)..(3)..(36): Xaa is C or S

SEQ ID NO: 62795 - protein, 35 aa, Artificial Sequence; identical to SEQ ID NO: 18486
  Cyclic GFR-binding peptide
  MOD_RES (2)..(3)..(35): Xaa is C or S

SEQ ID NO: 62796 - protein, 35 aa, Artificial Sequence
  Cyclic GFR-binding peptide
  MOD_RES (6)..(7): Xaa is C or S
ASAAPXXVPQALSPISILYIVGRKPKVYKQYEMIV

SEQ ID NO: 62797 - protein, 31 aa, Artificial Sequence
  Cyclic GFR-binding peptide
  MOD_RES (28)..(30): Xaa is C or S
LSPISVLYIDDSSNVIYKQYENMVVRAXGXH

SEQ ID NO: 62798 - protein, 22 aa, Artificial Sequence
  Cyclic GFR-binding peptide
LSPISILYIVGRKPKVYKQYEM

SEQ ID NO: 62799 - protein, 30 aa, Artificial Sequence
  Cyclic GFR-binding peptide
  MOD_RES (2)..(3): Xaa is C or S
AXXVPTKLSPISILYIDKGVVTYYKQYEGM

SEQ ID NO: 62800 - protein, 37 aa, Artificial Sequence; identical to SEQ ID NO: 18492
  Cyclic GFR-binding peptide
  MOD_RES (6)..(7): Xaa is C or S

SEQ ID NO: 62801 - protein, 39 aa, Artificial Sequence; identical to SEQ ID NO: 18493
  Cyclic GFR-binding peptide
  MOD_RES (6)..(7)..(39): Xaa is C or S

SEQ ID NO: 62802 - protein, 33 aa, Artificial Sequence
  Cyclic GFR-binding peptide
  MOD_RES (5)..(6): Xaa is C or S
APASXXVPARLNAISILYFDAANNVVLKKYRDM

SEQ ID NO: 62803 - protein, 30 aa, Artificial Sequence
  Cyclic GFR-binding peptide
  MOD_RES (28)..(30): Xaa is C or S
ALEPISILYLVGRKPKVKFKYEMIVRSXKX

SEQ ID NO: 62804 - protein, 25 aa, Artificial Sequence
  Cyclic GFR-binding peptide
LNAISILYFDKGVVTYLKKYRGMAV

SEQ ID NO: 62805 - protein, 33 aa, Artificial Sequence; identical to SEQ ID NO: 18502
  Cyclic GFR-binding peptide
  MOD_RES (1)..(33): Xaa is C or S

SEQ ID NO: 62806 - protein, 34 aa, Artificial Sequence
  Cyclic GFR-binding peptide
  MOD_RES (4)..(5): Xaa is C or S
PKPXXAPTQLEPISVLYLDDSSNVIKFKYENMVV

SEQ ID NO: 62807 - protein, 29 aa, Artificial Sequence
  Cyclic GFR-binding peptide
  MOD_RES (3)..(4): Xaa is C or S
KAXXVPTELSPISMLYIDEYDKVVYKQYE

SEQ ID NO: 62808 - protein, 36 aa, Artificial Sequence
  Cyclic GFR-binding peptide
  MOD_RES (6)..(7): Xaa is C or S
SIPKAXXVPTELSPISMLYIDEYDKVVYKQYEEMVV

SEQ ID NO: 62809 - protein, 20 aa, Artificial Sequence
  Cyclic GFR-binding peptide
EPISILYLIGKTPKIKFKYE

SEQ ID NO: 62810 - protein, 22 aa, Artificial Sequence
  Cyclic GFR-binding peptide
RLSPISILYKDAANNVVLKYHY

SEQ ID NO: 62811 - protein, 37 aa, Artificial Sequence; identical to SEQ ID NO: 18509
  Cyclic GFR-binding peptide
  MOD_RES (3)..(4)..(35)..(37): Xaa is C or S

SEQ ID NO: 62812 - protein, 30 aa, Artificial Sequence
  Cyclic GFR-binding peptide
  MOD_RES (4)..(5): Xaa is C or S
ASPXXVSQDLSPISILYIIGKTPKIYKQYE

SEQ ID NO: 62813 - protein, 30 aa, Artificial Sequence
  Cyclic GFR-binding peptide
  MOD_RES (4)..(5): Xaa is C or S
PKPXXAPTQLEPISVLYLDDSSNVIKFKYE

SEQ ID NO: 62814 - protein, 35 aa, Artificial Sequence
  Cyclic GFR-binding peptide
  MOD_RES (5)..(6): Xaa is C or S
APASXXVPARLEPISILYLDAANNVVKFKYEDMVV

SEQ ID NO: 62815 - protein, 27 aa, Artificial Sequence
  Cyclic GFR-binding peptide
PTKLEPISVLYLDSSNNVIKFKYENMV

SEQ ID NO: 62816 - protein, 29 aa, Artificial Sequence
  Cyclic GFR-binding peptide
VPTKLSPISVLYIDDMGVPTYKQYEEGMS

SEQ ID NO: 62817 - protein, 23 aa, Artificial Sequence
  Cyclic GFR-binding peptide
QDLSPISILYIVGRTPKVYKQYE

SEQ ID NO: 62818 - protein, 41 aa, Artificial Sequence; identical to SEQ ID NO: 18518
  Cyclic GFR-binding peptide
  MOD_RES (6)..(7)..(39)..(41): Xaa is C or S

SEQ ID NO: 62819 - protein, 39 aa, Artificial Sequence; identical to SEQ ID NO: 18519
  Cyclic GFR-binding peptide
  MOD_RES (4)..(5)..(36)..(38): Xaa is C or S

SEQ ID NO: 62820 - protein, 26 aa, Artificial Sequence
  Cyclic GFR-binding peptide
EPISILYLDAANNVVKFKYEDMVVEA

SEQ ID NO: 62821 - protein, 35 aa, Artificial Sequence; identical to SEQ ID NO: 18524
  Cyclic GFR-binding peptide
  MOD_RES (3)..(4): Xaa is C or S

SEQ ID NO: 62822 - protein, 38 aa, Artificial Sequence; identical to SEQ ID NO: 18525
  Cyclic GFR-binding peptide
  MOD_RES (5)..(6)..(38): Xaa is C or S

SEQ ID NO: 62823 - protein, 39 aa, Artificial Sequence; identical to SEQ ID NO: 18526
  Cyclic GFR-binding peptide
  MOD_RES (6)..(7)..(38): Xaa is C or S

SEQ ID NO: 62824 - protein, 20 aa, Artificial Sequence
  Cyclic GFR-binding peptide
SPISMLYIDEYDKVVYKQYE

SEQ ID NO: 62825 - protein, 32 aa, Artificial Sequence
  Cyclic GFR-binding peptide
  MOD_RES (5)..(6): Xaa is C or S
IPKAXXVPTELSPISMLYIDENEKVVYKQYED

SEQ ID NO: 62826 - protein, 35 aa, Artificial Sequence; identical to SEQ ID NO: 18527
  Cyclic GFR-binding peptide
  MOD_RES (3)..(4): Xaa is C or S

SEQ ID NO: 62827 - protein, 26 aa, Artificial Sequence
  Cyclic GFR-binding peptide
  MOD_RES (1)..(1): Xaa is C or S
XVPQALEPISILYLVGRKPKVKFKYE

SEQ ID NO: 62828 - protein, 33 aa, Artificial Sequence
  Cyclic GFR-binding peptide
  MOD_RES (6)..(7): Xaa is C or S
ASASPXXVSQDLEPISILYLIGKTPKIKFKYEM

SEQ ID NO: 62829 - protein, 34 aa, Artificial Sequence
  Cyclic GFR-binding peptide
  MOD_RES (31)..(33): Xaa is C or S
TKLSPISVLYIDDMGVPTYKQYEEGMSVAEXGXR

SEQ ID NO: 62830 - protein, 29 aa, Artificial Sequence
  Cyclic GFR-binding peptide
VPTELEPISMLYLDEYDKVVKFKYEEMVV

SEQ ID NO: 62831 - protein, 37 aa, Artificial Sequence; identical to SEQ ID NO: 18533
  Cyclic GFR-binding peptide
  MOD_RES (3)..(4)..(36): Xaa is C or S

SEQ ID NO: 62832 - protein, 35 aa, Artificial Sequence; identical to SEQ ID NO: 18535
  Cyclic GFR-binding peptide
  MOD_RES (4)..(5): Xaa is C or S

SEQ ID NO: 62833 - protein, 37 aa, Artificial Sequence; identical to SEQ ID NO: 18540
  Cyclic GFR-binding peptide
  MOD_RES (2)..(3)..(34)..(36): Xaa is C or S

SEQ ID NO: 62834 - protein, 26 aa, Artificial Sequence
  Cyclic GFR-binding peptide
SQDLSPISILYIIGKTPKIYKQYEMI

SEQ ID NO: 62835 - protein, 35 aa, Artificial Sequence
  Cyclic GFR-binding peptide
  MOD_RES (5)..(6): Xaa is C or S
SAAPXXVPQALSPISILYIVGRKPKVYKQYEMIVR

SEQ ID NO: 62836 - protein, 32 aa, Artificial Sequence
  Cyclic GFR-binding peptide
  MOD_RES (29)..(31): Xaa is C or S
QDLEPISILYLIGKTPKIKFKYEMIVKSXKXS

SEQ ID NO: 62837 - protein, 30 aa, Artificial Sequence
  Cyclic GFR-binding peptide
  MOD_RES (4)..(4): Xaa is C or S
KPTXAPTKLEPISVLYLDDSSNVIKFKYEN

SEQ ID NO: 62838 - protein, 24 aa, Artificial Sequence
  Cyclic GFR-binding peptide
ARLEPISILYLDAANNVVKFKYED

SEQ ID NO: 62839 - protein, 32 aa, Artificial Sequence
  Cyclic GFR-binding peptide
  MOD_RES (31)..(31): Xaa is C or S
PTELSPISMLYIDENEKVVYKQYEDMVVEGXG

SEQ ID NO: 62840 - protein, 34 aa, Artificial Sequence
  Cyclic GFR-binding peptide
  MOD_RES (31)..(33): Xaa is C or S
PTKLEPISVLYLDSSNNVIKFKYENMVVKAXGXH

SEQ ID NO: 62841 - protein, 23 aa, Artificial Sequence
  Cyclic GFR-binding peptide
QDLEPISILYLIGKTPKIKFKYE

SEQ ID NO: 62842 - protein, 37 aa, Artificial Sequence; identical to SEQ ID NO: 18550
  Cyclic GFR-binding peptide
  MOD_RES (4)..(5)..(37): Xaa is C or S

SEQ ID NO: 62843 - protein, 33 aa, Artificial Sequence; identical to SEQ ID NO: 18552
  Cyclic GFR-binding peptide
  MOD_RES (1)..(2): Xaa is C or S

SEQ ID NO: 62844 - protein, 29 aa, Artificial Sequence
  Cyclic GFR-binding peptide
  MOD_RES (1)..(1): Xaa is C or S
XVSQDLSPISILYIIGKTPKIYKQYEMIV

SEQ ID NO: 62845 - protein, 30 aa, Artificial Sequence
  Cyclic GFR-binding peptide
  MOD_RES (1)..(2): Xaa is C or S
XXVPTKLSPISILYIDKGVVTYYKQYEGMA

SEQ ID NO: 62846 - protein, 33 aa, Artificial Sequence
  Cyclic GFR-binding peptide
  MOD_RES (4)..(5): Xaa is C or S
PKAXXVPTELSPISMLYIDEYDKVVYKQYEEMV

SEQ ID NO: 62847 - protein, 34 aa, Artificial Sequence; identical to SEQ ID NO: 18554
  Cyclic GFR-binding peptide
  MOD_RES (2)..(3)..(34): Xaa is C or S

SEQ ID NO: 62848 - protein, 20 aa, Artificial Sequence
  Cyclic GFR-binding peptide
SPISILYIVGRTPKVYKQYE

SEQ ID NO: 62849 - protein, 26 aa, Artificial Sequence
  Cyclic GFR-binding peptide
VPTKLNAISILYFDKGVVTYLKKYRG

SEQ ID NO: 62850 - protein, 26 aa, Artificial Sequence
  Cyclic GFR-binding peptide
LEPISILYLVGRKPKVKFKYEMIVRS

SEQ ID NO: 62851 - protein, 33 aa, Artificial Sequence; identical to SEQ ID NO: 18555
  Cyclic GFR-binding peptide
  MOD_RES (32)..(32): Xaa is C or S

SEQ ID NO: 62852 - protein, 23 aa, Artificial Sequence
  Cyclic GFR-binding peptide
TELEPISMLYLDEYDKVVKFKYE

SEQ ID NO: 62853 - protein, 32 aa, Artificial Sequence
  Cyclic GFR-binding peptide
  MOD_RES (2)..(3): Xaa is C or S
SXXVPARLNAISILYFDAANNVVLKKYRDMVV

SEQ ID NO: 62854 - protein, 21 aa, Artificial Sequence
  Cyclic GFR-binding peptide
LEPISILYLDAANNVVKFKYE

SEQ ID NO: 62855 - protein, 28 aa, Artificial Sequence
  Cyclic GFR-binding peptide
TQLEPISVLYLDDSSNVIKFKYENMVVR

SEQ ID NO: 62856 - skipped

SEQ ID NO: 62857 - protein, 37 aa, Artificial Sequence; identical to SEQ ID NO: 18563
  Cyclic GFR-binding peptide
  MOD_RES (5)..(6): Xaa is C or S

SEQ ID NO: 62858 - protein, 32 aa, Artificial Sequence
  Cyclic GFR-binding peptide
  MOD_RES (4)..(4): Xaa is C or S
KPTXAPTKLEPISVLYLDDSSNVIKFKYENMV

SEQ ID NO: 62859 - protein, 24 aa, Artificial Sequence
  Cyclic GFR-binding peptide
EPISMLYLDENEKVVKFKYEDMVV

SEQ ID NO: 62860 - protein, 24 aa, Artificial Sequence
  Cyclic GFR-binding peptide
PQDLEPISILYLVGRTPKVKFKYE

SEQ ID NO: 62861 - protein, 31 aa, Artificial Sequence; identical to SEQ ID NO: 18566
  Cyclic GFR-binding peptide
  MOD_RES (1)..(1): Xaa is C or S

SEQ ID NO: 62862 - protein, 25 aa, Artificial Sequence
  Cyclic GFR-binding peptide
SPISILYKDAANNVVLKYHYDMVVE

SEQ ID NO: 62863 - protein, 23 aa, Artificial Sequence
  Cyclic GFR-binding peptide
KLNAISILYFDKGVVTYLKKYRG

SEQ ID NO: 62864 - protein, 37 aa, Artificial Sequence; identical to SEQ ID NO: 18570
  Cyclic GFR-binding peptide
  MOD_RES (3)..(4)..(36): Xaa is C or S

SEQ ID NO: 62865 - protein, 26 aa, Artificial Sequence
  Cyclic GFR-binding peptide
  MOD_RES (1)..(1): Xaa is C or S
XAPTKLEPISVLYLDDSSNVIKFKYE

SEQ ID NO: 62866 - protein, 41 aa, Artificial Sequence; identical to SEQ ID NO: 18571
  Cyclic GFR-binding peptide
  MOD_RES (5)..(6)..(38)..(40): Xaa is C or S

SEQ ID NO: 62867 - protein, 31 aa, Artificial Sequence
  Cyclic GFR-binding peptide
  MOD_RES (2)..(3): Xaa is C or S
AXXVPTKLSPISVLYIDDMGVPTYKQYEEGM

SEQ ID NO: 62868 - protein, 32 aa, Artificial Sequence
  Cyclic GFR-binding peptide
  MOD_RES (29)..(31): Xaa is C or S
KLSPISVLYIDSSNNVIYKQYENMVVKAXGXH

SEQ ID NO: 62869 - protein, 27 aa, Artificial Sequence
  Cyclic GFR-binding peptide
PTKLEPISVLYLDDSSNVIKFKYENMV

SEQ ID NO: 62870 - protein, 30 aa, Artificial Sequence
  Cyclic GFR-binding peptide
  MOD_RES (1)..(2): Xaa is C or S
XXVPTKLSPISVLYIDDMGVPTYKQYEEGM

SEQ ID NO: 62871 - protein, 26 aa, Artificial Sequence
  Cyclic GFR-binding peptide
  MOD_RES (1)..(1): Xaa is C or S
XVPTKLNAISILYFDKGVVTYLKKYR

SEQ ID NO: 62872 - protein, 31 aa, Artificial Sequence
  Cyclic GFR-binding peptide
  MOD_RES (2)..(3): Xaa is C or S
AXXVPTKLSPISILYIDKGVVTYYKQYEGMA

SEQ ID NO: 62873 - protein, 40 aa, Artificial Sequence; identical to SEQ ID NO: 18578
  Cyclic GFR-binding peptide
  MOD_RES (5)..(6)..(38)..(40): Xaa is C or S

SEQ ID NO: 62874 - protein, 31 aa, Artificial Sequence
  Cyclic GFR-binding peptide
  MOD_RES (29)..(31): Xaa is C or S
QLSPISVLYIDDSSNVIYKQYENMVVRAXGX

SEQ ID NO: 62875 - protein, 23 aa, Artificial Sequence
  Cyclic GFR-binding peptide
LSPISILYKDKGVVTYLKYHYGM

SEQ ID NO: 62876 - protein, 37 aa, Artificial Sequence; identical to SEQ ID NO: 18579
  Cyclic GFR-binding peptide
  MOD_RES (2)..(3)..(35)..(37): Xaa is C or S

SEQ ID NO: 62877 - protein, 27 aa, Artificial Sequence
  Cyclic GFR-binding peptide
DLEPISILYLVGRTPKVKFKYEMVVKS

SEQ ID NO: 62878 - protein, 31 aa, Artificial Sequence
  Cyclic GFR-binding peptide
  MOD_RES (28)..(30): Xaa is C or S
LNAISILYFDKGVVTYLKKYRGMAVSEXGXR

SEQ ID NO: 62879 - protein, 31 aa, Artificial Sequence
  Cyclic GFR-binding peptide
  MOD_RES (5)..(6): Xaa is C or S
VGKAXXVPTKLEPISVLYLDDMGVPTKFKYE

SEQ ID NO: 62880 - protein, 26 aa, Artificial Sequence
  Cyclic GFR-binding peptide
PARLNAISILYFDAANNVVLKKYRDM

SEQ ID NO: 62881 - protein, 35 aa, Artificial Sequence; identical to SEQ ID NO: 18587
  Cyclic GFR-binding peptide
  MOD_RES (1)..(2)..(33)..(35): Xaa is C or S

SEQ ID NO: 62882 - protein, 37 aa, Artificial Sequence; identical to SEQ ID NO: 18590
  Cyclic GFR-binding peptide
  MOD_RES (6)..(7): Xaa is C or S

SEQ ID NO: 62883 - protein, 27 aa, Artificial Sequence
  Cyclic GFR-binding peptide
ELSPISMLYIDENEKVVYKQYEDMVVE

SEQ ID NO: 62884 - protein, 31 aa, Artificial Sequence
  Cyclic GFR-binding peptide
  MOD_RES (4)..(5): Xaa is C or S
SKAXXVPTKLSPISILYIDKGVVTYYKQYEG

SEQ ID NO: 62885 - protein, 24 aa, Artificial Sequence
  Cyclic GFR-binding peptide
LSPISILYKDKGVVTYLKYHYGMA

SEQ ID NO: 62886 - protein, 39 aa, Artificial Sequence; identical to SEQ ID NO: 18592
  Cyclic GFR-binding peptide
  MOD_RES (6)..(38): Xaa is C or S

SEQ ID NO: 62887 - protein, 34 aa, Artificial Sequence
  Cyclic GFR-binding peptide
  MOD_RES (5)..(6): Xaa is C or S
ASKAXXVPTKLNAISILYFDKGVVTYLKKYRGMA

SEQ ID NO: 62888 - protein, 37 aa, Artificial Sequence; identical to SEQ ID NO: 18597
  Cyclic GFR-binding peptide
  MOD_RES (2)..(3)..(35)..(37): Xaa is C or S

SEQ ID NO: 62889 - protein, 38 aa, Artificial Sequence; identical to SEQ ID NO: 18601
  Cyclic GFR-binding peptide
  MOD_RES (2)..(3)..(35)..(37): Xaa is C or S

SEQ ID NO: 62890 - protein, 35 aa, Artificial Sequence; identical to SEQ ID NO: 18602
  Cyclic GFR-binding peptide
  MOD_RES (32)..(34): Xaa is C or S

SEQ ID NO: 62891 - protein, 38 aa, Artificial Sequence; identical to SEQ ID NO: 18604
  Cyclic GFR-binding peptide
  MOD_RES (3)..(4)..(35)..(37): Xaa is C or S

SEQ ID NO: 62892 - protein, 39 aa, Artificial Sequence; identical to SEQ ID NO: 18607
  Cyclic GFR-binding peptide
  MOD_RES (6)..(7): Xaa is C or S

SEQ ID NO: 62893 - protein, 26 aa, Artificial Sequence
  Cyclic GFR-binding peptide
LSPISILYIDKGVVTYYKQYEGMAVS

SEQ ID NO: 62894 - protein, 32 aa, Artificial Sequence
  Cyclic GFR-binding peptide
  MOD_RES (29)..(31): Xaa is C or S
QLSPISVLYIDDSSNVIYKQYENMVVRAXGXH

SEQ ID NO: 62895 - protein, 37 aa, Artificial Sequence; identical to SEQ ID NO: 18612
  Cyclic GFR-binding peptide
  MOD_RES (4)..(5)..(37): Xaa is C or S

SEQ ID NO: 62896 - protein, 32 aa, Artificial Sequence
  Cyclic GFR-binding peptide
  MOD_RES (2)..(3): Xaa is C or S
AXXVPTELSPISMLYIDEYDKVVYKQYEEMVV

SEQ ID NO: 62897 - protein, 33 aa, Artificial Sequence; identical to SEQ ID NO: 18617
  Cyclic GFR-binding peptide
  MOD_RES (1)..(2): Xaa is C or S

SEQ ID NO: 62898 - protein, 24 aa, Artificial Sequence
  Cyclic GFR-binding peptide
QLEPISVLYLDDSSNVIKFKYENM

SEQ ID NO: 62899 - protein, 33 aa, Artificial Sequence
  Cyclic GFR-binding peptide
  MOD_RES (30)..(32): Xaa is C or S
TKLSPISILYIDKGVVTYYKQYEGMAVSEXGXR

SEQ ID NO: 62900 - protein, 28 aa, Artificial Sequence
  Cyclic GFR-binding peptide
TKLSPISILYIDKGVVTYYKQYEGMAVS

SEQ ID NO: 62901 - protein, 42 aa, Artificial Sequence; identical to SEQ ID NO: 18623
  Cyclic GFR-binding peptide
  MOD_RES (6)..(7)..(39)..(41): Xaa is C or S

SEQ ID NO: 62902 - protein, 36 aa, Artificial Sequence
  Cyclic GFR-binding peptide
  MOD_RES (6)..(7): Xaa is C or S
KIPKAXXVPTELEPISMLYLDENEKVVKFKYEDMVV

SEQ ID NO: 62903 - protein, 28 aa, Artificial Sequence
  Cyclic GFR-binding peptide
  MOD_RES (1)..(2): Xaa is C or S
XXVPQDLSPISILYIVGRTPKVYKQYEM

SEQ ID NO: 62904 - protein, 31 aa, Artificial Sequence
  Cyclic GFR-binding peptide
  MOD_RES (1)..(2): Xaa is C or S
XXAPTQLEPISVLYLDDSSNVIKFKYENMVV

SEQ ID NO: 62905 - protein, 34 aa, Artificial Sequence; identical to SEQ ID NO: 18629
  Cyclic GFR-binding peptide
  MOD_RES (1)..(2)..(34): Xaa is C or S

SEQ ID NO: 62906 - protein, 40 aa, Artificial Sequence; identical to SEQ ID NO: 18630
  Cyclic GFR-binding peptide
  MOD_RES (4)..(5)..(37)..(39): Xaa is C or S

SEQ ID NO: 62907 - protein, 28 aa, Artificial Sequence
  Cyclic GFR-binding peptide
VPTKLNAISILYFDKGVVTYLKKYRGMA

SEQ ID NO: 62908 - protein, 32 aa, Artificial Sequence
  Cyclic GFR-binding peptide
  MOD_RES (29)..(31): Xaa is C or S
QLEPISVLYLDDSSNVIKFKYENMVVRAXGXH

SEQ ID NO: 62909 - protein, 32 aa, Artificial Sequence
  Cyclic GFR-binding peptide
  MOD_RES (3)..(4): Xaa is C or S
KPXXAPTKLEPISVLYLDDSSNVIKFKYENMV

SEQ ID NO: 62910 - protein, 31 aa, Artificial Sequence
  Cyclic GFR-binding peptide
  MOD_RES (29)..(31): Xaa is C or S
RLEPISILYLDAANNVVKFKYEDMVVEAXGX

SEQ ID NO: 62911 - protein, 31 aa, Artificial Sequence
  Cyclic GFR-binding peptide
  MOD_RES (3)..(4): Xaa is C or S
KAXXVPTKLSPISILYIDKGVVTYYKQYEGM

SEQ ID NO: 62912 - protein, 27 aa, Artificial Sequence
  Cyclic GFR-binding peptide
  MOD_RES (27)..(27): Xaa is C or S
LSPISILYIIGKTPKIYKQYEMIVKSX

SEQ ID NO: 62913 - protein, 22 aa, Artificial Sequence
  Cyclic GFR-binding peptide
KLSPISVLYIDSSNNVIYKQYE

SEQ ID NO: 62914 - protein, 33 aa, Artificial Sequence
  Cyclic GFR-binding peptide
  MOD_RES (6)..(7): Xaa is C or S
KVGKAXXVPTKLSPISVLYIDDMGVPTYKQYEE

SEQ ID NO: 62915 - protein, 26 aa, Artificial Sequence
  Cyclic GFR-binding peptide
PTKLEPISVLYLDDMGVPTKFKYEEG

SEQ ID NO: 62916 - protein, 38 aa, Artificial Sequence; identical to SEQ ID NO: 18632
  Cyclic GFR-binding peptide
  MOD_RES (2)..(3)..(35)..(37): Xaa is C or S

SEQ ID NO: 62917 - protein, 32 aa, Artificial Sequence
  Cyclic GFR-binding peptide
  MOD_RES (4)..(5): Xaa is C or S
AAPXXVPQALSPISILYIVGRKPKVYKQYEMI

SEQ ID NO: 62918 - protein, 32 aa, Artificial Sequence
  Cyclic GFR-binding peptide
  MOD_RES (6)..(7): Xaa is C or S
SIPKAXXVPTELEPISMLYLDEYDKVVKFKYE

SEQ ID NO: 62919 - protein, 32 aa, Artificial Sequence; identical to SEQ ID NO: 18637
  Cyclic GFR-binding peptide
  MOD_RES (1)..(1): Xaa is C or S

SEQ ID NO: 62920 - protein, 33 aa, Artificial Sequence
  Cyclic GFR-binding peptide
  MOD_RES (30)..(32): Xaa is C or S
TELSPISMLYIDENEKVVYKQYEDMVVEGXGXR

SEQ ID NO: 62921 - protein, 36 aa, Artificial Sequence; identical to SEQ ID NO: 18639
  Cyclic GFR-binding peptide
  MOD_RES (2)..(3)..(35): Xaa is C or S

SEQ ID NO: 62922 - protein, 40 aa, Artificial Sequence; identical to SEQ ID NO: 18644
  Cyclic GFR-binding peptide
  MOD_RES (6)..(7)..(38)..(40): Xaa is C or S

SEQ ID NO: 62923 - protein, 29 aa, Artificial Sequence
  Cyclic GFR-binding peptide
  MOD_RES (2)..(3): Xaa is C or S
AXXVPTKLSPISILYIDKGVVTYYKQYEG

SEQ ID NO: 62924 - protein, 23 aa, Artificial Sequence
  Cyclic GFR-binding peptide
TKLSPISVLYIDDMGVPTYKQYE

SEQ ID NO: 62925 - protein, 27 aa, Artificial Sequence
  Cyclic GFR-binding peptide
  MOD_RES (1)..(2): Xaa is C or S
XXVPQDLEPISILYLVGRTPKVKFKYE

SEQ ID NO: 62926 - protein, 33 aa, Artificial Sequence
  Cyclic GFR-binding peptide
  MOD_RES (31)..(33): Xaa is C or S
PTKLEPISVLYLDSSNNVIKFKYENMVVKAXGX

SEQ ID NO: 62927 - protein, 36 aa, Artificial Sequence; identical to SEQ ID NO: 18647
  Cyclic GFR-binding peptide
  MOD_RES (5)..(6): Xaa is C or S

SEQ ID NO: 62928 - protein, 26 aa, Artificial Sequence
  Cyclic GFR-binding peptide
TKLSPISILYIDKGVVTYYKQYEGMA

SEQ ID NO: 62929 - protein, 27 aa, Artificial Sequence
  Cyclic GFR-binding peptide
TKLSPISILYIDKGVVTYYKQYEGMAV

SEQ ID NO: 62930 - protein, 36 aa, Artificial Sequence; identical to SEQ ID NO: 18648
  Cyclic GFR-binding peptide
  MOD_RES (1)..(2)..(33)..(35): Xaa is C or S

SEQ ID NO: 62931 - protein, 38 aa, Artificial Sequence; identical to SEQ ID NO: 18651
  Cyclic GFR-binding peptide
  MOD_RES (2)..(3)..(35)..(37): Xaa is C or S

SEQ ID NO: 62932 - protein, 22 aa, Artificial Sequence
  Cyclic GFR-binding peptide
KLSPISILYIDKGVVTYYKQYE

SEQ ID NO: 62933 - protein, 29 aa, Artificial Sequence
  Cyclic GFR-binding peptide
ARLEPISILYLDAANNVVKFKYEDMVVEA

SEQ ID NO: 62934 - protein, 31 aa, Artificial Sequence
  Cyclic GFR-binding peptide
  MOD_RES (28)..(30): Xaa is C or S
LEPISVLYLDDSSNVIKFKYENMVVRSXGXH

SEQ ID NO: 62935 - protein, 25 aa, Artificial Sequence
  Cyclic GFR-binding peptide
LSPISILYIIGKTPKIYKQYEMIVK

SEQ ID NO: 62936 - protein, 40 aa, Artificial Sequence; identical to SEQ ID NO: 18655
  Cyclic GFR-binding peptide
  MOD_RES (5)..(6)..(39): Xaa is C or S

SEQ ID NO: 62937 - protein, 31 aa, Artificial Sequence
  Cyclic GFR-binding peptide
  MOD_RES (28)..(30): Xaa is C or S
LEPISMLYLDENEKVVKFKYEDMVVEGXGXR

SEQ ID NO: 62938 - protein, 27 aa, Artificial Sequence
  Cyclic GFR-binding peptide
TKLNAISILYFDKGVVTYLKKYRGMAV

SEQ ID NO: 62939 - protein, 38 aa, Artificial Sequence; identical to SEQ ID NO: 18658
  Cyclic GFR-binding peptide
  MOD_RES (4)..(5)..(37): Xaa is C or S

SEQ ID NO: 62940 - protein, 32 aa, Artificial Sequence
  Cyclic GFR-binding peptide
  MOD_RES (2)..(3): Xaa is C or S
PXXVSQDLSPISILYIIGKTPKIYKQYEMIVK

SEQ ID NO: 62941 - protein, 32 aa, Artificial Sequence
  Cyclic GFR-binding peptide
  MOD_RES (6)..(7): Xaa is C or S
KASKAXXVPTKLSPISILYKDKGVVTYLKYHY

SEQ ID NO: 62942 - protein, 21 aa, Artificial Sequence
  Cyclic GFR-binding peptide
EPISVLYLDSSNNVIKFKYEN

SEQ ID NO: 62943 - protein, 33 aa, Artificial Sequence
  Cyclic GFR-binding peptide
  MOD_RES (4)..(5): Xaa is C or S
PKPXXAPTKLEPISVLYLDDSSNVIKFKYENMV

SEQ ID NO: 62944 - protein, 27 aa, Artificial Sequence
  Cyclic GFR-binding peptide
  MOD_RES (26)..(26): Xaa is C or S
SPISILYIIGKTPKIYKQYEMIVKSXK

SEQ ID NO: 62945 - protein, 38 aa, Artificial Sequence; identical to SEQ ID NO: 18660
  Cyclic GFR-binding peptide
  MOD_RES (4)..(5)..(36)..(38): Xaa is C or S

SEQ ID NO: 62946 - protein, 30 aa, Artificial Sequence
  Cyclic GFR-binding peptide
  MOD_RES (27)..(29): Xaa is C or S
LEPISILYLIGKTPKIKFKYEMIVKSXKXS

SEQ ID NO: 62947 - protein, 33 aa, Artificial Sequence
  Cyclic GFR-binding peptide
  MOD_RES (4)..(5): Xaa is C or S
ASPXXVSQDLSPISILYIIGKTPKIYKQYEMIV

SEQ ID NO: 62948 - protein, 37 aa, Artificial Sequence; identical to SEQ ID NO: 18664
  Cyclic GFR-binding peptide
  MOD_RES (1)..(2)..(35)..(37): Xaa is C or S

SEQ ID NO: 62949 - protein, 31 aa, Artificial Sequence
  Cyclic GFR-binding peptide
  MOD_RES (30)..(30): Xaa is C or S
TKLSPISVLYIDSSNNVIYKQYENMVVKAXG

SEQ ID NO: 62950 - protein, 37 aa, Artificial Sequence; identical to SEQ ID NO: 18665
  Cyclic GFR-binding peptide
  MOD_RES (1)..(2)..(35)..(37): Xaa is C or S

SEQ ID NO: 62951 - protein, 28 aa, Artificial Sequence
  Cyclic GFR-binding peptide
  MOD_RES (27)..(27): Xaa is C or S
EPISMLYLDENEKVVKFKYEDMVVEGXG

SEQ ID NO: 62952 - protein, 22 aa, Artificial Sequence
  Cyclic GFR-binding peptide
ALEPISILYLVGRKPKVKFKYE

SEQ ID NO: 62953 - protein, 25 aa, Artificial Sequence
  Cyclic GFR-binding peptide
QDLSPISILYIVGRTPKVYKQYEMV

SEQ ID NO: 62954 - protein, 32 aa, Artificial Sequence; identical to SEQ ID NO: 18672
  Cyclic GFR-binding peptide
  MOD_RES (1)..(1): Xaa is C or S

SEQ ID NO: 62955 - protein, 32 aa, Artificial Sequence
  Cyclic GFR-binding peptide
  MOD_RES (5)..(6): Xaa is C or S
ASKAXXVPTKLSPISILYIDKGVVTYYKQYEG

SEQ ID NO: 62956 - protein, 33 aa, Artificial Sequence
  Cyclic GFR-binding peptide
  MOD_RES (6)..(7): Xaa is C or S
YVPKPXXAPTKLSPISVLYIDDSSNVIYKQYEN

SEQ ID NO: 62957 - protein, 27 aa, Artificial Sequence
  Cyclic GFR-binding peptide
  MOD_RES (27)..(27): Xaa is C or S
SPISVLYIDDSSNVIYKQYENMVVRAX

SEQ ID NO: 62958 - protein, 39 aa, Artificial Sequence; identical to SEQ ID NO: 18676
  Cyclic GFR-binding peptide
  MOD_RES (5)..(6)..(37)..(39): Xaa is C or S

SEQ ID NO: 62959 - protein, 31 aa, Artificial Sequence
  Cyclic GFR-binding peptide
  MOD_RES (6)..(6): Xaa is C or S
VTKPTXAPTKLSPISVLYIDDSSNVIYKQYE

SEQ ID NO: 62960 - protein, 24 aa, Artificial Sequence
  Cyclic GFR-binding peptide
QDLSPISILYIIGKTPKIYKQYEM

SEQ ID NO: 62961 - protein, 33 aa, Artificial Sequence
  Cyclic GFR-binding peptide
  MOD_RES (4)..(5): Xaa is C or S
PKAXXVPTELEPISMLYLDENEKVVKFKYEDMV

SEQ ID NO: 62962 - protein, 23 aa, Artificial Sequence
  Cyclic GFR-binding peptide
RLEPISILYLDAANNVVKFKYED

SEQ ID NO: 62963 - protein, 24 aa, Artificial Sequence
  Cyclic GFR-binding peptide
LNAISILYFDAANNVVLKKYRDMV

SEQ ID NO: 62964 - protein, 30 aa, Artificial Sequence
  Cyclic GFR-binding peptide
  MOD_RES (4)..(5): Xaa is C or S
PASXXVPARLEPISILYLDAANNVVKFKYE

SEQ ID NO: 62965 - protein, 31 aa, Artificial Sequence
  Cyclic GFR-binding peptide
  MOD_RES (3)..(4): Xaa is C or S
SPXXVSQDLEPISILYLIGKTPKIKFKYEMI

SEQ ID NO: 62966 - protein, 35 aa, Artificial Sequence; identical to SEQ ID NO: 18682
  Cyclic GFR-binding peptide
  MOD_RES (2)..(3)..(34): Xaa is C or S

SEQ ID NO: 62967 - protein, 30 aa, Artificial Sequence
  Cyclic GFR-binding peptide
  MOD_RES (2)..(3): Xaa is C or S
AXXVPTELEPISMLYLDEYDKVVKFKYEEM

SEQ ID NO: 62968 - protein, 30 aa, Artificial Sequence
  Cyclic GFR-binding peptide
  MOD_RES (1)..(2): Xaa is C or S
XXAPTKLEPISVLYLDDSSNVIKFKYENMV

SEQ ID NO: 62969 - protein, 39 aa, Artificial Sequence; identical to SEQ ID NO: 18683
  Cyclic GFR-binding peptide
  MOD_RES (4)..(5)..(37)..(39): Xaa is C or S

SEQ ID NO: 62970 - protein, 26 aa, Artificial Sequence
  Cyclic GFR-binding peptide
DLEPISILYLIGKTPKIKFKYEMIVK

SEQ ID NO: 62971 - protein, 26 aa, Artificial Sequence
  Cyclic GFR-binding peptide
TKLEPISVLYLDDMGVPTKFKYEEGM

SEQ ID NO: 62972 - protein, 28 aa, Artificial Sequence
  Cyclic GFR-binding peptide
  MOD_RES (1)..(2): Xaa is C or S
XXVPTELSPISMLYIDENEKVVYKQYED

SEQ ID NO: 62973 - protein, 30 aa, Artificial Sequence
  Cyclic GFR-binding peptide
  MOD_RES (30)..(30): Xaa is C or S
TQLSPISVLYIDDSSNVIYKQYENMVVRAX

SEQ ID NO: 62974 - protein, 34 aa, Artificial Sequence; identical to SEQ ID NO: 18691
  Cyclic GFR-binding peptide
  MOD_RES (31)..(33): Xaa is C or S

SEQ ID NO: 62975 - protein, 32 aa, Artificial Sequence; identical to SEQ ID NO: 18692
  Cyclic GFR-binding peptide
  MOD_RES (1)..(1): Xaa is C or S

SEQ ID NO: 62976 - protein, 35 aa, Artificial Sequence
  Cyclic GFR-binding peptide
  MOD_RES (4)..(5): Xaa is C or S
ASPXXVPQDLSPISILYIVGRTPKVYKQYEMVVKS

SEQ ID NO: 62977 - protein, 32 aa, Artificial Sequence; identical to SEQ ID NO: 18696
  Cyclic GFR-binding peptide
  MOD_RES (1)..(1): Xaa is C or S

SEQ ID NO: 62978 - protein, 32 aa, Artificial Sequence
  Cyclic GFR-binding peptide
  MOD_RES (5)..(6): Xaa is C or S
VGKAXXVPTKLSPISVLYIDDMGVPTYKQYEE

SEQ ID NO: 62979 - protein, 20 aa, Artificial Sequence
  Cyclic GFR-binding peptide
EPISILYLIGKTPKIKFKYE

SEQ ID NO: 62980 - protein, 36 aa, Artificial Sequence; identical to SEQ ID NO: 18702
  Cyclic GFR-binding peptide
  MOD_RES (3)..(4)..(35): Xaa is C or S

SEQ ID NO: 62981 - protein, 27 aa, Artificial Sequence
  Cyclic GFR-binding peptide
  MOD_RES (27)..(27): Xaa is C or S
SPISVLYIDSSNNVIYKQYENMVVKAX

SEQ ID NO: 62982 - protein, 27 aa, Artificial Sequence
  Cyclic GFR-binding peptide
LEPISMLYLDENEKVVKFKYEDMVVEG

SEQ ID NO: 62983 - protein, 32 aa, Artificial Sequence
  Cyclic GFR-binding peptide
  MOD_RES (30)..(32): Xaa is C or S
ARLEPISILYLDAANNVVKFKYEDMVVEAXGX

SEQ ID NO: 62984 - protein, 33 aa, Artificial Sequence
  Cyclic GFR-binding peptide
  MOD_RES (2)..(3): Xaa is C or S
AXXVPTKLSPISVLYIDDMGVPTYKQYEEGMSV

SEQ ID NO: 62985 - protein, 26 aa, Artificial Sequence
  Cyclic GFR-binding peptide
  MOD_RES (1)..(1): Xaa is C or S
XVPTELEPISMLYLDENEKVVKFKYE

SEQ ID NO: 62986 - protein, 27 aa, Artificial Sequence
  Cyclic GFR-binding peptide
APTQLEPISVLYLDDSSNVIKFKYENM

SEQ ID NO: 62987 - protein, 28 aa, Artificial Sequence
  Cyclic GFR-binding peptide
  MOD_RES (1)..(1): Xaa is C or S
XVPTKLSPISILYIDKGVVTYYKQYEGM

SEQ ID NO: 62988 - protein, 39 aa, Artificial Sequence; identical to SEQ ID NO: 18714
  Cyclic GFR-binding peptide
  MOD_RES (5)..(6)..(37)..(39): Xaa is C or S

SEQ ID NO: 62989 - protein, 32 aa, Artificial Sequence; identical to SEQ ID NO: 18718
  Cyclic GFR-binding peptide
  MOD_RES (31)..(31): Xaa is C or S

SEQ ID NO: 62990 - protein, 35 aa, Artificial Sequence; identical to SEQ ID NO: 18719
  Cyclic GFR-binding peptide
  MOD_RES (4)..(5): Xaa is C or S

SEQ ID NO: 62991 - protein, 34 aa, Artificial Sequence
  Cyclic GFR-binding peptide
  MOD_RES (6)..(7): Xaa is C or S
ASASPXXVPQDLSPISILYIVGRTPKVYKQYEMV

SEQ ID NO: 62992 - protein, 42 aa, Artificial Sequence; identical to SEQ ID NO: 18722
  Cyclic GFR-binding peptide
  MOD_RES (6)..(7)..(39)..(41): Xaa is C or S

SEQ ID NO: 62993 - protein, 36 aa, Artificial Sequence; identical to SEQ ID NO: 18724
  Cyclic GFR-binding peptide
  MOD_RES (2)..(3)..(35): Xaa is C or S

SEQ ID NO: 62994 - protein, 28 aa, Artificial Sequence
  Cyclic GFR-binding peptide
  MOD_RES (1)..(1): Xaa is C or S
XVPTKLNAISILYFDKGVVTYLKKYRGM

SEQ ID NO: 62995 - protein, 34 aa, Artificial Sequence; identical to SEQ ID NO: 18728
  Cyclic GFR-binding peptide
  MOD_RES (2)..(3)..(34): Xaa is C or S

SEQ ID NO: 62996 - protein, 30 aa, Artificial Sequence
  Cyclic GFR-binding peptide
  MOD_RES (28)..(30): Xaa is C or S
LEPISVLYLDDSSNVIKFKYENMVVRAXGX

SEQ ID NO: 62997 - protein, 32 aa, Artificial Sequence
  Cyclic GFR-binding peptide
  MOD_RES (30)..(32): Xaa is C or S
PQALSPISILYIVGRKPKVYKQYEMIVRSXKX

SEQ ID NO: 62998 - protein, 32 aa, Artificial Sequence
  Cyclic GFR-binding peptide
  MOD_RES (6)..(7): Xaa is C or S
YVPKPXXAPTKLSPISVLYIDDSSNVIYKQYE

SEQ ID NO: 62999 - protein, 34 aa, Artificial Sequence; identical to SEQ ID NO: 18735
  Cyclic GFR-binding peptide
  MOD_RES (32)..(34): Xaa is C or S

SEQ ID NO: 63000 - protein, 30 aa, Artificial Sequence
  Cyclic GFR-binding peptide
  MOD_RES (28)..(30): Xaa is C or S
EPISVLYLDDMGVPTKFKYEEGMSVAEXGX

SEQ ID NO: 63001 - protein, 34 aa, Artificial Sequence; identical to SEQ ID NO: 18739
  Cyclic GFR-binding peptide
  MOD_RES (4)..(4): Xaa is C or S

SEQ ID NO: 63002 - protein, 27 aa, Artificial Sequence
  Cyclic GFR-binding peptide
PTKLSPISVLYIDSSNNVIYKQYENMV

SEQ ID NO: 63003 - protein, 31 aa, Artificial Sequence
  Cyclic GFR-binding peptide
  MOD_RES (5)..(6): Xaa is C or S
ASKAXXVPTKLSPISILYKDKGVVTYLKYHY

SEQ ID NO: 63004 - protein, 30 aa, Artificial Sequence; identical to SEQ ID NO: 18746
  Cyclic GFR-binding peptide

SEQ ID NO: 63005 - protein, 33 aa, Artificial Sequence; identical to SEQ ID NO: 18747
  Cyclic GFR-binding peptide
  MOD_RES (1)..(2)..(33): Xaa is C or S

SEQ ID NO: 63006 - protein, 26 aa, Artificial Sequence
  Cyclic GFR-binding peptide
LEPISILYLVGRTPKVKFKYEMVVKS

SEQ ID NO: 63007 - protein, 21 aa, Artificial Sequence
  Cyclic GFR-binding peptide
SPISILYIDKGVVTYYKQYEG

SEQ ID NO: 63008 - protein, 39 aa, Artificial Sequence; identical to SEQ ID NO: 18749
  Cyclic GFR-binding peptide
  MOD_RES (5)..(6)..(39): Xaa is C or S

SEQ ID NO: 63009 - protein, 28 aa, Artificial Sequence
  Cyclic GFR-binding peptide
  MOD_RES (1)..(1): Xaa is C or S
XAPTKLEPISVLYLDDSSNVIKFKYENM

SEQ ID NO: 63010 - protein, 27 aa, Artificial Sequence
  Cyclic GFR-binding peptide
RLNAISILYFDAANNVVLKKYRDMVVE

SEQ ID NO: 63011 - protein, 21 aa, Artificial Sequence
  Cyclic GFR-binding peptide
LSPISILYIVGRKPKVYKQYE

SEQ ID NO: 63012 - protein, 31 aa, Artificial Sequence
  Cyclic GFR-binding peptide
  MOD_RES (29)..(31): Xaa is C or S
KLSPISVLYIDSSNNVIYKQYENMVVKAXGX

SEQ ID NO: 63013 - protein, 38 aa, Artificial Sequence; identical to SEQ ID NO: 18756
  Cyclic GFR-binding peptide
  MOD_RES (5)..(6)..(37): Xaa is C or S

SEQ ID NO: 63014 - protein, 27 aa, Artificial Sequence
  Cyclic GFR-binding peptide
LEPISILYLDAANNVVKFKYEDMVVEA

SEQ ID NO: 63015 - protein, 28 aa, Artificial Sequence
  Cyclic GFR-binding peptide
  MOD_RES (1)..(1): Xaa is C or S
XVPTKLSPISVLYIDDMGVPTYKQYEEG

SEQ ID NO: 63016 - protein, 27 aa, Artificial Sequence
  Cyclic GFR-binding peptide
LNAISILYFDAANNVVLKKYRDMVVEA

SEQ ID NO: 63017 - protein, 35 aa, Artificial Sequence; identical to SEQ ID NO: 18758
  Cyclic GFR-binding peptide
  MOD_RES (2)..(3)..(35): Xaa is C or S

SEQ ID NO: 63018 - protein, 29 aa, Artificial Sequence
  Cyclic GFR-binding peptide
  MOD_RES (1)..(2): Xaa is C or S
XXAPTQLSPISVLYIDDSSNVIYKQYENM

SEQ ID NO: 63019 - protein, 28 aa, Artificial Sequence
  Cyclic GFR-binding peptide
  MOD_RES (1)..(2): Xaa is C or S
XXAPTKLEPISVLYLDDSSNVIKFKYEN

SEQ ID NO: 63020 - protein, 25 aa, Artificial Sequence
  Cyclic GFR-binding peptide
TKLEPISVLYLDSSNNVIKFKYENM

SEQ ID NO: 63021 - protein, 37 aa, Artificial Sequence; identical to SEQ ID NO: 18759
  Cyclic GFR-binding peptide
  MOD_RES (3)..(4)..(36): Xaa is C or S

SEQ ID NO: 63022 - protein, 30 aa, Artificial Sequence
  Cyclic GFR-binding peptide
  MOD_RES (28)..(30): Xaa is C or S
LSPISVLYIDDSSNVIYKQYENMVVRSXGX

SEQ ID NO: 63023 - protein, 35 aa, Artificial Sequence; identical to SEQ ID NO: 18763
  Cyclic GFR-binding peptide
  MOD_RES (4)..(5): Xaa is C or S

SEQ ID NO: 63024 - protein, 33 aa, Artificial Sequence
  Cyclic GFR-binding peptide
  MOD_RES (30)..(32): Xaa is C or S
TELSPISMLYIDEYDKVVYKQYEEMVVEGXGXR

SEQ ID NO: 63025 - protein, 28 aa, Artificial Sequence
  Cyclic GFR-binding peptide
PTELEPISMLYLDENEKVVKFKYEDMVV

SEQ ID NO: 63026 - protein, 41 aa, Artificial Sequence; identical to SEQ ID NO: 18770
  Cyclic GFR-binding peptide
  MOD_RES (6)..(7)..(39)..(41): Xaa is C or S

SEQ ID NO: 63027 - protein, 37 aa, Artificial Sequence; identical to SEQ ID NO: 18771
  Cyclic GFR-binding peptide
  MOD_RES (6)..(7): Xaa is C or S

SEQ ID NO: 63028 - protein, 28 aa, Artificial Sequence
  Cyclic GFR-binding peptide
  MOD_RES (28)..(28): Xaa is C or S
DLSPISILYIIGKTPKIYKQYEMIVKSX

SEQ ID NO: 63029 - protein, 30 aa, Artificial Sequence
  Cyclic GFR-binding peptide
  MOD_RES (4)..(5): Xaa is C or S
GKAXXVPTKLSPISVLYIDDMGVPTYKQYE

SEQ ID NO: 63030 - protein, 22 aa, Artificial Sequence
  Cyclic GFR-binding peptide
QLSPISVLYIDDSSNVIYKQYE

SEQ ID NO: 63031 - protein, 37 aa, Artificial Sequence; identical to SEQ ID NO: 18773
  Cyclic GFR-binding peptide
  MOD_RES (6)..(7): Xaa is C or S

SEQ ID NO: 63032 - protein, 27 aa, Artificial Sequence
  Cyclic GFR-binding peptide
KLEPISVLYLDDMGVPTKFKYEEGMSV

SEQ ID NO: 63033 - protein, 32 aa, Artificial Sequence; identical to SEQ ID NO: 18780
  Cyclic GFR-binding peptide
  MOD_RES (1)..(1): Xaa is C or S

SEQ ID NO: 63034 - protein, 29 aa, Artificial Sequence
  Cyclic GFR-binding peptide
PTKLEPISVLYLDDSSNVIKFKYENMVVR

SEQ ID NO: 63035 - protein, 37 aa, Artificial Sequence
  Cyclic GFR-binding peptide
  MOD_RES (5)..(6): Xaa is C or S
VGKAXXVPTKLSPISVLYIDDMGVPTYKQYEEGMSVA

SEQ ID NO: 63036 - protein, 27 aa, Artificial Sequence
  Cyclic GFR-binding peptide
  MOD_RES (1)..(2): Xaa is C or S
XXVSQDLSPISILYIIGKTPKIYKQYE

SEQ ID NO: 63037 - protein, 29 aa, Artificial Sequence
  Cyclic GFR-binding peptide
PTELSPISMLYIDEYDKVVYKQYEEMVVE

SEQ ID NO: 63038 - protein, 32 aa, Artificial Sequence
  Cyclic GFR-binding peptide
  MOD_RES (5)..(6): Xaa is C or S
APASXXVPARLNAISILYFDAANNVVLKKYRD

SEQ ID NO: 63039 - protein, 36 aa, Artificial Sequence; identical to SEQ ID NO: 18790
  Cyclic GFR-binding peptide
  MOD_RES (1)..(2)..(35): Xaa is C or S

SEQ ID NO: 63040 - protein, 38 aa, Artificial Sequence; identical to SEQ ID NO: 18793
  Cyclic GFR-binding peptide
  MOD_RES (3)..(4)..(36)..(38): Xaa is C or S

SEQ ID NO: 63041 - protein, 37 aa, Artificial Sequence; identical to SEQ ID NO: 18794
  Cyclic GFR-binding peptide
  MOD_RES (4)..(5)..(37): Xaa is C or S

SEQ ID NO: 63042 - protein, 21 aa, Artificial Sequence
  Cyclic GFR-binding peptide
LSPISVLYIDSSNNVIYKQYE

SEQ ID NO: 63043 - protein, 24 aa, Artificial Sequence
  Cyclic GFR-binding peptide
KLSPISILYKDKGVVTYLKYHYGM

SEQ ID NO: 63044 - protein, 31 aa, Artificial Sequence
  Cyclic GFR-binding peptide
  MOD_RES (2)..(3): Xaa is C or S
AXXVPTELSPISMLYIDENEKVVYKQYEDMV

SEQ ID NO: 63045 - protein, 37 aa, Artificial Sequence; identical to SEQ ID NO: 18796
  Cyclic GFR-binding peptide
  MOD_RES (4)..(5)..(36): Xaa is C or S

SEQ ID NO: 63046 - protein, 36 aa, Artificial Sequence
  Cyclic GFR-binding peptide
  MOD_RES (6)..(7): Xaa is C or S
ASASPXXVPQDLEPISILYLVGRTPKVKFKYEMVVK

SEQ ID NO: 63047 - protein, 33 aa, Artificial Sequence; identical to SEQ ID NO: 18797
  Cyclic GFR-binding peptide
  MOD_RES (2)..(3): Xaa is C or S

SEQ ID NO: 63048 - protein, 38 aa, Artificial Sequence; identical to SEQ ID NO: 18799
  Cyclic GFR-binding peptide
  MOD_RES (5)..(6)..(38): Xaa is C or S

SEQ ID NO: 63049 - protein, 29 aa, Artificial Sequence
  Cyclic GFR-binding peptide
PTKLEPISVLYLDSSNNVIKFKYENMVVK

SEQ ID NO: 63050 - protein, 27 aa, Artificial Sequence
  Cyclic GFR-binding peptide
  MOD_RES (27)..(27): Xaa is C or S
EPISILYLDAANNVVKFKYEDMVVEAX

SEQ ID NO: 63051 - protein, 35 aa, Artificial Sequence; identical to SEQ ID NO: 18805
  Cyclic GFR-binding peptide
  MOD_RES (4)..(4): Xaa is C or S

SEQ ID NO: 63052 - protein, 28 aa, Artificial Sequence
  Cyclic GFR-binding peptide
  MOD_RES (1)..(2): Xaa is C or S
XXVPTELSPISMLYIDEYDKVVYKQYEE

SEQ ID NO: 63053 - protein, 31 aa, Artificial Sequence
  Cyclic GFR-binding peptide
  MOD_RES (5)..(6): Xaa is C or S
ASKAXXVPTKLNAISILYFDKGVVTYLKKYR

SEQ ID NO: 63054 - protein, 33 aa, Artificial Sequence
  Cyclic GFR-binding peptide
  MOD_RES (3)..(4): Xaa is C or S
KPXXAPTQLEPISVLYLDDSSNVIKFKYENMVV

SEQ ID NO: 63055 - protein, 35 aa, Artificial Sequence; identical to SEQ ID NO: 18812
  Cyclic GFR-binding peptide
  MOD_RES (32)..(34): Xaa is C or S

SEQ ID NO: 63056 - protein, 30 aa, Artificial Sequence
  Cyclic GFR-binding peptide
  MOD_RES (1)..(1): Xaa is C or S
XAPTQLEPISVLYLDDSSNVIKFKYENMVV

SEQ ID NO: 63057 - protein, 28 aa, Artificial Sequence
  Cyclic GFR-binding peptide
LSPISVLYIDDMGVPTYKQYEEGMSVAE

SEQ ID NO: 63058 - protein, 26 aa, Artificial Sequence
  Cyclic GFR-binding peptide
  MOD_RES (1)..(1): Xaa is C or S
XVPTKLSPISVLYIDDMGVPTYKQYE

SEQ ID NO: 63059 - protein, 40 aa, Artificial Sequence; identical to SEQ ID NO: 18819
  Cyclic GFR-binding peptide
  MOD_RES (5)..(6)..(38)..(40): Xaa is C or S

SEQ ID NO: 63060 - protein, 27 aa, Artificial Sequence
  Cyclic GFR-binding peptide
  MOD_RES (27)..(27): Xaa is C or S
SPISILYKDAANNVVLKYHYDMVVEAX

SEQ ID NO: 63061 - protein, 40 aa, Artificial Sequence; identical to SEQ ID NO: 18822
  Cyclic GFR-binding peptide
  MOD_RES (5)..(6)..(38)..(40): Xaa is C or S

SEQ ID NO: 63062 - protein, 28 aa, Artificial Sequence
  Cyclic GFR-binding peptide
  MOD_RES (1)..(1): Xaa is C or S
XAPTKLSPISVLYIDDSSNVIYKQYENM

SEQ ID NO: 63063 - protein, 29 aa, Artificial Sequence
  Cyclic GFR-binding peptide
  MOD_RES (3)..(4): Xaa is C or S
KAXXVPTKLSPISILYIDKGVVTYYKQYE

SEQ ID NO: 63064 - protein, 35 aa, Artificial Sequence
  Cyclic GFR-binding peptide
  MOD_RES (5)..(6): Xaa is C or S
VPKAXXAPTKLSPISVLYIDSSNNVIYKQYENMVV

SEQ ID NO: 63065 - protein, 35 aa, Artificial Sequence
  Cyclic GFR-binding peptide
  MOD_RES (6)..(7): Xaa is C or S
AAPASXXVPARLSPISILYKDAANNVVLKYHYDMV

SEQ ID NO: 63066 - protein, 32 aa, Artificial Sequence; identical to SEQ ID NO: 18826
  Cyclic GFR-binding peptide
  MOD_RES (32)..(32): Xaa is C or S

SEQ ID NO: 63067 - protein, 35 aa, Artificial Sequence
  Cyclic GFR-binding peptide
  MOD_RES (6)..(7): Xaa is C or S
AVPKAXXAPTKLSPISVLYIDSSNNVIYKQYENMV

SEQ ID NO: 63068 - protein, 36 aa, Artificial Sequence; identical to SEQ ID NO: 18829
  Cyclic GFR-binding peptide
  MOD_RES (2)..(3)..(35): Xaa is C or S

SEQ ID NO: 63069 - protein, 32 aa, Artificial Sequence
  Cyclic GFR-binding peptide
  MOD_RES (3)..(4): Xaa is C or S
KAXXVPTKLSPISILYKDKGVVTYLKYHYGMA

SEQ ID NO: 63070 - protein, 36 aa, Artificial Sequence; identical to SEQ ID NO: 18832
  Cyclic GFR-binding peptide
  MOD_RES (3)..(35): Xaa is C or S

SEQ ID NO: 63071 - protein, 25 aa, Artificial Sequence
  Cyclic GFR-binding peptide
VPTELSPISMLYIDENEKVVYKQYE

SEQ ID NO: 63072 - protein, 32 aa, Artificial Sequence; identical to SEQ ID NO: 18834
  Cyclic GFR-binding peptide
  MOD_RES (32)..(32): Xaa is C or S

SEQ ID NO: 63073 - protein, 35 aa, Artificial Sequence
  Cyclic GFR-binding peptide
  MOD_RES (32)..(34): Xaa is C or S
PTKLSPISVLYIDDMGVPTYKQYEEGMSVAEXGXR

SEQ ID NO: 63074 - protein, 29 aa, Artificial Sequence
  Cyclic GFR-binding peptide
  MOD_RES (3)..(3): Xaa is C or S
PTXAPTKLEPISVLYLDDSSNVIKFKYEN

SEQ ID NO: 63075 - protein, 34 aa, Artificial Sequence
  Cyclic GFR-binding peptide
  MOD_RES (6)..(6): Xaa is C or S
VTKPTXAPTKLSPISVLYIDDSSNVIYKQYENMV

SEQ ID NO: 63076 - protein, 31 aa, Artificial Sequence; identical to SEQ ID NO: 18840
  Cyclic GFR-binding peptide
  MOD_RES (1)..(1): Xaa is C or S

SEQ ID NO: 63077 - protein, 37 aa, Artificial Sequence; identical to SEQ ID NO: 18841
  Cyclic GFR-binding peptide
  MOD_RES (4)..(5)..(36): Xaa is C or S

SEQ ID NO: 63078 - protein, 33 aa, Artificial Sequence
  Cyclic GFR-binding peptide
  MOD_RES (3)..(4): Xaa is C or S
KAXXVPTELSPISMLYIDENEKVVYKQYEDMVV

SEQ ID NO: 63079 - protein, 34 aa, Artificial Sequence
  Cyclic GFR-binding peptide
  MOD_RES (31)..(33): Xaa is C or S
PTKLSPISVLYIDSSNNVIYKQYENMVVKAXGXH

SEQ ID NO: 63080 - protein, 34 aa, Artificial Sequence; identical to SEQ ID NO: 18843
  Cyclic GFR-binding peptide
  MOD_RES (1)..(2)..(33): Xaa is C or S

SEQ ID NO: 63081 - protein, 34 aa, Artificial Sequence
  Cyclic GFR-binding peptide
  MOD_RES (5)..(6): Xaa is C or S
SAAPXXVPQALEPISILYLVGRKPKVKFKYEMIV

SEQ ID NO: 63082 - protein, 41 aa, Artificial Sequence; identical to SEQ ID NO: 18844
  Cyclic GFR-binding peptide
  MOD_RES (5)..(6)..(38)..(40): Xaa is C or S

SEQ ID NO: 63083 - protein, 35 aa, Artificial Sequence; identical to SEQ ID NO: 18846
  Cyclic GFR-binding peptide
  MOD_RES (2)..(3)..(35): Xaa is C or S

SEQ ID NO: 63084 - protein, 25 aa, Artificial Sequence
  Cyclic GFR-binding peptide
PARLEPISILYLDAANNVVKFKYED

SEQ ID NO: 63085 - protein, 31 aa, Artificial Sequence
  Cyclic GFR-binding peptide
  MOD_RES (4)..(5): Xaa is C or S
PKPXXAPTKLSPISVLYIDDSSNVIYKQYEN

SEQ ID NO: 63086 - protein, 35 aa, Artificial Sequence; identical to SEQ ID NO: 18850
  Cyclic GFR-binding peptide
  MOD_RES (32)..(34): Xaa is C or S

SEQ ID NO: 63087 - protein, 28 aa, Artificial Sequence
  Cyclic GFR-binding peptide
TKLSPISVLYIDDMGVPTYKQYEEGMSV

SEQ ID NO: 63088 - protein, 40 aa, Artificial Sequence; identical to SEQ ID NO: 18851
  Cyclic GFR-binding peptide
  MOD_RES (4)..(5)..(37)..(39): Xaa is C or S

SEQ ID NO: 63089 - protein, 28 aa, Artificial Sequence
  Cyclic GFR-binding peptide
  MOD_RES (28)..(28): Xaa is C or S
LSPISMLYIDEYDKVVYKQYEEMVVEGX

SEQ ID NO: 63090 - protein, 29 aa, Artificial Sequence
  Cyclic GFR-binding peptide
  MOD_RES (27)..(29): Xaa is C or S
LSPISILYIVGRKPKVYKQYEMIVRSXKX

SEQ ID NO: 63091 - protein, 25 aa, Artificial Sequence
  Cyclic GFR-binding peptide
QALSPISILYIVGRKPKVYKQYEMI

SEQ ID NO: 63092 - protein, 34 aa, Artificial Sequence
  Cyclic GFR-binding peptide
  MOD_RES (6)..(7): Xaa is C or S
KASKAXXVPTKLSPISILYIDKGVVTYYKQYEGM

SEQ ID NO: 63093 - protein, 30 aa, Artificial Sequence
  Cyclic GFR-binding peptide
  MOD_RES (4)..(5): Xaa is C or S
PKPXXAPTKLSPISVLYIDDSSNVIYKQYE

SEQ ID NO: 63094 - protein, 32 aa, Artificial Sequence
  Cyclic GFR-binding peptide
  MOD_RES (3)..(4): Xaa is C or S
ASXXVPARLEPISILYLDAANNVVKFKYEDMV

SEQ ID NO: 63095 - protein, 23 aa, Artificial Sequence
  Cyclic GFR-binding peptide
QALSPISILYIVGRKPKVYKQYE

SEQ ID NO: 63096 - protein, 36 aa, Artificial Sequence; identical to SEQ ID NO: 18859
  Cyclic GFR-binding peptide
  MOD_RES (2)..(3)..(35): Xaa is C or S

SEQ ID NO: 63097 - protein, 38 aa, Artificial Sequence; identical to SEQ ID NO: 18860
  Cyclic GFR-binding peptide
  MOD_RES (2)..(3)..(35)..(37): Xaa is C or S

SEQ ID NO: 63098 - protein, 35 aa, Artificial Sequence; identical to SEQ ID NO: 18863
  Cyclic GFR-binding peptide
  MOD_RES (2)..(3)..(35): Xaa is C or S

SEQ ID NO: 63099 - protein, 24 aa, Artificial Sequence
  Cyclic GFR-binding peptide
ARLSPISILYKDAANNVVLKYHYD

SEQ ID NO: 63100 - protein, 35 aa, Artificial Sequence; identical to SEQ ID NO: 18864
  Cyclic GFR-binding peptide
  MOD_RES (3)..(4): Xaa is C or S

SEQ ID NO: 63101 - protein, 31 aa, Artificial Sequence
  Cyclic GFR-binding peptide
  MOD_RES (1)..(2): Xaa is C or S
XXVPARLSPISILYKDAANNVVLKYHYDMVV

SEQ ID NO: 63102 - protein, 26 aa, Artificial Sequence
  Cyclic GFR-binding peptide
SPISVLYIDDMGVPTYKQYEEGMSVA

SEQ ID NO: 63103 - protein, 36 aa, Artificial Sequence; identical to SEQ ID NO: 18869
  Cyclic GFR-binding peptide
  MOD_RES (1)..(2)..(34)..(36): Xaa is C or S

SEQ ID NO: 63104 - protein, 34 aa, Artificial Sequence; identical to SEQ ID NO: 18874
  Cyclic GFR-binding peptide
  MOD_RES (2)..(3): Xaa is C or S

SEQ ID NO: 63105 - protein, 27 aa, Artificial Sequence
  Cyclic GFR-binding peptide
KLSPISILYKDKGVVTYLKYHYGMAVS

SEQ ID NO: 63106 - protein, 35 aa, Artificial Sequence; identical to SEQ ID NO: 18878
  Cyclic GFR-binding peptide
  MOD_RES (1)..(33)..(35): Xaa is C or S

SEQ ID NO: 63107 - protein, 33 aa, Artificial Sequence; identical to SEQ ID NO: 18880
  Cyclic GFR-binding peptide
  MOD_RES (32)..(32): Xaa is C or S

SEQ ID NO: 63108 - protein, 36 aa, Artificial Sequence; identical to SEQ ID NO: 18883
  Cyclic GFR-binding peptide
  MOD_RES (2)..(3)..(34)..(36): Xaa is C or S

SEQ ID NO: 63109 - protein, 35 aa, Artificial Sequence; identical to SEQ ID NO: 18885
  Cyclic GFR-binding peptide
  MOD_RES (1)..(32)..(34): Xaa is C or S

SEQ ID NO: 63110 - protein, 29 aa, Artificial Sequence
  Cyclic GFR-binding peptide
  MOD_RES (27)..(29): Xaa is C or S
SPISILYKDAANNVVLKYHYDMVVEAXGX

SEQ ID NO: 63111 - protein, 22 aa, Artificial Sequence
  Cyclic GFR-binding peptide
LNAISILYFDAANNVVLKKYRD

SEQ ID NO: 63112 - protein, 34 aa, Artificial Sequence
  Cyclic GFR-binding peptide
  MOD_RES (5)..(6): Xaa is C or S
SAAPXXVPQALSPISILYIVGRKPKVYKQYEMIV

SEQ ID NO: 63113 - protein, 22 aa, Artificial Sequence
  Cyclic GFR-binding peptide
LSPISILYKDKGVVTYLKYHYG

SEQ ID NO: 63114 - protein, 35 aa, Artificial Sequence; identical to SEQ ID NO: 18895
  Cyclic GFR-binding peptide
  MOD_RES (2)..(3)..(35): Xaa is C or S

SEQ ID NO: 63115 - protein, 29 aa, Artificial Sequence
  Cyclic GFR-binding peptide
APTKLSPISVLYIDDSSNVIYKQYENMVV

SEQ ID NO: 63116 - protein, 30 aa, Artificial Sequence
  Cyclic GFR-binding peptide
  MOD_RES (2)..(3): Xaa is C or S
AXXVPTKLNAISILYFDKGVVTYLKKYRGM

SEQ ID NO: 63117 - protein, 39 aa, Artificial Sequence; identical to SEQ ID NO: 18904
  Cyclic GFR-binding peptide
  MOD_RES (6)..(7)..(38): Xaa is C or S

SEQ ID NO: 63118 - protein, 24 aa, Artificial Sequence
  Cyclic GFR-binding peptide
LEPISVLYLDDMGVPTKFKYEEGM

SEQ ID NO: 63119 - protein, 34 aa, Artificial Sequence
  Cyclic GFR-binding peptide
  MOD_RES (5)..(6): Xaa is C or S
IPKAXXVPTELSPISMLYIDENEKVVYKQYEDMV

SEQ ID NO: 63120 - protein, 25 aa, Artificial Sequence
  Cyclic GFR-binding peptide
LEPISVLYLDDMGVPTKFKYEEGMS

SEQ ID NO: 63121 - protein, 25 aa, Artificial Sequence
  Cyclic GFR-binding peptide
PTKLSPISVLYIDDSSNVIYKQYEN

SEQ ID NO: 63122 - protein, 40 aa, Artificial Sequence; identical to SEQ ID NO: 18905
  Cyclic GFR-binding peptide
  MOD_RES (6)..(7)..(39): Xaa is C or S

SEQ ID NO: 63123 - protein, 36 aa, Artificial Sequence; identical to SEQ ID NO: 18914
  Cyclic GFR-binding peptide
  MOD_RES (3)..(4): Xaa is C or S

SEQ ID NO: 63124 - protein, 30 aa, Artificial Sequence
  Cyclic GFR-binding peptide
PTKLEPISVLYLDDMGVPTKFKYEEGMSVA

SEQ ID NO: 63125 - protein, 24 aa, Artificial Sequence
  Cyclic GFR-binding peptide
TKLSPISVLYIDDSSNVIYKQYEN

SEQ ID NO: 63126 - protein, 39 aa, Artificial Sequence; identical to SEQ ID NO: 18916
  Cyclic GFR-binding peptide
  MOD_RES (2)..(3)..(36)..(38): Xaa is C or S

SEQ ID NO: 63127 - protein, 29 aa, Artificial Sequence
  Cyclic GFR-binding peptide
PTKLSPISILYIDKGVVTYYKQYEGMAVS

SEQ ID NO: 63128 - protein, 40 aa, Artificial Sequence; identical to SEQ ID NO: 18922
  Cyclic GFR-binding peptide
  MOD_RES (6)..(38)..(40): Xaa is C or S

SEQ ID NO: 63129 - protein, 27 aa, Artificial Sequence
  Cyclic GFR-binding peptide
  MOD_RES (27)..(27): Xaa is C or S
NAISILYFDAANNVVLKKYRDMVVEAX

SEQ ID NO: 63130 - protein, 26 aa, Artificial Sequence
  Cyclic GFR-binding peptide
  MOD_RES (1)..(1): Xaa is C or S
XVPTKLSPISILYKDKGVVTYLKYHY

SEQ ID NO: 63131 - protein, 29 aa, Artificial Sequence
  Cyclic GFR-binding peptide
  MOD_RES (27)..(29): Xaa is C or S
EPISILYLDAANNVVKFKYEDMVVEAXGX

SEQ ID NO: 63132 - protein, 29 aa, Artificial Sequence
  Cyclic GFR-binding peptide
  MOD_RES (3)..(4): Xaa is C or S
KAXXAPTKLSPISVLYIDSSNNVIYKQYE

SEQ ID NO: 63133 - protein, 39 aa, Artificial Sequence; identical to SEQ ID NO: 18929
  Cyclic GFR-binding peptide
  MOD_RES (4)..(5)..(36)..(38): Xaa is C or S

SEQ ID NO: 63134 - protein, 31 aa, Artificial Sequence
  Cyclic GFR-binding peptide
  MOD_RES (29)..(31): Xaa is C or S
QDLEPISILYLVGRTPKVKFKYEMVVKSXKX

SEQ ID NO: 63135 - protein, 31 aa, Artificial Sequence
  Cyclic GFR-binding peptide
  MOD_RES (2)..(3): Xaa is C or S
SXXVPARLSPISILYKDAANNVVLKYHYDMV

SEQ ID NO: 63136 - protein, 28 aa, Artificial Sequence
  Cyclic GFR-binding peptide
PQALSPISILYIVGRKPKVYKQYEMIVR

SEQ ID NO: 63137 - protein, 31 aa, Artificial Sequence
  Cyclic GFR-binding peptide
  MOD_RES (30)..(30): Xaa is C or S
PQALSPISILYIVGRKPKVYKQYEMIVRSXK

SEQ ID NO: 63138 - protein, 31 aa, Artificial Sequence
  Cyclic GFR-binding peptide
  MOD_RES (4)..(5): Xaa is C or S
SKAXXVPTKLSPISILYKDKGVVTYLKYHYG

SEQ ID NO: 63139 - protein, 33 aa, Artificial Sequence; identical to SEQ ID NO: 18938
  Cyclic GFR-binding peptide
  MOD_RES (2)..(3): Xaa is C or S

SEQ ID NO: 63140 - protein, 26 aa, Artificial Sequence
  Cyclic GFR-binding peptide
  MOD_RES (26)..(26): Xaa is C or S
SPISILYIVGRKPKVYKQYEMIVRSX

SEQ ID NO: 63141 - protein, 27 aa, Artificial Sequence
  Cyclic GFR-binding peptide
PQALSPISILYIVGRKPKVYKQYEMIV

SEQ ID NO: 63142 - protein, 37 aa, Artificial Sequence; identical to SEQ ID NO: 18940
  Cyclic GFR-binding peptide
  MOD_RES (4)..(5)..(37): Xaa is C or S

SEQ ID NO: 63143 - protein, 33 aa, Artificial Sequence
  Cyclic GFR-binding peptide
  MOD_RES (4)..(5): Xaa is C or S
PASXXVPARLSPISILYKDAANNVVLKYHYDMV

SEQ ID NO: 63144 - protein, 29 aa, Artificial Sequence
  Cyclic GFR-binding peptide
  MOD_RES (27)..(29): Xaa is C or S
SPISILYIDKGVVTYYKQYEGMAVSEXGX

SEQ ID NO: 63145 - protein, 29 aa, Artificial Sequence
  Cyclic GFR-binding peptide
TQLEPISVLYLDDSSNVIKFKYENMVVRA

SEQ ID NO: 63146 - protein, 35 aa, Artificial Sequence
  Cyclic GFR-binding peptide
  MOD_RES (5)..(6): Xaa is C or S
VGKAXXVPTKLSPISVLYIDDMGVPTYKQYEEGMS

SEQ ID NO: 63147 - protein, 38 aa, Artificial Sequence; identical to SEQ ID NO: 18941
  Cyclic GFR-binding peptide
  MOD_RES (5)..(6): Xaa is C or S

SEQ ID NO: 63148 - protein, 31 aa, Artificial Sequence; identical to SEQ ID NO: 18945
  Cyclic GFR-binding peptide
  MOD_RES (31)..(31): Xaa is C or S

SEQ ID NO: 63149 - protein, 24 aa, Artificial Sequence
  Cyclic GFR-binding peptide
EPISILYLIGKTPKIKFKYEMIVK

SEQ ID NO: 63150 - protein, 33 aa, Artificial Sequence
  Cyclic GFR-binding peptide
  MOD_RES (3)..(4): Xaa is C or S
ASXXVPARLEPISILYLDAANNVVKFKYEDMVV

SEQ ID NO: 63151 - protein, 38 aa, Artificial Sequence; identical to SEQ ID NO: 18948
  Cyclic GFR-binding peptide
  MOD_RES (6)..(7): Xaa is C or S

SEQ ID NO: 63152 - protein, 24 aa, Artificial Sequence
  Cyclic GFR-binding peptide
EPISILYLVGRTPKVKFKYEMVVK

SEQ ID NO: 63153 - protein, 32 aa, Artificial Sequence; identical to SEQ ID NO: 18950
  Cyclic GFR-binding peptide
  MOD_RES (1)..(2): Xaa is C or S

SEQ ID NO: 63154 - protein, 29 aa, Artificial Sequence
  Cyclic GFR-binding peptide
  MOD_RES (1)..(2): Xaa is C or S
XXVPQALEPISILYLVGRKPKVKFKYEMI

SEQ ID NO: 63155 - protein, 28 aa, Artificial Sequence
  Cyclic GFR-binding peptide
QLSPISVLYIDDSSNVIYKQYENMVVRA

SEQ ID NO: 63156 - protein, 33 aa, Artificial Sequence; identical to SEQ ID NO: 18953
  Cyclic GFR-binding peptide
  MOD_RES (1)..(33): Xaa is C or S

SEQ ID NO: 63157 - protein, 33 aa, Artificial Sequence; identical to SEQ ID NO: 18954
  Cyclic GFR-binding peptide
  MOD_RES (2)..(3): Xaa is C or S

SEQ ID NO: 63158 - protein, 25 aa, Artificial Sequence
  Cyclic GFR-binding peptide
PARLSPISILYKDAANNVVLKYHYD

SEQ ID NO: 63159 - protein, 31 aa, Artificial Sequence
  Cyclic GFR-binding peptide
  MOD_RES (29)..(31): Xaa is C or S
KLSPISILYIDKGVVTYYKQYEGMAVSEXGX

SEQ ID NO: 63160 - protein, 24 aa, Artificial Sequence
  Cyclic GFR-binding peptide
LSPISVLYIDDSSNVIYKQYENMV

SEQ ID NO: 63161 - protein, 25 aa, Artificial Sequence
  Cyclic GFR-binding peptide
LSPISMLYIDENEKVVYKQYEDMVV

SEQ ID NO: 63162 - protein, 31 aa, Artificial Sequence; identical to SEQ ID NO: 18962
  Cyclic GFR-binding peptide
  MOD_RES (1)..(1): Xaa is C or S

SEQ ID NO: 63163 - protein, 40 aa, Artificial Sequence; identical to SEQ ID NO: 18963
  Cyclic GFR-binding peptide
  MOD_RES (6)..(7)..(39): Xaa is C or S

SEQ ID NO: 63164 - protein, 28 aa, Artificial Sequence
  Cyclic GFR-binding peptide
  MOD_RES (1)..(1): Xaa is C or S
XAPTKLEPISVLYLDSSNNVIKFKYENM

SEQ ID NO: 63165 - protein, 34 aa, Artificial Sequence; identical to SEQ ID NO: 18965
  Cyclic GFR-binding peptide
  MOD_RES (2)..(3): Xaa is C or S

SEQ ID NO: 63166 - protein, 35 aa, Artificial Sequence; identical to SEQ ID NO: 18967
  Cyclic GFR-binding peptide
  MOD_RES (1)..(2)..(34): Xaa is C or S

SEQ ID NO: 63167 - protein, 30 aa, Artificial Sequence
  Cyclic GFR-binding peptide
  MOD_RES (2)..(3): Xaa is C or S
SXXVPARLEPISILYLDAANNVVKFKYEDM

SEQ ID NO: 63168 - protein, 38 aa, Artificial Sequence; identical to SEQ ID NO: 18972
  Cyclic GFR-binding peptide
  MOD_RES (3)..(4)..(35)..(37): Xaa is C or S

SEQ ID NO: 63169 - protein, 33 aa, Artificial Sequence; identical to SEQ ID NO: 18975
  Cyclic GFR-binding peptide
  MOD_RES (2)..(3): Xaa is C or S

SEQ ID NO: 63170 - protein, 30 aa, Artificial Sequence
  Cyclic GFR-binding peptide
  MOD_RES (29)..(29): Xaa is C or S
KLEPISVLYLDSSNNVIKFKYENMVVKAXG

SEQ ID NO: 63171 - protein, 29 aa, Artificial Sequence
  Cyclic GFR-binding peptide
  MOD_RES (1)..(2): Xaa is C or S
XXVPTKLSPISILYKDKGVVTYLKYHYGM

SEQ ID NO: 63172 - protein, 33 aa, Artificial Sequence
  Cyclic GFR-binding peptide
  MOD_RES (5)..(6): Xaa is C or S
APASXXVPARLEPISILYLDAANNVVKFKYEDM

SEQ ID NO: 63173 - protein, 34 aa, Artificial Sequence; identical to SEQ ID NO: 18979
  Cyclic GFR-binding peptide
  MOD_RES (1)..(32)..(34): Xaa is C or S

SEQ ID NO: 63174 - protein, 36 aa, Artificial Sequence; identical to SEQ ID NO: 18980
  Cyclic GFR-binding peptide
  MOD_RES (5)..(5): Xaa is C or S

SEQ ID NO: 63175 - protein, 34 aa, Artificial Sequence; identical to SEQ ID NO: 18981
  Cyclic GFR-binding peptide
  MOD_RES (2)..(3): Xaa is C or S

SEQ ID NO: 63176 - protein, 33 aa, Artificial Sequence; identical to SEQ ID NO: 18984
  Cyclic GFR-binding peptide
  MOD_RES (32)..(32): Xaa is C or S

SEQ ID NO: 63177 - protein, 32 aa, Artificial Sequence
  Cyclic GFR-binding peptide
  MOD_RES (7)..(7): Xaa is C or S
HVTKPTXAPTKLSPISVLYIDDSSNVIYKQYE

SEQ ID NO: 63178 - protein, 34 aa, Artificial Sequence
  Cyclic GFR-binding peptide
  MOD_RES (5)..(5): Xaa is C or S
TKPTXAPTKLEPISVLYLDDSSNVIKFKYENMVV

SEQ ID NO: 63179 - protein, 34 aa, Artificial Sequence; identical to SEQ ID NO: 18990
  Cyclic GFR-binding peptide
  MOD_RES (2)..(3): Xaa is C or S

SEQ ID NO: 63180 - protein, 32 aa, Artificial Sequence
  Cyclic GFR-binding peptide
  MOD_RES (3)..(4): Xaa is C or S
KPXXAPTKLSPISVLYIDDSSNVIYKQYENMV

SEQ ID NO: 63181 - protein, 24 aa, Artificial Sequence
  Cyclic GFR-binding peptide
SQDLSPISILYIIGKTPKIYKQYE

SEQ ID NO: 63182 - protein, 36 aa, Artificial Sequence; identical to SEQ ID NO: 18994
  Cyclic GFR-binding peptide
  MOD_RES (2)..(3)..(34)..(36): Xaa is C or S

SEQ ID NO: 63183 - protein, 30 aa, Artificial Sequence
  Cyclic GFR-binding peptide
  MOD_RES (1)..(1): Xaa is C or S
XVPTKLEPISVLYLDDMGVPTKFKYEEGMS

SEQ ID NO: 63184 - protein, 33 aa, Artificial Sequence
  Cyclic GFR-binding peptide
  MOD_RES (30)..(32): Xaa is C or S
PQALSPISILYIVGRKPKVYKQYEMIVRSXKXS

SEQ ID NO: 63185 - protein, 30 aa, Artificial Sequence
  Cyclic GFR-binding peptide
  MOD_RES (27)..(29): Xaa is C or S
EPISMLYLDENEKVVKFKYEDMVVEGXGXR

SEQ ID NO: 63186 - protein, 34 aa, Artificial Sequence
  Cyclic GFR-binding peptide
  MOD_RES (6)..(7): Xaa is C or S
KVGKAXXVPTKLSPISVLYIDDMGVPTYKQYEEG

SEQ ID NO: 63187 - protein, 30 aa, Artificial Sequence
  Cyclic GFR-binding peptide
  MOD_RES (29)..(29): Xaa is C or S
LEPISVLYLDDMGVPTKFKYEEGMSVAEXG

SEQ ID NO: 63188 - protein, 34 aa, Artificial Sequence; identical to SEQ ID NO: 19000
  Cyclic GFR-binding peptide
  MOD_RES (1)..(2)..(34): Xaa is C or S

SEQ ID NO: 63189 - protein, 29 aa, Artificial Sequence
  Cyclic GFR-binding peptide
ARLNAISILYFDAANNVVLKKYRDMVVEA

SEQ ID NO: 63190 - protein, 32 aa, Artificial Sequence; identical to SEQ ID NO: 19007
  Cyclic GFR-binding peptide
  MOD_RES (1)..(2): Xaa is C or S

SEQ ID NO: 63191 - protein, 28 aa, Artificial Sequence
  Cyclic GFR-binding peptide
  MOD_RES (1)..(2): Xaa is C or S
XXVPTELEPISMLYLDENEKVVKFKYED

SEQ ID NO: 63192 - protein, 24 aa, Artificial Sequence
  Cyclic GFR-binding peptide
LSPISILYIDKGVVTYYKQYEGMA

SEQ ID NO: 63193 - protein, 33 aa, Artificial Sequence; identical to SEQ ID NO: 19013
  Cyclic GFR-binding peptide
  MOD_RES (33)..(33): Xaa is C or S

SEQ ID NO: 63194 - protein, 25 aa, Artificial Sequence
  Cyclic GFR-binding peptide
LSPISVLYIDDMGVPTYKQYEEGMS

SEQ ID NO: 63195 - protein, 25 aa, Artificial Sequence
  Cyclic GFR-binding peptide
APTQLSPISVLYIDDSSNVIYKQYE

SEQ ID NO: 63196 - protein, 30 aa, Artificial Sequence
  Cyclic GFR-binding peptide
  MOD_RES (28)..(30): Xaa is C or S
SPISVLYIDDMGVPTYKQYEEGMSVAEXGX

SEQ ID NO: 63197 - protein, 35 aa, Artificial Sequence; identical to SEQ ID NO: 19017
  Cyclic GFR-binding peptide
  MOD_RES (2)..(3)..(35): Xaa is C or S

SEQ ID NO: 63198 - protein, 28 aa, Artificial Sequence
  Cyclic GFR-binding peptide
  MOD_RES (1)..(1): Xaa is C or S
XVSQDLEPISILYLIGKTPKIKFKYEMI

SEQ ID NO: 63199 - protein, 30 aa, Artificial Sequence
  Cyclic GFR-binding peptide
  MOD_RES (29)..(29): Xaa is C or S
RLNAISILYFDAANNVVLKKYRDMVVEAXG

SEQ ID NO: 63200 - protein, 30 aa, Artificial Sequence
  Cyclic GFR-binding peptide
  MOD_RES (3)..(4): Xaa is C or S
ASXXVPARLNAISILYFDAANNVVLKKYRD

SEQ ID NO: 63201 - protein, 33 aa, Artificial Sequence
  Cyclic GFR-binding peptide
  MOD_RES (3)..(4): Xaa is C or S
KAXXAPTKLSPISVLYIDSSNNVIYKQYENMVV

SEQ ID NO: 63202 - protein, 23 aa, Artificial Sequence
  Cyclic GFR-binding peptide
KLSPISILYKDKGVVTYLKYHYG

SEQ ID NO: 63203 - protein, 30 aa, Artificial Sequence
  Cyclic GFR-binding peptide
  MOD_RES (30)..(30): Xaa is C or S
TKLSPISVLYIDSSNNVIYKQYENMVVKAX

SEQ ID NO: 63204 - protein, 33 aa, Artificial Sequence; identical to SEQ ID NO: 19021
  Cyclic GFR-binding peptide
  MOD_RES (1)..(2)..(33): Xaa is C or S

SEQ ID NO: 63205 - protein, 33 aa, Artificial Sequence
  Cyclic GFR-binding peptide
  MOD_RES (30)..(32): Xaa is C or S
TELEPISMLYLDEYDKVVKFKYEEMVVEGXGXR

SEQ ID NO: 63206 - protein, 37 aa, Artificial Sequence; identical to SEQ ID NO: 19025
  Cyclic GFR-binding peptide
  MOD_RES (2)..(3)..(35)..(37): Xaa is C or S

SEQ ID NO: 63207 - protein, 31 aa, Artificial Sequence
  Cyclic GFR-binding peptide
  MOD_RES (3)..(4): Xaa is C or S
KAXXVPTELEPISMLYLDENEKVVKFKYEDM

SEQ ID NO: 63208 - protein, 36 aa, Artificial Sequence
  Cyclic GFR-binding peptide
  MOD_RES (6)..(7): Xaa is C or S
ASAAPXXVPQALEPISILYLVGRKPKVKFKYEMIVR

SEQ ID NO: 63209 - protein, 33 aa, Artificial Sequence; identical to SEQ ID NO: 19027
  Cyclic GFR-binding peptide
  MOD_RES (2)..(3): Xaa is C or S

SEQ ID NO: 63210 - protein, 35 aa, Artificial Sequence
  Cyclic GFR-binding peptide
  MOD_RES (3)..(4): Xaa is C or S
KAXXVPTKLSPISVLYIDDMGVPTYKQYEEGMSVA

SEQ ID NO: 63211 - protein, 34 aa, Artificial Sequence
  Cyclic GFR-binding peptide
  MOD_RES (5)..(6): Xaa is C or S
APASXXVPARLEPISILYLDAANNVVKFKYEDMV

SEQ ID NO: 63212 - protein, 30 aa, Artificial Sequence
  Cyclic GFR-binding peptide
  MOD_RES (5)..(5): Xaa is C or S
TKPTXAPTKLSPISVLYIDDSSNVIYKQYE

SEQ ID NO: 63213 - protein, 23 aa, Artificial Sequence
  Cyclic GFR-binding peptide
EPISILYLDAANNVVKFKYEDMV

SEQ ID NO: 63214 - protein, 27 aa, Artificial Sequence
  Cyclic GFR-binding peptide
VPQDLEPISILYLVGRTPKVKFKYEMV

SEQ ID NO: 63215 - protein, 37 aa, Artificial Sequence; identical to SEQ ID NO: 19036
  Cyclic GFR-binding peptide
  MOD_RES (2)..(3)..(35)..(37): Xaa is C or S

SEQ ID NO: 63216 - protein, 26 aa, Artificial Sequence
  Cyclic GFR-binding peptide
  MOD_RES (1)..(1): Xaa is C or S
XVPTELEPISMLYLDEYDKVVKFKYE

SEQ ID NO: 63217 - protein, 38 aa, Artificial Sequence; identical to SEQ ID NO: 19041
  Cyclic GFR-binding peptide
  MOD_RES (4)..(5)..(37): Xaa is C or S

SEQ ID NO: 63218 - protein, 30 aa, Artificial Sequence
  Cyclic GFR-binding peptide
  MOD_RES (4)..(5): Xaa is C or S
PASXXVPARLNAISILYFDAANNVVLKKYR

SEQ ID NO: 63219 - protein, 23 aa, Artificial Sequence
  Cyclic GFR-binding peptide
TKLNAISILYFDKGVVTYLKKYR

SEQ ID NO: 63220 - protein, 36 aa, Artificial Sequence; identical to SEQ ID NO: 19047
  Cyclic GFR-binding peptide
  MOD_RES (4)..(5)..(36): Xaa is C or S

SEQ ID NO: 63221 - protein, 23 aa, Artificial Sequence
  Cyclic GFR-binding peptide
ELEPISMLYLDENEKVVKFKYED

SEQ ID NO: 63222 - protein, 41 aa, Artificial Sequence; identical to SEQ ID NO: 19049
  Cyclic GFR-binding peptide
  MOD_RES (6)..(7)..(39)..(41): Xaa is C or S

SEQ ID NO: 63223 - protein, 37 aa, Artificial Sequence; identical to SEQ ID NO: 19050
  Cyclic GFR-binding peptide
  MOD_RES (6)..(7): Xaa is C or S

SEQ ID NO: 63224 - protein, 29 aa, Artificial Sequence
  Cyclic GFR-binding peptide
  MOD_RES (3)..(4): Xaa is C or S
SPXXVPQDLEPISILYLVGRTPKVKFKYE

SEQ ID NO: 63225 - protein, 39 aa, Artificial Sequence; identical to SEQ ID NO: 19052
  Cyclic GFR-binding peptide
  MOD_RES (5)..(6)..(38): Xaa is C or S

SEQ ID NO: 63226 - protein, 35 aa, Artificial Sequence; identical to SEQ ID NO: 19055
  Cyclic GFR-binding peptide
  MOD_RES (1)..(2)..(34): Xaa is C or S

SEQ ID NO: 63227 - protein, 20 aa, Artificial Sequence
  Cyclic GFR-binding peptide
SPISMLYIDENEKVVYKQYE

SEQ ID NO: 63228 - protein, 33 aa, Artificial Sequence
  Cyclic GFR-binding peptide
  MOD_RES (6)..(7): Xaa is C or S
YVPKPXXAPTKLEPISVLYLDDSSNVIKFKYEN

SEQ ID NO: 63229 - protein, 32 aa, Artificial Sequence
  Cyclic GFR-binding peptide
  MOD_RES (1)..(1): Xaa is C or S
XVPTKLEPISVLYLDDMGVPTKFKYEEGMSVA

SEQ ID NO: 63230 - protein, 20 aa, Artificial Sequence
  Cyclic GFR-binding peptide
SPISILYKDKGVVTYLKYHY

SEQ ID NO: 63231 - protein, 41 aa, Artificial Sequence; identical to SEQ ID NO: 19074
  Cyclic GFR-binding peptide
  MOD_RES (6)..(7)..(40): Xaa is C or S

SEQ ID NO: 63232 - protein, 31 aa, Artificial Sequence
  Cyclic GFR-binding peptide
  MOD_RES (31)..(31): Xaa is C or S
PTELSPISMLYIDENEKVVYKQYEDMVVEGX

SEQ ID NO: 63233 - protein, 35 aa, Artificial Sequence
  Cyclic GFR-binding peptide
  MOD_RES (6)..(7): Xaa is C or S
KVGKAXXVPTKLEPISVLYLDDMGVPTKFKYEEGM

SEQ ID NO: 63234 - protein, 40 aa, Artificial Sequence; identical to SEQ ID NO: 19084
  Cyclic GFR-binding peptide
  MOD_RES (6)..(7)..(39): Xaa is C or S

SEQ ID NO: 63235 - protein, 32 aa, Artificial Sequence
  Cyclic GFR-binding peptide
  MOD_RES (5)..(6): Xaa is C or S
SASPXXVPQDLEPISILYLVGRTPKVKFKYEM

SEQ ID NO: 63236 - protein, 38 aa, Artificial Sequence; identical to SEQ ID NO: 19085
  Cyclic GFR-binding peptide
  MOD_RES (6)..(7)..(38): Xaa is C or S

SEQ ID NO: 63237 - protein, 33 aa, Artificial Sequence
  Cyclic GFR-binding peptide
  MOD_RES (31)..(33): Xaa is C or S
PTELSPISMLYIDENEKVVYKQYEDMVVEGXGX

SEQ ID NO: 63238 - protein, 31 aa, Artificial Sequence
  Cyclic GFR-binding peptide
  MOD_RES (28)..(30): Xaa is C or S
LSPISILYKDAANNVVLKYHYDMVVEAXGXR

SEQ ID NO: 63239 - protein, 22 aa, Artificial Sequence
  Cyclic GFR-binding peptide
EPISVLYLDDMGVPTKFKYEEG

SEQ ID NO: 63240 - protein, 31 aa, Artificial Sequence; identical to SEQ ID NO: 19091
  Cyclic GFR-binding peptide

SEQ ID NO: 63241 - protein, 29 aa, Artificial Sequence
  Cyclic GFR-binding peptide
  MOD_RES (2)..(3): Xaa is C or S
PXXVSQDLSPISILYIIGKTPKIYKQYEM

SEQ ID NO: 63242 - protein, 31 aa, Artificial Sequence
  Cyclic GFR-binding peptide
  MOD_RES (29)..(31): Xaa is C or S
ELEPISMLYLDENEKVVKFKYEDMVVEGXGX

SEQ ID NO: 63243 - protein, 38 aa, Artificial Sequence; identical to SEQ ID NO: 19098
  Cyclic GFR-binding peptide
  MOD_RES (2)..(3)..(35)..(37): Xaa is C or S

SEQ ID NO: 63244 - protein, 32 aa, Artificial Sequence
  Cyclic GFR-binding peptide
  MOD_RES (3)..(4): Xaa is C or S
SPXXVPQDLEPISILYLVGRTPKVKFKYEMVV

SEQ ID NO: 63245 - protein, 33 aa, Artificial Sequence
  Cyclic GFR-binding peptide
  MOD_RES (5)..(6): Xaa is C or S
SASPXXVPQDLEPISILYLVGRTPKVKFKYEMV

SEQ ID NO: 63246 - protein, 33 aa, Artificial Sequence
  Cyclic GFR-binding peptide
  MOD_RES (30)..(32): Xaa is C or S
TKLEPISVLYLDDSSNVIKFKYENMVVRSXGXH

SEQ ID NO: 63247 - protein, 26 aa, Artificial Sequence
  Cyclic GFR-binding peptide
QALSPISILYIVGRKPKVYKQYEMIV

SEQ ID NO: 63248 - protein, 31 aa, Artificial Sequence; identical to SEQ ID NO: 19100
  Cyclic GFR-binding peptide
  MOD_RES (31)..(31): Xaa is C or S

SEQ ID NO: 63249 - protein, 32 aa, Artificial Sequence
  Cyclic GFR-binding peptide
  MOD_RES (4)..(5): Xaa is C or S
AAPXXVPQALEPISILYLVGRKPKVKFKYEMI

SEQ ID NO: 63250 - protein, 34 aa, Artificial Sequence; identical to SEQ ID NO: 19101
  Cyclic GFR-binding peptide
  MOD_RES (33)..(33): Xaa is C or S

SEQ ID NO: 63251 - protein, 35 aa, Artificial Sequence; identical to SEQ ID NO: 19102
  Cyclic GFR-binding peptide
  MOD_RES (1)..(2)..(34): Xaa is C or S

SEQ ID NO: 63252 - protein, 28 aa, Artificial Sequence
  Cyclic GFR-binding peptide
  MOD_RES (2)..(3): Xaa is C or S
AXXVPTKLSPISVLYIDDMGVPTYKQYE

SEQ ID NO: 63253 - protein, 28 aa, Artificial Sequence
  Cyclic GFR-binding peptide
  MOD_RES (1)..(1): Xaa is C or S
XVPTELSPISMLYIDEYDKVVYKQYEEM

SEQ ID NO: 63254 - protein, 33 aa, Artificial Sequence; identical to SEQ ID NO: 19105
  Cyclic GFR-binding peptide
  MOD_RES (1)..(32): Xaa is C or S

SEQ ID NO: 63255 - protein, 30 aa, Artificial Sequence
  Cyclic GFR-binding peptide
  MOD_RES (2)..(2): Xaa is C or S
TXAPTKLSPISVLYIDDSSNVIYKQYENMV

SEQ ID NO: 63256 - protein, 35 aa, Artificial Sequence; identical to SEQ ID NO: 19114
  Cyclic GFR-binding peptide
  MOD_RES (32)..(34): Xaa is C or S

SEQ ID NO: 63257 - protein, 29 aa, Artificial Sequence
  Cyclic GFR-binding peptide
  MOD_RES (28)..(28): Xaa is C or S
LEPISMLYLDENEKVVKFKYEDMVVEGXG

SEQ ID NO: 63258 - protein, 33 aa, Artificial Sequence; identical to SEQ ID NO: 19115
  Cyclic GFR-binding peptide
  MOD_RES (32)..(32): Xaa is C or S

SEQ ID NO: 63259 - protein, 25 aa, Artificial Sequence
  Cyclic GFR-binding peptide
LSPISMLYIDEYDKVVYKQYEEMVV

SEQ ID NO: 63260 - protein, 29 aa, Artificial Sequence
  Cyclic GFR-binding peptide
TKLSPISVLYIDDMGVPTYKQYEEGMSVA

SEQ ID NO: 63261 - protein, 28 aa, Artificial Sequence
  Cyclic GFR-binding peptide
PTKLEPISVLYLDDMGVPTKFKYEEGMS

SEQ ID NO: 63262 - protein, 23 aa, Artificial Sequence
  Cyclic GFR-binding peptide
NAISILYFDKGVVTYLKKYRGMA

SEQ ID NO: 63263 - protein, 24 aa, Artificial Sequence
  Cyclic GFR-binding peptide
PTKLSPISILYKDKGVVTYLKYHY

SEQ ID NO: 63264 - protein, 31 aa, Artificial Sequence
  Cyclic GFR-binding peptide
  MOD_RES (2)..(3): Xaa is C or S
AXXAPTKLEPISVLYLDSSNNVIKFKYENMV

SEQ ID NO: 63265 - protein, 33 aa, Artificial Sequence
  Cyclic GFR-binding peptide
  MOD_RES (6)..(7): Xaa is C or S
ASASPXXVSQDLSPISILYIIGKTPKIYKQYEM

SEQ ID NO: 63266 - protein, 30 aa, Artificial Sequence
  Cyclic GFR-binding peptide
  MOD_RES (1)..(2): Xaa is C or S
XXVPTKLNAISILYFDKGVVTYLKKYRGMA

SEQ ID NO: 63267 - protein, 30 aa, Artificial Sequence; identical to SEQ ID NO: 19125
  Cyclic GFR-binding peptide

SEQ ID NO: 63268 - protein, 39 aa, Artificial Sequence; identical to SEQ ID NO: 19127
  Cyclic GFR-binding peptide
  MOD_RES (4)..(5)..(36)..(38): Xaa is C or S

SEQ ID NO: 63269 - protein, 35 aa, Artificial Sequence; identical to SEQ ID NO: 19128
  Cyclic GFR-binding peptide
  MOD_RES (2)..(3)..(35): Xaa is C or S

SEQ ID NO: 63270 - protein, 26 aa, Artificial Sequence
  Cyclic GFR-binding peptide
  MOD_RES (1)..(1): Xaa is C or S
XVPQDLSPISILYIVGRTPKVYKQYE

SEQ ID NO: 63271 - protein, 26 aa, Artificial Sequence
  Cyclic GFR-binding peptide
PARLEPISILYLDAANNVVKFKYEDM

SEQ ID NO: 63272 - protein, 27 aa, Artificial Sequence
  Cyclic GFR-binding peptide
DLEPISILYLIGKTPKIKFKYEMIVKS

SEQ ID NO: 63273 - protein, 25 aa, Artificial Sequence
  Cyclic GFR-binding peptide
LEPISMLYLDEYDKVVKFKYEEMVV

SEQ ID NO: 63274 - protein, 28 aa, Artificial Sequence
  Cyclic GFR-binding peptide
  MOD_RES (2)..(2): Xaa is C or S
TXAPTKLEPISVLYLDDSSNVIKFKYEN

SEQ ID NO: 63275 - protein, 35 aa, Artificial Sequence; identical to SEQ ID NO: 19134
  Cyclic GFR-binding peptide
  MOD_RES (32)..(34): Xaa is C or S

SEQ ID NO: 63276 - protein, 26 aa, Artificial Sequence
  Cyclic GFR-binding peptide
PTELSPISMLYIDEYDKVVYKQYEEM

SEQ ID NO: 63277 - protein, 28 aa, Artificial Sequence
  Cyclic GFR-binding peptide
  MOD_RES (1)..(2): Xaa is C or S
XXAPTKLSPISVLYIDSSNNVIYKQYEN

SEQ ID NO: 63278 - protein, 29 aa, Artificial Sequence
  Cyclic GFR-binding peptide
  MOD_RES (26)..(28): Xaa is C or S
SPISILYIVGRTPKVYKQYEMVVKSXKXS

SEQ ID NO: 63279 - protein, 34 aa, Artificial Sequence
  Cyclic GFR-binding peptide
  MOD_RES (4)..(5): Xaa is C or S
ASPXXVSQDLEPISILYLIGKTPKIKFKYEMIVK

SEQ ID NO: 63280 - protein, 32 aa, Artificial Sequence
  Cyclic GFR-binding peptide
  MOD_RES (4)..(5): Xaa is C or S
SKAXXVPTKLNAISILYFDKGVVTYLKKYRGM

SEQ ID NO: 63281 - protein, 35 aa, Artificial Sequence
  Cyclic GFR-binding peptide
  MOD_RES (6)..(7): Xaa is C or S
AVPKAXXAPTKLEPISVLYLDSSNNVIKFKYENMV

SEQ ID NO: 63282 - protein, 36 aa, Artificial Sequence; identical to SEQ ID NO: 19140
  Cyclic GFR-binding peptide
  MOD_RES (5)..(6): Xaa is C or S

SEQ ID NO: 63283 - protein, 30 aa, Artificial Sequence
  Cyclic GFR-binding peptide
  MOD_RES (29)..(29): Xaa is C or S
RLEPISILYLDAANNVVKFKYEDMVVEAXG

SEQ ID NO: 63284 - protein, 30 aa, Artificial Sequence
  Cyclic GFR-binding peptide
  MOD_RES (27)..(29): Xaa is C or S
LSPISILYIVGRTPKVYKQYEMVVKSXKXS

SEQ ID NO: 63285 - protein, 29 aa, Artificial Sequence
  Cyclic GFR-binding peptide
  MOD_RES (1)..(2): Xaa is C or S
XXVPQDLEPISILYLVGRTPKVKFKYEMV

SEQ ID NO: 63286 - protein, 28 aa, Artificial Sequence
  Cyclic GFR-binding peptide
  MOD_RES (2)..(2): Xaa is C or S
TXAPTKLSPISVLYIDDSSNVIYKQYEN

SEQ ID NO: 63287 - protein, 23 aa, Artificial Sequence
  Cyclic GFR-binding peptide
EPISILYLIGKTPKIKFKYEMIV

SEQ ID NO: 63288 - protein, 30 aa, Artificial Sequence
  Cyclic GFR-binding peptide
PTELSPISMLYIDEYDKVVYKQYEEMVVEG

SEQ ID NO: 63289 - protein, 30 aa, Artificial Sequence
  Cyclic GFR-binding peptide
  MOD_RES (30)..(30): Xaa is C or S
PQALEPISILYLVGRKPKVKFKYEMIVRSX

SEQ ID NO: 63290 - protein, 35 aa, Artificial Sequence; identical to SEQ ID NO: 19149
  Cyclic GFR-binding peptide
  MOD_RES (1)..(33)..(35): Xaa is C or S

SEQ ID NO: 63291 - protein, 22 aa, Artificial Sequence
  Cyclic GFR-binding peptide
LEPISVLYLDSSNNVIKFKYEN

SEQ ID NO: 63292 - protein, 30 aa, Artificial Sequence
  Cyclic GFR-binding peptide
  MOD_RES (2)..(3): Xaa is C or S
PXXVPQDLSPISILYIVGRTPKVYKQYEMV

SEQ ID NO: 63293 - protein, 21 aa, Artificial Sequence
  Cyclic GFR-binding peptide
SPISILYIVGRKPKVYKQYEM

SEQ ID NO: 63294 - protein, 31 aa, Artificial Sequence
  Cyclic GFR-binding peptide
  MOD_RES (1)..(2): Xaa is C or S
XXVSQDLEPISILYLIGKTPKIKFKYEMIVK

SEQ ID NO: 63295 - protein, 32 aa, Artificial Sequence; identical to SEQ ID NO: 19157
  Cyclic GFR-binding peptide
  MOD_RES (1)..(1): Xaa is C or S

SEQ ID NO: 63296 - protein, 30 aa, Artificial Sequence
  Cyclic GFR-binding peptide
  MOD_RES (1)..(1): Xaa is C or S
XVPQALSPISILYIVGRKPKVYKQYEMIVR

SEQ ID NO: 63297 - protein, 37 aa, Artificial Sequence; identical to SEQ ID NO: 19160
  Cyclic GFR-binding peptide
  MOD_RES (7)..(7): Xaa is C or S

SEQ ID NO: 63298 - protein, 35 aa, Artificial Sequence; identical to SEQ ID NO: 19163
  Cyclic GFR-binding peptide
  MOD_RES (3)..(4): Xaa is C or S

SEQ ID NO: 63299 - protein, 40 aa, Artificial Sequence; identical to SEQ ID NO: 19164
  Cyclic GFR-binding peptide
  MOD_RES (6)..(7)..(39): Xaa is C or S

SEQ ID NO: 63300 - protein, 29 aa, Artificial Sequence
  Cyclic GFR-binding peptide
KLEPISVLYLDDMGVPTKFKYEEGMSVAE

SEQ ID NO: 63301 - protein, 34 aa, Artificial Sequence
  Cyclic GFR-binding peptide
  MOD_RES (6)..(7): Xaa is C or S
KASKAXXVPTKLNAISILYFDKGVVTYLKKYRGM

SEQ ID NO: 63302 - protein, 40 aa, Artificial Sequence; identical to SEQ ID NO: 19166
  Cyclic GFR-binding peptide
  MOD_RES (5)..(6)..(37)..(39): Xaa is C or S

SEQ ID NO: 63303 - protein, 25 aa, Artificial Sequence
  Cyclic GFR-binding peptide
APTKLSPISVLYIDSSNNVIYKQYE

SEQ ID NO: 63304 - protein, 28 aa, Artificial Sequence
  Cyclic GFR-binding peptide
  MOD_RES (1)..(2): Xaa is C or S
XXAPTKLEPISVLYLDSSNNVIKFKYEN

SEQ ID NO: 63305 - protein, 36 aa, Artificial Sequence; identical to SEQ ID NO: 19172
  Cyclic GFR-binding peptide
  MOD_RES (5)..(6): Xaa is C or S

SEQ ID NO: 63306 - protein, 25 aa, Artificial Sequence
  Cyclic GFR-binding peptide
EPISMLYLDENEKVVKFKYEDMVVE

SEQ ID NO: 63307 - protein, 31 aa, Artificial Sequence
  Cyclic GFR-binding peptide
  MOD_RES (31)..(31): Xaa is C or S
PTKLEPISVLYLDSSNNVIKFKYENMVVKAX

SEQ ID NO: 63308 - protein, 26 aa, Artificial Sequence
  Cyclic GFR-binding peptide
KLEPISVLYLDDMGVPTKFKYEEGMS

SEQ ID NO: 63309 - protein, 26 aa, Artificial Sequence
  Cyclic GFR-binding peptide
LNAISILYFDAANNVVLKKYRDMVVE

SEQ ID NO: 63310 - protein, 30 aa, Artificial Sequence
  Cyclic GFR-binding peptide
  MOD_RES (27)..(29): Xaa is C or S
LSPISILYIVGRKPKVYKQYEMIVRSXKXS

SEQ ID NO: 63311 - protein, 24 aa, Artificial Sequence
  Cyclic GFR-binding peptide
QLSPISVLYIDDSSNVIYKQYENM

SEQ ID NO: 63312 - protein, 37 aa, Artificial Sequence; identical to SEQ ID NO: 19183
  Cyclic GFR-binding peptide
  MOD_RES (4)..(5)..(37): Xaa is C or S

SEQ ID NO: 63313 - protein, 34 aa, Artificial Sequence; identical to SEQ ID NO: 19184
  Cyclic GFR-binding peptide
  MOD_RES (1)..(2)..(33): Xaa is C or S

SEQ ID NO: 63314 - protein, 29 aa, Artificial Sequence
  Cyclic GFR-binding peptide
VPARLEPISILYLDAANNVVKFKYEDMVV

SEQ ID NO: 63315 - protein, 42 aa, Artificial Sequence; identical to SEQ ID NO: 19187
  Cyclic GFR-binding peptide
  MOD_RES (6)..(7)..(39)..(41): Xaa is C or S

SEQ ID NO: 63316 - protein, 38 aa, Artificial Sequence; identical to SEQ ID NO: 19188
  Cyclic GFR-binding peptide
  MOD_RES (5)..(6)..(37): Xaa is C or S

SEQ ID NO: 63317 - protein, 30 aa, Artificial Sequence; identical to SEQ ID NO: 889
  Cyclic GFR-binding peptide

SEQ ID NO: 63318 - protein, 26 aa, Artificial Sequence
  Cyclic GFR-binding peptide
PTELEPISMLYLDENEKVVKFKYEDM

SEQ ID NO: 63319 - protein, 39 aa, Artificial Sequence; identical to SEQ ID NO: 19194
  Cyclic GFR-binding peptide
  MOD_RES (5)..(6)..(38): Xaa is C or S

SEQ ID NO: 63320 - protein, 26 aa, Artificial Sequence
  Cyclic GFR-binding peptide
ALSPISILYIVGRKPKVYKQYEMIVR

SEQ ID NO: 63321 - protein, 30 aa, Artificial Sequence
  Cyclic GFR-binding peptide
  MOD_RES (4)..(5): Xaa is C or S
AAPXXVPQALEPISILYLVGRKPKVKFKYE

SEQ ID NO: 63322 - protein, 34 aa, Artificial Sequence; identical to SEQ ID NO: 19195
  Cyclic GFR-binding peptide
  MOD_RES (3)..(4): Xaa is C or S

SEQ ID NO: 63323 - protein, 33 aa, Artificial Sequence
  Cyclic GFR-binding peptide
  MOD_RES (30)..(32): Xaa is C or S
SQDLEPISILYLIGKTPKIKFKYEMIVKSXKXS

SEQ ID NO: 63324 - protein, 34 aa, Artificial Sequence
  Cyclic GFR-binding peptide
  MOD_RES (4)..(5): Xaa is C or S
SKAXXVPTKLNAISILYFDKGVVTYLKKYRGMAV

SEQ ID NO: 63325 - protein, 29 aa, Artificial Sequence
  Cyclic GFR-binding peptide
VPQALEPISILYLVGRKPKVKFKYEMIVR

SEQ ID NO: 63326 - protein, 24 aa, Artificial Sequence
  Cyclic GFR-binding peptide
SPISILYIVGRTPKVYKQYEMVVK

SEQ ID NO: 63327 - protein, 40 aa, Artificial Sequence; identical to SEQ ID NO: 19197
  Cyclic GFR-binding peptide
  MOD_RES (4)..(5)..(37)..(39): Xaa is C or S

SEQ ID NO: 63328 - protein, 33 aa, Artificial Sequence; identical to SEQ ID NO: 19201
  Cyclic GFR-binding peptide
  MOD_RES (2)..(3): Xaa is C or S

SEQ ID NO: 63329 - protein, 41 aa, Artificial Sequence; identical to SEQ ID NO: 19204
  Cyclic GFR-binding peptide
  MOD_RES (5)..(6)..(38)..(40): Xaa is C or S

SEQ ID NO: 63330 - protein, 35 aa, Artificial Sequence
  Cyclic GFR-binding peptide
  MOD_RES (6)..(7): Xaa is C or S
ASASPXXVSQDLSPISILYIIGKTPKIYKQYEMIV

SEQ ID NO: 63331 - protein, 26 aa, Artificial Sequence
  Cyclic GFR-binding peptide
SQDLEPISILYLIGKTPKIKFKYEMI

SEQ ID NO: 63332 - protein, 28 aa, Artificial Sequence
  Cyclic GFR-binding peptide
  MOD_RES (28)..(28): Xaa is C or S
LEPISVLYLDDSSNVIKFKYENMVVRAX

SEQ ID NO: 63333 - protein, 36 aa, Artificial Sequence
  Cyclic GFR-binding peptide
  MOD_RES (6)..(7): Xaa is C or S
YVPKPXXAPTKLSPISVLYIDDSSNVIYKQYENMVV

SEQ ID NO: 63334 - protein, 37 aa, Artificial Sequence; identical to SEQ ID NO: 19208
  Cyclic GFR-binding peptide
  MOD_RES (1)..(2)..(34)..(36): Xaa is C or S

SEQ ID NO: 63335 - protein, 39 aa, Artificial Sequence; identical to SEQ ID NO: 19210
  Cyclic GFR-binding peptide
  MOD_RES (4)..(5)..(37)..(39): Xaa is C or S

SEQ ID NO: 63336 - protein, 23 aa, Artificial Sequence
  Cyclic GFR-binding peptide
EPISVLYLDDSSNVIKFKYENMV

SEQ ID NO: 63337 - protein, 29 aa, Artificial Sequence
  Cyclic GFR-binding peptide
  MOD_RES (1)..(2): Xaa is C or S
XXVPARLSPISILYKDAANNVVLKYHYDM

SEQ ID NO: 63338 - protein, 35 aa, Artificial Sequence
  Cyclic GFR-binding peptide
  MOD_RES (6)..(7): Xaa is C or S
KASKAXXVPTKLNAISILYFDKGVVTYLKKYRGMA

SEQ ID NO: 63339 - protein, 25 aa, Artificial Sequence
  Cyclic GFR-binding peptide
TKLSPISVLYIDDSSNVIYKQYENM

SEQ ID NO: 63340 - protein, 29 aa, Artificial Sequence
  Cyclic GFR-binding peptide
  MOD_RES (3)..(4): Xaa is C or S
APXXVPQALSPISILYIVGRKPKVYKQYE

SEQ ID NO: 63341 - protein, 28 aa, Artificial Sequence
  Cyclic GFR-binding peptide
TELEPISMLYLDENEKVVKFKYEDMVVE

SEQ ID NO: 63342 - protein, 37 aa, Artificial Sequence; identical to SEQ ID NO: 19213
  Cyclic GFR-binding peptide
  MOD_RES (3)..(4)..(36): Xaa is C or S

SEQ ID NO: 63343 - protein, 40 aa, Artificial Sequence; identical to SEQ ID NO: 19216
  Cyclic GFR-binding peptide
  MOD_RES (3)..(4)..(37)..(39): Xaa is C or S

SEQ ID NO: 63344 - protein, 33 aa, Artificial Sequence
  Cyclic GFR-binding peptide
  MOD_RES (5)..(5): Xaa is C or S
TKPTXAPTKLEPISVLYLDDSSNVIKFKYENMV

SEQ ID NO: 63345 - protein, 37 aa, Artificial Sequence; identical to SEQ ID NO: 19218
  Cyclic GFR-binding peptide
  MOD_RES (6)..(7): Xaa is C or S

SEQ ID NO: 63346 - protein, 31 aa, Artificial Sequence
  Cyclic GFR-binding peptide
  MOD_RES (3)..(4): Xaa is C or S
KAXXVPTELSPISMLYIDEYDKVVYKQYEEM

SEQ ID NO: 63347 - protein, 28 aa, Artificial Sequence
  Cyclic GFR-binding peptide
ARLNAISILYFDAANNVVLKKYRDMVVE

SEQ ID NO: 63348 - protein, 35 aa, Artificial Sequence
  Cyclic GFR-binding peptide
  MOD_RES (5)..(6): Xaa is C or S
ASKAXXVPTKLSPISILYIDKGVVTYYKQYEGMAV

SEQ ID NO: 63349 - protein, 32 aa, Artificial Sequence; identical to SEQ ID NO: 19225
  Cyclic GFR-binding peptide
  MOD_RES (1)..(32): Xaa is C or S

SEQ ID NO: 63350 - protein, 27 aa, Artificial Sequence
  Cyclic GFR-binding peptide
VPARLSPISILYKDAANNVVLKYHYDM

SEQ ID NO: 63351 - protein, 38 aa, Artificial Sequence; identical to SEQ ID NO: 19226
  Cyclic GFR-binding peptide
  MOD_RES (6)..(7): Xaa is C or S

SEQ ID NO: 63352 - protein, 30 aa, Artificial Sequence
  Cyclic GFR-binding peptide
  MOD_RES (4)..(4): Xaa is C or S
KPTXAPTKLSPISVLYIDDSSNVIYKQYEN

SEQ ID NO: 63353 - protein, 33 aa, Artificial Sequence; identical to SEQ ID NO: 19228
  Cyclic GFR-binding peptide
  MOD_RES (32)..(32): Xaa is C or S

SEQ ID NO: 63354 - protein, 31 aa, Artificial Sequence
  Cyclic GFR-binding peptide
  MOD_RES (30)..(30): Xaa is C or S
TKLEPISVLYLDSSNNVIKFKYENMVVKAXG

SEQ ID NO: 63355 - protein, 34 aa, Artificial Sequence; identical to SEQ ID NO: 19234
  Cyclic GFR-binding peptide
  MOD_RES (3)..(3): Xaa is C or S

SEQ ID NO: 63356 - protein, 27 aa, Artificial Sequence
  Cyclic GFR-binding peptide
  MOD_RES (26)..(26): Xaa is C or S
EPISILYLVGRKPKVKFKYEMIVRSXK

SEQ ID NO: 63357 - protein, 26 aa, Artificial Sequence
  Cyclic GFR-binding peptide
VPTELEPISMLYLDENEKVVKFKYED

SEQ ID NO: 63358 - protein, 34 aa, Artificial Sequence
  Cyclic GFR-binding peptide
  MOD_RES (6)..(7): Xaa is C or S
TVPKPXXAPTQLEPISVLYLDDSSNVIKFKYENM

SEQ ID NO: 63359 - protein, 29 aa, Artificial Sequence
  Cyclic GFR-binding peptide
  MOD_RES (2)..(3): Xaa is C or S
AXXVPTELSPISMLYIDENEKVVYKQYED

SEQ ID NO: 63360 - protein, 28 aa, Artificial Sequence
  Cyclic GFR-binding peptide
  MOD_RES (1)..(2): Xaa is C or S
XXVPARLNAISILYFDAANNVVLKKYRD

SEQ ID NO: 63361 - protein, 27 aa, Artificial Sequence
  Cyclic GFR-binding peptide
PQALEPISILYLVGRKPKVKFKYEMIV

SEQ ID NO: 63362 - protein, 32 aa, Artificial Sequence; identical to SEQ ID NO: 19242
  Cyclic GFR-binding peptide
  MOD_RES (31)..(31): Xaa is C or S

SEQ ID NO: 63363 - protein, 37 aa, Artificial Sequence; identical to SEQ ID NO: 19243
  Cyclic GFR-binding peptide
  MOD_RES (3)..(4)..(37): Xaa is C or S

SEQ ID NO: 63364 - protein, 26 aa, Artificial Sequence
  Cyclic GFR-binding peptide
PTKLSPISVLYIDDMGVPTYKQYEEG

SEQ ID NO: 63365 - protein, 21 aa, Artificial Sequence
  Cyclic GFR-binding peptide
LSPISVLYIDDSSNVIYKQYE

SEQ ID NO: 63366 - protein, 21 aa, Artificial Sequence
  Cyclic GFR-binding peptide
LSPISVLYIDDMGVPTYKQYE

SEQ ID NO: 63367 - protein, 35 aa, Artificial Sequence; identical to SEQ ID NO: 19244
  Cyclic GFR-binding peptide
  MOD_RES (1)..(2)..(34): Xaa is C or S

SEQ ID NO: 63368 - protein, 31 aa, Artificial Sequence
  Cyclic GFR-binding peptide
  MOD_RES (2)..(3): Xaa is C or S
AXXVPTKLSPISILYKDKGVVTYLKYHYGMA

SEQ ID NO: 63369 - protein, 31 aa, Artificial Sequence
  Cyclic GFR-binding peptide
  MOD_RES (3)..(4): Xaa is C or S
SPXXVSQDLSPISILYIIGKTPKIYKQYEMI

SEQ ID NO: 63370 - protein, 28 aa, Artificial Sequence
  Cyclic GFR-binding peptide
  MOD_RES (2)..(3): Xaa is C or S
AXXVPTELEPISMLYLDEYDKVVKFKYE

SEQ ID NO: 63371 - protein, 37 aa, Artificial Sequence; identical to SEQ ID NO: 19250
  Cyclic GFR-binding peptide
  MOD_RES (1)..(2)..(34)..(36): Xaa is C or S

SEQ ID NO: 63372 - protein, 35 aa, Artificial Sequence; identical to SEQ ID NO: 19251
  Cyclic GFR-binding peptide
  MOD_RES (1)..(33)..(35): Xaa is C or S

SEQ ID NO: 63373 - protein, 37 aa, Artificial Sequence; identical to SEQ ID NO: 19253
  Cyclic GFR-binding peptide
  MOD_RES (4)..(5)..(36): Xaa is C or S

SEQ ID NO: 63374 - protein, 34 aa, Artificial Sequence; identical to SEQ ID NO: 19255
  Cyclic GFR-binding peptide
  MOD_RES (1)..(32)..(34): Xaa is C or S

SEQ ID NO: 63375 - protein, 36 aa, Artificial Sequence
  Cyclic GFR-binding peptide
  MOD_RES (5)..(6): Xaa is C or S
VGKAXXVPTKLEPISVLYLDDMGVPTKFKYEEGMSV

SEQ ID NO: 63376 - protein, 28 aa, Artificial Sequence
  Cyclic GFR-binding peptide
  MOD_RES (27)..(27): Xaa is C or S
SPISVLYIDSSNNVIYKQYENMVVKAXG

SEQ ID NO: 63377 - protein, 36 aa, Artificial Sequence
  Cyclic GFR-binding peptide
  MOD_RES (6)..(7): Xaa is C or S
AAPASXXVPARLEPISILYLDAANNVVKFKYEDMVV

SEQ ID NO: 63378 - protein, 31 aa, Artificial Sequence
  Cyclic GFR-binding peptide
  MOD_RES (28)..(30): Xaa is C or S
DLSPISILYIVGRTPKVYKQYEMVVKSXKXS

SEQ ID NO: 63379 - protein, 32 aa, Artificial Sequence
  Cyclic GFR-binding peptide
  MOD_RES (4)..(5): Xaa is C or S
PKAXXAPTKLEPISVLYLDSSNNVIKFKYENM

SEQ ID NO: 63380 - protein, 28 aa, Artificial Sequence
  Cyclic GFR-binding peptide
VPARLSPISILYKDAANNVVLKYHYDMV

SEQ ID NO: 63381 - protein, 26 aa, Artificial Sequence
  Cyclic GFR-binding peptide
LSPISVLYIDDSSNVIYKQYENMVVR

SEQ ID NO: 63382 - protein, 34 aa, Artificial Sequence; identical to SEQ ID NO: 19266
  Cyclic GFR-binding peptide
  MOD_RES (1)..(32)..(34): Xaa is C or S

SEQ ID NO: 63383 - protein, 29 aa, Artificial Sequence
  Cyclic GFR-binding peptide
  MOD_RES (3)..(4): Xaa is C or S
KPXXAPTQLSPISVLYIDDSSNVIYKQYE

SEQ ID NO: 63384 - protein, 30 aa, Artificial Sequence
  Cyclic GFR-binding peptide
  MOD_RES (27)..(29): Xaa is C or S
SPISVLYIDSSNNVIYKQYENMVVKAXGXH

SEQ ID NO: 63385 - protein, 24 aa, Artificial Sequence
  Cyclic GFR-binding peptide
LSPISILYIIGKTPKIYKQYEMIV

SEQ ID NO: 63386 - protein, 32 aa, Artificial Sequence
  Cyclic GFR-binding peptide
  MOD_RES (3)..(4): Xaa is C or S
KPXXAPTQLEPISVLYLDDSSNVIKFKYENMV

SEQ ID NO: 63387 - protein, 29 aa, Artificial Sequence
  Cyclic GFR-binding peptide
SQDLEPISILYLIGKTPKIKFKYEMIVKS

SEQ ID NO: 63388 - protein, 33 aa, Artificial Sequence
  Cyclic GFR-binding peptide
  MOD_RES (3)..(4): Xaa is C or S
APXXVPQALSPISILYIVGRKPKVYKQYEMIVR

SEQ ID NO: 63389 - protein, 31 aa, Artificial Sequence; identical to SEQ ID NO: 19271
  Cyclic GFR-binding peptide
  MOD_RES (31)..(31): Xaa is C or S

SEQ ID NO: 63390 - protein, 33 aa, Artificial Sequence; identical to SEQ ID NO: 19272
  Cyclic GFR-binding peptide
  MOD_RES (31)..(33): Xaa is C or S

SEQ ID NO: 63391 - protein, 32 aa, Artificial Sequence
  Cyclic GFR-binding peptide
  MOD_RES (6)..(7): Xaa is C or S
KASKAXXVPTKLNAISILYFDKGVVTYLKKYR

SEQ ID NO: 63392 - protein, 31 aa, Artificial Sequence
  Cyclic GFR-binding peptide
  MOD_RES (3)..(4): Xaa is C or S
KPXXAPTKLEPISVLYLDDSSNVIKFKYENM

SEQ ID NO: 63393 - protein, 32 aa, Artificial Sequence
  Cyclic GFR-binding peptide
  MOD_RES (30)..(32): Xaa is C or S
TKLSPISVLYIDDSSNVIYKQYENMVVRSXGX

SEQ ID NO: 63394 - protein, 30 aa, Artificial Sequence
  Cyclic GFR-binding peptide
  MOD_RES (2)..(3): Xaa is C or S
AXXAPTKLSPISVLYIDSSNNVIYKQYENM

SEQ ID NO: 63395 - protein, 33 aa, Artificial Sequence
  Cyclic GFR-binding peptide
  MOD_RES (6)..(7): Xaa is C or S
ASAAPXXVPQALEPISILYLVGRKPKVKFKYEM

SEQ ID NO: 63396 - protein, 24 aa, Artificial Sequence
  Cyclic GFR-binding peptide
DLEPISILYLVGRTPKVKFKYEMV

SEQ ID NO: 63397 - protein, 33 aa, Artificial Sequence; identical to SEQ ID NO: 19281
  Cyclic GFR-binding peptide
  MOD_RES (31)..(33): Xaa is C or S

SEQ ID NO: 63398 - protein, 40 aa, Artificial Sequence; identical to SEQ ID NO: 19282
  Cyclic GFR-binding peptide
  MOD_RES (4)..(5)..(37)..(39): Xaa is C or S

SEQ ID NO: 63399 - protein, 33 aa, Artificial Sequence; identical to SEQ ID NO: 19283
  Cyclic GFR-binding peptide
  MOD_RES (2)..(2): Xaa is C or S

SEQ ID NO: 63400 - protein, 31 aa, Artificial Sequence
  Cyclic GFR-binding peptide
  MOD_RES (30)..(30): Xaa is C or S
ARLSPISILYKDAANNVVLKYHYDMVVEAXG

SEQ ID NO: 63401 - protein, 30 aa, Artificial Sequence
  Cyclic GFR-binding peptide
  MOD_RES (27)..(29): Xaa is C or S
EPISVLYLDSSNNVIKFKYENMVVKAXGXH

SEQ ID NO: 63402 - protein, 27 aa, Artificial Sequence
  Cyclic GFR-binding peptide
KLNAISILYFDKGVVTYLKKYRGMAVS

SEQ ID NO: 63403 - protein, 39 aa, Artificial Sequence; identical to SEQ ID NO: 19288
  Cyclic GFR-binding peptide
  MOD_RES (6)..(38): Xaa is C or S

SEQ ID NO: 63404 - protein, 28 aa, Artificial Sequence
  Cyclic GFR-binding peptide
VPQALEPISILYLVGRKPKVKFKYEMIV

SEQ ID NO: 63405 - protein, 33 aa, Artificial Sequence
  Cyclic GFR-binding peptide
  MOD_RES (30)..(32): Xaa is C or S
TKLNAISILYFDKGVVTYLKKYRGMAVSEXGXR

SEQ ID NO: 63406 - protein, 31 aa, Artificial Sequence
  Cyclic GFR-binding peptide
  MOD_RES (28)..(30): Xaa is C or S
LNAISILYFDAANNVVLKKYRDMVVEAXGXR

SEQ ID NO: 63407 - protein, 24 aa, Artificial Sequence
  Cyclic GFR-binding peptide
LSPISVLYIDDMGVPTYKQYEEGM

SEQ ID NO: 63408 - protein, 32 aa, Artificial Sequence
  Cyclic GFR-binding peptide
  MOD_RES (30)..(32): Xaa is C or S
SQDLSPISILYIIGKTPKIYKQYEMIVKSXKX

SEQ ID NO: 63409 - protein, 30 aa, Artificial Sequence
  Cyclic GFR-binding peptide
  MOD_RES (4)..(5): Xaa is C or S
PKPXXAPTQLSPISVLYIDDSSNVIYKQYE

SEQ ID NO: 63410 - protein, 25 aa, Artificial Sequence
  Cyclic GFR-binding peptide
LSPISVLYIDSSNNVIYKQYENMVV

SEQ ID NO: 63411 - protein, 29 aa, Artificial Sequence
  Cyclic GFR-binding peptide
  MOD_RES (29)..(29): Xaa is C or S
QLEPISVLYLDDSSNVIKFKYENMVVRAX

SEQ ID NO: 63412 - protein, 29 aa, Artificial Sequence
  Cyclic GFR-binding peptide
KLSPISVLYIDDMGVPTYKQYEEGMSVAE

SEQ ID NO: 63413 - protein, 29 aa, Artificial Sequence
  Cyclic GFR-binding peptide
  MOD_RES (27)..(29): Xaa is C or S
EPISVLYLDDSSNVIKFKYENMVVRAXGX

SEQ ID NO: 63414 - protein, 22 aa, Artificial Sequence
  Cyclic GFR-binding peptide
LEPISMLYLDEYDKVVKFKYEE

SEQ ID NO: 63415 - protein, 32 aa, Artificial Sequence
  Cyclic GFR-binding peptide
  MOD_RES (2)..(3): Xaa is C or S
AXXAPTKLSPISVLYIDSSNNVIYKQYENMVV

SEQ ID NO: 63416 - protein, 22 aa, Artificial Sequence
  Cyclic GFR-binding peptide
KLSPISVLYIDDMGVPTYKQYE

SEQ ID NO: 63417 - protein, 37 aa, Artificial Sequence; identical to SEQ ID NO: 19297
  Cyclic GFR-binding peptide
  MOD_RES (3)..(4)..(35)..(37): Xaa is C or S

SEQ ID NO: 63418 - protein, 31 aa, Artificial Sequence
  Cyclic GFR-binding peptide
  MOD_RES (30)..(30): Xaa is C or S
TELSPISMLYIDENEKVVYKQYEDMVVEGXG

SEQ ID NO: 63419 - protein, 30 aa, Artificial Sequence
  Cyclic GFR-binding peptide
  MOD_RES (28)..(30): Xaa is C or S
LSPISMLYIDEYDKVVYKQYEEMVVEGXGX

SEQ ID NO: 63420 - protein, 38 aa, Artificial Sequence; identical to SEQ ID NO: 19302
  Cyclic GFR-binding peptide
  MOD_RES (7)..(7): Xaa is C or S

SEQ ID NO: 63421 - protein, 33 aa, Artificial Sequence; identical to SEQ ID NO: 19304
  Cyclic GFR-binding peptide
  MOD_RES (1)..(2)..(33): Xaa is C or S

SEQ ID NO: 63422 - protein, 21 aa, Artificial Sequence
  Cyclic GFR-binding peptide
LSPISMLYIDENEKVVYKQYE

SEQ ID NO: 63423 - protein, 26 aa, Artificial Sequence
  Cyclic GFR-binding peptide
  MOD_RES (1)..(1): Xaa is C or S
XAPTKLSPISVLYIDDSSNVIYKQYE

SEQ ID NO: 63424 - protein, 32 aa, Artificial Sequence
  Cyclic GFR-binding peptide
  MOD_RES (4)..(4): Xaa is C or S
KPTXAPTKLSPISVLYIDDSSNVIYKQYENMV

SEQ ID NO: 63425 - protein, 35 aa, Artificial Sequence; identical to SEQ ID NO: 19310
  Cyclic GFR-binding peptide
  MOD_RES (2)..(3)..(34): Xaa is C or S

SEQ ID NO: 63426 - protein, 31 aa, Artificial Sequence
  Cyclic GFR-binding peptide
  MOD_RES (30)..(30): Xaa is C or S
TQLSPISVLYIDDSSNVIYKQYENMVVRAXG

SEQ ID NO: 63427 - protein, 31 aa, Artificial Sequence
  Cyclic GFR-binding peptide
  MOD_RES (5)..(6): Xaa is C or S
APASXXVPARLEPISILYLDAANNVVKFKYE

SEQ ID NO: 63428 - protein, 38 aa, Artificial Sequence; identical to SEQ ID NO: 19313
  Cyclic GFR-binding peptide
  MOD_RES (4)..(5)..(37): Xaa is C or S

SEQ ID NO: 63429 - protein, 30 aa, Artificial Sequence
  Cyclic GFR-binding peptide
  MOD_RES (1)..(2): Xaa is C or S
XXVPTELEPISMLYLDEYDKVVKFKYEEMV

SEQ ID NO: 63430 - protein, 30 aa, Artificial Sequence
  Cyclic GFR-binding peptide
  MOD_RES (1)..(2): Xaa is C or S
XXVPQDLSPISILYIVGRTPKVYKQYEMVV

SEQ ID NO: 63431 - protein, 38 aa, Artificial Sequence; identical to SEQ ID NO: 19315
  Cyclic GFR-binding peptide
  MOD_RES (6)..(7): Xaa is C or S

SEQ ID NO: 63432 - protein, 32 aa, Artificial Sequence; identical to SEQ ID NO: 19317
  Cyclic GFR-binding peptide
  MOD_RES (32)..(32): Xaa is C or S

SEQ ID NO: 63433 - protein, 31 aa, Artificial Sequence
  Cyclic GFR-binding peptide
  MOD_RES (1)..(2): Xaa is C or S
XXVPTELEPISMLYLDENEKVVKFKYEDMVV

SEQ ID NO: 63434 - protein, 34 aa, Artificial Sequence
  Cyclic GFR-binding peptide
  MOD_RES (32)..(34): Xaa is C or S
PTKLEPISVLYLDDMGVPTKFKYEEGMSVAEXGX

SEQ ID NO: 63435 - protein, 35 aa, Artificial Sequence; identical to SEQ ID NO: 19320
  Cyclic GFR-binding peptide
  MOD_RES (4)..(4): Xaa is C or S

SEQ ID NO: 63436 - protein, 31 aa, Artificial Sequence
  Cyclic GFR-binding peptide
  MOD_RES (3)..(4): Xaa is C or S
KAXXVPTKLNAISILYFDKGVVTYLKKYRGM

SEQ ID NO: 63437 - protein, 38 aa, Artificial Sequence; identical to SEQ ID NO: 19321
  Cyclic GFR-binding peptide
  MOD_RES (5)..(6)..(37): Xaa is C or S

SEQ ID NO: 63438 - protein, 28 aa, Artificial Sequence
  Cyclic GFR-binding peptide
KLSPISILYIDKGVVTYYKQYEGMAVSE

SEQ ID NO: 63439 - protein, 36 aa, Artificial Sequence; identical to SEQ ID NO: 19325
  Cyclic GFR-binding peptide
  MOD_RES (4)..(5): Xaa is C or S

SEQ ID NO: 63440 - protein, 29 aa, Artificial Sequence
  Cyclic GFR-binding peptide
APTKLEPISVLYLDDSSNVIKFKYENMVV

SEQ ID NO: 63441 - protein, 33 aa, Artificial Sequence
  Cyclic GFR-binding peptide
  MOD_RES (6)..(7): Xaa is C or S
KVGKAXXVPTKLEPISVLYLDDMGVPTKFKYEE

SEQ ID NO: 63442 - protein, 38 aa, Artificial Sequence; identical to SEQ ID NO: 19326
  Cyclic GFR-binding peptide
  MOD_RES (4)..(5)..(36)..(38): Xaa is C or S

SEQ ID NO: 63443 - protein, 29 aa, Artificial Sequence
  Cyclic GFR-binding peptide
  MOD_RES (1)..(1): Xaa is C or S
XVPARLNAISILYFDAANNVVLKKYRDMV

SEQ ID NO: 63444 - protein, 31 aa, Artificial Sequence
  Cyclic GFR-binding peptide
  MOD_RES (2)..(3): Xaa is C or S
SXXVPARLEPISILYLDAANNVVKFKYEDMV

SEQ ID NO: 63445 - protein, 29 aa, Artificial Sequence
  Cyclic GFR-binding peptide
PQALEPISILYLVGRKPKVKFKYEMIVRS

SEQ ID NO: 63446 - protein, 33 aa, Artificial Sequence
  Cyclic GFR-binding peptide
  MOD_RES (5)..(6): Xaa is C or S
SAAPXXVPQALSPISILYIVGRKPKVYKQYEMI

SEQ ID NO: 63447 - protein, 28 aa, Artificial Sequence
  Cyclic GFR-binding peptide
  MOD_RES (26)..(28): Xaa is C or S
EPISILYLIGKTPKIKFKYEMIVKSXKX

SEQ ID NO: 63448 - protein, 32 aa, Artificial Sequence
  Cyclic GFR-binding peptide
  MOD_RES (2)..(3): Xaa is C or S
PXXVPQALSPISILYIVGRKPKVYKQYEMIVR

SEQ ID NO: 63449 - protein, 24 aa, Artificial Sequence
  Cyclic GFR-binding peptide
KLSPISVLYIDDSSNVIYKQYENM

SEQ ID NO: 63450 - protein, 21 aa, Artificial Sequence
  Cyclic GFR-binding peptide
SPISILYIVGRTPKVYKQYEM

SEQ ID NO: 63451 - protein, 39 aa, Artificial Sequence; identical to SEQ ID NO: 19336
  Cyclic GFR-binding peptide
  MOD_RES (5)..(6)..(38): Xaa is C or S

SEQ ID NO: 63452 - protein, 27 aa, Artificial Sequence
  Cyclic GFR-binding peptide
  MOD_RES (1)..(1): Xaa is C or S
XVPTELEPISMLYLDENEKVVKFKYED

SEQ ID NO: 63453 - protein, 31 aa, Artificial Sequence
  Cyclic GFR-binding peptide
  MOD_RES (31)..(31): Xaa is C or S
PTQLEPISVLYLDDSSNVIKFKYENMVVRAX

SEQ ID NO: 63454 - protein, 39 aa, Artificial Sequence; identical to SEQ ID NO: 19341
  Cyclic GFR-binding peptide
  MOD_RES (4)..(5)..(36)..(38): Xaa is C or S

SEQ ID NO: 63455 - protein, 34 aa, Artificial Sequence
  Cyclic GFR-binding peptide
  MOD_RES (4)..(5): Xaa is C or S
PKAXXAPTKLEPISVLYLDSSNNVIKFKYENMVV

SEQ ID NO: 63456 - protein, 27 aa, Artificial Sequence
  Cyclic GFR-binding peptide
TKLSPISVLYIDSSNNVIYKQYENMVV

SEQ ID NO: 63457 - protein, 40 aa, Artificial Sequence; identical to SEQ ID NO: 19343
  Cyclic GFR-binding peptide
  MOD_RES (6)..(7)..(40): Xaa is C or S

SEQ ID NO: 63458 - protein, 34 aa, Artificial Sequence
  Cyclic GFR-binding peptide
  MOD_RES (5)..(5): Xaa is C or S
TKPTXAPTKLSPISVLYIDDSSNVIYKQYENMVV

SEQ ID NO: 63459 - protein, 24 aa, Artificial Sequence
  Cyclic GFR-binding peptide
PQALEPISILYLVGRKPKVKFKYE

SEQ ID NO: 63460 - protein, 32 aa, Artificial Sequence
  Cyclic GFR-binding peptide
  MOD_RES (5)..(6): Xaa is C or S
VPKPXXAPTKLSPISVLYIDDSSNVIYKQYEN

SEQ ID NO: 63461 - protein, 38 aa, Artificial Sequence; identical to SEQ ID NO: 19346
  Cyclic GFR-binding peptide
  MOD_RES (5)..(6)..(37): Xaa is C or S

SEQ ID NO: 63462 - protein, 37 aa, Artificial Sequence; identical to SEQ ID NO: 19347
  Cyclic GFR-binding peptide
  MOD_RES (6)..(7): Xaa is C or S

SEQ ID NO: 63463 - protein, 28 aa, Artificial Sequence
  Cyclic GFR-binding peptide
  MOD_RES (28)..(28): Xaa is C or S
LNAISILYFDKGVVTYLKKYRGMAVSEX

SEQ ID NO: 63464 - protein, 31 aa, Artificial Sequence; identical to SEQ ID NO: 19354
  Cyclic GFR-binding peptide

SEQ ID NO: 63465 - protein, 38 aa, Artificial Sequence; identical to SEQ ID NO: 19353
  Cyclic GFR-binding peptide
  MOD_RES (4)..(5)..(37): Xaa is C or S

SEQ ID NO: 63466 - protein, 25 aa, Artificial Sequence
  Cyclic GFR-binding peptide
PTELEPISMLYLDEYDKVVKFKYEE

SEQ ID NO: 63467 - protein, 40 aa, Artificial Sequence; identical to SEQ ID NO: 19356
  Cyclic GFR-binding peptide
  MOD_RES (5)..(6)..(37)..(39): Xaa is C or S

SEQ ID NO: 63468 - protein, 27 aa, Artificial Sequence
  Cyclic GFR-binding peptide
  MOD_RES (1)..(1): Xaa is C or S
XAPTQLSPISVLYIDDSSNVIYKQYEN

SEQ ID NO: 63469 - protein, 37 aa, Artificial Sequence; identical to SEQ ID NO: 19357
  Cyclic GFR-binding peptide
  MOD_RES (5)..(6): Xaa is C or S

SEQ ID NO: 63470 - protein, 30 aa, Artificial Sequence
  Cyclic GFR-binding peptide
  MOD_RES (1)..(1): Xaa is C or S
XVPTELSPISMLYIDEYDKVVYKQYEEMVV

SEQ ID NO: 63471 - protein, 31 aa, Artificial Sequence; identical to SEQ ID NO: 19359
  Cyclic GFR-binding peptide

SEQ ID NO: 63472 - protein, 38 aa, Artificial Sequence; identical to SEQ ID NO: 19361
  Cyclic GFR-binding peptide
  MOD_RES (6)..(7): Xaa is C or S

SEQ ID NO: 63473 - protein, 24 aa, Artificial Sequence
  Cyclic GFR-binding peptide
PTKLNAISILYFDKGVVTYLKKYR

SEQ ID NO: 63474 - protein, 38 aa, Artificial Sequence; identical to SEQ ID NO: 19364
  Cyclic GFR-binding peptide
  MOD_RES (3)..(4)..(36)..(38): Xaa is C or S

SEQ ID NO: 63475 - protein, 33 aa, Artificial Sequence
  Cyclic GFR-binding peptide
  MOD_RES (6)..(7): Xaa is C or S
KASKAXXVPTKLSPISILYIDKGVVTYYKQYEG

SEQ ID NO: 63476 - protein, 37 aa, Artificial Sequence; identical to SEQ ID NO: 19365
  Cyclic GFR-binding peptide
  MOD_RES (2)..(3)..(35)..(37): Xaa is C or S

SEQ ID NO: 63477 - protein, 40 aa, Artificial Sequence; identical to SEQ ID NO: 19367
  Cyclic GFR-binding peptide
  MOD_RES (5)..(6)..(38)..(40): Xaa is C or S

SEQ ID NO: 63478 - protein, 34 aa, Artificial Sequence
  Cyclic GFR-binding peptide
  MOD_RES (31)..(33): Xaa is C or S
PARLSPISILYKDAANNVVLKYHYDMVVEAXGXR

SEQ ID NO: 63479 - protein, 27 aa, Artificial Sequence
  Cyclic GFR-binding peptide
  MOD_RES (1)..(2): Xaa is C or S
XXVPARLNAISILYFDAANNVVLKKYR

SEQ ID NO: 63480 - protein, 42 aa, Artificial Sequence; identical to SEQ ID NO: 19368
  Cyclic GFR-binding peptide
  MOD_RES (6)..(7)..(39)..(41): Xaa is C or S

SEQ ID NO: 63481 - protein, 31 aa, Artificial Sequence; identical to SEQ ID NO: 19369
  Cyclic GFR-binding peptide
  MOD_RES (1)..(1): Xaa is C or S

SEQ ID NO: 63482 - protein, 27 aa, Artificial Sequence
  Cyclic GFR-binding peptide
  MOD_RES (1)..(2): Xaa is C or S
XXVPARLSPISILYKDAANNVVLKYHY

SEQ ID NO: 63483 - protein, 28 aa, Artificial Sequence
  Cyclic GFR-binding peptide
PTQLEPISVLYLDDSSNVIKFKYENMVV

SEQ ID NO: 63484 - protein, 22 aa, Artificial Sequence
  Cyclic GFR-binding peptide
SPISILYIDKGVVTYYKQYEGM

SEQ ID NO: 63485 - protein, 30 aa, Artificial Sequence
  Cyclic GFR-binding peptide
  MOD_RES (30)..(30): Xaa is C or S
TKLSPISILYKDKGVVTYLKYHYGMAVSEX

SEQ ID NO: 63486 - protein, 36 aa, Artificial Sequence; identical to SEQ ID NO: 19375
  Cyclic GFR-binding peptide
  MOD_RES (2)..(3)..(34)..(36): Xaa is C or S

SEQ ID NO: 63487 - protein, 30 aa, Artificial Sequence
  Cyclic GFR-binding peptide
PARLSPISILYKDAANNVVLKYHYDMVVEA

SEQ ID NO: 63488 - protein, 29 aa, Artificial Sequence
  Cyclic GFR-binding peptide
  MOD_RES (27)..(29): Xaa is C or S
NAISILYFDKGVVTYLKKYRGMAVSEXGX

SEQ ID NO: 63489 - protein, 28 aa, Artificial Sequence
  Cyclic GFR-binding peptide
TKLSPISILYKDKGVVTYLKYHYGMAVS

SEQ ID NO: 63490 - protein, 40 aa, Artificial Sequence; identical to SEQ ID NO: 19382
  Cyclic GFR-binding peptide
  MOD_RES (4)..(5)..(38)..(40): Xaa is C or S

SEQ ID NO: 63491 - protein, 33 aa, Artificial Sequence; identical to SEQ ID NO: 19387
  Cyclic GFR-binding peptide
  MOD_RES (1)..(33): Xaa is C or S

SEQ ID NO: 63492 - protein, 34 aa, Artificial Sequence; identical to SEQ ID NO: 19388
  Cyclic GFR-binding peptide
  MOD_RES (31)..(33): Xaa is C or S

SEQ ID NO: 63493 - protein, 21 aa, Artificial Sequence
  Cyclic GFR-binding peptide
EPISILYLDAANNVVKFKYED

SEQ ID NO: 63494 - protein, 33 aa, Artificial Sequence
  Cyclic GFR-binding peptide
  MOD_RES (5)..(6): Xaa is C or S
VGKAXXVPTKLSPISVLYIDDMGVPTYKQYEEG

SEQ ID NO: 63495 - protein, 29 aa, Artificial Sequence
  Cyclic GFR-binding peptide
VPTKLSPISILYKDKGVVTYLKYHYGMAV

SEQ ID NO: 63496 - protein, 38 aa, Artificial Sequence; identical to SEQ ID NO: 19395
  Cyclic GFR-binding peptide
  MOD_RES (5)..(37): Xaa is C or S

SEQ ID NO: 63497 - protein, 35 aa, Artificial Sequence; identical to SEQ ID NO: 21700
  Cyclic GFR-binding peptide
  MOD_RES (32)..(34): Xaa is C or S

SEQ ID NO: 63498 - protein, 32 aa, Artificial Sequence
  Cyclic GFR-binding peptide
  MOD_RES (4)..(5): Xaa is C or S
GKAXXVPTKLSPISVLYIDDMGVPTYKQYEEG

SEQ ID NO: 63499 - protein, 34 aa, Artificial Sequence; identical to SEQ ID NO: 19400
  Cyclic GFR-binding peptide
  MOD_RES (1)..(2)..(34): Xaa is C or S

SEQ ID NO: 63500 - protein, 34 aa, Artificial Sequence; identical to SEQ ID NO: 19403
  Cyclic GFR-binding peptide
  MOD_RES (2)..(3): Xaa is C or S

SEQ ID NO: 63501 - protein, 37 aa, Artificial Sequence; identical to SEQ ID NO: 19405
  Cyclic GFR-binding peptide
  MOD_RES (6)..(7): Xaa is C or S

SEQ ID NO: 63502 - protein, 25 aa, Artificial Sequence
  Cyclic GFR-binding peptide
KLEPISVLYLDDMGVPTKFKYEEGM

SEQ ID NO: 63503 - protein, 30 aa, Artificial Sequence
  Cyclic GFR-binding peptide
  MOD_RES (1)..(2): Xaa is C or S
XXVPTELSPISMLYIDENEKVVYKQYEDMV

SEQ ID NO: 63504 - protein, 24 aa, Artificial Sequence
  Cyclic GFR-binding peptide
TKLEPISVLYLDDMGVPTKFKYEE

SEQ ID NO: 63505 - protein, 28 aa, Artificial Sequence
  Cyclic GFR-binding peptide
  MOD_RES (1)..(2): Xaa is C or S
XXVPQALSPISILYIVGRKPKVYKQYEM

SEQ ID NO: 63506 - protein, 40 aa, Artificial Sequence; identical to SEQ ID NO: 19412
  Cyclic GFR-binding peptide
  MOD_RES (6)..(7)..(39): Xaa is C or S

SEQ ID NO: 63507 - protein, 29 aa, Artificial Sequence
  Cyclic GFR-binding peptide
  MOD_RES (3)..(3): Xaa is C or S
PTXAPTKLSPISVLYIDDSSNVIYKQYEN

SEQ ID NO: 63508 - protein, 24 aa, Artificial Sequence
  Cyclic GFR-binding peptide
TQLSPISVLYIDDSSNVIYKQYEN

SEQ ID NO: 63509 - protein, 34 aa, Artificial Sequence; identical to SEQ ID NO: 19415
  Cyclic GFR-binding peptide
  MOD_RES (1)..(2)..(34): Xaa is C or S

SEQ ID NO: 63510 - protein, 36 aa, Artificial Sequence
  Cyclic GFR-binding peptide
  MOD_RES (6)..(7): Xaa is C or S
ASASPXXVSQDLEPISILYLIGKTPKIKFKYEMIVK

SEQ ID NO: 63511 - protein, 35 aa, Artificial Sequence; identical to SEQ ID NO: 19418
  Cyclic GFR-binding peptide
  MOD_RES (32)..(34): Xaa is C or S

SEQ ID NO: 63512 - protein, 35 aa, Artificial Sequence
  Cyclic GFR-binding peptide
  MOD_RES (6)..(7): Xaa is C or S
KVGKAXXVPTKLSPISVLYIDDMGVPTYKQYEEGM

SEQ ID NO: 63513 - protein, 24 aa, Artificial Sequence
  Cyclic GFR-binding peptide
LEPISILYLVGRKPKVKFKYEMIV

SEQ ID NO: 63514 - protein, 35 aa, Artificial Sequence; identical to SEQ ID NO: 19424
  Cyclic GFR-binding peptide
  MOD_RES (1)..(33)..(35): Xaa is C or S

SEQ ID NO: 63515 - protein, 28 aa, Artificial Sequence
  Cyclic GFR-binding peptide
  MOD_RES (27)..(27): Xaa is C or S
NAISILYFDAANNVVLKKYRDMVVEAXG

SEQ ID NO: 63516 - protein, 26 aa, Artificial Sequence
  Cyclic GFR-binding peptide
LSPISVLYIDSSNNVIYKQYENMVVK

SEQ ID NO: 63517 - protein, 41 aa, Artificial Sequence; identical to SEQ ID NO: 19430
  Cyclic GFR-binding peptide
  MOD_RES (6)..(7)..(39)..(41): Xaa is C or S

SEQ ID NO: 63518 - protein, 27 aa, Artificial Sequence
  Cyclic GFR-binding peptide
KLEPISVLYLDDSSNVIKFKYENMVVR

SEQ ID NO: 63519 - protein, 39 aa, Artificial Sequence; identical to SEQ ID NO: 19446
  Cyclic GFR-binding peptide
  MOD_RES (6)..(7)..(38): Xaa is C or S

SEQ ID NO: 63520 - protein, 32 aa, Artificial Sequence
  Cyclic GFR-binding peptide
  MOD_RES (3)..(4): Xaa is C or S
SPXXVSQDLSPISILYIIGKTPKIYKQYEMIV

SEQ ID NO: 63521 - protein, 33 aa, Artificial Sequence
  Cyclic GFR-binding peptide
  MOD_RES (5)..(6): Xaa is C or S
ASKAXXVPTKLSPISILYIDKGVVTYYKQYEGM

SEQ ID NO: 63522 - protein, 35 aa, Artificial Sequence
  Cyclic GFR-binding peptide
  MOD_RES (6)..(7): Xaa is C or S
KIPKAXXVPTELSPISMLYIDENEKVVYKQYEDMV

SEQ ID NO: 63523 - protein, 30 aa, Artificial Sequence
  Cyclic GFR-binding peptide
  MOD_RES (1)..(2): Xaa is C or S
XXAPTKLSPISVLYIDSSNNVIYKQYENMV

SEQ ID NO: 63524 - protein, 36 aa, Artificial Sequence
  Cyclic GFR-binding peptide
  MOD_RES (7)..(7): Xaa is C or S
HVTKPTXAPTKLEPISVLYLDDSSNVIKFKYENMVV

SEQ ID NO: 63525 - protein, 39 aa, Artificial Sequence; identical to SEQ ID NO: 19450
  Cyclic GFR-binding peptide
  MOD_RES (6)..(7)..(39): Xaa is C or S

SEQ ID NO: 63526 - protein, 28 aa, Artificial Sequence
  Cyclic GFR-binding peptide
QDLSPISILYIIGKTPKIYKQYEMIVKS

SEQ ID NO: 63527 - protein, 33 aa, Artificial Sequence; identical to SEQ ID NO: 19455
  Cyclic GFR-binding peptide
  MOD_RES (31)..(33): Xaa is C or S

SEQ ID NO: 63528 - protein, 29 aa, Artificial Sequence
  Cyclic GFR-binding peptide
PTELEPISMLYLDEYDKVVKFKYEEMVVE

SEQ ID NO: 63529 - protein, 28 aa, Artificial Sequence
  Cyclic GFR-binding peptide
  MOD_RES (27)..(27): Xaa is C or S
SPISMLYIDEYDKVVYKQYEEMVVEGXG

SEQ ID NO: 63530 - protein, 32 aa, Artificial Sequence
  Cyclic GFR-binding peptide
  MOD_RES (30)..(32): Xaa is C or S
ARLSPISILYKDAANNVVLKYHYDMVVEAXGX

SEQ ID NO: 63531 - protein, 35 aa, Artificial Sequence; identical to SEQ ID NO: 19464
  Cyclic GFR-binding peptide
  MOD_RES (3)..(4): Xaa is C or S

SEQ ID NO: 63532 - protein, 28 aa, Artificial Sequence
  Cyclic GFR-binding peptide
  MOD_RES (1)..(2): Xaa is C or S
XXAPTKLSPISVLYIDDSSNVIYKQYEN

SEQ ID NO: 63533 - protein, 24 aa, Artificial Sequence
  Cyclic GFR-binding peptide
PARLNAISILYFDAANNVVLKKYR

SEQ ID NO: 63534 - protein, 27 aa, Artificial Sequence
  Cyclic GFR-binding peptide
TELEPISMLYLDEYDKVVKFKYEEMVV

SEQ ID NO: 63535 - protein, 27 aa, Artificial Sequence
  Cyclic GFR-binding peptide
TKLSPISVLYIDDSSNVIYKQYENMVV

SEQ ID NO: 63536 - protein, 23 aa, Artificial Sequence
  Cyclic GFR-binding peptide
KLSPISVLYIDSSNNVIYKQYEN

SEQ ID NO: 63537 - protein, 28 aa, Artificial Sequence
  Cyclic GFR-binding peptide
  MOD_RES (28)..(28): Xaa is C or S
LSPISVLYIDDSSNVIYKQYENMVVRAX

SEQ ID NO: 63538 - protein, 33 aa, Artificial Sequence
  Cyclic GFR-binding peptide
  MOD_RES (3)..(4): Xaa is C or S
APXXVPQALEPISILYLVGRKPKVKFKYEMIVR

SEQ ID NO: 63539 - protein, 38 aa, Artificial Sequence; identical to SEQ ID NO: 19474
  Cyclic GFR-binding peptide
  MOD_RES (6)..(7)..(38): Xaa is C or S

SEQ ID NO: 63540 - protein, 32 aa, Artificial Sequence
  Cyclic GFR-binding peptide
  MOD_RES (29)..(31): Xaa is C or S
QALEPISILYLVGRKPKVKFKYEMIVRSXKXS

SEQ ID NO: 63541 - protein, 32 aa, Artificial Sequence
  Cyclic GFR-binding peptide
  MOD_RES (2)..(3): Xaa is C or S
PXXVSQDLEPISILYLIGKTPKIKFKYEMIVK

SEQ ID NO: 63542 - protein, 33 aa, Artificial Sequence
  Cyclic GFR-binding peptide
  MOD_RES (6)..(7): Xaa is C or S
AVPKAXXAPTKLSPISVLYIDSSNNVIYKQYEN

SEQ ID NO: 63543 - protein, 35 aa, Artificial Sequence
  Cyclic GFR-binding peptide
  MOD_RES (5)..(6): Xaa is C or S
VPKPXXAPTKLEPISVLYLDDSSNVIKFKYENMVV

SEQ ID NO: 63544 - protein, 27 aa, Artificial Sequence
  Cyclic GFR-binding peptide
APTKLSPISVLYIDDSSNVIYKQYENM

SEQ ID NO: 63545 - protein, 23 aa, Artificial Sequence
  Cyclic GFR-binding peptide
QDLSPISILYIIGKTPKIYKQYE

SEQ ID NO: 63546 - protein, 35 aa, Artificial Sequence; identical to SEQ ID NO: 19479
  Cyclic GFR-binding peptide
  MOD_RES (2)..(3)..(34): Xaa is C or S

SEQ ID NO: 63547 - protein, 29 aa, Artificial Sequence
  Cyclic GFR-binding peptide
APTQLSPISVLYIDDSSNVIYKQYENMVV

SEQ ID NO: 63548 - protein, 31 aa, Artificial Sequence
  Cyclic GFR-binding peptide
  MOD_RES (31)..(31): Xaa is C or S
PTKLEPISVLYLDDSSNVIKFKYENMVVRSX

SEQ ID NO: 63549 - protein, 32 aa, Artificial Sequence
  Cyclic GFR-binding peptide
  MOD_RES (29)..(31): Xaa is C or S
RLSPISILYKDAANNVVLKYHYDMVVEAXGXR

SEQ ID NO: 63550 - protein, 30 aa, Artificial Sequence
  Cyclic GFR-binding peptide
  MOD_RES (3)..(4): Xaa is C or S
ASXXVPARLEPISILYLDAANNVVKFKYED

SEQ ID NO: 63551 - protein, 28 aa, Artificial Sequence
  Cyclic GFR-binding peptide
  MOD_RES (28)..(28): Xaa is C or S
ALEPISILYLVGRKPKVKFKYEMIVRSX

SEQ ID NO: 63552 - protein, 31 aa, Artificial Sequence
  Cyclic GFR-binding peptide
  MOD_RES (2)..(3): Xaa is C or S
PXXAPTKLEPISVLYLDDSSNVIKFKYENMV

SEQ ID NO: 63553 - protein, 24 aa, Artificial Sequence
  Cyclic GFR-binding peptide
KLSPISILYIDKGVVTYYKQYEGM

SEQ ID NO: 63554 - protein, 36 aa, Artificial Sequence; identical to SEQ ID NO: 19493
  Cyclic GFR-binding peptide
  MOD_RES (4)..(36): Xaa is C or S

SEQ ID NO: 63555 - protein, 38 aa, Artificial Sequence; identical to SEQ ID NO: 19497
  Cyclic GFR-binding peptide
  MOD_RES (5)..(6)..(38): Xaa is C or S

SEQ ID NO: 63556 - protein, 26 aa, Artificial Sequence
  Cyclic GFR-binding peptide
PTKLEPISVLYLDSSNNVIKFKYENM

SEQ ID NO: 63557 - protein, 28 aa, Artificial Sequence
  Cyclic GFR-binding peptide
PARLSPISILYKDAANNVVLKYHYDMVV

SEQ ID NO: 63558 - protein, 30 aa, Artificial Sequence
  Cyclic GFR-binding peptide
  MOD_RES (28)..(30): Xaa is C or S
LSPISVLYIDSSNNVIYKQYENMVVKAXGX

SEQ ID NO: 63559 - protein, 27 aa, Artificial Sequence
  Cyclic GFR-binding peptide
  MOD_RES (1)..(2): Xaa is C or S
XXVPTKLNAISILYFDKGVVTYLKKYR

SEQ ID NO: 63560 - protein, 37 aa, Artificial Sequence; identical to SEQ ID NO: 19501
  Cyclic GFR-binding peptide
  MOD_RES (1)..(2)..(34)..(36): Xaa is C or S

SEQ ID NO: 63561 - protein, 34 aa, Artificial Sequence; identical to SEQ ID NO: 19503
  Cyclic GFR-binding peptide
  MOD_RES (2)..(3): Xaa is C or S

SEQ ID NO: 63562 - protein, 27 aa, Artificial Sequence
  Cyclic GFR-binding peptide
  MOD_RES (1)..(1): Xaa is C or S
XVPARLSPISILYKDAANNVVLKYHYD

SEQ ID NO: 63563 - protein, 36 aa, Artificial Sequence; identical to SEQ ID NO: 19504
  Cyclic GFR-binding peptide
  MOD_RES (4)..(5)..(36): Xaa is C or S

SEQ ID NO: 63564 - protein, 37 aa, Artificial Sequence; identical to SEQ ID NO: 19506
  Cyclic GFR-binding peptide
  MOD_RES (1)..(2)..(34)..(36): Xaa is C or S

SEQ ID NO: 63565 - protein, 25 aa, Artificial Sequence
  Cyclic GFR-binding peptide
TKLSPISILYKDKGVVTYLKYHYGM

SEQ ID NO: 63566 - protein, 33 aa, Artificial Sequence
  Cyclic GFR-binding peptide
  MOD_RES (30)..(32): Xaa is C or S
KLEPISVLYLDDMGVPTKFKYEEGMSVAEXGXR

SEQ ID NO: 63567 - protein, 20 aa, Artificial Sequence
  Cyclic GFR-binding peptide
SPISMLYIDEYDKVVYKQYE

SEQ ID NO: 63568 - protein, 37 aa, Artificial Sequence; identical to SEQ ID NO: 19509
  Cyclic GFR-binding peptide
  MOD_RES (4)..(5): Xaa is C or S

SEQ ID NO: 63569 - protein, 33 aa, Artificial Sequence
  Cyclic GFR-binding peptide
  MOD_RES (5)..(6): Xaa is C or S
VGKAXXVPTKLEPISVLYLDDMGVPTKFKYEEG

SEQ ID NO: 63570 - protein, 31 aa, Artificial Sequence
  Cyclic GFR-binding peptide
  MOD_RES (31)..(31): Xaa is C or S
PARLEPISILYLDAANNVVKFKYEDMVVEAX

SEQ ID NO: 63571 - protein, 37 aa, Artificial Sequence; identical to SEQ ID NO: 19519
  Cyclic GFR-binding peptide
  MOD_RES (5)..(6): Xaa is C or S

SEQ ID NO: 63572 - protein, 28 aa, Artificial Sequence
  Cyclic GFR-binding peptide
  MOD_RES (2)..(3): Xaa is C or S
AXXAPTKLEPISVLYLDSSNNVIKFKYE

SEQ ID NO: 63573 - protein, 24 aa, Artificial Sequence
  Cyclic GFR-binding peptide
PTQLSPISVLYIDDSSNVIYKQYE

SEQ ID NO: 63574 - protein, 26 aa, Artificial Sequence
  Cyclic GFR-binding peptide
ARLEPISILYLDAANNVVKFKYEDMV

SEQ ID NO: 63575 - protein, 29 aa, Artificial Sequence
  Cyclic GFR-binding peptide
  MOD_RES (29)..(29): Xaa is C or S
ELEPISMLYLDEYDKVVKFKYEEMVVEGX

SEQ ID NO: 63576 - protein, 43 aa, Artificial Sequence; identical to SEQ ID NO: 19524
  Cyclic GFR-binding peptide
  MOD_RES (6)..(7)..(40)..(42): Xaa is C or S

SEQ ID NO: 63577 - protein, 34 aa, Artificial Sequence
  Cyclic GFR-binding peptide
  MOD_RES (5)..(6): Xaa is C or S
ASKAXXVPTKLSPISILYIDKGVVTYYKQYEGMA

SEQ ID NO: 63578 - protein, 21 aa, Artificial Sequence
  Cyclic GFR-binding peptide
SPISILYKDKGVVTYLKYHYG

SEQ ID NO: 63579 - protein, 28 aa, Artificial Sequence
  Cyclic GFR-binding peptide
  MOD_RES (27)..(27): Xaa is C or S
LSPISILYIVGRKPKVYKQYEMIVRSXK

SEQ ID NO: 63580 - protein, 32 aa, Artificial Sequence; identical to SEQ ID NO: 19529
  Cyclic GFR-binding peptide
  MOD_RES (32)..(32): Xaa is C or S

SEQ ID NO: 63581 - protein, 40 aa, Artificial Sequence; identical to SEQ ID NO: 19536
  Cyclic GFR-binding peptide
  MOD_RES (6)..(7)..(39): Xaa is C or S

SEQ ID NO: 63582 - protein, 32 aa, Artificial Sequence
  Cyclic GFR-binding peptide
  MOD_RES (29)..(31): Xaa is C or S
QALSPISILYIVGRKPKVYKQYEMIVRSXKXS

SEQ ID NO: 63583 - protein, 20 aa, Artificial Sequence
  Cyclic GFR-binding peptide
NAISILYFDKGVVTYLKKYR

SEQ ID NO: 63584 - protein, 35 aa, Artificial Sequence
  Cyclic GFR-binding peptide
  MOD_RES (5)..(6): Xaa is C or S
ASKAXXVPTKLSPISILYKDKGVVTYLKYHYGMAV

SEQ ID NO: 63585 - protein, 30 aa, Artificial Sequence
  Cyclic GFR-binding peptide
  MOD_RES (29)..(29): Xaa is C or S
KLSPISILYIDKGVVTYYKQYEGMAVSEXG

SEQ ID NO: 63586 - protein, 33 aa, Artificial Sequence
  Cyclic GFR-binding peptide
  MOD_RES (30)..(32): Xaa is C or S
PQDLSPISILYIVGRTPKVYKQYEMVVKSXKXS

SEQ ID NO: 63587 - protein, 26 aa, Artificial Sequence
  Cyclic GFR-binding peptide
KLSPISILYKDKGVVTYLKYHYGMAV

SEQ ID NO: 63588 - protein, 31 aa, Artificial Sequence
  Cyclic GFR-binding peptide
  MOD_RES (29)..(31): Xaa is C or S
KLNAISILYFDKGVVTYLKKYRGMAVSEXGX

SEQ ID NO: 63589 - protein, 34 aa, Artificial Sequence; identical to SEQ ID NO: 19541
  Cyclic GFR-binding peptide
  MOD_RES (31)..(33): Xaa is C or S

SEQ ID NO: 63590 - protein, 27 aa, Artificial Sequence
  Cyclic GFR-binding peptide
  MOD_RES (1)..(2): Xaa is C or S
XXVPTELSPISMLYIDEYDKVVYKQYE

SEQ ID NO: 63591 - protein, 30 aa, Artificial Sequence
  Cyclic GFR-binding peptide
  MOD_RES (4)..(5): Xaa is C or S
AAPXXVPQALSPISILYIVGRKPKVYKQYE

SEQ ID NO: 63592 - protein, 36 aa, Artificial Sequence; identical to SEQ ID NO: 19545
  Cyclic GFR-binding peptide
  MOD_RES (1)..(33)..(35): Xaa is C or S

SEQ ID NO: 63593 - protein, 20 aa, Artificial Sequence
  Cyclic GFR-binding peptide
NAISILYFDKGVVTYLKKYR

SEQ ID NO: 63594 - protein, 23 aa, Artificial Sequence
  Cyclic GFR-binding peptide
DLEPISILYLVGRTPKVKFKYEM

SEQ ID NO: 63595 - protein, 30 aa, Artificial Sequence
  Cyclic GFR-binding peptide
  MOD_RES (1)..(1): Xaa is C or S
XAPTKLEPISVLYLDDSSNVIKFKYENMVV

SEQ ID NO: 63596 - protein, 26 aa, Artificial Sequence
  Cyclic GFR-binding peptide
ALEPISILYLVGRKPKVKFKYEMIVR

SEQ ID NO: 63597 - protein, 31 aa, Artificial Sequence; identical to SEQ ID NO: 19548
  Cyclic GFR-binding peptide
  MOD_RES (1)..(1): Xaa is C or S

SEQ ID NO: 63598 - protein, 25 aa, Artificial Sequence
  Cyclic GFR-binding peptide
APTKLSPISVLYIDDSSNVIYKQYE

SEQ ID NO: 63599 - protein, 27 aa, Artificial Sequence
  Cyclic GFR-binding peptide
DLSPISILYIIGKTPKIYKQYEMIVKS

SEQ ID NO: 63600 - protein, 24 aa, Artificial Sequence
  Cyclic GFR-binding peptide
LSPISMLYIDENEKVVYKQYEDMV

SEQ ID NO: 63601 - protein, 37 aa, Artificial Sequence; identical to SEQ ID NO: 19553
  Cyclic GFR-binding peptide
  MOD_RES (5)..(6)..(37): Xaa is C or S

SEQ ID NO: 63602 - protein, 35 aa, Artificial Sequence
  Cyclic GFR-binding peptide
  MOD_RES (6)..(6): Xaa is C or S
VTKPTXAPTKLSPISVLYIDDSSNVIYKQYENMVV

SEQ ID NO: 63603 - protein, 23 aa, Artificial Sequence
  Cyclic GFR-binding peptide
TKLSPISILYKDKGVVTYLKYHY

SEQ ID NO: 63604 - protein, 41 aa, Artificial Sequence; identical to SEQ ID NO: 19562
  Cyclic GFR-binding peptide
  MOD_RES (6)..(7)..(39)..(41): Xaa is C or S

SEQ ID NO: 63605 - protein, 26 aa, Artificial Sequence
  Cyclic GFR-binding peptide
APTQLSPISVLYIDDSSNVIYKQYEN

SEQ ID NO: 63606 - protein, 31 aa, Artificial Sequence
  Cyclic GFR-binding peptide
  MOD_RES (4)..(5): Xaa is C or S
PKAXXVPTELEPISMLYLDENEKVVKFKYED

SEQ ID NO: 63607 - protein, 22 aa, Artificial Sequence
  Cyclic GFR-binding peptide
NAISILYFDAANNVVLKKYRDM

SEQ ID NO: 63608 - protein, 30 aa, Artificial Sequence
  Cyclic GFR-binding peptide
  MOD_RES (28)..(30): Xaa is C or S
LEPISVLYLDSSNNVIKFKYENMVVKAXGX

SEQ ID NO: 63609 - protein, 31 aa, Artificial Sequence
  Cyclic GFR-binding peptide
  MOD_RES (3)..(3): Xaa is C or S
PTXAPTKLEPISVLYLDDSSNVIKFKYENMV

SEQ ID NO: 63610 - protein, 30 aa, Artificial Sequence
  Cyclic GFR-binding peptide
  MOD_RES (1)..(1): Xaa is C or S
XVPTKLNAISILYFDKGVVTYLKKYRGMAV

SEQ ID NO: 63611 - protein, 30 aa, Artificial Sequence
  Cyclic GFR-binding peptide
  MOD_RES (29)..(29): Xaa is C or S
RLSPISILYKDAANNVVLKYHYDMVVEAXG

SEQ ID NO: 63612 - protein, 27 aa, Artificial Sequence
  Cyclic GFR-binding peptide
  MOD_RES (1)..(2): Xaa is C or S
XXVPTKLSPISILYKDKGVVTYLKYHY

SEQ ID NO: 63613 - protein, 31 aa, Artificial Sequence
  Cyclic GFR-binding peptide
  MOD_RES (4)..(5): Xaa is C or S
PASXXVPARLNAISILYFDAANNVVLKKYRD

SEQ ID NO: 63614 - protein, 39 aa, Artificial Sequence; identical to SEQ ID NO: 19574
  Cyclic GFR-binding peptide
  MOD_RES (5)..(6)..(39): Xaa is C or S

SEQ ID NO: 63615 - protein, 30 aa, Artificial Sequence
  Cyclic GFR-binding peptide
  MOD_RES (1)..(1): Xaa is C or S
XAPTQLSPISVLYIDDSSNVIYKQYENMVV

SEQ ID NO: 63616 - protein, 31 aa, Artificial Sequence
  Cyclic GFR-binding peptide
  MOD_RES (1)..(2): Xaa is C or S
XXVPTKLSPISILYKDKGVVTYLKYHYGMAV

SEQ ID NO: 63617 - protein, 30 aa, Artificial Sequence; identical to SEQ ID NO: 947
  Cyclic GFR-binding peptide

SEQ ID NO: 63618 - protein, 36 aa, Artificial Sequence; identical to SEQ ID NO: 19577
  Cyclic GFR-binding peptide
  MOD_RES (3)..(4)..(36): Xaa is C or S

SEQ ID NO: 63619 - protein, 37 aa, Artificial Sequence; identical to SEQ ID NO: 19578
  Cyclic GFR-binding peptide
  MOD_RES (2)..(3)..(35)..(37): Xaa is C or S

SEQ ID NO: 63620 - protein, 33 aa, Artificial Sequence
  Cyclic GFR-binding peptide
  MOD_RES (5)..(6): Xaa is C or S
SASPXXVSQDLSPISILYIIGKTPKIYKQYEMI

SEQ ID NO: 63621 - protein, 26 aa, Artificial Sequence
  Cyclic GFR-binding peptide
PTKLSPISVLYIDSSNNVIYKQYENM

SEQ ID NO: 63622 - protein, 20 aa, Artificial Sequence
  Cyclic GFR-binding peptide
SPISILYIDAANNVVYKQYE

SEQ ID NO: 63623 - protein, 36 aa, Artificial Sequence; identical to SEQ ID NO: 19581
  Cyclic GFR-binding peptide
  MOD_RES (1)..(2)..(35): Xaa is C or S

SEQ ID NO: 63624 - protein, 32 aa, Artificial Sequence
  Cyclic GFR-binding peptide
  MOD_RES (5)..(5): Xaa is C or S
TKPTXAPTKLSPISVLYIDDSSNVIYKQYENM

SEQ ID NO: 63625 - protein, 33 aa, Artificial Sequence
  Cyclic GFR-binding peptide
  MOD_RES (30)..(32): Xaa is C or S
TKLEPISVLYLDSSNNVIKFKYENMVVKAXGXH

SEQ ID NO: 63626 - protein, 31 aa, Artificial Sequence
  Cyclic GFR-binding peptide
  MOD_RES (30)..(30): Xaa is C or S
TKLEPISVLYLDDSSNVIKFKYENMVVRSXG

SEQ ID NO: 63627 - protein, 32 aa, Artificial Sequence; identical to SEQ ID NO: 19585
  Cyclic GFR-binding peptide
  MOD_RES (32)..(32): Xaa is C or S

SEQ ID NO: 63628 - protein, 27 aa, Artificial Sequence
  Cyclic GFR-binding peptide
  MOD_RES (1)..(1): Xaa is C or S
XVSQDLEPISILYLIGKTPKIKFKYEM

SEQ ID NO: 63629 - protein, 26 aa, Artificial Sequence
  Cyclic GFR-binding peptide
SPISMLYIDEYDKVVYKQYEEMVVEG

SEQ ID NO: 63630 - protein, 31 aa, Artificial Sequence
  Cyclic GFR-binding peptide
  MOD_RES (3)..(4): Xaa is C or S
KPXXAPTKLSPISVLYIDDSSNVIYKQYENM

SEQ ID NO: 63631 - protein, 21 aa, Artificial Sequence
  Cyclic GFR-binding peptide
LEPISVLYLDSSNNVIKFKYE

SEQ ID NO: 63632 - protein, 27 aa, Artificial Sequence
  Cyclic GFR-binding peptide
SQDLEPISILYLIGKTPKIKFKYEMIV

SEQ ID NO: 63633 - protein, 30 aa, Artificial Sequence
  Cyclic GFR-binding peptide
VPTKLEPISVLYLDDMGVPTKFKYEEGMSV

SEQ ID NO: 63634 - protein, 29 aa, Artificial Sequence
  Cyclic GFR-binding peptide
  MOD_RES (2)..(3): Xaa is C or S
PXXAPTQLSPISVLYIDDSSNVIYKQYEN

SEQ ID NO: 63635 - protein, 25 aa, Artificial Sequence
  Cyclic GFR-binding peptide
SPISILYIVGRKPKVYKQYEMIVRS

SEQ ID NO: 63636 - protein, 36 aa, Artificial Sequence; identical to SEQ ID NO: 19591
  Cyclic GFR-binding peptide
  MOD_RES (1)..(33)..(35): Xaa is C or S

SEQ ID NO: 63637 - protein, 37 aa, Artificial Sequence; identical to SEQ ID NO: 19594
  Cyclic GFR-binding peptide
  MOD_RES (5)..(6): Xaa is C or S

SEQ ID NO: 63638 - protein, 35 aa, Artificial Sequence; identical to SEQ ID NO: 19595
  Cyclic GFR-binding peptide
  MOD_RES (32)..(34): Xaa is C or S

SEQ ID NO: 63639 - protein, 32 aa, Artificial Sequence; identical to SEQ ID NO: 19596
  Cyclic GFR-binding peptide
  MOD_RES (1)..(2): Xaa is C or S

SEQ ID NO: 63640 - protein, 26 aa, Artificial Sequence
  Cyclic GFR-binding peptide
PTQLEPISVLYLDDSSNVIKFKYENM

SEQ ID NO: 63641 - protein, 39 aa, Artificial Sequence; identical to SEQ ID NO: 19597
  Cyclic GFR-binding peptide
  MOD_RES (4)..(5)..(37)..(39): Xaa is C or S

SEQ ID NO: 63642 - protein, 37 aa, Artificial Sequence; identical to SEQ ID NO: 19600
  Cyclic GFR-binding peptide
  MOD_RES (2)..(3)..(35)..(37): Xaa is C or S

SEQ ID NO: 63643 - protein, 33 aa, Artificial Sequence; identical to SEQ ID NO: 19601
  Cyclic GFR-binding peptide
  MOD_RES (3)..(3): Xaa is C or S

SEQ ID NO: 63644 - protein, 26 aa, Artificial Sequence
  Cyclic GFR-binding peptide
EPISMLYLDEYDKVVKFKYEEMVVEG

SEQ ID NO: 63645 - protein, 34 aa, Artificial Sequence
  Cyclic GFR-binding peptide
  MOD_RES (31)..(33): Xaa is C or S
PTELEPISMLYLDENEKVVKFKYEDMVVEGXGXR

SEQ ID NO: 63646 - protein, 24 aa, Artificial Sequence
  Cyclic GFR-binding peptide
PTELSPISMLYIDEYDKVVYKQYE

SEQ ID NO: 63647 - protein, 31 aa, Artificial Sequence
  Cyclic GFR-binding peptide
  MOD_RES (4)..(5): Xaa is C or S
PKAXXAPTKLEPISVLYLDSSNNVIKFKYEN

SEQ ID NO: 63648 - protein, 26 aa, Artificial Sequence
  Cyclic GFR-binding peptide
VPTELSPISMLYIDEYDKVVYKQYEE

SEQ ID NO: 63649 - protein, 20 aa, Artificial Sequence
  Cyclic GFR-binding peptide
SPISILYKDKGVVTYLKYHY

SEQ ID NO: 63650 - protein, 31 aa, Artificial Sequence
  Cyclic GFR-binding peptide
  MOD_RES (31)..(31): Xaa is C or S
PTELEPISMLYLDENEKVVKFKYEDMVVEGX

SEQ ID NO: 63651 - protein, 28 aa, Artificial Sequence
  Cyclic GFR-binding peptide
  MOD_RES (1)..(1): Xaa is C or S
XVPTELSPISMLYIDENEKVVYKQYEDM

SEQ ID NO: 63652 - protein, 22 aa, Artificial Sequence
  Cyclic GFR-binding peptide
DLEPISILYLVGRTPKVKFKYE

SEQ ID NO: 63653 - protein, 35 aa, Artificial Sequence
  Cyclic GFR-binding peptide
  MOD_RES (5)..(6): Xaa is C or S
VPKPXXAPTQLSPISVLYIDDSSNVIYKQYENMVV

SEQ ID NO: 63654 - protein, 24 aa, Artificial Sequence
  Cyclic GFR-binding peptide
LSPISILYIVGRTPKVYKQYEMVV

SEQ ID NO: 63655 - protein, 23 aa, Artificial Sequence
  Cyclic GFR-binding peptide
EPISMLYLDEYDKVVKFKYEEMV

SEQ ID NO: 63656 - protein, 38 aa, Artificial Sequence; identical to SEQ ID NO: 19613
  Cyclic GFR-binding peptide
  MOD_RES (2)..(3)..(35)..(37): Xaa is C or S

SEQ ID NO: 63657 - protein, 38 aa, Artificial Sequence; identical to SEQ ID NO: 19615
  Cyclic GFR-binding peptide
  MOD_RES (3)..(4)..(36)..(38): Xaa is C or S

SEQ ID NO: 63658 - protein, 33 aa, Artificial Sequence; identical to SEQ ID NO: 19617
  Cyclic GFR-binding peptide
  MOD_RES (2)..(3): Xaa is C or S

SEQ ID NO: 63659 - protein, 29 aa, Artificial Sequence
  Cyclic GFR-binding peptide
  MOD_RES (28)..(28): Xaa is C or S
LSPISMLYIDENEKVVYKQYEDMVVEGXG

SEQ ID NO: 63660 - protein, 34 aa, Artificial Sequence
  Cyclic GFR-binding peptide
  MOD_RES (6)..(6): Xaa is C or S
VTKPTXAPTKLEPISVLYLDDSSNVIKFKYENMV

SEQ ID NO: 63661 - protein, 28 aa, Artificial Sequence
  Cyclic GFR-binding peptide
  MOD_RES (27)..(27): Xaa is C or S
SPISVLYIDDSSNVIYKQYENMVVRAXG

SEQ ID NO: 63662 - protein, 36 aa, Artificial Sequence; identical to SEQ ID NO: 19620
  Cyclic GFR-binding peptide
  MOD_RES (1)..(33)..(35): Xaa is C or S

SEQ ID NO: 63663 - protein, 38 aa, Artificial Sequence; identical to SEQ ID NO: 19623
  Cyclic GFR-binding peptide
  MOD_RES (6)..(7): Xaa is C or S

SEQ ID NO: 63664 - protein, 26 aa, Artificial Sequence
  Cyclic GFR-binding peptide
VSQDLSPISILYIIGKTPKIYKQYEM

SEQ ID NO: 63665 - protein, 38 aa, Artificial Sequence; identical to SEQ ID NO: 19626
  Cyclic GFR-binding peptide
  MOD_RES (4)..(5)..(37): Xaa is C or S

SEQ ID NO: 63666 - protein, 27 aa, Artificial Sequence
  Cyclic GFR-binding peptide
LSPISMLYIDENEKVVYKQYEDMVVEG

SEQ ID NO: 63667 - protein, 32 aa, Artificial Sequence
  Cyclic GFR-binding peptide
  MOD_RES (4)..(5): Xaa is C or S
PKPXXAPTQLEPISVLYLDDSSNVIKFKYENM

SEQ ID NO: 63668 - protein, 31 aa, Artificial Sequence
  Cyclic GFR-binding peptide
  MOD_RES (3)..(4): Xaa is C or S
KAXXVPTELSPISMLYIDENEKVVYKQYEDM

SEQ ID NO: 63669 - protein, 21 aa, Artificial Sequence
  Cyclic GFR-binding peptide
LSPISILYKDAANNVVLKYHY

SEQ ID NO: 63670 - protein, 35 aa, Artificial Sequence
  Cyclic GFR-binding peptide
  MOD_RES (6)..(7): Xaa is C or S
ASASPXXVPQDLEPISILYLVGRTPKVKFKYEMVV

SEQ ID NO: 63671 - protein, 26 aa, Artificial Sequence
  Cyclic GFR-binding peptide
VPARLSPISILYKDAANNVVLKYHYD

SEQ ID NO: 63672 - protein, 28 aa, Artificial Sequence
  Cyclic GFR-binding peptide
KLSPISILYKDKGVVTYLKYHYGMAVSE

SEQ ID NO: 63673 - protein, 33 aa, Artificial Sequence; identical to SEQ ID NO: 19634
  Cyclic GFR-binding peptide
  MOD_RES (1)..(2): Xaa is C or S

SEQ ID NO: 63674 - protein, 29 aa, Artificial Sequence
  Cyclic GFR-binding peptide
  MOD_RES (29)..(29): Xaa is C or S
ELSPISMLYIDENEKVVYKQYEDMVVEGX

SEQ ID NO: 63675 - protein, 32 aa, Artificial Sequence; identical to SEQ ID NO: 19636
  Cyclic GFR-binding peptide
  MOD_RES (1)..(1): Xaa is C or S

SEQ ID NO: 63676 - protein, 29 aa, Artificial Sequence
  Cyclic GFR-binding peptide
  MOD_RES (29)..(29): Xaa is C or S
ELEPISMLYLDENEKVVKFKYEDMVVEGX

SEQ ID NO: 63677 - protein, 30 aa, Artificial Sequence; identical to SEQ ID NO: 953
  Cyclic GFR-binding peptide

SEQ ID NO: 63678 - protein, 34 aa, Artificial Sequence
  Cyclic GFR-binding peptide
  MOD_RES (31)..(33): Xaa is C or S
PTKLSPISILYIDKGVVTYYKQYEGMAVSEXGXR

SEQ ID NO: 63679 - protein, 24 aa, Artificial Sequence
  Cyclic GFR-binding peptide
SPISILYKDAANNVVLKYHYDMVV

SEQ ID NO: 63680 - protein, 32 aa, Artificial Sequence
  Cyclic GFR-binding peptide
  MOD_RES (1)..(2): Xaa is C or S
XXVPTKLSPISVLYIDDMGVPTYKQYEEGMSV

SEQ ID NO: 63681 - protein, 24 aa, Artificial Sequence
  Cyclic GFR-binding peptide
DLSPISILYIVGRTPKVYKQYEMV

SEQ ID NO: 63682 - protein, 33 aa, Artificial Sequence
  Cyclic GFR-binding peptide
  MOD_RES (6)..(6): Xaa is C or S
VTKPTXAPTKLSPISVLYIDDSSNVIYKQYENM

SEQ ID NO: 63683 - protein, 29 aa, Artificial Sequence
  Cyclic GFR-binding peptide
VPTKLNAISILYFDKGVVTYLKKYRGMAV

SEQ ID NO: 63684 - protein, 30 aa, Artificial Sequence
  Cyclic GFR-binding peptide
  MOD_RES (2)..(3): Xaa is C or S
PXXVPQDLEPISILYLVGRTPKVKFKYEMV

SEQ ID NO: 63685 - protein, 28 aa, Artificial Sequence
  Cyclic GFR-binding peptide
  MOD_RES (27)..(27): Xaa is C or S
LEPISILYLVGRKPKVKFKYEMIVRSXK

SEQ ID NO: 63686 - protein, 34 aa, Artificial Sequence
  Cyclic GFR-binding peptide
  MOD_RES (4)..(5): Xaa is C or S
PKAXXVPTELSPISMLYIDEYDKVVYKQYEEMVV

SEQ ID NO: 63687 - protein, 29 aa, Artificial Sequence
  Cyclic GFR-binding peptide
  MOD_RES (27)..(29): Xaa is C or S
EPISMLYLDENEKVVKFKYEDMVVEGXGX

SEQ ID NO: 63688 - protein, 30 aa, Artificial Sequence
  Cyclic GFR-binding peptide
  MOD_RES (1)..(1): Xaa is C or S
XVPTKLSPISILYIDKGVVTYYKQYEGMAV

SEQ ID NO: 63689 - protein, 38 aa, Artificial Sequence
  Cyclic GFR-binding peptide
  MOD_RES (6)..(7): Xaa is C or S
KVGKAXXVPTKLEPISVLYLDDMGVPTKFKYEEGMSVA

SEQ ID NO: 63690 - protein, 34 aa, Artificial Sequence
  Cyclic GFR-binding peptide
  MOD_RES (31)..(33): Xaa is C or S
PTQLEPISVLYLDDSSNVIKFKYENMVVRAXGXH

SEQ ID NO: 63691 - protein, 41 aa, Artificial Sequence; identical to SEQ ID NO: 19653
  Cyclic GFR-binding peptide
  MOD_RES (6)..(7)..(39)..(41): Xaa is C or S

SEQ ID NO: 63692 - protein, 26 aa, Artificial Sequence
  Cyclic GFR-binding peptide
LSPISVLYIDDMGVPTYKQYEEGMSV

SEQ ID NO: 63693 - protein, 27 aa, Artificial Sequence
  Cyclic GFR-binding peptide
  MOD_RES (27)..(27): Xaa is C or S
LEPISILYLVGRKPKVKFKYEMIVRSX

SEQ ID NO: 63694 - protein, 29 aa, Artificial Sequence
  Cyclic GFR-binding peptide
VPTKLSPISILYIDKGVVTYYKQYEGMAV

SEQ ID NO: 63695 - protein, 30 aa, Artificial Sequence
  Cyclic GFR-binding peptide
  MOD_RES (1)..(1): Xaa is C or S
XVPTKLSPISILYKDKGVVTYLKYHYGMAV

SEQ ID NO: 63696 - protein, 34 aa, Artificial Sequence; identical to SEQ ID NO: 19656
  Cyclic GFR-binding peptide
  MOD_RES (32)..(34): Xaa is C or S

SEQ ID NO: 63697 - protein, 31 aa, Artificial Sequence
  Cyclic GFR-binding peptide
  MOD_RES (1)..(2): Xaa is C or S
XXAPTQLSPISVLYIDDSSNVIYKQYENMVV

SEQ ID NO: 63698 - protein, 32 aa, Artificial Sequence; identical to SEQ ID NO: 19657
  Cyclic GFR-binding peptide
  MOD_RES (1)..(2): Xaa is C or S

SEQ ID NO: 63699 - protein, 32 aa, Artificial Sequence; identical to SEQ ID NO: 19658
  Cyclic GFR-binding peptide
  MOD_RES (1)..(1): Xaa is C or S

SEQ ID NO: 63700 - protein, 31 aa, Artificial Sequence
  Cyclic GFR-binding peptide
  MOD_RES (29)..(31): Xaa is C or S
RLSPISILYKDAANNVVLKYHYDMVVEAXGX

SEQ ID NO: 63701 - protein, 39 aa, Artificial Sequence; identical to SEQ ID NO: 19660
  Cyclic GFR-binding peptide
  MOD_RES (5)..(6)..(38): Xaa is C or S

SEQ ID NO: 63702 - protein, 31 aa, Artificial Sequence
  Cyclic GFR-binding peptide
  MOD_RES (30)..(30): Xaa is C or S
TELEPISMLYLDEYDKVVKFKYEEMVVEGXG

SEQ ID NO: 63703 - protein, 30 aa, Artificial Sequence
  Cyclic GFR-binding peptide
PTKLSPISVLYIDSSNNVIYKQYENMVVKA

SEQ ID NO: 63704 - protein, 24 aa, Artificial Sequence
  Cyclic GFR-binding peptide
SPISMLYIDEYDKVVYKQYEEMVV

SEQ ID NO: 63705 - protein, 36 aa, Artificial Sequence
  Cyclic GFR-binding peptide
  MOD_RES (5)..(6): Xaa is C or S
VGKAXXVPTKLSPISVLYIDDMGVPTYKQYEEGMSV

SEQ ID NO: 63706 - protein, 29 aa, Artificial Sequence
  Cyclic GFR-binding peptide
  MOD_RES (1)..(2): Xaa is C or S
XXVPTELSPISMLYIDENEKVVYKQYEDM

SEQ ID NO: 63707 - protein, 27 aa, Artificial Sequence
  Cyclic GFR-binding peptide
  MOD_RES (27)..(27): Xaa is C or S
EPISMLYLDEYDKVVKFKYEEMVVEGX

SEQ ID NO: 63708 - protein, 30 aa, Artificial Sequence; identical to SEQ ID NO: 19672
  Cyclic GFR-binding peptide

SEQ ID NO: 63709 - protein, 31 aa, Artificial Sequence; identical to SEQ ID NO: 19673
  Cyclic GFR-binding peptide

SEQ ID NO: 63710 - protein, 32 aa, Artificial Sequence
  Cyclic GFR-binding peptide
  MOD_RES (29)..(31): Xaa is C or S
KLNAISILYFDKGVVTYLKKYRGMAVSEXGXR

SEQ ID NO: 63711 - protein, 30 aa, Artificial Sequence
  Cyclic GFR-binding peptide
  MOD_RES (28)..(30): Xaa is C or S
LEPISMLYLDEYDKVVKFKYEEMVVEGXGX

SEQ ID NO: 63712 - protein, 30 aa, Artificial Sequence
  Cyclic GFR-binding peptide
  MOD_RES (30)..(30): Xaa is C or S
TELEPISMLYLDENEKVVKFKYEDMVVEGX

SEQ ID NO: 63713 - protein, 35 aa, Artificial Sequence; identical to SEQ ID NO: 19675
  Cyclic GFR-binding peptide
  MOD_RES (32)..(34): Xaa is C or S

SEQ ID NO: 63714 - protein, 29 aa, Artificial Sequence
  Cyclic GFR-binding peptide
  MOD_RES (28)..(28): Xaa is C or S
SPISVLYIDDMGVPTYKQYEEGMSVAEXG

SEQ ID NO: 63715 - protein, 20 aa, Artificial Sequence
  Cyclic GFR-binding peptide
EPISVLYLDDSSNVIKFKYE

SEQ ID NO: 63716 - protein, 25 aa, Artificial Sequence
  Cyclic GFR-binding peptide
TKLEPISVLYLDDSSNVIKFKYENM

SEQ ID NO: 63717 - protein, 34 aa, Artificial Sequence
  Cyclic GFR-binding peptide
  MOD_RES (5)..(6): Xaa is C or S
SASPXXVPQDLSPISILYIVGRTPKVYKQYEMVV

SEQ ID NO: 63718 - protein, 25 aa, Artificial Sequence
  Cyclic GFR-binding peptide
LEPISILYLVGRTPKVKFKYEMVVK

SEQ ID NO: 63719 - protein, 35 aa, Artificial Sequence; identical to SEQ ID NO: 19687
  Cyclic GFR-binding peptide
  MOD_RES (32)..(34): Xaa is C or S

SEQ ID NO: 63720 - protein, 33 aa, Artificial Sequence; identical to SEQ ID NO: 19691
  Cyclic GFR-binding peptide
  MOD_RES (1)..(2): Xaa is C or S

SEQ ID NO: 63721 - protein, 33 aa, Artificial Sequence; identical to SEQ ID NO: 19692
  Cyclic GFR-binding peptide
  MOD_RES (2)..(3): Xaa is C or S

SEQ ID NO: 63722 - protein, 36 aa, Artificial Sequence; identical to SEQ ID NO: 19696
  Cyclic GFR-binding peptide
  MOD_RES (5)..(6): Xaa is C or S

SEQ ID NO: 63723 - protein, 38 aa, Artificial Sequence
  Cyclic GFR-binding peptide
  MOD_RES (6)..(7): Xaa is C or S
KVGKAXXVPTKLSPISVLYIDDMGVPTYKQYEEGMSVA

SEQ ID NO: 63724 - protein, 28 aa, Artificial Sequence
  Cyclic GFR-binding peptide
  MOD_RES (2)..(3): Xaa is C or S
PXXAPTQLEPISVLYLDDSSNVIKFKYE

SEQ ID NO: 63725 - protein, 34 aa, Artificial Sequence
  Cyclic GFR-binding peptide
  MOD_RES (6)..(7): Xaa is C or S
KIPKAXXVPTELEPISMLYLDENEKVVKFKYEDM

SEQ ID NO: 63726 - protein, 37 aa, Artificial Sequence; identical to SEQ ID NO: 19702
  Cyclic GFR-binding peptide
  MOD_RES (4)..(5)..(37): Xaa is C or S

SEQ ID NO: 63727 - protein, 32 aa, Artificial Sequence
  Cyclic GFR-binding peptide
  MOD_RES (29)..(31): Xaa is C or S
ELSPISMLYIDEYDKVVYKQYEEMVVEGXGXR

SEQ ID NO: 63728 - protein, 29 aa, Artificial Sequence
  Cyclic GFR-binding peptide
  MOD_RES (1)..(1): Xaa is C or S
XVPQDLEPISILYLVGRTPKVKFKYEMVV

SEQ ID NO: 63729 - protein, 35 aa, Artificial Sequence; identical to SEQ ID NO: 19704
  Cyclic GFR-binding peptide
  MOD_RES (5)..(5): Xaa is C or S

SEQ ID NO: 63730 - protein, 37 aa, Artificial Sequence; identical to SEQ ID NO: 19705
  Cyclic GFR-binding peptide
  MOD_RES (3)..(4)..(36): Xaa is C or S

SEQ ID NO: 63731 - protein, 33 aa, Artificial Sequence; identical to SEQ ID NO: 19706
  Cyclic GFR-binding peptide
  MOD_RES (1)..(2): Xaa is C or S

SEQ ID NO: 63732 - protein, 27 aa, Artificial Sequence
  Cyclic GFR-binding peptide
VPTELEPISMLYLDEYDKVVKFKYEEM

SEQ ID NO: 63733 - protein, 30 aa, Artificial Sequence
  Cyclic GFR-binding peptide
  MOD_RES (29)..(29): Xaa is C or S
QALSPISILYIVGRKPKVYKQYEMIVRSXK

SEQ ID NO: 63734 - protein, 31 aa, Artificial Sequence
  Cyclic GFR-binding peptide
  MOD_RES (28)..(30): Xaa is C or S
DLEPISILYLVGRTPKVKFKYEMVVKSXKXS

SEQ ID NO: 63735 - protein, 36 aa, Artificial Sequence
  Cyclic GFR-binding peptide
  MOD_RES (6)..(7): Xaa is C or S
SIPKAXXVPTELEPISMLYLDEYDKVVKFKYEEMVV

SEQ ID NO: 63736 - protein, 32 aa, Artificial Sequence; identical to SEQ ID NO: 19710
  Cyclic GFR-binding peptide
  MOD_RES (32)..(32): Xaa is C or S

SEQ ID NO: 63737 - protein, 27 aa, Artificial Sequence
  Cyclic GFR-binding peptide
  MOD_RES (1)..(2): Xaa is C or S
XXVPQALEPISILYLVGRKPKVKFKYE

SEQ ID NO: 63738 - protein, 31 aa, Artificial Sequence
  Cyclic GFR-binding peptide
  MOD_RES (30)..(30): Xaa is C or S
TKLSPISVLYIDDSSNVIYKQYENMVVRSXG

SEQ ID NO: 63739 - protein, 28 aa, Artificial Sequence
  Cyclic GFR-binding peptide
  MOD_RES (2)..(3): Xaa is C or S
AXXVPTKLNAISILYFDKGVVTYLKKYR

SEQ ID NO: 63740 - protein, 23 aa, Artificial Sequence
  Cyclic GFR-binding peptide
LSPISMLYIDENEKVVYKQYEDM

SEQ ID NO: 63741 - protein, 26 aa, Artificial Sequence
  Cyclic GFR-binding peptide
KLNAISILYFDKGVVTYLKKYRGMAV

SEQ ID NO: 63742 - protein, 25 aa, Artificial Sequence
  Cyclic GFR-binding peptide
SPISVLYIDDSSNVIYKQYENMVVR

SEQ ID NO: 63743 - protein, 35 aa, Artificial Sequence; identical to SEQ ID NO: 19718
  Cyclic GFR-binding peptide
  MOD_RES (4)..(5): Xaa is C or S

SEQ ID NO: 63744 - protein, 25 aa, Artificial Sequence
  Cyclic GFR-binding peptide
TELEPISMLYLDEYDKVVKFKYEEM

SEQ ID NO: 63745 - protein, 20 aa, Artificial Sequence
  Cyclic GFR-binding peptide
SPISILYIVGRTPKVYKQYE

SEQ ID NO: 63746 - protein, 27 aa, Artificial Sequence
  Cyclic GFR-binding peptide
  MOD_RES (2)..(2): Xaa is C or S
TXAPTKLEPISVLYLDDSSNVIKFKYE

SEQ ID NO: 63747 - protein, 36 aa, Artificial Sequence; identical to SEQ ID NO: 19724
  Cyclic GFR-binding peptide
  MOD_RES (3)..(4)..(36): Xaa is C or S

SEQ ID NO: 63748 - protein, 32 aa, Artificial Sequence; identical to SEQ ID NO: 19727
  Cyclic GFR-binding peptide
  MOD_RES (32)..(32): Xaa is C or S

SEQ ID NO: 63749 - protein, 32 aa, Artificial Sequence
  Cyclic GFR-binding peptide
  MOD_RES (6)..(7): Xaa is C or S
KVGKAXXVPTKLEPISVLYLDDMGVPTKFKYE

SEQ ID NO: 63750 - protein, 25 aa, Artificial Sequence
  Cyclic GFR-binding peptide
SPISMLYIDENEKVVYKQYEDMVVE

SEQ ID NO: 63751 - protein, 30 aa, Artificial Sequence
  Cyclic GFR-binding peptide
  MOD_RES (3)..(4): Xaa is C or S
KAXXVPTKLEPISVLYLDDMGVPTKFKYEE

SEQ ID NO: 63752 - protein, 28 aa, Artificial Sequence
  Cyclic GFR-binding peptide
  MOD_RES (28)..(28): Xaa is C or S
LSPISVLYIDDSSNVIYKQYENMVVRSX

SEQ ID NO: 63753 - protein, 31 aa, Artificial Sequence
  Cyclic GFR-binding peptide
  MOD_RES (3)..(4): Xaa is C or S
KAXXVPTELEPISMLYLDEYDKVVKFKYEEM

SEQ ID NO: 63754 - protein, 34 aa, Artificial Sequence; identical to SEQ ID NO: 19731
  Cyclic GFR-binding peptide
  MOD_RES (32)..(34): Xaa is C or S

SEQ ID NO: 63755 - protein, 36 aa, Artificial Sequence; identical to SEQ ID NO: 19730
  Cyclic GFR-binding peptide
  MOD_RES (3)..(4)..(36): Xaa is C or S

SEQ ID NO: 63756 - protein, 33 aa, Artificial Sequence; identical to SEQ ID NO: 19733
  Cyclic GFR-binding peptide
  MOD_RES (1)..(32): Xaa is C or S

SEQ ID NO: 63757 - protein, 35 aa, Artificial Sequence; identical to SEQ ID NO: 19734
  Cyclic GFR-binding peptide
  MOD_RES (4)..(5): Xaa is C or S

SEQ ID NO: 63758 - protein, 25 aa, Artificial Sequence
  Cyclic GFR-binding peptide
LSPISVLYIDDSSNVIYKQYENMVV

SEQ ID NO: 63759 - protein, 39 aa, Artificial Sequence; identical to SEQ ID NO: 19737
  Cyclic GFR-binding peptide
  MOD_RES (6)..(7)..(39): Xaa is C or S

SEQ ID NO: 63760 - protein, 39 aa, Artificial Sequence; identical to SEQ ID NO: 19739
  Cyclic GFR-binding peptide
  MOD_RES (2)..(3)..(36)..(38): Xaa is C or S

SEQ ID NO: 63761 - protein, 34 aa, Artificial Sequence; identical to SEQ ID NO: 19742
  Cyclic GFR-binding peptide
  MOD_RES (1)..(2)..(34): Xaa is C or S

SEQ ID NO: 63762 - protein, 34 aa, Artificial Sequence; identical to SEQ ID NO: 19743
  Cyclic GFR-binding peptide
  MOD_RES (3)..(4): Xaa is C or S

SEQ ID NO: 63763 - protein, 31 aa, Artificial Sequence
  Cyclic GFR-binding peptide
  MOD_RES (31)..(31): Xaa is C or S
PTKLSPISVLYIDDSSNVIYKQYENMVVRSX

SEQ ID NO: 63764 - protein, 24 aa, Artificial Sequence
  Cyclic GFR-binding peptide
LEPISMLYLDEYDKVVKFKYEEMV

SEQ ID NO: 63765 - protein, 30 aa, Artificial Sequence
  Cyclic GFR-binding peptide
TKLEPISVLYLDDMGVPTKFKYEEGMSVAE

SEQ ID NO: 63766 - protein, 35 aa, Artificial Sequence
  Cyclic GFR-binding peptide
  MOD_RES (6)..(7): Xaa is C or S
TVPKPXXAPTQLEPISVLYLDDSSNVIKFKYENMV

SEQ ID NO: 63767 - protein, 30 aa, Artificial Sequence
  Cyclic GFR-binding peptide
  MOD_RES (4)..(5): Xaa is C or S
ASPXXVSQDLEPISILYLIGKTPKIKFKYE

SEQ ID NO: 63768 - protein, 30 aa, Artificial Sequence
  Cyclic GFR-binding peptide
  MOD_RES (2)..(3): Xaa is C or S
PXXVPQALSPISILYIVGRKPKVYKQYEMI

SEQ ID NO: 63769 - protein, 23 aa, Artificial Sequence
  Cyclic GFR-binding peptide
SPISILYIVGRTPKVYKQYEMVV

SEQ ID NO: 63770 - protein, 32 aa, Artificial Sequence
  Cyclic GFR-binding peptide
  MOD_RES (6)..(7): Xaa is C or S
AVPKAXXAPTKLSPISVLYIDSSNNVIYKQYE

SEQ ID NO: 63771 - protein, 31 aa, Artificial Sequence
  Cyclic GFR-binding peptide
  MOD_RES (5)..(6): Xaa is C or S
IPKAXXVPTELEPISMLYLDENEKVVKFKYE

SEQ ID NO: 63772 - protein, 29 aa, Artificial Sequence
  Cyclic GFR-binding peptide
  MOD_RES (29)..(29): Xaa is C or S
QDLSPISILYIIGKTPKIYKQYEMIVKSX

SEQ ID NO: 63773 - protein, 37 aa, Artificial Sequence; identical to SEQ ID NO: 19748
  Cyclic GFR-binding peptide
  MOD_RES (2)..(3)..(35)..(37): Xaa is C or S

SEQ ID NO: 63774 - protein, 33 aa, Artificial Sequence
  Cyclic GFR-binding peptide
  MOD_RES (5)..(6): Xaa is C or S
IPKAXXVPTELEPISMLYLDENEKVVKFKYEDM

SEQ ID NO: 63775 - protein, 37 aa, Artificial Sequence; identical to SEQ ID NO: 19751
  Cyclic GFR-binding peptide
  MOD_RES (2)..(3)..(34)..(36): Xaa is C or S

SEQ ID NO: 63776 - protein, 24 aa, Artificial Sequence
  Cyclic GFR-binding peptide
QALSPISILYIVGRKPKVYKQYEM

SEQ ID NO: 63777 - protein, 27 aa, Artificial Sequence
  Cyclic GFR-binding peptide
VPTELSPISMLYIDENEKVVYKQYEDM

SEQ ID NO: 63778 - protein, 25 aa, Artificial Sequence
  Cyclic GFR-binding peptide
RLNAISILYFDAANNVVLKKYRDMV

SEQ ID NO: 63779 - protein, 32 aa, Artificial Sequence
  Cyclic GFR-binding peptide
  MOD_RES (3)..(4): Xaa is C or S
KAXXVPTKLSPISVLYIDDMGVPTYKQYEEGM

SEQ ID NO: 63780 - protein, 29 aa, Artificial Sequence
  Cyclic GFR-binding peptide
VPTELSPISMLYIDEYDKVVYKQYEEMVV

SEQ ID NO: 63781 - protein, 36 aa, Artificial Sequence; identical to SEQ ID NO: 19757
  Cyclic GFR-binding peptide
  MOD_RES (4)..(5): Xaa is C or S

SEQ ID NO: 63782 - protein, 28 aa, Artificial Sequence
  Cyclic GFR-binding peptide
  MOD_RES (3)..(3): Xaa is C or S
PTXAPTKLSPISVLYIDDSSNVIYKQYE

SEQ ID NO: 63783 - protein, 31 aa, Artificial Sequence
  Cyclic GFR-binding peptide
  MOD_RES (5)..(6): Xaa is C or S
APASXXVPARLSPISILYKDAANNVVLKYHY

SEQ ID NO: 63784 - protein, 23 aa, Artificial Sequence
  Cyclic GFR-binding peptide
TKLSPISILYIDKGVVTYYKQYE

SEQ ID NO: 63785 - protein, 25 aa, Artificial Sequence
  Cyclic GFR-binding peptide
LEPISILYLVGRKPKVKFKYEMIVR

SEQ ID NO: 63786 - protein, 22 aa, Artificial Sequence
  Cyclic GFR-binding peptide
LEPISILYLVGRKPKVKFKYEM

SEQ ID NO: 63787 - protein, 33 aa, Artificial Sequence; identical to SEQ ID NO: 19765
  Cyclic GFR-binding peptide
  MOD_RES (1)..(33): Xaa is C or S

SEQ ID NO: 63788 - protein, 30 aa, Artificial Sequence
  Cyclic GFR-binding peptide
  MOD_RES (2)..(3): Xaa is C or S
AXXVPTKLEPISVLYLDDMGVPTKFKYEEG

SEQ ID NO: 63789 - protein, 31 aa, Artificial Sequence
  Cyclic GFR-binding peptide
  MOD_RES (28)..(30): Xaa is C or S
LSPISVLYIDDSSNVIYKQYENMVVRSXGXH

SEQ ID NO: 63790 - protein, 32 aa, Artificial Sequence; identical to SEQ ID NO: 19767
  Cyclic GFR-binding peptide
  MOD_RES (32)..(32): Xaa is C or S

SEQ ID NO: 63791 - protein, 31 aa, Artificial Sequence
  Cyclic GFR-binding peptide
  MOD_RES (31)..(31): Xaa is C or S
PTKLSPISILYKDKGVVTYLKYHYGMAVSEX

SEQ ID NO: 63792 - protein, 41 aa, Artificial Sequence; identical to SEQ ID NO: 19770
  Cyclic GFR-binding peptide
  MOD_RES (6)..(7)..(39)..(41): Xaa is C or S

SEQ ID NO: 63793 - protein, 32 aa, Artificial Sequence
  Cyclic GFR-binding peptide
  MOD_RES (6)..(7): Xaa is C or S
AAPASXXVPARLEPISILYLDAANNVVKFKYE

SEQ ID NO: 63794 - protein, 32 aa, Artificial Sequence
  Cyclic GFR-binding peptide
  MOD_RES (4)..(5): Xaa is C or S
PASXXVPARLEPISILYLDAANNVVKFKYEDM

SEQ ID NO: 63795 - protein, 40 aa, Artificial Sequence; identical to SEQ ID NO: 19775
  Cyclic GFR-binding peptide
  MOD_RES (4)..(5)..(37)..(39): Xaa is C or S

SEQ ID NO: 63796 - protein, 31 aa, Artificial Sequence
  Cyclic GFR-binding peptide
  MOD_RES (29)..(31): Xaa is C or S
KLSPISVLYIDDSSNVIYKQYENMVVRSXGX

SEQ ID NO: 63797 - protein, 33 aa, Artificial Sequence
  Cyclic GFR-binding peptide
  MOD_RES (32)..(32): Xaa is C or S
PTKLEPISVLYLDDMGVPTKFKYEEGMSVAEXG

SEQ ID NO: 63798 - protein, 33 aa, Artificial Sequence
  Cyclic GFR-binding peptide
  MOD_RES (6)..(7): Xaa is C or S
KASKAXXVPTKLNAISILYFDKGVVTYLKKYRG

SEQ ID NO: 63799 - protein, 39 aa, Artificial Sequence; identical to SEQ ID NO: 19780
  Cyclic GFR-binding peptide
  MOD_RES (4)..(5)..(37)..(39): Xaa is C or S

SEQ ID NO: 63800 - protein, 29 aa, Artificial Sequence
  Cyclic GFR-binding peptide
TELSPISMLYIDEYDKVVYKQYEEMVVEG

SEQ ID NO: 63801 - protein, 25 aa, Artificial Sequence
  Cyclic GFR-binding peptide
VPQALSPISILYIVGRKPKVYKQYE

SEQ ID NO: 63802 - protein, 27 aa, Artificial Sequence
  Cyclic GFR-binding peptide
  MOD_RES (1)..(1): Xaa is C or S
XVPTELSPISMLYIDEYDKVVYKQYEE

SEQ ID NO: 63803 - protein, 36 aa, Artificial Sequence; identical to SEQ ID NO: 19782
  Cyclic GFR-binding peptide
  MOD_RES (1)..(33)..(35): Xaa is C or S

SEQ ID NO: 63804 - protein, 30 aa, Artificial Sequence
  Cyclic GFR-binding peptide
  MOD_RES (2)..(3): Xaa is C or S
PXXVSQDLEPISILYLIGKTPKIKFKYEMI

SEQ ID NO: 63805 - protein, 34 aa, Artificial Sequence; identical to SEQ ID NO: 19784
  Cyclic GFR-binding peptide
  MOD_RES (1)..(33): Xaa is C or S

SEQ ID NO: 63806 - protein, 31 aa, Artificial Sequence
  Cyclic GFR-binding peptide
  MOD_RES (28)..(30): Xaa is C or S
LSPISMLYIDENEKVVYKQYEDMVVEGXGXR

SEQ ID NO: 63807 - protein, 27 aa, Artificial Sequence
  Cyclic GFR-binding peptide
LSPISMLYIDEYDKVVYKQYEEMVVEG

SEQ ID NO: 63808 - protein, 22 aa, Artificial Sequence
  Cyclic GFR-binding peptide
EPISMLYLDENEKVVKFKYEDM

SEQ ID NO: 63809 - protein, 32 aa, Artificial Sequence; identical to SEQ ID NO: 19787
  Cyclic GFR-binding peptide
  MOD_RES (2)..(2): Xaa is C or S

SEQ ID NO: 63810 - protein, 23 aa, Artificial Sequence
  Cyclic GFR-binding peptide
LEPISVLYLDDMGVPTKFKYEEG

SEQ ID NO: 63811 - protein, 41 aa, Artificial Sequence; identical to SEQ ID NO: 19793
  Cyclic GFR-binding peptide
  MOD_RES (6)..(7)..(38)..(40): Xaa is C or S

SEQ ID NO: 63812 - protein, 40 aa, Artificial Sequence; identical to SEQ ID NO: 19794
  Cyclic GFR-binding peptide
  MOD_RES (5)..(6)..(38)..(40): Xaa is C or S

SEQ ID NO: 63813 - protein, 25 aa, Artificial Sequence
  Cyclic GFR-binding peptide
QDLSPISILYIIGKTPKIYKQYEMI

SEQ ID NO: 63814 - protein, 34 aa, Artificial Sequence
  Cyclic GFR-binding peptide
  MOD_RES (6)..(7): Xaa is C or S
TVPKPXXAPTQLSPISVLYIDDSSNVIYKQYENM

SEQ ID NO: 63815 - protein, 32 aa, Artificial Sequence
  Cyclic GFR-binding peptide
  MOD_RES (3)..(3): Xaa is C or S
PTXAPTKLSPISVLYIDDSSNVIYKQYENMVV

SEQ ID NO: 63816 - protein, 26 aa, Artificial Sequence
  Cyclic GFR-binding peptide
KLSPISILYIDKGVVTYYKQYEGMAV

SEQ ID NO: 63817 - protein, 36 aa, Artificial Sequence; identical to SEQ ID NO: 19798
  Cyclic GFR-binding peptide
  MOD_RES (4)..(5): Xaa is C or S

SEQ ID NO: 63818 - protein, 32 aa, Artificial Sequence; identical to SEQ ID NO: 19799
  Cyclic GFR-binding peptide

SEQ ID NO: 63819 - protein, 31 aa, Artificial Sequence
  Cyclic GFR-binding peptide
  MOD_RES (1)..(2): Xaa is C or S
XXAPTKLEPISVLYLDDSSNVIKFKYENMVV

SEQ ID NO: 63820 - protein, 32 aa, Artificial Sequence
  Cyclic GFR-binding peptide
  MOD_RES (5)..(6): Xaa is C or S
IPKAXXVPTELSPISMLYIDEYDKVVYKQYEE

SEQ ID NO: 63821 - protein, 33 aa, Artificial Sequence; identical to SEQ ID NO: 19806
  Cyclic GFR-binding peptide
  MOD_RES (32)..(32): Xaa is C or S

SEQ ID NO: 63822 - protein, 27 aa, Artificial Sequence
  Cyclic GFR-binding peptide
PTKLNAISILYFDKGVVTYLKKYRGMA

SEQ ID NO: 63823 - protein, 31 aa, Artificial Sequence
  Cyclic GFR-binding peptide
  MOD_RES (28)..(30): Xaa is C or S
LEPISILYLDAANNVVKFKYEDMVVEAXGXR

SEQ ID NO: 63824 - protein, 27 aa, Artificial Sequence
  Cyclic GFR-binding peptide
VPTKLNAISILYFDKGVVTYLKKYRGM

SEQ ID NO: 63825 - protein, 28 aa, Artificial Sequence
  Cyclic GFR-binding peptide
PTKLEPISVLYLDDSSNVIKFKYENMVV

SEQ ID NO: 63826 - protein, 34 aa, Artificial Sequence; identical to SEQ ID NO: 19813
  Cyclic GFR-binding peptide
  MOD_RES (1)..(33): Xaa is C or S

SEQ ID NO: 63827 - protein, 23 aa, Artificial Sequence
  Cyclic GFR-binding peptide
LEPISMLYLDEYDKVVKFKYEEM

SEQ ID NO: 63828 - protein, 37 aa, Artificial Sequence; identical to SEQ ID NO: 19817
  Cyclic GFR-binding peptide
  MOD_RES (2)..(3)..(36): Xaa is C or S

SEQ ID NO: 63829 - protein, 35 aa, Artificial Sequence; identical to SEQ ID NO: 19819
  Cyclic GFR-binding peptide
  MOD_RES (3)..(4): Xaa is C or S

SEQ ID NO: 63830 - protein, 28 aa, Artificial Sequence
  Cyclic GFR-binding peptide
  MOD_RES (2)..(3): Xaa is C or S
AXXVPTELEPISMLYLDENEKVVKFKYE

SEQ ID NO: 63831 - protein, 27 aa, Artificial Sequence
  Cyclic GFR-binding peptide
PTKLSPISILYKDKGVVTYLKYHYGMA

SEQ ID NO: 63832 - protein, 35 aa, Artificial Sequence; identical to SEQ ID NO: 19824
  Cyclic GFR-binding peptide
  MOD_RES (32)..(34): Xaa is C or S

SEQ ID NO: 63833 - protein, 26 aa, Artificial Sequence
  Cyclic GFR-binding peptide
LEPISVLYLDSSNNVIKFKYENMVVK

SEQ ID NO: 63834 - protein, 29 aa, Artificial Sequence
  Cyclic GFR-binding peptide
  MOD_RES (1)..(2): Xaa is C or S
XXVPTKLNAISILYFDKGVVTYLKKYRGM

SEQ ID NO: 63835 - protein, 29 aa, Artificial Sequence
  Cyclic GFR-binding peptide
  MOD_RES (2)..(3): Xaa is C or S
SXXVPARLSPISILYKDAANNVVLKYHYD

SEQ ID NO: 63836 - protein, 24 aa, Artificial Sequence
  Cyclic GFR-binding peptide
LSPISVLYIDSSNNVIYKQYENMV

SEQ ID NO: 63837 - protein, 34 aa, Artificial Sequence; identical to SEQ ID NO: 19827
  Cyclic GFR-binding peptide
  MOD_RES (1)..(2)..(34): Xaa is C or S

SEQ ID NO: 63838 - protein, 35 aa, Artificial Sequence; identical to SEQ ID NO: 19828
  Cyclic GFR-binding peptide
  MOD_RES (2)..(3)..(34): Xaa is C or S

SEQ ID NO: 63839 - protein, 32 aa, Artificial Sequence
  Cyclic GFR-binding peptide
  MOD_RES (6)..(7): Xaa is C or S
ASASPXXVSQDLSPISILYIIGKTPKIYKQYE

SEQ ID NO: 63840 - protein, 29 aa, Artificial Sequence
  Cyclic GFR-binding peptide
  MOD_RES (1)..(1): Xaa is C or S
XAPTKLEPISVLYLDSSNNVIKFKYENMV

SEQ ID NO: 63841 - protein, 38 aa, Artificial Sequence; identical to SEQ ID NO: 19831
  Cyclic GFR-binding peptide
  MOD_RES (5)..(6)..(37): Xaa is C or S

SEQ ID NO: 63842 - protein, 31 aa, Artificial Sequence; identical to SEQ ID NO: 19832
  Cyclic GFR-binding peptide
  MOD_RES (1)..(1): Xaa is C or S

SEQ ID NO: 63843 - protein, 33 aa, Artificial Sequence; identical to SEQ ID NO: 19835
  Cyclic GFR-binding peptide
  MOD_RES (2)..(3): Xaa is C or S

SEQ ID NO: 63844 - protein, 30 aa, Artificial Sequence
  Cyclic GFR-binding peptide
  MOD_RES (27)..(29): Xaa is C or S
SPISVLYIDDSSNVIYKQYENMVVRAXGXH

SEQ ID NO: 63845 - protein, 26 aa, Artificial Sequence
  Cyclic GFR-binding peptide
TKLSPISVLYIDDSSNVIYKQYENMV

SEQ ID NO: 63846 - protein, 28 aa, Artificial Sequence
  Cyclic GFR-binding peptide
  MOD_RES (28)..(28): Xaa is C or S
LSPISILYKDAANNVVLKYHYDMVVEAX

SEQ ID NO: 63847 - protein, 28 aa, Artificial Sequence
  Cyclic GFR-binding peptide
APTQLSPISVLYIDDSSNVIYKQYENMV

SEQ ID NO: 63848 - protein, 35 aa, Artificial Sequence; identical to SEQ ID NO: 19838
  Cyclic GFR-binding peptide
  MOD_RES (1)..(2)..(35): Xaa is C or S

SEQ ID NO: 63849 - protein, 34 aa, Artificial Sequence; identical to SEQ ID NO: 19839
  Cyclic GFR-binding peptide
  MOD_RES (3)..(4): Xaa is C or S

SEQ ID NO: 63850 - protein, 26 aa, Artificial Sequence
  Cyclic GFR-binding peptide
PTKLSPISILYKDKGVVTYLKYHYGM

SEQ ID NO: 63851 - protein, 28 aa, Artificial Sequence
  Cyclic GFR-binding peptide
VSQDLSPISILYIIGKTPKIYKQYEMIV

SEQ ID NO: 63852 - protein, 30 aa, Artificial Sequence
  Cyclic GFR-binding peptide
  MOD_RES (4)..(5): Xaa is C or S
SKAXXVPTKLSPISILYIDKGVVTYYKQYE

SEQ ID NO: 63853 - protein, 34 aa, Artificial Sequence; identical to SEQ ID NO: 19843
  Cyclic GFR-binding peptide
  MOD_RES (3)..(4): Xaa is C or S

SEQ ID NO: 63854 - protein, 30 aa, Artificial Sequence
  Cyclic GFR-binding peptide
  MOD_RES (4)..(5): Xaa is C or S
PASXXVPARLSPISILYKDAANNVVLKYHY

SEQ ID NO: 63855 - protein, 39 aa, Artificial Sequence; identical to SEQ ID NO: 19850
  Cyclic GFR-binding peptide
  MOD_RES (6)..(7)..(39): Xaa is C or S

SEQ ID NO: 63856 - protein, 37 aa, Artificial Sequence; identical to SEQ ID NO: 19851
  Cyclic GFR-binding peptide
  MOD_RES (6)..(7): Xaa is C or S

SEQ ID NO: 63857 - protein, 26 aa, Artificial Sequence
  Cyclic GFR-binding peptide
  MOD_RES (26)..(26): Xaa is C or S
EPISILYLIGKTPKIKFKYEMIVKSX

SEQ ID NO: 63858 - protein, 39 aa, Artificial Sequence; identical to SEQ ID NO: 19855
  Cyclic GFR-binding peptide
  MOD_RES (6)..(7)..(39): Xaa is C or S

SEQ ID NO: 63859 - protein, 30 aa, Artificial Sequence
  Cyclic GFR-binding peptide
  MOD_RES (4)..(5): Xaa is C or S
PKAXXAPTKLSPISVLYIDSSNNVIYKQYE

SEQ ID NO: 63860 - protein, 33 aa, Artificial Sequence
  Cyclic GFR-binding peptide
  MOD_RES (3)..(4): Xaa is C or S
KAXXVPTELSPISMLYIDEYDKVVYKQYEEMVV

SEQ ID NO: 63861 - protein, 41 aa, Artificial Sequence; identical to SEQ ID NO: 19856
  Cyclic GFR-binding peptide
  MOD_RES (7)..(39)..(41): Xaa is C or S

SEQ ID NO: 63862 - protein, 38 aa, Artificial Sequence; identical to SEQ ID NO: 19857
  Cyclic GFR-binding peptide
  MOD_RES (3)..(4)..(36)..(38): Xaa is C or S

SEQ ID NO: 63863 - protein, 31 aa, Artificial Sequence
  Cyclic GFR-binding peptide
  MOD_RES (3)..(4): Xaa is C or S
APXXVPQALSPISILYIVGRKPKVYKQYEMI

SEQ ID NO: 63864 - protein, 22 aa, Artificial Sequence
  Cyclic GFR-binding peptide
ELEPISMLYLDEYDKVVKFKYE

SEQ ID NO: 63865 - protein, 34 aa, Artificial Sequence; identical to SEQ ID NO: 19865
  Cyclic GFR-binding peptide
  MOD_RES (31)..(33): Xaa is C or S

SEQ ID NO: 63866 - protein, 26 aa, Artificial Sequence
  Cyclic GFR-binding peptide
ELSPISMLYIDEYDKVVYKQYEEMVV

SEQ ID NO: 63867 - protein, 39 aa, Artificial Sequence; identical to SEQ ID NO: 19871
  Cyclic GFR-binding peptide
  MOD_RES (6)..(7)..(39): Xaa is C or S

SEQ ID NO: 63868 - protein, 27 aa, Artificial Sequence
  Cyclic GFR-binding peptide
QDLEPISILYLVGRTPKVKFKYEMVVK

SEQ ID NO: 63869 - protein, 42 aa, Artificial Sequence; identical to SEQ ID NO: 19876
  Cyclic GFR-binding peptide
  MOD_RES (6)..(7)..(39)..(41): Xaa is C or S

SEQ ID NO: 63870 - protein, 23 aa, Artificial Sequence
  Cyclic GFR-binding peptide
KLSPISILYIDKGVVTYYKQYEG

SEQ ID NO: 63871 - protein, 23 aa, Artificial Sequence
  Cyclic GFR-binding peptide
TKLSPISVLYIDDSSNVIYKQYE

SEQ ID NO: 63872 - protein, 29 aa, Artificial Sequence
  Cyclic GFR-binding peptide
  MOD_RES (29)..(29): Xaa is C or S
RLSPISILYKDAANNVVLKYHYDMVVEAX

SEQ ID NO: 63873 - protein, 29 aa, Artificial Sequence
  Cyclic GFR-binding peptide
  MOD_RES (1)..(1): Xaa is C or S
XVPTKLNAISILYFDKGVVTYLKKYRGMA

SEQ ID NO: 63874 - protein, 35 aa, Artificial Sequence; identical to SEQ ID NO: 19884
  Cyclic GFR-binding peptide
  MOD_RES (4)..(5): Xaa is C or S

SEQ ID NO: 63875 - protein, 33 aa, Artificial Sequence
  Cyclic GFR-binding peptide
  MOD_RES (31)..(33): Xaa is C or S
PTQLEPISVLYLDDSSNVIKFKYENMVVRAXGX

SEQ ID NO: 63876 - protein, 38 aa, Artificial Sequence; identical to SEQ ID NO: 19888
  Cyclic GFR-binding peptide
  MOD_RES (6)..(7): Xaa is C or S

SEQ ID NO: 63877 - protein, 36 aa, Artificial Sequence; identical to SEQ ID NO: 19891
  Cyclic GFR-binding peptide
  MOD_RES (2)..(3)..(34)..(36): Xaa is C or S

SEQ ID NO: 63878 - protein, 40 aa, Artificial Sequence; identical to SEQ ID NO: 19892
  Cyclic GFR-binding peptide
  MOD_RES (4)..(5)..(37)..(39): Xaa is C or S

SEQ ID NO: 63879 - protein, 34 aa, Artificial Sequence; identical to SEQ ID NO: 19893
  Cyclic GFR-binding peptide
  MOD_RES (1)..(33): Xaa is C or S

SEQ ID NO: 63880 - protein, 26 aa, Artificial Sequence
  Cyclic GFR-binding peptide
VPTKLSPISILYIDKGVVTYYKQYEG

SEQ ID NO: 63881 - protein, 27 aa, Artificial Sequence
  Cyclic GFR-binding peptide
ALSPISILYIVGRKPKVYKQYEMIVRS

SEQ ID NO: 63882 - protein, 34 aa, Artificial Sequence
  Cyclic GFR-binding peptide
  MOD_RES (4)..(5): Xaa is C or S
GKAXXVPTKLSPISVLYIDDMGVPTYKQYEEGMS

SEQ ID NO: 63883 - protein, 23 aa, Artificial Sequence
  Cyclic GFR-binding peptide
QDLEPISILYLVGRTPKVKFKYE

SEQ ID NO: 63884 - protein, 30 aa, Artificial Sequence
  Cyclic GFR-binding peptide
  MOD_RES (27)..(29): Xaa is C or S
SPISILYKDKGVVTYLKYHYGMAVSEXGXR

SEQ ID NO: 63885 - protein, 37 aa, Artificial Sequence; identical to SEQ ID NO: 19895
  Cyclic GFR-binding peptide
  MOD_RES (3)..(4)..(37): Xaa is C or S

SEQ ID NO: 63886 - protein, 26 aa, Artificial Sequence
  Cyclic GFR-binding peptide
TKLEPISVLYLDSSNNVIKFKYENMV

SEQ ID NO: 63887 - protein, 28 aa, Artificial Sequence
  Cyclic GFR-binding peptide
  MOD_RES (1)..(2): Xaa is C or S
XXVPTKLSPISILYKDKGVVTYLKYHYG

SEQ ID NO: 63888 - protein, 32 aa, Artificial Sequence
  Cyclic GFR-binding peptide
  MOD_RES (6)..(7): Xaa is C or S
ASASPXXVPQDLSPISILYIVGRTPKVYKQYE

SEQ ID NO: 63889 - protein, 30 aa, Artificial Sequence
  Cyclic GFR-binding peptide
  MOD_RES (28)..(30): Xaa is C or S
DLEPISILYLIGKTPKIKFKYEMIVKSXKX

SEQ ID NO: 63890 - protein, 31 aa, Artificial Sequence; identical to SEQ ID NO: 19901
  Cyclic GFR-binding peptide
  MOD_RES (1)..(1): Xaa is C or S

SEQ ID NO: 63891 - protein, 36 aa, Artificial Sequence; identical to SEQ ID NO: 19904
  Cyclic GFR-binding peptide
  MOD_RES (3)..(4)..(36): Xaa is C or S

SEQ ID NO: 63892 - protein, 36 aa, Artificial Sequence; identical to SEQ ID NO: 19905
  Cyclic GFR-binding peptide
  MOD_RES (5)..(6): Xaa is C or S

SEQ ID NO: 63893 - protein, 30 aa, Artificial Sequence
  Cyclic GFR-binding peptide
  MOD_RES (28)..(30): Xaa is C or S
DLSPISILYIVGRTPKVYKQYEMVVKSXKX

SEQ ID NO: 63894 - protein, 36 aa, Artificial Sequence; identical to SEQ ID NO: 19907
  Cyclic GFR-binding peptide
  MOD_RES (5)..(6): Xaa is C or S

SEQ ID NO: 63895 - protein, 27 aa, Artificial Sequence
  Cyclic GFR-binding peptide
ELEPISMLYLDEYDKVVKFKYEEMVVE

SEQ ID NO: 63896 - protein, 35 aa, Artificial Sequence; identical to SEQ ID NO: 19911
  Cyclic GFR-binding peptide
  MOD_RES (1)..(2)..(34): Xaa is C or S

SEQ ID NO: 63897 - protein, 28 aa, Artificial Sequence
  Cyclic GFR-binding peptide
TKLEPISVLYLDDSSNVIKFKYENMVVR

SEQ ID NO: 63898 - protein, 28 aa, Artificial Sequence
  Cyclic GFR-binding peptide
  MOD_RES (1)..(1): Xaa is C or S
XVPTKLEPISVLYLDDMGVPTKFKYEEG

SEQ ID NO: 63899 - protein, 39 aa, Artificial Sequence; identical to SEQ ID NO: 19912
  Cyclic GFR-binding peptide
  MOD_RES (4)..(5)..(37)..(39): Xaa is C or S

SEQ ID NO: 63900 - protein, 21 aa, Artificial Sequence
  Cyclic GFR-binding peptide
LEPISMLYLDEYDKVVKFKYE

SEQ ID NO: 63901 - protein, 35 aa, Artificial Sequence; identical to SEQ ID NO: 19915
  Cyclic GFR-binding peptide
  MOD_RES (1)..(2)..(34): Xaa is C or S

SEQ ID NO: 63902 - protein, 35 aa, Artificial Sequence; identical to SEQ ID NO: 19916
  Cyclic GFR-binding peptide
  MOD_RES (1)..(2)..(34): Xaa is C or S

SEQ ID NO: 63903 - protein, 33 aa, Artificial Sequence
  Cyclic GFR-binding peptide
  MOD_RES (5)..(6): Xaa is C or S
ASKAXXVPTKLNAISILYFDKGVVTYLKKYRGM

SEQ ID NO: 63904 - protein, 39 aa, Artificial Sequence; identical to SEQ ID NO: 19919
  Cyclic GFR-binding peptide
  MOD_RES (5)..(6)..(38): Xaa is C or S

SEQ ID NO: 63905 - protein, 31 aa, Artificial Sequence; identical to SEQ ID NO: 19921
  Cyclic GFR-binding peptide
  MOD_RES (1)..(1): Xaa is C or S

SEQ ID NO: 63906 - protein, 33 aa, Artificial Sequence
  Cyclic GFR-binding peptide
  MOD_RES (7)..(7): Xaa is C or S
HVTKPTXAPTKLSPISVLYIDDSSNVIYKQYEN

SEQ ID NO: 63907 - protein, 30 aa, Artificial Sequence
  Cyclic GFR-binding peptide
TKLSPISVLYIDDMGVPTYKQYEEGMSVAE

SEQ ID NO: 63908 - protein, 34 aa, Artificial Sequence; identical to SEQ ID NO: 19931
  Cyclic GFR-binding peptide
  MOD_RES (2)..(3): Xaa is C or S

SEQ ID NO: 63909 - protein, 36 aa, Artificial Sequence; identical to SEQ ID NO: 19933
  Cyclic GFR-binding peptide
  MOD_RES (2)..(3)..(35): Xaa is C or S

SEQ ID NO: 63910 - protein, 29 aa, Artificial Sequence
  Cyclic GFR-binding peptide
  MOD_RES (1)..(2): Xaa is C or S
XXVPQALSPISILYIVGRKPKVYKQYEMI

SEQ ID NO: 63911 - protein, 20 aa, Artificial Sequence
  Cyclic GFR-binding peptide
EPISILYLVGRKPKVKFKYE

SEQ ID NO: 63912 - protein, 29 aa, Artificial Sequence
  Cyclic GFR-binding peptide
  MOD_RES (1)..(1): Xaa is C or S
XVPTKLEPISVLYLDDMGVPTKFKYEEGM

SEQ ID NO: 63913 - protein, 25 aa, Artificial Sequence
  Cyclic GFR-binding peptide
ARLSPISILYKDAANNVVLKYHYDM

SEQ ID NO: 63914 - protein, 24 aa, Artificial Sequence
  Cyclic GFR-binding peptide
QALEPISILYLVGRKPKVKFKYEM

SEQ ID NO: 63915 - protein, 41 aa, Artificial Sequence; identical to SEQ ID NO: 19941
  Cyclic GFR-binding peptide
  MOD_RES (7)..(39)..(41): Xaa is C or S

SEQ ID NO: 63916 - protein, 34 aa, Artificial Sequence; identical to SEQ ID NO: 19947
  Cyclic GFR-binding peptide
  MOD_RES (2)..(3): Xaa is C or S

SEQ ID NO: 63917 - protein, 33 aa, Artificial Sequence
  Cyclic GFR-binding peptide
  MOD_RES (3)..(4): Xaa is C or S
ASXXVPARLNAISILYFDAANNVVLKKYRDMVV

SEQ ID NO: 63918 - protein, 37 aa, Artificial Sequence; identical to SEQ ID NO: 19949
  Cyclic GFR-binding peptide
  MOD_RES (2)..(3)..(35)..(37): Xaa is C or S

SEQ ID NO: 63919 - protein, 31 aa, Artificial Sequence
  Cyclic GFR-binding peptide
  MOD_RES (2)..(3): Xaa is C or S
AXXVPTKLEPISVLYLDDMGVPTKFKYEEGM

SEQ ID NO: 63920 - protein, 26 aa, Artificial Sequence
  Cyclic GFR-binding peptide
TELSPISMLYIDENEKVVYKQYEDMV

SEQ ID NO: 63921 - protein, 33 aa, Artificial Sequence; identical to SEQ ID NO: 19952
  Cyclic GFR-binding peptide
  MOD_RES (1)..(33): Xaa is C or S

SEQ ID NO: 63922 - protein, 29 aa, Artificial Sequence
  Cyclic GFR-binding peptide
  MOD_RES (1)..(1): Xaa is C or S
XVSQDLEPISILYLIGKTPKIKFKYEMIV

SEQ ID NO: 63923 - protein, 34 aa, Artificial Sequence
  Cyclic GFR-binding peptide
  MOD_RES (31)..(33): Xaa is C or S
PTKLSPISVLYIDDSSNVIYKQYENMVVRSXGXH

SEQ ID NO: 63924 - protein, 34 aa, Artificial Sequence; identical to SEQ ID NO: 19953
  Cyclic GFR-binding peptide
  MOD_RES (3)..(4): Xaa is C or S

SEQ ID NO: 63925 - protein, 39 aa, Artificial Sequence; identical to SEQ ID NO: 19957
  Cyclic GFR-binding peptide
  MOD_RES (5)..(6)..(37)..(39): Xaa is C or S

SEQ ID NO: 63926 - protein, 32 aa, Artificial Sequence
  Cyclic GFR-binding peptide
  MOD_RES (5)..(6): Xaa is C or S
SAAPXXVPQALEPISILYLVGRKPKVKFKYEM

SEQ ID NO: 63927 - protein, 36 aa, Artificial Sequence; identical to SEQ ID NO: 19960
  Cyclic GFR-binding peptide
  MOD_RES (3)..(4)..(36): Xaa is C or S

SEQ ID NO: 63928 - protein, 29 aa, Artificial Sequence
  Cyclic GFR-binding peptide
PTKLSPISVLYIDDMGVPTYKQYEEGMSV

SEQ ID NO: 63929 - protein, 27 aa, Artificial Sequence
  Cyclic GFR-binding peptide
VPTKLSPISILYIDKGVVTYYKQYEGM

SEQ ID NO: 63930 - protein, 25 aa, Artificial Sequence
  Cyclic GFR-binding peptide
DLSPISILYIIGKTPKIYKQYEMIV

SEQ ID NO: 63931 - protein, 32 aa, Artificial Sequence; identical to SEQ ID NO: 19963
  Cyclic GFR-binding peptide
  MOD_RES (32)..(32): Xaa is C or S

SEQ ID NO: 63932 - protein, 25 aa, Artificial Sequence
  Cyclic GFR-binding peptide
VPTKLSPISILYKDKGVVTYLKYHY

SEQ ID NO: 63933 - protein, 34 aa, Artificial Sequence; identical to SEQ ID NO: 19968
  Cyclic GFR-binding peptide
  MOD_RES (1)..(2): Xaa is C or S

SEQ ID NO: 63934 - protein, 29 aa, Artificial Sequence
  Cyclic GFR-binding peptide
  MOD_RES (26)..(28): Xaa is C or S
EPISILYLVGRKPKVKFKYEMIVRSXKXS

SEQ ID NO: 63935 - protein, 25 aa, Artificial Sequence
  Cyclic GFR-binding peptide
PTKLNAISILYFDKGVVTYLKKYRG

SEQ ID NO: 63936 - protein, 38 aa, Artificial Sequence; identical to SEQ ID NO: 19971
  Cyclic GFR-binding peptide
  MOD_RES (4)..(36)..(38): Xaa is C or S

SEQ ID NO: 63937 - protein, 31 aa, Artificial Sequence; identical to SEQ ID NO: 19972
  Cyclic GFR-binding peptide

SEQ ID NO: 63938 - protein, 28 aa, Artificial Sequence
  Cyclic GFR-binding peptide
  MOD_RES (2)..(3): Xaa is C or S
PXXVSQDLEPISILYLIGKTPKIKFKYE

SEQ ID NO: 63939 - protein, 30 aa, Artificial Sequence
  Cyclic GFR-binding peptide
  MOD_RES (30)..(30): Xaa is C or S
TQLEPISVLYLDDSSNVIKFKYENMVVRAX

SEQ ID NO: 63940 - protein, 28 aa, Artificial Sequence
  Cyclic GFR-binding peptide
PTKLEPISVLYLDSSNNVIKFKYENMVV

SEQ ID NO: 63941 - protein, 38 aa, Artificial Sequence; identical to SEQ ID NO: 19976
  Cyclic GFR-binding peptide
  MOD_RES (6)..(7): Xaa is C or S

SEQ ID NO: 63942 - protein, 32 aa, Artificial Sequence
  Cyclic GFR-binding peptide
  MOD_RES (29)..(31): Xaa is C or S
KLSPISILYKDKGVVTYLKYHYGMAVSEXGXR

SEQ ID NO: 63943 - protein, 35 aa, Artificial Sequence; identical to SEQ ID NO: 19977
  Cyclic GFR-binding peptide
  MOD_RES (4)..(5): Xaa is C or S

SEQ ID NO: 63944 - protein, 25 aa, Artificial Sequence
  Cyclic GFR-binding peptide
TKLSPISVLYIDDMGVPTYKQYEEG

SEQ ID NO: 63945 - protein, 31 aa, Artificial Sequence
  Cyclic GFR-binding peptide
  MOD_RES (30)..(30): Xaa is C or S
ARLEPISILYLDAANNVVKFKYEDMVVEAXG

SEQ ID NO: 63946 - protein, 33 aa, Artificial Sequence
  Cyclic GFR-binding peptide
  MOD_RES (6)..(7): Xaa is C or S
AAPASXXVPARLSPISILYKDAANNVVLKYHYD

SEQ ID NO: 63947 - protein, 31 aa, Artificial Sequence; identical to SEQ ID NO: 19981
  Cyclic GFR-binding peptide

SEQ ID NO: 63948 - protein, 38 aa, Artificial Sequence; identical to SEQ ID NO: 19986
  Cyclic GFR-binding peptide
  MOD_RES (4)..(5)..(37): Xaa is C or S

SEQ ID NO: 63949 - protein, 40 aa, Artificial Sequence; identical to SEQ ID NO: 19987
  Cyclic GFR-binding peptide
  MOD_RES (6)..(7)..(39): Xaa is C or S

SEQ ID NO: 63950 - protein, 29 aa, Artificial Sequence
  Cyclic GFR-binding peptide
  MOD_RES (3)..(4): Xaa is C or S
ASXXVPARLSPISILYKDAANNVVLKYHY

SEQ ID NO: 63951 - protein, 24 aa, Artificial Sequence
  Cyclic GFR-binding peptide
RLNAISILYFDAANNVVLKKYRDM

SEQ ID NO: 63952 - protein, 37 aa, Artificial Sequence; identical to SEQ ID NO: 19990
  Cyclic GFR-binding peptide
  MOD_RES (3)..(4)..(36): Xaa is C or S

SEQ ID NO: 63953 - protein, 26 aa, Artificial Sequence
  Cyclic GFR-binding peptide
  MOD_RES (1)..(1): Xaa is C or S
XVPARLSPISILYKDAANNVVLKYHY

SEQ ID NO: 63954 - protein, 29 aa, Artificial Sequence
  Cyclic GFR-binding peptide
  MOD_RES (27)..(29): Xaa is C or S
SPISMLYIDENEKVVYKQYEDMVVEGXGX

SEQ ID NO: 63955 - protein, 28 aa, Artificial Sequence
  Cyclic GFR-binding peptide
  MOD_RES (1)..(1): Xaa is C or S
XVPQALSPISILYIVGRKPKVYKQYEMI

SEQ ID NO: 63956 - protein, 37 aa, Artificial Sequence; identical to SEQ ID NO: 19999
  Cyclic GFR-binding peptide
  MOD_RES (6)..(7): Xaa is C or S

SEQ ID NO: 63957 - protein, 32 aa, Artificial Sequence
  Cyclic GFR-binding peptide
  MOD_RES (2)..(3): Xaa is C or S
AXXVPTKLSPISILYIDKGVVTYYKQYEGMAV

SEQ ID NO: 63958 - protein, 39 aa, Artificial Sequence; identical to SEQ ID NO: 20004
  Cyclic GFR-binding peptide
  MOD_RES (5)..(6)..(38): Xaa is C or S

SEQ ID NO: 63959 - protein, 31 aa, Artificial Sequence
  Cyclic GFR-binding peptide
  MOD_RES (5)..(5): Xaa is C or S
TKPTXAPTKLEPISVLYLDDSSNVIKFKYEN

SEQ ID NO: 63960 - protein, 27 aa, Artificial Sequence
  Cyclic GFR-binding peptide
  MOD_RES (1)..(2): Xaa is C or S
XXAPTKLEPISVLYLDSSNNVIKFKYE

SEQ ID NO: 63961 - protein, 35 aa, Artificial Sequence; identical to SEQ ID NO: 20009
  Cyclic GFR-binding peptide
  MOD_RES (4)..(5): Xaa is C or S

SEQ ID NO: 63962 - protein, 35 aa, Artificial Sequence
  Cyclic GFR-binding peptide
  MOD_RES (5)..(6): Xaa is C or S
ASKAXXVPTKLNAISILYFDKGVVTYLKKYRGMAV

SEQ ID NO: 63963 - protein, 28 aa, Artificial Sequence
  Cyclic GFR-binding peptide
  MOD_RES (1)..(2): Xaa is C or S
XXVPTKLSPISVLYIDDMGVPTYKQYEE

SEQ ID NO: 63964 - protein, 30 aa, Artificial Sequence
  Cyclic GFR-binding peptide
PTELSPISMLYIDENEKVVYKQYEDMVVEG

SEQ ID NO: 63965 - protein, 29 aa, Artificial Sequence
  Cyclic GFR-binding peptide
  MOD_RES (29)..(29): Xaa is C or S
ELSPISMLYIDEYDKVVYKQYEEMVVEGX

SEQ ID NO: 63966 - protein, 39 aa, Artificial Sequence; identical to SEQ ID NO: 20013
  Cyclic GFR-binding peptide
  MOD_RES (3)..(4)..(36)..(38): Xaa is C or S

SEQ ID NO: 63967 - protein, 33 aa, Artificial Sequence; identical to SEQ ID NO: 20014
  Cyclic GFR-binding peptide
  MOD_RES (32)..(32): Xaa is C or S

SEQ ID NO: 63968 - protein, 37 aa, Artificial Sequence; identical to SEQ ID NO: 20017
  Cyclic GFR-binding peptide
  MOD_RES (1)..(2)..(34)..(36): Xaa is C or S

SEQ ID NO: 63969 - protein, 28 aa, Artificial Sequence
  Cyclic GFR-binding peptide
  MOD_RES (28)..(28): Xaa is C or S
LSPISMLYIDENEKVVYKQYEDMVVEGX

SEQ ID NO: 63970 - protein, 32 aa, Artificial Sequence
  Cyclic GFR-binding peptide
  MOD_RES (30)..(32): Xaa is C or S
TELEPISMLYLDEYDKVVKFKYEEMVVEGXGX

SEQ ID NO: 63971 - protein, 28 aa, Artificial Sequence
  Cyclic GFR-binding peptide
  MOD_RES (27)..(27): Xaa is C or S
EPISVLYLDSSNNVIKFKYENMVVKAXG

SEQ ID NO: 63972 - protein, 34 aa, Artificial Sequence; identical to SEQ ID NO: 20022
  Cyclic GFR-binding peptide
  MOD_RES (1)..(2)..(33): Xaa is C or S

SEQ ID NO: 63973 - protein, 32 aa, Artificial Sequence
  Cyclic GFR-binding peptide
  MOD_RES (4)..(5): Xaa is C or S
PASXXVPARLNAISILYFDAANNVVLKKYRDM

SEQ ID NO: 63974 - protein, 35 aa, Artificial Sequence; identical to SEQ ID NO: 20029
  Cyclic GFR-binding peptide
  MOD_RES (1)..(32)..(34): Xaa is C or S

SEQ ID NO: 63975 - protein, 30 aa, Artificial Sequence
  Cyclic GFR-binding peptide
  MOD_RES (1)..(2): Xaa is C or S
XXAPTQLSPISVLYIDDSSNVIYKQYENMV

SEQ ID NO: 63976 - protein, 33 aa, Artificial Sequence
  Cyclic GFR-binding peptide
  MOD_RES (6)..(7): Xaa is C or S
AVPKAXXAPTKLEPISVLYLDSSNNVIKFKYEN

SEQ ID NO: 63977 - protein, 26 aa, Artificial Sequence
  Cyclic GFR-binding peptide
TELEPISMLYLDEYDKVVKFKYEEMV

SEQ ID NO: 63978 - protein, 33 aa, Artificial Sequence
  Cyclic GFR-binding peptide
  MOD_RES (30)..(32): Xaa is C or S
ARLEPISILYLDAANNVVKFKYEDMVVEAXGXR

SEQ ID NO: 63979 - protein, 28 aa, Artificial Sequence
  Cyclic GFR-binding peptide
KLSPISVLYIDDMGVPTYKQYEEGMSVA

SEQ ID NO: 63980 - protein, 40 aa, Artificial Sequence; identical to SEQ ID NO: 20031
  Cyclic GFR-binding peptide
  MOD_RES (5)..(6)..(39): Xaa is C or S

SEQ ID NO: 63981 - protein, 31 aa, Artificial Sequence
  Cyclic GFR-binding peptide
  MOD_RES (5)..(6): Xaa is C or S
SAAPXXVPQALSPISILYIVGRKPKVYKQYE

SEQ ID NO: 63982 - protein, 34 aa, Artificial Sequence
  Cyclic GFR-binding peptide
  MOD_RES (5)..(6): Xaa is C or S
ASKAXXVPTKLSPISILYKDKGVVTYLKYHYGMA

SEQ ID NO: 63983 - protein, 29 aa, Artificial Sequence
  Cyclic GFR-binding peptide
VPQDLSPISILYIVGRTPKVYKQYEMVVK

SEQ ID NO: 63984 - protein, 25 aa, Artificial Sequence
  Cyclic GFR-binding peptide
QDLEPISILYLIGKTPKIKFKYEMI

SEQ ID NO: 63985 - protein, 35 aa, Artificial Sequence
  Cyclic GFR-binding peptide
  MOD_RES (5)..(6): Xaa is C or S
IPKAXXVPTELSPISMLYIDENEKVVYKQYEDMVV

SEQ ID NO: 63986 - protein, 30 aa, Artificial Sequence
  Cyclic GFR-binding peptide
  MOD_RES (28)..(30): Xaa is C or S
LNAISILYFDAANNVVLKKYRDMVVEAXGX

SEQ ID NO: 63987 - protein, 27 aa, Artificial Sequence
  Cyclic GFR-binding peptide
LEPISVLYLDDSSNVIKFKYENMVVRA

SEQ ID NO: 63988 - protein, 39 aa, Artificial Sequence; identical to SEQ ID NO: 20040
  Cyclic GFR-binding peptide
  MOD_RES (5)..(6)..(38): Xaa is C or S

SEQ ID NO: 63989 - protein, 31 aa, Artificial Sequence
  Cyclic GFR-binding peptide
  MOD_RES (30)..(30): Xaa is C or S
SQDLEPISILYLIGKTPKIKFKYEMIVKSXK

SEQ ID NO: 63990 - protein, 34 aa, Artificial Sequence
  Cyclic GFR-binding peptide
  MOD_RES (3)..(4): Xaa is C or S
KAXXVPTKLEPISVLYLDDMGVPTKFKYEEGMSV

SEQ ID NO: 63991 - protein, 38 aa, Artificial Sequence; identical to SEQ ID NO: 20044
  Cyclic GFR-binding peptide
  MOD_RES (2)..(3)..(35)..(37): Xaa is C or S

SEQ ID NO: 63992 - protein, 25 aa, Artificial Sequence
  Cyclic GFR-binding peptide
VPARLSPISILYKDAANNVVLKYHY

SEQ ID NO: 63993 - protein, 22 aa, Artificial Sequence
  Cyclic GFR-binding peptide
LEPISVLYLDDMGVPTKFKYEE

SEQ ID NO: 63994 - protein, 35 aa, Artificial Sequence
  Cyclic GFR-binding peptide
  MOD_RES (5)..(6): Xaa is C or S
VPKPXXAPTQLEPISVLYLDDSSNVIKFKYENMVV

SEQ ID NO: 63995 - protein, 23 aa, Artificial Sequence
  Cyclic GFR-binding peptide
ALSPISILYIVGRKPKVYKQYEM

SEQ ID NO: 63996 - protein, 29 aa, Artificial Sequence
  Cyclic GFR-binding peptide
  MOD_RES (1)..(2): Xaa is C or S
XXAPTKLSPISVLYIDSSNNVIYKQYENM

SEQ ID NO: 63997 - protein, 26 aa, Artificial Sequence
  Cyclic GFR-binding peptide
SPISMLYIDENEKVVYKQYEDMVVEG

SEQ ID NO: 63998 - protein, 31 aa, Artificial Sequence
  Cyclic GFR-binding peptide
  MOD_RES (28)..(30): Xaa is C or S
LEPISVLYLDSSNNVIKFKYENMVVKAXGXH

SEQ ID NO: 63999 - protein, 25 aa, Artificial Sequence
  Cyclic GFR-binding peptide
TQLEPISVLYLDDSSNVIKFKYENM

SEQ ID NO: 64000 - protein, 27 aa, Artificial Sequence
  Cyclic GFR-binding peptide
TQLSPISVLYIDDSSNVIYKQYENMVV

SEQ ID NO: 64001 - protein, 36 aa, Artificial Sequence; identical to SEQ ID NO: 20056
  Cyclic GFR-binding peptide
  MOD_RES (5)..(6): Xaa is C or S

SEQ ID NO: 64002 - protein, 38 aa, Artificial Sequence; identical to SEQ ID NO: 20058
  Cyclic GFR-binding peptide
  MOD_RES (5)..(6)..(38): Xaa is C or S

SEQ ID NO: 64003 - protein, 28 aa, Artificial Sequence
  Cyclic GFR-binding peptide
VPARLEPISILYLDAANNVVKFKYEDMV

SEQ ID NO: 64004 - protein, 30 aa, Artificial Sequence
  Cyclic GFR-binding peptide
  MOD_RES (27)..(29): Xaa is C or S
EPISVLYLDDSSNVIKFKYENMVVRSXGXH

SEQ ID NO: 64005 - protein, 23 aa, Artificial Sequence
  Cyclic GFR-binding peptide
TKLEPISVLYLDDMGVPTKFKYE

SEQ ID NO: 64006 - protein, 34 aa, Artificial Sequence; identical to SEQ ID NO: 20060
  Cyclic GFR-binding peptide
  MOD_RES (32)..(34): Xaa is C or S

SEQ ID NO: 64007 - protein, 29 aa, Artificial Sequence
  Cyclic GFR-binding peptide
  MOD_RES (3)..(4): Xaa is C or S
KAXXVPTELEPISMLYLDENEKVVKFKYE

SEQ ID NO: 64008 - protein, 31 aa, Artificial Sequence
  Cyclic GFR-binding peptide
  MOD_RES (2)..(3): Xaa is C or S
AXXVPTKLNAISILYFDKGVVTYLKKYRGMA

SEQ ID NO: 64009 - protein, 35 aa, Artificial Sequence
  Cyclic GFR-binding peptide
  MOD_RES (5)..(6): Xaa is C or S
SASPXXVSQDLSPISILYIIGKTPKIYKQYEMIVK

SEQ ID NO: 64010 - protein, 36 aa, Artificial Sequence; identical to SEQ ID NO: 20069
  Cyclic GFR-binding peptide
  MOD_RES (3)..(4)..(36): Xaa is C or S

SEQ ID NO: 64011 - protein, 36 aa, Artificial Sequence; identical to SEQ ID NO: 20073
  Cyclic GFR-binding peptide
  MOD_RES (1)..(2)..(34)..(36): Xaa is C or S

SEQ ID NO: 64012 - protein, 33 aa, Artificial Sequence; identical to SEQ ID NO: 20074
  Cyclic GFR-binding peptide
  MOD_RES (1)..(33): Xaa is C or S

SEQ ID NO: 64013 - protein, 32 aa, Artificial Sequence
  Cyclic GFR-binding peptide
  MOD_RES (2)..(3): Xaa is C or S
AXXVPTKLSPISILYKDKGVVTYLKYHYGMAV

SEQ ID NO: 64014 - protein, 38 aa, Artificial Sequence; identical to SEQ ID NO: 20079
  Cyclic GFR-binding peptide
  MOD_RES (3)..(4)..(37): Xaa is C or S

SEQ ID NO: 64015 - protein, 26 aa, Artificial Sequence
  Cyclic GFR-binding peptide
TKLSPISVLYIDDMGVPTYKQYEEGM

SEQ ID NO: 64016 - protein, 31 aa, Artificial Sequence; identical to SEQ ID NO: 20082
  Cyclic GFR-binding peptide
  MOD_RES (1)..(1): Xaa is C or S

SEQ ID NO: 64017 - protein, 22 aa, Artificial Sequence
  Cyclic GFR-binding peptide
LEPISVLYLDDSSNVIKFKYEN

SEQ ID NO: 64018 - protein, 29 aa, Artificial Sequence
  Cyclic GFR-binding peptide
  MOD_RES (27)..(29): Xaa is C or S
LEPISILYLVGRTPKVKFKYEMVVKSXKX

SEQ ID NO: 64019 - protein, 33 aa, Artificial Sequence
  Cyclic GFR-binding peptide
  MOD_RES (31)..(33): Xaa is C or S
TKLEPISVLYLDDMGVPTKFKYEEGMSVAEXGX

SEQ ID NO: 64020 - protein, 21 aa, Artificial Sequence
  Cyclic GFR-binding peptide
EPISILYLVGRTPKVKFKYEM

SEQ ID NO: 64021 - protein, 24 aa, Artificial Sequence
  Cyclic GFR-binding peptide
EPISILYLDAANNVVKFKYEDMVV

SEQ ID NO: 64022 - protein, 27 aa, Artificial Sequence
  Cyclic GFR-binding peptide
PTELSPISMLYIDEYDKVVYKQYEEMV

SEQ ID NO: 64023 - protein, 41 aa, Artificial Sequence; identical to SEQ ID NO: 20096
  Cyclic GFR-binding peptide
  MOD_RES (6)..(7)..(38)..(40): Xaa is C or S

SEQ ID NO: 64024 - protein, 39 aa, Artificial Sequence; identical to SEQ ID NO: 20097
  Cyclic GFR-binding peptide
  MOD_RES (3)..(4)..(36)..(38): Xaa is C or S

SEQ ID NO: 64025 - protein, 34 aa, Artificial Sequence; identical to SEQ ID NO: 20099
  Cyclic GFR-binding peptide
  MOD_RES (1)..(32)..(34): Xaa is C or S

SEQ ID NO: 64026 - protein, 34 aa, Artificial Sequence; identical to SEQ ID NO: 20100
  Cyclic GFR-binding peptide
  MOD_RES (32)..(34): Xaa is C or S

SEQ ID NO: 64027 - protein, 41 aa, Artificial Sequence; identical to SEQ ID NO: 20102
  Cyclic GFR-binding peptide
  MOD_RES (5)..(6)..(38)..(40): Xaa is C or S

SEQ ID NO: 64028 - protein, 33 aa, Artificial Sequence
  Cyclic GFR-binding peptide
  MOD_RES (31)..(33): Xaa is C or S
PTKLSPISILYKDKGVVTYLKYHYGMAVSEXGX

SEQ ID NO: 64029 - protein, 20 aa, Artificial Sequence
  Cyclic GFR-binding peptide
SPISVLYIDDMGVPTYKQYE

SEQ ID NO: 64030 - protein, 31 aa, Artificial Sequence
  Cyclic GFR-binding peptide
  MOD_RES (5)..(6): Xaa is C or S
SASPXXVSQDLEPISILYLIGKTPKIKFKYE

SEQ ID NO: 64031 - protein, 33 aa, Artificial Sequence
  Cyclic GFR-binding peptide
  MOD_RES (30)..(32): Xaa is C or S
PQDLEPISILYLVGRTPKVKFKYEMVVKSXKXS

SEQ ID NO: 64032 - protein, 34 aa, Artificial Sequence
  Cyclic GFR-binding peptide
  MOD_RES (5)..(6): Xaa is C or S
VPKAXXAPTKLEPISVLYLDSSNNVIKFKYENMV

SEQ ID NO: 64033 - protein, 36 aa, Artificial Sequence; identical to SEQ ID NO: 20104
  Cyclic GFR-binding peptide
  MOD_RES (4)..(5): Xaa is C or S

SEQ ID NO: 64034 - protein, 22 aa, Artificial Sequence
  Cyclic GFR-binding peptide
KLEPISVLYLDDSSNVIKFKYE

SEQ ID NO: 64035 - protein, 40 aa, Artificial Sequence; identical to SEQ ID NO: 20106
  Cyclic GFR-binding peptide
  MOD_RES (4)..(5)..(37)..(39): Xaa is C or S

SEQ ID NO: 64036 - protein, 32 aa, Artificial Sequence; identical to SEQ ID NO: 20107
  Cyclic GFR-binding peptide
  MOD_RES (1)..(1): Xaa is C or S

SEQ ID NO: 64037 - protein, 38 aa, Artificial Sequence; identical to SEQ ID NO: 20111
  Cyclic GFR-binding peptide
  MOD_RES (5)..(6)..(38): Xaa is C or S

SEQ ID NO: 64038 - protein, 25 aa, Artificial Sequence
  Cyclic GFR-binding peptide
NAISILYFDKGVVTYLKKYRGMAVS

SEQ ID NO: 64039 - protein, 30 aa, Artificial Sequence
  Cyclic GFR-binding peptide
  MOD_RES (28)..(30): Xaa is C or S
LSPISVLYIDDSSNVIYKQYENMVVRAXGX

SEQ ID NO: 64040 - protein, 33 aa, Artificial Sequence
  Cyclic GFR-binding peptide
  MOD_RES (4)..(5): Xaa is C or S
PKPXXAPTQLSPISVLYIDDSSNVIYKQYENMV

SEQ ID NO: 64041 - protein, 33 aa, Artificial Sequence; identical to SEQ ID NO: 20112
  Cyclic GFR-binding peptide
  MOD_RES (33)..(33): Xaa is C or S

SEQ ID NO: 64042 - protein, 33 aa, Artificial Sequence
  Cyclic GFR-binding peptide
  MOD_RES (5)..(6): Xaa is C or S
SASPXXVPQDLSPISILYIVGRTPKVYKQYEMV

SEQ ID NO: 64043 - protein, 28 aa, Artificial Sequence
  Cyclic GFR-binding peptide
  MOD_RES (27)..(27): Xaa is C or S
LEPISILYLVGRTPKVKFKYEMVVKSXK

SEQ ID NO: 64044 - protein, 33 aa, Artificial Sequence
  Cyclic GFR-binding peptide
  MOD_RES (3)..(4): Xaa is C or S
KAXXVPTELEPISMLYLDEYDKVVKFKYEEMVV

SEQ ID NO: 64045 - protein, 26 aa, Artificial Sequence
  Cyclic GFR-binding peptide
LNAISILYFDKGVVTYLKKYRGMAVS

SEQ ID NO: 64046 - protein, 33 aa, Artificial Sequence
  Cyclic GFR-binding peptide
  MOD_RES (30)..(32): Xaa is C or S
ARLNAISILYFDAANNVVLKKYRDMVVEAXGXR

SEQ ID NO: 64047 - protein, 32 aa, Artificial Sequence
  Cyclic GFR-binding peptide
  MOD_RES (30)..(32): Xaa is C or S
KLSPISVLYIDDMGVPTYKQYEEGMSVAEXGX

SEQ ID NO: 64048 - protein, 31 aa, Artificial Sequence
  Cyclic GFR-binding peptide
  MOD_RES (5)..(6): Xaa is C or S
VGKAXXVPTKLSPISVLYIDDMGVPTYKQYE

SEQ ID NO: 64049 - protein, 37 aa, Artificial Sequence; identical to SEQ ID NO: 20117
  Cyclic GFR-binding peptide
  MOD_RES (2)..(3)..(35)..(37): Xaa is C or S

SEQ ID NO: 64050 - protein, 35 aa, Artificial Sequence; identical to SEQ ID NO: 20116
  Cyclic GFR-binding peptide
  MOD_RES (2)..(3): Xaa is C or S

SEQ ID NO: 64051 - protein, 28 aa, Artificial Sequence
  Cyclic GFR-binding peptide
QALSPISILYIVGRKPKVYKQYEMIVRS

SEQ ID NO: 64052 - protein, 41 aa, Artificial Sequence; identical to SEQ ID NO: 20118
  Cyclic GFR-binding peptide
  MOD_RES (5)..(6)..(39)..(41): Xaa is C or S

SEQ ID NO: 64053 - protein, 42 aa, Artificial Sequence; identical to SEQ ID NO: 20121
  Cyclic GFR-binding peptide
  MOD_RES (7)..(39)..(41): Xaa is C or S

SEQ ID NO: 64054 - protein, 23 aa, Artificial Sequence
  Cyclic GFR-binding peptide
ELSPISMLYIDEYDKVVYKQYEE

SEQ ID NO: 64055 - protein, 26 aa, Artificial Sequence
  Cyclic GFR-binding peptide
  MOD_RES (1)..(1): Xaa is C or S
XVPTELSPISMLYIDEYDKVVYKQYE

SEQ ID NO: 64056 - protein, 27 aa, Artificial Sequence
  Cyclic GFR-binding peptide
QALEPISILYLVGRKPKVKFKYEMIVR

SEQ ID NO: 64057 - protein, 26 aa, Artificial Sequence
  Cyclic GFR-binding peptide
  MOD_RES (1)..(1): Xaa is C or S
XVPARLNAISILYFDAANNVVLKKYR

SEQ ID NO: 64058 - protein, 38 aa, Artificial Sequence; identical to SEQ ID NO: 20125
  Cyclic GFR-binding peptide
  MOD_RES (6)..(38): Xaa is C or S

SEQ ID NO: 64059 - protein, 40 aa, Artificial Sequence; identical to SEQ ID NO: 20130
  Cyclic GFR-binding peptide
  MOD_RES (6)..(7)..(39): Xaa is C or S

SEQ ID NO: 64060 - protein, 32 aa, Artificial Sequence
  Cyclic GFR-binding peptide
  MOD_RES (29)..(31): Xaa is C or S
KLEPISVLYLDDSSNVIKFKYENMVVRSXGXH

SEQ ID NO: 64061 - protein, 29 aa, Artificial Sequence
  Cyclic GFR-binding peptide
  MOD_RES (1)..(2): Xaa is C or S
XXVPTKLEPISVLYLDDMGVPTKFKYEEG

SEQ ID NO: 64062 - protein, 31 aa, Artificial Sequence; identical to SEQ ID NO: 20131
  Cyclic GFR-binding peptide

SEQ ID NO: 64063 - protein, 34 aa, Artificial Sequence; identical to SEQ ID NO: 20132
  Cyclic GFR-binding peptide
  MOD_RES (32)..(34): Xaa is C or S

SEQ ID NO: 64064 - protein, 29 aa, Artificial Sequence
  Cyclic GFR-binding peptide
  MOD_RES (1)..(2): Xaa is C or S
XXVPTELEPISMLYLDEYDKVVKFKYEEM

SEQ ID NO: 64065 - protein, 26 aa, Artificial Sequence
  Cyclic GFR-binding peptide
VSQDLEPISILYLIGKTPKIKFKYEM

SEQ ID NO: 64066 - protein, 23 aa, Artificial Sequence
  Cyclic GFR-binding peptide
QLEPISVLYLDDSSNVIKFKYEN

SEQ ID NO: 64067 - protein, 33 aa, Artificial Sequence; identical to SEQ ID NO: 20137
  Cyclic GFR-binding peptide
  MOD_RES (32)..(32): Xaa is C or S

SEQ ID NO: 64068 - protein, 28 aa, Artificial Sequence
  Cyclic GFR-binding peptide
  MOD_RES (1)..(1): Xaa is C or S
XAPTKLSPISVLYIDSSNNVIYKQYENM

SEQ ID NO: 64069 - protein, 34 aa, Artificial Sequence; identical to SEQ ID NO: 20139
  Cyclic GFR-binding peptide
  MOD_RES (1)..(2)..(34): Xaa is C or S

SEQ ID NO: 64070 - protein, 27 aa, Artificial Sequence
  Cyclic GFR-binding peptide
PTKLSPISILYIDKGVVTYYKQYEGMA

SEQ ID NO: 64071 - protein, 23 aa, Artificial Sequence
  Cyclic GFR-binding peptide
LSPISILYIDKGVVTYYKQYEGM

SEQ ID NO: 64072 - protein, 30 aa, Artificial Sequence
  Cyclic GFR-binding peptide
  MOD_RES (29)..(29): Xaa is C or S
QALEPISILYLVGRKPKVKFKYEMIVRSXK

SEQ ID NO: 64073 - protein, 31 aa, Artificial Sequence
  Cyclic GFR-binding peptide
  MOD_RES (28)..(30): Xaa is C or S
SPISVLYIDDMGVPTYKQYEEGMSVAEXGXR

SEQ ID NO: 64074 - protein, 29 aa, Artificial Sequence
  Cyclic GFR-binding peptide
  MOD_RES (1)..(1): Xaa is C or S
XVPTKLSPISILYIDKGVVTYYKQYEGMA

SEQ ID NO: 64075 - protein, 25 aa, Artificial Sequence
  Cyclic GFR-binding peptide
PTELEPISMLYLDENEKVVKFKYED

SEQ ID NO: 64076 - protein, 27 aa, Artificial Sequence
  Cyclic GFR-binding peptide
SPISVLYIDDMGVPTYKQYEEGMSVAE

SEQ ID NO: 64077 - protein, 31 aa, Artificial Sequence
  Cyclic GFR-binding peptide
  MOD_RES (29)..(31): Xaa is C or S
KLSPISILYKDKGVVTYLKYHYGMAVSEXGX

SEQ ID NO: 64078 - protein, 25 aa, Artificial Sequence
  Cyclic GFR-binding peptide
ELSPISMLYIDEYDKVVYKQYEEMV

SEQ ID NO: 64079 - protein, 37 aa, Artificial Sequence
  Cyclic GFR-binding peptide
  MOD_RES (6)..(7): Xaa is C or S
KVGKAXXVPTKLEPISVLYLDDMGVPTKFKYEEGMSV

SEQ ID NO: 64080 - protein, 40 aa, Artificial Sequence; identical to SEQ ID NO: 20152
  Cyclic GFR-binding peptide
  MOD_RES (6)..(7)..(38)..(40): Xaa is C or S

SEQ ID NO: 64081 - protein, 25 aa, Artificial Sequence
  Cyclic GFR-binding peptide
LEPISVLYLDSSNNVIKFKYENMVV

SEQ ID NO: 64082 - protein, 41 aa, Artificial Sequence; identical to SEQ ID NO: 20156
  Cyclic GFR-binding peptide
  MOD_RES (6)..(7)..(39)..(41): Xaa is C or S

SEQ ID NO: 64083 - protein, 30 aa, Artificial Sequence
  Cyclic GFR-binding peptide
  MOD_RES (1)..(2): Xaa is C or S
XXVPARLEPISILYLDAANNVVKFKYEDMV

SEQ ID NO: 64084 - protein, 35 aa, Artificial Sequence; identical to SEQ ID NO: 20159
  Cyclic GFR-binding peptide
  MOD_RES (2)..(34): Xaa is C or S

SEQ ID NO: 64085 - protein, 32 aa, Artificial Sequence
  Cyclic GFR-binding peptide
  MOD_RES (5)..(6): Xaa is C or S
VGKAXXVPTKLEPISVLYLDDMGVPTKFKYEE

SEQ ID NO: 64086 - protein, 28 aa, Artificial Sequence
  Cyclic GFR-binding peptide
  MOD_RES (2)..(3): Xaa is C or S
AXXVPTELSPISMLYIDEYDKVVYKQYE

SEQ ID NO: 64087 - protein, 30 aa, Artificial Sequence
  Cyclic GFR-binding peptide
  MOD_RES (29)..(29): Xaa is C or S
QDLSPISILYIVGRTPKVYKQYEMVVKSXK

SEQ ID NO: 64088 - protein, 31 aa, Artificial Sequence
  Cyclic GFR-binding peptide
  MOD_RES (1)..(2): Xaa is C or S
XXAPTKLSPISVLYIDDSSNVIYKQYENMVV

SEQ ID NO: 64089 - protein, 31 aa, Artificial Sequence; identical to SEQ ID NO: 20164
  Cyclic GFR-binding peptide
  MOD_RES (1)..(1): Xaa is C or S

SEQ ID NO: 64090 - protein, 31 aa, Artificial Sequence
  Cyclic GFR-binding peptide
  MOD_RES (30)..(30): Xaa is C or S
TQLEPISVLYLDDSSNVIKFKYENMVVRAXG

SEQ ID NO: 64091 - protein, 31 aa, Artificial Sequence
  Cyclic GFR-binding peptide
  MOD_RES (28)..(30): Xaa is C or S
LEPISVLYLDDSSNVIKFKYENMVVRAXGXH

SEQ ID NO: 64092 - protein, 33 aa, Artificial Sequence; identical to SEQ ID NO: 20166
  Cyclic GFR-binding peptide
  MOD_RES (2)..(3): Xaa is C or S

SEQ ID NO: 64093 - protein, 25 aa, Artificial Sequence
  Cyclic GFR-binding peptide
EPISVLYLDDMGVPTKFKYEEGMSV

SEQ ID NO: 64094 - protein, 30 aa, Artificial Sequence
  Cyclic GFR-binding peptide
  MOD_RES (27)..(29): Xaa is C or S
NAISILYFDKGVVTYLKKYRGMAVSEXGXR

SEQ ID NO: 64095 - protein, 35 aa, Artificial Sequence; identical to SEQ ID NO: 20171
  Cyclic GFR-binding peptide
  MOD_RES (1)..(33)..(35): Xaa is C or S

SEQ ID NO: 64096 - protein, 30 aa, Artificial Sequence; identical to SEQ ID NO: 20172
  Cyclic GFR-binding peptide

SEQ ID NO: 64097 - protein, 33 aa, Artificial Sequence
  Cyclic GFR-binding peptide
  MOD_RES (3)..(4): Xaa is C or S
SPXXVSQDLSPISILYIIGKTPKIYKQYEMIVK

SEQ ID NO: 64098 - protein, 26 aa, Artificial Sequence
  Cyclic GFR-binding peptide
LEPISMLYLDEYDKVVKFKYEEMVVE

SEQ ID NO: 64099 - protein, 33 aa, Artificial Sequence
  Cyclic GFR-binding peptide
  MOD_RES (6)..(7): Xaa is C or S
TVPKPXXAPTQLSPISVLYIDDSSNVIYKQYEN

SEQ ID NO: 64100 - protein, 30 aa, Artificial Sequence
  Cyclic GFR-binding peptide
  MOD_RES (27)..(29): Xaa is C or S
SPISMLYIDEYDKVVYKQYEEMVVEGXGXR

SEQ ID NO: 64101 - protein, 27 aa, Artificial Sequence
  Cyclic GFR-binding peptide
LEPISVLYLDDSSNVIKFKYENMVVRS

SEQ ID NO: 64102 - protein, 33 aa, Artificial Sequence
  Cyclic GFR-binding peptide
  MOD_RES (4)..(5): Xaa is C or S
GKAXXVPTKLSPISVLYIDDMGVPTYKQYEEGM

SEQ ID NO: 64103 - protein, 23 aa, Artificial Sequence
  Cyclic GFR-binding peptide
SPISILYKDKGVVTYLKYHYGMA

SEQ ID NO: 64104 - protein, 20 aa, Artificial Sequence
  Cyclic GFR-binding peptide
EPISMLYLDEYDKVVKFKYE

SEQ ID NO: 64105 - protein, 32 aa, Artificial Sequence
  Cyclic GFR-binding peptide
  MOD_RES (31)..(31): Xaa is C or S
PTKLSPISILYIDKGVVTYYKQYEGMAVSEXG

SEQ ID NO: 64106 - protein, 31 aa, Artificial Sequence
  Cyclic GFR-binding peptide
  MOD_RES (4)..(5): Xaa is C or S
PKAXXVPTELSPISMLYIDENEKVVYKQYED

SEQ ID NO: 64107 - protein, 34 aa, Artificial Sequence; identical to SEQ ID NO: 20182
  Cyclic GFR-binding peptide
  MOD_RES (1)..(2)..(34): Xaa is C or S

SEQ ID NO: 64108 - protein, 29 aa, Artificial Sequence
  Cyclic GFR-binding peptide
APTKLSPISVLYIDSSNNVIYKQYENMVV

SEQ ID NO: 64109 - protein, 38 aa, Artificial Sequence; identical to SEQ ID NO: 20186
  Cyclic GFR-binding peptide
  MOD_RES (4)..(5)..(37): Xaa is C or S

SEQ ID NO: 64110 - protein, 24 aa, Artificial Sequence
  Cyclic GFR-binding peptide
PARLSPISILYKDAANNVVLKYHY

SEQ ID NO: 64111 - protein, 37 aa, Artificial Sequence; identical to SEQ ID NO: 20195
  Cyclic GFR-binding peptide
  MOD_RES (6)..(7): Xaa is C or S

SEQ ID NO: 64112 - protein, 37 aa, Artificial Sequence; identical to SEQ ID NO: 20196
  Cyclic GFR-binding peptide
  MOD_RES (1)..(34)..(36): Xaa is C or S

SEQ ID NO: 64113 - protein, 23 aa, Artificial Sequence
  Cyclic GFR-binding peptide
LNAISILYFDAANNVVLKKYRDM

SEQ ID NO: 64114 - protein, 30 aa, Artificial Sequence
  Cyclic GFR-binding peptide
  MOD_RES (3)..(4): Xaa is C or S
KPXXAPTKLEPISVLYLDDSSNVIKFKYEN

SEQ ID NO: 64115 - protein, 34 aa, Artificial Sequence
  Cyclic GFR-binding peptide
  MOD_RES (6)..(7): Xaa is C or S
KIPKAXXVPTELSPISMLYIDENEKVVYKQYEDM

SEQ ID NO: 64116 - protein, 36 aa, Artificial Sequence; identical to SEQ ID NO: 20201
  Cyclic GFR-binding peptide
  MOD_RES (4)..(5): Xaa is C or S

SEQ ID NO: 64117 - protein, 30 aa, Artificial Sequence
  Cyclic GFR-binding peptide
PARLNAISILYFDAANNVVLKKYRDMVVEA

SEQ ID NO: 64118 - protein, 31 aa, Artificial Sequence
  Cyclic GFR-binding peptide
  MOD_RES (5)..(6): Xaa is C or S
APASXXVPARLNAISILYFDAANNVVLKKYR

SEQ ID NO: 64119 - protein, 28 aa, Artificial Sequence
  Cyclic GFR-binding peptide
  MOD_RES (1)..(2): Xaa is C or S
XXVPQALEPISILYLVGRKPKVKFKYEM

SEQ ID NO: 64120 - protein, 31 aa, Artificial Sequence
  Cyclic GFR-binding peptide
  MOD_RES (29)..(31): Xaa is C or S
LEPISVLYLDDMGVPTKFKYEEGMSVAEXGX

SEQ ID NO: 64121 - protein, 22 aa, Artificial Sequence
  Cyclic GFR-binding peptide
LSPISVLYIDDMGVPTYKQYEE

SEQ ID NO: 64122 - protein, 39 aa, Artificial Sequence; identical to SEQ ID NO: 20211
  Cyclic GFR-binding peptide
  MOD_RES (3)..(4)..(36)..(38): Xaa is C or S

SEQ ID NO: 64123 - protein, 30 aa, Artificial Sequence
  Cyclic GFR-binding peptide
  MOD_RES (1)..(2): Xaa is C or S
XXVSQDLSPISILYIIGKTPKIYKQYEMIV

SEQ ID NO: 64124 - protein, 28 aa, Artificial Sequence
  Cyclic GFR-binding peptide
  MOD_RES (27)..(27): Xaa is C or S
EPISVLYLDDSSNVIKFKYENMVVRAXG

SEQ ID NO: 64125 - protein, 37 aa, Artificial Sequence; identical to SEQ ID NO: 20219
  Cyclic GFR-binding peptide
  MOD_RES (5)..(6): Xaa is C or S

SEQ ID NO: 64126 - protein, 34 aa, Artificial Sequence
  Cyclic GFR-binding peptide
  MOD_RES (6)..(7): Xaa is C or S
AAPASXXVPARLSPISILYKDAANNVVLKYHYDM

SEQ ID NO: 64127 - protein, 27 aa, Artificial Sequence
  Cyclic GFR-binding peptide
PTKLEPISVLYLDDMGVPTKFKYEEGM

SEQ ID NO: 64128 - protein, 25 aa, Artificial Sequence
  Cyclic GFR-binding peptide
EPISVLYLDSSNNVIKFKYENMVVK

SEQ ID NO: 64129 - protein, 24 aa, Artificial Sequence
  Cyclic GFR-binding peptide
PTKLEPISVLYLDDSSNVIKFKYE

SEQ ID NO: 64130 - protein, 34 aa, Artificial Sequence; identical to SEQ ID NO: 20230
  Cyclic GFR-binding peptide
  MOD_RES (1)..(2)..(34): Xaa is C or S

SEQ ID NO: 64131 - protein, 23 aa, Artificial Sequence
  Cyclic GFR-binding peptide
SPISMLYIDENEKVVYKQYEDMV

SEQ ID NO: 64132 - protein, 30 aa, Artificial Sequence
  Cyclic GFR-binding peptide
  MOD_RES (4)..(5): Xaa is C or S
PKPXXAPTKLEPISVLYLDDSSNVIKFKYE

SEQ ID NO: 64133 - protein, 42 aa, Artificial Sequence; identical to SEQ ID NO: 20234
  Cyclic GFR-binding peptide
  MOD_RES (6)..(7)..(39)..(41): Xaa is C or S

SEQ ID NO: 64134 - protein, 31 aa, Artificial Sequence
  Cyclic GFR-binding peptide
  MOD_RES (1)..(2): Xaa is C or S
XXVPARLEPISILYLDAANNVVKFKYEDMVV

SEQ ID NO: 64135 - protein, 22 aa, Artificial Sequence
  Cyclic GFR-binding peptide
LSPISILYIIGKTPKIYKQYEM

SEQ ID NO: 64136 - protein, 23 aa, Artificial Sequence
  Cyclic GFR-binding peptide
TELSPISMLYIDENEKVVYKQYE

SEQ ID NO: 64137 - protein, 25 aa, Artificial Sequence
  Cyclic GFR-binding peptide
PTELSPISMLYIDENEKVVYKQYED

SEQ ID NO: 64138 - protein, 36 aa, Artificial Sequence
  Cyclic GFR-binding peptide
  MOD_RES (6)..(7): Xaa is C or S
ASASPXXVSQDLSPISILYIIGKTPKIYKQYEMIVK

SEQ ID NO: 64139 - protein, 38 aa, Artificial Sequence; identical to SEQ ID NO: 20244
  Cyclic GFR-binding peptide
  MOD_RES (3)..(4)..(36)..(38): Xaa is C or S

SEQ ID NO: 64140 - protein, 22 aa, Artificial Sequence
  Cyclic GFR-binding peptide
LSPISVLYIDDSSNVIYKQYEN

SEQ ID NO: 64141 - protein, 34 aa, Artificial Sequence; identical to SEQ ID NO: 20246
  Cyclic GFR-binding peptide
  MOD_RES (33)..(33): Xaa is C or S

SEQ ID NO: 64142 - protein, 23 aa, Artificial Sequence
  Cyclic GFR-binding peptide
SPISVLYIDSSNNVIYKQYENMV

SEQ ID NO: 64143 - protein, 35 aa, Artificial Sequence; identical to SEQ ID NO: 20251
  Cyclic GFR-binding peptide
  MOD_RES (4)..(5): Xaa is C or S

SEQ ID NO: 64144 - protein, 27 aa, Artificial Sequence
  Cyclic GFR-binding peptide
KLSPISVLYIDSSNNVIYKQYENMVVK

SEQ ID NO: 64145 - protein, 22 aa, Artificial Sequence
  Cyclic GFR-binding peptide
NAISILYFDKGVVTYLKKYRGM

SEQ ID NO: 64146 - protein, 34 aa, Artificial Sequence; identical to SEQ ID NO: 20256
  Cyclic GFR-binding peptide
  MOD_RES (3)..(4): Xaa is C or S

SEQ ID NO: 64147 - protein, 26 aa, Artificial Sequence
  Cyclic GFR-binding peptide
PTKLSPISVLYIDDSSNVIYKQYENM

SEQ ID NO: 64148 - protein, 29 aa, Artificial Sequence
  Cyclic GFR-binding peptide
PTKLSPISVLYIDSSNNVIYKQYENMVVK

SEQ ID NO: 64149 - protein, 31 aa, Artificial Sequence
  Cyclic GFR-binding peptide
  MOD_RES (1)..(2): Xaa is C or S
XXVPTKLEPISVLYLDDMGVPTKFKYEEGMS

SEQ ID NO: 64150 - protein, 27 aa, Artificial Sequence
  Cyclic GFR-binding peptide
  MOD_RES (1)..(1): Xaa is C or S
XAPTQLEPISVLYLDDSSNVIKFKYEN

SEQ ID NO: 64151 - protein, 30 aa, Artificial Sequence
  Cyclic GFR-binding peptide
PTELEPISMLYLDEYDKVVKFKYEEMVVEG

SEQ ID NO: 64152 - protein, 29 aa, Artificial Sequence
  Cyclic GFR-binding peptide
  MOD_RES (2)..(3): Xaa is C or S
AXXVPTELEPISMLYLDEYDKVVKFKYEE

SEQ ID NO: 64153 - protein, 28 aa, Artificial Sequence
  Cyclic GFR-binding peptide
QDLEPISILYLVGRTPKVKFKYEMVVKS

SEQ ID NO: 64154 - protein, 28 aa, Artificial Sequence
  Cyclic GFR-binding peptide
APTKLEPISVLYLDDSSNVIKFKYENMV

SEQ ID NO: 64155 - protein, 31 aa, Artificial Sequence
  Cyclic GFR-binding peptide
  MOD_RES (29)..(31): Xaa is C or S
RLNAISILYFDAANNVVLKKYRDMVVEAXGX

SEQ ID NO: 64156 - protein, 26 aa, Artificial Sequence
  Cyclic GFR-binding peptide
EPISVLYLDDSSNVIKFKYENMVVRA

SEQ ID NO: 64157 - protein, 30 aa, Artificial Sequence
  Cyclic GFR-binding peptide
  MOD_RES (3)..(3): Xaa is C or S
PTXAPTKLEPISVLYLDDSSNVIKFKYENM

SEQ ID NO: 64158 - protein, 27 aa, Artificial Sequence
  Cyclic GFR-binding peptide
  MOD_RES (1)..(1): Xaa is C or S
XVPTKLSPISILYIDKGVVTYYKQYEG

SEQ ID NO: 64159 - protein, 39 aa, Artificial Sequence; identical to SEQ ID NO: 20268
  Cyclic GFR-binding peptide
  MOD_RES (4)..(5)..(37)..(39): Xaa is C or S

SEQ ID NO: 64160 - protein, 41 aa, Artificial Sequence; identical to SEQ ID NO: 20269
  Cyclic GFR-binding peptide
  MOD_RES (6)..(7)..(39)..(41): Xaa is C or S

SEQ ID NO: 64161 - protein, 31 aa, Artificial Sequence
  Cyclic GFR-binding peptide
  MOD_RES (3)..(4): Xaa is C or S
KAXXAPTKLSPISVLYIDSSNNVIYKQYENM

SEQ ID NO: 64162 - protein, 26 aa, Artificial Sequence
  Cyclic GFR-binding peptide
EPISVLYLDDSSNVIKFKYENMVVRS

SEQ ID NO: 64163 - protein, 29 aa, Artificial Sequence
  Cyclic GFR-binding peptide
TKLEPISVLYLDDMGVPTKFKYEEGMSVA

SEQ ID NO: 64164 - protein, 32 aa, Artificial Sequence
  Cyclic GFR-binding peptide
  MOD_RES (5)..(6): Xaa is C or S
VPKPXXAPTKLEPISVLYLDDSSNVIKFKYEN

SEQ ID NO: 64165 - protein, 30 aa, Artificial Sequence
  Cyclic GFR-binding peptide
  MOD_RES (3)..(4): Xaa is C or S
KAXXVPTKLSPISVLYIDDMGVPTYKQYEE

SEQ ID NO: 64166 - protein, 26 aa, Artificial Sequence
  Cyclic GFR-binding peptide
LEPISILYLIGKTPKIKFKYEMIVKS

SEQ ID NO: 64167 - protein, 32 aa, Artificial Sequence
  Cyclic GFR-binding peptide
  MOD_RES (2)..(3): Xaa is C or S
AXXAPTKLEPISVLYLDSSNNVIKFKYENMVV

SEQ ID NO: 64168 - protein, 28 aa, Artificial Sequence
  Cyclic GFR-binding peptide
  MOD_RES (1)..(2): Xaa is C or S
XXVPQDLEPISILYLVGRTPKVKFKYEM

SEQ ID NO: 64169 - protein, 35 aa, Artificial Sequence; identical to SEQ ID NO: 20280
  Cyclic GFR-binding peptide
  MOD_RES (1)..(2)..(33)..(35): Xaa is C or S

SEQ ID NO: 64170 - protein, 25 aa, Artificial Sequence
  Cyclic GFR-binding peptide
PTKLSPISVLYIDSSNNVIYKQYEN

SEQ ID NO: 64171 - protein, 25 aa, Artificial Sequence
  Cyclic GFR-binding peptide
VPTELEPISMLYLDENEKVVKFKYE

SEQ ID NO: 64172 - protein, 31 aa, Artificial Sequence
  Cyclic GFR-binding peptide
  MOD_RES (29)..(31): Xaa is C or S
KLEPISVLYLDDSSNVIKFKYENMVVRSXGX

SEQ ID NO: 64173 - protein, 30 aa, Artificial Sequence; identical to SEQ ID NO: 20285
  Cyclic GFR-binding peptide

SEQ ID NO: 64174 - protein, 24 aa, Artificial Sequence
  Cyclic GFR-binding peptide
KLSPISVLYIDSSNNVIYKQYENM

SEQ ID NO: 64175 - protein, 31 aa, Artificial Sequence
  Cyclic GFR-binding peptide
  MOD_RES (4)..(5): Xaa is C or S
ASPXXVSQDLEPISILYLIGKTPKIKFKYEM

SEQ ID NO: 64176 - protein, 30 aa, Artificial Sequence
  Cyclic GFR-binding peptide
  MOD_RES (30)..(30): Xaa is C or S
TKLSPISVLYIDDSSNVIYKQYENMVVRSX

SEQ ID NO: 64177 - protein, 28 aa, Artificial Sequence
  Cyclic GFR-binding peptide
  MOD_RES (27)..(27): Xaa is C or S
LSPISILYIVGRTPKVYKQYEMVVKSXK

SEQ ID NO: 64178 - protein, 29 aa, Artificial Sequence
  Cyclic GFR-binding peptide
  MOD_RES (2)..(3): Xaa is C or S
AXXVPTELSPISMLYIDEYDKVVYKQYEE

SEQ ID NO: 64179 - protein, 37 aa, Artificial Sequence; identical to SEQ ID NO: 20288
  Cyclic GFR-binding peptide
  MOD_RES (6)..(7): Xaa is C or S

SEQ ID NO: 64180 - protein, 30 aa, Artificial Sequence
  Cyclic GFR-binding peptide
  MOD_RES (30)..(30): Xaa is C or S
PQALSPISILYIVGRKPKVYKQYEMIVRSX

SEQ ID NO: 64181 - protein, 28 aa, Artificial Sequence
  Cyclic GFR-binding peptide
SQDLSPISILYIIGKTPKIYKQYEMIVK

SEQ ID NO: 64182 - protein, 24 aa, Artificial Sequence
  Cyclic GFR-binding peptide
PARLEPISILYLDAANNVVKFKYE

SEQ ID NO: 64183 - protein, 38 aa, Artificial Sequence; identical to SEQ ID NO: 20292
  Cyclic GFR-binding peptide
  MOD_RES (6)..(38): Xaa is C or S

SEQ ID NO: 64184 - protein, 27 aa, Artificial Sequence
  Cyclic GFR-binding peptide
QALSPISILYIVGRKPKVYKQYEMIVR

SEQ ID NO: 64185 - protein, 31 aa, Artificial Sequence
  Cyclic GFR-binding peptide
  MOD_RES (3)..(4): Xaa is C or S
ASXXVPARLSPISILYKDAANNVVLKYHYDM

SEQ ID NO: 64186 - protein, 22 aa, Artificial Sequence
  Cyclic GFR-binding peptide
QLEPISVLYLDDSSNVIKFKYE

SEQ ID NO: 64187 - protein, 41 aa, Artificial Sequence; identical to SEQ ID NO: 20294
  Cyclic GFR-binding peptide
  MOD_RES (6)..(7)..(38)..(40): Xaa is C or S

SEQ ID NO: 64188 - protein, 34 aa, Artificial Sequence; identical to SEQ ID NO: 20295
  Cyclic GFR-binding peptide
  MOD_RES (1)..(2)..(34): Xaa is C or S

SEQ ID NO: 64189 - protein, 27 aa, Artificial Sequence
  Cyclic GFR-binding peptide
  MOD_RES (27)..(27): Xaa is C or S
LSPISILYIVGRTPKVYKQYEMVVKSX

SEQ ID NO: 64190 - protein, 29 aa, Artificial Sequence
  Cyclic GFR-binding peptide
  MOD_RES (1)..(1): Xaa is C or S
XVPTELSPISMLYIDEYDKVVYKQYEEMV

SEQ ID NO: 64191 - protein, 27 aa, Artificial Sequence
  Cyclic GFR-binding peptide
KLSPISVLYIDDMGVPTYKQYEEGMSV

SEQ ID NO: 64192 - protein, 33 aa, Artificial Sequence; identical to SEQ ID NO: 20298
  Cyclic GFR-binding peptide
  MOD_RES (1)..(33): Xaa is C or S

SEQ ID NO: 64193 - protein, 25 aa, Artificial Sequence
  Cyclic GFR-binding peptide
PTKLEPISVLYLDSSNNVIKFKYEN

SEQ ID NO: 64194 - protein, 27 aa, Artificial Sequence
  Cyclic GFR-binding peptide
PARLNAISILYFDAANNVVLKKYRDMV

SEQ ID NO: 64195 - protein, 31 aa, Artificial Sequence
  Cyclic GFR-binding peptide
  MOD_RES (4)..(5): Xaa is C or S
ASPXXVSQDLSPISILYIIGKTPKIYKQYEM

SEQ ID NO: 64196 - protein, 28 aa, Artificial Sequence
  Cyclic GFR-binding peptide
  MOD_RES (1)..(2): Xaa is C or S
XXVPTKLEPISVLYLDDMGVPTKFKYEE

SEQ ID NO: 64197 - protein, 29 aa, Artificial Sequence
  Cyclic GFR-binding peptide
  MOD_RES (3)..(4): Xaa is C or S
KPXXAPTKLEPISVLYLDDSSNVIKFKYE

SEQ ID NO: 64198 - protein, 41 aa, Artificial Sequence; identical to SEQ ID NO: 20304
  Cyclic GFR-binding peptide
  MOD_RES (6)..(7)..(39)..(41): Xaa is C or S

SEQ ID NO: 64199 - protein, 29 aa, Artificial Sequence
  Cyclic GFR-binding peptide
  MOD_RES (28)..(28): Xaa is C or S
DLSPISILYIVGRTPKVYKQYEMVVKSXK

SEQ ID NO: 64200 - protein, 35 aa, Artificial Sequence; identical to SEQ ID NO: 20305
  Cyclic GFR-binding peptide
  MOD_RES (1)..(2)..(34): Xaa is C or S

SEQ ID NO: 64201 - protein, 37 aa, Artificial Sequence; identical to SEQ ID NO: 20307
  Cyclic GFR-binding peptide
  MOD_RES (1)..(2)..(34)..(36): Xaa is C or S

SEQ ID NO: 64202 - protein, 25 aa, Artificial Sequence
  Cyclic GFR-binding peptide
VPTELSPISMLYIDEYDKVVYKQYE

SEQ ID NO: 64203 - protein, 30 aa, Artificial Sequence
  Cyclic GFR-binding peptide
  MOD_RES (3)..(4): Xaa is C or S
KPXXAPTKLSPISVLYIDDSSNVIYKQYEN

SEQ ID NO: 64204 - protein, 32 aa, Artificial Sequence
  Cyclic GFR-binding peptide
  MOD_RES (5)..(6): Xaa is C or S
SAAPXXVPQALSPISILYIVGRKPKVYKQYEM

SEQ ID NO: 64205 - protein, 34 aa, Artificial Sequence; identical to SEQ ID NO: 20313
  Cyclic GFR-binding peptide
  MOD_RES (1)..(33): Xaa is C or S

SEQ ID NO: 64206 - protein, 36 aa, Artificial Sequence; identical to SEQ ID NO: 20314
  Cyclic GFR-binding peptide
  MOD_RES (4)..(5): Xaa is C or S

SEQ ID NO: 64207 - protein, 21 aa, Artificial Sequence
  Cyclic GFR-binding peptide
LNAISILYFDAANNVVLKKYR

SEQ ID NO: 64208 - protein, 20 aa, Artificial Sequence
  Cyclic GFR-binding peptide
EPISILYLDAANNVVKFKYE

SEQ ID NO: 64209 - protein, 39 aa, Artificial Sequence; identical to SEQ ID NO: 20316
  Cyclic GFR-binding peptide
  MOD_RES (4)..(5)..(36)..(38): Xaa is C or S

SEQ ID NO: 64210 - protein, 21 aa, Artificial Sequence
  Cyclic GFR-binding peptide
LSPISILYIDKGVVTYYKQYE

SEQ ID NO: 64211 - protein, 29 aa, Artificial Sequence
  Cyclic GFR-binding peptide
  MOD_RES (3)..(4): Xaa is C or S
KAXXVPTKLSPISILYKDKGVVTYLKYHY

SEQ ID NO: 64212 - protein, 22 aa, Artificial Sequence
  Cyclic GFR-binding peptide
LSPISMLYIDENEKVVYKQYED

SEQ ID NO: 64213 - protein, 39 aa, Artificial Sequence; identical to SEQ ID NO: 20318
  Cyclic GFR-binding peptide
  MOD_RES (4)..(5)..(37)..(39): Xaa is C or S

SEQ ID NO: 64214 - protein, 28 aa, Artificial Sequence
  Cyclic GFR-binding peptide
  MOD_RES (2)..(3): Xaa is C or S
PXXVPQDLEPISILYLVGRTPKVKFKYE

SEQ ID NO: 64215 - protein, 34 aa, Artificial Sequence
  Cyclic GFR-binding peptide
  MOD_RES (4)..(5): Xaa is C or S
PKAXXAPTKLSPISVLYIDSSNNVIYKQYENMVV

SEQ ID NO: 64216 - protein, 26 aa, Artificial Sequence
  Cyclic GFR-binding peptide
APTQLEPISVLYLDDSSNVIKFKYEN

SEQ ID NO: 64217 - protein, 35 aa, Artificial Sequence
  Cyclic GFR-binding peptide
  MOD_RES (6)..(7): Xaa is C or S
SIPKAXXVPTELEPISMLYLDEYDKVVKFKYEEMV

SEQ ID NO: 64218 - protein, 34 aa, Artificial Sequence
  Cyclic GFR-binding peptide
  MOD_RES (31)..(33): Xaa is C or S
PTELEPISMLYLDEYDKVVKFKYEEMVVEGXGXR

SEQ ID NO: 64219 - protein, 33 aa, Artificial Sequence
  Cyclic GFR-binding peptide
  MOD_RES (3)..(4): Xaa is C or S
ASXXVPARLSPISILYKDAANNVVLKYHYDMVV

SEQ ID NO: 64220 - protein, 27 aa, Artificial Sequence
  Cyclic GFR-binding peptide
PTELEPISMLYLDENEKVVKFKYEDMV

SEQ ID NO: 64221 - protein, 39 aa, Artificial Sequence; identical to SEQ ID NO: 20326
  Cyclic GFR-binding peptide
  MOD_RES (4)..(36)..(38): Xaa is C or S

SEQ ID NO: 64222 - protein, 26 aa, Artificial Sequence
  Cyclic GFR-binding peptide
EPISVLYLDDMGVPTKFKYEEGMSVA

SEQ ID NO: 64223 - protein, 37 aa, Artificial Sequence; identical to SEQ ID NO: 20331
  Cyclic GFR-binding peptide
  MOD_RES (2)..(3)..(35)..(37): Xaa is C or S

SEQ ID NO: 64224 - protein, 34 aa, Artificial Sequence; identical to SEQ ID NO: 20333
  Cyclic GFR-binding peptide
  MOD_RES (1)..(34): Xaa is C or S

SEQ ID NO: 64225 - protein, 33 aa, Artificial Sequence; identical to SEQ ID NO: 20334
  Cyclic GFR-binding peptide
  MOD_RES (32)..(32): Xaa is C or S

SEQ ID NO: 64226 - protein, 33 aa, Artificial Sequence; identical to SEQ ID NO: 20335
  Cyclic GFR-binding peptide
  MOD_RES (2)..(3): Xaa is C or S

SEQ ID NO: 64227 - protein, 28 aa, Artificial Sequence
  Cyclic GFR-binding peptide
SQDLEPISILYLIGKTPKIKFKYEMIVK

SEQ ID NO: 64228 - protein, 29 aa, Artificial Sequence
  Cyclic GFR-binding peptide
  MOD_RES (1)..(1): Xaa is C or S
XAPTKLSPISVLYIDDSSNVIYKQYENMV

SEQ ID NO: 64229 - protein, 31 aa, Artificial Sequence
  Cyclic GFR-binding peptide
  MOD_RES (5)..(6): Xaa is C or S
SASPXXVPQDLEPISILYLVGRTPKVKFKYE

SEQ ID NO: 64230 - protein, 22 aa, Artificial Sequence
  Cyclic GFR-binding peptide
LEPISILYLIGKTPKIKFKYEM

SEQ ID NO: 64231 - protein, 31 aa, Artificial Sequence
  Cyclic GFR-binding peptide
  MOD_RES (3)..(4): Xaa is C or S
APXXVPQALEPISILYLVGRKPKVKFKYEMI

SEQ ID NO: 64232 - protein, 31 aa, Artificial Sequence
  Cyclic GFR-binding peptide
  MOD_RES (30)..(30): Xaa is C or S
TKLNAISILYFDKGVVTYLKKYRGMAVSEXG

SEQ ID NO: 64233 - protein, 29 aa, Artificial Sequence
  Cyclic GFR-binding peptide
  MOD_RES (27)..(29): Xaa is C or S
LEPISILYLVGRKPKVKFKYEMIVRSXKX

SEQ ID NO: 64234 - protein, 35 aa, Artificial Sequence
  Cyclic GFR-binding peptide
  MOD_RES (6)..(7): Xaa is C or S
KASKAXXVPTKLSPISILYKDKGVVTYLKYHYGMA

SEQ ID NO: 64235 - protein, 30 aa, Artificial Sequence
  Cyclic GFR-binding peptide
  MOD_RES (2)..(3): Xaa is C or S
AXXVPTKLSPISVLYIDDMGVPTYKQYEEG

SEQ ID NO: 64236 - protein, 34 aa, Artificial Sequence
  Cyclic GFR-binding peptide
  MOD_RES (4)..(5): Xaa is C or S
GKAXXVPTKLEPISVLYLDDMGVPTKFKYEEGMS

SEQ ID NO: 64237 - protein, 39 aa, Artificial Sequence; identical to SEQ ID NO: 20349
  Cyclic GFR-binding peptide
  MOD_RES (4)..(5)..(37)..(39): Xaa is C or S

SEQ ID NO: 64238 - protein, 38 aa, Artificial Sequence; identical to SEQ ID NO: 20352
  Cyclic GFR-binding peptide
  MOD_RES (3)..(4)..(36)..(38): Xaa is C or S

SEQ ID NO: 64239 - protein, 29 aa, Artificial Sequence
  Cyclic GFR-binding peptide
APTKLEPISVLYLDSSNNVIKFKYENMVV

SEQ ID NO: 64240 - protein, 40 aa, Artificial Sequence; identical to SEQ ID NO: 20353
  Cyclic GFR-binding peptide
  MOD_RES (6)..(7)..(39): Xaa is C or S

SEQ ID NO: 64241 - protein, 36 aa, Artificial Sequence; identical to SEQ ID NO: 20356
  Cyclic GFR-binding peptide
  MOD_RES (2)..(3)..(35): Xaa is C or S

SEQ ID NO: 64242 - protein, 29 aa, Artificial Sequence
  Cyclic GFR-binding peptide
  MOD_RES (1)..(1): Xaa is C or S
XVPTELEPISMLYLDENEKVVKFKYEDMV

SEQ ID NO: 64243 - protein, 25 aa, Artificial Sequence
  Cyclic GFR-binding peptide
QDLEPISILYLVGRTPKVKFKYEMV

SEQ ID NO: 64244 - protein, 33 aa, Artificial Sequence
  Cyclic GFR-binding peptide
  MOD_RES (31)..(33): Xaa is C or S
PTQLSPISVLYIDDSSNVIYKQYENMVVRAXGX

SEQ ID NO: 64245 - protein, 35 aa, Artificial Sequence; identical to SEQ ID NO: 20362
  Cyclic GFR-binding peptide
  MOD_RES (1)..(34): Xaa is C or S

SEQ ID NO: 64246 - protein, 32 aa, Artificial Sequence; identical to SEQ ID NO: 20367
  Cyclic GFR-binding peptide
  MOD_RES (1)..(2): Xaa is C or S

SEQ ID NO: 64247 - protein, 36 aa, Artificial Sequence; identical to SEQ ID NO: 20369
  Cyclic GFR-binding peptide
  MOD_RES (2)..(3)..(35): Xaa is C or S

SEQ ID NO: 64248 - protein, 36 aa, Artificial Sequence; identical to SEQ ID NO: 20370
  Cyclic GFR-binding peptide
  MOD_RES (2)..(3)..(35): Xaa is C or S

SEQ ID NO: 64249 - protein, 25 aa, Artificial Sequence
  Cyclic GFR-binding peptide
KLSPISVLYIDSSNNVIYKQYENMV

SEQ ID NO: 64250 - protein, 36 aa, Artificial Sequence; identical to SEQ ID NO: 20373
  Cyclic GFR-binding peptide
  MOD_RES (4)..(36): Xaa is C or S

SEQ ID NO: 64251 - protein, 39 aa, Artificial Sequence; identical to SEQ ID NO: 20375
  Cyclic GFR-binding peptide
  MOD_RES (6)..(7)..(39): Xaa is C or S

SEQ ID NO: 64252 - protein, 33 aa, Artificial Sequence; identical to SEQ ID NO: 20376
  Cyclic GFR-binding peptide
  MOD_RES (1)..(2): Xaa is C or S

SEQ ID NO: 64253 - protein, 25 aa, Artificial Sequence
  Cyclic GFR-binding peptide
TELSPISMLYIDEYDKVVYKQYEEM

SEQ ID NO: 64254 - protein, 30 aa, Artificial Sequence
  Cyclic GFR-binding peptide
  MOD_RES (1)..(1): Xaa is C or S
XVPQDLSPISILYIVGRTPKVYKQYEMVVK

SEQ ID NO: 64255 - protein, 27 aa, Artificial Sequence
  Cyclic GFR-binding peptide
LEPISVLYLDDMGVPTKFKYEEGMSVA

SEQ ID NO: 64256 - protein, 31 aa, Artificial Sequence
  Cyclic GFR-binding peptide
  MOD_RES (30)..(30): Xaa is C or S
PQDLSPISILYIVGRTPKVYKQYEMVVKSXK

SEQ ID NO: 64257 - protein, 26 aa, Artificial Sequence
  Cyclic GFR-binding peptide
  MOD_RES (26)..(26): Xaa is C or S
EPISILYLVGRTPKVKFKYEMVVKSX

SEQ ID NO: 64258 - protein, 40 aa, Artificial Sequence; identical to SEQ ID NO: 20382
  Cyclic GFR-binding peptide
  MOD_RES (7)..(39): Xaa is C or S

SEQ ID NO: 64259 - protein, 35 aa, Artificial Sequence; identical to SEQ ID NO: 20384
  Cyclic GFR-binding peptide
  MOD_RES (33)..(35): Xaa is C or S

SEQ ID NO: 64260 - protein, 32 aa, Artificial Sequence
  Cyclic GFR-binding peptide
  MOD_RES (31)..(31): Xaa is C or S
PTELSPISMLYIDEYDKVVYKQYEEMVVEGXG

SEQ ID NO: 64261 - protein, 36 aa, Artificial Sequence; identical to SEQ ID NO: 20387
  Cyclic GFR-binding peptide
  MOD_RES (2)..(3)..(35): Xaa is C or S

SEQ ID NO: 64262 - protein, 30 aa, Artificial Sequence
  Cyclic GFR-binding peptide
  MOD_RES (30)..(30): Xaa is C or S
TKLEPISVLYLDDSSNVIKFKYENMVVRSX

SEQ ID NO: 64263 - protein, 21 aa, Artificial Sequence
  Cyclic GFR-binding peptide
LSPISILYIIGKTPKIYKQYE

SEQ ID NO: 64264 - protein, 25 aa, Artificial Sequence
  Cyclic GFR-binding peptide
KLSPISILYKDKGVVTYLKYHYGMA

SEQ ID NO: 64265 - protein, 31 aa, Artificial Sequence
  Cyclic GFR-binding peptide
  MOD_RES (28)..(30): Xaa is C or S
LSPISILYIDKGVVTYYKQYEGMAVSEXGXR

SEQ ID NO: 64266 - protein, 23 aa, Artificial Sequence
  Cyclic GFR-binding peptide
DLSPISILYIVGRTPKVYKQYEM

SEQ ID NO: 64267 - protein, 30 aa, Artificial Sequence
  Cyclic GFR-binding peptide
  MOD_RES (1)..(1): Xaa is C or S
XAPTKLEPISVLYLDSSNNVIKFKYENMVV

SEQ ID NO: 64268 - protein, 30 aa, Artificial Sequence
  Cyclic GFR-binding peptide
  MOD_RES (4)..(5): Xaa is C or S
ASPXXVPQDLEPISILYLVGRTPKVKFKYE

SEQ ID NO: 64269 - protein, 31 aa, Artificial Sequence
  Cyclic GFR-binding peptide
  MOD_RES (30)..(30): Xaa is C or S
PQDLEPISILYLVGRTPKVKFKYEMVVKSXK

SEQ ID NO: 64270 - protein, 33 aa, Artificial Sequence
  Cyclic GFR-binding peptide
  MOD_RES (4)..(5): Xaa is C or S
ASPXXVPQDLSPISILYIVGRTPKVYKQYEMVV

SEQ ID NO: 64271 - protein, 26 aa, Artificial Sequence
  Cyclic GFR-binding peptide
QDLEPISILYLIGKTPKIKFKYEMIV

SEQ ID NO: 64272 - protein, 31 aa, Artificial Sequence
  Cyclic GFR-binding peptide
  MOD_RES (29)..(31): Xaa is C or S
QLEPISVLYLDDSSNVIKFKYENMVVRAXGX

SEQ ID NO: 64273 - protein, 28 aa, Artificial Sequence
  Cyclic GFR-binding peptide
VPTKLSPISVLYIDDMGVPTYKQYEEGM

SEQ ID NO: 64274 - protein, 32 aa, Artificial Sequence
  Cyclic GFR-binding peptide
  MOD_RES (2)..(3): Xaa is C or S
PXXVPQALEPISILYLVGRKPKVKFKYEMIVR

SEQ ID NO: 64275 - protein, 29 aa, Artificial Sequence
  Cyclic GFR-binding peptide
  MOD_RES (4)..(4): Xaa is C or S
KPTXAPTKLSPISVLYIDDSSNVIYKQYE

SEQ ID NO: 64276 - protein, 38 aa, Artificial Sequence; identical to SEQ ID NO: 20404
  Cyclic GFR-binding peptide
  MOD_RES (2)..(3)..(35)..(37): Xaa is C or S

SEQ ID NO: 64277 - protein, 37 aa, Artificial Sequence; identical to SEQ ID NO: 20405
  Cyclic GFR-binding peptide
  MOD_RES (2)..(3)..(34)..(36): Xaa is C or S

SEQ ID NO: 64278 - protein, 27 aa, Artificial Sequence
  Cyclic GFR-binding peptide
  MOD_RES (1)..(2): Xaa is C or S
XXVPARLEPISILYLDAANNVVKFKYE

SEQ ID NO: 64279 - protein, 33 aa, Artificial Sequence
  Cyclic GFR-binding peptide
  MOD_RES (6)..(7): Xaa is C or S
TVPKPXXAPTQLEPISVLYLDDSSNVIKFKYEN

SEQ ID NO: 64280 - protein, 31 aa, Artificial Sequence; identical to SEQ ID NO: 20410
  Cyclic GFR-binding peptide
  MOD_RES (31)..(31): Xaa is C or S

SEQ ID NO: 64281 - protein, 33 aa, Artificial Sequence; identical to SEQ ID NO: 20416
  Cyclic GFR-binding peptide
  MOD_RES (2)..(3): Xaa is C or S

SEQ ID NO: 64282 - protein, 28 aa, Artificial Sequence
  Cyclic GFR-binding peptide
PTKLSPISVLYIDSSNNVIYKQYENMVV

SEQ ID NO: 64283 - protein, 24 aa, Artificial Sequence
  Cyclic GFR-binding peptide
TKLSPISILYKDKGVVTYLKYHYG

SEQ ID NO: 64284 - protein, 33 aa, Artificial Sequence
  Cyclic GFR-binding peptide
  MOD_RES (30)..(32): Xaa is C or S
ARLSPISILYKDAANNVVLKYHYDMVVEAXGXR

SEQ ID NO: 64285 - protein, 25 aa, Artificial Sequence
  Cyclic GFR-binding peptide
VPTKLNAISILYFDKGVVTYLKKYR

SEQ ID NO: 64286 - protein, 41 aa, Artificial Sequence; identical to SEQ ID NO: 20423
  Cyclic GFR-binding peptide
  MOD_RES (6)..(7)..(40): Xaa is C or S

SEQ ID NO: 64287 - protein, 40 aa, Artificial Sequence; identical to SEQ ID NO: 20425
  Cyclic GFR-binding peptide
  MOD_RES (3)..(4)..(37)..(39): Xaa is C or S

SEQ ID NO: 64288 - protein, 35 aa, Artificial Sequence
  Cyclic GFR-binding peptide
  MOD_RES (5)..(6): Xaa is C or S
SASPXXVSQDLEPISILYLIGKTPKIKFKYEMIVK

SEQ ID NO: 64289 - protein, 28 aa, Artificial Sequence
  Cyclic GFR-binding peptide
TELSPISMLYIDEYDKVVYKQYEEMVVE

SEQ ID NO: 64290 - protein, 29 aa, Artificial Sequence
  Cyclic GFR-binding peptide
  MOD_RES (28)..(28): Xaa is C or S
DLEPISILYLVGRTPKVKFKYEMVVKSXK

SEQ ID NO: 64291 - protein, 37 aa, Artificial Sequence; identical to SEQ ID NO: 20429
  Cyclic GFR-binding peptide
  MOD_RES (6)..(7): Xaa is C or S

SEQ ID NO: 64292 - protein, 34 aa, Artificial Sequence
  Cyclic GFR-binding peptide
  MOD_RES (4)..(5): Xaa is C or S
SKAXXVPTKLSPISILYIDKGVVTYYKQYEGMAV

SEQ ID NO: 64293 - protein, 41 aa, Artificial Sequence; identical to SEQ ID NO: 20431
  Cyclic GFR-binding peptide
  MOD_RES (6)..(7)..(39)..(41): Xaa is C or S

SEQ ID NO: 64294 - protein, 31 aa, Artificial Sequence
  Cyclic GFR-binding peptide
  MOD_RES (30)..(30): Xaa is C or S
ARLNAISILYFDAANNVVLKKYRDMVVEAXG

SEQ ID NO: 64295 - protein, 38 aa, Artificial Sequence; identical to SEQ ID NO: 20433
  Cyclic GFR-binding peptide
  MOD_RES (2)..(3)..(35)..(37): Xaa is C or S

SEQ ID NO: 64296 - protein, 26 aa, Artificial Sequence
  Cyclic GFR-binding peptide
LSPISMLYIDENEKVVYKQYEDMVVE

SEQ ID NO: 64297 - protein, 40 aa, Artificial Sequence; identical to SEQ ID NO: 20439
  Cyclic GFR-binding peptide
  MOD_RES (4)..(5)..(37)..(39): Xaa is C or S

SEQ ID NO: 64298 - protein, 34 aa, Artificial Sequence
  Cyclic GFR-binding peptide
  MOD_RES (5)..(6): Xaa is C or S
VPKPXXAPTQLSPISVLYIDDSSNVIYKQYENMV

SEQ ID NO: 64299 - protein, 33 aa, Artificial Sequence
  Cyclic GFR-binding peptide
  MOD_RES (6)..(6): Xaa is C or S
VTKPTXAPTKLEPISVLYLDDSSNVIKFKYENM

SEQ ID NO: 64300 - protein, 36 aa, Artificial Sequence; identical to SEQ ID NO: 20444
  Cyclic GFR-binding peptide
  MOD_RES (4)..(5): Xaa is C or S

SEQ ID NO: 64301 - protein, 31 aa, Artificial Sequence
  Cyclic GFR-binding peptide
  MOD_RES (2)..(3): Xaa is C or S
PXXVPQALSPISILYIVGRKPKVYKQYEMIV

SEQ ID NO: 64302 - protein, 26 aa, Artificial Sequence
  Cyclic GFR-binding peptide
PTQLSPISVLYIDDSSNVIYKQYENM

SEQ ID NO: 64303 - protein, 29 aa, Artificial Sequence
  Cyclic GFR-binding peptide
PARLNAISILYFDAANNVVLKKYRDMVVE

SEQ ID NO: 64304 - protein, 34 aa, Artificial Sequence
  Cyclic GFR-binding peptide
  MOD_RES (5)..(6): Xaa is C or S
SASPXXVSQDLSPISILYIIGKTPKIYKQYEMIV

SEQ ID NO: 64305 - protein, 33 aa, Artificial Sequence
  Cyclic GFR-binding peptide
  MOD_RES (4)..(5): Xaa is C or S
PKAXXAPTKLEPISVLYLDSSNNVIKFKYENMV

SEQ ID NO: 64306 - protein, 38 aa, Artificial Sequence; identical to SEQ ID NO: 20452
  Cyclic GFR-binding peptide
  MOD_RES (5)..(37): Xaa is C or S

SEQ ID NO: 64307 - protein, 33 aa, Artificial Sequence
  Cyclic GFR-binding peptide
  MOD_RES (31)..(33): Xaa is C or S
PTKLSPISVLYIDDSSNVIYKQYENMVVRSXGX

SEQ ID NO: 64308 - protein, 32 aa, Artificial Sequence
  Cyclic GFR-binding peptide
  MOD_RES (4)..(5): Xaa is C or S
ASPXXVPQDLSPISILYIVGRTPKVYKQYEMV

SEQ ID NO: 64309 - protein, 40 aa, Artificial Sequence; identical to SEQ ID NO: 20455
  Cyclic GFR-binding peptide
  MOD_RES (5)..(6)..(37)..(39): Xaa is C or S

SEQ ID NO: 64310 - protein, 29 aa, Artificial Sequence
  Cyclic GFR-binding peptide
  MOD_RES (28)..(28): Xaa is C or S
LSPISILYIDKGVVTYYKQYEGMAVSEXG

SEQ ID NO: 64311 - protein, 22 aa, Artificial Sequence
  Cyclic GFR-binding peptide
SPISMLYIDENEKVVYKQYEDM

SEQ ID NO: 64312 - protein, 28 aa, Artificial Sequence
  Cyclic GFR-binding peptide
PARLNAISILYFDAANNVVLKKYRDMVV

SEQ ID NO: 64313 - protein, 27 aa, Artificial Sequence
  Cyclic GFR-binding peptide
PQDLEPISILYLVGRTPKVKFKYEMVV

SEQ ID NO: 64314 - protein, 35 aa, Artificial Sequence; identical to SEQ ID NO: 18149
  Cyclic GFR-binding peptide
  MOD_RES (2)..(3)..(35): Xaa is C or S

SEQ ID NO: 64315 - protein, 24 aa, Artificial Sequence
  Cyclic GFR-binding peptide
SPISILYIDKGVVTYYKQYEGMAV

SEQ ID NO: 64316 - protein, 28 aa, Artificial Sequence
  Cyclic GFR-binding peptide
  MOD_RES (2)..(3): Xaa is C or S
AXXVPTKLEPISVLYLDDMGVPTKFKYE

SEQ ID NO: 64317 - protein, 32 aa, Artificial Sequence
  Cyclic GFR-binding peptide
  MOD_RES (31)..(31): Xaa is C or S
PTELEPISMLYLDEYDKVVKFKYEEMVVEGXG

SEQ ID NO: 64318 - protein, 32 aa, Artificial Sequence
  Cyclic GFR-binding peptide
  MOD_RES (2)..(3): Xaa is C or S
AXXVPTKLNAISILYFDKGVVTYLKKYRGMAV

SEQ ID NO: 64319 - protein, 25 aa, Artificial Sequence
  Cyclic GFR-binding peptide
PQDLSPISILYIVGRTPKVYKQYEM

SEQ ID NO: 64320 - protein, 28 aa, Artificial Sequence
  Cyclic GFR-binding peptide
PQDLEPISILYLVGRTPKVKFKYEMVVK

SEQ ID NO: 64321 - protein, 24 aa, Artificial Sequence
  Cyclic GFR-binding peptide
LEPISMLYLDENEKVVKFKYEDMV

SEQ ID NO: 64322 - protein, 33 aa, Artificial Sequence; identical to SEQ ID NO: 18154
  Cyclic GFR-binding peptide
  MOD_RES (2)..(3): Xaa is C or S

SEQ ID NO: 64323 - protein, 32 aa, Artificial Sequence
  Cyclic GFR-binding peptide
  MOD_RES (31)..(31): Xaa is C or S
PTKLEPISVLYLDDSSNVIKFKYENMVVRSXG

SEQ ID NO: 64324 - protein, 40 aa, Artificial Sequence; identical to SEQ ID NO: 18159
  Cyclic GFR-binding peptide
  MOD_RES (4)..(5)..(37)..(39): Xaa is C or S

SEQ ID NO: 64325 - protein, 35 aa, Artificial Sequence
  Cyclic GFR-binding peptide
  MOD_RES (6)..(7): Xaa is C or S
AAPASXXVPARLNAISILYFDAANNVVLKKYRDMV

SEQ ID NO: 64326 - protein, 31 aa, Artificial Sequence
  Cyclic GFR-binding peptide
  MOD_RES (29)..(31): Xaa is C or S
ELSPISMLYIDENEKVVYKQYEDMVVEGXGX

SEQ ID NO: 64327 - protein, 36 aa, Artificial Sequence; identical to SEQ ID NO: 18161
  Cyclic GFR-binding peptide
  MOD_RES (5)..(6): Xaa is C or S

SEQ ID NO: 64328 - protein, 20 aa, Artificial Sequence
  Cyclic GFR-binding peptide
SPISMLYIDENEKVVYKQYE

SEQ ID NO: 64329 - protein, 34 aa, Artificial Sequence; identical to SEQ ID NO: 18171
  Cyclic GFR-binding peptide
  MOD_RES (1)..(33): Xaa is C or S

SEQ ID NO: 64330 - protein, 30 aa, Artificial Sequence; identical to SEQ ID NO: 18172
  Cyclic GFR-binding peptide

SEQ ID NO: 64331 - protein, 38 aa, Artificial Sequence; identical to SEQ ID NO: 18178
  Cyclic GFR-binding peptide
  MOD_RES (3)..(35)..(37): Xaa is C or S

SEQ ID NO: 64332 - protein, 37 aa, Artificial Sequence; identical to SEQ ID NO: 18179
  Cyclic GFR-binding peptide
  MOD_RES (6)..(7): Xaa is C or S

SEQ ID NO: 64333 - protein, 32 aa, Artificial Sequence; identical to SEQ ID NO: 18182
  Cyclic GFR-binding peptide
  MOD_RES (1)..(32): Xaa is C or S

SEQ ID NO: 64334 - protein, 37 aa, Artificial Sequence; identical to SEQ ID NO: 18184
  Cyclic GFR-binding peptide
  MOD_RES (4)..(5)..(37): Xaa is C or S

SEQ ID NO: 64335 - protein, 20 aa, Artificial Sequence
  Cyclic GFR-binding peptide
EPISMLYLDENEKVVKFKYE

SEQ ID NO: 64336 - protein, 42 aa, Artificial Sequence; identical to SEQ ID NO: 18186
  Cyclic GFR-binding peptide
  MOD_RES (6)..(7)..(39)..(41): Xaa is C or S

SEQ ID NO: 64337 - protein, 28 aa, Artificial Sequence
  Cyclic GFR-binding peptide
VPTKLEPISVLYLDDMGVPTKFKYEEGM

SEQ ID NO: 64338 - protein, 24 aa, Artificial Sequence
  Cyclic GFR-binding peptide
SQDLEPISILYLIGKTPKIKFKYE

SEQ ID NO: 64339 - protein, 41 aa, Artificial Sequence; identical to SEQ ID NO: 18188
  Cyclic GFR-binding peptide
  MOD_RES (6)..(7)..(39)..(41): Xaa is C or S

SEQ ID NO: 64340 - protein, 36 aa, Artificial Sequence; identical to SEQ ID NO: 18192
  Cyclic GFR-binding peptide
  MOD_RES (6)..(6): Xaa is C or S

SEQ ID NO: 64341 - protein, 37 aa, Artificial Sequence; identical to SEQ ID NO: 18193
  Cyclic GFR-binding peptide
  MOD_RES (4)..(5)..(37): Xaa is C or S

SEQ ID NO: 64342 - protein, 25 aa, Artificial Sequence
  Cyclic GFR-binding peptide
LSPISILYIVGRKPKVYKQYEMIVR

SEQ ID NO: 64343 - protein, 35 aa, Artificial Sequence; identical to SEQ ID NO: 18196
  Cyclic GFR-binding peptide
  MOD_RES (3)..(4)..(35): Xaa is C or S

SEQ ID NO: 64344 - protein, 27 aa, Artificial Sequence
  Cyclic GFR-binding peptide
  MOD_RES (27)..(27): Xaa is C or S
LEPISILYLIGKTPKIKFKYEMIVKSX

SEQ ID NO: 64345 - protein, 41 aa, Artificial Sequence; identical to SEQ ID NO: 18198
  Cyclic GFR-binding peptide
  MOD_RES (5)..(6)..(38)..(40): Xaa is C or S

SEQ ID NO: 64346 - protein, 31 aa, Artificial Sequence
  Cyclic GFR-binding peptide
  MOD_RES (4)..(5): Xaa is C or S
GKAXXVPTKLSPISVLYIDDMGVPTYKQYEE

SEQ ID NO: 64347 - protein, 29 aa, Artificial Sequence
  Cyclic GFR-binding peptide
TKLSPISILYKDKGVVTYLKYHYGMAVSE

SEQ ID NO: 64348 - protein, 30 aa, Artificial Sequence
  Cyclic GFR-binding peptide
  MOD_RES (3)..(4): Xaa is C or S
APXXVPQALSPISILYIVGRKPKVYKQYEM

SEQ ID NO: 64349 - protein, 33 aa, Artificial Sequence; identical to SEQ ID NO: 18202
  Cyclic GFR-binding peptide
  MOD_RES (32)..(32): Xaa is C or S

SEQ ID NO: 64350 - protein, 38 aa, Artificial Sequence; identical to SEQ ID NO: 18203
  Cyclic GFR-binding peptide
  MOD_RES (6)..(7): Xaa is C or S

SEQ ID NO: 64351 - protein, 36 aa, Artificial Sequence
  Cyclic GFR-binding peptide
  MOD_RES (6)..(7): Xaa is C or S
AAPASXXVPARLSPISILYKDAANNVVLKYHYDMVV

SEQ ID NO: 64352 - protein, 32 aa, Artificial Sequence
  Cyclic GFR-binding peptide
  MOD_RES (6)..(6): Xaa is C or S
VTKPTXAPTKLSPISVLYIDDSSNVIYKQYEN

SEQ ID NO: 64353 - protein, 38 aa, Artificial Sequence; identical to SEQ ID NO: 18205
  Cyclic GFR-binding peptide
  MOD_RES (3)..(4)..(36)..(38): Xaa is C or S

SEQ ID NO: 64354 - protein, 39 aa, Artificial Sequence; identical to SEQ ID NO: 18206
  Cyclic GFR-binding peptide
  MOD_RES (3)..(4)..(36)..(38): Xaa is C or S

SEQ ID NO: 64355 - protein, 29 aa, Artificial Sequence
  Cyclic GFR-binding peptide
  MOD_RES (1)..(2): Xaa is C or S
XXVPTKLSPISILYIDKGVVTYYKQYEGM

SEQ ID NO: 64356 - protein, 35 aa, Artificial Sequence; identical to SEQ ID NO: 18209
  Cyclic GFR-binding peptide
  MOD_RES (1)..(33)..(35): Xaa is C or S

SEQ ID NO: 64357 - protein, 36 aa, Artificial Sequence; identical to SEQ ID NO: 18215
  Cyclic GFR-binding peptide
  MOD_RES (2)..(3)..(35): Xaa is C or S

SEQ ID NO: 64358 - protein, 32 aa, Artificial Sequence
  Cyclic GFR-binding peptide
  MOD_RES (6)..(7): Xaa is C or S
ASAAPXXVPQALSPISILYIVGRKPKVYKQYE

SEQ ID NO: 64359 - protein, 35 aa, Artificial Sequence
  Cyclic GFR-binding peptide
  MOD_RES (6)..(7): Xaa is C or S
TVPKPXXAPTQLSPISVLYIDDSSNVIYKQYENMV

SEQ ID NO: 64360 - protein, 35 aa, Artificial Sequence
  Cyclic GFR-binding peptide
  MOD_RES (6)..(7): Xaa is C or S
KIPKAXXVPTELEPISMLYLDENEKVVKFKYEDMV

SEQ ID NO: 64361 - protein, 31 aa, Artificial Sequence; identical to SEQ ID NO: 18218
  Cyclic GFR-binding peptide

SEQ ID NO: 64362 - protein, 25 aa, Artificial Sequence
  Cyclic GFR-binding peptide
VPTELEPISMLYLDEYDKVVKFKYE

SEQ ID NO: 64363 - protein, 34 aa, Artificial Sequence; identical to SEQ ID NO: 18223
  Cyclic GFR-binding peptide
  MOD_RES (3)..(4): Xaa is C or S

SEQ ID NO: 64364 - protein, 37 aa, Artificial Sequence; identical to SEQ ID NO: 18225
  Cyclic GFR-binding peptide
  MOD_RES (1)..(2)..(34)..(36): Xaa is C or S

SEQ ID NO: 64365 - protein, 33 aa, Artificial Sequence
  Cyclic GFR-binding peptide
  MOD_RES (31)..(33): Xaa is C or S
PTKLEPISVLYLDDSSNVIKFKYENMVVRSXGX

SEQ ID NO: 64366 - protein, 41 aa, Artificial Sequence; identical to SEQ ID NO: 18228
  Cyclic GFR-binding peptide
  MOD_RES (5)..(6)..(38)..(40): Xaa is C or S

SEQ ID NO: 64367 - protein, 29 aa, Artificial Sequence
  Cyclic GFR-binding peptide
TKLSPISVLYIDSSNNVIYKQYENMVVKA

SEQ ID NO: 64368 - protein, 24 aa, Artificial Sequence
  Cyclic GFR-binding peptide
QDLSPISILYIVGRTPKVYKQYEM

SEQ ID NO: 64369 - protein, 33 aa, Artificial Sequence; identical to SEQ ID NO: 18235
  Cyclic GFR-binding peptide
  MOD_RES (2)..(3): Xaa is C or S

SEQ ID NO: 64370 - protein, 30 aa, Artificial Sequence
  Cyclic GFR-binding peptide
  MOD_RES (27)..(29): Xaa is C or S
EPISILYLDAANNVVKFKYEDMVVEAXGXR

SEQ ID NO: 64371 - protein, 32 aa, Artificial Sequence
  Cyclic GFR-binding peptide
  MOD_RES (5)..(6): Xaa is C or S
ASKAXXVPTKLNAISILYFDKGVVTYLKKYRG

SEQ ID NO: 64372 - protein, 31 aa, Artificial Sequence
  Cyclic GFR-binding peptide
  MOD_RES (5)..(6): Xaa is C or S
IPKAXXVPTELSPISMLYIDENEKVVYKQYE

SEQ ID NO: 64373 - protein, 29 aa, Artificial Sequence
  Cyclic GFR-binding peptide
  MOD_RES (3)..(4): Xaa is C or S
KAXXVPTKLNAISILYFDKGVVTYLKKYR

SEQ ID NO: 64374 - protein, 27 aa, Artificial Sequence
  Cyclic GFR-binding peptide
APTKLSPISVLYIDSSNNVIYKQYENM

SEQ ID NO: 64375 - protein, 24 aa, Artificial Sequence
  Cyclic GFR-binding peptide
DLEPISILYLIGKTPKIKFKYEMI

SEQ ID NO: 64376 - protein, 26 aa, Artificial Sequence
  Cyclic GFR-binding peptide
ELSPISMLYIDENEKVVYKQYEDMVV

SEQ ID NO: 64377 - protein, 34 aa, Artificial Sequence
  Cyclic GFR-binding peptide
  MOD_RES (6)..(7): Xaa is C or S
ASASPXXVSQDLEPISILYLIGKTPKIKFKYEMI

SEQ ID NO: 64378 - protein, 20 aa, Artificial Sequence
  Cyclic GFR-binding peptide
EPISILYLDAANNVVKFKYE

SEQ ID NO: 64379 - protein, 31 aa, Artificial Sequence
  Cyclic GFR-binding peptide
  MOD_RES (4)..(5): Xaa is C or S
PASXXVPARLEPISILYLDAANNVVKFKYED

SEQ ID NO: 64380 - protein, 39 aa, Artificial Sequence; identical to SEQ ID NO: 18251
  Cyclic GFR-binding peptide
  MOD_RES (3)..(4)..(37)..(39): Xaa is C or S

SEQ ID NO: 64381 - protein, 33 aa, Artificial Sequence
  Cyclic GFR-binding peptide
  MOD_RES (5)..(6): Xaa is C or S
APASXXVPARLSPISILYKDAANNVVLKYHYDM

SEQ ID NO: 64382 - protein, 27 aa, Artificial Sequence
  Cyclic GFR-binding peptide
KLSPISILYIDKGVVTYYKQYEGMAVS

SEQ ID NO: 64383 - protein, 29 aa, Artificial Sequence
  Cyclic GFR-binding peptide
TELEPISMLYLDEYDKVVKFKYEEMVVEG

SEQ ID NO: 64384 - protein, 30 aa, Artificial Sequence
  Cyclic GFR-binding peptide
PTKLSPISVLYIDDMGVPTYKQYEEGMSVA

SEQ ID NO: 64385 - protein, 23 aa, Artificial Sequence
  Cyclic GFR-binding peptide
ALEPISILYLVGRKPKVKFKYEM

SEQ ID NO: 64386 - protein, 30 aa, Artificial Sequence
  Cyclic GFR-binding peptide
  MOD_RES (28)..(30): Xaa is C or S
LSPISILYKDKGVVTYLKYHYGMAVSEXGX

SEQ ID NO: 64387 - protein, 33 aa, Artificial Sequence; identical to SEQ ID NO: 18264
  Cyclic GFR-binding peptide
  MOD_RES (32)..(32): Xaa is C or S

SEQ ID NO: 64388 - protein, 30 aa, Artificial Sequence; identical to SEQ ID NO: 18269
  Cyclic GFR-binding peptide

SEQ ID NO: 64389 - protein, 23 aa, Artificial Sequence
  Cyclic GFR-binding peptide
EPISVLYLDDMGVPTKFKYEEGM

SEQ ID NO: 64390 - protein, 27 aa, Artificial Sequence
  Cyclic GFR-binding peptide
  MOD_RES (1)..(1): Xaa is C or S
XAPTKLEPISVLYLDDSSNVIKFKYEN

SEQ ID NO: 64391 - protein, 35 aa, Artificial Sequence; identical to SEQ ID NO: 18276
  Cyclic GFR-binding peptide
  MOD_RES (1)..(33)..(35): Xaa is C or S

SEQ ID NO: 64392 - protein, 37 aa, Artificial Sequence
  Cyclic GFR-binding peptide
  MOD_RES (5)..(6): Xaa is C or S
VGKAXXVPTKLEPISVLYLDDMGVPTKFKYEEGMSVA

SEQ ID NO: 64393 - protein, 33 aa, Artificial Sequence
  Cyclic GFR-binding peptide
  MOD_RES (31)..(33): Xaa is C or S
TKLSPISVLYIDDMGVPTYKQYEEGMSVAEXGX

SEQ ID NO: 64394 - protein, 30 aa, Artificial Sequence
  Cyclic GFR-binding peptide
  MOD_RES (28)..(30): Xaa is C or S
DLSPISILYIIGKTPKIYKQYEMIVKSXKX

SEQ ID NO: 64395 - protein, 29 aa, Artificial Sequence
  Cyclic GFR-binding peptide
PTKLEPISVLYLDDMGVPTKFKYEEGMSV

SEQ ID NO: 64396 - protein, 30 aa, Artificial Sequence
  Cyclic GFR-binding peptide
  MOD_RES (3)..(4): Xaa is C or S
KAXXAPTKLEPISVLYLDSSNNVIKFKYEN

SEQ ID NO: 64397 - protein, 38 aa, Artificial Sequence; identical to SEQ ID NO: 18288
  Cyclic GFR-binding peptide
  MOD_RES (3)..(4)..(36)..(38): Xaa is C or S

SEQ ID NO: 64398 - protein, 33 aa, Artificial Sequence
  Cyclic GFR-binding peptide
  MOD_RES (4)..(5): Xaa is C or S
PASXXVPARLNAISILYFDAANNVVLKKYRDMV

SEQ ID NO: 64399 - protein, 21 aa, Artificial Sequence
  Cyclic GFR-binding peptide
EPISILYLIGKTPKIKFKYEM

SEQ ID NO: 64400 - protein, 38 aa, Artificial Sequence; identical to SEQ ID NO: 18293
  Cyclic GFR-binding peptide
  MOD_RES (3)..(4)..(36)..(38): Xaa is C or S

SEQ ID NO: 64401 - protein, 30 aa, Artificial Sequence
  Cyclic GFR-binding peptide
  MOD_RES (30)..(30): Xaa is C or S
PQDLSPISILYIVGRTPKVYKQYEMVVKSX

SEQ ID NO: 64402 - protein, 29 aa, Artificial Sequence
  Cyclic GFR-binding peptide
  MOD_RES (28)..(28): Xaa is C or S
LSPISILYKDAANNVVLKYHYDMVVEAXG

SEQ ID NO: 64403 - protein, 36 aa, Artificial Sequence; identical to SEQ ID NO: 18299
  Cyclic GFR-binding peptide
  MOD_RES (4)..(5)..(36): Xaa is C or S

SEQ ID NO: 64404 - protein, 31 aa, Artificial Sequence
  Cyclic GFR-binding peptide
  MOD_RES (1)..(2): Xaa is C or S
XXVPTELEPISMLYLDEYDKVVKFKYEEMVV

SEQ ID NO: 64405 - protein, 35 aa, Artificial Sequence
  Cyclic GFR-binding peptide
  MOD_RES (5)..(6): Xaa is C or S
IPKAXXVPTELEPISMLYLDENEKVVKFKYEDMVV

SEQ ID NO: 64406 - protein, 35 aa, Artificial Sequence; identical to SEQ ID NO: 18300
  Cyclic GFR-binding peptide
  MOD_RES (4)..(5): Xaa is C or S

SEQ ID NO: 64407 - protein, 31 aa, Artificial Sequence
  Cyclic GFR-binding peptide
  MOD_RES (1)..(1): Xaa is C or S
XVPTKLSPISVLYIDDMGVPTYKQYEEGMSV

SEQ ID NO: 64408 - protein, 36 aa, Artificial Sequence; identical to SEQ ID NO: 18303
  Cyclic GFR-binding peptide
  MOD_RES (5)..(6): Xaa is C or S

SEQ ID NO: 64409 - protein, 40 aa, Artificial Sequence; identical to SEQ ID NO: 18304
  Cyclic GFR-binding peptide
  MOD_RES (5)..(6)..(38)..(40): Xaa is C or S

SEQ ID NO: 64410 - protein, 37 aa, Artificial Sequence; identical to SEQ ID NO: 18309
  Cyclic GFR-binding peptide
  MOD_RES (3)..(35)..(37): Xaa is C or S

SEQ ID NO: 64411 - protein, 27 aa, Artificial Sequence
  Cyclic GFR-binding peptide
VPTKLEPISVLYLDDMGVPTKFKYEEG

SEQ ID NO: 64412 - protein, 34 aa, Artificial Sequence
  Cyclic GFR-binding peptide
  MOD_RES (5)..(6): Xaa is C or S
SASPXXVPQDLEPISILYLVGRTPKVKFKYEMVV

SEQ ID NO: 64413 - protein, 37 aa, Artificial Sequence; identical to SEQ ID NO: 18310
  Cyclic GFR-binding peptide
  MOD_RES (4)..(36): Xaa is C or S

SEQ ID NO: 64414 - protein, 32 aa, Artificial Sequence
  Cyclic GFR-binding peptide
  MOD_RES (29)..(31): Xaa is C or S
LSPISVLYIDDMGVPTYKQYEEGMSVAEXGXR

SEQ ID NO: 64415 - protein, 30 aa, Artificial Sequence
  Cyclic GFR-binding peptide
  MOD_RES (29)..(29): Xaa is C or S
QDLEPISILYLVGRTPKVKFKYEMVVKSXK

SEQ ID NO: 64416 - protein, 30 aa, Artificial Sequence
  Cyclic GFR-binding peptide
  MOD_RES (3)..(4): Xaa is C or S
KAXXVPTKLSPISILYKDKGVVTYLKYHYG

SEQ ID NO: 64417 - protein, 21 aa, Artificial Sequence
  Cyclic GFR-binding peptide
LEPISVLYLDDMGVPTKFKYE

SEQ ID NO: 64418 - protein, 31 aa, Artificial Sequence
  Cyclic GFR-binding peptide
VPTKLSPISVLYIDDMGVPTYKQYEEGMSVA

SEQ ID NO: 64419 - protein, 35 aa, Artificial Sequence; identical to SEQ ID NO: 18315
  Cyclic GFR-binding peptide
  MOD_RES (2)..(3)..(35): Xaa is C or S

SEQ ID NO: 64420 - protein, 27 aa, Artificial Sequence
  Cyclic GFR-binding peptide
QLEPISVLYLDDSSNVIKFKYENMVVR

SEQ ID NO: 64421 - protein, 39 aa, Artificial Sequence; identical to SEQ ID NO: 18318
  Cyclic GFR-binding peptide
  MOD_RES (3)..(4)..(36)..(38): Xaa is C or S

SEQ ID NO: 64422 - protein, 29 aa, Artificial Sequence
  Cyclic GFR-binding peptide
  MOD_RES (3)..(4): Xaa is C or S
APXXVPQALEPISILYLVGRKPKVKFKYE

SEQ ID NO: 64423 - protein, 38 aa, Artificial Sequence; identical to SEQ ID NO: 18335
  Cyclic GFR-binding peptide
  MOD_RES (4)..(5)..(37): Xaa is C or S

SEQ ID NO: 64424 - protein, 37 aa, Artificial Sequence; identical to SEQ ID NO: 18338
  Cyclic GFR-binding peptide
  MOD_RES (1)..(2)..(34)..(36): Xaa is C or S

SEQ ID NO: 64425 - protein, 25 aa, Artificial Sequence
  Cyclic GFR-binding peptide
ARLEPISILYLDAANNVVKFKYEDM

SEQ ID NO: 64426 - protein, 28 aa, Artificial Sequence
  Cyclic GFR-binding peptide
KLEPISVLYLDDMGVPTKFKYEEGMSVA

SEQ ID NO: 64427 - protein, 37 aa, Artificial Sequence; identical to SEQ ID NO: 18339
  Cyclic GFR-binding peptide
  MOD_RES (2)..(3)..(34)..(36): Xaa is C or S

SEQ ID NO: 64428 - protein, 33 aa, Artificial Sequence
  Cyclic GFR-binding peptide
  MOD_RES (7)..(7): Xaa is C or S
HVTKPTXAPTKLEPISVLYLDDSSNVIKFKYEN

SEQ ID NO: 64429 - protein, 30 aa, Artificial Sequence
  Cyclic GFR-binding peptide
  MOD_RES (1)..(2): Xaa is C or S
XXVPTELEPISMLYLDENEKVVKFKYEDMV

SEQ ID NO: 64430 - protein, 35 aa, Artificial Sequence; identical to SEQ ID NO: 18342
  Cyclic GFR-binding peptide
  MOD_RES (3)..(4): Xaa is C or S

SEQ ID NO: 64431 - protein, 23 aa, Artificial Sequence
  Cyclic GFR-binding peptide
NAISILYFDAANNVVLKKYRDMV

SEQ ID NO: 64432 - protein, 29 aa, Artificial Sequence
  Cyclic GFR-binding peptide
  MOD_RES (3)..(4): Xaa is C or S
KPXXAPTQLEPISVLYLDDSSNVIKFKYE

SEQ ID NO: 64433 - protein, 23 aa, Artificial Sequence
  Cyclic GFR-binding peptide
LNAISILYFDKGVVTYLKKYRGM

SEQ ID NO: 64434 - protein, 36 aa, Artificial Sequence; identical to SEQ ID NO: 18349
  Cyclic GFR-binding peptide
  MOD_RES (5)..(5): Xaa is C or S

SEQ ID NO: 64435 - protein, 24 aa, Artificial Sequence
  Cyclic GFR-binding peptide
SPISILYKDKGVVTYLKYHYGMAV

SEQ ID NO: 64436 - protein, 29 aa, Artificial Sequence
  Cyclic GFR-binding peptide
  MOD_RES (2)..(3): Xaa is C or S
PXXAPTQLEPISVLYLDDSSNVIKFKYEN

SEQ ID NO: 64437 - protein, 41 aa, Artificial Sequence; identical to SEQ ID NO: 18350
  Cyclic GFR-binding peptide
  MOD_RES (5)..(6)..(38)..(40): Xaa is C or S

SEQ ID NO: 64438 - protein, 38 aa, Artificial Sequence; identical to SEQ ID NO: 18351
  Cyclic GFR-binding peptide
  MOD_RES (2)..(3)..(36)..(38): Xaa is C or S

SEQ ID NO: 64439 - protein, 40 aa, Artificial Sequence; identical to SEQ ID NO: 18353
  Cyclic GFR-binding peptide
  MOD_RES (4)..(5)..(37)..(39): Xaa is C or S

SEQ ID NO: 64440 - protein, 34 aa, Artificial Sequence; identical to SEQ ID NO: 18354
  Cyclic GFR-binding peptide
  MOD_RES (2)..(3): Xaa is C or S

SEQ ID NO: 64441 - protein, 29 aa, Artificial Sequence
  Cyclic GFR-binding peptide
  MOD_RES (1)..(2): Xaa is C or S
XXVPARLNAISILYFDAANNVVLKKYRDM

SEQ ID NO: 64442 - protein, 25 aa, Artificial Sequence
  Cyclic GFR-binding peptide
APTKLEPISVLYLDSSNNVIKFKYE

SEQ ID NO: 64443 - protein, 41 aa, Artificial Sequence; identical to SEQ ID NO: 18357
  Cyclic GFR-binding peptide
  MOD_RES (4)..(5)..(38)..(40): Xaa is C or S

SEQ ID NO: 64444 - protein, 36 aa, Artificial Sequence; identical to SEQ ID NO: 18359
  Cyclic GFR-binding peptide
  MOD_RES (1)..(33)..(35): Xaa is C or S

SEQ ID NO: 64445 - protein, 27 aa, Artificial Sequence
  Cyclic GFR-binding peptide
LSPISVLYIDDSSNVIYKQYENMVVRS

SEQ ID NO: 64446 - protein, 26 aa, Artificial Sequence
  Cyclic GFR-binding peptide
PARLSPISILYKDAANNVVLKYHYDM

SEQ ID NO: 64447 - protein, 30 aa, Artificial Sequence; identical to SEQ ID NO: 18360
  Cyclic GFR-binding peptide

SEQ ID NO: 64448 - protein, 33 aa, Artificial Sequence
  Cyclic GFR-binding peptide
  MOD_RES (6)..(7): Xaa is C or S
SIPKAXXVPTELSPISMLYIDEYDKVVYKQYEE

SEQ ID NO: 64449 - protein, 32 aa, Artificial Sequence
  Cyclic GFR-binding peptide
  MOD_RES (29)..(31): Xaa is C or S
QDLEPISILYLVGRTPKVKFKYEMVVKSXKXS

SEQ ID NO: 64450 - protein, 32 aa, Artificial Sequence
  Cyclic GFR-binding peptide
  MOD_RES (30)..(32): Xaa is C or S
TKLSPISILYKDKGVVTYLKYHYGMAVSEXGX

SEQ ID NO: 64451 - protein, 42 aa, Artificial Sequence; identical to SEQ ID NO: 18362
  Cyclic GFR-binding peptide
  MOD_RES (5)..(6)..(39)..(41): Xaa is C or S

SEQ ID NO: 64452 - protein, 33 aa, Artificial Sequence; identical to SEQ ID NO: 18364
  Cyclic GFR-binding peptide
  MOD_RES (1)..(2): Xaa is C or S

SEQ ID NO: 64453 - protein, 30 aa, Artificial Sequence
  Cyclic GFR-binding peptide
  MOD_RES (28)..(30): Xaa is C or S
LSPISMLYIDENEKVVYKQYEDMVVEGXGX

SEQ ID NO: 64454 - protein, 28 aa, Artificial Sequence
  Cyclic GFR-binding peptide
  MOD_RES (2)..(3): Xaa is C or S
SXXVPARLSPISILYKDAANNVVLKYHY

SEQ ID NO: 64455 - protein, 34 aa, Artificial Sequence
  Cyclic GFR-binding peptide
  MOD_RES (5)..(6): Xaa is C or S
VPKPXXAPTQLEPISVLYLDDSSNVIKFKYENMV

SEQ ID NO: 64456 - protein, 30 aa, Artificial Sequence
  Cyclic GFR-binding peptide
  MOD_RES (1)..(1): Xaa is C or S
XAPTKLSPISVLYIDSSNNVIYKQYENMVV

SEQ ID NO: 64457 - protein, 37 aa, Artificial Sequence; identical to SEQ ID NO: 18368
  Cyclic GFR-binding peptide
  MOD_RES (2)..(34)..(36): Xaa is C or S

SEQ ID NO: 64458 - protein, 34 aa, Artificial Sequence; identical to SEQ ID NO: 18370
  Cyclic GFR-binding peptide
  MOD_RES (3)..(4): Xaa is C or S

SEQ ID NO: 64459 - protein, 27 aa, Artificial Sequence
  Cyclic GFR-binding peptide
LSPISVLYIDDSSNVIYKQYENMVVRA

SEQ ID NO: 64460 - protein, 37 aa, Artificial Sequence; identical to SEQ ID NO: 18375
  Cyclic GFR-binding peptide
  MOD_RES (4)..(5)..(37): Xaa is C or S

SEQ ID NO: 64461 - protein, 28 aa, Artificial Sequence
  Cyclic GFR-binding peptide
VPTELSPISMLYIDENEKVVYKQYEDMV

SEQ ID NO: 64462 - protein, 29 aa, Artificial Sequence
  Cyclic GFR-binding peptide
  MOD_RES (2)..(3): Xaa is C or S
AXXVPTKLNAISILYFDKGVVTYLKKYRG

SEQ ID NO: 64463 - protein, 35 aa, Artificial Sequence; identical to SEQ ID NO: 18378
  Cyclic GFR-binding peptide
  MOD_RES (4)..(5): Xaa is C or S

SEQ ID NO: 64464 - protein, 24 aa, Artificial Sequence
  Cyclic GFR-binding peptide
KLEPISVLYLDSSNNVIKFKYENM

SEQ ID NO: 64465 - protein, 26 aa, Artificial Sequence
  Cyclic GFR-binding peptide
TQLEPISVLYLDDSSNVIKFKYENMV

SEQ ID NO: 64466 - protein, 25 aa, Artificial Sequence
  Cyclic GFR-binding peptide
SPISILYIDKGVVTYYKQYEGMAVS

SEQ ID NO: 64467 - protein, 29 aa, Artificial Sequence
  Cyclic GFR-binding peptide
  MOD_RES (29)..(29): Xaa is C or S
KLSPISVLYIDSSNNVIYKQYENMVVKAX

SEQ ID NO: 64468 - protein, 30 aa, Artificial Sequence
  Cyclic GFR-binding peptide
PTQLSPISVLYIDDSSNVIYKQYENMVVRA

SEQ ID NO: 64469 - protein, 28 aa, Artificial Sequence
  Cyclic GFR-binding peptide
  MOD_RES (28)..(28): Xaa is C or S
LEPISMLYLDENEKVVKFKYEDMVVEGX

SEQ ID NO: 64470 - protein, 34 aa, Artificial Sequence
  Cyclic GFR-binding peptide
  MOD_RES (31)..(33): Xaa is C or S
PARLNAISILYFDAANNVVLKKYRDMVVEAXGXR

SEQ ID NO: 64471 - protein, 28 aa, Artificial Sequence
  Cyclic GFR-binding peptide
QLEPISVLYLDDSSNVIKFKYENMVVRA

SEQ ID NO: 64472 - protein, 29 aa, Artificial Sequence
  Cyclic GFR-binding peptide
  MOD_RES (28)..(28): Xaa is C or S
LEPISVLYLDDSSNVIKFKYENMVVRSXG

SEQ ID NO: 64473 - protein, 27 aa, Artificial Sequence
  Cyclic GFR-binding peptide
VPARLEPISILYLDAANNVVKFKYEDM

SEQ ID NO: 64474 - protein, 35 aa, Artificial Sequence; identical to SEQ ID NO: 18387
  Cyclic GFR-binding peptide
  MOD_RES (32)..(34): Xaa is C or S

SEQ ID NO: 64475 - protein, 40 aa, Artificial Sequence; identical to SEQ ID NO: 18388
  Cyclic GFR-binding peptide
  MOD_RES (5)..(6)..(38)..(40): Xaa is C or S

SEQ ID NO: 64476 - protein, 30 aa, Artificial Sequence
  Cyclic GFR-binding peptide
  MOD_RES (1)..(1): Xaa is C or S
XVPTELSPISMLYIDENEKVVYKQYEDMVV

SEQ ID NO: 64477 - protein, 34 aa, Artificial Sequence
  Cyclic GFR-binding peptide
  MOD_RES (6)..(7): Xaa is C or S
AVPKAXXAPTKLEPISVLYLDSSNNVIKFKYENM

SEQ ID NO: 64478 - protein, 28 aa, Artificial Sequence
  Cyclic GFR-binding peptide
  MOD_RES (1)..(1): Xaa is C or S
XVPTKLSPISILYKDKGVVTYLKYHYGM

SEQ ID NO: 64479 - protein, 35 aa, Artificial Sequence; identical to SEQ ID NO: 18392
  Cyclic GFR-binding peptide
  MOD_RES (3)..(4): Xaa is C or S

SEQ ID NO: 64480 - protein, 38 aa, Artificial Sequence; identical to SEQ ID NO: 18397
  Cyclic GFR-binding peptide
  MOD_RES (2)..(3)..(35)..(37): Xaa is C or S

SEQ ID NO: 64481 - protein, 32 aa, Artificial Sequence
  Cyclic GFR-binding peptide
  MOD_RES (4)..(5): Xaa is C or S
PKPXXAPTKLEPISVLYLDDSSNVIKFKYENM

SEQ ID NO: 64482 - protein, 27 aa, Artificial Sequence
  Cyclic GFR-binding peptide
APTKLEPISVLYLDSSNNVIKFKYENM

SEQ ID NO: 64483 - protein, 41 aa, Artificial Sequence; identical to SEQ ID NO: 18400
  Cyclic GFR-binding peptide
  MOD_RES (4)..(5)..(38)..(40): Xaa is C or S

SEQ ID NO: 64484 - protein, 25 aa, Artificial Sequence
  Cyclic GFR-binding peptide
SQDLSPISILYIIGKTPKIYKQYEM

SEQ ID NO: 64485 - protein, 34 aa, Artificial Sequence; identical to SEQ ID NO: 18408
  Cyclic GFR-binding peptide
  MOD_RES (2)..(3): Xaa is C or S

SEQ ID NO: 64486 - protein, 29 aa, Artificial Sequence
  Cyclic GFR-binding peptide
  MOD_RES (2)..(3): Xaa is C or S
SXXVPARLNAISILYFDAANNVVLKKYRD

SEQ ID NO: 64487 - protein, 26 aa, Artificial Sequence
  Cyclic GFR-binding peptide
APTKLEPISVLYLDDSSNVIKFKYEN

SEQ ID NO: 64488 - protein, 30 aa, Artificial Sequence
  Cyclic GFR-binding peptide
  MOD_RES (30)..(30): Xaa is C or S
TKLEPISVLYLDSSNNVIKFKYENMVVKAX

SEQ ID NO: 64489 - protein, 25 aa, Artificial Sequence
  Cyclic GFR-binding peptide
VPTKLSPISVLYIDDMGVPTYKQYE

SEQ ID NO: 64490 - protein, 40 aa, Artificial Sequence; identical to SEQ ID NO: 18414
  Cyclic GFR-binding peptide
  MOD_RES (6)..(7)..(38)..(40): Xaa is C or S

SEQ ID NO: 64491 - protein, 32 aa, Artificial Sequence
  Cyclic GFR-binding peptide
  MOD_RES (30)..(32): Xaa is C or S
TELSPISMLYIDEYDKVVYKQYEEMVVEGXGX

SEQ ID NO: 64492 - protein, 28 aa, Artificial Sequence
  Cyclic GFR-binding peptide
  MOD_RES (28)..(28): Xaa is C or S
LEPISMLYLDEYDKVVKFKYEEMVVEGX

SEQ ID NO: 64493 - protein, 32 aa, Artificial Sequence
  Cyclic GFR-binding peptide
  MOD_RES (31)..(31): Xaa is C or S
PARLSPISILYKDAANNVVLKYHYDMVVEAXG

SEQ ID NO: 64494 - protein, 35 aa, Artificial Sequence; identical to SEQ ID NO: 18416
  Cyclic GFR-binding peptide
  MOD_RES (1)..(33)..(35): Xaa is C or S

SEQ ID NO: 64495 - protein, 32 aa, Artificial Sequence
  Cyclic GFR-binding peptide
  MOD_RES (29)..(31): Xaa is C or S
LEPISVLYLDDMGVPTKFKYEEGMSVAEXGXR

SEQ ID NO: 64496 - protein, 30 aa, Artificial Sequence
  Cyclic GFR-binding peptide
  MOD_RES (1)..(1): Xaa is C or S
XVPQDLEPISILYLVGRTPKVKFKYEMVVK

SEQ ID NO: 64497 - protein, 29 aa, Artificial Sequence
  Cyclic GFR-binding peptide
  MOD_RES (3)..(4): Xaa is C or S
ASXXVPARLEPISILYLDAANNVVKFKYE

SEQ ID NO: 64498 - protein, 32 aa, Artificial Sequence
  Cyclic GFR-binding peptide
  MOD_RES (30)..(32): Xaa is C or S
PQALEPISILYLVGRKPKVKFKYEMIVRSXKX

SEQ ID NO: 64499 - protein, 32 aa, Artificial Sequence
  Cyclic GFR-binding peptide
  MOD_RES (6)..(7): Xaa is C or S
TVPKPXXAPTQLSPISVLYIDDSSNVIYKQYE

SEQ ID NO: 64500 - protein, 36 aa, Artificial Sequence; identical to SEQ ID NO: 18419
  Cyclic GFR-binding peptide
  MOD_RES (5)..(6): Xaa is C or S

SEQ ID NO: 64501 - protein, 28 aa, Artificial Sequence
  Cyclic GFR-binding peptide
VSQDLEPISILYLIGKTPKIKFKYEMIV

SEQ ID NO: 64502 - protein, 26 aa, Artificial Sequence
  Cyclic GFR-binding peptide
  MOD_RES (1)..(1): Xaa is C or S
XVSQDLSPISILYIIGKTPKIYKQYE

SEQ ID NO: 64503 - protein, 32 aa, Artificial Sequence
  Cyclic GFR-binding peptide
  MOD_RES (29)..(31): Xaa is C or S
QDLSPISILYIIGKTPKIYKQYEMIVKSXKXS

SEQ ID NO: 64504 - protein, 37 aa, Artificial Sequence; identical to SEQ ID NO: 18426
  Cyclic GFR-binding peptide
  MOD_RES (5)..(6)..(37): Xaa is C or S

SEQ ID NO: 64505 - protein, 33 aa, Artificial Sequence
  Cyclic GFR-binding peptide
  MOD_RES (31)..(33): Xaa is C or S
PTKLSPISILYIDKGVVTYYKQYEGMAVSEXGX

SEQ ID NO: 64506 - protein, 35 aa, Artificial Sequence; identical to SEQ ID NO: 18428
  Cyclic GFR-binding peptide
  MOD_RES (4)..(5): Xaa is C or S

SEQ ID NO: 64507 - protein, 29 aa, Artificial Sequence
  Cyclic GFR-binding peptide
  MOD_RES (26)..(28): Xaa is C or S
EPISILYLVGRTPKVKFKYEMVVKSXKXS

SEQ ID NO: 64508 - protein, 31 aa, Artificial Sequence
  Cyclic GFR-binding peptide
  MOD_RES (1)..(2): Xaa is C or S
XXVPTKLSPISVLYIDDMGVPTYKQYEEGMS

SEQ ID NO: 64509 - protein, 30 aa, Artificial Sequence
  Cyclic GFR-binding peptide
  MOD_RES (1)..(2): Xaa is C or S
XXVPTELSPISMLYIDEYDKVVYKQYEEMV

SEQ ID NO: 64510 - protein, 29 aa, Artificial Sequence
  Cyclic GFR-binding peptide
  MOD_RES (28)..(28): Xaa is C or S
DLEPISILYLIGKTPKIKFKYEMIVKSXK

SEQ ID NO: 64511 - protein, 38 aa, Artificial Sequence; identical to SEQ ID NO: 18436
  Cyclic GFR-binding peptide
  MOD_RES (6)..(7)..(38): Xaa is C or S

SEQ ID NO: 64512 - protein, 27 aa, Artificial Sequence
  Cyclic GFR-binding peptide
  MOD_RES (27)..(27): Xaa is C or S
SPISMLYIDEYDKVVYKQYEEMVVEGX

SEQ ID NO: 64513 - protein, 35 aa, Artificial Sequence
  Cyclic GFR-binding peptide
  MOD_RES (5)..(6): Xaa is C or S
VPKPXXAPTKLSPISVLYIDDSSNVIYKQYENMVV

SEQ ID NO: 64514 - protein, 39 aa, Artificial Sequence; identical to SEQ ID NO: 18442
  Cyclic GFR-binding peptide
  MOD_RES (3)..(4)..(36)..(38): Xaa is C or S

SEQ ID NO: 64515 - protein, 34 aa, Artificial Sequence; identical to SEQ ID NO: 18446
  Cyclic GFR-binding peptide
  MOD_RES (3)..(4): Xaa is C or S

SEQ ID NO: 64516 - protein, 29 aa, Artificial Sequence
  Cyclic GFR-binding peptide
PTELSPISMLYIDENEKVVYKQYEDMVVE

SEQ ID NO: 64517 - protein, 27 aa, Artificial Sequence
  Cyclic GFR-binding peptide
DLSPISILYIVGRTPKVYKQYEMVVKS

SEQ ID NO: 64518 - protein, 34 aa, Artificial Sequence; identical to SEQ ID NO: 18450
  Cyclic GFR-binding peptide
  MOD_RES (1)..(33): Xaa is C or S

SEQ ID NO: 64519 - protein, 36 aa, Artificial Sequence; identical to SEQ ID NO: 18451
  Cyclic GFR-binding peptide
  MOD_RES (2)..(3)..(35): Xaa is C or S

SEQ ID NO: 64520 - protein, 24 aa, Artificial Sequence
  Cyclic GFR-binding peptide
PTQLEPISVLYLDDSSNVIKFKYE

SEQ ID NO: 64521 - protein, 32 aa, Artificial Sequence; identical to SEQ ID NO: 18455
  Cyclic GFR-binding peptide
  MOD_RES (1)..(2): Xaa is C or S

SEQ ID NO: 64522 - protein, 25 aa, Artificial Sequence
  Cyclic GFR-binding peptide
KLSPISVLYIDDMGVPTYKQYEEGM

SEQ ID NO: 64523 - protein, 33 aa, Artificial Sequence; identical to SEQ ID NO: 18460
  Cyclic GFR-binding peptide
  MOD_RES (1)..(2): Xaa is C or S

SEQ ID NO: 64524 - protein, 22 aa, Artificial Sequence
  Cyclic GFR-binding peptide
LNAISILYFDKGVVTYLKKYRG

SEQ ID NO: 64525 - protein, 23 aa, Artificial Sequence
  Cyclic GFR-binding peptide
LEPISVLYLDSSNNVIKFKYENM

SEQ ID NO: 64526 - protein, 42 aa, Artificial Sequence; identical to SEQ ID NO: 18463
  Cyclic GFR-binding peptide
  MOD_RES (6)..(7)..(40)..(42): Xaa is C or S

SEQ ID NO: 64527 - protein, 34 aa, Artificial Sequence
  Cyclic GFR-binding peptide
  MOD_RES (6)..(7): Xaa is C or S
ASAAPXXVPQALEPISILYLVGRKPKVKFKYEMI

SEQ ID NO: 64528 - protein, 35 aa, Artificial Sequence; identical to SEQ ID NO: 18467
  Cyclic GFR-binding peptide
  MOD_RES (2)..(3)..(35): Xaa is C or S

SEQ ID NO: 64529 - protein, 40 aa, Artificial Sequence; identical to SEQ ID NO: 18469
  Cyclic GFR-binding peptide
  MOD_RES (4)..(5)..(37)..(39): Xaa is C or S

SEQ ID NO: 64530 - protein, 22 aa, Artificial Sequence
  Cyclic GFR-binding peptide
EPISVLYLDSSNNVIKFKYENM

SEQ ID NO: 64531 - protein, 34 aa, Artificial Sequence; identical to SEQ ID NO: 18472
  Cyclic GFR-binding peptide
  MOD_RES (1)..(33): Xaa is C or S

SEQ ID NO: 64532 - protein, 33 aa, Artificial Sequence
  Cyclic GFR-binding peptide
  MOD_RES (4)..(4): Xaa is C or S
KPTXAPTKLSPISVLYIDDSSNVIYKQYENMVV

SEQ ID NO: 64533 - protein, 31 aa, Artificial Sequence
  Cyclic GFR-binding peptide
  MOD_RES (5)..(6): Xaa is C or S
VPKAXXAPTKLEPISVLYLDSSNNVIKFKYE

SEQ ID NO: 64534 - protein, 22 aa, Artificial Sequence
  Cyclic GFR-binding peptide
KLSPISILYKDKGVVTYLKYHY

SEQ ID NO: 64535 - protein, 31 aa, Artificial Sequence
  Cyclic GFR-binding peptide
  MOD_RES (4)..(5): Xaa is C or S
PKPXXAPTQLEPISVLYLDDSSNVIKFKYEN

SEQ ID NO: 64536 - protein, 25 aa, Artificial Sequence
  Cyclic GFR-binding peptide
LEPISVLYLDDSSNVIKFKYENMVV

SEQ ID NO: 64537 - protein, 37 aa, Artificial Sequence; identical to SEQ ID NO: 18478
  Cyclic GFR-binding peptide
  MOD_RES (4)..(5)..(37): Xaa is C or S

SEQ ID NO: 64538 - protein, 26 aa, Artificial Sequence
  Cyclic GFR-binding peptide
PQDLSPISILYIVGRTPKVYKQYEMV

SEQ ID NO: 64539 - protein, 26 aa, Artificial Sequence
  Cyclic GFR-binding peptide
KLSPISVLYIDDMGVPTYKQYEEGMS

SEQ ID NO: 64540 - protein, 31 aa, Artificial Sequence
  Cyclic GFR-binding peptide
  MOD_RES (5)..(6): Xaa is C or S
IPKAXXVPTELSPISMLYIDEYDKVVYKQYE

SEQ ID NO: 64541 - protein, 28 aa, Artificial Sequence
  Cyclic GFR-binding peptide
VPTKLSPISILYKDKGVVTYLKYHYGMA

SEQ ID NO: 64542 - protein, 22 aa, Artificial Sequence
  Cyclic GFR-binding peptide
LEPISMLYLDENEKVVKFKYED

SEQ ID NO: 64543 - protein, 23 aa, Artificial Sequence
  Cyclic GFR-binding peptide
LSPISILYIIGKTPKIYKQYEMI

SEQ ID NO: 64544 - protein, 40 aa, Artificial Sequence; identical to SEQ ID NO: 18483
  Cyclic GFR-binding peptide
  MOD_RES (5)..(6)..(38)..(40): Xaa is C or S

SEQ ID NO: 64545 - protein, 37 aa, Artificial Sequence; identical to SEQ ID NO: 18485
  Cyclic GFR-binding peptide
  MOD_RES (5)..(6): Xaa is C or S

SEQ ID NO: 64546 - protein, 28 aa, Artificial Sequence
  Cyclic GFR-binding peptide
  MOD_RES (26)..(28): Xaa is C or S
EPISILYLVGRKPKVKFKYEMIVRSXKX

SEQ ID NO: 64547 - protein, 35 aa, Artificial Sequence
  Cyclic GFR-binding peptide
  MOD_RES (5)..(6): Xaa is C or S
VPKAXXAPTKLEPISVLYLDSSNNVIKFKYENMVV

SEQ ID NO: 64548 - protein, 41 aa, Artificial Sequence; identical to SEQ ID NO: 18487
  Cyclic GFR-binding peptide
  MOD_RES (5)..(6)..(38)..(40): Xaa is C or S

SEQ ID NO: 64549 - protein, 33 aa, Artificial Sequence
  Cyclic GFR-binding peptide
  MOD_RES (3)..(4): Xaa is C or S
KAXXVPTELEPISMLYLDENEKVVKFKYEDMVV

SEQ ID NO: 64550 - protein, 31 aa, Artificial Sequence; identical to SEQ ID NO: 18489
  Cyclic GFR-binding peptide
  MOD_RES (1)..(1): Xaa is C or S

SEQ ID NO: 64551 - protein, 24 aa, Artificial Sequence
  Cyclic GFR-binding peptide
SPISMLYIDENEKVVYKQYEDMVV

SEQ ID NO: 64552 - protein, 30 aa, Artificial Sequence
  Cyclic GFR-binding peptide
  MOD_RES (1)..(2): Xaa is C or S
XXVPQALEPISILYLVGRKPKVKFKYEMIV

SEQ ID NO: 64553 - protein, 30 aa, Artificial Sequence
  Cyclic GFR-binding peptide
  MOD_RES (29)..(29): Xaa is C or S
ELSPISMLYIDEYDKVVYKQYEEMVVEGXG

SEQ ID NO: 64554 - protein, 25 aa, Artificial Sequence
  Cyclic GFR-binding peptide
VPARLEPISILYLDAANNVVKFKYE

SEQ ID NO: 64555 - protein, 27 aa, Artificial Sequence
  Cyclic GFR-binding peptide
  MOD_RES (1)..(2): Xaa is C or S
XXVPTELEPISMLYLDENEKVVKFKYE

SEQ ID NO: 64556 - protein, 33 aa, Artificial Sequence; identical to SEQ ID NO: 18497
  Cyclic GFR-binding peptide
  MOD_RES (1)..(2): Xaa is C or S

SEQ ID NO: 64557 - protein, 39 aa, Artificial Sequence; identical to SEQ ID NO: 18498
  Cyclic GFR-binding peptide
  MOD_RES (5)..(6)..(37)..(39): Xaa is C or S

SEQ ID NO: 64558 - protein, 37 aa, Artificial Sequence; identical to SEQ ID NO: 18500
  Cyclic GFR-binding peptide
  MOD_RES (5)..(6): Xaa is C or S

SEQ ID NO: 64559 - protein, 37 aa, Artificial Sequence; identical to SEQ ID NO: 18501
  Cyclic GFR-binding peptide
  MOD_RES (6)..(7): Xaa is C or S

SEQ ID NO: 64560 - protein, 38 aa, Artificial Sequence; identical to SEQ ID NO: 18505
  Cyclic GFR-binding peptide
  MOD_RES (3)..(35)..(37): Xaa is C or S

SEQ ID NO: 64561 - protein, 25 aa, Artificial Sequence
  Cyclic GFR-binding peptide
LEPISILYLIGKTPKIKFKYEMIVK

SEQ ID NO: 64562 - protein, 35 aa, Artificial Sequence; identical to SEQ ID NO: 18511
  Cyclic GFR-binding peptide
  MOD_RES (3)..(4): Xaa is C or S

SEQ ID NO: 64563 - protein, 22 aa, Artificial Sequence
  Cyclic GFR-binding peptide
EPISILYLDAANNVVKFKYEDM

SEQ ID NO: 64564 - protein, 35 aa, Artificial Sequence; identical to SEQ ID NO: 18513
  Cyclic GFR-binding peptide
  MOD_RES (3)..(4): Xaa is C or S

SEQ ID NO: 64565 - protein, 26 aa, Artificial Sequence
  Cyclic GFR-binding peptide
LEPISVLYLDDMGVPTKFKYEEGMSV

SEQ ID NO: 64566 - protein, 35 aa, Artificial Sequence
  Cyclic GFR-binding peptide
  MOD_RES (6)..(6): Xaa is C or S
VTKPTXAPTKLEPISVLYLDDSSNVIKFKYENMVV

SEQ ID NO: 64567 - protein, 33 aa, Artificial Sequence
  Cyclic GFR-binding peptide
  MOD_RES (4)..(5): Xaa is C or S
AAPXXVPQALEPISILYLVGRKPKVKFKYEMIV

SEQ ID NO: 64568 - protein, 33 aa, Artificial Sequence
  Cyclic GFR-binding peptide
  MOD_RES (31)..(33): Xaa is C or S
PTKLNAISILYFDKGVVTYLKKYRGMAVSEXGX

SEQ ID NO: 64569 - protein, 34 aa, Artificial Sequence; identical to SEQ ID NO: 18522
  Cyclic GFR-binding peptide
  MOD_RES (2)..(34): Xaa is C or S

SEQ ID NO: 64570 - protein, 20 aa, Artificial Sequence
  Cyclic GFR-binding peptide
EPISMLYLDEYDKVVKFKYE

SEQ ID NO: 64571 - protein, 30 aa, Artificial Sequence
  Cyclic GFR-binding peptide
  MOD_RES (29)..(29): Xaa is C or S
KLSPISVLYIDDSSNVIYKQYENMVVRSXG

SEQ ID NO: 64572 - protein, 29 aa, Artificial Sequence
  Cyclic GFR-binding peptide
  MOD_RES (27)..(29): Xaa is C or S
EPISMLYLDEYDKVVKFKYEEMVVEGXGX

SEQ ID NO: 64573 - protein, 39 aa, Artificial Sequence; identical to SEQ ID NO: 18528
  Cyclic GFR-binding peptide
  MOD_RES (5)..(6)..(38): Xaa is C or S

SEQ ID NO: 64574 - protein, 40 aa, Artificial Sequence; identical to SEQ ID NO: 18530
  Cyclic GFR-binding peptide
  MOD_RES (4)..(5)..(37)..(39): Xaa is C or S

SEQ ID NO: 64575 - protein, 30 aa, Artificial Sequence
  Cyclic GFR-binding peptide
  MOD_RES (3)..(4): Xaa is C or S
KAXXVPTELSPISMLYIDEYDKVVYKQYEE

SEQ ID NO: 64576 - protein, 29 aa, Artificial Sequence
  Cyclic GFR-binding peptide
  MOD_RES (2)..(3): Xaa is C or S
AXXVPTKLEPISVLYLDDMGVPTKFKYEE

SEQ ID NO: 64577 - protein, 23 aa, Artificial Sequence
  Cyclic GFR-binding peptide
EPISILYLVGRTPKVKFKYEMVV

SEQ ID NO: 64578 - protein, 35 aa, Artificial Sequence; identical to SEQ ID NO: 18534
  Cyclic GFR-binding peptide
  MOD_RES (1)..(33)..(35): Xaa is C or S

SEQ ID NO: 64579 - protein, 25 aa, Artificial Sequence
  Cyclic GFR-binding peptide
KLSPISILYIDKGVVTYYKQYEGMA

SEQ ID NO: 64580 - protein, 36 aa, Artificial Sequence; identical to SEQ ID NO: 18536
  Cyclic GFR-binding peptide
  MOD_RES (1)..(2)..(34)..(36): Xaa is C or S

SEQ ID NO: 64581 - protein, 36 aa, Artificial Sequence; identical to SEQ ID NO: 18537
  Cyclic GFR-binding peptide
  MOD_RES (1)..(2)..(33)..(35): Xaa is C or S

SEQ ID NO: 64582 - protein, 24 aa, Artificial Sequence
  Cyclic GFR-binding peptide
LSPISMLYIDEYDKVVYKQYEEMV

SEQ ID NO: 64583 - protein, 32 aa, Artificial Sequence
  Cyclic GFR-binding peptide
  MOD_RES (3)..(4): Xaa is C or S
KAXXVPTELEPISMLYLDEYDKVVKFKYEEMV

SEQ ID NO: 64584 - protein, 36 aa, Artificial Sequence; identical to SEQ ID NO: 18539
  Cyclic GFR-binding peptide
  MOD_RES (1)..(2)..(34)..(36): Xaa is C or S

SEQ ID NO: 64585 - protein, 37 aa, Artificial Sequence; identical to SEQ ID NO: 18545
  Cyclic GFR-binding peptide
  MOD_RES (2)..(3)..(35)..(37): Xaa is C or S

SEQ ID NO: 64586 - protein, 25 aa, Artificial Sequence
  Cyclic GFR-binding peptide
DLSPISILYIVGRTPKVYKQYEMVV

SEQ ID NO: 64587 - protein, 30 aa, Artificial Sequence
  Cyclic GFR-binding peptide
  MOD_RES (29)..(29): Xaa is C or S
KLNAISILYFDKGVVTYLKKYRGMAVSEXG

SEQ ID NO: 64588 - protein, 29 aa, Artificial Sequence
  Cyclic GFR-binding peptide
SQDLSPISILYIIGKTPKIYKQYEMIVKS

SEQ ID NO: 64589 - protein, 26 aa, Artificial Sequence
  Cyclic GFR-binding peptide
ELEPISMLYLDEYDKVVKFKYEEMVV

SEQ ID NO: 64590 - protein, 28 aa, Artificial Sequence
  Cyclic GFR-binding peptide
TELSPISMLYIDENEKVVYKQYEDMVVE

SEQ ID NO: 64591 - protein, 27 aa, Artificial Sequence
  Cyclic GFR-binding peptide
  MOD_RES (26)..(26): Xaa is C or S
EPISILYLIGKTPKIKFKYEMIVKSXK

SEQ ID NO: 64592 - protein, 38 aa, Artificial Sequence; identical to SEQ ID NO: 18553
  Cyclic GFR-binding peptide
  MOD_RES (4)..(36)..(38): Xaa is C or S

SEQ ID NO: 64593 - protein, 31 aa, Artificial Sequence
  Cyclic GFR-binding peptide
  MOD_RES (5)..(6): Xaa is C or S
SASPXXVSQDLSPISILYIIGKTPKIYKQYE

SEQ ID NO: 64594 - protein, 27 aa, Artificial Sequence
  Cyclic GFR-binding peptide
TKLEPISVLYLDDSSNVIKFKYENMVV

SEQ ID NO: 64595 - protein, 24 aa, Artificial Sequence
  Cyclic GFR-binding peptide
LSPISILYKDAANNVVLKYHYDMV

SEQ ID NO: 64596 - protein, 27 aa, Artificial Sequence
  Cyclic GFR-binding peptide
TELSPISMLYIDEYDKVVYKQYEEMVV

SEQ ID NO: 64597 - protein, 28 aa, Artificial Sequence
  Cyclic GFR-binding peptide
PQALEPISILYLVGRKPKVKFKYEMIVR

SEQ ID NO: 64598 - protein, 31 aa, Artificial Sequence
  Cyclic GFR-binding peptide
  MOD_RES (2)..(3): Xaa is C or S
AXXAPTKLSPISVLYIDSSNNVIYKQYENMV

SEQ ID NO: 64599 - protein, 37 aa, Artificial Sequence; identical to SEQ ID NO: 18562
  Cyclic GFR-binding peptide
  MOD_RES (5)..(6): Xaa is C or S

SEQ ID NO: 64600 - protein, 33 aa, Artificial Sequence; identical to SEQ ID NO: 18564
  Cyclic GFR-binding peptide
  MOD_RES (1)..(2)..(33): Xaa is C or S

SEQ ID NO: 64601 - protein, 26 aa, Artificial Sequence
  Cyclic GFR-binding peptide
SPISVLYIDSSNNVIYKQYENMVVKA

SEQ ID NO: 64602 - protein, 29 aa, Artificial Sequence
  Cyclic GFR-binding peptide
  MOD_RES (3)..(4): Xaa is C or S
ASXXVPARLNAISILYFDAANNVVLKKYR

SEQ ID NO: 64603 - protein, 30 aa, Artificial Sequence
  Cyclic GFR-binding peptide
  MOD_RES (4)..(5): Xaa is C or S
GKAXXVPTKLEPISVLYLDDMGVPTKFKYE

SEQ ID NO: 64604 - protein, 32 aa, Artificial Sequence; identical to SEQ ID NO: 18565
  Cyclic GFR-binding peptide
  MOD_RES (31)..(31): Xaa is C or S

SEQ ID NO: 64605 - protein, 32 aa, Artificial Sequence
  Cyclic GFR-binding peptide
  MOD_RES (4)..(5): Xaa is C or S
PKPXXAPTKLSPISVLYIDDSSNVIYKQYENM

SEQ ID NO: 64606 - protein, 35 aa, Artificial Sequence
  Cyclic GFR-binding peptide
  MOD_RES (7)..(7): Xaa is C or S
HVTKPTXAPTKLSPISVLYIDDSSNVIYKQYENMV

SEQ ID NO: 64607 - protein, 40 aa, Artificial Sequence; identical to SEQ ID NO: 18567
  Cyclic GFR-binding peptide
  MOD_RES (6)..(7)..(39): Xaa is C or S

SEQ ID NO: 64608 - protein, 36 aa, Artificial Sequence; identical to SEQ ID NO: 18568
  Cyclic GFR-binding peptide
  MOD_RES (3)..(4): Xaa is C or S

SEQ ID NO: 64609 - protein, 31 aa, Artificial Sequence
  Cyclic GFR-binding peptide
  MOD_RES (31)..(31): Xaa is C or S
TKLSPISVLYIDDMGVPTYKQYEEGMSVAEX

SEQ ID NO: 64610 - protein, 31 aa, Artificial Sequence
  Cyclic GFR-binding peptide
  MOD_RES (1)..(2): Xaa is C or S
XXVPTELSPISMLYIDENEKVVYKQYEDMVV

SEQ ID NO: 64611 - protein, 21 aa, Artificial Sequence
  Cyclic GFR-binding peptide
SPISVLYIDDSSNVIYKQYEN

SEQ ID NO: 64612 - protein, 42 aa, Artificial Sequence; identical to SEQ ID NO: 18572
  Cyclic GFR-binding peptide
  MOD_RES (6)..(7)..(39)..(41): Xaa is C or S

SEQ ID NO: 64613 - protein, 22 aa, Artificial Sequence
  Cyclic GFR-binding peptide
KLEPISVLYLDDMGVPTKFKYE

SEQ ID NO: 64614 - protein, 29 aa, Artificial Sequence
  Cyclic GFR-binding peptide
  MOD_RES (28)..(28): Xaa is C or S
LSPISVLYIDDSSNVIYKQYENMVVRSXG

SEQ ID NO: 64615 - protein, 27 aa, Artificial Sequence
  Cyclic GFR-binding peptide
  MOD_RES (27)..(27): Xaa is C or S
EPISVLYLDSSNNVIKFKYENMVVKAX

SEQ ID NO: 64616 - protein, 30 aa, Artificial Sequence
  Cyclic GFR-binding peptide
  MOD_RES (3)..(4): Xaa is C or S
SPXXVPQDLEPISILYLVGRTPKVKFKYEM

SEQ ID NO: 64617 - protein, 36 aa, Artificial Sequence; identical to SEQ ID NO: 18581
  Cyclic GFR-binding peptide
  MOD_RES (4)..(5): Xaa is C or S

SEQ ID NO: 64618 - protein, 32 aa, Artificial Sequence; identical to SEQ ID NO: 18583
  Cyclic GFR-binding peptide
  MOD_RES (1)..(2): Xaa is C or S

SEQ ID NO: 64619 - protein, 39 aa, Artificial Sequence; identical to SEQ ID NO: 18584
  Cyclic GFR-binding peptide
  MOD_RES (7)..(39): Xaa is C or S

SEQ ID NO: 64620 - protein, 36 aa, Artificial Sequence; identical to SEQ ID NO: 18586
  Cyclic GFR-binding peptide
  MOD_RES (5)..(6): Xaa is C or S

SEQ ID NO: 64621 - protein, 27 aa, Artificial Sequence
  Cyclic GFR-binding peptide
QDLEPISILYLIGKTPKIKFKYEMIVK

SEQ ID NO: 64622 - protein, 28 aa, Artificial Sequence
  Cyclic GFR-binding peptide
PTQLSPISVLYIDDSSNVIYKQYENMVV

SEQ ID NO: 64623 - protein, 33 aa, Artificial Sequence; identical to SEQ ID NO: 18594
  Cyclic GFR-binding peptide
  MOD_RES (31)..(33): Xaa is C or S

SEQ ID NO: 64624 - protein, 36 aa, Artificial Sequence; identical to SEQ ID NO: 18595
  Cyclic GFR-binding peptide
  MOD_RES (1)..(33)..(35): Xaa is C or S

SEQ ID NO: 64625 - protein, 32 aa, Artificial Sequence
  Cyclic GFR-binding peptide
  MOD_RES (5)..(6): Xaa is C or S
APASXXVPARLSPISILYKDAANNVVLKYHYD

SEQ ID NO: 64626 - protein, 32 aa, Artificial Sequence; identical to SEQ ID NO: 18598
  Cyclic GFR-binding peptide
  MOD_RES (1)..(1): Xaa is C or S

SEQ ID NO: 64627 - protein, 42 aa, Artificial Sequence; identical to SEQ ID NO: 18599
  Cyclic GFR-binding peptide
  MOD_RES (5)..(6)..(39)..(41): Xaa is C or S

SEQ ID NO: 64628 - protein, 35 aa, Artificial Sequence; identical to SEQ ID NO: 18600
  Cyclic GFR-binding peptide
  MOD_RES (32)..(34): Xaa is C or S

SEQ ID NO: 64629 - protein, 28 aa, Artificial Sequence
  Cyclic GFR-binding peptide
  MOD_RES (28)..(28): Xaa is C or S
DLEPISILYLVGRTPKVKFKYEMVVKSX

SEQ ID NO: 64630 - protein, 27 aa, Artificial Sequence
  Cyclic GFR-binding peptide
  MOD_RES (1)..(2): Xaa is C or S
XXAPTKLSPISVLYIDDSSNVIYKQYE

SEQ ID NO: 64631 - protein, 30 aa, Artificial Sequence
  Cyclic GFR-binding peptide
  MOD_RES (1)..(1): Xaa is C or S
XVPTKLSPISVLYIDDMGVPTYKQYEEGMS

SEQ ID NO: 64632 - protein, 34 aa, Artificial Sequence; identical to SEQ ID NO: 18603
  Cyclic GFR-binding peptide
  MOD_RES (2)..(3)..(34): Xaa is C or S

SEQ ID NO: 64633 - protein, 32 aa, Artificial Sequence; identical to SEQ ID NO: 18605
  Cyclic GFR-binding peptide
  MOD_RES (1)..(1): Xaa is C or S

SEQ ID NO: 64634 - protein, 33 aa, Artificial Sequence; identical to SEQ ID NO: 18611
  Cyclic GFR-binding peptide
  MOD_RES (1)..(2): Xaa is C or S

SEQ ID NO: 64635 - protein, 28 aa, Artificial Sequence
  Cyclic GFR-binding peptide
  MOD_RES (27)..(27): Xaa is C or S
SPISILYKDAANNVVLKYHYDMVVEAXG

SEQ ID NO: 64636 - protein, 35 aa, Artificial Sequence; identical to SEQ ID NO: 18615
  Cyclic GFR-binding peptide
  MOD_RES (3)..(4): Xaa is C or S

SEQ ID NO: 64637 - protein, 37 aa, Artificial Sequence; identical to SEQ ID NO: 18616
  Cyclic GFR-binding peptide
  MOD_RES (1)..(2)..(34)..(36): Xaa is C or S

SEQ ID NO: 64638 - protein, 25 aa, Artificial Sequence
  Cyclic GFR-binding peptide
VPQDLSPISILYIVGRTPKVYKQYE

SEQ ID NO: 64639 - protein, 36 aa, Artificial Sequence; identical to SEQ ID NO: 18618
  Cyclic GFR-binding peptide
  MOD_RES (2)..(3)..(35): Xaa is C or S

SEQ ID NO: 64640 - protein, 30 aa, Artificial Sequence
  Cyclic GFR-binding peptide
  MOD_RES (30)..(30): Xaa is C or S
TELSPISMLYIDENEKVVYKQYEDMVVEGX

SEQ ID NO: 64641 - protein, 27 aa, Artificial Sequence
  Cyclic GFR-binding peptide
  MOD_RES (1)..(1): Xaa is C or S
XVPTELSPISMLYIDENEKVVYKQYED

SEQ ID NO: 64642 - protein, 42 aa, Artificial Sequence; identical to SEQ ID NO: 18621
  Cyclic GFR-binding peptide
  MOD_RES (6)..(7)..(39)..(41): Xaa is C or S

SEQ ID NO: 64643 - protein, 28 aa, Artificial Sequence
  Cyclic GFR-binding peptide
PTELSPISMLYIDENEKVVYKQYEDMVV

SEQ ID NO: 64644 - protein, 38 aa, Artificial Sequence; identical to SEQ ID NO: 18624
  Cyclic GFR-binding peptide
  MOD_RES (3)..(4)..(37): Xaa is C or S

SEQ ID NO: 64645 - protein, 31 aa, Artificial Sequence
  Cyclic GFR-binding peptide
  MOD_RES (3)..(3): Xaa is C or S
PTXAPTKLSPISVLYIDDSSNVIYKQYENMV

SEQ ID NO: 64646 - protein, 31 aa, Artificial Sequence
  Cyclic GFR-binding peptide
  MOD_RES (4)..(5): Xaa is C or S
SKAXXVPTKLNAISILYFDKGVVTYLKKYRG

SEQ ID NO: 64647 - protein, 27 aa, Artificial Sequence
  Cyclic GFR-binding peptide
VSQDLSPISILYIIGKTPKIYKQYEMI

SEQ ID NO: 64648 - protein, 35 aa, Artificial Sequence; identical to SEQ ID NO: 18627
  Cyclic GFR-binding peptide
  MOD_RES (32)..(34): Xaa is C or S

SEQ ID NO: 64649 - protein, 29 aa, Artificial Sequence
  Cyclic GFR-binding peptide
  MOD_RES (3)..(4): Xaa is C or S
SPXXVSQDLSPISILYIIGKTPKIYKQYE

SEQ ID NO: 64650 - protein, 40 aa, Artificial Sequence; identical to SEQ ID NO: 18631
  Cyclic GFR-binding peptide
  MOD_RES (6)..(7)..(39): Xaa is C or S

SEQ ID NO: 64651 - protein, 21 aa, Artificial Sequence
  Cyclic GFR-binding peptide
SPISMLYIDENEKVVYKQYED

SEQ ID NO: 64652 - protein, 31 aa, Artificial Sequence
  Cyclic GFR-binding peptide
  MOD_RES (31)..(31): Xaa is C or S
PTKLNAISILYFDKGVVTYLKKYRGMAVSEX

SEQ ID NO: 64653 - protein, 40 aa, Artificial Sequence; identical to SEQ ID NO: 18633
  Cyclic GFR-binding peptide
  MOD_RES (6)..(7)..(40): Xaa is C or S

SEQ ID NO: 64654 - protein, 39 aa, Artificial Sequence; identical to SEQ ID NO: 18634
  Cyclic GFR-binding peptide
  MOD_RES (3)..(4)..(36)..(38): Xaa is C or S

SEQ ID NO: 64655 - protein, 30 aa, Artificial Sequence
  Cyclic GFR-binding peptide
PTKLEPISVLYLDSSNNVIKFKYENMVVKA

SEQ ID NO: 64656 - protein, 31 aa, Artificial Sequence
  Cyclic GFR-binding peptide
  MOD_RES (30)..(30): Xaa is C or S
PQALEPISILYLVGRKPKVKFKYEMIVRSXK

SEQ ID NO: 64657 - protein, 26 aa, Artificial Sequence
  Cyclic GFR-binding peptide
PQALEPISILYLVGRKPKVKFKYEMI

SEQ ID NO: 64658 - protein, 38 aa, Artificial Sequence; identical to SEQ ID NO: 18638
  Cyclic GFR-binding peptide
  MOD_RES (6)..(7): Xaa is C or S

SEQ ID NO: 64659 - protein, 34 aa, Artificial Sequence
  Cyclic GFR-binding peptide
  MOD_RES (5)..(6): Xaa is C or S
VGKAXXVPTKLSPISVLYIDDMGVPTYKQYEEGM

SEQ ID NO: 64660 - protein, 28 aa, Artificial Sequence
  Cyclic GFR-binding peptide
  MOD_RES (28)..(28): Xaa is C or S
EPISVLYLDDMGVPTKFKYEEGMSVAEX

SEQ ID NO: 64661 - protein, 31 aa, Artificial Sequence
  Cyclic GFR-binding peptide
  MOD_RES (1)..(2): Xaa is C or S
XXVPTKLNAISILYFDKGVVTYLKKYRGMAV

SEQ ID NO: 64662 - protein, 28 aa, Artificial Sequence
  Cyclic GFR-binding peptide
  MOD_RES (27)..(27): Xaa is C or S
SPISILYKDKGVVTYLKYHYGMAVSEXG

SEQ ID NO: 64663 - protein, 37 aa, Artificial Sequence; identical to SEQ ID NO: 18646
  Cyclic GFR-binding peptide
  MOD_RES (4)..(5)..(37): Xaa is C or S

SEQ ID NO: 64664 - protein, 32 aa, Artificial Sequence
  Cyclic GFR-binding peptide
  MOD_RES (4)..(5): Xaa is C or S
ASPXXVPQDLEPISILYLVGRTPKVKFKYEMV

SEQ ID NO: 64665 - protein, 28 aa, Artificial Sequence
  Cyclic GFR-binding peptide
  MOD_RES (28)..(28): Xaa is C or S
LNAISILYFDAANNVVLKKYRDMVVEAX

SEQ ID NO: 64666 - protein, 25 aa, Artificial Sequence
  Cyclic GFR-binding peptide
NAISILYFDAANNVVLKKYRDMVVE

SEQ ID NO: 64667 - protein, 37 aa, Artificial Sequence
  Cyclic GFR-binding peptide
  MOD_RES (6)..(7): Xaa is C or S
KVGKAXXVPTKLSPISVLYIDDMGVPTYKQYEEGMSV

SEQ ID NO: 64668 - protein, 25 aa, Artificial Sequence
  Cyclic GFR-binding peptide
PTKLSPISILYIDKGVVTYYKQYEG

SEQ ID NO: 64669 - protein, 35 aa, Artificial Sequence; identical to SEQ ID NO: 18652
  Cyclic GFR-binding peptide
  MOD_RES (1)..(2)..(33)..(35): Xaa is C or S

SEQ ID NO: 64670 - protein, 34 aa, Artificial Sequence; identical to SEQ ID NO: 18653
  Cyclic GFR-binding peptide
  MOD_RES (1)..(32)..(34): Xaa is C or S

SEQ ID NO: 64671 - protein, 30 aa, Artificial Sequence
  Cyclic GFR-binding peptide
  MOD_RES (5)..(5): Xaa is C or S
TKPTXAPTKLEPISVLYLDDSSNVIKFKYE

SEQ ID NO: 64672 - protein, 27 aa, Artificial Sequence
  Cyclic GFR-binding peptide
  MOD_RES (27)..(27): Xaa is C or S
SPISILYIDKGVVTYYKQYEGMAVSEX

SEQ ID NO: 64673 - protein, 34 aa, Artificial Sequence; identical to SEQ ID NO: 18656
  Cyclic GFR-binding peptide
  MOD_RES (2)..(3)..(34): Xaa is C or S

SEQ ID NO: 64674 - protein, 33 aa, Artificial Sequence
  Cyclic GFR-binding peptide
  MOD_RES (4)..(5): Xaa is C or S
SKAXXVPTKLSPISILYIDKGVVTYYKQYEGMA

SEQ ID NO: 64675 - protein, 23 aa, Artificial Sequence
  Cyclic GFR-binding peptide
QLSPISVLYIDDSSNVIYKQYEN

SEQ ID NO: 64676 - protein, 32 aa, Artificial Sequence
  Cyclic GFR-binding peptide
  MOD_RES (3)..(4): Xaa is C or S
SPXXVSQDLEPISILYLIGKTPKIKFKYEMIV

SEQ ID NO: 64677 - protein, 27 aa, Artificial Sequence
  Cyclic GFR-binding peptide
LEPISMLYLDEYDKVVKFKYEEMVVEG

SEQ ID NO: 64678 - protein, 29 aa, Artificial Sequence
  Cyclic GFR-binding peptide
  MOD_RES (29)..(29): Xaa is C or S
RLNAISILYFDAANNVVLKKYRDMVVEAX

SEQ ID NO: 64679 - protein, 33 aa, Artificial Sequence; identical to SEQ ID NO: 18662
  Cyclic GFR-binding peptide
  MOD_RES (32)..(32): Xaa is C or S

SEQ ID NO: 64680 - protein, 22 aa, Artificial Sequence
  Cyclic GFR-binding peptide
SPISMLYIDEYDKVVYKQYEEM

SEQ ID NO: 64681 - protein, 30 aa, Artificial Sequence
  Cyclic GFR-binding peptide
  MOD_RES (2)..(3): Xaa is C or S
AXXVPTKLSPISILYKDKGVVTYLKYHYGM

SEQ ID NO: 64682 - protein, 27 aa, Artificial Sequence
  Cyclic GFR-binding peptide
SQDLSPISILYIIGKTPKIYKQYEMIV

SEQ ID NO: 64683 - protein, 31 aa, Artificial Sequence
  Cyclic GFR-binding peptide
  MOD_RES (3)..(4): Xaa is C or S
KPXXAPTQLSPISVLYIDDSSNVIYKQYENM

SEQ ID NO: 64684 - protein, 25 aa, Artificial Sequence
  Cyclic GFR-binding peptide
TELSPISMLYIDENEKVVYKQYEDM

SEQ ID NO: 64685 - protein, 35 aa, Artificial Sequence; identical to SEQ ID NO: 18667
  Cyclic GFR-binding peptide
  MOD_RES (1)..(2)..(34): Xaa is C or S

SEQ ID NO: 64686 - protein, 25 aa, Artificial Sequence
  Cyclic GFR-binding peptide
APTQLEPISVLYLDDSSNVIKFKYE

SEQ ID NO: 64687 - protein, 26 aa, Artificial Sequence
  Cyclic GFR-binding peptide
APTKLSPISVLYIDDSSNVIYKQYEN

SEQ ID NO: 64688 - protein, 34 aa, Artificial Sequence
  Cyclic GFR-binding peptide
  MOD_RES (4)..(5): Xaa is C or S
PASXXVPARLNAISILYFDAANNVVLKKYRDMVV

SEQ ID NO: 64689 - protein, 24 aa, Artificial Sequence
  Cyclic GFR-binding peptide
DLSPISILYIIGKTPKIYKQYEMI

SEQ ID NO: 64690 - protein, 37 aa, Artificial Sequence; identical to SEQ ID NO: 18673
  Cyclic GFR-binding peptide
  MOD_RES (4)..(5)..(36): Xaa is C or S

SEQ ID NO: 64691 - protein, 28 aa, Artificial Sequence
  Cyclic GFR-binding peptide
TKLEPISVLYLDDMGVPTKFKYEEGMSV

SEQ ID NO: 64692 - protein, 34 aa, Artificial Sequence; identical to SEQ ID NO: 18674
  Cyclic GFR-binding peptide
  MOD_RES (1)..(2)..(34): Xaa is C or S

SEQ ID NO: 64693 - protein, 32 aa, Artificial Sequence
  Cyclic GFR-binding peptide
  MOD_RES (5)..(6): Xaa is C or S
APASXXVPARLEPISILYLDAANNVVKFKYED

SEQ ID NO: 64694 - protein, 40 aa, Artificial Sequence; identical to SEQ ID NO: 18675
  Cyclic GFR-binding peptide
  MOD_RES (5)..(6)..(37)..(39): Xaa is C or S

SEQ ID NO: 64695 - protein, 34 aa, Artificial Sequence; identical to SEQ ID NO: 18677
  Cyclic GFR-binding peptide
  MOD_RES (1)..(33): Xaa is C or S

SEQ ID NO: 64696 - protein, 31 aa, Artificial Sequence
  Cyclic GFR-binding peptide
  MOD_RES (5)..(6): Xaa is C or S
VPKPXXAPTQLEPISVLYLDDSSNVIKFKYE

SEQ ID NO: 64697 - protein, 38 aa, Artificial Sequence; identical to SEQ ID NO: 18678
  Cyclic GFR-binding peptide
  MOD_RES (5)..(6)..(38): Xaa is C or S

SEQ ID NO: 64698 - protein, 31 aa, Artificial Sequence
  Cyclic GFR-binding peptide
  MOD_RES (30)..(30): Xaa is C or S
KLEPISVLYLDDMGVPTKFKYEEGMSVAEXG

SEQ ID NO: 64699 - protein, 33 aa, Artificial Sequence
  Cyclic GFR-binding peptide
  MOD_RES (3)..(4): Xaa is C or S
KAXXVPTKLSPISILYIDKGVVTYYKQYEGMAV

SEQ ID NO: 64700 - protein, 25 aa, Artificial Sequence
  Cyclic GFR-binding peptide
PARLNAISILYFDAANNVVLKKYRD

SEQ ID NO: 64701 - protein, 23 aa, Artificial Sequence
  Cyclic GFR-binding peptide
LEPISILYLVGRKPKVKFKYEMI

SEQ ID NO: 64702 - protein, 32 aa, Artificial Sequence
  Cyclic GFR-binding peptide
  MOD_RES (6)..(7): Xaa is C or S
AAPASXXVPARLSPISILYKDAANNVVLKYHY

SEQ ID NO: 64703 - protein, 31 aa, Artificial Sequence
  Cyclic GFR-binding peptide
  MOD_RES (5)..(6): Xaa is C or S
ASKAXXVPTKLSPISILYIDKGVVTYYKQYE

SEQ ID NO: 64704 - protein, 30 aa, Artificial Sequence
  Cyclic GFR-binding peptide
  MOD_RES (1)..(1): Xaa is C or S
XVPTELEPISMLYLDEYDKVVKFKYEEMVV

SEQ ID NO: 64705 - protein, 34 aa, Artificial Sequence; identical to SEQ ID NO: 18679
  Cyclic GFR-binding peptide
  MOD_RES (32)..(34): Xaa is C or S

SEQ ID NO: 64706 - protein, 33 aa, Artificial Sequence; identical to SEQ ID NO: 18680
  Cyclic GFR-binding peptide
  MOD_RES (1)..(33): Xaa is C or S

SEQ ID NO: 64707 - protein, 34 aa, Artificial Sequence; identical to SEQ ID NO: 18681
  Cyclic GFR-binding peptide
  MOD_RES (32)..(34): Xaa is C or S

SEQ ID NO: 64708 - protein, 32 aa, Artificial Sequence; identical to SEQ ID NO: 18684
  Cyclic GFR-binding peptide
  MOD_RES (1)..(2): Xaa is C or S

SEQ ID NO: 64709 - protein, 24 aa, Artificial Sequence
  Cyclic GFR-binding peptide
LEPISILYLDAANNVVKFKYEDMV

SEQ ID NO: 64710 - protein, 31 aa, Artificial Sequence
  Cyclic GFR-binding peptide
  MOD_RES (3)..(4): Xaa is C or S
SPXXVPQDLEPISILYLVGRTPKVKFKYEMV

SEQ ID NO: 64711 - protein, 24 aa, Artificial Sequence
  Cyclic GFR-binding peptide
RLEPISILYLDAANNVVKFKYEDM

SEQ ID NO: 64712 - protein, 38 aa, Artificial Sequence; identical to SEQ ID NO: 18686
  Cyclic GFR-binding peptide
  MOD_RES (3)..(4)..(36)..(38): Xaa is C or S

SEQ ID NO: 64713 - protein, 25 aa, Artificial Sequence
  Cyclic GFR-binding peptide
EPISILYLIGKTPKIKFKYEMIVKS

SEQ ID NO: 64714 - protein, 35 aa, Artificial Sequence
  Cyclic GFR-binding peptide
  MOD_RES (6)..(7): Xaa is C or S
ASASPXXVPQDLSPISILYIVGRTPKVYKQYEMVV

SEQ ID NO: 64715 - protein, 30 aa, Artificial Sequence
  Cyclic GFR-binding peptide
  MOD_RES (30)..(30): Xaa is C or S
TELSPISMLYIDEYDKVVYKQYEEMVVEGX

SEQ ID NO: 64716 - protein, 37 aa, Artificial Sequence; identical to SEQ ID NO: 18694
  Cyclic GFR-binding peptide
  MOD_RES (6)..(7): Xaa is C or S

SEQ ID NO: 64717 - protein, 39 aa, Artificial Sequence; identical to SEQ ID NO: 18695
  Cyclic GFR-binding peptide
  MOD_RES (6)..(7): Xaa is C or S

SEQ ID NO: 64718 - protein, 31 aa, Artificial Sequence
  Cyclic GFR-binding peptide
  MOD_RES (4)..(5): Xaa is C or S
PASXXVPARLSPISILYKDAANNVVLKYHYD

SEQ ID NO: 64719 - protein, 24 aa, Artificial Sequence
  Cyclic GFR-binding peptide
PTELEPISMLYLDENEKVVKFKYE

SEQ ID NO: 64720 - protein, 34 aa, Artificial Sequence; identical to SEQ ID NO: 18697
  Cyclic GFR-binding peptide
  MOD_RES (1)..(34): Xaa is C or S

SEQ ID NO: 64721 - protein, 34 aa, Artificial Sequence
  Cyclic GFR-binding peptide
  MOD_RES (6)..(7): Xaa is C or S
ASASPXXVSQDLSPISILYIIGKTPKIYKQYEMI

SEQ ID NO: 64722 - protein, 32 aa, Artificial Sequence
  Cyclic GFR-binding peptide
  MOD_RES (30)..(32): Xaa is C or S
SQDLEPISILYLIGKTPKIKFKYEMIVKSXKX

SEQ ID NO: 64723 - protein, 22 aa, Artificial Sequence
  Cyclic GFR-binding peptide
EPISILYLIGKTPKIKFKYEMI

SEQ ID NO: 64724 - protein, 35 aa, Artificial Sequence; identical to SEQ ID NO: 18699
  Cyclic GFR-binding peptide
  MOD_RES (2)..(3)..(35): Xaa is C or S

SEQ ID NO: 64725 - protein, 36 aa, Artificial Sequence; identical to SEQ ID NO: 18706
  Cyclic GFR-binding peptide
  MOD_RES (1)..(33)..(35): Xaa is C or S

SEQ ID NO: 64726 - protein, 42 aa, Artificial Sequence; identical to SEQ ID NO: 18710
  Cyclic GFR-binding peptide
  MOD_RES (6)..(7)..(40)..(42): Xaa is C or S

SEQ ID NO: 64727 - protein, 38 aa, Artificial Sequence; identical to SEQ ID NO: 18711
  Cyclic GFR-binding peptide
  MOD_RES (5)..(6)..(38): Xaa is C or S

SEQ ID NO: 64728 - protein, 31 aa, Artificial Sequence
  Cyclic GFR-binding peptide
  MOD_RES (29)..(31): Xaa is C or S
QDLSPISILYIVGRTPKVYKQYEMVVKSXKX

SEQ ID NO: 64729 - protein, 37 aa, Artificial Sequence; identical to SEQ ID NO: 18713
  Cyclic GFR-binding peptide
  MOD_RES (6)..(7): Xaa is C or S

SEQ ID NO: 64730 - protein, 32 aa, Artificial Sequence
  Cyclic GFR-binding peptide
  MOD_RES (31)..(31): Xaa is C or S
PTQLEPISVLYLDDSSNVIKFKYENMVVRAXG

SEQ ID NO: 64731 - protein, 26 aa, Artificial Sequence
  Cyclic GFR-binding peptide
QDLSPISILYIVGRTPKVYKQYEMVV

SEQ ID NO: 64732 - protein, 26 aa, Artificial Sequence
  Cyclic GFR-binding peptide
PTKLEPISVLYLDDSSNVIKFKYENM

SEQ ID NO: 64733 - protein, 29 aa, Artificial Sequence
  Cyclic GFR-binding peptide
  MOD_RES (3)..(4): Xaa is C or S
KAXXAPTKLEPISVLYLDSSNNVIKFKYE

SEQ ID NO: 64734 - protein, 37 aa, Artificial Sequence; identical to SEQ ID NO: 18717
  Cyclic GFR-binding peptide
  MOD_RES (3)..(4)..(35)..(37): Xaa is C or S

SEQ ID NO: 64735 - protein, 30 aa, Artificial Sequence
  Cyclic GFR-binding peptide
  MOD_RES (30)..(30): Xaa is C or S
ARLEPISILYLDAANNVVKFKYEDMVVEAX

SEQ ID NO: 64736 - protein, 20 aa, Artificial Sequence
  Cyclic GFR-binding peptide
EPISVLYLDSSNNVIKFKYE

SEQ ID NO: 64737 - protein, 33 aa, Artificial Sequence; identical to SEQ ID NO: 18725
  Cyclic GFR-binding peptide
  MOD_RES (1)..(33): Xaa is C or S

SEQ ID NO: 64738 - protein, 39 aa, Artificial Sequence; identical to SEQ ID NO: 18727
  Cyclic GFR-binding peptide
  MOD_RES (4)..(5)..(38): Xaa is C or S

SEQ ID NO: 64739 - protein, 31 aa, Artificial Sequence
  Cyclic GFR-binding peptide
  MOD_RES (2)..(3): Xaa is C or S
AXXVPTELEPISMLYLDEYDKVVKFKYEEMV

SEQ ID NO: 64740 - protein, 35 aa, Artificial Sequence; identical to SEQ ID NO: 18730
  Cyclic GFR-binding peptide
  MOD_RES (4)..(5): Xaa is C or S

SEQ ID NO: 64741 - protein, 30 aa, Artificial Sequence
  Cyclic GFR-binding peptide
  MOD_RES (30)..(30): Xaa is C or S
KLEPISVLYLDDMGVPTKFKYEEGMSVAEX

SEQ ID NO: 64742 - protein, 31 aa, Artificial Sequence
  Cyclic GFR-binding peptide
  MOD_RES (1)..(2): Xaa is C or S
XXVPQDLEPISILYLVGRTPKVKFKYEMVVK

SEQ ID NO: 64743 - protein, 38 aa, Artificial Sequence; identical to SEQ ID NO: 18732
  Cyclic GFR-binding peptide
  MOD_RES (7)..(7): Xaa is C or S

SEQ ID NO: 64744 - protein, 20 aa, Artificial Sequence
  Cyclic GFR-binding peptide
SPISVLYIDDMGVPTYKQYE

SEQ ID NO: 64745 - protein, 31 aa, Artificial Sequence
  Cyclic GFR-binding peptide
  MOD_RES (31)..(31): Xaa is C or S
PTQLSPISVLYIDDSSNVIYKQYENMVVRAX

SEQ ID NO: 64746 - protein, 20 aa, Artificial Sequence
  Cyclic GFR-binding peptide
SPISVLYIDDSSNVIYKQYE

SEQ ID NO: 64747 - protein, 26 aa, Artificial Sequence
  Cyclic GFR-binding peptide
ARLSPISILYKDAANNVVLKYHYDMV

SEQ ID NO: 64748 - protein, 21 aa, Artificial Sequence
  Cyclic GFR-binding peptide
LEPISILYLIGKTPKIKFKYE

SEQ ID NO: 64749 - protein, 22 aa, Artificial Sequence
  Cyclic GFR-binding peptide
LEPISILYLDAANNVVKFKYED

SEQ ID NO: 64750 - protein, 39 aa, Artificial Sequence; identical to SEQ ID NO: 18741
  Cyclic GFR-binding peptide
  MOD_RES (3)..(4)..(36)..(38): Xaa is C or S

SEQ ID NO: 64751 - protein, 37 aa, Artificial Sequence; identical to SEQ ID NO: 18742
  Cyclic GFR-binding peptide
  MOD_RES (3)..(4)..(36): Xaa is C or S

SEQ ID NO: 64752 - protein, 28 aa, Artificial Sequence
  Cyclic GFR-binding peptide
QDLEPISILYLIGKTPKIKFKYEMIVKS

SEQ ID NO: 64753 - protein, 30 aa, Artificial Sequence; identical to SEQ ID NO: 951
  Cyclic GFR-binding peptide

SEQ ID NO: 64754 - protein, 37 aa, Artificial Sequence; identical to SEQ ID NO: 18750
  Cyclic GFR-binding peptide
  MOD_RES (3)..(4)..(35)..(37): Xaa is C or S

SEQ ID NO: 64755 - protein, 23 aa, Artificial Sequence
  Cyclic GFR-binding peptide
EPISILYLVGRKPKVKFKYEMIV

SEQ ID NO: 64756 - protein, 36 aa, Artificial Sequence
  Cyclic GFR-binding peptide
  MOD_RES (7)..(7): Xaa is C or S
HVTKPTXAPTKLSPISVLYIDDSSNVIYKQYENMVV

SEQ ID NO: 64757 - protein, 36 aa, Artificial Sequence; identical to SEQ ID NO: 18752
  Cyclic GFR-binding peptide
  MOD_RES (5)..(6): Xaa is C or S

SEQ ID NO: 64758 - protein, 40 aa, Artificial Sequence; identical to SEQ ID NO: 18753
  Cyclic GFR-binding peptide
  MOD_RES (5)..(37)..(39): Xaa is C or S

SEQ ID NO: 64759 - protein, 29 aa, Artificial Sequence
  Cyclic GFR-binding peptide
APTQLEPISVLYLDDSSNVIKFKYENMVV

SEQ ID NO: 64760 - protein, 25 aa, Artificial Sequence
  Cyclic GFR-binding peptide
EPISILYLVGRTPKVKFKYEMVVKS

SEQ ID NO: 64761 - protein, 26 aa, Artificial Sequence
  Cyclic GFR-binding peptide
TKLEPISVLYLDDSSNVIKFKYENMV

SEQ ID NO: 64762 - protein, 27 aa, Artificial Sequence
  Cyclic GFR-binding peptide
  MOD_RES (1)..(2): Xaa is C or S
XXVPQALSPISILYIVGRKPKVYKQYE

SEQ ID NO: 64763 - protein, 31 aa, Artificial Sequence
  Cyclic GFR-binding peptide
  MOD_RES (29)..(31): Xaa is C or S
QALSPISILYIVGRKPKVYKQYEMIVRSXKX

SEQ ID NO: 64764 - protein, 24 aa, Artificial Sequence
  Cyclic GFR-binding peptide
LEPISVLYLDDSSNVIKFKYENMV

SEQ ID NO: 64765 - protein, 24 aa, Artificial Sequence
  Cyclic GFR-binding peptide
LEPISVLYLDSSNNVIKFKYENMV

SEQ ID NO: 64766 - protein, 30 aa, Artificial Sequence
  Cyclic GFR-binding peptide
  MOD_RES (27)..(29): Xaa is C or S
LEPISILYLVGRTPKVKFKYEMVVKSXKXS

SEQ ID NO: 64767 - protein, 28 aa, Artificial Sequence
  Cyclic GFR-binding peptide
ELEPISMLYLDENEKVVKFKYEDMVVEG

SEQ ID NO: 64768 - protein, 34 aa, Artificial Sequence
  Cyclic GFR-binding peptide
  MOD_RES (5)..(6): Xaa is C or S
IPKAXXVPTELSPISMLYIDEYDKVVYKQYEEMV

SEQ ID NO: 64769 - protein, 29 aa, Artificial Sequence
  Cyclic GFR-binding peptide
  MOD_RES (27)..(29): Xaa is C or S
SPISILYKDKGVVTYLKYHYGMAVSEXGX

SEQ ID NO: 64770 - protein, 25 aa, Artificial Sequence
  Cyclic GFR-binding peptide
VPARLNAISILYFDAANNVVLKKYR

SEQ ID NO: 64771 - protein, 25 aa, Artificial Sequence
  Cyclic GFR-binding peptide
TKLEPISVLYLDDMGVPTKFKYEEG

SEQ ID NO: 64772 - protein, 26 aa, Artificial Sequence
  Cyclic GFR-binding peptide
VPTELSPISMLYIDENEKVVYKQYED

SEQ ID NO: 64773 - protein, 34 aa, Artificial Sequence; identical to SEQ ID NO: 18765
  Cyclic GFR-binding peptide
  MOD_RES (3)..(4): Xaa is C or S

SEQ ID NO: 64774 - protein, 39 aa, Artificial Sequence; identical to SEQ ID NO: 18766
  Cyclic GFR-binding peptide
  MOD_RES (6)..(7)..(39): Xaa is C or S

SEQ ID NO: 64775 - protein, 36 aa, Artificial Sequence; identical to SEQ ID NO: 18767
  Cyclic GFR-binding peptide
  MOD_RES (33)..(35): Xaa is C or S

SEQ ID NO: 64776 - protein, 29 aa, Artificial Sequence
  Cyclic GFR-binding peptide
  MOD_RES (27)..(29): Xaa is C or S
EPISVLYLDSSNNVIKFKYENMVVKAXGX

SEQ ID NO: 64777 - protein, 25 aa, Artificial Sequence
  Cyclic GFR-binding peptide
LSPISILYIVGRTPKVYKQYEMVVK

SEQ ID NO: 64778 - protein, 28 aa, Artificial Sequence
  Cyclic GFR-binding peptide
KLNAISILYFDKGVVTYLKKYRGMAVSE

SEQ ID NO: 64779 - protein, 24 aa, Artificial Sequence
  Cyclic GFR-binding peptide
PQDLSPISILYIVGRTPKVYKQYE

SEQ ID NO: 64780 - protein, 32 aa, Artificial Sequence
  Cyclic GFR-binding peptide
  MOD_RES (2)..(3): Xaa is C or S
PXXVPQDLEPISILYLVGRTPKVKFKYEMVVK

SEQ ID NO: 64781 - protein, 39 aa, Artificial Sequence; identical to SEQ ID NO: 18774
  Cyclic GFR-binding peptide
  MOD_RES (5)..(6)..(38): Xaa is C or S

SEQ ID NO: 64782 - protein, 28 aa, Artificial Sequence
  Cyclic GFR-binding peptide
  MOD_RES (2)..(3): Xaa is C or S
AXXVPTKLSPISILYKDKGVVTYLKYHY

SEQ ID NO: 64783 - protein, 27 aa, Artificial Sequence
  Cyclic GFR-binding peptide
RLEPISILYLDAANNVVKFKYEDMVVE

SEQ ID NO: 64784 - protein, 25 aa, Artificial Sequence
  Cyclic GFR-binding peptide
PTKLSPISVLYIDDMGVPTYKQYEE

SEQ ID NO: 64785 - protein, 32 aa, Artificial Sequence
  Cyclic GFR-binding peptide
  MOD_RES (2)..(3): Xaa is C or S
AXXVPTKLSPISVLYIDDMGVPTYKQYEEGMS

SEQ ID NO: 64786 - protein, 33 aa, Artificial Sequence; identical to SEQ ID NO: 18779
  Cyclic GFR-binding peptide
  MOD_RES (1)..(1): Xaa is C or S

SEQ ID NO: 64787 - protein, 23 aa, Artificial Sequence
  Cyclic GFR-binding peptide
SPISILYIIGKTPKIYKQYEMIV

SEQ ID NO: 64788 - protein, 31 aa, Artificial Sequence
  Cyclic GFR-binding peptide
  MOD_RES (28)..(30): Xaa is C or S
DLSPISILYIIGKTPKIYKQYEMIVKSXKXS

SEQ ID NO: 64789 - protein, 30 aa, Artificial Sequence
  Cyclic GFR-binding peptide
PTKLSPISILYIDKGVVTYYKQYEGMAVSE

SEQ ID NO: 64790 - protein, 42 aa, Artificial Sequence; identical to SEQ ID NO: 18784
  Cyclic GFR-binding peptide
  MOD_RES (6)..(7)..(39)..(41): Xaa is C or S

SEQ ID NO: 64791 - protein, 40 aa, Artificial Sequence; identical to SEQ ID NO: 18789
  Cyclic GFR-binding peptide
  MOD_RES (6)..(7)..(38)..(40): Xaa is C or S

SEQ ID NO: 64792 - protein, 30 aa, Artificial Sequence
  Cyclic GFR-binding peptide
  MOD_RES (29)..(29): Xaa is C or S
KLSPISILYKDKGVVTYLKYHYGMAVSEXG

SEQ ID NO: 64793 - protein, 33 aa, Artificial Sequence
  Cyclic GFR-binding peptide
  MOD_RES (6)..(7): Xaa is C or S
KIPKAXXVPTELEPISMLYLDENEKVVKFKYED

SEQ ID NO: 64794 - protein, 27 aa, Artificial Sequence
  Cyclic GFR-binding peptide
  MOD_RES (27)..(27): Xaa is C or S
EPISVLYLDDSSNVIKFKYENMVVRAX

SEQ ID NO: 64795 - protein, 34 aa, Artificial Sequence; identical to SEQ ID NO: 18798
  Cyclic GFR-binding peptide
  MOD_RES (1)..(33): Xaa is C or S

SEQ ID NO: 64796 - protein, 38 aa, Artificial Sequence; identical to SEQ ID NO: 18800
  Cyclic GFR-binding peptide
  MOD_RES (2)..(3)..(36)..(38): Xaa is C or S

SEQ ID NO: 64797 - protein, 32 aa, Artificial Sequence
  Cyclic GFR-binding peptide
  MOD_RES (2)..(3): Xaa is C or S
AXXVPTELEPISMLYLDEYDKVVKFKYEEMVV

SEQ ID NO: 64798 - protein, 31 aa, Artificial Sequence; identical to SEQ ID NO: 18802
  Cyclic GFR-binding peptide

SEQ ID NO: 64799 - protein, 32 aa, Artificial Sequence
  Cyclic GFR-binding peptide
  MOD_RES (31)..(31): Xaa is C or S
TKLSPISVLYIDDMGVPTYKQYEEGMSVAEXG

SEQ ID NO: 64800 - protein, 35 aa, Artificial Sequence
  Cyclic GFR-binding peptide
  MOD_RES (4)..(5): Xaa is C or S
GKAXXVPTKLSPISVLYIDDMGVPTYKQYEEGMSV

SEQ ID NO: 64801 - protein, 20 aa, Artificial Sequence
  Cyclic GFR-binding peptide
SPISILYIIGKTPKIYKQYE

SEQ ID NO: 64802 - protein, 32 aa, Artificial Sequence; identical to SEQ ID NO: 18814
  Cyclic GFR-binding peptide
  MOD_RES (1)..(2): Xaa is C or S

SEQ ID NO: 64803 - protein, 41 aa, Artificial Sequence; identical to SEQ ID NO: 18815
  Cyclic GFR-binding peptide
  MOD_RES (5)..(6)..(38)..(40): Xaa is C or S

SEQ ID NO: 64804 - protein, 35 aa, Artificial Sequence; identical to SEQ ID NO: 18816
  Cyclic GFR-binding peptide
  MOD_RES (2)..(3)..(35): Xaa is C or S

SEQ ID NO: 64805 - protein, 24 aa, Artificial Sequence
  Cyclic GFR-binding peptide
QDLEPISILYLVGRTPKVKFKYEM

SEQ ID NO: 64806 - protein, 22 aa, Artificial Sequence
  Cyclic GFR-binding peptide
LSPISILYKDAANNVVLKYHYD

SEQ ID NO: 64807 - protein, 32 aa, Artificial Sequence
  Cyclic GFR-binding peptide
  MOD_RES (5)..(6): Xaa is C or S
IPKAXXVPTELEPISMLYLDEYDKVVKFKYEE

SEQ ID NO: 64808 - protein, 33 aa, Artificial Sequence
  Cyclic GFR-binding peptide
  MOD_RES (3)..(4): Xaa is C or S
KAXXAPTKLEPISVLYLDSSNNVIKFKYENMVV

SEQ ID NO: 64809 - protein, 29 aa, Artificial Sequence
  Cyclic GFR-binding peptide
  MOD_RES (2)..(3): Xaa is C or S
PXXVSQDLEPISILYLIGKTPKIKFKYEM

SEQ ID NO: 64810 - protein, 27 aa, Artificial Sequence
  Cyclic GFR-binding peptide
LSPISILYKDKGVVTYLKYHYGMAVSE

SEQ ID NO: 64811 - protein, 38 aa, Artificial Sequence; identical to SEQ ID NO: 18820
  Cyclic GFR-binding peptide
  MOD_RES (4)..(5)..(37): Xaa is C or S

SEQ ID NO: 64812 - protein, 28 aa, Artificial Sequence
  Cyclic GFR-binding peptide
ARLSPISILYKDAANNVVLKYHYDMVVE

SEQ ID NO: 64813 - protein, 31 aa, Artificial Sequence
  Cyclic GFR-binding peptide
  MOD_RES (2)..(3): Xaa is C or S
PXXAPTQLEPISVLYLDDSSNVIKFKYENMV

SEQ ID NO: 64814 - protein, 24 aa, Artificial Sequence
  Cyclic GFR-binding peptide
NAISILYFDKGVVTYLKKYRGMAV

SEQ ID NO: 64815 - protein, 33 aa, Artificial Sequence
  Cyclic GFR-binding peptide
  MOD_RES (3)..(4): Xaa is C or S
KPXXAPTKLSPISVLYIDDSSNVIYKQYENMVV

SEQ ID NO: 64816 - protein, 24 aa, Artificial Sequence
  Cyclic GFR-binding peptide
EPISVLYLDDMGVPTKFKYEEGMS

SEQ ID NO: 64817 - protein, 32 aa, Artificial Sequence
  Cyclic GFR-binding peptide
  MOD_RES (5)..(6): Xaa is C or S
SASPXXVPQDLSPISILYIVGRTPKVYKQYEM

SEQ ID NO: 64818 - protein, 29 aa, Artificial Sequence
  Cyclic GFR-binding peptide
  MOD_RES (1)..(2): Xaa is C or S
XXAPTKLEPISVLYLDSSNNVIKFKYENM

SEQ ID NO: 64819 - protein, 38 aa, Artificial Sequence; identical to SEQ ID NO: 18823
  Cyclic GFR-binding peptide
  MOD_RES (5)..(6)..(37): Xaa is C or S

SEQ ID NO: 64820 - protein, 28 aa, Artificial Sequence
  Cyclic GFR-binding peptide
PTKLSPISVLYIDDMGVPTYKQYEEGMS

SEQ ID NO: 64821 - protein, 33 aa, Artificial Sequence
  Cyclic GFR-binding peptide
  MOD_RES (30)..(32): Xaa is C or S
PQALEPISILYLVGRKPKVKFKYEMIVRSXKXS

SEQ ID NO: 64822 - protein, 33 aa, Artificial Sequence
  Cyclic GFR-binding peptide
  MOD_RES (5)..(6): Xaa is C or S
IPKAXXVPTELSPISMLYIDENEKVVYKQYEDM

SEQ ID NO: 64823 - protein, 34 aa, Artificial Sequence
  Cyclic GFR-binding peptide
  MOD_RES (2)..(3): Xaa is C or S
AXXVPTKLSPISVLYIDDMGVPTYKQYEEGMSVA

SEQ ID NO: 64824 - protein, 31 aa, Artificial Sequence
  Cyclic GFR-binding peptide
  MOD_RES (28)..(30): Xaa is C or S
ALEPISILYLVGRKPKVKFKYEMIVRSXKXS

SEQ ID NO: 64825 - protein, 35 aa, Artificial Sequence
  Cyclic GFR-binding peptide
  MOD_RES (5)..(6): Xaa is C or S
APASXXVPARLNAISILYFDAANNVVLKKYRDMVV

SEQ ID NO: 64826 - protein, 29 aa, Artificial Sequence
  Cyclic GFR-binding peptide
  MOD_RES (29)..(29): Xaa is C or S
QLSPISVLYIDDSSNVIYKQYENMVVRAX

SEQ ID NO: 64827 - protein, 30 aa, Artificial Sequence
  Cyclic GFR-binding peptide
  MOD_RES (2)..(3): Xaa is C or S
AXXVPTELSPISMLYIDENEKVVYKQYEDM

SEQ ID NO: 64828 - protein, 28 aa, Artificial Sequence
  Cyclic GFR-binding peptide
  MOD_RES (1)..(2): Xaa is C or S
XXVPARLEPISILYLDAANNVVKFKYED

SEQ ID NO: 64829 - protein, 34 aa, Artificial Sequence; identical to SEQ ID NO: 18833
  Cyclic GFR-binding peptide
  MOD_RES (2)..(3): Xaa is C or S

SEQ ID NO: 64830 - protein, 39 aa, Artificial Sequence; identical to SEQ ID NO: 18835
  Cyclic GFR-binding peptide
  MOD_RES (4)..(5)..(37)..(39): Xaa is C or S

SEQ ID NO: 64831 - protein, 22 aa, Artificial Sequence
  Cyclic GFR-binding peptide
DLSPISILYIIGKTPKIYKQYE

SEQ ID NO: 64832 - protein, 35 aa, Artificial Sequence
  Cyclic GFR-binding peptide
  MOD_RES (6)..(7): Xaa is C or S
YVPKPXXAPTKLSPISVLYIDDSSNVIYKQYENMV

SEQ ID NO: 64833 - protein, 28 aa, Artificial Sequence
  Cyclic GFR-binding peptide
  MOD_RES (26)..(28): Xaa is C or S
SPISILYIIGKTPKIYKQYEMIVKSXKX

SEQ ID NO: 64834 - protein, 36 aa, Artificial Sequence; identical to SEQ ID NO: 18838
  Cyclic GFR-binding peptide
  MOD_RES (3)..(4)..(36): Xaa is C or S

SEQ ID NO: 64835 - protein, 34 aa, Artificial Sequence
  Cyclic GFR-binding peptide
  MOD_RES (5)..(6): Xaa is C or S
VPKPXXAPTKLEPISVLYLDDSSNVIKFKYENMV

SEQ ID NO: 64836 - protein, 22 aa, Artificial Sequence
  Cyclic GFR-binding peptide
LSPISILYIVGRTPKVYKQYEM

SEQ ID NO: 64837 - protein, 23 aa, Artificial Sequence
  Cyclic GFR-binding peptide
ELSPISMLYIDENEKVVYKQYED

SEQ ID NO: 64838 - protein, 25 aa, Artificial Sequence
  Cyclic GFR-binding peptide
PTELSPISMLYIDEYDKVVYKQYEE

SEQ ID NO: 64839 - protein, 40 aa, Artificial Sequence; identical to SEQ ID NO: 18847
  Cyclic GFR-binding peptide
  MOD_RES (6)..(38)..(40): Xaa is C or S

SEQ ID NO: 64840 - protein, 22 aa, Artificial Sequence
  Cyclic GFR-binding peptide
LSPISVLYIDSSNNVIYKQYEN

SEQ ID NO: 64841 - protein, 36 aa, Artificial Sequence; identical to SEQ ID NO: 18848
  Cyclic GFR-binding peptide
  MOD_RES (3)..(4)..(36): Xaa is C or S

SEQ ID NO: 64842 - protein, 32 aa, Artificial Sequence
  Cyclic GFR-binding peptide
  MOD_RES (4)..(5): Xaa is C or S
SKAXXVPTKLSPISILYKDKGVVTYLKYHYGM

SEQ ID NO: 64843 - protein, 34 aa, Artificial Sequence; identical to SEQ ID NO: 18852
  Cyclic GFR-binding peptide
  MOD_RES (1)..(2)..(33): Xaa is C or S

SEQ ID NO: 64844 - protein, 24 aa, Artificial Sequence
  Cyclic GFR-binding peptide
PTKLSPISVLYIDDSSNVIYKQYE

SEQ ID NO: 64845 - protein, 28 aa, Artificial Sequence
  Cyclic GFR-binding peptide
  MOD_RES (27)..(27): Xaa is C or S
EPISMLYLDEYDKVVKFKYEEMVVEGXG

SEQ ID NO: 64846 - protein, 32 aa, Artificial Sequence
  Cyclic GFR-binding peptide
  MOD_RES (6)..(7): Xaa is C or S
SIPKAXXVPTELSPISMLYIDEYDKVVYKQYE

SEQ ID NO: 64847 - protein, 32 aa, Artificial Sequence
  Cyclic GFR-binding peptide
  MOD_RES (31)..(31): Xaa is C or S
PTKLSPISVLYIDDSSNVIYKQYENMVVRSXG

SEQ ID NO: 64848 - protein, 35 aa, Artificial Sequence; identical to SEQ ID NO: 18855
  Cyclic GFR-binding peptide
  MOD_RES (1)..(2)..(34): Xaa is C or S

SEQ ID NO: 64849 - protein, 31 aa, Artificial Sequence
  Cyclic GFR-binding peptide
  MOD_RES (2)..(2): Xaa is C or S
TXAPTKLSPISVLYIDDSSNVIYKQYENMVV

SEQ ID NO: 64850 - protein, 35 aa, Artificial Sequence; identical to SEQ ID NO: 18858
  Cyclic GFR-binding peptide
  MOD_RES (2)..(3)..(34): Xaa is C or S

SEQ ID NO: 64851 - protein, 29 aa, Artificial Sequence
  Cyclic GFR-binding peptide
  MOD_RES (26)..(28): Xaa is C or S
SPISILYIVGRKPKVYKQYEMIVRSXKXS

SEQ ID NO: 64852 - protein, 31 aa, Artificial Sequence
  Cyclic GFR-binding peptide
  MOD_RES (2)..(3): Xaa is C or S
AXXVPTELEPISMLYLDENEKVVKFKYEDMV

SEQ ID NO: 64853 - protein, 32 aa, Artificial Sequence; identical to SEQ ID NO: 18861
  Cyclic GFR-binding peptide
  MOD_RES (32)..(32): Xaa is C or S

SEQ ID NO: 64854 - protein, 32 aa, Artificial Sequence
  Cyclic GFR-binding peptide
  MOD_RES (30)..(32): Xaa is C or S
ARLNAISILYFDAANNVVLKKYRDMVVEAXGX

SEQ ID NO: 64855 - protein, 25 aa, Artificial Sequence
  Cyclic GFR-binding peptide
DLEPISILYLVGRTPKVKFKYEMVV

SEQ ID NO: 64856 - protein, 26 aa, Artificial Sequence
  Cyclic GFR-binding peptide
VPARLNAISILYFDAANNVVLKKYRD

SEQ ID NO: 64857 - protein, 21 aa, Artificial Sequence
  Cyclic GFR-binding peptide
EPISILYLVGRKPKVKFKYEM

SEQ ID NO: 64858 - protein, 30 aa, Artificial Sequence
  Cyclic GFR-binding peptide
  MOD_RES (4)..(5): Xaa is C or S
ASPXXVPQDLSPISILYIVGRTPKVYKQYE

SEQ ID NO: 64859 - protein, 25 aa, Artificial Sequence
  Cyclic GFR-binding peptide
EPISMLYLDEYDKVVKFKYEEMVVE

SEQ ID NO: 64860 - protein, 29 aa, Artificial Sequence
  Cyclic GFR-binding peptide
TKLSPISVLYIDDSSNVIYKQYENMVVRS

SEQ ID NO: 64861 - protein, 34 aa, Artificial Sequence; identical to SEQ ID NO: 18865
  Cyclic GFR-binding peptide
  MOD_RES (3)..(4): Xaa is C or S

SEQ ID NO: 64862 - protein, 38 aa, Artificial Sequence; identical to SEQ ID NO: 18866
  Cyclic GFR-binding peptide
  MOD_RES (4)..(5)..(37): Xaa is C or S

SEQ ID NO: 64863 - protein, 39 aa, Artificial Sequence; identical to SEQ ID NO: 18867
  Cyclic GFR-binding peptide
  MOD_RES (6)..(7)..(39): Xaa is C or S

SEQ ID NO: 64864 - protein, 39 aa, Artificial Sequence; identical to SEQ ID NO: 18868
  Cyclic GFR-binding peptide
  MOD_RES (5)..(6)..(37)..(39): Xaa is C or S

SEQ ID NO: 64865 - protein, 26 aa, Artificial Sequence
  Cyclic GFR-binding peptide
QALEPISILYLVGRKPKVKFKYEMIV

SEQ ID NO: 64866 - protein, 37 aa, Artificial Sequence; identical to SEQ ID NO: 18873
  Cyclic GFR-binding peptide
  MOD_RES (6)..(7): Xaa is C or S

SEQ ID NO: 64867 - protein, 24 aa, Artificial Sequence
  Cyclic GFR-binding peptide
TKLSPISVLYIDDMGVPTYKQYEE

SEQ ID NO: 64868 - protein, 36 aa, Artificial Sequence
  Cyclic GFR-binding peptide
  MOD_RES (4)..(5): Xaa is C or S
GKAXXVPTKLEPISVLYLDDMGVPTKFKYEEGMSVA

SEQ ID NO: 64869 - protein, 37 aa, Artificial Sequence; identical to SEQ ID NO: 18879
  Cyclic GFR-binding peptide
  MOD_RES (1)..(2)..(34)..(36): Xaa is C or S

SEQ ID NO: 64870 - protein, 36 aa, Artificial Sequence; identical to SEQ ID NO: 18884
  Cyclic GFR-binding peptide
  MOD_RES (2)..(34)..(36): Xaa is C or S

SEQ ID NO: 64871 - protein, 28 aa, Artificial Sequence
  Cyclic GFR-binding peptide
PTELEPISMLYLDEYDKVVKFKYEEMVV

SEQ ID NO: 64872 - protein, 35 aa, Artificial Sequence
  Cyclic GFR-binding peptide
  MOD_RES (6)..(7): Xaa is C or S
KASKAXXVPTKLSPISILYIDKGVVTYYKQYEGMA

SEQ ID NO: 64873 - protein, 20 aa, Artificial Sequence
  Cyclic GFR-binding peptide
NAISILYFDAANNVVLKKYR

SEQ ID NO: 64874 - protein, 34 aa, Artificial Sequence; identical to SEQ ID NO: 18889
  Cyclic GFR-binding peptide
  MOD_RES (2)..(3): Xaa is C or S

SEQ ID NO: 64875 - protein, 40 aa, Artificial Sequence; identical to SEQ ID NO: 18894
  Cyclic GFR-binding peptide
  MOD_RES (6)..(7)..(39): Xaa is C or S

SEQ ID NO: 64876 - protein, 39 aa, Artificial Sequence; identical to SEQ ID NO: 18896
  Cyclic GFR-binding peptide
  MOD_RES (4)..(5)..(37)..(39): Xaa is C or S

SEQ ID NO: 64877 - protein, 29 aa, Artificial Sequence
  Cyclic GFR-binding peptide
  MOD_RES (1)..(1): Xaa is C or S
XAPTKLSPISVLYIDSSNNVIYKQYENMV

SEQ ID NO: 64878 - protein, 35 aa, Artificial Sequence; identical to SEQ ID NO: 18900
  Cyclic GFR-binding peptide
  MOD_RES (3)..(4): Xaa is C or S

SEQ ID NO: 64879 - protein, 25 aa, Artificial Sequence
  Cyclic GFR-binding peptide
VPQALEPISILYLVGRKPKVKFKYE

SEQ ID NO: 64880 - protein, 30 aa, Artificial Sequence
  Cyclic GFR-binding peptide
  MOD_RES (29)..(29): Xaa is C or S
QLSPISVLYIDDSSNVIYKQYENMVVRAXG

SEQ ID NO: 64881 - protein, 31 aa, Artificial Sequence
  Cyclic GFR-binding peptide
  MOD_RES (4)..(5): Xaa is C or S
PKAXXVPTELEPISMLYLDEYDKVVKFKYEE

SEQ ID NO: 64882 - protein, 25 aa, Artificial Sequence
  Cyclic GFR-binding peptide
TQLSPISVLYIDDSSNVIYKQYENM

SEQ ID NO: 64883 - protein, 27 aa, Artificial Sequence
  Cyclic GFR-binding peptide
VPARLNAISILYFDAANNVVLKKYRDM

SEQ ID NO: 64884 - protein, 29 aa, Artificial Sequence
  Cyclic GFR-binding peptide
VPTKLEPISVLYLDDMGVPTKFKYEEGMS

SEQ ID NO: 64885 - protein, 26 aa, Artificial Sequence
  Cyclic GFR-binding peptide
LEPISILYLDAANNVVKFKYEDMVVE

SEQ ID NO: 64886 - protein, 25 aa, Artificial Sequence
  Cyclic GFR-binding peptide
PQDLEPISILYLVGRTPKVKFKYEM

SEQ ID NO: 64887 - protein, 32 aa, Artificial Sequence
  Cyclic GFR-binding peptide
  MOD_RES (30)..(32): Xaa is C or S
TKLNAISILYFDKGVVTYLKKYRGMAVSEXGX

SEQ ID NO: 64888 - protein, 30 aa, Artificial Sequence
  Cyclic GFR-binding peptide
  MOD_RES (30)..(30): Xaa is C or S
TKLSPISILYIDKGVVTYYKQYEGMAVSEX

SEQ ID NO: 64889 - protein, 34 aa, Artificial Sequence; identical to SEQ ID NO: 18906
  Cyclic GFR-binding peptide
  MOD_RES (3)..(4): Xaa is C or S

SEQ ID NO: 64890 - protein, 34 aa, Artificial Sequence; identical to SEQ ID NO: 18910
  Cyclic GFR-binding peptide
  MOD_RES (32)..(34): Xaa is C or S

SEQ ID NO: 64891 - protein, 40 aa, Artificial Sequence; identical to SEQ ID NO: 18911
  Cyclic GFR-binding peptide
  MOD_RES (7)..(39): Xaa is C or S

SEQ ID NO: 64892 - protein, 38 aa, Artificial Sequence; identical to SEQ ID NO: 18913
  Cyclic GFR-binding peptide
  MOD_RES (6)..(7): Xaa is C or S

SEQ ID NO: 64893 - protein, 35 aa, Artificial Sequence; identical to SEQ ID NO: 18918
  Cyclic GFR-binding peptide
  MOD_RES (1)..(2)..(34): Xaa is C or S

SEQ ID NO: 64894 - protein, 27 aa, Artificial Sequence
  Cyclic GFR-binding peptide
  MOD_RES (26)..(26): Xaa is C or S
SPISILYIVGRKPKVYKQYEMIVRSXK

SEQ ID NO: 64895 - protein, 36 aa, Artificial Sequence; identical to SEQ ID NO: 18920
  Cyclic GFR-binding peptide
  MOD_RES (4)..(5): Xaa is C or S

SEQ ID NO: 64896 - protein, 27 aa, Artificial Sequence
  Cyclic GFR-binding peptide
QDLSPISILYIVGRTPKVYKQYEMVVK

SEQ ID NO: 64897 - protein, 37 aa, Artificial Sequence; identical to SEQ ID NO: 18923
  Cyclic GFR-binding peptide
  MOD_RES (3)..(4)..(35)..(37): Xaa is C or S

SEQ ID NO: 64898 - protein, 33 aa, Artificial Sequence
  Cyclic GFR-binding peptide
  MOD_RES (30)..(32): Xaa is C or S
TKLSPISILYKDKGVVTYLKYHYGMAVSEXGXR

SEQ ID NO: 64899 - protein, 35 aa, Artificial Sequence; identical to SEQ ID NO: 18924
  Cyclic GFR-binding peptide
  MOD_RES (1)..(33)..(35): Xaa is C or S

SEQ ID NO: 64900 - protein, 27 aa, Artificial Sequence
  Cyclic GFR-binding peptide
  MOD_RES (1)..(1): Xaa is C or S
XVSQDLSPISILYIIGKTPKIYKQYEM

SEQ ID NO: 64901 - protein, 32 aa, Artificial Sequence
  Cyclic GFR-binding peptide
  MOD_RES (5)..(6): Xaa is C or S
VPKAXXAPTKLEPISVLYLDSSNNVIKFKYEN

SEQ ID NO: 64902 - protein, 32 aa, Artificial Sequence
  Cyclic GFR-binding peptide
  MOD_RES (6)..(7): Xaa is C or S
KASKAXXVPTKLSPISILYIDKGVVTYYKQYE

SEQ ID NO: 64903 - protein, 38 aa, Artificial Sequence; identical to SEQ ID NO: 18928
  Cyclic GFR-binding peptide
  MOD_RES (2)..(3)..(35)..(37): Xaa is C or S

SEQ ID NO: 64904 - protein, 27 aa, Artificial Sequence
  Cyclic GFR-binding peptide
  MOD_RES (2)..(2): Xaa is C or S
TXAPTKLSPISVLYIDDSSNVIYKQYE

SEQ ID NO: 64905 - protein, 28 aa, Artificial Sequence
  Cyclic GFR-binding peptide
VPQALSPISILYIVGRKPKVYKQYEMIV

SEQ ID NO: 64906 - protein, 24 aa, Artificial Sequence
  Cyclic GFR-binding peptide
PTKLSPISVLYIDDMGVPTYKQYE

SEQ ID NO: 64907 - protein, 36 aa, Artificial Sequence; identical to SEQ ID NO: 18934
  Cyclic GFR-binding peptide
  MOD_RES (5)..(6): Xaa is C or S

SEQ ID NO: 64908 - protein, 35 aa, Artificial Sequence; identical to SEQ ID NO: 18935
  Cyclic GFR-binding peptide
  MOD_RES (1)..(2)..(33)..(35): Xaa is C or S

SEQ ID NO: 64909 - protein, 21 aa, Artificial Sequence
  Cyclic GFR-binding peptide
LSPISILYKDKGVVTYLKYHY

SEQ ID NO: 64910 - protein, 35 aa, Artificial Sequence
  Cyclic GFR-binding peptide
  MOD_RES (7)..(7): Xaa is C or S
HVTKPTXAPTKLEPISVLYLDDSSNVIKFKYENMV

SEQ ID NO: 64911 - protein, 29 aa, Artificial Sequence
  Cyclic GFR-binding peptide
  MOD_RES (28)..(28): Xaa is C or S
LEPISMLYLDEYDKVVKFKYEEMVVEGXG

SEQ ID NO: 64912 - protein, 32 aa, Artificial Sequence
  Cyclic GFR-binding peptide
  MOD_RES (4)..(5): Xaa is C or S
PKAXXVPTELSPISMLYIDEYDKVVYKQYEEM

SEQ ID NO: 64913 - protein, 30 aa, Artificial Sequence
  Cyclic GFR-binding peptide
  MOD_RES (3)..(4): Xaa is C or S
APXXVPQALEPISILYLVGRKPKVKFKYEM

SEQ ID NO: 64914 - protein, 32 aa, Artificial Sequence
  Cyclic GFR-binding peptide
  MOD_RES (3)..(4): Xaa is C or S
KAXXAPTKLSPISVLYIDSSNNVIYKQYENMV

SEQ ID NO: 64915 - protein, 31 aa, Artificial Sequence
  Cyclic GFR-binding peptide
  MOD_RES (2)..(3): Xaa is C or S
AXXVPTELSPISMLYIDEYDKVVYKQYEEMV

SEQ ID NO: 64916 - protein, 26 aa, Artificial Sequence
  Cyclic GFR-binding peptide
LSPISILYKDAANNVVLKYHYDMVVE

SEQ ID NO: 64917 - protein, 37 aa, Artificial Sequence; identical to SEQ ID NO: 18947
  Cyclic GFR-binding peptide
  MOD_RES (1)..(34)..(36): Xaa is C or S

SEQ ID NO: 64918 - protein, 26 aa, Artificial Sequence
  Cyclic GFR-binding peptide
QLSPISVLYIDDSSNVIYKQYENMVV

SEQ ID NO: 64919 - protein, 30 aa, Artificial Sequence
  Cyclic GFR-binding peptide
  MOD_RES (3)..(4): Xaa is C or S
KAXXVPTELSPISMLYIDENEKVVYKQYED

SEQ ID NO: 64920 - protein, 26 aa, Artificial Sequence
  Cyclic GFR-binding peptide
TKLNAISILYFDKGVVTYLKKYRGMA

SEQ ID NO: 64921 - protein, 27 aa, Artificial Sequence
  Cyclic GFR-binding peptide
  MOD_RES (27)..(27): Xaa is C or S
SPISMLYIDENEKVVYKQYEDMVVEGX

SEQ ID NO: 64922 - protein, 37 aa, Artificial Sequence; identical to SEQ ID NO: 18951
  Cyclic GFR-binding peptide
  MOD_RES (5)..(6)..(37): Xaa is C or S

SEQ ID NO: 64923 - protein, 32 aa, Artificial Sequence; identical to SEQ ID NO: 18952
  Cyclic GFR-binding peptide
  MOD_RES (32)..(32): Xaa is C or S

SEQ ID NO: 64924 - protein, 36 aa, Artificial Sequence
  Cyclic GFR-binding peptide
  MOD_RES (6)..(7): Xaa is C or S
KIPKAXXVPTELSPISMLYIDENEKVVYKQYEDMVV

SEQ ID NO: 64925 - protein, 32 aa, Artificial Sequence; identical to SEQ ID NO: 18959
  Cyclic GFR-binding peptide
  MOD_RES (1)..(32): Xaa is C or S

SEQ ID NO: 64926 - protein, 33 aa, Artificial Sequence
  Cyclic GFR-binding peptide
  MOD_RES (31)..(33): Xaa is C or S
PTELSPISMLYIDEYDKVVYKQYEEMVVEGXGX

SEQ ID NO: 64927 - protein, 30 aa, Artificial Sequence
  Cyclic GFR-binding peptide
  MOD_RES (1)..(2): Xaa is C or S
XXVPQALSPISILYIVGRKPKVYKQYEMIV

SEQ ID NO: 64928 - protein, 41 aa, Artificial Sequence; identical to SEQ ID NO: 18960
  Cyclic GFR-binding peptide
  MOD_RES (5)..(6)..(38)..(40): Xaa is C or S

SEQ ID NO: 64929 - protein, 27 aa, Artificial Sequence
  Cyclic GFR-binding peptide
EPISVLYLDDMGVPTKFKYEEGMSVAE

SEQ ID NO: 64930 - protein, 32 aa, Artificial Sequence; identical to SEQ ID NO: 18964
  Cyclic GFR-binding peptide
  MOD_RES (1)..(2): Xaa is C or S

SEQ ID NO: 64931 - protein, 34 aa, Artificial Sequence; identical to SEQ ID NO: 18966
  Cyclic GFR-binding peptide
  MOD_RES (1)..(2): Xaa is C or S

SEQ ID NO: 64932 - protein, 31 aa, Artificial Sequence
  Cyclic GFR-binding peptide
  MOD_RES (2)..(3): Xaa is C or S
PXXVSQDLSPISILYIIGKTPKIYKQYEMIV

SEQ ID NO: 64933 - protein, 29 aa, Artificial Sequence
  Cyclic GFR-binding peptide
  MOD_RES (1)..(2): Xaa is C or S
XXVPTKLSPISVLYIDDMGVPTYKQYEEG

SEQ ID NO: 64934 - protein, 28 aa, Artificial Sequence
  Cyclic GFR-binding peptide
PARLEPISILYLDAANNVVKFKYEDMVV

SEQ ID NO: 64935 - protein, 30 aa, Artificial Sequence
  Cyclic GFR-binding peptide
  MOD_RES (4)..(5): Xaa is C or S
PKAXXVPTELSPISMLYIDENEKVVYKQYE

SEQ ID NO: 64936 - protein, 32 aa, Artificial Sequence
  Cyclic GFR-binding peptide
  MOD_RES (6)..(7): Xaa is C or S
AVPKAXXAPTKLEPISVLYLDSSNNVIKFKYE

SEQ ID NO: 64937 - protein, 33 aa, Artificial Sequence
  Cyclic GFR-binding peptide
  MOD_RES (30)..(32): Xaa is C or S
TQLEPISVLYLDDSSNVIKFKYENMVVRAXGXH

SEQ ID NO: 64938 - protein, 32 aa, Artificial Sequence
  Cyclic GFR-binding peptide
  MOD_RES (4)..(5): Xaa is C or S
PKPXXAPTQLSPISVLYIDDSSNVIYKQYENM

SEQ ID NO: 64939 - protein, 28 aa, Artificial Sequence
  Cyclic GFR-binding peptide
  MOD_RES (1)..(2): Xaa is C or S
XXVPARLSPISILYKDAANNVVLKYHYD

SEQ ID NO: 64940 - protein, 27 aa, Artificial Sequence
  Cyclic GFR-binding peptide
LSPISVLYIDSSNNVIYKQYENMVVKA

SEQ ID NO: 64941 - protein, 31 aa, Artificial Sequence
  Cyclic GFR-binding peptide
PTKLEPISVLYLDDMGVPTKFKYEEGMSVAE

SEQ ID NO: 64942 - protein, 30 aa, Artificial Sequence
  Cyclic GFR-binding peptide
  MOD_RES (28)..(30): Xaa is C or S
LEPISVLYLDDSSNVIKFKYENMVVRSXGX

SEQ ID NO: 64943 - protein, 33 aa, Artificial Sequence
  Cyclic GFR-binding peptide
  MOD_RES (3)..(4): Xaa is C or S
KAXXVPTKLSPISILYKDKGVVTYLKYHYGMAV

SEQ ID NO: 64944 - protein, 23 aa, Artificial Sequence
  Cyclic GFR-binding peptide
LEPISILYLDAANNVVKFKYEDM

SEQ ID NO: 64945 - protein, 28 aa, Artificial Sequence
  Cyclic GFR-binding peptide
  MOD_RES (1)..(1): Xaa is C or S
XVPQALEPISILYLVGRKPKVKFKYEMI

SEQ ID NO: 64946 - protein, 30 aa, Artificial Sequence
  Cyclic GFR-binding peptide
  MOD_RES (3)..(3): Xaa is C or S
PTXAPTKLSPISVLYIDDSSNVIYKQYENM

SEQ ID NO: 64947 - protein, 35 aa, Artificial Sequence; identical to SEQ ID NO: 18989
  Cyclic GFR-binding peptide
  MOD_RES (3)..(4)..(35): Xaa is C or S

SEQ ID NO: 64948 - protein, 32 aa, Artificial Sequence; identical to SEQ ID NO: 18992
  Cyclic GFR-binding peptide
  MOD_RES (31)..(31): Xaa is C or S

SEQ ID NO: 64949 - protein, 38 aa, Artificial Sequence; identical to SEQ ID NO: 18996
  Cyclic GFR-binding peptide
  MOD_RES (2)..(3)..(35)..(37): Xaa is C or S

SEQ ID NO: 64950 - protein, 30 aa, Artificial Sequence
  Cyclic GFR-binding peptide
  MOD_RES (4)..(5): Xaa is C or S
PKAXXVPTELSPISMLYIDEYDKVVYKQYE

SEQ ID NO: 64951 - protein, 38 aa, Artificial Sequence; identical to SEQ ID NO: 18997
  Cyclic GFR-binding peptide
  MOD_RES (6)..(7)..(38): Xaa is C or S

SEQ ID NO: 64952 - protein, 26 aa, Artificial Sequence
  Cyclic GFR-binding peptide
  MOD_RES (1)..(1): Xaa is C or S
XAPTQLSPISVLYIDDSSNVIYKQYE

SEQ ID NO: 64953 - protein, 36 aa, Artificial Sequence; identical to SEQ ID NO: 18998
  Cyclic GFR-binding peptide
  MOD_RES (5)..(6): Xaa is C or S

SEQ ID NO: 64954 - protein, 32 aa, Artificial Sequence
  Cyclic GFR-binding peptide
  MOD_RES (30)..(32): Xaa is C or S
TKLSPISILYIDKGVVTYYKQYEGMAVSEXGX

SEQ ID NO: 64955 - protein, 38 aa, Artificial Sequence; identical to SEQ ID NO: 18999
  Cyclic GFR-binding peptide
  MOD_RES (6)..(7): Xaa is C or S

SEQ ID NO: 64956 - protein, 33 aa, Artificial Sequence
  Cyclic GFR-binding peptide
  MOD_RES (30)..(32): Xaa is C or S
TQLSPISVLYIDDSSNVIYKQYENMVVRAXGXH

SEQ ID NO: 64957 - protein, 37 aa, Artificial Sequence; identical to SEQ ID NO: 19003
  Cyclic GFR-binding peptide
  MOD_RES (5)..(6)..(37): Xaa is C or S

SEQ ID NO: 64958 - protein, 27 aa, Artificial Sequence
  Cyclic GFR-binding peptide
ARLSPISILYKDAANNVVLKYHYDMVV

SEQ ID NO: 64959 - protein, 23 aa, Artificial Sequence
  Cyclic GFR-binding peptide
DLEPISILYLIGKTPKIKFKYEM

SEQ ID NO: 64960 - protein, 39 aa, Artificial Sequence; identical to SEQ ID NO: 19004
  Cyclic GFR-binding peptide
  MOD_RES (4)..(5)..(37)..(39): Xaa is C or S

SEQ ID NO: 64961 - protein, 31 aa, Artificial Sequence
  Cyclic GFR-binding peptide
  MOD_RES (30)..(30): Xaa is C or S
TELSPISMLYIDEYDKVVYKQYEEMVVEGXG

SEQ ID NO: 64962 - protein, 24 aa, Artificial Sequence
  Cyclic GFR-binding peptide
EPISMLYLDEYDKVVKFKYEEMVV

SEQ ID NO: 64963 - protein, 37 aa, Artificial Sequence; identical to SEQ ID NO: 19006
  Cyclic GFR-binding peptide
  MOD_RES (2)..(3)..(35)..(37): Xaa is C or S

SEQ ID NO: 64964 - protein, 37 aa, Artificial Sequence; identical to SEQ ID NO: 19008
  Cyclic GFR-binding peptide
  MOD_RES (6)..(7): Xaa is C or S

SEQ ID NO: 64965 - protein, 29 aa, Artificial Sequence
  Cyclic GFR-binding peptide
  MOD_RES (28)..(28): Xaa is C or S
ALSPISILYIVGRKPKVYKQYEMIVRSXK

SEQ ID NO: 64966 - protein, 37 aa, Artificial Sequence; identical to SEQ ID NO: 19010
  Cyclic GFR-binding peptide
  MOD_RES (2)..(3)..(35)..(37): Xaa is C or S

SEQ ID NO: 64967 - protein, 23 aa, Artificial Sequence
  Cyclic GFR-binding peptide
LEPISILYLIGKTPKIKFKYEMI

SEQ ID NO: 64968 - protein, 31 aa, Artificial Sequence; identical to SEQ ID NO: 19011
  Cyclic GFR-binding peptide

SEQ ID NO: 64969 - protein, 25 aa, Artificial Sequence
  Cyclic GFR-binding peptide
KLNAISILYFDKGVVTYLKKYRGMA

SEQ ID NO: 64970 - protein, 38 aa, Artificial Sequence; identical to SEQ ID NO: 19012
  Cyclic GFR-binding peptide
  MOD_RES (2)..(3)..(35)..(37): Xaa is C or S

SEQ ID NO: 64971 - protein, 24 aa, Artificial Sequence
  Cyclic GFR-binding peptide
SPISVLYIDDSSNVIYKQYENMVV

SEQ ID NO: 64972 - protein, 22 aa, Artificial Sequence
  Cyclic GFR-binding peptide
SPISVLYIDSSNNVIYKQYENM

SEQ ID NO: 64973 - protein, 36 aa, Artificial Sequence
  Cyclic GFR-binding peptide
  MOD_RES (6)..(7): Xaa is C or S
YVPKPXXAPTKLEPISVLYLDDSSNVIKFKYENMVV

SEQ ID NO: 64974 - protein, 28 aa, Artificial Sequence
  Cyclic GFR-binding peptide
  MOD_RES (1)..(1): Xaa is C or S
XVPTELEPISMLYLDENEKVVKFKYEDM

SEQ ID NO: 64975 - protein, 37 aa, Artificial Sequence; identical to SEQ ID NO: 19018
  Cyclic GFR-binding peptide
  MOD_RES (5)..(6): Xaa is C or S

SEQ ID NO: 64976 - protein, 23 aa, Artificial Sequence
  Cyclic GFR-binding peptide
KLEPISVLYLDSSNNVIKFKYEN

SEQ ID NO: 64977 - protein, 26 aa, Artificial Sequence
  Cyclic GFR-binding peptide
PQDLEPISILYLVGRTPKVKFKYEMV

SEQ ID NO: 64978 - protein, 31 aa, Artificial Sequence
  Cyclic GFR-binding peptide
  MOD_RES (4)..(4): Xaa is C or S
KPTXAPTKLSPISVLYIDDSSNVIYKQYENM

SEQ ID NO: 64979 - protein, 36 aa, Artificial Sequence; identical to SEQ ID NO: 19028
  Cyclic GFR-binding peptide
  MOD_RES (1)..(2)..(33)..(35): Xaa is C or S

SEQ ID NO: 64980 - protein, 33 aa, Artificial Sequence
  Cyclic GFR-binding peptide
  MOD_RES (6)..(7): Xaa is C or S
SIPKAXXVPTELEPISMLYLDEYDKVVKFKYEE

SEQ ID NO: 64981 - protein, 29 aa, Artificial Sequence
  Cyclic GFR-binding peptide
  MOD_RES (1)..(2): Xaa is C or S
XXVPTELSPISMLYIDEYDKVVYKQYEEM

SEQ ID NO: 64982 - protein, 35 aa, Artificial Sequence; identical to SEQ ID NO: 19032
  Cyclic GFR-binding peptide
  MOD_RES (1)..(32)..(34): Xaa is C or S

SEQ ID NO: 64983 - protein, 24 aa, Artificial Sequence
  Cyclic GFR-binding peptide
LEPISILYLIGKTPKIKFKYEMIV

SEQ ID NO: 64984 - protein, 31 aa, Artificial Sequence; identical to SEQ ID NO: 19034
  Cyclic GFR-binding peptide

SEQ ID NO: 64985 - protein, 29 aa, Artificial Sequence
  Cyclic GFR-binding peptide
PQDLEPISILYLVGRTPKVKFKYEMVVKS

SEQ ID NO: 64986 - protein, 21 aa, Artificial Sequence
  Cyclic GFR-binding peptide
NAISILYFDKGVVTYLKKYRG

SEQ ID NO: 64987 - protein, 41 aa, Artificial Sequence; identical to SEQ ID NO: 19037
  Cyclic GFR-binding peptide
  MOD_RES (6)..(7)..(38)..(40): Xaa is C or S

SEQ ID NO: 64988 - protein, 31 aa, Artificial Sequence
  Cyclic GFR-binding peptide
  MOD_RES (1)..(2): Xaa is C or S
XXAPTKLEPISVLYLDSSNNVIKFKYENMVV

SEQ ID NO: 64989 - protein, 39 aa, Artificial Sequence; identical to SEQ ID NO: 19044
  Cyclic GFR-binding peptide
  MOD_RES (3)..(4)..(36)..(38): Xaa is C or S

SEQ ID NO: 64990 - protein, 30 aa, Artificial Sequence
  Cyclic GFR-binding peptide
  MOD_RES (27)..(29): Xaa is C or S
LSPISILYIIGKTPKIYKQYEMIVKSXKXS

SEQ ID NO: 64991 - protein, 32 aa, Artificial Sequence
  Cyclic GFR-binding peptide
  MOD_RES (31)..(31): Xaa is C or S
PARLNAISILYFDAANNVVLKKYRDMVVEAXG

SEQ ID NO: 64992 - protein, 24 aa, Artificial Sequence
  Cyclic GFR-binding peptide
KLNAISILYFDKGVVTYLKKYRGM

SEQ ID NO: 64993 - protein, 40 aa, Artificial Sequence; identical to SEQ ID NO: 19051
  Cyclic GFR-binding peptide
  MOD_RES (5)..(6)..(38)..(40): Xaa is C or S

SEQ ID NO: 64994 - protein, 27 aa, Artificial Sequence
  Cyclic GFR-binding peptide
  MOD_RES (1)..(1): Xaa is C or S
XAPTKLSPISVLYIDSSNNVIYKQYEN

SEQ ID NO: 64995 - protein, 40 aa, Artificial Sequence; identical to SEQ ID NO: 19053
  Cyclic GFR-binding peptide
  MOD_RES (4)..(5)..(37)..(39): Xaa is C or S

SEQ ID NO: 64996 - protein, 28 aa, Artificial Sequence
  Cyclic GFR-binding peptide
TKLSPISVLYIDSSNNVIYKQYENMVVK

SEQ ID NO: 64997 - protein, 35 aa, Artificial Sequence; identical to SEQ ID NO: 19056
  Cyclic GFR-binding peptide
  MOD_RES (4)..(5): Xaa is C or S

SEQ ID NO: 64998 - protein, 37 aa, Artificial Sequence; identical to SEQ ID NO: 19057
  Cyclic GFR-binding peptide
  MOD_RES (5)..(37): Xaa is C or S

SEQ ID NO: 64999 - protein, 38 aa, Artificial Sequence; identical to SEQ ID NO: 19058
  Cyclic GFR-binding peptide
  MOD_RES (3)..(4)..(36)..(38): Xaa is C or S

SEQ ID NO: 65000 - protein, 37 aa, Artificial Sequence; identical to SEQ ID NO: 19060
  Cyclic GFR-binding peptide
  MOD_RES (2)..(3)..(35)..(37): Xaa is C or S

SEQ ID NO: 65001 - protein, 35 aa, Artificial Sequence; identical to SEQ ID NO: 19062
  Cyclic GFR-binding peptide
  MOD_RES (5)..(5): Xaa is C or S

SEQ ID NO: 65002 - protein, 31 aa, Artificial Sequence
  Cyclic GFR-binding peptide
  MOD_RES (2)..(2): Xaa is C or S
TXAPTKLEPISVLYLDDSSNVIKFKYENMVV

SEQ ID NO: 65003 - protein, 33 aa, Artificial Sequence
  Cyclic GFR-binding peptide
  MOD_RES (2)..(3): Xaa is C or S
AXXVPTKLEPISVLYLDDMGVPTKFKYEEGMSV

SEQ ID NO: 65004 - protein, 23 aa, Artificial Sequence
  Cyclic GFR-binding peptide
SPISILYIDKGVVTYYKQYEGMA

SEQ ID NO: 65005 - protein, 30 aa, Artificial Sequence
  Cyclic GFR-binding peptide
  MOD_RES (27)..(29): Xaa is C or S
SPISILYIDKGVVTYYKQYEGMAVSEXGXR

SEQ ID NO: 65006 - protein, 31 aa, Artificial Sequence
  Cyclic GFR-binding peptide
  MOD_RES (2)..(3): Xaa is C or S
PXXVSQDLEPISILYLIGKTPKIKFKYEMIV

SEQ ID NO: 65007 - protein, 40 aa, Artificial Sequence; identical to SEQ ID NO: 19068
  Cyclic GFR-binding peptide
  MOD_RES (5)..(6)..(38)..(40): Xaa is C or S

SEQ ID NO: 65008 - protein, 36 aa, Artificial Sequence; identical to SEQ ID NO: 19069
  Cyclic GFR-binding peptide
  MOD_RES (5)..(6): Xaa is C or S

SEQ ID NO: 65009 - protein, 29 aa, Artificial Sequence
  Cyclic GFR-binding peptide
VPQALSPISILYIVGRKPKVYKQYEMIVR

SEQ ID NO: 65010 - protein, 26 aa, Artificial Sequence
  Cyclic GFR-binding peptide
SPISILYKDKGVVTYLKYHYGMAVSE

SEQ ID NO: 65011 - protein, 35 aa, Artificial Sequence
  Cyclic GFR-binding peptide
  MOD_RES (6)..(7): Xaa is C or S
YVPKPXXAPTKLEPISVLYLDDSSNVIKFKYENMV

SEQ ID NO: 65012 - protein, 34 aa, Artificial Sequence
  Cyclic GFR-binding peptide
  MOD_RES (4)..(5): Xaa is C or S
PASXXVPARLSPISILYKDAANNVVLKYHYDMVV

SEQ ID NO: 65013 - protein, 32 aa, Artificial Sequence
  Cyclic GFR-binding peptide
  MOD_RES (29)..(31): Xaa is C or S
RLEPISILYLDAANNVVKFKYEDMVVEAXGXR

SEQ ID NO: 65014 - protein, 31 aa, Artificial Sequence
  Cyclic GFR-binding peptide
  MOD_RES (3)..(4): Xaa is C or S
KPXXAPTQLEPISVLYLDDSSNVIKFKYENM

SEQ ID NO: 65015 - protein, 42 aa, Artificial Sequence; identical to SEQ ID NO: 19073
  Cyclic GFR-binding peptide
  MOD_RES (6)..(7)..(39)..(41): Xaa is C or S

SEQ ID NO: 65016 - protein, 32 aa, Artificial Sequence; identical to SEQ ID NO: 19075
  Cyclic GFR-binding peptide
  MOD_RES (32)..(32): Xaa is C or S

SEQ ID NO: 65017 - protein, 30 aa, Artificial Sequence
  Cyclic GFR-binding peptide
  MOD_RES (3)..(4): Xaa is C or S
KPXXAPTQLSPISVLYIDDSSNVIYKQYEN

SEQ ID NO: 65018 - protein, 28 aa, Artificial Sequence
  Cyclic GFR-binding peptide
  MOD_RES (28)..(28): Xaa is C or S
SPISVLYIDDMGVPTYKQYEEGMSVAEX

SEQ ID NO: 65019 - protein, 30 aa, Artificial Sequence
  Cyclic GFR-binding peptide
  MOD_RES (3)..(4): Xaa is C or S
SPXXVPQDLSPISILYIVGRTPKVYKQYEM

SEQ ID NO: 65020 - protein, 29 aa, Artificial Sequence
  Cyclic GFR-binding peptide
  MOD_RES (1)..(1): Xaa is C or S
XVPQALEPISILYLVGRKPKVKFKYEMIV

SEQ ID NO: 65021 - protein, 29 aa, Artificial Sequence
  Cyclic GFR-binding peptide
  MOD_RES (26)..(28): Xaa is C or S
SPISILYIIGKTPKIYKQYEMIVKSXKXS

SEQ ID NO: 65022 - protein, 25 aa, Artificial Sequence
  Cyclic GFR-binding peptide
SPISVLYIDDMGVPTYKQYEEGMSV

SEQ ID NO: 65023 - protein, 39 aa, Artificial Sequence; identical to SEQ ID NO: 19078
  Cyclic GFR-binding peptide
  MOD_RES (6)..(7)..(38): Xaa is C or S

SEQ ID NO: 65024 - protein, 25 aa, Artificial Sequence
  Cyclic GFR-binding peptide
LEPISMLYLDENEKVVKFKYEDMVV

SEQ ID NO: 65025 - protein, 27 aa, Artificial Sequence
  Cyclic GFR-binding peptide
  MOD_RES (1)..(1): Xaa is C or S
XVPARLNAISILYFDAANNVVLKKYRD

SEQ ID NO: 65026 - protein, 39 aa, Artificial Sequence; identical to SEQ ID NO: 19083
  Cyclic GFR-binding peptide
  MOD_RES (6)..(7)..(38): Xaa is C or S

SEQ ID NO: 65027 - protein, 34 aa, Artificial Sequence; identical to SEQ ID NO: 19087
  Cyclic GFR-binding peptide
  MOD_RES (3)..(4): Xaa is C or S

SEQ ID NO: 65028 - protein, 40 aa, Artificial Sequence; identical to SEQ ID NO: 19088
  Cyclic GFR-binding peptide
  MOD_RES (5)..(37)..(39): Xaa is C or S

SEQ ID NO: 65029 - protein, 26 aa, Artificial Sequence
  Cyclic GFR-binding peptide
LSPISILYIVGRKPKVYKQYEMIVRS

SEQ ID NO: 65030 - protein, 34 aa, Artificial Sequence; identical to SEQ ID NO: 19092
  Cyclic GFR-binding peptide
  MOD_RES (31)..(33): Xaa is C or S

SEQ ID NO: 65031 - protein, 33 aa, Artificial Sequence
  Cyclic GFR-binding peptide
  MOD_RES (6)..(7): Xaa is C or S
KASKAXXVPTKLSPISILYKDKGVVTYLKYHYG

SEQ ID NO: 65032 - protein, 26 aa, Artificial Sequence
  Cyclic GFR-binding peptide
RLEPISILYLDAANNVVKFKYEDMVV

SEQ ID NO: 65033 - protein, 38 aa, Artificial Sequence; identical to SEQ ID NO: 19095
  Cyclic GFR-binding peptide
  MOD_RES (4)..(5)..(37): Xaa is C or S

SEQ ID NO: 65034 - protein, 36 aa, Artificial Sequence; identical to SEQ ID NO: 19096
  Cyclic GFR-binding peptide
  MOD_RES (1)..(2)..(34)..(36): Xaa is C or S

SEQ ID NO: 65035 - protein, 27 aa, Artificial Sequence
  Cyclic GFR-binding peptide
ARLNAISILYFDAANNVVLKKYRDMVV

SEQ ID NO: 65036 - protein, 22 aa, Artificial Sequence
  Cyclic GFR-binding peptide
KLNAISILYFDKGVVTYLKKYR

SEQ ID NO: 65037 - protein, 27 aa, Artificial Sequence
  Cyclic GFR-binding peptide
  MOD_RES (27)..(27): Xaa is C or S
LEPISILYLVGRTPKVKFKYEMVVKSX

SEQ ID NO: 65038 - protein, 32 aa, Artificial Sequence
  Cyclic GFR-binding peptide
  MOD_RES (3)..(4): Xaa is C or S
APXXVPQALSPISILYIVGRKPKVYKQYEMIV

SEQ ID NO: 65039 - protein, 33 aa, Artificial Sequence
  Cyclic GFR-binding peptide
  MOD_RES (3)..(4): Xaa is C or S
SPXXVPQDLEPISILYLVGRTPKVKFKYEMVVK

SEQ ID NO: 65040 - protein, 32 aa, Artificial Sequence
  Cyclic GFR-binding peptide
  MOD_RES (5)..(6): Xaa is C or S
VPKPXXAPTQLSPISVLYIDDSSNVIYKQYEN

SEQ ID NO: 65041 - protein, 30 aa, Artificial Sequence
  Cyclic GFR-binding peptide
  MOD_RES (3)..(4): Xaa is C or S
SPXXVSQDLEPISILYLIGKTPKIKFKYEM

SEQ ID NO: 65042 - protein, 36 aa, Artificial Sequence; identical to SEQ ID NO: 19109
  Cyclic GFR-binding peptide
  MOD_RES (4)..(5): Xaa is C or S

SEQ ID NO: 65043 - protein, 36 aa, Artificial Sequence; identical to SEQ ID NO: 19110
  Cyclic GFR-binding peptide
  MOD_RES (5)..(6): Xaa is C or S

SEQ ID NO: 65044 - protein, 33 aa, Artificial Sequence
  Cyclic GFR-binding peptide
  MOD_RES (5)..(6): Xaa is C or S
SASPXXVSQDLEPISILYLIGKTPKIKFKYEMI

SEQ ID NO: 65045 - protein, 27 aa, Artificial Sequence
  Cyclic GFR-binding peptide
  MOD_RES (1)..(2): Xaa is C or S
XXAPTQLSPISVLYIDDSSNVIYKQYE

SEQ ID NO: 65046 - protein, 31 aa, Artificial Sequence
  Cyclic GFR-binding peptide
  MOD_RES (5)..(6): Xaa is C or S
SAAPXXVPQALEPISILYLVGRKPKVKFKYE

SEQ ID NO: 65047 - protein, 34 aa, Artificial Sequence; identical to SEQ ID NO: 19113
  Cyclic GFR-binding peptide
  MOD_RES (1)..(33): Xaa is C or S

SEQ ID NO: 65048 - protein, 36 aa, Artificial Sequence; identical to SEQ ID NO: 19116
  Cyclic GFR-binding peptide
  MOD_RES (4)..(5): Xaa is C or S

SEQ ID NO: 65049 - protein, 21 aa, Artificial Sequence
  Cyclic GFR-binding peptide
EPISMLYLDENEKVVKFKYED

SEQ ID NO: 65050 - protein, 28 aa, Artificial Sequence
  Cyclic GFR-binding peptide
  MOD_RES (2)..(3): Xaa is C or S
PXXAPTKLEPISVLYLDDSSNVIKFKYE

SEQ ID NO: 65051 - protein, 28 aa, Artificial Sequence
  Cyclic GFR-binding peptide
  MOD_RES (27)..(27): Xaa is C or S
EPISVLYLDDSSNVIKFKYENMVVRSXG

SEQ ID NO: 65052 - protein, 29 aa, Artificial Sequence
  Cyclic GFR-binding peptide
  MOD_RES (3)..(4): Xaa is C or S
KAXXVPTKLEPISVLYLDDMGVPTKFKYE

SEQ ID NO: 65053 - protein, 27 aa, Artificial Sequence
  Cyclic GFR-binding peptide
  MOD_RES (1)..(2): Xaa is C or S
XXVPQDLSPISILYIVGRTPKVYKQYE

SEQ ID NO: 65054 - protein, 25 aa, Artificial Sequence
  Cyclic GFR-binding peptide
PTQLEPISVLYLDDSSNVIKFKYEN

SEQ ID NO: 65055 - protein, 37 aa, Artificial Sequence; identical to SEQ ID NO: 19126
  Cyclic GFR-binding peptide
  MOD_RES (3)..(4)..(36): Xaa is C or S

SEQ ID NO: 65056 - protein, 27 aa, Artificial Sequence
  Cyclic GFR-binding peptide
RLSPISILYKDAANNVVLKYHYDMVVE

SEQ ID NO: 65057 - protein, 23 aa, Artificial Sequence
  Cyclic GFR-binding peptide
SPISILYIVGRKPKVYKQYEMIV

SEQ ID NO: 65058 - protein, 30 aa, Artificial Sequence
  Cyclic GFR-binding peptide
  MOD_RES (1)..(1): Xaa is C or S
XAPTKLSPISVLYIDDSSNVIYKQYENMVV

SEQ ID NO: 65059 - protein, 30 aa, Artificial Sequence
  Cyclic GFR-binding peptide
  MOD_RES (3)..(4): Xaa is C or S
KAXXAPTKLSPISVLYIDSSNNVIYKQYEN

SEQ ID NO: 65060 - protein, 36 aa, Artificial Sequence
  Cyclic GFR-binding peptide
  MOD_RES (6)..(7): Xaa is C or S
KVGKAXXVPTKLEPISVLYLDDMGVPTKFKYEEGMS

SEQ ID NO: 65061 - protein, 38 aa, Artificial Sequence; identical to SEQ ID NO: 19133
  Cyclic GFR-binding peptide
  MOD_RES (1)..(2)..(35)..(37): Xaa is C or S

SEQ ID NO: 65062 - protein, 32 aa, Artificial Sequence
  Cyclic GFR-binding peptide
  MOD_RES (6)..(7): Xaa is C or S
ASASPXXVPQDLEPISILYLVGRTPKVKFKYE

SEQ ID NO: 65063 - protein, 30 aa, Artificial Sequence
  Cyclic GFR-binding peptide
  MOD_RES (1)..(1): Xaa is C or S
XVPARLEPISILYLDAANNVVKFKYEDMVV

SEQ ID NO: 65064 - protein, 29 aa, Artificial Sequence
  Cyclic GFR-binding peptide
  MOD_RES (1)..(2): Xaa is C or S
XXVSQDLEPISILYLIGKTPKIKFKYEMI

SEQ ID NO: 65065 - protein, 32 aa, Artificial Sequence; identical to SEQ ID NO: 19137
  Cyclic GFR-binding peptide
  MOD_RES (32)..(32): Xaa is C or S

SEQ ID NO: 65066 - protein, 31 aa, Artificial Sequence
  Cyclic GFR-binding peptide
  MOD_RES (31)..(31): Xaa is C or S
PTKLSPISVLYIDSSNNVIYKQYENMVVKAX

SEQ ID NO: 65067 - protein, 34 aa, Artificial Sequence
  Cyclic GFR-binding peptide
  MOD_RES (6)..(7): Xaa is C or S
SIPKAXXVPTELSPISMLYIDEYDKVVYKQYEEM

SEQ ID NO: 65068 - protein, 37 aa, Artificial Sequence; identical to SEQ ID NO: 19139
  Cyclic GFR-binding peptide
  MOD_RES (5)..(6): Xaa is C or S

SEQ ID NO: 65069 - protein, 30 aa, Artificial Sequence
  Cyclic GFR-binding peptide
PTKLEPISVLYLDDSSNVIKFKYENMVVRS

SEQ ID NO: 65070 - protein, 28 aa, Artificial Sequence
  Cyclic GFR-binding peptide
ELSPISMLYIDEYDKVVYKQYEEMVVEG

SEQ ID NO: 65071 - protein, 24 aa, Artificial Sequence
  Cyclic GFR-binding peptide
SPISILYIIGKTPKIYKQYEMIVK

SEQ ID NO: 65072 - protein, 23 aa, Artificial Sequence
  Cyclic GFR-binding peptide
SPISVLYIDDSSNVIYKQYENMV

SEQ ID NO: 65073 - protein, 23 aa, Artificial Sequence
  Cyclic GFR-binding peptide
LSPISVLYIDSSNNVIYKQYENM

SEQ ID NO: 65074 - protein, 34 aa, Artificial Sequence
  Cyclic GFR-binding peptide
  MOD_RES (5)..(6): Xaa is C or S
IPKAXXVPTELEPISMLYLDENEKVVKFKYEDMV

SEQ ID NO: 65075 - protein, 27 aa, Artificial Sequence
  Cyclic GFR-binding peptide
  MOD_RES (1)..(2): Xaa is C or S
XXVPTKLSPISVLYIDDMGVPTYKQYE

SEQ ID NO: 65076 - protein, 32 aa, Artificial Sequence
  Cyclic GFR-binding peptide
  MOD_RES (3)..(4): Xaa is C or S
ASXXVPARLNAISILYFDAANNVVLKKYRDMV

SEQ ID NO: 65077 - protein, 31 aa, Artificial Sequence
  Cyclic GFR-binding peptide
  MOD_RES (29)..(31): Xaa is C or S
KLEPISVLYLDSSNNVIKFKYENMVVKAXGX

SEQ ID NO: 65078 - protein, 27 aa, Artificial Sequence
  Cyclic GFR-binding peptide
TKLEPISVLYLDSSNNVIKFKYENMVV

SEQ ID NO: 65079 - protein, 36 aa, Artificial Sequence; identical to SEQ ID NO: 19147
  Cyclic GFR-binding peptide
  MOD_RES (1)..(33)..(35): Xaa is C or S

SEQ ID NO: 65080 - protein, 30 aa, Artificial Sequence
  Cyclic GFR-binding peptide
  MOD_RES (2)..(3): Xaa is C or S
SXXVPARLSPISILYKDAANNVVLKYHYDM

SEQ ID NO: 65081 - protein, 23 aa, Artificial Sequence
  Cyclic GFR-binding peptide
LSPISMLYIDEYDKVVYKQYEEM

SEQ ID NO: 65082 - protein, 32 aa, Artificial Sequence
  Cyclic GFR-binding peptide
  MOD_RES (31)..(31): Xaa is C or S
PTQLSPISVLYIDDSSNVIYKQYENMVVRAXG

SEQ ID NO: 65083 - protein, 34 aa, Artificial Sequence
  Cyclic GFR-binding peptide
  MOD_RES (7)..(7): Xaa is C or S
HVTKPTXAPTKLSPISVLYIDDSSNVIYKQYENM

SEQ ID NO: 65084 - protein, 32 aa, Artificial Sequence
  Cyclic GFR-binding peptide
  MOD_RES (31)..(31): Xaa is C or S
PARLEPISILYLDAANNVVKFKYEDMVVEAXG

SEQ ID NO: 65085 - protein, 39 aa, Artificial Sequence; identical to SEQ ID NO: 19156
  Cyclic GFR-binding peptide
  MOD_RES (5)..(6)..(38): Xaa is C or S

SEQ ID NO: 65086 - protein, 29 aa, Artificial Sequence
  Cyclic GFR-binding peptide
  MOD_RES (27)..(29): Xaa is C or S
LSPISILYIIGKTPKIYKQYEMIVKSXKX

SEQ ID NO: 65087 - protein, 33 aa, Artificial Sequence
  Cyclic GFR-binding peptide
  MOD_RES (4)..(5): Xaa is C or S
SKAXXVPTKLSPISILYKDKGVVTYLKYHYGMA

SEQ ID NO: 65088 - protein, 34 aa, Artificial Sequence
  Cyclic GFR-binding peptide
  MOD_RES (6)..(7): Xaa is C or S
AVPKAXXAPTKLSPISVLYIDSSNNVIYKQYENM

SEQ ID NO: 65089 - protein, 32 aa, Artificial Sequence; identical to SEQ ID NO: 19162
  Cyclic GFR-binding peptide
  MOD_RES (1)..(2): Xaa is C or S

SEQ ID NO: 65090 - protein, 23 aa, Artificial Sequence
  Cyclic GFR-binding peptide
LSPISVLYIDDMGVPTYKQYEEG

SEQ ID NO: 65091 - protein, 30 aa, Artificial Sequence
  Cyclic GFR-binding peptide
  MOD_RES (3)..(4): Xaa is C or S
SPXXVSQDLSPISILYIIGKTPKIYKQYEM

SEQ ID NO: 65092 - protein, 28 aa, Artificial Sequence
  Cyclic GFR-binding peptide
KLEPISVLYLDDSSNVIKFKYENMVVRS

SEQ ID NO: 65093 - protein, 32 aa, Artificial Sequence; identical to SEQ ID NO: 19169
  Cyclic GFR-binding peptide
  MOD_RES (31)..(31): Xaa is C or S

SEQ ID NO: 65094 - protein, 33 aa, Artificial Sequence
  Cyclic GFR-binding peptide
  MOD_RES (5)..(5): Xaa is C or S
TKPTXAPTKLSPISVLYIDDSSNVIYKQYENMV

SEQ ID NO: 65095 - protein, 24 aa, Artificial Sequence
  Cyclic GFR-binding peptide
TQLEPISVLYLDDSSNVIKFKYEN

SEQ ID NO: 65096 - protein, 32 aa, Artificial Sequence
  Cyclic GFR-binding peptide
  MOD_RES (3)..(4): Xaa is C or S
KAXXAPTKLEPISVLYLDSSNNVIKFKYENMV

SEQ ID NO: 65097 - protein, 29 aa, Artificial Sequence
  Cyclic GFR-binding peptide
  MOD_RES (29)..(29): Xaa is C or S
KLEPISVLYLDDSSNVIKFKYENMVVRSX

SEQ ID NO: 65098 - protein, 21 aa, Artificial Sequence
  Cyclic GFR-binding peptide
EPISVLYLDDSSNVIKFKYEN

SEQ ID NO: 65099 - protein, 38 aa, Artificial Sequence; identical to SEQ ID NO: 19177
  Cyclic GFR-binding peptide
  MOD_RES (4)..(5)..(37): Xaa is C or S

SEQ ID NO: 65100 - protein, 27 aa, Artificial Sequence
  Cyclic GFR-binding peptide
ELSPISMLYIDEYDKVVYKQYEEMVVE

SEQ ID NO: 65101 - protein, 27 aa, Artificial Sequence
  Cyclic GFR-binding peptide
VSQDLEPISILYLIGKTPKIKFKYEMI

SEQ ID NO: 65102 - protein, 29 aa, Artificial Sequence
  Cyclic GFR-binding peptide
  MOD_RES (29)..(29): Xaa is C or S
KLNAISILYFDKGVVTYLKKYRGMAVSEX

SEQ ID NO: 65103 - protein, 36 aa, Artificial Sequence; identical to SEQ ID NO: 19179
  Cyclic GFR-binding peptide
  MOD_RES (4)..(5): Xaa is C or S

SEQ ID NO: 65104 - protein, 34 aa, Artificial Sequence
  Cyclic GFR-binding peptide
  MOD_RES (5)..(6): Xaa is C or S
APASXXVPARLNAISILYFDAANNVVLKKYRDMV

SEQ ID NO: 65105 - protein, 29 aa, Artificial Sequence
  Cyclic GFR-binding peptide
  MOD_RES (29)..(29): Xaa is C or S
KLSPISILYKDKGVVTYLKYHYGMAVSEX

SEQ ID NO: 65106 - protein, 33 aa, Artificial Sequence; identical to SEQ ID NO: 19182
  Cyclic GFR-binding peptide
  MOD_RES (1)..(32): Xaa is C or S

SEQ ID NO: 65107 - protein, 32 aa, Artificial Sequence
  Cyclic GFR-binding peptide
  MOD_RES (6)..(7): Xaa is C or S
KIPKAXXVPTELSPISMLYIDENEKVVYKQYE

SEQ ID NO: 65108 - protein, 41 aa, Artificial Sequence; identical to SEQ ID NO: 19186
  Cyclic GFR-binding peptide
  MOD_RES (6)..(38)..(40): Xaa is C or S

SEQ ID NO: 65109 - protein, 29 aa, Artificial Sequence
  Cyclic GFR-binding peptide
  MOD_RES (28)..(28): Xaa is C or S
LNAISILYFDKGVVTYLKKYRGMAVSEXG

SEQ ID NO: 65110 - protein, 31 aa, Artificial Sequence
  Cyclic GFR-binding peptide
  MOD_RES (29)..(31): Xaa is C or S
ELEPISMLYLDEYDKVVKFKYEEMVVEGXGX

SEQ ID NO: 65111 - protein, 23 aa, Artificial Sequence
  Cyclic GFR-binding peptide
TQLSPISVLYIDDSSNVIYKQYE

SEQ ID NO: 65112 - protein, 26 aa, Artificial Sequence
  Cyclic GFR-binding peptide
  MOD_RES (1)..(1): Xaa is C or S
XVPQALSPISILYIVGRKPKVYKQYE

SEQ ID NO: 65113 - protein, 28 aa, Artificial Sequence
  Cyclic GFR-binding peptide
  MOD_RES (1)..(1): Xaa is C or S
XAPTQLSPISVLYIDDSSNVIYKQYENM

SEQ ID NO: 65114 - protein, 39 aa, Artificial Sequence; identical to SEQ ID NO: 19193
  Cyclic GFR-binding peptide
  MOD_RES (3)..(4)..(37)..(39): Xaa is C or S

SEQ ID NO: 65115 - protein, 31 aa, Artificial Sequence
  Cyclic GFR-binding peptide
  MOD_RES (5)..(6): Xaa is C or S
VPKPXXAPTKLEPISVLYLDDSSNVIKFKYE

SEQ ID NO: 65116 - protein, 26 aa, Artificial Sequence
  Cyclic GFR-binding peptide
APTKLSPISVLYIDSSNNVIYKQYEN

SEQ ID NO: 65117 - protein, 28 aa, Artificial Sequence
  Cyclic GFR-binding peptide
  MOD_RES (1)..(1): Xaa is C or S
XVPQDLEPISILYLVGRTPKVKFKYEMV

SEQ ID NO: 65118 - protein, 32 aa, Artificial Sequence
  Cyclic GFR-binding peptide
  MOD_RES (29)..(31): Xaa is C or S
ELEPISMLYLDENEKVVKFKYEDMVVEGXGXR

SEQ ID NO: 65119 - protein, 30 aa, Artificial Sequence
  Cyclic GFR-binding peptide
  MOD_RES (2)..(3): Xaa is C or S
PXXVPQALEPISILYLVGRKPKVKFKYEMI

SEQ ID NO: 65120 - protein, 30 aa, Artificial Sequence
  Cyclic GFR-binding peptide
  MOD_RES (29)..(29): Xaa is C or S
ELEPISMLYLDEYDKVVKFKYEEMVVEGXG

SEQ ID NO: 65121 - protein, 27 aa, Artificial Sequence
  Cyclic GFR-binding peptide
  MOD_RES (1)..(2): Xaa is C or S
XXVPTELEPISMLYLDEYDKVVKFKYE

SEQ ID NO: 65122 - protein, 27 aa, Artificial Sequence
  Cyclic GFR-binding peptide
VPTELEPISMLYLDENEKVVKFKYEDM

SEQ ID NO: 65123 - protein, 27 aa, Artificial Sequence
  Cyclic GFR-binding peptide
VPTKLSPISVLYIDDMGVPTYKQYEEG

SEQ ID NO: 65124 - protein, 34 aa, Artificial Sequence
  Cyclic GFR-binding peptide
  MOD_RES (5)..(6): Xaa is C or S
IPKAXXVPTELEPISMLYLDEYDKVVKFKYEEMV

SEQ ID NO: 65125 - protein, 36 aa, Artificial Sequence; identical to SEQ ID NO: 19199
  Cyclic GFR-binding peptide
  MOD_RES (1)..(34)..(36): Xaa is C or S

SEQ ID NO: 65126 - protein, 29 aa, Artificial Sequence
  Cyclic GFR-binding peptide
  MOD_RES (1)..(1): Xaa is C or S
XVPARLSPISILYKDAANNVVLKYHYDMV

SEQ ID NO: 65127 - protein, 33 aa, Artificial Sequence
  Cyclic GFR-binding peptide
  MOD_RES (30)..(32): Xaa is C or S
KLSPISVLYIDDMGVPTYKQYEEGMSVAEXGXR

SEQ ID NO: 65128 - protein, 24 aa, Artificial Sequence
  Cyclic GFR-binding peptide
TELSPISMLYIDEYDKVVYKQYEE

SEQ ID NO: 65129 - protein, 34 aa, Artificial Sequence
  Cyclic GFR-binding peptide
  MOD_RES (6)..(7): Xaa is C or S
KASKAXXVPTKLSPISILYKDKGVVTYLKYHYGM

SEQ ID NO: 65130 - protein, 36 aa, Artificial Sequence; identical to SEQ ID NO: 19202
  Cyclic GFR-binding peptide
  MOD_RES (5)..(6): Xaa is C or S

SEQ ID NO: 65131 - protein, 29 aa, Artificial Sequence
  Cyclic GFR-binding peptide
  MOD_RES (2)..(3): Xaa is C or S
AXXVPTKLSPISILYKDKGVVTYLKYHYG

SEQ ID NO: 65132 - protein, 32 aa, Artificial Sequence
  Cyclic GFR-binding peptide
  MOD_RES (29)..(31): Xaa is C or S
ELSPISMLYIDENEKVVYKQYEDMVVEGXGXR

SEQ ID NO: 65133 - protein, 36 aa, Artificial Sequence
  Cyclic GFR-binding peptide
  MOD_RES (6)..(7): Xaa is C or S
ASAAPXXVPQALSPISILYIVGRKPKVYKQYEMIVR

SEQ ID NO: 65134 - protein, 22 aa, Artificial Sequence
  Cyclic GFR-binding peptide
EPISMLYLDEYDKVVKFKYEEM

SEQ ID NO: 65135 - protein, 28 aa, Artificial Sequence
  Cyclic GFR-binding peptide
TQLSPISVLYIDDSSNVIYKQYENMVVR

SEQ ID NO: 65136 - protein, 36 aa, Artificial Sequence
  Cyclic GFR-binding peptide
  MOD_RES (6)..(7): Xaa is C or S
KVGKAXXVPTKLSPISVLYIDDMGVPTYKQYEEGMS

SEQ ID NO: 65137 - protein, 23 aa, Artificial Sequence
  Cyclic GFR-binding peptide
LEPISMLYLDENEKVVKFKYEDM

SEQ ID NO: 65138 - protein, 33 aa, Artificial Sequence; identical to SEQ ID NO: 19211
  Cyclic GFR-binding peptide
  MOD_RES (2)..(3): Xaa is C or S

SEQ ID NO: 65139 - protein, 32 aa, Artificial Sequence
  Cyclic GFR-binding peptide
  MOD_RES (30)..(32): Xaa is C or S
TQLSPISVLYIDDSSNVIYKQYENMVVRAXGX

SEQ ID NO: 65140 - protein, 36 aa, Artificial Sequence; identical to SEQ ID NO: 19220
  Cyclic GFR-binding peptide
  MOD_RES (1)..(34)..(36): Xaa is C or S

SEQ ID NO: 65141 - protein, 22 aa, Artificial Sequence
  Cyclic GFR-binding peptide
LSPISMLYIDEYDKVVYKQYEE

SEQ ID NO: 65142 - protein, 31 aa, Artificial Sequence
  Cyclic GFR-binding peptide
  MOD_RES (4)..(5): Xaa is C or S
GKAXXVPTKLEPISVLYLDDMGVPTKFKYEE

SEQ ID NO: 65143 - protein, 31 aa, Artificial Sequence
  Cyclic GFR-binding peptide
  MOD_RES (3)..(4): Xaa is C or S
SPXXVPQDLSPISILYIVGRTPKVYKQYEMV

SEQ ID NO: 65144 - protein, 36 aa, Artificial Sequence; identical to SEQ ID NO: 19227
  Cyclic GFR-binding peptide
  MOD_RES (4)..(5): Xaa is C or S

SEQ ID NO: 65145 - protein, 38 aa, Artificial Sequence; identical to SEQ ID NO: 19229
  Cyclic GFR-binding peptide
  MOD_RES (3)..(4)..(35)..(37): Xaa is C or S

SEQ ID NO: 65146 - protein, 30 aa, Artificial Sequence
  Cyclic GFR-binding peptide
  MOD_RES (2)..(2): Xaa is C or S
TXAPTKLEPISVLYLDDSSNVIKFKYENMV

SEQ ID NO: 65147 - protein, 29 aa, Artificial Sequence
  Cyclic GFR-binding peptide
PTKLNAISILYFDKGVVTYLKKYRGMAVS

SEQ ID NO: 65148 - protein, 39 aa, Artificial Sequence; identical to SEQ ID NO: 19231
  Cyclic GFR-binding peptide
  MOD_RES (5)..(37)..(39): Xaa is C or S

SEQ ID NO: 65149 - protein, 21 aa, Artificial Sequence
  Cyclic GFR-binding peptide
EPISVLYLDDMGVPTKFKYEE

SEQ ID NO: 65150 - protein, 35 aa, Artificial Sequence; identical to SEQ ID NO: 19235
  Cyclic GFR-binding peptide
  MOD_RES (4)..(5): Xaa is C or S

SEQ ID NO: 65151 - protein, 26 aa, Artificial Sequence
  Cyclic GFR-binding peptide
SPISVLYIDDSSNVIYKQYENMVVRS

SEQ ID NO: 65152 - protein, 27 aa, Artificial Sequence
  Cyclic GFR-binding peptide
VPTELSPISMLYIDEYDKVVYKQYEEM

SEQ ID NO: 65153 - protein, 31 aa, Artificial Sequence
  Cyclic GFR-binding peptide
  MOD_RES (30)..(30): Xaa is C or S
TELEPISMLYLDENEKVVKFKYEDMVVEGXG

SEQ ID NO: 65154 - protein, 26 aa, Artificial Sequence
  Cyclic GFR-binding peptide
SPISVLYIDDSSNVIYKQYENMVVRA

SEQ ID NO: 65155 - protein, 31 aa, Artificial Sequence
  Cyclic GFR-binding peptide
  MOD_RES (29)..(31): Xaa is C or S
QDLEPISILYLIGKTPKIKFKYEMIVKSXKX

SEQ ID NO: 65156 - protein, 30 aa, Artificial Sequence
  Cyclic GFR-binding peptide
PARLEPISILYLDAANNVVKFKYEDMVVEA

SEQ ID NO: 65157 - protein, 29 aa, Artificial Sequence
  Cyclic GFR-binding peptide
  MOD_RES (29)..(29): Xaa is C or S
QALEPISILYLVGRKPKVKFKYEMIVRSX

SEQ ID NO: 65158 - protein, 27 aa, Artificial Sequence
  Cyclic GFR-binding peptide
PARLSPISILYKDAANNVVLKYHYDMV

SEQ ID NO: 65159 - protein, 28 aa, Artificial Sequence
  Cyclic GFR-binding peptide
QALEPISILYLVGRKPKVKFKYEMIVRS

SEQ ID NO: 65160 - protein, 30 aa, Artificial Sequence
  Cyclic GFR-binding peptide
  MOD_RES (28)..(30): Xaa is C or S
LEPISILYLDAANNVVKFKYEDMVVEAXGX

SEQ ID NO: 65161 - protein, 29 aa, Artificial Sequence
  Cyclic GFR-binding peptide
  MOD_RES (1)..(2): Xaa is C or S
XXAPTKLSPISVLYIDDSSNVIYKQYENM

SEQ ID NO: 65162 - protein, 33 aa, Artificial Sequence
  Cyclic GFR-binding peptide
  MOD_RES (30)..(32): Xaa is C or S
TKLSPISVLYIDDSSNVIYKQYENMVVRSXGXH

SEQ ID NO: 65163 - protein, 31 aa, Artificial Sequence; identical to SEQ ID NO: 19246
  Cyclic GFR-binding peptide
  MOD_RES (1)..(1): Xaa is C or S

SEQ ID NO: 65164 - protein, 20 aa, Artificial Sequence
  Cyclic GFR-binding peptide
SPISILYKDAANNVVLKYHY

SEQ ID NO: 65165 - protein, 30 aa, Artificial Sequence
  Cyclic GFR-binding peptide
  MOD_RES (1)..(1): Xaa is C or S
XVPQALEPISILYLVGRKPKVKFKYEMIVR

SEQ ID NO: 65166 - protein, 33 aa, Artificial Sequence
  Cyclic GFR-binding peptide
  MOD_RES (1)..(2): Xaa is C or S
XXVPTKLEPISVLYLDDMGVPTKFKYEEGMSVA

SEQ ID NO: 65167 - protein, 31 aa, Artificial Sequence
  Cyclic GFR-binding peptide
  MOD_RES (1)..(2): Xaa is C or S
XXAPTKLSPISVLYIDSSNNVIYKQYENMVV

SEQ ID NO: 65168 - protein, 31 aa, Artificial Sequence
  Cyclic GFR-binding peptide
  MOD_RES (31)..(31): Xaa is C or S
TKLEPISVLYLDDMGVPTKFKYEEGMSVAEX

SEQ ID NO: 65169 - protein, 24 aa, Artificial Sequence
  Cyclic GFR-binding peptide
PTKLSPISVLYIDSSNNVIYKQYE

SEQ ID NO: 65170 - protein, 32 aa, Artificial Sequence; identical to SEQ ID NO: 19256
  Cyclic GFR-binding peptide
  MOD_RES (1)..(2): Xaa is C or S

SEQ ID NO: 65171 - protein, 37 aa, Artificial Sequence; identical to SEQ ID NO: 19257
  Cyclic GFR-binding peptide
  MOD_RES (4)..(5)..(37): Xaa is C or S

SEQ ID NO: 65172 - protein, 34 aa, Artificial Sequence; identical to SEQ ID NO: 19258
  Cyclic GFR-binding peptide
  MOD_RES (1)..(33): Xaa is C or S

SEQ ID NO: 65173 - protein, 31 aa, Artificial Sequence
  Cyclic GFR-binding peptide
  MOD_RES (28)..(30): Xaa is C or S
LSPISMLYIDEYDKVVYKQYEEMVVEGXGXR

SEQ ID NO: 65174 - protein, 36 aa, Artificial Sequence; identical to SEQ ID NO: 19260
  Cyclic GFR-binding peptide
  MOD_RES (1)..(2)..(34)..(36): Xaa is C or S

SEQ ID NO: 65175 - protein, 32 aa, Artificial Sequence
  Cyclic GFR-binding peptide
  MOD_RES (5)..(6): Xaa is C or S
VPKAXXAPTKLSPISVLYIDSSNNVIYKQYEN

SEQ ID NO: 65176 - protein, 28 aa, Artificial Sequence
  Cyclic GFR-binding peptide
  MOD_RES (27)..(27): Xaa is C or S
EPISILYLDAANNVVKFKYEDMVVEAXG

SEQ ID NO: 65177 - protein, 36 aa, Artificial Sequence; identical to SEQ ID NO: 19261
  Cyclic GFR-binding peptide
  MOD_RES (3)..(4)..(36): Xaa is C or S

SEQ ID NO: 65178 - protein, 42 aa, Artificial Sequence; identical to SEQ ID NO: 19262
  Cyclic GFR-binding peptide
  MOD_RES (6)..(7)..(39)..(41): Xaa is C or S

SEQ ID NO: 65179 - protein, 32 aa, Artificial Sequence
  Cyclic GFR-binding peptide
  MOD_RES (6)..(7): Xaa is C or S
AAPASXXVPARLNAISILYFDAANNVVLKKYR

SEQ ID NO: 65180 - protein, 36 aa, Artificial Sequence; identical to SEQ ID NO: 19263
  Cyclic GFR-binding peptide
  MOD_RES (1)..(2)..(34)..(36): Xaa is C or S

SEQ ID NO: 65181 - protein, 29 aa, Artificial Sequence
  Cyclic GFR-binding peptide
  MOD_RES (29)..(29): Xaa is C or S
KLSPISVLYIDDSSNVIYKQYENMVVRSX

SEQ ID NO: 65182 - protein, 41 aa, Artificial Sequence; identical to SEQ ID NO: 19265
  Cyclic GFR-binding peptide
  MOD_RES (6)..(7)..(39)..(41): Xaa is C or S

SEQ ID NO: 65183 - protein, 31 aa, Artificial Sequence
  Cyclic GFR-binding peptide
  MOD_RES (30)..(30): Xaa is C or S
TKLSPISILYKDKGVVTYLKYHYGMAVSEXG

SEQ ID NO: 65184 - protein, 29 aa, Artificial Sequence
  Cyclic GFR-binding peptide
  MOD_RES (27)..(29): Xaa is C or S
SPISVLYIDDSSNVIYKQYENMVVRSXGX

SEQ ID NO: 65185 - protein, 26 aa, Artificial Sequence
  Cyclic GFR-binding peptide
  MOD_RES (26)..(26): Xaa is C or S
SPISILYIVGRTPKVYKQYEMVVKSX

SEQ ID NO: 65186 - protein, 36 aa, Artificial Sequence; identical to SEQ ID NO: 19267
  Cyclic GFR-binding peptide
  MOD_RES (3)..(4)..(36): Xaa is C or S

SEQ ID NO: 65187 - protein, 28 aa, Artificial Sequence
  Cyclic GFR-binding peptide
  MOD_RES (28)..(28): Xaa is C or S
LEPISILYLDAANNVVKFKYEDMVVEAX

SEQ ID NO: 65188 - protein, 33 aa, Artificial Sequence; identical to SEQ ID NO: 19268
  Cyclic GFR-binding peptide
  MOD_RES (1)..(2): Xaa is C or S

SEQ ID NO: 65189 - protein, 24 aa, Artificial Sequence
  Cyclic GFR-binding peptide
PQALSPISILYIVGRKPKVYKQYE

SEQ ID NO: 65190 - protein, 33 aa, Artificial Sequence
  Cyclic GFR-binding peptide
  MOD_RES (31)..(33): Xaa is C or S
PTKLSPISVLYIDSSNNVIYKQYENMVVKAXGX

SEQ ID NO: 65191 - protein, 34 aa, Artificial Sequence
  Cyclic GFR-binding peptide
  MOD_RES (4)..(5): Xaa is C or S
ASPXXVSQDLSPISILYIIGKTPKIYKQYEMIVK

SEQ ID NO: 65192 - protein, 24 aa, Artificial Sequence
  Cyclic GFR-binding peptide
NAISILYFDAANNVVLKKYRDMVV

SEQ ID NO: 65193 - protein, 31 aa, Artificial Sequence
  Cyclic GFR-binding peptide
  MOD_RES (30)..(30): Xaa is C or S
TKLSPISILYIDKGVVTYYKQYEGMAVSEXG

SEQ ID NO: 65194 - protein, 34 aa, Artificial Sequence; identical to SEQ ID NO: 19276
  Cyclic GFR-binding peptide
  MOD_RES (32)..(34): Xaa is C or S

SEQ ID NO: 65195 - protein, 24 aa, Artificial Sequence
  Cyclic GFR-binding peptide
PTELEPISMLYLDEYDKVVKFKYE

SEQ ID NO: 65196 - protein, 37 aa, Artificial Sequence; identical to SEQ ID NO: 19279
  Cyclic GFR-binding peptide
  MOD_RES (2)..(3)..(34)..(36): Xaa is C or S

SEQ ID NO: 65197 - protein, 36 aa, Artificial Sequence; identical to SEQ ID NO: 19280
  Cyclic GFR-binding peptide
  MOD_RES (4)..(5): Xaa is C or S

SEQ ID NO: 65198 - protein, 32 aa, Artificial Sequence; identical to SEQ ID NO: 19284
  Cyclic GFR-binding peptide
  MOD_RES (1)..(32): Xaa is C or S

SEQ ID NO: 65199 - protein, 37 aa, Artificial Sequence; identical to SEQ ID NO: 19286
  Cyclic GFR-binding peptide
  MOD_RES (3)..(4)..(36): Xaa is C or S

SEQ ID NO: 65200 - protein, 33 aa, Artificial Sequence; identical to SEQ ID NO: 19287
  Cyclic GFR-binding peptide
  MOD_RES (1)..(32): Xaa is C or S

SEQ ID NO: 65201 - protein, 31 aa, Artificial Sequence
  Cyclic GFR-binding peptide
  MOD_RES (28)..(30): Xaa is C or S
LEPISMLYLDEYDKVVKFKYEEMVVEGXGXR

SEQ ID NO: 65202 - protein, 30 aa, Artificial Sequence
  Cyclic GFR-binding peptide
  MOD_RES (3)..(4): Xaa is C or S
KAXXVPTELEPISMLYLDENEKVVKFKYED

SEQ ID NO: 65203 - protein, 22 aa, Artificial Sequence
  Cyclic GFR-binding peptide
ELEPISMLYLDENEKVVKFKYE

SEQ ID NO: 65204 - protein, 25 aa, Artificial Sequence
  Cyclic GFR-binding peptide
SQDLEPISILYLIGKTPKIKFKYEM

SEQ ID NO: 65205 - protein, 27 aa, Artificial Sequence
  Cyclic GFR-binding peptide
LSPISVLYIDDMGVPTYKQYEEGMSVA

SEQ ID NO: 65206 - protein, 28 aa, Artificial Sequence
  Cyclic GFR-binding peptide
  MOD_RES (1)..(1): Xaa is C or S
XVPARLSPISILYKDAANNVVLKYHYDM

SEQ ID NO: 65207 - protein, 30 aa, Artificial Sequence; identical to SEQ ID NO: 890
  Cyclic GFR-binding peptide

SEQ ID NO: 65208 - protein, 32 aa, Artificial Sequence
  Cyclic GFR-binding peptide
  MOD_RES (2)..(3): Xaa is C or S
PXXVPQDLSPISILYIVGRTPKVYKQYEMVVK

SEQ ID NO: 65209 - protein, 27 aa, Artificial Sequence
  Cyclic GFR-binding peptide
PTQLEPISVLYLDDSSNVIKFKYENMV

SEQ ID NO: 65210 - protein, 33 aa, Artificial Sequence
  Cyclic GFR-binding peptide
  MOD_RES (4)..(5): Xaa is C or S
AAPXXVPQALSPISILYIVGRKPKVYKQYEMIV

SEQ ID NO: 65211 - protein, 31 aa, Artificial Sequence
  Cyclic GFR-binding peptide
  MOD_RES (29)..(31): Xaa is C or S
QALEPISILYLVGRKPKVKFKYEMIVRSXKX

SEQ ID NO: 65212 - protein, 35 aa, Artificial Sequence; identical to SEQ ID NO: 19293
  Cyclic GFR-binding peptide
  MOD_RES (4)..(5): Xaa is C or S

SEQ ID NO: 65213 - protein, 32 aa, Artificial Sequence
  Cyclic GFR-binding peptide
  MOD_RES (3)..(4): Xaa is C or S
APXXVPQALEPISILYLVGRKPKVKFKYEMIV

SEQ ID NO: 65214 - protein, 24 aa, Artificial Sequence
  Cyclic GFR-binding peptide
TELEPISMLYLDEYDKVVKFKYEE

SEQ ID NO: 65215 - protein, 29 aa, Artificial Sequence
  Cyclic GFR-binding peptide
PTKLSPISILYKDKGVVTYLKYHYGMAVS

SEQ ID NO: 65216 - protein, 25 aa, Artificial Sequence
  Cyclic GFR-binding peptide
SPISMLYIDEYDKVVYKQYEEMVVE

SEQ ID NO: 65217 - protein, 28 aa, Artificial Sequence
  Cyclic GFR-binding peptide
  MOD_RES (28)..(28): Xaa is C or S
ALSPISILYIVGRKPKVYKQYEMIVRSX

SEQ ID NO: 65218 - protein, 30 aa, Artificial Sequence
  Cyclic GFR-binding peptide
  MOD_RES (2)..(3): Xaa is C or S
SXXVPARLNAISILYFDAANNVVLKKYRDM

SEQ ID NO: 65219 - protein, 29 aa, Artificial Sequence
  Cyclic GFR-binding peptide
  MOD_RES (2)..(2): Xaa is C or S
TXAPTKLSPISVLYIDDSSNVIYKQYENM

SEQ ID NO: 65220 - protein, 30 aa, Artificial Sequence
  Cyclic GFR-binding peptide
  MOD_RES (1)..(2): Xaa is C or S
XXVPTKLEPISVLYLDDMGVPTKFKYEEGM

SEQ ID NO: 65221 - protein, 35 aa, Artificial Sequence; identical to SEQ ID NO: 19298
  Cyclic GFR-binding peptide
  MOD_RES (1)..(33)..(35): Xaa is C or S

SEQ ID NO: 65222 - protein, 30 aa, Artificial Sequence
  Cyclic GFR-binding peptide
  MOD_RES (4)..(5): Xaa is C or S
SKAXXVPTKLSPISILYKDKGVVTYLKYHY

SEQ ID NO: 65223 - protein, 34 aa, Artificial Sequence; identical to SEQ ID NO: 19299
  Cyclic GFR-binding peptide
  MOD_RES (1)..(2)..(34): Xaa is C or S

SEQ ID NO: 65224 - protein, 31 aa, Artificial Sequence
  Cyclic GFR-binding peptide
  MOD_RES (2)..(3): Xaa is C or S
PXXVPQDLEPISILYLVGRTPKVKFKYEMVV

SEQ ID NO: 65225 - protein, 30 aa, Artificial Sequence
  Cyclic GFR-binding peptide
  MOD_RES (28)..(30): Xaa is C or S
DLEPISILYLVGRTPKVKFKYEMVVKSXKX

SEQ ID NO: 65226 - protein, 34 aa, Artificial Sequence
  Cyclic GFR-binding peptide
  MOD_RES (4)..(5): Xaa is C or S
AAPXXVPQALSPISILYIVGRKPKVYKQYEMIVR

SEQ ID NO: 65227 - protein, 34 aa, Artificial Sequence
  Cyclic GFR-binding peptide
  MOD_RES (31)..(33): Xaa is C or S
PARLEPISILYLDAANNVVKFKYEDMVVEAXGXR

SEQ ID NO: 65228 - protein, 34 aa, Artificial Sequence
  Cyclic GFR-binding peptide
  MOD_RES (31)..(33): Xaa is C or S
PTQLSPISVLYIDDSSNVIYKQYENMVVRAXGXH

SEQ ID NO: 65229 - protein, 29 aa, Artificial Sequence
  Cyclic GFR-binding peptide
  MOD_RES (2)..(2): Xaa is C or S
TXAPTKLEPISVLYLDDSSNVIKFKYENM

SEQ ID NO: 65230 - protein, 38 aa, Artificial Sequence; identical to SEQ ID NO: 19314
  Cyclic GFR-binding peptide
  MOD_RES (6)..(7): Xaa is C or S

SEQ ID NO: 65231 - protein, 26 aa, Artificial Sequence
  Cyclic GFR-binding peptide
SPISILYKDAANNVVLKYHYDMVVEA

SEQ ID NO: 65232 - protein, 27 aa, Artificial Sequence
  Cyclic GFR-binding peptide
  MOD_RES (1)..(1): Xaa is C or S
XVPTKLSPISILYKDKGVVTYLKYHYG

SEQ ID NO: 65233 - protein, 41 aa, Artificial Sequence; identical to SEQ ID NO: 19316
  Cyclic GFR-binding peptide
  MOD_RES (6)..(7)..(39)..(41): Xaa is C or S

SEQ ID NO: 65234 - protein, 31 aa, Artificial Sequence
  Cyclic GFR-binding peptide
  MOD_RES (31)..(31): Xaa is C or S
PTELEPISMLYLDEYDKVVKFKYEEMVVEGX

SEQ ID NO: 65235 - protein, 34 aa, Artificial Sequence
  Cyclic GFR-binding peptide
  MOD_RES (2)..(3): Xaa is C or S
AXXVPTKLEPISVLYLDDMGVPTKFKYEEGMSVA

SEQ ID NO: 65236 - protein, 39 aa, Artificial Sequence; identical to SEQ ID NO: 19318
  Cyclic GFR-binding peptide
  MOD_RES (6)..(7)..(39): Xaa is C or S

SEQ ID NO: 65237 - protein, 42 aa, Artificial Sequence; identical to SEQ ID NO: 19319
  Cyclic GFR-binding peptide
  MOD_RES (6)..(7)..(39)..(41): Xaa is C or S

SEQ ID NO: 65238 - protein, 34 aa, Artificial Sequence
  Cyclic GFR-binding peptide
  MOD_RES (31)..(33): Xaa is C or S
PTELSPISMLYIDENEKVVYKQYEDMVVEGXGXR

SEQ ID NO: 65239 - protein, 35 aa, Artificial Sequence; identical to SEQ ID NO: 19324
  Cyclic GFR-binding peptide
  MOD_RES (4)..(5): Xaa is C or S

SEQ ID NO: 65240 - protein, 31 aa, Artificial Sequence
  Cyclic GFR-binding peptide
  MOD_RES (5)..(6): Xaa is C or S
VPKAXXAPTKLSPISVLYIDSSNNVIYKQYE

SEQ ID NO: 65241 - protein, 30 aa, Artificial Sequence
  Cyclic GFR-binding peptide
PTELEPISMLYLDENEKVVKFKYEDMVVEG

SEQ ID NO: 65242 - protein, 33 aa, Artificial Sequence; identical to SEQ ID NO: 19328
  Cyclic GFR-binding peptide
  MOD_RES (32)..(32): Xaa is C or S

SEQ ID NO: 65243 - protein, 33 aa, Artificial Sequence; identical to SEQ ID NO: 19329
  Cyclic GFR-binding peptide
  MOD_RES (2)..(3): Xaa is C or S

SEQ ID NO: 65244 - protein, 34 aa, Artificial Sequence; identical to SEQ ID NO: 19330
  Cyclic GFR-binding peptide
  MOD_RES (3)..(4): Xaa is C or S

SEQ ID NO: 65245 - protein, 28 aa, Artificial Sequence
  Cyclic GFR-binding peptide
PTELSPISMLYIDEYDKVVYKQYEEMVV

SEQ ID NO: 65246 - protein, 26 aa, Artificial Sequence
  Cyclic GFR-binding peptide
LSPISMLYIDEYDKVVYKQYEEMVVE

SEQ ID NO: 65247 - protein, 34 aa, Artificial Sequence
  Cyclic GFR-binding peptide
  MOD_RES (6)..(7): Xaa is C or S
YVPKPXXAPTKLSPISVLYIDDSSNVIYKQYENM

SEQ ID NO: 65248 - protein, 33 aa, Artificial Sequence
  Cyclic GFR-binding peptide
  MOD_RES (4)..(5): Xaa is C or S
PKAXXAPTKLSPISVLYIDSSNNVIYKQYENMV

SEQ ID NO: 65249 - protein, 25 aa, Artificial Sequence
  Cyclic GFR-binding peptide
LNAISILYFDAANNVVLKKYRDMVV

SEQ ID NO: 65250 - protein, 41 aa, Artificial Sequence; identical to SEQ ID NO: 19334
  Cyclic GFR-binding peptide
  MOD_RES (6)..(7)..(38)..(40): Xaa is C or S

SEQ ID NO: 65251 - protein, 27 aa, Artificial Sequence
  Cyclic GFR-binding peptide
  MOD_RES (1)..(2): Xaa is C or S
XXAPTKLEPISVLYLDDSSNVIKFKYE

SEQ ID NO: 65252 - protein, 33 aa, Artificial Sequence
  Cyclic GFR-binding peptide
  MOD_RES (5)..(6): Xaa is C or S
VPKAXXAPTKLEPISVLYLDSSNNVIKFKYENM

SEQ ID NO: 65253 - protein, 29 aa, Artificial Sequence
  Cyclic GFR-binding peptide
  MOD_RES (28)..(28): Xaa is C or S
LSPISVLYIDSSNNVIYKQYENMVVKAXG

SEQ ID NO: 65254 - protein, 31 aa, Artificial Sequence
  Cyclic GFR-binding peptide
  MOD_RES (29)..(31): Xaa is C or S
ELSPISMLYIDEYDKVVYKQYEEMVVEGXGX

SEQ ID NO: 65255 - protein, 38 aa, Artificial Sequence; identical to SEQ ID NO: 19338
  Cyclic GFR-binding peptide
  MOD_RES (2)..(3)..(35)..(37): Xaa is C or S

SEQ ID NO: 65256 - protein, 32 aa, Artificial Sequence; identical to SEQ ID NO: 19339
  Cyclic GFR-binding peptide
  MOD_RES (1)..(2): Xaa is C or S

SEQ ID NO: 65257 - protein, 21 aa, Artificial Sequence
  Cyclic GFR-binding peptide
SPISVLYIDSSNNVIYKQYEN

SEQ ID NO: 65258 - protein, 30 aa, Artificial Sequence; identical to SEQ ID NO: 952
  Cyclic GFR-binding peptide

SEQ ID NO: 65259 - protein, 37 aa, Artificial Sequence; identical to SEQ ID NO: 19345
  Cyclic GFR-binding peptide
  MOD_RES (4)..(5)..(37): Xaa is C or S

SEQ ID NO: 65260 - protein, 26 aa, Artificial Sequence
  Cyclic GFR-binding peptide
APTKLEPISVLYLDSSNNVIKFKYEN

SEQ ID NO: 65261 - protein, 36 aa, Artificial Sequence
  Cyclic GFR-binding peptide
  MOD_RES (6)..(7): Xaa is C or S
KASKAXXVPTKLSPISILYIDKGVVTYYKQYEGMAV

SEQ ID NO: 65262 - protein, 36 aa, Artificial Sequence; identical to SEQ ID NO: 19352
  Cyclic GFR-binding peptide
  MOD_RES (3)..(4)..(36): Xaa is C or S

SEQ ID NO: 65263 - protein, 26 aa, Artificial Sequence
  Cyclic GFR-binding peptide
DLSPISILYIIGKTPKIYKQYEMIVK

SEQ ID NO: 65264 - protein, 30 aa, Artificial Sequence
  Cyclic GFR-binding peptide
  MOD_RES (27)..(29): Xaa is C or S
LEPISILYLVGRKPKVKFKYEMIVRSXKXS

SEQ ID NO: 65265 - protein, 30 aa, Artificial Sequence
  Cyclic GFR-binding peptide
  MOD_RES (2)..(3): Xaa is C or S
PXXAPTQLSPISVLYIDDSSNVIYKQYENM

SEQ ID NO: 65266 - protein, 32 aa, Artificial Sequence
  Cyclic GFR-binding peptide
  MOD_RES (5)..(5): Xaa is C or S
TKPTXAPTKLEPISVLYLDDSSNVIKFKYENM

SEQ ID NO: 65267 - protein, 32 aa, Artificial Sequence
  Cyclic GFR-binding peptide
  MOD_RES (30)..(32): Xaa is C or S
TKLEPISVLYLDSSNNVIKFKYENMVVKAXGX

SEQ ID NO: 65268 - protein, 31 aa, Artificial Sequence; identical to SEQ ID NO: 19355
  Cyclic GFR-binding peptide
  MOD_RES (1)..(1): Xaa is C or S

SEQ ID NO: 65269 - protein, 25 aa, Artificial Sequence
  Cyclic GFR-binding peptide
PTQLSPISVLYIDDSSNVIYKQYEN

SEQ ID NO: 65270 - protein, 22 aa, Artificial Sequence
  Cyclic GFR-binding peptide
LEPISILYLVGRTPKVKFKYEM

SEQ ID NO: 65271 - protein, 33 aa, Artificial Sequence
  Cyclic GFR-binding peptide
  MOD_RES (6)..(7): Xaa is C or S
KIPKAXXVPTELSPISMLYIDENEKVVYKQYED

SEQ ID NO: 65272 - protein, 29 aa, Artificial Sequence
  Cyclic GFR-binding peptide
  MOD_RES (3)..(4): Xaa is C or S
KPXXAPTKLSPISVLYIDDSSNVIYKQYE

SEQ ID NO: 65273 - protein, 36 aa, Artificial Sequence; identical to SEQ ID NO: 19360
  Cyclic GFR-binding peptide
  MOD_RES (2)..(3)..(35): Xaa is C or S

SEQ ID NO: 65274 - protein, 32 aa, Artificial Sequence
  Cyclic GFR-binding peptide
  MOD_RES (32)..(32): Xaa is C or S
PTKLSPISVLYIDDMGVPTYKQYEEGMSVAEX

SEQ ID NO: 65275 - protein, 27 aa, Artificial Sequence
  Cyclic GFR-binding peptide
LEPISVLYLDSSNNVIKFKYENMVVKA

SEQ ID NO: 65276 - protein, 35 aa, Artificial Sequence
  Cyclic GFR-binding peptide
  MOD_RES (4)..(5): Xaa is C or S
GKAXXVPTKLEPISVLYLDDMGVPTKFKYEEGMSV

SEQ ID NO: 65277 - protein, 24 aa, Artificial Sequence
  Cyclic GFR-binding peptide
ALSPISILYIVGRKPKVYKQYEMI

SEQ ID NO: 65278 - protein, 33 aa, Artificial Sequence
  Cyclic GFR-binding peptide
  MOD_RES (31)..(33): Xaa is C or S
PTELEPISMLYLDENEKVVKFKYEDMVVEGXGX

SEQ ID NO: 65279 - protein, 29 aa, Artificial Sequence
  Cyclic GFR-binding peptide
  MOD_RES (2)..(3): Xaa is C or S
AXXAPTKLEPISVLYLDSSNNVIKFKYEN

SEQ ID NO: 65280 - protein, 22 aa, Artificial Sequence
  Cyclic GFR-binding peptide
KLEPISVLYLDSSNNVIKFKYE

SEQ ID NO: 65281 - protein, 24 aa, Artificial Sequence
  Cyclic GFR-binding peptide
ALEPISILYLVGRKPKVKFKYEMI

SEQ ID NO: 65282 - protein, 40 aa, Artificial Sequence; identical to SEQ ID NO: 19376
  Cyclic GFR-binding peptide
  MOD_RES (6)..(7)..(38)..(40): Xaa is C or S

SEQ ID NO: 65283 - protein, 31 aa, Artificial Sequence
  Cyclic GFR-binding peptide
  MOD_RES (4)..(5): Xaa is C or S
PKPXXAPTQLSPISVLYIDDSSNVIYKQYEN

SEQ ID NO: 65284 - protein, 34 aa, Artificial Sequence
  Cyclic GFR-binding peptide
  MOD_RES (31)..(33): Xaa is C or S
PTKLSPISILYKDKGVVTYLKYHYGMAVSEXGXR

SEQ ID NO: 65285 - protein, 30 aa, Artificial Sequence; identical to SEQ ID NO: 19379
  Cyclic GFR-binding peptide

SEQ ID NO: 65286 - protein, 30 aa, Artificial Sequence
  Cyclic GFR-binding peptide
  MOD_RES (1)..(2): Xaa is C or S
XXVSQDLEPISILYLIGKTPKIKFKYEMIV

SEQ ID NO: 65287 - protein, 30 aa, Artificial Sequence
  Cyclic GFR-binding peptide
  MOD_RES (2)..(3): Xaa is C or S
PXXAPTQLEPISVLYLDDSSNVIKFKYENM

SEQ ID NO: 65288 - protein, 27 aa, Artificial Sequence
  Cyclic GFR-binding peptide
ARLEPISILYLDAANNVVKFKYEDMVV

SEQ ID NO: 65289 - protein, 36 aa, Artificial Sequence; identical to SEQ ID NO: 19381
  Cyclic GFR-binding peptide
  MOD_RES (1)..(2)..(34)..(36): Xaa is C or S

SEQ ID NO: 65290 - protein, 38 aa, Artificial Sequence; identical to SEQ ID NO: 19383
  Cyclic GFR-binding peptide
  MOD_RES (3)..(4)..(36)..(38): Xaa is C or S

SEQ ID NO: 65291 - protein, 25 aa, Artificial Sequence
  Cyclic GFR-binding peptide
PTKLEPISVLYLDDMGVPTKFKYEE

SEQ ID NO: 65292 - protein, 29 aa, Artificial Sequence
  Cyclic GFR-binding peptide
  MOD_RES (1)..(1): Xaa is C or S
XVPARLEPISILYLDAANNVVKFKYEDMV

SEQ ID NO: 65293 - protein, 25 aa, Artificial Sequence
  Cyclic GFR-binding peptide
PQALSPISILYIVGRKPKVYKQYEM

SEQ ID NO: 65294 - protein, 28 aa, Artificial Sequence
  Cyclic GFR-binding peptide
  MOD_RES (26)..(28): Xaa is C or S
SPISILYIVGRTPKVYKQYEMVVKSXKX

SEQ ID NO: 65295 - protein, 23 aa, Artificial Sequence
  Cyclic GFR-binding peptide
LSPISILYKDAANNVVLKYHYDM

SEQ ID NO: 65296 - protein, 29 aa, Artificial Sequence
  Cyclic GFR-binding peptide
  MOD_RES (29)..(29): Xaa is C or S
QDLEPISILYLIGKTPKIKFKYEMIVKSX

SEQ ID NO: 65297 - protein, 34 aa, Artificial Sequence; identical to SEQ ID NO: 19391
  Cyclic GFR-binding peptide
  MOD_RES (2)..(3): Xaa is C or S

SEQ ID NO: 65298 - protein, 35 aa, Artificial Sequence; identical to SEQ ID NO: 19393
  Cyclic GFR-binding peptide
  MOD_RES (2)..(3)..(34): Xaa is C or S

SEQ ID NO: 65299 - protein, 25 aa, Artificial Sequence
  Cyclic GFR-binding peptide
RLEPISILYLDAANNVVKFKYEDMV

SEQ ID NO: 65300 - protein, 41 aa, Artificial Sequence; identical to SEQ ID NO: 19396
  Cyclic GFR-binding peptide
  MOD_RES (5)..(6)..(38)..(40): Xaa is C or S

SEQ ID NO: 65301 - protein, 31 aa, Artificial Sequence; identical to SEQ ID NO: 19398
  Cyclic GFR-binding peptide
  MOD_RES (1)..(1): Xaa is C or S

SEQ ID NO: 65302 - protein, 23 aa, Artificial Sequence
  Cyclic GFR-binding peptide
EPISVLYLDSSNNVIKFKYENMV

SEQ ID NO: 65303 - protein, 32 aa, Artificial Sequence
  Cyclic GFR-binding peptide
  MOD_RES (1)..(2): Xaa is C or S
XXVPTKLEPISVLYLDDMGVPTKFKYEEGMSV

SEQ ID NO: 65304 - protein, 24 aa, Artificial Sequence
  Cyclic GFR-binding peptide
KLEPISVLYLDDSSNVIKFKYENM

SEQ ID NO: 65305 - protein, 33 aa, Artificial Sequence
  Cyclic GFR-binding peptide
  MOD_RES (5)..(6): Xaa is C or S
SAAPXXVPQALEPISILYLVGRKPKVKFKYEMI

SEQ ID NO: 65306 - protein, 34 aa, Artificial Sequence; identical to SEQ ID NO: 19406
  Cyclic GFR-binding peptide
  MOD_RES (3)..(4): Xaa is C or S

SEQ ID NO: 65307 - protein, 38 aa, Artificial Sequence; identical to SEQ ID NO: 19407
  Cyclic GFR-binding peptide
  MOD_RES (3)..(4)..(35)..(37): Xaa is C or S

SEQ ID NO: 65308 - protein, 35 aa, Artificial Sequence; identical to SEQ ID NO: 19409
  Cyclic GFR-binding peptide
  MOD_RES (1)..(34): Xaa is C or S

SEQ ID NO: 65309 - protein, 43 aa, Artificial Sequence; identical to SEQ ID NO: 19411
  Cyclic GFR-binding peptide
  MOD_RES (6)..(7)..(40)..(42): Xaa is C or S

SEQ ID NO: 65310 - protein, 32 aa, Artificial Sequence
  Cyclic GFR-binding peptide
  MOD_RES (2)..(3): Xaa is C or S
AXXVPTKLEPISVLYLDDMGVPTKFKYEEGMS

SEQ ID NO: 65311 - protein, 40 aa, Artificial Sequence; identical to SEQ ID NO: 19413
  Cyclic GFR-binding peptide
  MOD_RES (6)..(7)..(39): Xaa is C or S

SEQ ID NO: 65312 - protein, 26 aa, Artificial Sequence
  Cyclic GFR-binding peptide
  MOD_RES (1)..(1): Xaa is C or S
XVPTKLEPISVLYLDDMGVPTKFKYE

SEQ ID NO: 65313 - protein, 26 aa, Artificial Sequence
  Cyclic GFR-binding peptide
  MOD_RES (1)..(1): Xaa is C or S
XVPQDLEPISILYLVGRTPKVKFKYE

SEQ ID NO: 65314 - protein, 32 aa, Artificial Sequence
  Cyclic GFR-binding peptide
  MOD_RES (29)..(31): Xaa is C or S
ELEPISMLYLDEYDKVVKFKYEEMVVEGXGXR

SEQ ID NO: 65315 - protein, 29 aa, Artificial Sequence
  Cyclic GFR-binding peptide
  MOD_RES (1)..(1): Xaa is C or S
XVPQALSPISILYIVGRKPKVYKQYEMIV

SEQ ID NO: 65316 - protein, 34 aa, Artificial Sequence
  Cyclic GFR-binding peptide
  MOD_RES (6)..(7): Xaa is C or S
YVPKPXXAPTKLEPISVLYLDDSSNVIKFKYENM

SEQ ID NO: 65317 - protein, 40 aa, Artificial Sequence; identical to SEQ ID NO: 19423
  Cyclic GFR-binding peptide
  MOD_RES (5)..(6)..(38)..(40): Xaa is C or S

SEQ ID NO: 65318 - protein, 32 aa, Artificial Sequence
  Cyclic GFR-binding peptide
  MOD_RES (5)..(6): Xaa is C or S
ASKAXXVPTKLSPISILYKDKGVVTYLKYHYG

SEQ ID NO: 65319 - protein, 30 aa, Artificial Sequence
  Cyclic GFR-binding peptide
  MOD_RES (2)..(3): Xaa is C or S
PXXVSQDLSPISILYIIGKTPKIYKQYEMI

SEQ ID NO: 65320 - protein, 34 aa, Artificial Sequence
  Cyclic GFR-binding peptide
  MOD_RES (5)..(6): Xaa is C or S
VGKAXXVPTKLEPISVLYLDDMGVPTKFKYEEGM

SEQ ID NO: 65321 - protein, 31 aa, Artificial Sequence
  Cyclic GFR-binding peptide
  MOD_RES (4)..(5): Xaa is C or S
PKAXXVPTELSPISMLYIDEYDKVVYKQYEE

SEQ ID NO: 65322 - protein, 33 aa, Artificial Sequence
  Cyclic GFR-binding peptide
  MOD_RES (5)..(6): Xaa is C or S
VPKAXXAPTKLSPISVLYIDSSNNVIYKQYENM

SEQ ID NO: 65323 - protein, 28 aa, Artificial Sequence
  Cyclic GFR-binding peptide
RLNAISILYFDAANNVVLKKYRDMVVEA

SEQ ID NO: 65324 - protein, 28 aa, Artificial Sequence
  Cyclic GFR-binding peptide
  MOD_RES (2)..(3): Xaa is C or S
PXXVPQDLSPISILYIVGRTPKVYKQYE

SEQ ID NO: 65325 - protein, 29 aa, Artificial Sequence
  Cyclic GFR-binding peptide
  MOD_RES (3)..(4): Xaa is C or S
SPXXVSQDLEPISILYLIGKTPKIKFKYE

SEQ ID NO: 65326 - protein, 35 aa, Artificial Sequence; identical to SEQ ID NO: 19434
  Cyclic GFR-binding peptide
  MOD_RES (4)..(5): Xaa is C or S

SEQ ID NO: 65327 - protein, 26 aa, Artificial Sequence
  Cyclic GFR-binding peptide
EPISMLYLDENEKVVKFKYEDMVVEG

SEQ ID NO: 65328 - protein, 31 aa, Artificial Sequence; identical to SEQ ID NO: 19436
  Cyclic GFR-binding peptide
  MOD_RES (1)..(1): Xaa is C or S

SEQ ID NO: 65329 - protein, 34 aa, Artificial Sequence; identical to SEQ ID NO: 19438
  Cyclic GFR-binding peptide
  MOD_RES (4)..(4): Xaa is C or S

SEQ ID NO: 65330 - protein, 33 aa, Artificial Sequence; identical to SEQ ID NO: 19440
  Cyclic GFR-binding peptide
  MOD_RES (1)..(2): Xaa is C or S

SEQ ID NO: 65331 - protein, 37 aa, Artificial Sequence; identical to SEQ ID NO: 19441
  Cyclic GFR-binding peptide
  MOD_RES (5)..(6): Xaa is C or S

SEQ ID NO: 65332 - protein, 29 aa, Artificial Sequence
  Cyclic GFR-binding peptide
  MOD_RES (28)..(28): Xaa is C or S
LSPISMLYIDEYDKVVYKQYEEMVVEGXG

SEQ ID NO: 65333 - protein, 30 aa, Artificial Sequence
  Cyclic GFR-binding peptide
  MOD_RES (27)..(29): Xaa is C or S
NAISILYFDAANNVVLKKYRDMVVEAXGXR

SEQ ID NO: 65334 - protein, 37 aa, Artificial Sequence; identical to SEQ ID NO: 19442
  Cyclic GFR-binding peptide
  MOD_RES (1)..(2)..(34)..(36): Xaa is C or S

SEQ ID NO: 65335 - protein, 38 aa, Artificial Sequence; identical to SEQ ID NO: 19444
  Cyclic GFR-binding peptide
  MOD_RES (6)..(7): Xaa is C or S

SEQ ID NO: 65336 - protein, 41 aa, Artificial Sequence; identical to SEQ ID NO: 19447
  Cyclic GFR-binding peptide
  MOD_RES (6)..(38)..(40): Xaa is C or S

SEQ ID NO: 65337 - protein, 29 aa, Artificial Sequence
  Cyclic GFR-binding peptide
  MOD_RES (27)..(29): Xaa is C or S
NAISILYFDAANNVVLKKYRDMVVEAXGX

SEQ ID NO: 65338 - protein, 31 aa, Artificial Sequence
  Cyclic GFR-binding peptide
  MOD_RES (5)..(6): Xaa is C or S
VPKPXXAPTQLSPISVLYIDDSSNVIYKQYE

SEQ ID NO: 65339 - protein, 30 aa, Artificial Sequence
  Cyclic GFR-binding peptide
  MOD_RES (1)..(2): Xaa is C or S
XXAPTKLSPISVLYIDDSSNVIYKQYENMV

SEQ ID NO: 65340 - protein, 20 aa, Artificial Sequence
  Cyclic GFR-binding peptide
SPISVLYIDSSNNVIYKQYE

SEQ ID NO: 65341 - protein, 34 aa, Artificial Sequence; identical to SEQ ID NO: 19451
  Cyclic GFR-binding peptide
  MOD_RES (32)..(34): Xaa is C or S

SEQ ID NO: 65342 - protein, 31 aa, Artificial Sequence
  Cyclic GFR-binding peptide
  MOD_RES (28)..(30): Xaa is C or S
EPISVLYLDDMGVPTKFKYEEGMSVAEXGXR

SEQ ID NO: 65343 - protein, 24 aa, Artificial Sequence
  Cyclic GFR-binding peptide
SPISVLYIDDMGVPTYKQYEEGMS

SEQ ID NO: 65344 - protein, 38 aa, Artificial Sequence; identical to SEQ ID NO: 19453
  Cyclic GFR-binding peptide
  MOD_RES (4)..(5)..(37): Xaa is C or S

SEQ ID NO: 65345 - protein, 32 aa, Artificial Sequence; identical to SEQ ID NO: 19454
  Cyclic GFR-binding peptide
  MOD_RES (1)..(2): Xaa is C or S

SEQ ID NO: 65346 - protein, 23 aa, Artificial Sequence
  Cyclic GFR-binding peptide
LSPISILYIVGRTPKVYKQYEMV

SEQ ID NO: 65347 - protein, 24 aa, Artificial Sequence
  Cyclic GFR-binding peptide
SPISVLYIDSSNNVIYKQYENMVV

SEQ ID NO: 65348 - protein, 22 aa, Artificial Sequence
  Cyclic GFR-binding peptide
ALSPISILYIVGRKPKVYKQYE

SEQ ID NO: 65349 - protein, 34 aa, Artificial Sequence; identical to SEQ ID NO: 19458
  Cyclic GFR-binding peptide
  MOD_RES (1)..(32)..(34): Xaa is C or S

SEQ ID NO: 65350 - protein, 30 aa, Artificial Sequence
  Cyclic GFR-binding peptide
  MOD_RES (4)..(5): Xaa is C or S
SKAXXVPTKLNAISILYFDKGVVTYLKKYR

SEQ ID NO: 65351 - protein, 40 aa, Artificial Sequence; identical to SEQ ID NO: 19459
  Cyclic GFR-binding peptide
  MOD_RES (5)..(6)..(37)..(39): Xaa is C or S

SEQ ID NO: 65352 - protein, 21 aa, Artificial Sequence
  Cyclic GFR-binding peptide
LEPISVLYLDDSSNVIKFKYE

SEQ ID NO: 65353 - protein, 39 aa, Artificial Sequence; identical to SEQ ID NO: 19461
  Cyclic GFR-binding peptide
  MOD_RES (3)..(4)..(36)..(38): Xaa is C or S

SEQ ID NO: 65354 - protein, 29 aa, Artificial Sequence
  Cyclic GFR-binding peptide
PARLEPISILYLDAANNVVKFKYEDMVVE

SEQ ID NO: 65355 - protein, 32 aa, Artificial Sequence
  Cyclic GFR-binding peptide
  MOD_RES (3)..(4): Xaa is C or S
KAXXVPTKLSPISILYIDKGVVTYYKQYEGMA

SEQ ID NO: 65356 - protein, 28 aa, Artificial Sequence
  Cyclic GFR-binding peptide
ARLEPISILYLDAANNVVKFKYEDMVVE

SEQ ID NO: 65357 - protein, 27 aa, Artificial Sequence
  Cyclic GFR-binding peptide
  MOD_RES (1)..(2): Xaa is C or S
XXVPTELSPISMLYIDENEKVVYKQYE

SEQ ID NO: 65358 - protein, 29 aa, Artificial Sequence
  Cyclic GFR-binding peptide
  MOD_RES (28)..(28): Xaa is C or S
LNAISILYFDAANNVVLKKYRDMVVEAXG

SEQ ID NO: 65359 - protein, 36 aa, Artificial Sequence
  Cyclic GFR-binding peptide
  MOD_RES (6)..(7): Xaa is C or S
ASASPXXVPQDLSPISILYIVGRTPKVYKQYEMVVK

SEQ ID NO: 65360 - protein, 36 aa, Artificial Sequence
  Cyclic GFR-binding peptide
  MOD_RES (6)..(7): Xaa is C or S
KASKAXXVPTKLSPISILYKDKGVVTYLKYHYGMAV

SEQ ID NO: 65361 - protein, 27 aa, Artificial Sequence
  Cyclic GFR-binding peptide
  MOD_RES (27)..(27): Xaa is C or S
EPISMLYLDENEKVVKFKYEDMVVEGX

SEQ ID NO: 65362 - protein, 41 aa, Artificial Sequence; identical to SEQ ID NO: 19470
  Cyclic GFR-binding peptide
  MOD_RES (6)..(7)..(38)..(40): Xaa is C or S

SEQ ID NO: 65363 - protein, 34 aa, Artificial Sequence; identical to SEQ ID NO: 19471
  Cyclic GFR-binding peptide
  MOD_RES (2)..(3): Xaa is C or S

SEQ ID NO: 65364 - protein, 35 aa, Artificial Sequence
  Cyclic GFR-binding peptide
  MOD_RES (5)..(6): Xaa is C or S
APASXXVPARLSPISILYKDAANNVVLKYHYDMVV

SEQ ID NO: 65365 - protein, 37 aa, Artificial Sequence; identical to SEQ ID NO: 19475
  Cyclic GFR-binding peptide
  MOD_RES (5)..(6): Xaa is C or S

SEQ ID NO: 65366 - protein, 40 aa, Artificial Sequence; identical to SEQ ID NO: 19476
  Cyclic GFR-binding peptide
  MOD_RES (4)..(5)..(37)..(39): Xaa is C or S

SEQ ID NO: 65367 - protein, 28 aa, Artificial Sequence
  Cyclic GFR-binding peptide
TELEPISMLYLDEYDKVVKFKYEEMVVE

SEQ ID NO: 65368 - protein, 30 aa, Artificial Sequence
  Cyclic GFR-binding peptide
  MOD_RES (3)..(4): Xaa is C or S
ASXXVPARLSPISILYKDAANNVVLKYHYD

SEQ ID NO: 65369 - protein, 26 aa, Artificial Sequence
  Cyclic GFR-binding peptide
RLSPISILYKDAANNVVLKYHYDMVV

SEQ ID NO: 65370 - protein, 35 aa, Artificial Sequence; identical to SEQ ID NO: 19484
  Cyclic GFR-binding peptide
  MOD_RES (1)..(2)..(34): Xaa is C or S

SEQ ID NO: 65371 - protein, 34 aa, Artificial Sequence; identical to SEQ ID NO: 19485
  Cyclic GFR-binding peptide
  MOD_RES (1)..(2)..(34): Xaa is C or S

SEQ ID NO: 65372 - protein, 33 aa, Artificial Sequence
  Cyclic GFR-binding peptide
  MOD_RES (31)..(33): Xaa is C or S
PARLNAISILYFDAANNVVLKKYRDMVVEAXGX

SEQ ID NO: 65373 - protein, 29 aa, Artificial Sequence
  Cyclic GFR-binding peptide
  MOD_RES (29)..(29): Xaa is C or S
QDLSPISILYIVGRTPKVYKQYEMVVKSX

SEQ ID NO: 65374 - protein, 27 aa, Artificial Sequence
  Cyclic GFR-binding peptide
  MOD_RES (27)..(27): Xaa is C or S
SPISILYKDKGVVTYLKYHYGMAVSEX

SEQ ID NO: 65375 - protein, 31 aa, Artificial Sequence
  Cyclic GFR-binding peptide
  MOD_RES (2)..(3): Xaa is C or S
SXXVPARLNAISILYFDAANNVVLKKYRDMV

SEQ ID NO: 65376 - protein, 36 aa, Artificial Sequence; identical to SEQ ID NO: 19491
  Cyclic GFR-binding peptide
  MOD_RES (5)..(6): Xaa is C or S

SEQ ID NO: 65377 - protein, 25 aa, Artificial Sequence
  Cyclic GFR-binding peptide
VPTKLSPISILYIDKGVVTYYKQYE

SEQ ID NO: 65378 - protein, 27 aa, Artificial Sequence
  Cyclic GFR-binding peptide
  MOD_RES (1)..(1): Xaa is C or S
XAPTKLEPISVLYLDSSNNVIKFKYEN

SEQ ID NO: 65379 - protein, 38 aa, Artificial Sequence; identical to SEQ ID NO: 19499
  Cyclic GFR-binding peptide
  MOD_RES (3)..(4)..(36)..(38): Xaa is C or S

SEQ ID NO: 65380 - protein, 36 aa, Artificial Sequence; identical to SEQ ID NO: 19500
  Cyclic GFR-binding peptide
  MOD_RES (3)..(4)..(35): Xaa is C or S

SEQ ID NO: 65381 - protein, 32 aa, Artificial Sequence
  Cyclic GFR-binding peptide
  MOD_RES (31)..(31): Xaa is C or S
PTKLSPISVLYIDSSNNVIYKQYENMVVKAXG

SEQ ID NO: 65382 - protein, 26 aa, Artificial Sequence
  Cyclic GFR-binding peptide
PTKLNAISILYFDKGVVTYLKKYRGM

SEQ ID NO: 65383 - protein, 38 aa, Artificial Sequence; identical to SEQ ID NO: 19502
  Cyclic GFR-binding peptide
  MOD_RES (2)..(3)..(35)..(37): Xaa is C or S

SEQ ID NO: 65384 - protein, 39 aa, Artificial Sequence; identical to SEQ ID NO: 19507
  Cyclic GFR-binding peptide
  MOD_RES (4)..(5)..(37)..(39): Xaa is C or S

SEQ ID NO: 65385 - protein, 23 aa, Artificial Sequence
  Cyclic GFR-binding peptide
RLNAISILYFDAANNVVLKKYRD

SEQ ID NO: 65386 - protein, 23 aa, Artificial Sequence
  Cyclic GFR-binding peptide
TELSPISMLYIDEYDKVVYKQYE

SEQ ID NO: 65387 - protein, 28 aa, Artificial Sequence
  Cyclic GFR-binding peptide
TKLSPISVLYIDDSSNVIYKQYENMVVR

SEQ ID NO: 65388 - protein, 24 aa, Artificial Sequence
  Cyclic GFR-binding peptide
PTELSPISMLYIDENEKVVYKQYE

SEQ ID NO: 65389 - protein, 24 aa, Artificial Sequence
  Cyclic GFR-binding peptide
QDLEPISILYLIGKTPKIKFKYEM

SEQ ID NO: 65390 - protein, 33 aa, Artificial Sequence; identical to SEQ ID NO: 19516
  Cyclic GFR-binding peptide
  MOD_RES (31)..(33): Xaa is C or S

SEQ ID NO: 65391 - protein, 26 aa, Artificial Sequence
  Cyclic GFR-binding peptide
QDLEPISILYLVGRTPKVKFKYEMVV

SEQ ID NO: 65392 - protein, 36 aa, Artificial Sequence; identical to SEQ ID NO: 19517
  Cyclic GFR-binding peptide
  MOD_RES (5)..(6): Xaa is C or S

SEQ ID NO: 65393 - protein, 38 aa, Artificial Sequence; identical to SEQ ID NO: 19518
  Cyclic GFR-binding peptide
  MOD_RES (5)..(6)..(38): Xaa is C or S

SEQ ID NO: 65394 - protein, 27 aa, Artificial Sequence
  Cyclic GFR-binding peptide
KLEPISVLYLDSSNNVIKFKYENMVVK

SEQ ID NO: 65395 - protein, 41 aa, Artificial Sequence; identical to SEQ ID NO: 19521
  Cyclic GFR-binding peptide
  MOD_RES (5)..(6)..(38)..(40): Xaa is C or S

SEQ ID NO: 65396 - protein, 35 aa, Artificial Sequence; identical to SEQ ID NO: 19523
  Cyclic GFR-binding peptide
  MOD_RES (3)..(4)..(35): Xaa is C or S

SEQ ID NO: 65397 - protein, 33 aa, Artificial Sequence
  Cyclic GFR-binding peptide
  MOD_RES (5)..(6): Xaa is C or S
VPKPXXAPTQLSPISVLYIDDSSNVIYKQYENM

SEQ ID NO: 65398 - protein, 32 aa, Artificial Sequence
  Cyclic GFR-binding peptide
  MOD_RES (4)..(5): Xaa is C or S
GKAXXVPTKLEPISVLYLDDMGVPTKFKYEEG

SEQ ID NO: 65399 - protein, 32 aa, Artificial Sequence
  Cyclic GFR-binding peptide
  MOD_RES (31)..(31): Xaa is C or S
PTKLNAISILYFDKGVVTYLKKYRGMAVSEXG

SEQ ID NO: 65400 - protein, 39 aa, Artificial Sequence; identical to SEQ ID NO: 19530
  Cyclic GFR-binding peptide
  MOD_RES (5)..(6)..(38): Xaa is C or S

SEQ ID NO: 65401 - protein, 28 aa, Artificial Sequence
  Cyclic GFR-binding peptide
VPTKLSPISILYIDKGVVTYYKQYEGMA

SEQ ID NO: 65402 - protein, 29 aa, Artificial Sequence
  Cyclic GFR-binding peptide
PTKLSPISVLYIDDSSNVIYKQYENMVVR

SEQ ID NO: 65403 - protein, 27 aa, Artificial Sequence
  Cyclic GFR-binding peptide
  MOD_RES (1)..(1): Xaa is C or S
XVPARLEPISILYLDAANNVVKFKYED

SEQ ID NO: 65404 - protein, 21 aa, Artificial Sequence
  Cyclic GFR-binding peptide
LSPISMLYIDEYDKVVYKQYE

SEQ ID NO: 65405 - protein, 29 aa, Artificial Sequence
  Cyclic GFR-binding peptide
  MOD_RES (2)..(3): Xaa is C or S
AXXVPTELEPISMLYLDENEKVVKFKYED

SEQ ID NO: 65406 - protein, 31 aa, Artificial Sequence
  Cyclic GFR-binding peptide
  MOD_RES (1)..(2): Xaa is C or S
XXVSQDLSPISILYIIGKTPKIYKQYEMIVK

SEQ ID NO: 65407 - protein, 29 aa, Artificial Sequence
  Cyclic GFR-binding peptide
TQLSPISVLYIDDSSNVIYKQYENMVVRA

SEQ ID NO: 65408 - protein, 35 aa, Artificial Sequence; identical to SEQ ID NO: 19542
  Cyclic GFR-binding peptide
  MOD_RES (1)..(2)..(34): Xaa is C or S

SEQ ID NO: 65409 - protein, 25 aa, Artificial Sequence
  Cyclic GFR-binding peptide
VPQDLEPISILYLVGRTPKVKFKYE

SEQ ID NO: 65410 - protein, 26 aa, Artificial Sequence
  Cyclic GFR-binding peptide
ARLNAISILYFDAANNVVLKKYRDMV

SEQ ID NO: 65411 - protein, 29 aa, Artificial Sequence
  Cyclic GFR-binding peptide
  MOD_RES (1)..(2): Xaa is C or S
XXVPTELEPISMLYLDENEKVVKFKYEDM

SEQ ID NO: 65412 - protein, 35 aa, Artificial Sequence
  Cyclic GFR-binding peptide
  MOD_RES (6)..(7): Xaa is C or S
ASAAPXXVPQALEPISILYLVGRKPKVKFKYEMIV

SEQ ID NO: 65413 - protein, 33 aa, Artificial Sequence
  Cyclic GFR-binding peptide
  MOD_RES (30)..(32): Xaa is C or S
TKLSPISVLYIDSSNNVIYKQYENMVVKAXGXH

SEQ ID NO: 65414 - protein, 31 aa, Artificial Sequence
  Cyclic GFR-binding peptide
PTKLSPISVLYIDDMGVPTYKQYEEGMSVAE

SEQ ID NO: 65415 - protein, 32 aa, Artificial Sequence
  Cyclic GFR-binding peptide
  MOD_RES (30)..(32): Xaa is C or S
PQDLSPISILYIVGRTPKVYKQYEMVVKSXKX

SEQ ID NO: 65416 - protein, 23 aa, Artificial Sequence
  Cyclic GFR-binding peptide
LEPISILYLVGRTPKVKFKYEMV

SEQ ID NO: 65417 - protein, 33 aa, Artificial Sequence
  Cyclic GFR-binding peptide
  MOD_RES (5)..(6): Xaa is C or S
VPKPXXAPTQLEPISVLYLDDSSNVIKFKYENM

SEQ ID NO: 65418 - protein, 33 aa, Artificial Sequence
  Cyclic GFR-binding peptide
  MOD_RES (4)..(5): Xaa is C or S
PKAXXVPTELSPISMLYIDENEKVVYKQYEDMV

SEQ ID NO: 65419 - protein, 25 aa, Artificial Sequence
  Cyclic GFR-binding peptide
SPISVLYIDSSNNVIYKQYENMVVK

SEQ ID NO: 65420 - protein, 36 aa, Artificial Sequence; identical to SEQ ID NO: 19557
  Cyclic GFR-binding peptide
  MOD_RES (1)..(33)..(35): Xaa is C or S

SEQ ID NO: 65421 - protein, 26 aa, Artificial Sequence
  Cyclic GFR-binding peptide
VPQDLSPISILYIVGRTPKVYKQYEM

SEQ ID NO: 65422 - protein, 34 aa, Artificial Sequence; identical to SEQ ID NO: 19558
  Cyclic GFR-binding peptide
  MOD_RES (3)..(4): Xaa is C or S

SEQ ID NO: 65423 - protein, 33 aa, Artificial Sequence; identical to SEQ ID NO: 19559
  Cyclic GFR-binding peptide
  MOD_RES (1)..(32): Xaa is C or S

SEQ ID NO: 65424 - protein, 37 aa, Artificial Sequence; identical to SEQ ID NO: 19560
  Cyclic GFR-binding peptide
  MOD_RES (4)..(5): Xaa is C or S

SEQ ID NO: 65425 - protein, 33 aa, Artificial Sequence; identical to SEQ ID NO: 19561
  Cyclic GFR-binding peptide
  MOD_RES (1)..(33): Xaa is C or S

SEQ ID NO: 65426 - protein, 31 aa, Artificial Sequence; identical to SEQ ID NO: 19564
  Cyclic GFR-binding peptide
  MOD_RES (1)..(1): Xaa is C or S

SEQ ID NO: 65427 - protein, 33 aa, Artificial Sequence
  Cyclic GFR-binding peptide
  MOD_RES (3)..(4): Xaa is C or S
KPXXAPTKLEPISVLYLDDSSNVIKFKYENMVV

SEQ ID NO: 65428 - protein, 33 aa, Artificial Sequence; identical to SEQ ID NO: 19566
  Cyclic GFR-binding peptide
  MOD_RES (1)..(33): Xaa is C or S

SEQ ID NO: 65429 - protein, 41 aa, Artificial Sequence; identical to SEQ ID NO: 19571
  Cyclic GFR-binding peptide
  MOD_RES (5)..(6)..(39)..(41): Xaa is C or S

SEQ ID NO: 65430 - protein, 33 aa, Artificial Sequence
  Cyclic GFR-binding peptide
  MOD_RES (3)..(4): Xaa is C or S
KPXXAPTQLSPISVLYIDDSSNVIYKQYENMVV

SEQ ID NO: 65431 - protein, 31 aa, Artificial Sequence
  Cyclic GFR-binding peptide
  MOD_RES (6)..(6): Xaa is C or S
VTKPTXAPTKLEPISVLYLDDSSNVIKFKYE

SEQ ID NO: 65432 - protein, 33 aa, Artificial Sequence
  Cyclic GFR-binding peptide
  MOD_RES (3)..(4): Xaa is C or S
KAXXVPTKLSPISVLYIDDMGVPTYKQYEEGMS

SEQ ID NO: 65433 - protein, 34 aa, Artificial Sequence; identical to SEQ ID NO: 19573
  Cyclic GFR-binding peptide
  MOD_RES (1)..(2)..(33): Xaa is C or S

SEQ ID NO: 65434 - protein, 36 aa, Artificial Sequence; identical to SEQ ID NO: 19575
  Cyclic GFR-binding peptide
  MOD_RES (3)..(4)..(36): Xaa is C or S

SEQ ID NO: 65435 - protein, 35 aa, Artificial Sequence
  Cyclic GFR-binding peptide
  MOD_RES (5)..(6): Xaa is C or S
SAAPXXVPQALEPISILYLVGRKPKVKFKYEMIVR

SEQ ID NO: 65436 - protein, 37 aa, Artificial Sequence; identical to SEQ ID NO: 19580
  Cyclic GFR-binding peptide
  MOD_RES (6)..(6): Xaa is C or S

SEQ ID NO: 65437 - protein, 38 aa, Artificial Sequence; identical to SEQ ID NO: 19579
  Cyclic GFR-binding peptide
  MOD_RES (4)..(5)..(37): Xaa is C or S

SEQ ID NO: 65438 - protein, 34 aa, Artificial Sequence
  Cyclic GFR-binding peptide
  MOD_RES (3)..(4): Xaa is C or S
KAXXVPTKLSPISVLYIDDMGVPTYKQYEEGMSV

SEQ ID NO: 65439 - protein, 33 aa, Artificial Sequence
  Cyclic GFR-binding peptide
  MOD_RES (4)..(5): Xaa is C or S
ASPXXVSQDLEPISILYLIGKTPKIKFKYEMIV

SEQ ID NO: 65440 - protein, 34 aa, Artificial Sequence
  Cyclic GFR-binding peptide
  MOD_RES (7)..(7): Xaa is C or S
HVTKPTXAPTKLEPISVLYLDDSSNVIKFKYENM

SEQ ID NO: 65441 - protein, 28 aa, Artificial Sequence
  Cyclic GFR-binding peptide
  MOD_RES (2)..(3): Xaa is C or S
PXXVSQDLSPISILYIIGKTPKIYKQYE

SEQ ID NO: 65442 - protein, 24 aa, Artificial Sequence
  Cyclic GFR-binding peptide
KLEPISVLYLDDMGVPTKFKYEEG

SEQ ID NO: 65443 - protein, 33 aa, Artificial Sequence
  Cyclic GFR-binding peptide
  MOD_RES (3)..(4): Xaa is C or S
KAXXVPTKLNAISILYFDKGVVTYLKKYRGMAV

SEQ ID NO: 65444 - protein, 37 aa, Artificial Sequence; identical to SEQ ID NO: 19592
  Cyclic GFR-binding peptide
  MOD_RES (5)..(37): Xaa is C or S

SEQ ID NO: 65445 - protein, 26 aa, Artificial Sequence
  Cyclic GFR-binding peptide
KLEPISVLYLDDSSNVIKFKYENMVV

SEQ ID NO: 65446 - protein, 27 aa, Artificial Sequence
  Cyclic GFR-binding peptide
LNAISILYFDKGVVTYLKKYRGMAVSE

SEQ ID NO: 65447 - protein, 37 aa, Artificial Sequence; identical to SEQ ID NO: 19598
  Cyclic GFR-binding peptide
  MOD_RES (6)..(7): Xaa is C or S

SEQ ID NO: 65448 - protein, 34 aa, Artificial Sequence; identical to SEQ ID NO: 19604
  Cyclic GFR-binding peptide
  MOD_RES (32)..(34): Xaa is C or S

SEQ ID NO: 65449 - protein, 25 aa, Artificial Sequence
  Cyclic GFR-binding peptide
ARLNAISILYFDAANNVVLKKYRDM

SEQ ID NO: 65450 - protein, 33 aa, Artificial Sequence; identical to SEQ ID NO: 19605
  Cyclic GFR-binding peptide
  MOD_RES (1)..(2): Xaa is C or S

SEQ ID NO: 65451 - protein, 21 aa, Artificial Sequence
  Cyclic GFR-binding peptide
SPISVLYIDDMGVPTYKQYEE

SEQ ID NO: 65452 - protein, 26 aa, Artificial Sequence
  Cyclic GFR-binding peptide
VPARLEPISILYLDAANNVVKFKYED

SEQ ID NO: 65453 - protein, 28 aa, Artificial Sequence
  Cyclic GFR-binding peptide
VPQDLEPISILYLVGRTPKVKFKYEMVV

SEQ ID NO: 65454 - protein, 28 aa, Artificial Sequence
  Cyclic GFR-binding peptide
  MOD_RES (1)..(2): Xaa is C or S
XXVSQDLEPISILYLIGKTPKIKFKYEM

SEQ ID NO: 65455 - protein, 31 aa, Artificial Sequence
  Cyclic GFR-binding peptide
  MOD_RES (2)..(3): Xaa is C or S
PXXAPTQLSPISVLYIDDSSNVIYKQYENMV

SEQ ID NO: 65456 - protein, 36 aa, Artificial Sequence; identical to SEQ ID NO: 19608
  Cyclic GFR-binding peptide
  MOD_RES (1)..(2)..(33)..(35): Xaa is C or S

SEQ ID NO: 65457 - protein, 29 aa, Artificial Sequence
  Cyclic GFR-binding peptide
  MOD_RES (29)..(29): Xaa is C or S
LSPISVLYIDDMGVPTYKQYEEGMSVAEX

SEQ ID NO: 65458 - protein, 28 aa, Artificial Sequence
  Cyclic GFR-binding peptide
  MOD_RES (26)..(28): Xaa is C or S
SPISILYIVGRKPKVYKQYEMIVRSXKX

SEQ ID NO: 65459 - protein, 29 aa, Artificial Sequence
  Cyclic GFR-binding peptide
TELSPISMLYIDENEKVVYKQYEDMVVEG

SEQ ID NO: 65460 - protein, 35 aa, Artificial Sequence; identical to SEQ ID NO: 19609
  Cyclic GFR-binding peptide
  MOD_RES (1)..(32)..(34): Xaa is C or S

SEQ ID NO: 65461 - protein, 30 aa, Artificial Sequence
  Cyclic GFR-binding peptide
  MOD_RES (29)..(29): Xaa is C or S
ELEPISMLYLDENEKVVKFKYEDMVVEGXG

SEQ ID NO: 65462 - protein, 29 aa, Artificial Sequence
  Cyclic GFR-binding peptide
  MOD_RES (1)..(2): Xaa is C or S
XXVPARLEPISILYLDAANNVVKFKYEDM

SEQ ID NO: 65463 - protein, 39 aa, Artificial Sequence; identical to SEQ ID NO: 19616
  Cyclic GFR-binding peptide
  MOD_RES (6)..(7)..(38): Xaa is C or S

SEQ ID NO: 65464 - protein, 31 aa, Artificial Sequence
  Cyclic GFR-binding peptide
  MOD_RES (4)..(5): Xaa is C or S
AAPXXVPQALEPISILYLVGRKPKVKFKYEM

SEQ ID NO: 65465 - protein, 30 aa, Artificial Sequence; identical to SEQ ID NO: 22053
  Cyclic GFR-binding peptide

SEQ ID NO: 65466 - protein, 28 aa, Artificial Sequence
  Cyclic GFR-binding peptide
  MOD_RES (1)..(2): Xaa is C or S
XXVPTELEPISMLYLDEYDKVVKFKYEE

SEQ ID NO: 65467 - protein, 27 aa, Artificial Sequence
  Cyclic GFR-binding peptide
  MOD_RES (1)..(2): Xaa is C or S
XXAPTKLSPISVLYIDSSNNVIYKQYE

SEQ ID NO: 65468 - protein, 33 aa, Artificial Sequence; identical to SEQ ID NO: 19628
  Cyclic GFR-binding peptide
  MOD_RES (32)..(32): Xaa is C or S

SEQ ID NO: 65469 - protein, 36 aa, Artificial Sequence; identical to SEQ ID NO: 19629
  Cyclic GFR-binding peptide
  MOD_RES (2)..(3)..(36): Xaa is C or S

SEQ ID NO: 65470 - protein, 38 aa, Artificial Sequence; identical to SEQ ID NO: 19630
  Cyclic GFR-binding peptide
  MOD_RES (5)..(6)..(38): Xaa is C or S

SEQ ID NO: 65471 - protein, 26 aa, Artificial Sequence
  Cyclic GFR-binding peptide
LEPISVLYLDDSSNVIKFKYENMVVR

SEQ ID NO: 65472 - protein, 29 aa, Artificial Sequence
  Cyclic GFR-binding peptide
  MOD_RES (28)..(28): Xaa is C or S
LSPISVLYIDDSSNVIYKQYENMVVRAXG

SEQ ID NO: 65473 - protein, 29 aa, Artificial Sequence
  Cyclic GFR-binding peptide
TKLNAISILYFDKGVVTYLKKYRGMAVSE

SEQ ID NO: 65474 - protein, 27 aa, Artificial Sequence
  Cyclic GFR-binding peptide
LSPISILYIDKGVVTYYKQYEGMAVSE

SEQ ID NO: 65475 - protein, 30 aa, Artificial Sequence
  Cyclic GFR-binding peptide
  MOD_RES (1)..(1): Xaa is C or S
XVSQDLSPISILYIIGKTPKIYKQYEMIVK

SEQ ID NO: 65476 - protein, 31 aa, Artificial Sequence
  Cyclic GFR-binding peptide
  MOD_RES (28)..(30): Xaa is C or S
LSPISILYKDKGVVTYLKYHYGMAVSEXGXR

SEQ ID NO: 65477 - protein, 34 aa, Artificial Sequence; identical to SEQ ID NO: 19635
  Cyclic GFR-binding peptide
  MOD_RES (32)..(34): Xaa is C or S

SEQ ID NO: 65478 - protein, 30 aa, Artificial Sequence
  Cyclic GFR-binding peptide
  MOD_RES (30)..(30): Xaa is C or S
SQDLSPISILYIIGKTPKIYKQYEMIVKSX

SEQ ID NO: 65479 - protein, 30 aa, Artificial Sequence
  Cyclic GFR-binding peptide
PTKLSPISILYKDKGVVTYLKYHYGMAVSE

SEQ ID NO: 65480 - protein, 40 aa, Artificial Sequence; identical to SEQ ID NO: 19642
  Cyclic GFR-binding peptide
  MOD_RES (4)..(5)..(38)..(40): Xaa is C or S

SEQ ID NO: 65481 - protein, 38 aa, Artificial Sequence; identical to SEQ ID NO: 19643
  Cyclic GFR-binding peptide
  MOD_RES (4)..(5)..(36)..(38): Xaa is C or S

SEQ ID NO: 65482 - protein, 32 aa, Artificial Sequence
  Cyclic GFR-binding peptide
  MOD_RES (2)..(3): Xaa is C or S
AXXVPTELSPISMLYIDENEKVVYKQYEDMVV

SEQ ID NO: 65483 - protein, 27 aa, Artificial Sequence
  Cyclic GFR-binding peptide
PTELSPISMLYIDENEKVVYKQYEDMV

SEQ ID NO: 65484 - protein, 34 aa, Artificial Sequence; identical to SEQ ID NO: 19646
  Cyclic GFR-binding peptide
  MOD_RES (31)..(33): Xaa is C or S

SEQ ID NO: 65485 - protein, 29 aa, Artificial Sequence
  Cyclic GFR-binding peptide
  MOD_RES (27)..(29): Xaa is C or S
EPISVLYLDDSSNVIKFKYENMVVRSXGX

SEQ ID NO: 65486 - protein, 29 aa, Artificial Sequence
  Cyclic GFR-binding peptide
  MOD_RES (1)..(2): Xaa is C or S
XXVPQDLSPISILYIVGRTPKVYKQYEMV

SEQ ID NO: 65487 - protein, 26 aa, Artificial Sequence
  Cyclic GFR-binding peptide
  MOD_RES (26)..(26): Xaa is C or S
SPISILYIIGKTPKIYKQYEMIVKSX

SEQ ID NO: 65488 - protein, 29 aa, Artificial Sequence
  Cyclic GFR-binding peptide
  MOD_RES (28)..(28): Xaa is C or S
LEPISVLYLDDSSNVIKFKYENMVVRAXG

SEQ ID NO: 65489 - protein, 38 aa, Artificial Sequence; identical to SEQ ID NO: 19655
  Cyclic GFR-binding peptide
  MOD_RES (5)..(6)..(38): Xaa is C or S

SEQ ID NO: 65490 - protein, 29 aa, Artificial Sequence
  Cyclic GFR-binding peptide
  MOD_RES (2)..(3): Xaa is C or S
AXXVPTKLSPISVLYIDDMGVPTYKQYEE

SEQ ID NO: 65491 - protein, 28 aa, Artificial Sequence
  Cyclic GFR-binding peptide
KLSPISVLYIDSSNNVIYKQYENMVVKA

SEQ ID NO: 65492 - protein, 31 aa, Artificial Sequence; identical to SEQ ID NO: 19661
  Cyclic GFR-binding peptide

SEQ ID NO: 65493 - protein, 35 aa, Artificial Sequence; identical to SEQ ID NO: 19662
  Cyclic GFR-binding peptide
  MOD_RES (32)..(34): Xaa is C or S

SEQ ID NO: 65494 - protein, 23 aa, Artificial Sequence
  Cyclic GFR-binding peptide
SPISVLYIDDMGVPTYKQYEEGM

SEQ ID NO: 65495 - protein, 38 aa, Artificial Sequence; identical to SEQ ID NO: 19665
  Cyclic GFR-binding peptide
  MOD_RES (5)..(6)..(38): Xaa is C or S

SEQ ID NO: 65496 - protein, 31 aa, Artificial Sequence
  Cyclic GFR-binding peptide
  MOD_RES (3)..(4): Xaa is C or S
KAXXVPTKLSPISILYKDKGVVTYLKYHYGM

SEQ ID NO: 65497 - protein, 32 aa, Artificial Sequence
  Cyclic GFR-binding peptide
  MOD_RES (4)..(5): Xaa is C or S
PKAXXAPTKLSPISVLYIDSSNNVIYKQYENM

SEQ ID NO: 65498 - protein, 26 aa, Artificial Sequence
  Cyclic GFR-binding peptide
LSPISILYIIGKTPKIYKQYEMIVKS

SEQ ID NO: 65499 - protein, 28 aa, Artificial Sequence
  Cyclic GFR-binding peptide
  MOD_RES (1)..(1): Xaa is C or S
XVPARLEPISILYLDAANNVVKFKYEDM

SEQ ID NO: 65500 - protein, 28 aa, Artificial Sequence
  Cyclic GFR-binding peptide
APTKLEPISVLYLDSSNNVIKFKYENMV

SEQ ID NO: 65501 - protein, 34 aa, Artificial Sequence
  Cyclic GFR-binding peptide
  MOD_RES (6)..(7): Xaa is C or S
SIPKAXXVPTELEPISMLYLDEYDKVVKFKYEEM

SEQ ID NO: 65502 - protein, 37 aa, Artificial Sequence; identical to SEQ ID NO: 19667
  Cyclic GFR-binding peptide
  MOD_RES (3)..(4)..(36): Xaa is C or S

SEQ ID NO: 65503 - protein, 36 aa, Artificial Sequence; identical to SEQ ID NO: 19668
  Cyclic GFR-binding peptide
  MOD_RES (2)..(34)..(36): Xaa is C or S

SEQ ID NO: 65504 - protein, 27 aa, Artificial Sequence
  Cyclic GFR-binding peptide
VPTKLSPISILYKDKGVVTYLKYHYGM

SEQ ID NO: 65505 - protein, 29 aa, Artificial Sequence
  Cyclic GFR-binding peptide
  MOD_RES (1)..(2): Xaa is C or S
XXVSQDLSPISILYIIGKTPKIYKQYEMI

SEQ ID NO: 65506 - protein, 30 aa, Artificial Sequence
  Cyclic GFR-binding peptide
  MOD_RES (2)..(3): Xaa is C or S
AXXAPTKLEPISVLYLDSSNNVIKFKYENM

SEQ ID NO: 65507 - protein, 41 aa, Artificial Sequence; identical to SEQ ID NO: 19676
  Cyclic GFR-binding peptide
  MOD_RES (5)..(6)..(38)..(40): Xaa is C or S

SEQ ID NO: 65508 - protein, 26 aa, Artificial Sequence
  Cyclic GFR-binding peptide
LEPISMLYLDENEKVVKFKYEDMVVE

SEQ ID NO: 65509 - protein, 26 aa, Artificial Sequence
  Cyclic GFR-binding peptide
PTELSPISMLYIDENEKVVYKQYEDM

SEQ ID NO: 65510 - protein, 26 aa, Artificial Sequence
  Cyclic GFR-binding peptide
VPTKLSPISILYKDKGVVTYLKYHYG

SEQ ID NO: 65511 - protein, 31 aa, Artificial Sequence; identical to SEQ ID NO: 19677
  Cyclic GFR-binding peptide
  MOD_RES (1)..(1): Xaa is C or S

SEQ ID NO: 65512 - protein, 35 aa, Artificial Sequence; identical to SEQ ID NO: 19679
  Cyclic GFR-binding peptide
  MOD_RES (1)..(2)..(33)..(35): Xaa is C or S

SEQ ID NO: 65513 - protein, 36 aa, Artificial Sequence; identical to SEQ ID NO: 19680
  Cyclic GFR-binding peptide
  MOD_RES (3)..(4)..(35): Xaa is C or S

SEQ ID NO: 65514 - protein, 33 aa, Artificial Sequence
  Cyclic GFR-binding peptide
  MOD_RES (4)..(5): Xaa is C or S
PKAXXVPTELEPISMLYLDEYDKVVKFKYEEMV

SEQ ID NO: 65515 - protein, 39 aa, Artificial Sequence; identical to SEQ ID NO: 19682
  Cyclic GFR-binding peptide
  MOD_RES (6)..(7)..(39): Xaa is C or S

SEQ ID NO: 65516 - protein, 29 aa, Artificial Sequence
  Cyclic GFR-binding peptide
  MOD_RES (27)..(29): Xaa is C or S
SPISVLYIDDSSNVIYKQYENMVVRAXGX

SEQ ID NO: 65517 - protein, 32 aa, Artificial Sequence
  Cyclic GFR-binding peptide
  MOD_RES (2)..(3): Xaa is C or S
PXXAPTQLEPISVLYLDDSSNVIKFKYENMVV

SEQ ID NO: 65518 - protein, 33 aa, Artificial Sequence; identical to SEQ ID NO: 19688
  Cyclic GFR-binding peptide
  MOD_RES (1)..(1): Xaa is C or S

SEQ ID NO: 65519 - protein, 28 aa, Artificial Sequence
  Cyclic GFR-binding peptide
PTKLSPISILYIDKGVVTYYKQYEGMAV

SEQ ID NO: 65520 - protein, 25 aa, Artificial Sequence
  Cyclic GFR-binding peptide
SPISILYKDKGVVTYLKYHYGMAVS

SEQ ID NO: 65521 - protein, 38 aa, Artificial Sequence; identical to SEQ ID NO: 19693
  Cyclic GFR-binding peptide
  MOD_RES (6)..(7): Xaa is C or S

SEQ ID NO: 65522 - protein, 29 aa, Artificial Sequence
  Cyclic GFR-binding peptide
  MOD_RES (29)..(29): Xaa is C or S
KLEPISVLYLDSSNNVIKFKYENMVVKAX

SEQ ID NO: 65523 - protein, 26 aa, Artificial Sequence
  Cyclic GFR-binding peptide
QLEPISVLYLDDSSNVIKFKYENMVV

SEQ ID NO: 65524 - protein, 20 aa, Artificial Sequence
  Cyclic GFR-binding peptide
EPISVLYLDSSNNVIKFKYE

SEQ ID NO: 65525 - protein, 27 aa, Artificial Sequence
  Cyclic GFR-binding peptide
  MOD_RES (27)..(27): Xaa is C or S
EPISVLYLDDSSNVIKFKYENMVVRSX

SEQ ID NO: 65526 - protein, 23 aa, Artificial Sequence
  Cyclic GFR-binding peptide
TKLSPISVLYIDSSNNVIYKQYE

SEQ ID NO: 65527 - protein, 29 aa, Artificial Sequence
  Cyclic GFR-binding peptide
  MOD_RES (27)..(29): Xaa is C or S
LSPISILYIVGRTPKVYKQYEMVVKSXKX

SEQ ID NO: 65528 - protein, 32 aa, Artificial Sequence
  Cyclic GFR-binding peptide
  MOD_RES (5)..(6): Xaa is C or S
VPKPXXAPTQLEPISVLYLDDSSNVIKFKYEN

SEQ ID NO: 65529 - protein, 27 aa, Artificial Sequence
  Cyclic GFR-binding peptide
  MOD_RES (1)..(1): Xaa is C or S
XVPQDLSPISILYIVGRTPKVYKQYEM

SEQ ID NO: 65530 - protein, 38 aa, Artificial Sequence; identical to SEQ ID NO: 19719
  Cyclic GFR-binding peptide
  MOD_RES (5)..(6)..(38): Xaa is C or S

SEQ ID NO: 65531 - protein, 32 aa, Artificial Sequence; identical to SEQ ID NO: 19721
  Cyclic GFR-binding peptide
  MOD_RES (1)..(1): Xaa is C or S

SEQ ID NO: 65532 - protein, 29 aa, Artificial Sequence
  Cyclic GFR-binding peptide
PQALSPISILYIVGRKPKVYKQYEMIVRS

SEQ ID NO: 65533 - protein, 21 aa, Artificial Sequence
  Cyclic GFR-binding peptide
SPISILYIIGKTPKIYKQYEM

SEQ ID NO: 65534 - protein, 25 aa, Artificial Sequence
  Cyclic GFR-binding peptide
QLEPISVLYLDDSSNVIKFKYENMV

SEQ ID NO: 65535 - protein, 25 aa, Artificial Sequence
  Cyclic GFR-binding peptide
KLSPISVLYIDDSSNVIYKQYENMV

SEQ ID NO: 65536 - protein, 28 aa, Artificial Sequence
  Cyclic GFR-binding peptide
PQDLSPISILYIVGRTPKVYKQYEMVVK

SEQ ID NO: 65537 - protein, 36 aa, Artificial Sequence
  Cyclic GFR-binding peptide
  MOD_RES (3)..(4)..(36): Xaa is C or S
KPXXAPTKLEPISVLYLDDSSNVIKFKYENMVVRSX

SEQ ID NO: 65538 - protein, 36 aa, Artificial Sequence
  Cyclic GFR-binding peptide
  MOD_RES (6)..(7): Xaa is C or S
TVPKPXXAPTQLEPISVLYLDDSSNVIKFKYENMVV

SEQ ID NO: 65539 - protein, 32 aa, Artificial Sequence; identical to SEQ ID NO: 19729
  Cyclic GFR-binding peptide
  MOD_RES (31)..(31): Xaa is C or S

SEQ ID NO: 65540 - protein, 31 aa, Artificial Sequence
  Cyclic GFR-binding peptide
  MOD_RES (4)..(4): Xaa is C or S
KPTXAPTKLEPISVLYLDDSSNVIKFKYENM

SEQ ID NO: 65541 - protein, 33 aa, Artificial Sequence; identical to SEQ ID NO: 19732
  Cyclic GFR-binding peptide
  MOD_RES (1)..(2)..(33): Xaa is C or S

SEQ ID NO: 65542 - protein, 33 aa, Artificial Sequence
  Cyclic GFR-binding peptide
  MOD_RES (30)..(32): Xaa is C or S
TELEPISMLYLDENEKVVKFKYEDMVVEGXGXR

SEQ ID NO: 65543 - protein, 29 aa, Artificial Sequence
  Cyclic GFR-binding peptide
VSQDLSPISILYIIGKTPKIYKQYEMIVK

SEQ ID NO: 65544 - protein, 27 aa, Artificial Sequence
  Cyclic GFR-binding peptide
APTKLEPISVLYLDDSSNVIKFKYENM

SEQ ID NO: 65545 - protein, 29 aa, Artificial Sequence
  Cyclic GFR-binding peptide
  MOD_RES (2)..(3): Xaa is C or S
PXXVPQDLSPISILYIVGRTPKVYKQYEM

SEQ ID NO: 65546 - protein, 30 aa, Artificial Sequence
  Cyclic GFR-binding peptide
  MOD_RES (30)..(30): Xaa is C or S
TELEPISMLYLDEYDKVVKFKYEEMVVEGX

SEQ ID NO: 65547 - protein, 33 aa, Artificial Sequence; identical to SEQ ID NO: 19744
  Cyclic GFR-binding peptide
  MOD_RES (2)..(3): Xaa is C or S

SEQ ID NO: 65548 - protein, 32 aa, Artificial Sequence
  Cyclic GFR-binding peptide
  MOD_RES (5)..(6): Xaa is C or S
SASPXXVSQDLEPISILYLIGKTPKIKFKYEM

SEQ ID NO: 65549 - protein, 28 aa, Artificial Sequence
  Cyclic GFR-binding peptide
  MOD_RES (27)..(27): Xaa is C or S
NAISILYFDKGVVTYLKKYRGMAVSEXG

SEQ ID NO: 65550 - protein, 37 aa, Artificial Sequence; identical to SEQ ID NO: 19749
  Cyclic GFR-binding peptide
  MOD_RES (3)..(4)..(36): Xaa is C or S

SEQ ID NO: 65551 - protein, 30 aa, Artificial Sequence
  Cyclic GFR-binding peptide
  MOD_RES (1)..(1): Xaa is C or S
XVPTELEPISMLYLDENEKVVKFKYEDMVV

SEQ ID NO: 65552 - protein, 30 aa, Artificial Sequence
  Cyclic GFR-binding peptide
  MOD_RES (1)..(2): Xaa is C or S
XXVPARLSPISILYKDAANNVVLKYHYDMV

SEQ ID NO: 65553 - protein, 32 aa, Artificial Sequence
  Cyclic GFR-binding peptide
  MOD_RES (30)..(32): Xaa is C or S
TKLEPISVLYLDDSSNVIKFKYENMVVRSXGX

SEQ ID NO: 65554 - protein, 32 aa, Artificial Sequence
  Cyclic GFR-binding peptide
  MOD_RES (3)..(4): Xaa is C or S
KAXXVPTELSPISMLYIDEYDKVVYKQYEEMV

SEQ ID NO: 65555 - protein, 25 aa, Artificial Sequence
  Cyclic GFR-binding peptide
ELEPISMLYLDEYDKVVKFKYEEMV

SEQ ID NO: 65556 - protein, 32 aa, Artificial Sequence; identical to SEQ ID NO: 19763
  Cyclic GFR-binding peptide
  MOD_RES (1)..(1): Xaa is C or S

SEQ ID NO: 65557 - protein, 27 aa, Artificial Sequence
  Cyclic GFR-binding peptide
TELSPISMLYIDENEKVVYKQYEDMVV

SEQ ID NO: 65558 - protein, 31 aa, Artificial Sequence
  Cyclic GFR-binding peptide
  MOD_RES (1)..(2): Xaa is C or S
XXVPTKLSPISILYIDKGVVTYYKQYEGMAV

SEQ ID NO: 65559 - protein, 31 aa, Artificial Sequence
  Cyclic GFR-binding peptide
  MOD_RES (4)..(5): Xaa is C or S
ASPXXVPQDLEPISILYLVGRTPKVKFKYEM

SEQ ID NO: 65560 - protein, 23 aa, Artificial Sequence
  Cyclic GFR-binding peptide
LEPISVLYLDDSSNVIKFKYENM

SEQ ID NO: 65561 - protein, 27 aa, Artificial Sequence
  Cyclic GFR-binding peptide
ALEPISILYLVGRKPKVKFKYEMIVRS

SEQ ID NO: 65562 - protein, 35 aa, Artificial Sequence
  Cyclic GFR-binding peptide
  MOD_RES (5)..(6): Xaa is C or S
VGKAXXVPTKLEPISVLYLDDMGVPTKFKYEEGMS

SEQ ID NO: 65563 - protein, 33 aa, Artificial Sequence
  Cyclic GFR-binding peptide
  MOD_RES (4)..(5): Xaa is C or S
GKAXXVPTKLEPISVLYLDDMGVPTKFKYEEGM

SEQ ID NO: 65564 - protein, 35 aa, Artificial Sequence
  Cyclic GFR-binding peptide
  MOD_RES (5)..(6): Xaa is C or S
SASPXXVPQDLEPISILYLVGRTPKVKFKYEMVVK

SEQ ID NO: 65565 - protein, 36 aa, Artificial Sequence; identical to SEQ ID NO: 19769
  Cyclic GFR-binding peptide
  MOD_RES (3)..(35): Xaa is C or S

SEQ ID NO: 65566 - protein, 39 aa, Artificial Sequence; identical to SEQ ID NO: 19771
  Cyclic GFR-binding peptide
  MOD_RES (7)..(39): Xaa is C or S

SEQ ID NO: 65567 - protein, 34 aa, Artificial Sequence; identical to SEQ ID NO: 19776
  Cyclic GFR-binding peptide
  MOD_RES (1)..(33): Xaa is C or S

SEQ ID NO: 65568 - protein, 28 aa, Artificial Sequence
  Cyclic GFR-binding peptide
PTKLNAISILYFDKGVVTYLKKYRGMAV

SEQ ID NO: 65569 - protein, 22 aa, Artificial Sequence
  Cyclic GFR-binding peptide
SPISVLYIDDSSNVIYKQYENM

SEQ ID NO: 65570 - protein, 32 aa, Artificial Sequence
  Cyclic GFR-binding peptide
  MOD_RES (6)..(6): Xaa is C or S
VTKPTXAPTKLEPISVLYLDDSSNVIKFKYEN

SEQ ID NO: 65571 - protein, 32 aa, Artificial Sequence; identical to SEQ ID NO: 19779
  Cyclic GFR-binding peptide
  MOD_RES (1)..(1): Xaa is C or S

SEQ ID NO: 65572 - protein, 34 aa, Artificial Sequence; identical to SEQ ID NO: 19783
  Cyclic GFR-binding peptide
  MOD_RES (1)..(33): Xaa is C or S

SEQ ID NO: 65573 - protein, 30 aa, Artificial Sequence
  Cyclic GFR-binding peptide
  MOD_RES (3)..(4): Xaa is C or S
KPXXAPTQLEPISVLYLDDSSNVIKFKYEN

SEQ ID NO: 65574 - protein, 30 aa, Artificial Sequence; identical to SEQ ID NO: 19785
  Cyclic GFR-binding peptide

SEQ ID NO: 65575 - protein, 29 aa, Artificial Sequence
  Cyclic GFR-binding peptide
  MOD_RES (28)..(28): Xaa is C or S
LEPISILYLDAANNVVKFKYEDMVVEAXG

SEQ ID NO: 65576 - protein, 36 aa, Artificial Sequence; identical to SEQ ID NO: 19786
  Cyclic GFR-binding peptide
  MOD_RES (1)..(33)..(35): Xaa is C or S

SEQ ID NO: 65577 - protein, 29 aa, Artificial Sequence
  Cyclic GFR-binding peptide
  MOD_RES (3)..(4): Xaa is C or S
KAXXVPTKLSPISVLYIDDMGVPTYKQYE

SEQ ID NO: 65578 - protein, 29 aa, Artificial Sequence
  Cyclic GFR-binding peptide
  MOD_RES (2)..(3): Xaa is C or S
SXXVPARLEPISILYLDAANNVVKFKYED

SEQ ID NO: 65579 - protein, 39 aa, Artificial Sequence; identical to SEQ ID NO: 19789
  Cyclic GFR-binding peptide
  MOD_RES (4)..(5)..(37)..(39): Xaa is C or S

SEQ ID NO: 65580 - protein, 28 aa, Artificial Sequence
  Cyclic GFR-binding peptide
  MOD_RES (1)..(1): Xaa is C or S
XAPTQLEPISVLYLDDSSNVIKFKYENM

SEQ ID NO: 65581 - protein, 34 aa, Artificial Sequence; identical to SEQ ID NO: 19796
  Cyclic GFR-binding peptide
  MOD_RES (3)..(4): Xaa is C or S

SEQ ID NO: 65582 - protein, 23 aa, Artificial Sequence
  Cyclic GFR-binding peptide
ARLSPISILYKDAANNVVLKYHY

SEQ ID NO: 65583 - protein, 25 aa, Artificial Sequence
  Cyclic GFR-binding peptide
VSQDLEPISILYLIGKTPKIKFKYE

SEQ ID NO: 65584 - protein, 28 aa, Artificial Sequence
  Cyclic GFR-binding peptide
RLEPISILYLDAANNVVKFKYEDMVVEA

SEQ ID NO: 65585 - protein, 34 aa, Artificial Sequence
  Cyclic GFR-binding peptide
  MOD_RES (5)..(6): Xaa is C or S
VPKPXXAPTKLSPISVLYIDDSSNVIYKQYENMV

SEQ ID NO: 65586 - protein, 34 aa, Artificial Sequence; identical to SEQ ID NO: 19808
  Cyclic GFR-binding peptide
  MOD_RES (1)..(33): Xaa is C or S

SEQ ID NO: 65587 - protein, 31 aa, Artificial Sequence
  Cyclic GFR-binding peptide
  MOD_RES (4)..(5): Xaa is C or S
AAPXXVPQALSPISILYIVGRKPKVYKQYEM

SEQ ID NO: 65588 - protein, 35 aa, Artificial Sequence; identical to SEQ ID NO: 19810
  Cyclic GFR-binding peptide
  MOD_RES (3)..(35): Xaa is C or S

SEQ ID NO: 65589 - protein, 25 aa, Artificial Sequence
  Cyclic GFR-binding peptide
TKLNAISILYFDKGVVTYLKKYRGM

SEQ ID NO: 65590 - protein, 42 aa, Artificial Sequence; identical to SEQ ID NO: 19814
  Cyclic GFR-binding peptide
  MOD_RES (6)..(7)..(39)..(41): Xaa is C or S

SEQ ID NO: 65591 - protein, 33 aa, Artificial Sequence; identical to SEQ ID NO: 19816
  Cyclic GFR-binding peptide
  MOD_RES (2)..(3): Xaa is C or S

SEQ ID NO: 65592 - protein, 23 aa, Artificial Sequence
  Cyclic GFR-binding peptide
KLEPISVLYLDDSSNVIKFKYEN

SEQ ID NO: 65593 - protein, 29 aa, Artificial Sequence
  Cyclic GFR-binding peptide
VPTELEPISMLYLDENEKVVKFKYEDMVV

SEQ ID NO: 65594 - protein, 35 aa, Artificial Sequence; identical to SEQ ID NO: 19818
  Cyclic GFR-binding peptide
  MOD_RES (4)..(5): Xaa is C or S

SEQ ID NO: 65595 - protein, 22 aa, Artificial Sequence
  Cyclic GFR-binding peptide
SPISVLYIDDMGVPTYKQYEEG

SEQ ID NO: 65596 - protein, 34 aa, Artificial Sequence
  Cyclic GFR-binding peptide
  MOD_RES (32)..(34): Xaa is C or S
PTKLSPISVLYIDDMGVPTYKQYEEGMSVAEXGX

SEQ ID NO: 65597 - protein, 38 aa, Artificial Sequence; identical to SEQ ID NO: 19825
  Cyclic GFR-binding peptide
  MOD_RES (4)..(5)..(38): Xaa is C or S

SEQ ID NO: 65598 - protein, 20 aa, Artificial Sequence
  Cyclic GFR-binding peptide
SPISVLYIDDSSNVIYKQYE

SEQ ID NO: 65599 - protein, 33 aa, Artificial Sequence; identical to SEQ ID NO: 19826
  Cyclic GFR-binding peptide
  MOD_RES (1)..(2): Xaa is C or S

SEQ ID NO: 65600 - protein, 20 aa, Artificial Sequence
  Cyclic GFR-binding peptide
SPISILYIVGRKPKVYKQYE

SEQ ID NO: 65601 - protein, 33 aa, Artificial Sequence
  Cyclic GFR-binding peptide
  MOD_RES (30)..(32): Xaa is C or S
SQDLSPISILYIIGKTPKIYKQYEMIVKSXKXS

SEQ ID NO: 65602 - protein, 26 aa, Artificial Sequence
  Cyclic GFR-binding peptide
PTELEPISMLYLDEYDKVVKFKYEEM

SEQ ID NO: 65603 - protein, 38 aa, Artificial Sequence; identical to SEQ ID NO: 19830
  Cyclic GFR-binding peptide
  MOD_RES (5)..(6)..(38): Xaa is C or S

SEQ ID NO: 65604 - protein, 30 aa, Artificial Sequence
  Cyclic GFR-binding peptide
  MOD_RES (28)..(30): Xaa is C or S
LSPISILYIDKGVVTYYKQYEGMAVSEXGX

SEQ ID NO: 65605 - protein, 25 aa, Artificial Sequence
  Cyclic GFR-binding peptide
RLSPISILYKDAANNVVLKYHYDMV

SEQ ID NO: 65606 - protein, 25 aa, Artificial Sequence
  Cyclic GFR-binding peptide
TKLSPISILYIDKGVVTYYKQYEGM

SEQ ID NO: 65607 - protein, 34 aa, Artificial Sequence
  Cyclic GFR-binding peptide
  MOD_RES (4)..(5): Xaa is C or S
PKAXXVPTELEPISMLYLDENEKVVKFKYEDMVV

SEQ ID NO: 65608 - protein, 25 aa, Artificial Sequence
  Cyclic GFR-binding peptide
LEPISILYLDAANNVVKFKYEDMVV

SEQ ID NO: 65609 - protein, 39 aa, Artificial Sequence; identical to SEQ ID NO: 19836
  Cyclic GFR-binding peptide
  MOD_RES (4)..(5)..(37)..(39): Xaa is C or S

SEQ ID NO: 65610 - protein, 29 aa, Artificial Sequence
  Cyclic GFR-binding peptide
  MOD_RES (1)..(1): Xaa is C or S
XAPTQLSPISVLYIDDSSNVIYKQYENMV

SEQ ID NO: 65611 - protein, 36 aa, Artificial Sequence; identical to SEQ ID NO: 19837
  Cyclic GFR-binding peptide
  MOD_RES (2)..(3)..(35): Xaa is C or S

SEQ ID NO: 65612 - protein, 32 aa, Artificial Sequence
  Cyclic GFR-binding peptide
  MOD_RES (30)..(32): Xaa is C or S
PQDLEPISILYLVGRTPKVKFKYEMVVKSXKX

SEQ ID NO: 65613 - protein, 31 aa, Artificial Sequence; identical to SEQ ID NO: 19840
  Cyclic GFR-binding peptide
  MOD_RES (1)..(1): Xaa is C or S

SEQ ID NO: 65614 - protein, 24 aa, Artificial Sequence
  Cyclic GFR-binding peptide
LNAISILYFDKGVVTYLKKYRGMA

SEQ ID NO: 65615 - protein, 28 aa, Artificial Sequence
  Cyclic GFR-binding peptide
KLEPISVLYLDSSNNVIKFKYENMVVKA

SEQ ID NO: 65616 - protein, 25 aa, Artificial Sequence
  Cyclic GFR-binding peptide
ALEPISILYLVGRKPKVKFKYEMIV

SEQ ID NO: 65617 - protein, 26 aa, Artificial Sequence
  Cyclic GFR-binding peptide
DLEPISILYLVGRTPKVKFKYEMVVK

SEQ ID NO: 65618 - protein, 30 aa, Artificial Sequence
  Cyclic GFR-binding peptide
  MOD_RES (3)..(4): Xaa is C or S
KAXXVPTKLNAISILYFDKGVVTYLKKYRG

SEQ ID NO: 65619 - protein, 32 aa, Artificial Sequence
  Cyclic GFR-binding peptide
  MOD_RES (3)..(4): Xaa is C or S
KAXXVPTELEPISMLYLDENEKVVKFKYEDMV

SEQ ID NO: 65620 - protein, 23 aa, Artificial Sequence
  Cyclic GFR-binding peptide
DLSPISILYIIGKTPKIYKQYEM

SEQ ID NO: 65621 - protein, 39 aa, Artificial Sequence; identical to SEQ ID NO: 19845
  Cyclic GFR-binding peptide
  MOD_RES (3)..(4)..(36)..(38): Xaa is C or S

SEQ ID NO: 65622 - protein, 29 aa, Artificial Sequence
  Cyclic GFR-binding peptide
  MOD_RES (1)..(2): Xaa is C or S
XXAPTKLEPISVLYLDDSSNVIKFKYENM

SEQ ID NO: 65623 - protein, 22 aa, Artificial Sequence
  Cyclic GFR-binding peptide
RLEPISILYLDAANNVVKFKYE

SEQ ID NO: 65624 - protein, 25 aa, Artificial Sequence
  Cyclic GFR-binding peptide
VPTKLEPISVLYLDDMGVPTKFKYE

SEQ ID NO: 65625 - protein, 26 aa, Artificial Sequence
  Cyclic GFR-binding peptide
ELEPISMLYLDENEKVVKFKYEDMVV

SEQ ID NO: 65626 - protein, 28 aa, Artificial Sequence
  Cyclic GFR-binding peptide
  MOD_RES (1)..(1): Xaa is C or S
XVSQDLSPISILYIIGKTPKIYKQYEMI

SEQ ID NO: 65627 - protein, 36 aa, Artificial Sequence; identical to SEQ ID NO: 19853
  Cyclic GFR-binding peptide
  MOD_RES (3)..(4)..(36): Xaa is C or S

SEQ ID NO: 65628 - protein, 22 aa, Artificial Sequence
  Cyclic GFR-binding peptide
SPISILYIVGRKPKVYKQYEMI

SEQ ID NO: 65629 - protein, 34 aa, Artificial Sequence
  Cyclic GFR-binding peptide
  MOD_RES (6)..(7): Xaa is C or S
AAPASXXVPARLEPISILYLDAANNVVKFKYEDM

SEQ ID NO: 65630 - protein, 31 aa, Artificial Sequence
  Cyclic GFR-binding peptide
  MOD_RES (1)..(2): Xaa is C or S
XXVPTELSPISMLYIDEYDKVVYKQYEEMVV

SEQ ID NO: 65631 - protein, 26 aa, Artificial Sequence
  Cyclic GFR-binding peptide
  MOD_RES (1)..(1): Xaa is C or S
XAPTKLSPISVLYIDSSNNVIYKQYE

SEQ ID NO: 65632 - protein, 36 aa, Artificial Sequence; identical to SEQ ID NO: 19863
  Cyclic GFR-binding peptide
  MOD_RES (1)..(33)..(35): Xaa is C or S

SEQ ID NO: 65633 - protein, 21 aa, Artificial Sequence
  Cyclic GFR-binding peptide
SPISILYKDAANNVVLKYHYD

SEQ ID NO: 65634 - protein, 38 aa, Artificial Sequence; identical to SEQ ID NO: 19869
  Cyclic GFR-binding peptide
  MOD_RES (3)..(4)..(35)..(37): Xaa is C or S

SEQ ID NO: 65635 - protein, 36 aa, Artificial Sequence; identical to SEQ ID NO: 19872
  Cyclic GFR-binding peptide
  MOD_RES (1)..(2)..(34)..(36): Xaa is C or S

SEQ ID NO: 65636 - protein, 39 aa, Artificial Sequence; identical to SEQ ID NO: 19873
  Cyclic GFR-binding peptide
  MOD_RES (5)..(6)..(38): Xaa is C or S

SEQ ID NO: 65637 - protein, 37 aa, Artificial Sequence; identical to SEQ ID NO: 19874
  Cyclic GFR-binding peptide
  MOD_RES (3)..(4)..(36): Xaa is C or S

SEQ ID NO: 65638 - protein, 33 aa, Artificial Sequence
  Cyclic GFR-binding peptide
  MOD_RES (31)..(33): Xaa is C or S
PARLEPISILYLDAANNVVKFKYEDMVVEAXGX

SEQ ID NO: 65639 - protein, 28 aa, Artificial Sequence
  Cyclic GFR-binding peptide
  MOD_RES (1)..(1): Xaa is C or S
XVPQDLSPISILYIVGRTPKVYKQYEMV

SEQ ID NO: 65640 - protein, 32 aa, Artificial Sequence
  Cyclic GFR-binding peptide
  MOD_RES (2)..(3): Xaa is C or S
AXXVPTELEPISMLYLDENEKVVKFKYEDMVV

SEQ ID NO: 65641 - protein, 32 aa, Artificial Sequence
  Cyclic GFR-binding peptide
  MOD_RES (30)..(32): Xaa is C or S
TQLEPISVLYLDDSSNVIKFKYENMVVRAXGX

SEQ ID NO: 65642 - protein, 24 aa, Artificial Sequence
  Cyclic GFR-binding peptide
ARLNAISILYFDAANNVVLKKYRD

SEQ ID NO: 65643 - protein, 23 aa, Artificial Sequence
  Cyclic GFR-binding peptide
ARLEPISILYLDAANNVVKFKYE

SEQ ID NO: 65644 - protein, 30 aa, Artificial Sequence
  Cyclic GFR-binding peptide
  MOD_RES (27)..(29): Xaa is C or S
EPISVLYLDDSSNVIKFKYENMVVRAXGXH

SEQ ID NO: 65645 - protein, 34 aa, Artificial Sequence
  Cyclic GFR-binding peptide
  MOD_RES (4)..(5): Xaa is C or S
ASPXXVPQDLSPISILYIVGRTPKVYKQYEMVVK

SEQ ID NO: 65646 - protein, 21 aa, Artificial Sequence
  Cyclic GFR-binding peptide
SPISMLYIDEYDKVVYKQYEE

SEQ ID NO: 65647 - protein, 33 aa, Artificial Sequence; identical to SEQ ID NO: 19894
  Cyclic GFR-binding peptide
  MOD_RES (2)..(3): Xaa is C or S

SEQ ID NO: 65648 - protein, 32 aa, Artificial Sequence
  Cyclic GFR-binding peptide
  MOD_RES (2)..(3): Xaa is C or S
SXXVPARLEPISILYLDAANNVVKFKYEDMVV

SEQ ID NO: 65649 - protein, 26 aa, Artificial Sequence
  Cyclic GFR-binding peptide
RLNAISILYFDAANNVVLKKYRDMVV

SEQ ID NO: 65650 - protein, 22 aa, Artificial Sequence
  Cyclic GFR-binding peptide
SPISILYKDAANNVVLKYHYDM

SEQ ID NO: 65651 - protein, 39 aa, Artificial Sequence; identical to SEQ ID NO: 19898
  Cyclic GFR-binding peptide
  MOD_RES (6)..(7)..(39): Xaa is C or S

SEQ ID NO: 65652 - protein, 27 aa, Artificial Sequence
  Cyclic GFR-binding peptide
QLSPISVLYIDDSSNVIYKQYENMVVR

SEQ ID NO: 65653 - protein, 32 aa, Artificial Sequence
  Cyclic GFR-binding peptide
  MOD_RES (5)..(6): Xaa is C or S
SASPXXVSQDLSPISILYIIGKTPKIYKQYEM

SEQ ID NO: 65654 - protein, 29 aa, Artificial Sequence
  Cyclic GFR-binding peptide
  MOD_RES (3)..(4): Xaa is C or S
KAXXVPTELEPISMLYLDEYDKVVKFKYE

SEQ ID NO: 65655 - protein, 36 aa, Artificial Sequence; identical to SEQ ID NO: 19909
  Cyclic GFR-binding peptide
  MOD_RES (1)..(2)..(34)..(36): Xaa is C or S

SEQ ID NO: 65656 - protein, 27 aa, Artificial Sequence
  Cyclic GFR-binding peptide
PTKLSPISVLYIDDSSNVIYKQYENMV

SEQ ID NO: 65657 - protein, 34 aa, Artificial Sequence
  Cyclic GFR-binding peptide
  MOD_RES (31)..(33): Xaa is C or S
TKLEPISVLYLDDMGVPTKFKYEEGMSVAEXGXR

SEQ ID NO: 65658 - protein, 36 aa, Artificial Sequence; identical to SEQ ID NO: 19910
  Cyclic GFR-binding peptide
  MOD_RES (2)..(3)..(35): Xaa is C or S

SEQ ID NO: 65659 - protein, 25 aa, Artificial Sequence
  Cyclic GFR-binding peptide
TKLSPISVLYIDSSNNVIYKQYENM

SEQ ID NO: 65660 - protein, 29 aa, Artificial Sequence
  Cyclic GFR-binding peptide
  MOD_RES (1)..(2): Xaa is C or S
XXAPTQLEPISVLYLDDSSNVIKFKYENM

SEQ ID NO: 65661 - protein, 35 aa, Artificial Sequence; identical to SEQ ID NO: 19918
  Cyclic GFR-binding peptide
  MOD_RES (1)..(2)..(34): Xaa is C or S

SEQ ID NO: 65662 - protein, 36 aa, Artificial Sequence; identical to SEQ ID NO: 19920
  Cyclic GFR-binding peptide
  MOD_RES (5)..(6): Xaa is C or S

SEQ ID NO: 65663 - protein, 33 aa, Artificial Sequence
  Cyclic GFR-binding peptide
  MOD_RES (6)..(7): Xaa is C or S
AAPASXXVPARLEPISILYLDAANNVVKFKYED

SEQ ID NO: 65664 - protein, 35 aa, Artificial Sequence; identical to SEQ ID NO: 19922
  Cyclic GFR-binding peptide
  MOD_RES (1)..(33)..(35): Xaa is C or S

SEQ ID NO: 65665 - protein, 32 aa, Artificial Sequence; identical to SEQ ID NO: 19923
  Cyclic GFR-binding peptide

SEQ ID NO: 65666 - protein, 25 aa, Artificial Sequence
  Cyclic GFR-binding peptide
APTKLEPISVLYLDDSSNVIKFKYE

SEQ ID NO: 65667 - protein, 36 aa, Artificial Sequence
  Cyclic GFR-binding peptide
  MOD_RES (6)..(7): Xaa is C or S
KASKAXXVPTKLNAISILYFDKGVVTYLKKYRGMAV

SEQ ID NO: 65668 - protein, 36 aa, Artificial Sequence; identical to SEQ ID NO: 19926
  Cyclic GFR-binding peptide
  MOD_RES (1)..(33)..(35): Xaa is C or S

SEQ ID NO: 65669 - protein, 29 aa, Artificial Sequence
  Cyclic GFR-binding peptide
  MOD_RES (2)..(3): Xaa is C or S
PXXVPQDLEPISILYLVGRTPKVKFKYEM

SEQ ID NO: 65670 - protein, 32 aa, Artificial Sequence; identical to SEQ ID NO: 19930
  Cyclic GFR-binding peptide
  MOD_RES (1)..(2): Xaa is C or S

SEQ ID NO: 65671 - protein, 35 aa, Artificial Sequence; identical to SEQ ID NO: 19936
  Cyclic GFR-binding peptide
  MOD_RES (4)..(5): Xaa is C or S

SEQ ID NO: 65672 - protein, 29 aa, Artificial Sequence
  Cyclic GFR-binding peptide
  MOD_RES (2)..(3): Xaa is C or S
PXXVPQALEPISILYLVGRKPKVKFKYEM

SEQ ID NO: 65673 - protein, 26 aa, Artificial Sequence
  Cyclic GFR-binding peptide
VPQDLEPISILYLVGRTPKVKFKYEM

SEQ ID NO: 65674 - protein, 35 aa, Artificial Sequence; identical to SEQ ID NO: 19939
  Cyclic GFR-binding peptide
  MOD_RES (3)..(35): Xaa is C or S

SEQ ID NO: 65675 - protein, 28 aa, Artificial Sequence
  Cyclic GFR-binding peptide
  MOD_RES (1)..(2): Xaa is C or S
XXAPTQLSPISVLYIDDSSNVIYKQYEN

SEQ ID NO: 65676 - protein, 39 aa, Artificial Sequence; identical to SEQ ID NO: 19940
  Cyclic GFR-binding peptide
  MOD_RES (6)..(7)..(39): Xaa is C or S

SEQ ID NO: 65677 - protein, 20 aa, Artificial Sequence
  Cyclic GFR-binding peptide
EPISILYLVGRTPKVKFKYE

SEQ ID NO: 65678 - protein, 31 aa, Artificial Sequence
  Cyclic GFR-binding peptide
  MOD_RES (5)..(6): Xaa is C or S
IPKAXXVPTELEPISMLYLDEYDKVVKFKYE

SEQ ID NO: 65679 - protein, 29 aa, Artificial Sequence
  Cyclic GFR-binding peptide
  MOD_RES (1)..(1): Xaa is C or S
XVPQDLSPISILYIVGRTPKVYKQYEMVV

SEQ ID NO: 65680 - protein, 37 aa, Artificial Sequence; identical to SEQ ID NO: 19945
  Cyclic GFR-binding peptide
  MOD_RES (5)..(6)..(37): Xaa is C or S

SEQ ID NO: 65681 - protein, 27 aa, Artificial Sequence
  Cyclic GFR-binding peptide
  MOD_RES (1)..(2): Xaa is C or S
XXVPTKLEPISVLYLDDMGVPTKFKYE

SEQ ID NO: 65682 - protein, 23 aa, Artificial Sequence
  Cyclic GFR-binding peptide
SPISILYKDAANNVVLKYHYDMV

SEQ ID NO: 65683 - protein, 29 aa, Artificial Sequence
  Cyclic GFR-binding peptide
  MOD_RES (1)..(1): Xaa is C or S
XVPTELEPISMLYLDEYDKVVKFKYEEMV

SEQ ID NO: 65684 - protein, 24 aa, Artificial Sequence
  Cyclic GFR-binding peptide
PTKLSPISILYIDKGVVTYYKQYE

SEQ ID NO: 65685 - protein, 34 aa, Artificial Sequence; identical to SEQ ID NO: 19956
  Cyclic GFR-binding peptide
  MOD_RES (2)..(3): Xaa is C or S

SEQ ID NO: 65686 - protein, 27 aa, Artificial Sequence
  Cyclic GFR-binding peptide
  MOD_RES (27)..(27): Xaa is C or S
LSPISILYIVGRKPKVYKQYEMIVRSX

SEQ ID NO: 65687 - protein, 35 aa, Artificial Sequence; identical to SEQ ID NO: 19962
  Cyclic GFR-binding peptide
  MOD_RES (1)..(32)..(34): Xaa is C or S

SEQ ID NO: 65688 - protein, 34 aa, Artificial Sequence
  Cyclic GFR-binding peptide
  MOD_RES (6)..(7): Xaa is C or S
AAPASXXVPARLNAISILYFDAANNVVLKKYRDM

SEQ ID NO: 65689 - protein, 35 aa, Artificial Sequence; identical to SEQ ID NO: 19964
  Cyclic GFR-binding peptide
  MOD_RES (1)..(33)..(35): Xaa is C or S

SEQ ID NO: 65690 - protein, 29 aa, Artificial Sequence
  Cyclic GFR-binding peptide
  MOD_RES (27)..(29): Xaa is C or S
SPISMLYIDEYDKVVYKQYEEMVVEGXGX

SEQ ID NO: 65691 - protein, 34 aa, Artificial Sequence; identical to SEQ ID NO: 19965
  Cyclic GFR-binding peptide
  MOD_RES (3)..(4): Xaa is C or S

SEQ ID NO: 65692 - protein, 20 aa, Artificial Sequence
  Cyclic GFR-binding peptide
EPISVLYLDDSSNVIKFKYE

SEQ ID NO: 65693 - protein, 36 aa, Artificial Sequence; identical to SEQ ID NO: 19966
  Cyclic GFR-binding peptide
  MOD_RES (1)..(2)..(33)..(35): Xaa is C or S

SEQ ID NO: 65694 - protein, 26 aa, Artificial Sequence
  Cyclic GFR-binding peptide
PTKLSPISILYIDKGVVTYYKQYEGM

SEQ ID NO: 65695 - protein, 28 aa, Artificial Sequence
  Cyclic GFR-binding peptide
  MOD_RES (26)..(28): Xaa is C or S
EPISILYLVGRTPKVKFKYEMVVKSXKX

SEQ ID NO: 65696 - protein, 39 aa, Artificial Sequence; identical to SEQ ID NO: 19970
  Cyclic GFR-binding peptide
  MOD_RES (3)..(4)..(36)..(38): Xaa is C or S

SEQ ID NO: 65697 - protein, 30 aa, Artificial Sequence
  Cyclic GFR-binding peptide
  MOD_RES (1)..(1): Xaa is C or S
XVPARLNAISILYFDAANNVVLKKYRDMVV

SEQ ID NO: 65698 - protein, 28 aa, Artificial Sequence
  Cyclic GFR-binding peptide
  MOD_RES (2)..(3): Xaa is C or S
PXXVPQALEPISILYLVGRKPKVKFKYE

SEQ ID NO: 65699 - protein, 33 aa, Artificial Sequence
  Cyclic GFR-binding peptide
  MOD_RES (32)..(32): Xaa is C or S
PTKLSPISVLYIDDMGVPTYKQYEEGMSVAEXG

SEQ ID NO: 65700 - protein, 22 aa, Artificial Sequence
  Cyclic GFR-binding peptide
EPISILYLVGRTPKVKFKYEMV

SEQ ID NO: 65701 - protein, 29 aa, Artificial Sequence
  Cyclic GFR-binding peptide
TKLEPISVLYLDSSNNVIKFKYENMVVKA

SEQ ID NO: 65702 - protein, 32 aa, Artificial Sequence; identical to SEQ ID NO: 19979
  Cyclic GFR-binding peptide
  MOD_RES (1)..(32): Xaa is C or S

SEQ ID NO: 65703 - protein, 37 aa, Artificial Sequence; identical to SEQ ID NO: 19982
  Cyclic GFR-binding peptide
  MOD_RES (4)..(5)..(37): Xaa is C or S

SEQ ID NO: 65704 - protein, 29 aa, Artificial Sequence
  Cyclic GFR-binding peptide
  MOD_RES (29)..(29): Xaa is C or S
QALSPISILYIVGRKPKVYKQYEMIVRSX

SEQ ID NO: 65705 - protein, 34 aa, Artificial Sequence
  Cyclic GFR-binding peptide
  MOD_RES (4)..(5): Xaa is C or S
ASPXXVPQDLEPISILYLVGRTPKVKFKYEMVVK

SEQ ID NO: 65706 - protein, 32 aa, Artificial Sequence; identical to SEQ ID NO: 19991
  Cyclic GFR-binding peptide
  MOD_RES (1)..(2): Xaa is C or S

SEQ ID NO: 65707 - protein, 20 aa, Artificial Sequence
  Cyclic GFR-binding peptide
SPISILYKDAANNVVLKYHY

SEQ ID NO: 65708 - protein, 33 aa, Artificial Sequence; identical to SEQ ID NO: 19992
  Cyclic GFR-binding peptide
  MOD_RES (1)..(33): Xaa is C or S

SEQ ID NO: 65709 - protein, 32 aa, Artificial Sequence
  Cyclic GFR-binding peptide
  MOD_RES (29)..(31): Xaa is C or S
KLEPISVLYLDSSNNVIKFKYENMVVKAXGXH

SEQ ID NO: 65710 - protein, 38 aa, Artificial Sequence; identical to SEQ ID NO: 19998
  Cyclic GFR-binding peptide
  MOD_RES (4)..(5)..(36)..(38): Xaa is C or S

SEQ ID NO: 65711 - protein, 24 aa, Artificial Sequence
  Cyclic GFR-binding peptide
TKLSPISILYIDKGVVTYYKQYEG

SEQ ID NO: 65712 - protein, 32 aa, Artificial Sequence
  Cyclic GFR-binding peptide
  MOD_RES (30)..(32): Xaa is C or S
TELEPISMLYLDENEKVVKFKYEDMVVEGXGX

SEQ ID NO: 65713 - protein, 29 aa, Artificial Sequence
  Cyclic GFR-binding peptide
  MOD_RES (3)..(4): Xaa is C or S
SPXXVPQDLSPISILYIVGRTPKVYKQYE

SEQ ID NO: 65714 - protein, 33 aa, Artificial Sequence; identical to SEQ ID NO: 20005
  Cyclic GFR-binding peptide
  MOD_RES (1)..(33): Xaa is C or S

SEQ ID NO: 65715 - protein, 20 aa, Artificial Sequence
  Cyclic GFR-binding peptide
SPISILYIDKGVVTYYKQYE

SEQ ID NO: 65716 - protein, 26 aa, Artificial Sequence
  Cyclic GFR-binding peptide
VPQALEPISILYLVGRKPKVKFKYEM

SEQ ID NO: 65717 - protein, 28 aa, Artificial Sequence
  Cyclic GFR-binding peptide
  MOD_RES (27)..(27): Xaa is C or S
SPISILYIDKGVVTYYKQYEGMAVSEXG

SEQ ID NO: 65718 - protein, 28 aa, Artificial Sequence
  Cyclic GFR-binding peptide
VPARLNAISILYFDAANNVVLKKYRDMV

SEQ ID NO: 65719 - protein, 21 aa, Artificial Sequence
  Cyclic GFR-binding peptide
LSPISILYIVGRTPKVYKQYE

SEQ ID NO: 65720 - protein, 27 aa, Artificial Sequence
  Cyclic GFR-binding peptide
  MOD_RES (1)..(1): Xaa is C or S
XAPTKLSPISVLYIDDSSNVIYKQYEN

SEQ ID NO: 65721 - protein, 39 aa, Artificial Sequence; identical to SEQ ID NO: 20015
  Cyclic GFR-binding peptide
  MOD_RES (5)..(37)..(39): Xaa is C or S

SEQ ID NO: 65722 - protein, 34 aa, Artificial Sequence
  Cyclic GFR-binding peptide
  MOD_RES (4)..(5): Xaa is C or S
PKPXXAPTQLSPISVLYIDDSSNVIYKQYENMVV

SEQ ID NO: 65723 - protein, 36 aa, Artificial Sequence; identical to SEQ ID NO: 20020
  Cyclic GFR-binding peptide
  MOD_RES (1)..(2)..(34)..(36): Xaa is C or S

SEQ ID NO: 65724 - protein, 31 aa, Artificial Sequence
  Cyclic GFR-binding peptide
  MOD_RES (3)..(4): Xaa is C or S
ASXXVPARLNAISILYFDAANNVVLKKYRDM

SEQ ID NO: 65725 - protein, 25 aa, Artificial Sequence
  Cyclic GFR-binding peptide
PQALEPISILYLVGRKPKVKFKYEM

SEQ ID NO: 65726 - protein, 35 aa, Artificial Sequence; identical to SEQ ID NO: 20023
  Cyclic GFR-binding peptide
  MOD_RES (1)..(33)..(35): Xaa is C or S

SEQ ID NO: 65727 - protein, 24 aa, Artificial Sequence
  Cyclic GFR-binding peptide
ELEPISMLYLDEYDKVVKFKYEEM

SEQ ID NO: 65728 - protein, 30 aa, Artificial Sequence
  Cyclic GFR-binding peptide
  MOD_RES (28)..(30): Xaa is C or S
LNAISILYFDKGVVTYLKKYRGMAVSEXGX

SEQ ID NO: 65729 - protein, 28 aa, Artificial Sequence
  Cyclic GFR-binding peptide
  MOD_RES (28)..(28): Xaa is C or S
DLEPISILYLIGKTPKIKFKYEMIVKSX

SEQ ID NO: 65730 - protein, 27 aa, Artificial Sequence
  Cyclic GFR-binding peptide
  MOD_RES (26)..(26): Xaa is C or S
EPISILYLVGRTPKVKFKYEMVVKSXK

SEQ ID NO: 65731 - protein, 37 aa, Artificial Sequence; identical to SEQ ID NO: 20033
  Cyclic GFR-binding peptide
  MOD_RES (4)..(5)..(36): Xaa is C or S

SEQ ID NO: 65732 - protein, 27 aa, Artificial Sequence
  Cyclic GFR-binding peptide
  MOD_RES (1)..(2): Xaa is C or S
XXAPTQLEPISVLYLDDSSNVIKFKYE

SEQ ID NO: 65733 - protein, 20 aa, Artificial Sequence
  Cyclic GFR-binding peptide
EPISILYLVGRKPKVKFKYE

SEQ ID NO: 65734 - protein, 39 aa, Artificial Sequence; identical to SEQ ID NO: 20035
  Cyclic GFR-binding peptide
  MOD_RES (6)..(7)..(39): Xaa is C or S

SEQ ID NO: 65735 - protein, 31 aa, Artificial Sequence
  Cyclic GFR-binding peptide
  MOD_RES (29)..(31): Xaa is C or S
LSPISVLYIDDMGVPTYKQYEEGMSVAEXGX

SEQ ID NO: 65736 - protein, 30 aa, Artificial Sequence
  Cyclic GFR-binding peptide
  MOD_RES (30)..(30): Xaa is C or S
SQDLEPISILYLIGKTPKIKFKYEMIVKSX

SEQ ID NO: 65737 - protein, 28 aa, Artificial Sequence
  Cyclic GFR-binding peptide
  MOD_RES (2)..(3): Xaa is C or S
PXXAPTKLSPISVLYIDDSSNVIYKQYE

SEQ ID NO: 65738 - protein, 20 aa, Artificial Sequence
  Cyclic GFR-binding peptide
SPISILYIDKGVVTYYKQYE

SEQ ID NO: 65739 - protein, 33 aa, Artificial Sequence; identical to SEQ ID NO: 20037
  Cyclic GFR-binding peptide
  MOD_RES (3)..(3): Xaa is C or S

SEQ ID NO: 65740 - protein, 27 aa, Artificial Sequence
  Cyclic GFR-binding peptide
PARLEPISILYLDAANNVVKFKYEDMV

SEQ ID NO: 65741 - protein, 23 aa, Artificial Sequence
  Cyclic GFR-binding peptide
LSPISVLYIDDSSNVIYKQYENM

SEQ ID NO: 65742 - protein, 24 aa, Artificial Sequence
  Cyclic GFR-binding peptide
TKLNAISILYFDKGVVTYLKKYRG

SEQ ID NO: 65743 - protein, 37 aa, Artificial Sequence; identical to SEQ ID NO: 20041
  Cyclic GFR-binding peptide
  MOD_RES (2)..(34)..(36): Xaa is C or S

SEQ ID NO: 65744 - protein, 28 aa, Artificial Sequence
  Cyclic GFR-binding peptide
APTQLEPISVLYLDDSSNVIKFKYENMV

SEQ ID NO: 65745 - protein, 39 aa, Artificial Sequence; identical to SEQ ID NO: 20043
  Cyclic GFR-binding peptide
  MOD_RES (3)..(4)..(36)..(38): Xaa is C or S

SEQ ID NO: 65746 - protein, 26 aa, Artificial Sequence
  Cyclic GFR-binding peptide
EPISVLYLDSSNNVIKFKYENMVVKA

SEQ ID NO: 65747 - protein, 35 aa, Artificial Sequence; identical to SEQ ID NO: 20045
  Cyclic GFR-binding peptide
  MOD_RES (3)..(4): Xaa is C or S

SEQ ID NO: 65748 - protein, 34 aa, Artificial Sequence; identical to SEQ ID NO: 20048
  Cyclic GFR-binding peptide
  MOD_RES (1)..(2)..(34): Xaa is C or S

SEQ ID NO: 65749 - protein, 32 aa, Artificial Sequence
  Cyclic GFR-binding peptide
  MOD_RES (31)..(31): Xaa is C or S
PTELEPISMLYLDENEKVVKFKYEDMVVEGXG

SEQ ID NO: 65750 - protein, 25 aa, Artificial Sequence
  Cyclic GFR-binding peptide
LSPISILYKDAANNVVLKYHYDMVV

SEQ ID NO: 65751 - protein, 37 aa, Artificial Sequence; identical to SEQ ID NO: 20050
  Cyclic GFR-binding peptide
  MOD_RES (6)..(6): Xaa is C or S

SEQ ID NO: 65752 - protein, 23 aa, Artificial Sequence
  Cyclic GFR-binding peptide
TKLEPISVLYLDDSSNVIKFKYE

SEQ ID NO: 65753 - protein, 31 aa, Artificial Sequence
  Cyclic GFR-binding peptide
  MOD_RES (28)..(30): Xaa is C or S
LSPISVLYIDSSNNVIYKQYENMVVKAXGXH

SEQ ID NO: 65754 - protein, 35 aa, Artificial Sequence; identical to SEQ ID NO: 20053
  Cyclic GFR-binding peptide
  MOD_RES (3)..(4): Xaa is C or S

SEQ ID NO: 65755 - protein, 29 aa, Artificial Sequence
  Cyclic GFR-binding peptide
  MOD_RES (28)..(28): Xaa is C or S
DLSPISILYIIGKTPKIYKQYEMIVKSXK

SEQ ID NO: 65756 - protein, 33 aa, Artificial Sequence
  Cyclic GFR-binding peptide
  MOD_RES (4)..(5): Xaa is C or S
SKAXXVPTKLNAISILYFDKGVVTYLKKYRGMA

SEQ ID NO: 65757 - protein, 37 aa, Artificial Sequence; identical to SEQ ID NO: 20059
  Cyclic GFR-binding peptide
  MOD_RES (4)..(5)..(37): Xaa is C or S

SEQ ID NO: 65758 - protein, 32 aa, Artificial Sequence
  Cyclic GFR-binding peptide
  MOD_RES (32)..(32): Xaa is C or S
PTKLEPISVLYLDDMGVPTKFKYEEGMSVAEX

SEQ ID NO: 65759 - protein, 25 aa, Artificial Sequence
  Cyclic GFR-binding peptide
EPISILYLDAANNVVKFKYEDMVVE

SEQ ID NO: 65760 - protein, 35 aa, Artificial Sequence; identical to SEQ ID NO: 20062
  Cyclic GFR-binding peptide
  MOD_RES (3)..(4)..(35): Xaa is C or S

SEQ ID NO: 65761 - protein, 33 aa, Artificial Sequence
  Cyclic GFR-binding peptide
  MOD_RES (31)..(33): Xaa is C or S
PARLSPISILYKDAANNVVLKYHYDMVVEAXGX

SEQ ID NO: 65762 - protein, 20 aa, Artificial Sequence
  Cyclic GFR-binding peptide
EPISMLYLDENEKVVKFKYE

SEQ ID NO: 65763 - protein, 34 aa, Artificial Sequence; identical to SEQ ID NO: 20064
  Cyclic GFR-binding peptide
  MOD_RES (1)..(33): Xaa is C or S

SEQ ID NO: 65764 - protein, 23 aa, Artificial Sequence
  Cyclic GFR-binding peptide
EPISMLYLDENEKVVKFKYEDMV

SEQ ID NO: 65765 - protein, 28 aa, Artificial Sequence
  Cyclic GFR-binding peptide
  MOD_RES (27)..(27): Xaa is C or S
SPISVLYIDDSSNVIYKQYENMVVRSXG

SEQ ID NO: 65766 - protein, 34 aa, Artificial Sequence; identical to SEQ ID NO: 20065
  Cyclic GFR-binding peptide
  MOD_RES (2)..(3)..(34): Xaa is C or S

SEQ ID NO: 65767 - protein, 28 aa, Artificial Sequence
  Cyclic GFR-binding peptide
  MOD_RES (2)..(3): Xaa is C or S
AXXVPTELSPISMLYIDENEKVVYKQYE

SEQ ID NO: 65768 - protein, 33 aa, Artificial Sequence; identical to SEQ ID NO: 20072
  Cyclic GFR-binding peptide
  MOD_RES (2)..(3): Xaa is C or S

SEQ ID NO: 65769 - protein, 29 aa, Artificial Sequence
  Cyclic GFR-binding peptide
PTELEPISMLYLDENEKVVKFKYEDMVVE

SEQ ID NO: 65770 - protein, 38 aa, Artificial Sequence; identical to SEQ ID NO: 20077
  Cyclic GFR-binding peptide
  MOD_RES (5)..(6)..(38): Xaa is C or S

SEQ ID NO: 65771 - protein, 34 aa, Artificial Sequence; identical to SEQ ID NO: 20081
  Cyclic GFR-binding peptide
  MOD_RES (1)..(2)..(34): Xaa is C or S

SEQ ID NO: 65772 - protein, 32 aa, Artificial Sequence
  Cyclic GFR-binding peptide
  MOD_RES (2)..(3): Xaa is C or S
PXXAPTKLEPISVLYLDDSSNVIKFKYENMVV

SEQ ID NO: 65773 - protein, 36 aa, Artificial Sequence; identical to SEQ ID NO: 20083
  Cyclic GFR-binding peptide
  MOD_RES (2)..(3)..(34)..(36): Xaa is C or S

SEQ ID NO: 65774 - protein, 30 aa, Artificial Sequence
  Cyclic GFR-binding peptide
  MOD_RES (3)..(4): Xaa is C or S
KAXXVPTKLSPISILYIDKGVVTYYKQYEG

SEQ ID NO: 65775 - protein, 28 aa, Artificial Sequence
  Cyclic GFR-binding peptide
  MOD_RES (1)..(2): Xaa is C or S
XXVPTKLNAISILYFDKGVVTYLKKYRG

SEQ ID NO: 65776 - protein, 26 aa, Artificial Sequence
  Cyclic GFR-binding peptide
NAISILYFDKGVVTYLKKYRGMAVSE

SEQ ID NO: 65777 - protein, 31 aa, Artificial Sequence; identical to SEQ ID NO: 20086
  Cyclic GFR-binding peptide
  MOD_RES (31)..(31): Xaa is C or S

SEQ ID NO: 65778 - protein, 24 aa, Artificial Sequence
  Cyclic GFR-binding peptide
PTKLEPISVLYLDSSNNVIKFKYE

SEQ ID NO: 65779 - protein, 22 aa, Artificial Sequence
  Cyclic GFR-binding peptide
SPISILYIVGRTPKVYKQYEMV

SEQ ID NO: 65780 - protein, 33 aa, Artificial Sequence; identical to SEQ ID NO: 20087
  Cyclic GFR-binding peptide
  MOD_RES (1)..(2)..(33): Xaa is C or S

SEQ ID NO: 65781 - protein, 30 aa, Artificial Sequence
  Cyclic GFR-binding peptide
PTKLSPISVLYIDDSSNVIYKQYENMVVRS

SEQ ID NO: 65782 - protein, 31 aa, Artificial Sequence
  Cyclic GFR-binding peptide
  MOD_RES (5)..(6): Xaa is C or S
VPKPXXAPTKLSPISVLYIDDSSNVIYKQYE

SEQ ID NO: 65783 - protein, 32 aa, Artificial Sequence
  Cyclic GFR-binding peptide
  MOD_RES (30)..(32): Xaa is C or S
KLEPISVLYLDDMGVPTKFKYEEGMSVAEXGX

SEQ ID NO: 65784 - protein, 34 aa, Artificial Sequence
  Cyclic GFR-binding peptide
  MOD_RES (5)..(6): Xaa is C or S
SASPXXVSQDLEPISILYLIGKTPKIKFKYEMIV

SEQ ID NO: 65785 - protein, 28 aa, Artificial Sequence
  Cyclic GFR-binding peptide
ELEPISMLYLDEYDKVVKFKYEEMVVEG

SEQ ID NO: 65786 - protein, 26 aa, Artificial Sequence
  Cyclic GFR-binding peptide
TELSPISMLYIDEYDKVVYKQYEEMV

SEQ ID NO: 65787 - protein, 29 aa, Artificial Sequence
  Cyclic GFR-binding peptide
PARLSPISILYKDAANNVVLKYHYDMVVE

SEQ ID NO: 65788 - protein, 31 aa, Artificial Sequence
  Cyclic GFR-binding peptide
  MOD_RES (2)..(3): Xaa is C or S
PXXVPQALEPISILYLVGRKPKVKFKYEMIV

SEQ ID NO: 65789 - protein, 36 aa, Artificial Sequence; identical to SEQ ID NO: 20109
  Cyclic GFR-binding peptide
  MOD_RES (3)..(4)..(35): Xaa is C or S

SEQ ID NO: 65790 - protein, 37 aa, Artificial Sequence; identical to SEQ ID NO: 20110
  Cyclic GFR-binding peptide
  MOD_RES (4)..(5)..(37): Xaa is C or S

SEQ ID NO: 65791 - protein, 32 aa, Artificial Sequence
  Cyclic GFR-binding peptide
  MOD_RES (29)..(31): Xaa is C or S
KLSPISILYIDKGVVTYYKQYEGMAVSEXGXR

SEQ ID NO: 65792 - protein, 31 aa, Artificial Sequence
  Cyclic GFR-binding peptide
  MOD_RES (31)..(31): Xaa is C or S
PTELSPISMLYIDEYDKVVYKQYEEMVVEGX

SEQ ID NO: 65793 - protein, 29 aa, Artificial Sequence
  Cyclic GFR-binding peptide
  MOD_RES (28)..(28): Xaa is C or S
EPISVLYLDDMGVPTKFKYEEGMSVAEXG

SEQ ID NO: 65794 - protein, 35 aa, Artificial Sequence
  Cyclic GFR-binding peptide
  MOD_RES (6)..(7): Xaa is C or S
SIPKAXXVPTELSPISMLYIDEYDKVVYKQYEEMV

SEQ ID NO: 65795 - protein, 32 aa, Artificial Sequence
  Cyclic GFR-binding peptide
  MOD_RES (3)..(4): Xaa is C or S
KAXXVPTKLEPISVLYLDDMGVPTKFKYEEGM

SEQ ID NO: 65796 - protein, 35 aa, Artificial Sequence; identical to SEQ ID NO: 20115
  Cyclic GFR-binding peptide
  MOD_RES (3)..(4): Xaa is C or S

SEQ ID NO: 65797 - protein, 25 aa, Artificial Sequence
  Cyclic GFR-binding peptide
QALEPISILYLVGRKPKVKFKYEMI

SEQ ID NO: 65798 - protein, 28 aa, Artificial Sequence
  Cyclic GFR-binding peptide
  MOD_RES (3)..(3): Xaa is C or S
PTXAPTKLEPISVLYLDDSSNVIKFKYE

SEQ ID NO: 65799 - protein, 22 aa, Artificial Sequence
  Cyclic GFR-binding peptide
ELSPISMLYIDENEKVVYKQYE

SEQ ID NO: 65800 - protein, 34 aa, Artificial Sequence
  Cyclic GFR-binding peptide
  MOD_RES (4)..(5): Xaa is C or S
PASXXVPARLEPISILYLDAANNVVKFKYEDMVV

SEQ ID NO: 65801 - protein, 42 aa, Artificial Sequence; identical to SEQ ID NO: 20120
  Cyclic GFR-binding peptide
  MOD_RES (7)..(39)..(41): Xaa is C or S

SEQ ID NO: 65802 - protein, 31 aa, Artificial Sequence
  Cyclic GFR-binding peptide
  MOD_RES (31)..(31): Xaa is C or S
PARLNAISILYFDAANNVVLKKYRDMVVEAX

SEQ ID NO: 65803 - protein, 31 aa, Artificial Sequence
  Cyclic GFR-binding peptide
  MOD_RES (31)..(31): Xaa is C or S
PARLSPISILYKDAANNVVLKYHYDMVVEAX

SEQ ID NO: 65804 - protein, 24 aa, Artificial Sequence
  Cyclic GFR-binding peptide
ELSPISMLYIDEYDKVVYKQYEEM

SEQ ID NO: 65805 - protein, 40 aa, Artificial Sequence; identical to SEQ ID NO: 20123
  Cyclic GFR-binding peptide
  MOD_RES (5)..(6)..(37)..(39): Xaa is C or S

SEQ ID NO: 65806 - protein, 30 aa, Artificial Sequence
  Cyclic GFR-binding peptide
PTQLEPISVLYLDDSSNVIKFKYENMVVRA

SEQ ID NO: 65807 - protein, 32 aa, Artificial Sequence
  Cyclic GFR-binding peptide
  MOD_RES (31)..(31): Xaa is C or S
PTKLEPISVLYLDSSNNVIKFKYENMVVKAXG

SEQ ID NO: 65808 - protein, 35 aa, Artificial Sequence
  Cyclic GFR-binding peptide
  MOD_RES (5)..(6): Xaa is C or S
IPKAXXVPTELSPISMLYIDEYDKVVYKQYEEMVV

SEQ ID NO: 65809 - protein, 30 aa, Artificial Sequence; identical to SEQ ID NO: 20126
  Cyclic GFR-binding peptide

SEQ ID NO: 65810 - protein, 30 aa, Artificial Sequence
  Cyclic GFR-binding peptide
  MOD_RES (1)..(2): Xaa is C or S
XXVPARLNAISILYFDAANNVVLKKYRDMV

SEQ ID NO: 65811 - protein, 39 aa, Artificial Sequence; identical to SEQ ID NO: 20127
  Cyclic GFR-binding peptide
  MOD_RES (4)..(5)..(36)..(38): Xaa is C or S

SEQ ID NO: 65812 - protein, 38 aa, Artificial Sequence; identical to SEQ ID NO: 20129
  Cyclic GFR-binding peptide
  MOD_RES (5)..(6): Xaa is C or S

SEQ ID NO: 65813 - protein, 26 aa, Artificial Sequence
  Cyclic GFR-binding peptide
  MOD_RES (26)..(26): Xaa is C or S
EPISILYLVGRKPKVKFKYEMIVRSX

SEQ ID NO: 65814 - protein, 32 aa, Artificial Sequence
  Cyclic GFR-binding peptide
  MOD_RES (31)..(31): Xaa is C or S
PTKLSPISILYKDKGVVTYLKYHYGMAVSEXG

SEQ ID NO: 65815 - protein, 29 aa, Artificial Sequence
  Cyclic GFR-binding peptide
  MOD_RES (26)..(28): Xaa is C or S
EPISILYLIGKTPKIKFKYEMIVKSXKXS

SEQ ID NO: 65816 - protein, 20 aa, Artificial Sequence
  Cyclic GFR-binding peptide
SPISVLYIDSSNNVIYKQYE

SEQ ID NO: 65817 - protein, 21 aa, Artificial Sequence
  Cyclic GFR-binding peptide
EPISMLYLDEYDKVVKFKYEE

SEQ ID NO: 65818 - protein, 34 aa, Artificial Sequence; identical to SEQ ID NO: 20141
  Cyclic GFR-binding peptide
  MOD_RES (3)..(4): Xaa is C or S

SEQ ID NO: 65819 - protein, 36 aa, Artificial Sequence; identical to SEQ ID NO: 20140
  Cyclic GFR-binding peptide
  MOD_RES (4)..(5)..(36): Xaa is C or S

SEQ ID NO: 65820 - protein, 36 aa, Artificial Sequence; identical to SEQ ID NO: 20143
  Cyclic GFR-binding peptide
  MOD_RES (3)..(4)..(36): Xaa is C or S

SEQ ID NO: 65821 - protein, 30 aa, Artificial Sequence
  Cyclic GFR-binding peptide
  MOD_RES (1)..(1): Xaa is C or S
XVSQDLEPISILYLIGKTPKIKFKYEMIVK

SEQ ID NO: 65822 - protein, 23 aa, Artificial Sequence
  Cyclic GFR-binding peptide
KLSPISVLYIDDSSNVIYKQYEN

SEQ ID NO: 65823 - protein, 38 aa, Artificial Sequence; identical to SEQ ID NO: 20147
  Cyclic GFR-binding peptide
  MOD_RES (6)..(7)..(38): Xaa is C or S

SEQ ID NO: 65824 - protein, 36 aa, Artificial Sequence; identical to SEQ ID NO: 20149
  Cyclic GFR-binding peptide
  MOD_RES (1)..(33)..(35): Xaa is C or S

SEQ ID NO: 65825 - protein, 34 aa, Artificial Sequence; identical to SEQ ID NO: 20150
  Cyclic GFR-binding peptide
  MOD_RES (2)..(3): Xaa is C or S

SEQ ID NO: 65826 - protein, 28 aa, Artificial Sequence
  Cyclic GFR-binding peptide
TKLEPISVLYLDSSNNVIKFKYENMVVK

SEQ ID NO: 65827 - protein, 29 aa, Artificial Sequence
  Cyclic GFR-binding peptide
VSQDLEPISILYLIGKTPKIKFKYEMIVK

SEQ ID NO: 65828 - protein, 21 aa, Artificial Sequence
  Cyclic GFR-binding peptide
LNAISILYFDKGVVTYLKKYR

SEQ ID NO: 65829 - protein, 36 aa, Artificial Sequence
  Cyclic GFR-binding peptide
  MOD_RES (6)..(7): Xaa is C or S
AVPKAXXAPTKLSPISVLYIDSSNNVIYKQYENMVV

SEQ ID NO: 65830 - protein, 30 aa, Artificial Sequence
  Cyclic GFR-binding peptide
  MOD_RES (27)..(29): Xaa is C or S
EPISMLYLDEYDKVVKFKYEEMVVEGXGXR

SEQ ID NO: 65831 - protein, 36 aa, Artificial Sequence; identical to SEQ ID NO: 20161
  Cyclic GFR-binding peptide
  MOD_RES (4)..(5)..(36): Xaa is C or S

SEQ ID NO: 65832 - protein, 35 aa, Artificial Sequence; identical to SEQ ID NO: 20163
  Cyclic GFR-binding peptide
  MOD_RES (3)..(4)..(35): Xaa is C or S

SEQ ID NO: 65833 - protein, 31 aa, Artificial Sequence
  Cyclic GFR-binding peptide
  MOD_RES (29)..(31): Xaa is C or S
QDLSPISILYIIGKTPKIYKQYEMIVKSXKX

SEQ ID NO: 65834 - protein, 40 aa, Artificial Sequence; identical to SEQ ID NO: 20167
  Cyclic GFR-binding peptide
  MOD_RES (5)..(6)..(38)..(40): Xaa is C or S

SEQ ID NO: 65835 - protein, 29 aa, Artificial Sequence
  Cyclic GFR-binding peptide
VPARLNAISILYFDAANNVVLKKYRDMVV

SEQ ID NO: 65836 - protein, 26 aa, Artificial Sequence
  Cyclic GFR-binding peptide
TELEPISMLYLDENEKVVKFKYEDMV

SEQ ID NO: 65837 - protein, 24 aa, Artificial Sequence
  Cyclic GFR-binding peptide
TELEPISMLYLDENEKVVKFKYED

SEQ ID NO: 65838 - protein, 39 aa, Artificial Sequence; identical to SEQ ID NO: 20170
  Cyclic GFR-binding peptide
  MOD_RES (3)..(4)..(36)..(38): Xaa is C or S

SEQ ID NO: 65839 - protein, 33 aa, Artificial Sequence
  Cyclic GFR-binding peptide
  MOD_RES (6)..(7): Xaa is C or S
ASASPXXVPQDLEPISILYLVGRTPKVKFKYEM

SEQ ID NO: 65840 - protein, 36 aa, Artificial Sequence; identical to SEQ ID NO: 20173
  Cyclic GFR-binding peptide
  MOD_RES (3)..(4)..(36): Xaa is C or S

SEQ ID NO: 65841 - protein, 38 aa, Artificial Sequence; identical to SEQ ID NO: 20174
  Cyclic GFR-binding peptide
  MOD_RES (6)..(7): Xaa is C or S

SEQ ID NO: 65842 - protein, 33 aa, Artificial Sequence
  Cyclic GFR-binding peptide
  MOD_RES (4)..(5): Xaa is C or S
PKPXXAPTKLSPISVLYIDDSSNVIYKQYENMV

SEQ ID NO: 65843 - protein, 37 aa, Artificial Sequence; identical to SEQ ID NO: 20176
  Cyclic GFR-binding peptide
  MOD_RES (2)..(3)..(35)..(37): Xaa is C or S

SEQ ID NO: 65844 - protein, 38 aa, Artificial Sequence; identical to SEQ ID NO: 20175
  Cyclic GFR-binding peptide
  MOD_RES (3)..(4)..(36)..(38): Xaa is C or S

SEQ ID NO: 65845 - protein, 28 aa, Artificial Sequence
  Cyclic GFR-binding peptide
  MOD_RES (2)..(3): Xaa is C or S
SXXVPARLEPISILYLDAANNVVKFKYE

SEQ ID NO: 65846 - protein, 31 aa, Artificial Sequence; identical to SEQ ID NO: 20178
  Cyclic GFR-binding peptide

SEQ ID NO: 65847 - protein, 36 aa, Artificial Sequence
  Cyclic GFR-binding peptide
  MOD_RES (6)..(7): Xaa is C or S
AAPASXXVPARLNAISILYFDAANNVVLKKYRDMVV

SEQ ID NO: 65848 - protein, 23 aa, Artificial Sequence
  Cyclic GFR-binding peptide
KLSPISVLYIDDMGVPTYKQYEE

SEQ ID NO: 65849 - protein, 33 aa, Artificial Sequence
  Cyclic GFR-binding peptide
  MOD_RES (4)..(5): Xaa is C or S
ASPXXVPQDLEPISILYLVGRTPKVKFKYEMVV

SEQ ID NO: 65850 - protein, 37 aa, Artificial Sequence; identical to SEQ ID NO: 20180
  Cyclic GFR-binding peptide
  MOD_RES (5)..(6): Xaa is C or S

SEQ ID NO: 65851 - protein, 29 aa, Artificial Sequence
  Cyclic GFR-binding peptide
  MOD_RES (1)..(1): Xaa is C or S
XVPTELSPISMLYIDENEKVVYKQYEDMV

SEQ ID NO: 65852 - protein, 33 aa, Artificial Sequence
  Cyclic GFR-binding peptide
  MOD_RES (4)..(5): Xaa is C or S
PKPXXAPTQLEPISVLYLDDSSNVIKFKYENMV

SEQ ID NO: 65853 - protein, 32 aa, Artificial Sequence
  Cyclic GFR-binding peptide
  MOD_RES (6)..(7): Xaa is C or S
ASAAPXXVPQALEPISILYLVGRKPKVKFKYE

SEQ ID NO: 65854 - protein, 31 aa, Artificial Sequence; identical to SEQ ID NO: 20185
  Cyclic GFR-binding peptide

SEQ ID NO: 65855 - protein, 32 aa, Artificial Sequence
  Cyclic GFR-binding peptide
  MOD_RES (30)..(32): Xaa is C or S
TKLSPISVLYIDSSNNVIYKQYENMVVKAXGX

SEQ ID NO: 65856 - protein, 28 aa, Artificial Sequence
  Cyclic GFR-binding peptide
  MOD_RES (2)..(3): Xaa is C or S
SXXVPARLNAISILYFDAANNVVLKKYR

SEQ ID NO: 65857 - protein, 28 aa, Artificial Sequence
  Cyclic GFR-binding peptide
PTKLSPISILYKDKGVVTYLKYHYGMAV

SEQ ID NO: 65858 - protein, 35 aa, Artificial Sequence; identical to SEQ ID NO: 20190
  Cyclic GFR-binding peptide
  MOD_RES (32)..(34): Xaa is C or S

SEQ ID NO: 65859 - protein, 34 aa, Artificial Sequence; identical to SEQ ID NO: 20192
  Cyclic GFR-binding peptide
  MOD_RES (1)..(33): Xaa is C or S

SEQ ID NO: 65860 - protein, 35 aa, Artificial Sequence
  Cyclic GFR-binding peptide
  MOD_RES (3)..(4): Xaa is C or S
KAXXVPTKLEPISVLYLDDMGVPTKFKYEEGMSVA

SEQ ID NO: 65861 - protein, 28 aa, Artificial Sequence
  Cyclic GFR-binding peptide
  MOD_RES (2)..(3): Xaa is C or S
AXXVPTKLSPISILYIDKGVVTYYKQYE

SEQ ID NO: 65862 - protein, 30 aa, Artificial Sequence
  Cyclic GFR-binding peptide
  MOD_RES (30)..(30): Xaa is C or S
ARLSPISILYKDAANNVVLKYHYDMVVEAX

SEQ ID NO: 65863 - protein, 30 aa, Artificial Sequence
  Cyclic GFR-binding peptide
  MOD_RES (1)..(2): Xaa is C or S
XXVPTKLSPISILYKDKGVVTYLKYHYGMA

SEQ ID NO: 65864 - protein, 38 aa, Artificial Sequence; identical to SEQ ID NO: 20197
  Cyclic GFR-binding peptide
  MOD_RES (6)..(7)..(38): Xaa is C or S

SEQ ID NO: 65865 - protein, 31 aa, Artificial Sequence; identical to SEQ ID NO: 20198
  Cyclic GFR-binding peptide
  MOD_RES (1)..(1): Xaa is C or S

SEQ ID NO: 65866 - protein, 25 aa, Artificial Sequence
  Cyclic GFR-binding peptide
DLEPISILYLIGKTPKIKFKYEMIV

SEQ ID NO: 65867 - protein, 36 aa, Artificial Sequence; identical to SEQ ID NO: 20199
  Cyclic GFR-binding peptide
  MOD_RES (33)..(35): Xaa is C or S

SEQ ID NO: 65868 - protein, 26 aa, Artificial Sequence
  Cyclic GFR-binding peptide
  MOD_RES (1)..(1): Xaa is C or S
XVPTELSPISMLYIDENEKVVYKQYE

SEQ ID NO: 65869 - protein, 32 aa, Artificial Sequence; identical to SEQ ID NO: 20203
  Cyclic GFR-binding peptide
  MOD_RES (2)..(2): Xaa is C or S

SEQ ID NO: 65870 - protein, 22 aa, Artificial Sequence
  Cyclic GFR-binding peptide
SPISILYIIGKTPKIYKQYEMI

SEQ ID NO: 65871 - protein, 34 aa, Artificial Sequence
  Cyclic GFR-binding peptide
  MOD_RES (6)..(7): Xaa is C or S
KVGKAXXVPTKLEPISVLYLDDMGVPTKFKYEEG

SEQ ID NO: 65872 - protein, 34 aa, Artificial Sequence; identical to SEQ ID NO: 20206
  Cyclic GFR-binding peptide
  MOD_RES (2)..(34): Xaa is C or S

SEQ ID NO: 65873 - protein, 22 aa, Artificial Sequence
  Cyclic GFR-binding peptide
EPISILYLVGRKPKVKFKYEMI

SEQ ID NO: 65874 - protein, 27 aa, Artificial Sequence
  Cyclic GFR-binding peptide
  MOD_RES (1)..(1): Xaa is C or S
XVPQALEPISILYLVGRKPKVKFKYEM

SEQ ID NO: 65875 - protein, 31 aa, Artificial Sequence; identical to SEQ ID NO: 20207
  Cyclic GFR-binding peptide
  MOD_RES (1)..(1): Xaa is C or S

SEQ ID NO: 65876 - protein, 27 aa, Artificial Sequence
  Cyclic GFR-binding peptide
ELEPISMLYLDENEKVVKFKYEDMVVE

SEQ ID NO: 65877 - protein, 26 aa, Artificial Sequence
  Cyclic GFR-binding peptide
LSPISILYKDKGVVTYLKYHYGMAVS

SEQ ID NO: 65878 - protein, 27 aa, Artificial Sequence
  Cyclic GFR-binding peptide
PTELEPISMLYLDEYDKVVKFKYEEMV

SEQ ID NO: 65879 - protein, 35 aa, Artificial Sequence
  Cyclic GFR-binding peptide
  MOD_RES (32)..(34): Xaa is C or S
PTKLEPISVLYLDDMGVPTKFKYEEGMSVAEXGXR

SEQ ID NO: 65880 - protein, 37 aa, Artificial Sequence; identical to SEQ ID NO: 20210
  Cyclic GFR-binding peptide
  MOD_RES (5)..(6): Xaa is C or S

SEQ ID NO: 65881 - protein, 27 aa, Artificial Sequence
  Cyclic GFR-binding peptide
TKLSPISVLYIDDMGVPTYKQYEEGMS

SEQ ID NO: 65882 - protein, 20 aa, Artificial Sequence
  Cyclic GFR-binding peptide
EPISILYLDKGVVTYKFKYE

SEQ ID NO: 65883 - protein, 36 aa, Artificial Sequence; identical to SEQ ID NO: 20217
  Cyclic GFR-binding peptide
  MOD_RES (2)..(3)..(36): Xaa is C or S

SEQ ID NO: 65884 - protein, 25 aa, Artificial Sequence
  Cyclic GFR-binding peptide
SPISILYIIGKTPKIYKQYEMIVKS

SEQ ID NO: 65885 - protein, 32 aa, Artificial Sequence
  Cyclic GFR-binding peptide
  MOD_RES (4)..(5): Xaa is C or S
PASXXVPARLSPISILYKDAANNVVLKYHYDM

SEQ ID NO: 65886 - protein, 32 aa, Artificial Sequence
  Cyclic GFR-binding peptide
  MOD_RES (30)..(32): Xaa is C or S
TELSPISMLYIDENEKVVYKQYEDMVVEGXGX

SEQ ID NO: 65887 - protein, 34 aa, Artificial Sequence
  Cyclic GFR-binding peptide
  MOD_RES (4)..(5): Xaa is C or S
PKPXXAPTKLEPISVLYLDDSSNVIKFKYENMVV

SEQ ID NO: 65888 - protein, 30 aa, Artificial Sequence
  Cyclic GFR-binding peptide
  MOD_RES (29)..(29): Xaa is C or S
QLEPISVLYLDDSSNVIKFKYENMVVRAXG

SEQ ID NO: 65889 - protein, 33 aa, Artificial Sequence; identical to SEQ ID NO: 20226
  Cyclic GFR-binding peptide
  MOD_RES (32)..(32): Xaa is C or S

SEQ ID NO: 65890 - protein, 37 aa, Artificial Sequence; identical to SEQ ID NO: 20227
  Cyclic GFR-binding peptide
  MOD_RES (1)..(2)..(34)..(36): Xaa is C or S

SEQ ID NO: 65891 - protein, 40 aa, Artificial Sequence; identical to SEQ ID NO: 20228
  Cyclic GFR-binding peptide
  MOD_RES (6)..(7)..(39): Xaa is C or S

SEQ ID NO: 65892 - protein, 39 aa, Artificial Sequence; identical to SEQ ID NO: 20231
  Cyclic GFR-binding peptide
  MOD_RES (5)..(6)..(38): Xaa is C or S

SEQ ID NO: 65893 - protein, 31 aa, Artificial Sequence
  Cyclic GFR-binding peptide
  MOD_RES (1)..(2): Xaa is C or S
XXVPQALEPISILYLVGRKPKVKFKYEMIVR

SEQ ID NO: 65894 - protein, 29 aa, Artificial Sequence
  Cyclic GFR-binding peptide
  MOD_RES (29)..(29): Xaa is C or S
QDLEPISILYLVGRTPKVKFKYEMVVKSX

SEQ ID NO: 65895 - protein, 35 aa, Artificial Sequence; identical to SEQ ID NO: 20232
  Cyclic GFR-binding peptide
  MOD_RES (2)..(3)..(35): Xaa is C or S

SEQ ID NO: 65896 - protein, 30 aa, Artificial Sequence; identical to SEQ ID NO: 20235
  Cyclic GFR-binding peptide

SEQ ID NO: 65897 - protein, 29 aa, Artificial Sequence
  Cyclic GFR-binding peptide
VPARLSPISILYKDAANNVVLKYHYDMVV

SEQ ID NO: 65898 - protein, 36 aa, Artificial Sequence; identical to SEQ ID NO: 20236
  Cyclic GFR-binding peptide
  MOD_RES (3)..(4)..(35): Xaa is C or S

SEQ ID NO: 65899 - protein, 26 aa, Artificial Sequence
  Cyclic GFR-binding peptide
  MOD_RES (1)..(1): Xaa is C or S
XVSQDLEPISILYLIGKTPKIKFKYE

SEQ ID NO: 65900 - protein, 35 aa, Artificial Sequence
  Cyclic GFR-binding peptide
  MOD_RES (5)..(6): Xaa is C or S
IPKAXXVPTELEPISMLYLDEYDKVVKFKYEEMVV

SEQ ID NO: 65901 - protein, 27 aa, Artificial Sequence
  Cyclic GFR-binding peptide
KLSPISVLYIDDSSNVIYKQYENMVVR

SEQ ID NO: 65902 - protein, 31 aa, Artificial Sequence
  Cyclic GFR-binding peptide
  MOD_RES (4)..(5): Xaa is C or S
ASPXXVPQDLSPISILYIVGRTPKVYKQYEM

SEQ ID NO: 65903 - protein, 33 aa, Artificial Sequence
  Cyclic GFR-binding peptide
  MOD_RES (5)..(6): Xaa is C or S
ASKAXXVPTKLSPISILYKDKGVVTYLKYHYGM

SEQ ID NO: 65904 - protein, 27 aa, Artificial Sequence
  Cyclic GFR-binding peptide
  MOD_RES (1)..(1): Xaa is C or S
XVPTKLEPISVLYLDDMGVPTKFKYEE

SEQ ID NO: 65905 - protein, 36 aa, Artificial Sequence; identical to SEQ ID NO: 20243
  Cyclic GFR-binding peptide
  MOD_RES (1)..(2)..(34)..(36): Xaa is C or S

SEQ ID NO: 65906 - protein, 28 aa, Artificial Sequence
  Cyclic GFR-binding peptide
  MOD_RES (28)..(28): Xaa is C or S
LSPISILYIDKGVVTYYKQYEGMAVSEX

SEQ ID NO: 65907 - protein, 37 aa, Artificial Sequence; identical to SEQ ID NO: 20245
  Cyclic GFR-binding peptide
  MOD_RES (7)..(7): Xaa is C or S

SEQ ID NO: 65908 - protein, 26 aa, Artificial Sequence
  Cyclic GFR-binding peptide
VPQALSPISILYIVGRKPKVYKQYEM

SEQ ID NO: 65909 - protein, 30 aa, Artificial Sequence
  Cyclic GFR-binding peptide
  MOD_RES (30)..(30): Xaa is C or S
ARLNAISILYFDAANNVVLKKYRDMVVEAX

SEQ ID NO: 65910 - protein, 35 aa, Artificial Sequence; identical to SEQ ID NO: 20247
  Cyclic GFR-binding peptide
  MOD_RES (2)..(3)..(35): Xaa is C or S

SEQ ID NO: 65911 - protein, 38 aa, Artificial Sequence; identical to SEQ ID NO: 20249
  Cyclic GFR-binding peptide
  MOD_RES (3)..(4)..(35)..(37): Xaa is C or S

SEQ ID NO: 65912 - protein, 35 aa, Artificial Sequence; identical to SEQ ID NO: 20250
  Cyclic GFR-binding peptide
  MOD_RES (2)..(3)..(35): Xaa is C or S

SEQ ID NO: 65913 - protein, 24 aa, Artificial Sequence
  Cyclic GFR-binding peptide
EPISVLYLDSSNNVIKFKYENMVV

SEQ ID NO: 65914 - protein, 28 aa, Artificial Sequence
  Cyclic GFR-binding peptide
LEPISVLYLDDMGVPTKFKYEEGMSVAE

SEQ ID NO: 65915 - protein, 32 aa, Artificial Sequence; identical to SEQ ID NO: 20255
  Cyclic GFR-binding peptide
  MOD_RES (32)..(32): Xaa is C or S

SEQ ID NO: 65916 - protein, 32 aa, Artificial Sequence; identical to SEQ ID NO: 20257
  Cyclic GFR-binding peptide
  MOD_RES (1)..(1): Xaa is C or S

SEQ ID NO: 65917 - protein, 28 aa, Artificial Sequence
  Cyclic GFR-binding peptide
VPTELSPISMLYIDEYDKVVYKQYEEMV

SEQ ID NO: 65918 - protein, 23 aa, Artificial Sequence
  Cyclic GFR-binding peptide
LSPISILYIVGRKPKVYKQYEMI

SEQ ID NO: 65919 - protein, 29 aa, Artificial Sequence
  Cyclic GFR-binding peptide
  MOD_RES (1)..(1): Xaa is C or S
XAPTKLEPISVLYLDDSSNVIKFKYENMV

SEQ ID NO: 65920 - protein, 23 aa, Artificial Sequence
  Cyclic GFR-binding peptide
QALEPISILYLVGRKPKVKFKYE

SEQ ID NO: 65921 - protein, 32 aa, Artificial Sequence
  Cyclic GFR-binding peptide
  MOD_RES (5)..(6): Xaa is C or S
IPKAXXVPTELEPISMLYLDENEKVVKFKYED

SEQ ID NO: 65922 - protein, 37 aa, Artificial Sequence; identical to SEQ ID NO: 20261
  Cyclic GFR-binding peptide
  MOD_RES (3)..(4)..(35)..(37): Xaa is C or S

SEQ ID NO: 65923 - protein, 23 aa, Artificial Sequence
  Cyclic GFR-binding peptide
ARLNAISILYFDAANNVVLKKYR

SEQ ID NO: 65924 - protein, 28 aa, Artificial Sequence
  Cyclic GFR-binding peptide
  MOD_RES (1)..(2): Xaa is C or S
XXVPTKLSPISILYIDKGVVTYYKQYEG

SEQ ID NO: 65925 - protein, 21 aa, Artificial Sequence
  Cyclic GFR-binding peptide
LEPISILYLVGRKPKVKFKYE

SEQ ID NO: 65926 - protein, 30 aa, Artificial Sequence
  Cyclic GFR-binding peptide
  MOD_RES (3)..(4): Xaa is C or S
KAXXVPTELEPISMLYLDEYDKVVKFKYEE

SEQ ID NO: 65927 - protein, 27 aa, Artificial Sequence
  Cyclic GFR-binding peptide
PQDLSPISILYIVGRTPKVYKQYEMVV

SEQ ID NO: 65928 - protein, 28 aa, Artificial Sequence
  Cyclic GFR-binding peptide
  MOD_RES (1)..(2): Xaa is C or S
XXAPTQLEPISVLYLDDSSNVIKFKYEN

SEQ ID NO: 65929 - protein, 34 aa, Artificial Sequence
  Cyclic GFR-binding peptide
  MOD_RES (6)..(7): Xaa is C or S
ASAAPXXVPQALSPISILYIVGRKPKVYKQYEMI

SEQ ID NO: 65930 - protein, 36 aa, Artificial Sequence; identical to SEQ ID NO: 20264
  Cyclic GFR-binding peptide
  MOD_RES (4)..(5): Xaa is C or S

SEQ ID NO: 65931 - protein, 35 aa, Artificial Sequence; identical to SEQ ID NO: 20267
  Cyclic GFR-binding peptide
  MOD_RES (3)..(4): Xaa is C or S

SEQ ID NO: 65932 - protein, 26 aa, Artificial Sequence
  Cyclic GFR-binding peptide
TKLSPISVLYIDSSNNVIYKQYENMV

SEQ ID NO: 65933 - protein, 24 aa, Artificial Sequence
  Cyclic GFR-binding peptide
TKLEPISVLYLDSSNNVIKFKYEN

SEQ ID NO: 65934 - protein, 36 aa, Artificial Sequence; identical to SEQ ID NO: 20273
  Cyclic GFR-binding peptide
  MOD_RES (1)..(2)..(34)..(36): Xaa is C or S

SEQ ID NO: 65935 - protein, 37 aa, Artificial Sequence; identical to SEQ ID NO: 20279
  Cyclic GFR-binding peptide
  MOD_RES (5)..(6): Xaa is C or S

SEQ ID NO: 65936 - protein, 27 aa, Artificial Sequence
  Cyclic GFR-binding peptide
  MOD_RES (1)..(1): Xaa is C or S
XVPQDLEPISILYLVGRTPKVKFKYEM

SEQ ID NO: 65937 - protein, 30 aa, Artificial Sequence
  Cyclic GFR-binding peptide
  MOD_RES (1)..(2): Xaa is C or S
XXAPTKLEPISVLYLDSSNNVIKFKYENMV

SEQ ID NO: 65938 - protein, 24 aa, Artificial Sequence
  Cyclic GFR-binding peptide
KLSPISVLYIDDMGVPTYKQYEEG

SEQ ID NO: 65939 - protein, 24 aa, Artificial Sequence
  Cyclic GFR-binding peptide
RLSPISILYKDAANNVVLKYHYDM

SEQ ID NO: 65940 - protein, 33 aa, Artificial Sequence
  Cyclic GFR-binding peptide
  MOD_RES (1)..(2): Xaa is C or S
XXVPTKLSPISVLYIDDMGVPTYKQYEEGMSVA

SEQ ID NO: 65941 - protein, 28 aa, Artificial Sequence
  Cyclic GFR-binding peptide
  MOD_RES (27)..(27): Xaa is C or S
LSPISILYIIGKTPKIYKQYEMIVKSXK

SEQ ID NO: 65942 - protein, 30 aa, Artificial Sequence
  Cyclic GFR-binding peptide
  MOD_RES (29)..(29): Xaa is C or S
KLSPISVLYIDSSNNVIYKQYENMVVKAXG

SEQ ID NO: 65943 - protein, 33 aa, Artificial Sequence; identical to SEQ ID NO: 20284
  Cyclic GFR-binding peptide
  MOD_RES (2)..(3): Xaa is C or S

SEQ ID NO: 65944 - protein, 25 aa, Artificial Sequence
  Cyclic GFR-binding peptide
TELEPISMLYLDENEKVVKFKYEDM

SEQ ID NO: 65945 - protein, 32 aa, Artificial Sequence; identical to SEQ ID NO: 20287
  Cyclic GFR-binding peptide
  MOD_RES (1)..(1): Xaa is C or S

SEQ ID NO: 65946 - protein, 32 aa, Artificial Sequence
  Cyclic GFR-binding peptide
  MOD_RES (4)..(5): Xaa is C or S
PKAXXVPTELEPISMLYLDEYDKVVKFKYEEM

SEQ ID NO: 65947 - protein, 24 aa, Artificial Sequence
  Cyclic GFR-binding peptide
PTKLEPISVLYLDDMGVPTKFKYE

SEQ ID NO: 65948 - protein, 30 aa, Artificial Sequence
  Cyclic GFR-binding peptide
  MOD_RES (29)..(29): Xaa is C or S
QDLEPISILYLIGKTPKIKFKYEMIVKSXK

SEQ ID NO: 65949 - protein, 25 aa, Artificial Sequence
  Cyclic GFR-binding peptide
ELSPISMLYIDENEKVVYKQYEDMV

SEQ ID NO: 65950 - protein, 22 aa, Artificial Sequence
  Cyclic GFR-binding peptide
RLNAISILYFDAANNVVLKKYR

SEQ ID NO: 65951 - protein, 32 aa, Artificial Sequence; identical to SEQ ID NO: 20293
  Cyclic GFR-binding peptide
  MOD_RES (1)..(2): Xaa is C or S

SEQ ID NO: 65952 - protein, 27 aa, Artificial Sequence
  Cyclic GFR-binding peptide
  MOD_RES (1)..(2): Xaa is C or S
XXVSQDLEPISILYLIGKTPKIKFKYE

SEQ ID NO: 65953 - protein, 25 aa, Artificial Sequence
  Cyclic GFR-binding peptide
KLEPISVLYLDSSNNVIKFKYENMV

SEQ ID NO: 65954 - protein, 24 aa, Artificial Sequence
  Cyclic GFR-binding peptide
TKLSPISVLYIDSSNNVIYKQYEN

SEQ ID NO: 65955 - protein, 37 aa, Artificial Sequence; identical to SEQ ID NO: 20296
  Cyclic GFR-binding peptide
  MOD_RES (1)..(2)..(34)..(36): Xaa is C or S

SEQ ID NO: 65956 - protein, 36 aa, Artificial Sequence; identical to SEQ ID NO: 20297
  Cyclic GFR-binding peptide
  MOD_RES (6)..(6): Xaa is C or S

SEQ ID NO: 65957 - protein, 30 aa, Artificial Sequence
  Cyclic GFR-binding peptide
  MOD_RES (28)..(30): Xaa is C or S
ALSPISILYIVGRKPKVYKQYEMIVRSXKX

SEQ ID NO: 65958 - protein, 33 aa, Artificial Sequence; identical to SEQ ID NO: 20299
  Cyclic GFR-binding peptide
  MOD_RES (2)..(3): Xaa is C or S

SEQ ID NO: 65959 - protein, 39 aa, Artificial Sequence; identical to SEQ ID NO: 20300
  Cyclic GFR-binding peptide
  MOD_RES (5)..(6)..(38): Xaa is C or S

SEQ ID NO: 65960 - protein, 38 aa, Artificial Sequence; identical to SEQ ID NO: 20301
  Cyclic GFR-binding peptide
  MOD_RES (4)..(5)..(38): Xaa is C or S

SEQ ID NO: 65961 - protein, 28 aa, Artificial Sequence
  Cyclic GFR-binding peptide
  MOD_RES (27)..(27): Xaa is C or S
SPISMLYIDENEKVVYKQYEDMVVEGXG

SEQ ID NO: 65962 - protein, 29 aa, Artificial Sequence
  Cyclic GFR-binding peptide
ARLSPISILYKDAANNVVLKYHYDMVVEA

SEQ ID NO: 65963 - protein, 24 aa, Artificial Sequence
  Cyclic GFR-binding peptide
EPISILYLVGRKPKVKFKYEMIVR

SEQ ID NO: 65964 - protein, 33 aa, Artificial Sequence
  Cyclic GFR-binding peptide
  MOD_RES (6)..(7): Xaa is C or S
AAPASXXVPARLNAISILYFDAANNVVLKKYRD

SEQ ID NO: 65965 - protein, 31 aa, Artificial Sequence
  Cyclic GFR-binding peptide
VPTKLEPISVLYLDDMGVPTKFKYEEGMSVA

SEQ ID NO: 65966 - protein, 33 aa, Artificial Sequence; identical to SEQ ID NO: 20309
  Cyclic GFR-binding peptide
  MOD_RES (32)..(32): Xaa is C or S

SEQ ID NO: 65967 - protein, 32 aa, Artificial Sequence; identical to SEQ ID NO: 20310
  Cyclic GFR-binding peptide
  MOD_RES (1)..(32): Xaa is C or S

SEQ ID NO: 65968 - protein, 20 aa, Artificial Sequence
  Cyclic GFR-binding peptide
SPISILYIIGKTPKIYKQYE

SEQ ID NO: 65969 - protein, 30 aa, Artificial Sequence
  Cyclic GFR-binding peptide
  MOD_RES (2)..(3): Xaa is C or S
AXXVPTELEPISMLYLDENEKVVKFKYEDM

SEQ ID NO: 65970 - protein, 36 aa, Artificial Sequence
  Cyclic GFR-binding peptide
  MOD_RES (6)..(7): Xaa is C or S
AVPKAXXAPTKLEPISVLYLDSSNNVIKFKYENMVV

SEQ ID NO: 65971 - protein, 26 aa, Artificial Sequence
  Cyclic GFR-binding peptide
KLEPISVLYLDSSNNVIKFKYENMVV

SEQ ID NO: 65972 - protein, 26 aa, Artificial Sequence
  Cyclic GFR-binding peptide
TKLSPISILYKDKGVVTYLKYHYGMA

SEQ ID NO: 65973 - protein, 32 aa, Artificial Sequence
  Cyclic GFR-binding peptide
  MOD_RES (6)..(7): Xaa is C or S
KVGKAXXVPTKLSPISVLYIDDMGVPTYKQYE

SEQ ID NO: 65974 - protein, 26 aa, Artificial Sequence
  Cyclic GFR-binding peptide
TQLSPISVLYIDDSSNVIYKQYENMV

SEQ ID NO: 65975 - protein, 28 aa, Artificial Sequence
  Cyclic GFR-binding peptide
VPTELEPISMLYLDENEKVVKFKYEDMV

SEQ ID NO: 65976 - protein, 25 aa, Artificial Sequence
  Cyclic GFR-binding peptide
EPISILYLVGRKPKVKFKYEMIVRS

SEQ ID NO: 65977 - protein, 38 aa, Artificial Sequence; identical to SEQ ID NO: 20319
  Cyclic GFR-binding peptide
  MOD_RES (5)..(6)..(38): Xaa is C or S

SEQ ID NO: 65978 - protein, 33 aa, Artificial Sequence
  Cyclic GFR-binding peptide
  MOD_RES (4)..(4): Xaa is C or S
KPTXAPTKLEPISVLYLDDSSNVIKFKYENMVV

SEQ ID NO: 65979 - protein, 28 aa, Artificial Sequence
  Cyclic GFR-binding peptide
  MOD_RES (28)..(28): Xaa is C or S
LSPISVLYIDSSNNVIYKQYENMVVKAX

SEQ ID NO: 65980 - protein, 25 aa, Artificial Sequence
  Cyclic GFR-binding peptide
PTKLSPISILYKDKGVVTYLKYHYG

SEQ ID NO: 65981 - protein, 24 aa, Artificial Sequence
  Cyclic GFR-binding peptide
TELSPISMLYIDENEKVVYKQYED

SEQ ID NO: 65982 - protein, 34 aa, Artificial Sequence
  Cyclic GFR-binding peptide
  MOD_RES (4)..(5): Xaa is C or S
AAPXXVPQALEPISILYLVGRKPKVKFKYEMIVR

SEQ ID NO: 65983 - protein, 28 aa, Artificial Sequence
  Cyclic GFR-binding peptide
APTKLSPISVLYIDDSSNVIYKQYENMV

SEQ ID NO: 65984 - protein, 29 aa, Artificial Sequence
  Cyclic GFR-binding peptide
  MOD_RES (28)..(28): Xaa is C or S
LSPISILYKDKGVVTYLKYHYGMAVSEXG

SEQ ID NO: 65985 - protein, 30 aa, Artificial Sequence
  Cyclic GFR-binding peptide
  MOD_RES (1)..(2): Xaa is C or S
XXAPTQLEPISVLYLDDSSNVIKFKYENMV

SEQ ID NO: 65986 - protein, 29 aa, Artificial Sequence
  Cyclic GFR-binding peptide
  MOD_RES (2)..(3): Xaa is C or S
PXXAPTKLSPISVLYIDDSSNVIYKQYEN

SEQ ID NO: 65987 - protein, 29 aa, Artificial Sequence
  Cyclic GFR-binding peptide
PTQLSPISVLYIDDSSNVIYKQYENMVVR

SEQ ID NO: 65988 - protein, 30 aa, Artificial Sequence
  Cyclic GFR-binding peptide
VPTKLSPISVLYIDDMGVPTYKQYEEGMSV

SEQ ID NO: 65989 - protein, 29 aa, Artificial Sequence
  Cyclic GFR-binding peptide
  MOD_RES (27)..(29): Xaa is C or S
SPISVLYIDSSNNVIYKQYENMVVKAXGX

SEQ ID NO: 65990 - protein, 27 aa, Artificial Sequence
  Cyclic GFR-binding peptide
  MOD_RES (1)..(1): Xaa is C or S
XVPTKLSPISVLYIDDMGVPTYKQYEE

SEQ ID NO: 65991 - protein, 27 aa, Artificial Sequence
  Cyclic GFR-binding peptide
PTKLSPISVLYIDDMGVPTYKQYEEGM

SEQ ID NO: 65992 - protein, 35 aa, Artificial Sequence; identical to SEQ ID NO: 20336
  Cyclic GFR-binding peptide
  MOD_RES (33)..(35): Xaa is C or S

SEQ ID NO: 65993 - protein, 32 aa, Artificial Sequence; identical to SEQ ID NO: 20337
  Cyclic GFR-binding peptide
  MOD_RES (32)..(32): Xaa is C or S

SEQ ID NO: 65994 - protein, 38 aa, Artificial Sequence; identical to SEQ ID NO: 20338
  Cyclic GFR-binding peptide
  MOD_RES (5)..(6)..(38): Xaa is C or S

SEQ ID NO: 65995 - protein, 26 aa, Artificial Sequence
  Cyclic GFR-binding peptide
LSPISILYIVGRTPKVYKQYEMVVKS

SEQ ID NO: 65996 - protein, 26 aa, Artificial Sequence
  Cyclic GFR-binding peptide
  MOD_RES (1)..(1): Xaa is C or S
XVPTKLSPISILYIDKGVVTYYKQYE

SEQ ID NO: 65997 - protein, 39 aa, Artificial Sequence; identical to SEQ ID NO: 20344
  Cyclic GFR-binding peptide
  MOD_RES (5)..(6)..(37)..(39): Xaa is C or S

SEQ ID NO: 65998 - protein, 33 aa, Artificial Sequence; identical to SEQ ID NO: 20345
  Cyclic GFR-binding peptide
  MOD_RES (2)..(2): Xaa is C or S

SEQ ID NO: 65999 - protein, 32 aa, Artificial Sequence; identical to SEQ ID NO: 20347
  Cyclic GFR-binding peptide
  MOD_RES (32)..(32): Xaa is C or S

SEQ ID NO: 66000 - protein, 23 aa, Artificial Sequence
  Cyclic GFR-binding peptide
SPISMLYIDEYDKVVYKQYEEMV

SEQ ID NO: 66001 - protein, 35 aa, Artificial Sequence; identical to SEQ ID NO: 20350
  Cyclic GFR-binding peptide
  MOD_RES (4)..(5): Xaa is C or S

SEQ ID NO: 66002 - protein, 37 aa, Artificial Sequence; identical to SEQ ID NO: 20351
  Cyclic GFR-binding peptide
  MOD_RES (3)..(4)..(36): Xaa is C or S

SEQ ID NO: 66003 - protein, 22 aa, Artificial Sequence
  Cyclic GFR-binding peptide
SPISILYKDKGVVTYLKYHYGM

SEQ ID NO: 66004 - protein, 36 aa, Artificial Sequence; identical to SEQ ID NO: 20354
  Cyclic GFR-binding peptide
  MOD_RES (2)..(3)..(34)..(36): Xaa is C or S

SEQ ID NO: 66005 - protein, 33 aa, Artificial Sequence; identical to SEQ ID NO: 20357
  Cyclic GFR-binding peptide
  MOD_RES (1)..(2): Xaa is C or S

SEQ ID NO: 66006 - protein, 36 aa, Artificial Sequence; identical to SEQ ID NO: 20359
  Cyclic GFR-binding peptide
  MOD_RES (3)..(4)..(35): Xaa is C or S

SEQ ID NO: 66007 - protein, 24 aa, Artificial Sequence
  Cyclic GFR-binding peptide
SPISILYIVGRKPKVYKQYEMIVR

SEQ ID NO: 66008 - protein, 29 aa, Artificial Sequence
  Cyclic GFR-binding peptide
  MOD_RES (28)..(28): Xaa is C or S
LEPISVLYLDSSNNVIKFKYENMVVKAXG

SEQ ID NO: 66009 - protein, 29 aa, Artificial Sequence
  Cyclic GFR-binding peptide
  MOD_RES (27)..(29): Xaa is C or S
LEPISILYLIGKTPKIKFKYEMIVKSXKX

SEQ ID NO: 66010 - protein, 35 aa, Artificial Sequence; identical to SEQ ID NO: 20363
  Cyclic GFR-binding peptide
  MOD_RES (1)..(32)..(34): Xaa is C or S

SEQ ID NO: 66011 - protein, 24 aa, Artificial Sequence
  Cyclic GFR-binding peptide
LEPISILYLVGRTPKVKFKYEMVV

SEQ ID NO: 66012 - protein, 30 aa, Artificial Sequence
  Cyclic GFR-binding peptide
  MOD_RES (29)..(29): Xaa is C or S
ELSPISMLYIDENEKVVYKQYEDMVVEGXG

SEQ ID NO: 66013 - protein, 36 aa, Artificial Sequence; identical to SEQ ID NO: 20365
  Cyclic GFR-binding peptide
  MOD_RES (4)..(5): Xaa is C or S

SEQ ID NO: 66014 - protein, 37 aa, Artificial Sequence; identical to SEQ ID NO: 20366
  Cyclic GFR-binding peptide
  MOD_RES (4)..(36): Xaa is C or S

SEQ ID NO: 66015 - protein, 21 aa, Artificial Sequence
  Cyclic GFR-binding peptide
LEPISMLYLDENEKVVKFKYE

SEQ ID NO: 66016 - protein, 33 aa, Artificial Sequence
  Cyclic GFR-binding peptide
  MOD_RES (3)..(4): Xaa is C or S
KAXXVPTKLEPISVLYLDDMGVPTKFKYEEGMS

SEQ ID NO: 66017 - protein, 32 aa, Artificial Sequence
  Cyclic GFR-binding peptide
  MOD_RES (7)..(7): Xaa is C or S
HVTKPTXAPTKLEPISVLYLDDSSNVIKFKYE

SEQ ID NO: 66018 - protein, 32 aa, Artificial Sequence
  Cyclic GFR-binding peptide
  MOD_RES (6)..(7): Xaa is C or S
TVPKPXXAPTQLEPISVLYLDDSSNVIKFKYE

SEQ ID NO: 66019 - protein, 39 aa, Artificial Sequence; identical to SEQ ID NO: 20374
  Cyclic GFR-binding peptide
  MOD_RES (4)..(5)..(37)..(39): Xaa is C or S

SEQ ID NO: 66020 - protein, 31 aa, Artificial Sequence
  Cyclic GFR-binding peptide
  MOD_RES (28)..(30): Xaa is C or S
ALSPISILYIVGRKPKVYKQYEMIVRSXKXS

SEQ ID NO: 66021 - protein, 27 aa, Artificial Sequence
  Cyclic GFR-binding peptide
  MOD_RES (1)..(1): Xaa is C or S
XVPQALSPISILYIVGRKPKVYKQYEM

SEQ ID NO: 66022 - protein, 39 aa, Artificial Sequence; identical to SEQ ID NO: 20378
  Cyclic GFR-binding peptide
  MOD_RES (5)..(6)..(38): Xaa is C or S

SEQ ID NO: 66023 - protein, 30 aa, Artificial Sequence
  Cyclic GFR-binding peptide
  MOD_RES (29)..(29): Xaa is C or S
KLEPISVLYLDDSSNVIKFKYENMVVRSXG

SEQ ID NO: 66024 - protein, 37 aa, Artificial Sequence; identical to SEQ ID NO: 20381
  Cyclic GFR-binding peptide
  MOD_RES (1)..(2)..(34)..(36): Xaa is C or S

SEQ ID NO: 66025 - protein, 25 aa, Artificial Sequence
  Cyclic GFR-binding peptide
EPISVLYLDDSSNVIKFKYENMVVR

SEQ ID NO: 66026 - protein, 26 aa, Artificial Sequence
  Cyclic GFR-binding peptide
  MOD_RES (1)..(1): Xaa is C or S
XAPTQLEPISVLYLDDSSNVIKFKYE

SEQ ID NO: 66027 - protein, 30 aa, Artificial Sequence
  Cyclic GFR-binding peptide
  MOD_RES (29)..(29): Xaa is C or S
LSPISVLYIDDMGVPTYKQYEEGMSVAEXG

SEQ ID NO: 66028 - protein, 29 aa, Artificial Sequence
  Cyclic GFR-binding peptide
  MOD_RES (29)..(29): Xaa is C or S
RLEPISILYLDAANNVVKFKYEDMVVEAX

SEQ ID NO: 66029 - protein, 32 aa, Artificial Sequence
  Cyclic GFR-binding peptide
  MOD_RES (6)..(7): Xaa is C or S
YVPKPXXAPTKLEPISVLYLDDSSNVIKFKYE

SEQ ID NO: 66030 - protein, 22 aa, Artificial Sequence
  Cyclic GFR-binding peptide
EPISVLYLDDSSNVIKFKYENM

SEQ ID NO: 66031 - protein, 39 aa, Artificial Sequence; identical to SEQ ID NO: 20386
  Cyclic GFR-binding peptide
  MOD_RES (6)..(7)..(39): Xaa is C or S

SEQ ID NO: 66032 - protein, 29 aa, Artificial Sequence
  Cyclic GFR-binding peptide
  MOD_RES (1)..(1): Xaa is C or S
XVPTKLSPISVLYIDDMGVPTYKQYEEGM

SEQ ID NO: 66033 - protein, 31 aa, Artificial Sequence; identical to SEQ ID NO: 20388
  Cyclic GFR-binding peptide
  MOD_RES (1)..(1): Xaa is C or S

SEQ ID NO: 66034 - protein, 28 aa, Artificial Sequence
  Cyclic GFR-binding peptide
  MOD_RES (27)..(27): Xaa is C or S
LEPISILYLIGKTPKIKFKYEMIVKSXK

SEQ ID NO: 66035 - protein, 32 aa, Artificial Sequence
  Cyclic GFR-binding peptide
  MOD_RES (2)..(3): Xaa is C or S
PXXAPTKLSPISVLYIDDSSNVIYKQYENMVV

SEQ ID NO: 66036 - protein, 34 aa, Artificial Sequence
  Cyclic GFR-binding peptide
  MOD_RES (5)..(6): Xaa is C or S
APASXXVPARLSPISILYKDAANNVVLKYHYDMV

SEQ ID NO: 66037 - protein, 34 aa, Artificial Sequence
  Cyclic GFR-binding peptide
  MOD_RES (4)..(5): Xaa is C or S
PKPXXAPTKLSPISVLYIDDSSNVIYKQYENMVV

SEQ ID NO: 66038 - protein, 30 aa, Artificial Sequence
  Cyclic GFR-binding peptide
  MOD_RES (30)..(30): Xaa is C or S
KLSPISVLYIDDMGVPTYKQYEEGMSVAEX

SEQ ID NO: 66039 - protein, 34 aa, Artificial Sequence
  Cyclic GFR-binding peptide
  MOD_RES (31)..(33): Xaa is C or S
PTKLEPISVLYLDDSSNVIKFKYENMVVRSXGXH

SEQ ID NO: 66040 - protein, 32 aa, Artificial Sequence
  Cyclic GFR-binding peptide
  MOD_RES (1)..(1): Xaa is C or S
XVPTKLSPISVLYIDDMGVPTYKQYEEGMSVA

SEQ ID NO: 66041 - protein, 40 aa, Artificial Sequence; identical to SEQ ID NO: 20393
  Cyclic GFR-binding peptide
  MOD_RES (5)..(6)..(38)..(40): Xaa is C or S

SEQ ID NO: 66042 - protein, 35 aa, Artificial Sequence; identical to SEQ ID NO: 20395
  Cyclic GFR-binding peptide
  MOD_RES (1)..(33)..(35): Xaa is C or S

SEQ ID NO: 66043 - protein, 30 aa, Artificial Sequence
  Cyclic GFR-binding peptide
  MOD_RES (4)..(5): Xaa is C or S
PKAXXVPTELEPISMLYLDEYDKVVKFKYE

SEQ ID NO: 66044 - protein, 33 aa, Artificial Sequence
  Cyclic GFR-binding peptide
  MOD_RES (5)..(6): Xaa is C or S
IPKAXXVPTELEPISMLYLDEYDKVVKFKYEEM

SEQ ID NO: 66045 - protein, 29 aa, Artificial Sequence
  Cyclic GFR-binding peptide
  MOD_RES (29)..(29): Xaa is C or S
LEPISVLYLDDMGVPTKFKYEEGMSVAEX

SEQ ID NO: 66046 - protein, 32 aa, Artificial Sequence; identical to SEQ ID NO: 20399
  Cyclic GFR-binding peptide
  MOD_RES (1)..(2): Xaa is C or S

SEQ ID NO: 66047 - protein, 35 aa, Artificial Sequence; identical to SEQ ID NO: 20400
  Cyclic GFR-binding peptide
  MOD_RES (32)..(34): Xaa is C or S

SEQ ID NO: 66048 - protein, 20 aa, Artificial Sequence
  Cyclic GFR-binding peptide
NAISILYFDAANNVVLKKYR

SEQ ID NO: 66049 - protein, 39 aa, Artificial Sequence; identical to SEQ ID NO: 20406
  Cyclic GFR-binding peptide
  MOD_RES (3)..(4)..(36)..(38): Xaa is C or S

SEQ ID NO: 66050 - protein, 26 aa, Artificial Sequence
  Cyclic GFR-binding peptide
PQALSPISILYIVGRKPKVYKQYEMI

SEQ ID NO: 66051 - protein, 39 aa, Artificial Sequence; identical to SEQ ID NO: 20409
  Cyclic GFR-binding peptide
  MOD_RES (6)..(7)..(39): Xaa is C or S

SEQ ID NO: 66052 - protein, 26 aa, Artificial Sequence
  Cyclic GFR-binding peptide
VPTKLSPISVLYIDDMGVPTYKQYEE

SEQ ID NO: 66053 - protein, 31 aa, Artificial Sequence
  Cyclic GFR-binding peptide
  MOD_RES (1)..(2): Xaa is C or S
XXVPQALSPISILYIVGRKPKVYKQYEMIVR

SEQ ID NO: 66054 - protein, 32 aa, Artificial Sequence; identical to SEQ ID NO: 20412
  Cyclic GFR-binding peptide
  MOD_RES (1)..(2): Xaa is C or S

SEQ ID NO: 66055 - protein, 27 aa, Artificial Sequence
  Cyclic GFR-binding peptide
LSPISILYKDAANNVVLKYHYDMVVEA

SEQ ID NO: 66056 - protein, 39 aa, Artificial Sequence; identical to SEQ ID NO: 20415
  Cyclic GFR-binding peptide
  MOD_RES (4)..(36)..(38): Xaa is C or S

SEQ ID NO: 66057 - protein, 30 aa, Artificial Sequence
  Cyclic GFR-binding peptide
  MOD_RES (1)..(1): Xaa is C or S
XVPARLSPISILYKDAANNVVLKYHYDMVV

SEQ ID NO: 66058 - protein, 28 aa, Artificial Sequence
  Cyclic GFR-binding peptide
TKLNAISILYFDKGVVTYLKKYRGMAVS

SEQ ID NO: 66059 - protein, 31 aa, Artificial Sequence; identical to SEQ ID NO: 20420
  Cyclic GFR-binding peptide
  MOD_RES (31)..(31): Xaa is C or S

SEQ ID NO: 66060 - protein, 36 aa, Artificial Sequence; identical to SEQ ID NO: 20422
  Cyclic GFR-binding peptide
  MOD_RES (1)..(2)..(34)..(36): Xaa is C or S

SEQ ID NO: 66061 - protein, 34 aa, Artificial Sequence
  Cyclic GFR-binding peptide
  MOD_RES (5)..(6): Xaa is C or S
VPKAXXAPTKLSPISVLYIDSSNNVIYKQYENMV

SEQ ID NO: 66062 - protein, 39 aa, Artificial Sequence; identical to SEQ ID NO: 20426
  Cyclic GFR-binding peptide
  MOD_RES (4)..(5)..(38): Xaa is C or S

SEQ ID NO: 66063 - protein, 32 aa, Artificial Sequence
  Cyclic GFR-binding peptide
  MOD_RES (3)..(4): Xaa is C or S
KAXXVPTKLNAISILYFDKGVVTYLKKYRGMA

SEQ ID NO: 66064 - protein, 27 aa, Artificial Sequence
  Cyclic GFR-binding peptide
TKLEPISVLYLDDMGVPTKFKYEEGMS

SEQ ID NO: 66065 - protein, 38 aa, Artificial Sequence; identical to SEQ ID NO: 20436
  Cyclic GFR-binding peptide
  MOD_RES (3)..(4)..(36)..(38): Xaa is C or S

SEQ ID NO: 66066 - protein, 33 aa, Artificial Sequence; identical to SEQ ID NO: 20440
  Cyclic GFR-binding peptide
  MOD_RES (1)..(2): Xaa is C or S

SEQ ID NO: 66067 - protein, 38 aa, Artificial Sequence; identical to SEQ ID NO: 20441
  Cyclic GFR-binding peptide
  MOD_RES (2)..(3)..(35)..(37): Xaa is C or S

SEQ ID NO: 66068 - protein, 37 aa, Artificial Sequence; identical to SEQ ID NO: 20442
  Cyclic GFR-binding peptide
  MOD_RES (1)..(2)..(34)..(36): Xaa is C or S

SEQ ID NO: 66069 - protein, 38 aa, Artificial Sequence; identical to SEQ ID NO: 20443
  Cyclic GFR-binding peptide
  MOD_RES (1)..(2)..(35)..(37): Xaa is C or S

SEQ ID NO: 66070 - protein, 34 aa, Artificial Sequence; identical to SEQ ID NO: 20446
  Cyclic GFR-binding peptide
  MOD_RES (32)..(34): Xaa is C or S

SEQ ID NO: 66071 - protein, 34 aa, Artificial Sequence; identical to SEQ ID NO: 20447
  Cyclic GFR-binding peptide
  MOD_RES (3)..(4): Xaa is C or S

SEQ ID NO: 66072 - protein, 30 aa, Artificial Sequence; identical to SEQ ID NO: 20448
  Cyclic GFR-binding peptide

SEQ ID NO: 66073 - protein, 28 aa, Artificial Sequence
  Cyclic GFR-binding peptide
RLSPISILYKDAANNVVLKYHYDMVVEA

SEQ ID NO: 66074 - protein, 40 aa, Artificial Sequence; identical to SEQ ID NO: 20449
  Cyclic GFR-binding peptide
  MOD_RES (6)..(7)..(39): Xaa is C or S

SEQ ID NO: 66075 - protein, 34 aa, Artificial Sequence; identical to SEQ ID NO: 20451
  Cyclic GFR-binding peptide
  MOD_RES (3)..(3): Xaa is C or S

SEQ ID NO: 66076 - protein, 25 aa, Artificial Sequence
  Cyclic GFR-binding peptide
LSPISILYKDKGVVTYLKYHYGMAV

SEQ ID NO: 66077 - protein, 30 aa, Artificial Sequence
  Cyclic GFR-binding peptide
  MOD_RES (29)..(29): Xaa is C or S
QDLSPISILYIIGKTPKIYKQYEMIVKSXK

SEQ ID NO: 66078 - protein, 27 aa, Artificial Sequence
  Cyclic GFR-binding peptide
  MOD_RES (1)..(2): Xaa is C or S
XXVPTKLSPISILYIDKGVVTYYKQYE

SEQ ID NO: 66079 - protein, 37 aa, Artificial Sequence; identical to SEQ ID NO: 20456
  Cyclic GFR-binding peptide
  MOD_RES (6)..(7): Xaa is C or S

SEQ ID NO: 66080 - protein, 28 aa, Artificial Sequence
  Cyclic GFR-binding peptide
  MOD_RES (28)..(28): Xaa is C or S
LEPISVLYLDSSNNVIKFKYENMVVKAX

SEQ ID NO: 66081 - protein, 37 aa, Artificial Sequence; identical to SEQ ID NO: 20457
  Cyclic GFR-binding peptide
  MOD_RES (3)..(4)..(36): Xaa is C or S

SEQ ID NO: 66082 - protein, 39 aa, Artificial Sequence; identical to SEQ ID NO: 20459
  Cyclic GFR-binding peptide
  MOD_RES (1)..(33)..(34): Xaa is C or S

SEQ ID NO: 66083 - protein, 30 aa, Artificial Sequence
  Cyclic GFR-binding peptide
  MOD_RES (26)..(27): Xaa is C or S
PIKGYYTVVGKDFYLINIPSLKTPVXXAKS

SEQ ID NO: 66084 - protein, 27 aa, Artificial Sequence
  Cyclic GFR-binding peptide
  MOD_RES (26)..(27): Xaa is C or S
PIKGYIVNNSSDFYLVNIPSLKTPAXX

SEQ ID NO: 66085 - protein, 34 aa, Artificial Sequence
  Cyclic GFR-binding peptide
  MOD_RES (30)..(31): Xaa is C or S
VVMDPIKGYVVNNASDFYLINIPSLRTPVXXTPP

SEQ ID NO: 66086 - protein, 40 aa, Artificial Sequence; identical to SEQ ID NO: 20470
  Cyclic GFR-binding peptide
  MOD_RES (1)..(3)..(35)..(36): Xaa is C or S

SEQ ID NO: 66087 - protein, 37 aa, Artificial Sequence; identical to SEQ ID NO: 20471
  Cyclic GFR-binding peptide
  MOD_RES (2)..(34): Xaa is C or S

SEQ ID NO: 66088 - protein, 32 aa, Artificial Sequence
  Cyclic GFR-binding peptide
  MOD_RES (2)..(4): Xaa is C or S
HXGXARVVMNPIKGYIVNSSDDFYLVNIPSLQ

SEQ ID NO: 66089 - protein, 35 aa, Artificial Sequence; identical to SEQ ID NO: 20476
  Cyclic GFR-binding peptide
  MOD_RES (32)..(33): Xaa is C or S

SEQ ID NO: 66090 - protein, 23 aa, Artificial Sequence
  Cyclic GFR-binding peptide
MDPIKGYVVKENEDFYLMNIPSL

SEQ ID NO: 66091 - protein, 29 aa, Artificial Sequence
  Cyclic GFR-binding peptide
EVIMPIKGYLLVRGNDFYLMNIPSTKVPA

SEQ ID NO: 66092 - protein, 34 aa, Artificial Sequence
  Cyclic GFR-binding peptide
  MOD_RES (30)..(31): Xaa is C or S
VAMGPIKGYYTVVGKDFYLINIPSLKTPVXXAKS

SEQ ID NO: 66093 - protein, 22 aa, Artificial Sequence
  Cyclic GFR-binding peptide
DPIKGYVVNNAADFYLINIPSL

SEQ ID NO: 66094 - protein, 39 aa, Artificial Sequence; identical to SEQ ID NO: 20480
  Cyclic GFR-binding peptide
  MOD_RES (2)..(4)..(37)..(38): Xaa is C or S

SEQ ID NO: 66095 - protein, 36 aa, Artificial Sequence; identical to SEQ ID NO: 20482
  Cyclic GFR-binding peptide
  MOD_RES (32)..(33): Xaa is C or S

SEQ ID NO: 66096 - protein, 30 aa, Artificial Sequence
  Cyclic GFR-binding peptide
GEVVMEPIKGYVVKDYEDFYLMNIPSLETP

SEQ ID NO: 66097 - protein, 33 aa, Artificial Sequence; identical to SEQ ID NO: 20486
  Cyclic GFR-binding peptide
  MOD_RES (32)..(33): Xaa is C or S

SEQ ID NO: 66098 - protein, 27 aa, Artificial Sequence
  Cyclic GFR-binding peptide
MDPIKGYVVNNASDFYLINIPSLRTPV

SEQ ID NO: 66099 - protein, 31 aa, Artificial Sequence
  Cyclic GFR-binding peptide
  MOD_RES (30)..(31): Xaa is C or S
VVMNPIKGYIVNSSDDFYLVNIPSLKTPAXX

SEQ ID NO: 66100 - protein, 35 aa, Artificial Sequence; identical to SEQ ID NO: 20487
  Cyclic GFR-binding peptide
  MOD_RES (1)..(3)..(35): Xaa is C or S

SEQ ID NO: 66101 - protein, 39 aa, Artificial Sequence; identical to SEQ ID NO: 20488
  Cyclic GFR-binding peptide
  MOD_RES (2)..(4)..(36)..(37): Xaa is C or S

SEQ ID NO: 66102 - protein, 35 aa, Artificial Sequence; identical to SEQ ID NO: 20489
  Cyclic GFR-binding peptide
  MOD_RES (1)..(34)..(35): Xaa is C or S

SEQ ID NO: 66103 - protein, 30 aa, Artificial Sequence
  Cyclic GFR-binding peptide
  MOD_RES (1)..(3): Xaa is C or S
XGXESVAMGPIKGYYTVVGKDFYLINIPSL

SEQ ID NO: 66104 - protein, 27 aa, Artificial Sequence
  Cyclic GFR-binding peptide
  MOD_RES (26)..(27): Xaa is C or S
PIKGYYTVVGKDFYLINIPSLKTPVXX

SEQ ID NO: 66105 - protein, 38 aa, Artificial Sequence; identical to SEQ ID NO: 20490
  Cyclic GFR-binding peptide
  MOD_RES (2)..(33)..(34): Xaa is C or S

SEQ ID NO: 66106 - protein, 28 aa, Artificial Sequence
  Cyclic GFR-binding peptide
  MOD_RES (27)..(28): Xaa is C or S
DPIKGYVVKENEDFYLMNIPSLETPVXX

SEQ ID NO: 66107 - protein, 31 aa, Artificial Sequence
  Cyclic GFR-binding peptide
  MOD_RES (2)..(4): Xaa is C or S
RXGXEAVSMGEPIKGYTPVGMDDFYLVNIPS

SEQ ID NO: 66108 - protein, 29 aa, Artificial Sequence
  Cyclic GFR-binding peptide
  MOD_RES (1)..(1): Xaa is C or S
XEEVIMPIKGYLLVRGNDFYLMNIPSTKV

SEQ ID NO: 66109 - protein, 22 aa, Artificial Sequence
  Cyclic GFR-binding peptide
MEPIKGYVVKDYEDFYLMNIPS

SEQ ID NO: 66110 - protein, 31 aa, Artificial Sequence
  Cyclic GFR-binding peptide
  MOD_RES (28)..(29): Xaa is C or S
MGPIKGYYTVVGKDFYLINIPSLKTPVXXAK

SEQ ID NO: 66111 - protein, 25 aa, Artificial Sequence
  Cyclic GFR-binding peptide
EVVMDPIKGYVVNNAADFYLINIPS

SEQ ID NO: 66112 - protein, 39 aa, Artificial Sequence; identical to SEQ ID NO: 20496
  Cyclic GFR-binding peptide
  MOD_RES (1)..(33)..(34): Xaa is C or S

SEQ ID NO: 66113 - protein, 27 aa, Artificial Sequence
  Cyclic GFR-binding peptide
MDPIKGYVVKENEDFYLMNIPSLETPV

SEQ ID NO: 66114 - protein, 30 aa, Artificial Sequence
  Cyclic GFR-binding peptide
  MOD_RES (2)..(2): Xaa is C or S
GXSRVVMNPIKGYIVNSSDDFYLVNIPSLK

SEQ ID NO: 66115 - protein, 32 aa, Artificial Sequence
  Cyclic GFR-binding peptide
  MOD_RES (2)..(2): Xaa is C or S
GXESVAMGPIKGYYTVVGKDFYLINIPSLKTP

SEQ ID NO: 66116 - protein, 30 aa, Artificial Sequence
  Cyclic GFR-binding peptide
  MOD_RES (28)..(29): Xaa is C or S
GEPIKGYTPVGMDDFYLVNIPSLKTPVXXA

SEQ ID NO: 66117 - protein, 29 aa, Artificial Sequence
  Cyclic GFR-binding peptide
  MOD_RES (1)..(3): Xaa is C or S
XGXSEVVMDPIKGYVVNNASDFYLINIPS

SEQ ID NO: 66118 - protein, 37 aa, Artificial Sequence; identical to SEQ ID NO: 20507
  Cyclic GFR-binding peptide
  MOD_RES (31)..(32): Xaa is C or S

SEQ ID NO: 66119 - protein, 31 aa, Artificial Sequence
  Cyclic GFR-binding peptide
  MOD_RES (27)..(28): Xaa is C or S
GPIKGYYTVVGKDFYLINIPSLKTPVXXAKS

SEQ ID NO: 66120 - protein, 40 aa, Artificial Sequence; identical to SEQ ID NO: 20508
  Cyclic GFR-binding peptide
  MOD_RES (2)..(34)..(35): Xaa is C or S

SEQ ID NO: 66121 - protein, 26 aa, Artificial Sequence
  Cyclic GFR-binding peptide
MDPIKGYVVKENEDFYLMNIPSLETP

SEQ ID NO: 66122 - protein, 34 aa, Artificial Sequence
  Cyclic GFR-binding peptide
  MOD_RES (28)..(29): Xaa is C or S
MNPIKGYIVNSSDDFYLVNIPSLKTPAXXPKPVH

SEQ ID NO: 66123 - protein, 24 aa, Artificial Sequence
  Cyclic GFR-binding peptide
VVMDPIKGYVVKENEDFYLMNIPS

SEQ ID NO: 66124 - protein, 36 aa, Artificial Sequence; identical to SEQ ID NO: 20514
  Cyclic GFR-binding peptide
  MOD_RES (31)..(32): Xaa is C or S

SEQ ID NO: 66125 - protein, 28 aa, Artificial Sequence
  Cyclic GFR-binding peptide
  MOD_RES (26)..(27): Xaa is C or S
PIKGYVVNNASDFYLINIPSLRTPVXXT

SEQ ID NO: 66126 - protein, 38 aa, Artificial Sequence; identical to SEQ ID NO: 20515
  Cyclic GFR-binding peptide
  MOD_RES (1)..(3)..(35)..(36): Xaa is C or S

SEQ ID NO: 66127 - protein, 26 aa, Artificial Sequence
  Cyclic GFR-binding peptide
VMDPIKGYVVKENEDFYLMNIPSLET

SEQ ID NO: 66128 - protein, 27 aa, Artificial Sequence
  Cyclic GFR-binding peptide
SVAMGPIKGYYTVVGKDFYLINIPSLK

SEQ ID NO: 66129 - protein, 28 aa, Artificial Sequence
  Cyclic GFR-binding peptide
  MOD_RES (27)..(28): Xaa is C or S
NPIKGYIVNSSDDFYLVNIPSLKTPAXX

SEQ ID NO: 66130 - protein, 30 aa, Artificial Sequence
  Cyclic GFR-binding peptide
  MOD_RES (30)..(30): Xaa is C or S
VAMGPIKGYYTVVGKDFYLINIPSLKTPVX

SEQ ID NO: 66131 - protein, 40 aa, Artificial Sequence; identical to SEQ ID NO: 20521
  Cyclic GFR-binding peptide
  MOD_RES (2)..(34)..(35): Xaa is C or S

SEQ ID NO: 66132 - protein, 27 aa, Artificial Sequence
  Cyclic GFR-binding peptide
VMNPIKGYIVNSSDDFYLVNIPSLKTP

SEQ ID NO: 66133 - protein, 27 aa, Artificial Sequence
  Cyclic GFR-binding peptide
VMNPIKGYIVNNSSDFYLVNIPSLKTP

SEQ ID NO: 66134 - protein, 37 aa, Artificial Sequence; identical to SEQ ID NO: 20525
  Cyclic GFR-binding peptide
  MOD_RES (2)..(34)..(35): Xaa is C or S

SEQ ID NO: 66135 - protein, 25 aa, Artificial Sequence
  Cyclic GFR-binding peptide
VVMEPIKGYVVKDYEDFYLMNIPSL

SEQ ID NO: 66136 - protein, 24 aa, Artificial Sequence
  Cyclic GFR-binding peptide
VVMDPIKGYVVNNAADFYLINIPS

SEQ ID NO: 66137 - protein, 40 aa, Artificial Sequence; identical to SEQ ID NO: 20527
  Cyclic GFR-binding peptide
  MOD_RES (1)..(3)..(35)..(36): Xaa is C or S

SEQ ID NO: 66138 - protein, 30 aa, Artificial Sequence
  Cyclic GFR-binding peptide
  MOD_RES (2)..(2): Xaa is C or S
GXGEVVMEPIKGYVVKDYEDFYLMNIPSLE

SEQ ID NO: 66139 - protein, 32 aa, Artificial Sequence
  Cyclic GFR-binding peptide
  MOD_RES (32)..(32): Xaa is C or S
AVSMGEPIKGYTPVGMDDFYLVNIPSLKTPVX

SEQ ID NO: 66140 - protein, 20 aa, Artificial Sequence
  Cyclic GFR-binding peptide
PIKGYVVNNASDFYLINIPS

SEQ ID NO: 66141 - protein, 29 aa, Artificial Sequence
  Cyclic GFR-binding peptide
  MOD_RES (29)..(29): Xaa is C or S
VIMPIKGYLLVRGNDFYLMNIPSTKVPAX

SEQ ID NO: 66142 - protein, 28 aa, Artificial Sequence
  Cyclic GFR-binding peptide
  MOD_RES (28)..(28): Xaa is C or S
MNPIKGYIVNNSSDFYLVNIPSLKTPAX

SEQ ID NO: 66143 - protein, 41 aa, Artificial Sequence; identical to SEQ ID NO: 20532
  Cyclic GFR-binding peptide
  MOD_RES (2)..(4)..(36)..(37): Xaa is C or S

SEQ ID NO: 66144 - protein, 29 aa, Artificial Sequence
  Cyclic GFR-binding peptide
  MOD_RES (27)..(27): Xaa is C or S
NPIKGYIVNSSDDFYLVNIPSLKTPAXTP

SEQ ID NO: 66145 - protein, 27 aa, Artificial Sequence
  Cyclic GFR-binding peptide
AMGPIKGYYTVVGKDFYLINIPSLKTP

SEQ ID NO: 66146 - protein, 34 aa, Artificial Sequence; identical to SEQ ID NO: 20533
  Cyclic GFR-binding peptide
  MOD_RES (31)..(32): Xaa is C or S

SEQ ID NO: 66147 - protein, 35 aa, Artificial Sequence; identical to SEQ ID NO: 20535
  Cyclic GFR-binding peptide
  MOD_RES (31)..(32): Xaa is C or S

SEQ ID NO: 66148 - protein, 25 aa, Artificial Sequence
  Cyclic GFR-binding peptide
EVVMEPIKGYVVKDYEDFYLMNIPS

SEQ ID NO: 66149 - protein, 21 aa, Artificial Sequence
  Cyclic GFR-binding peptide
EPIKGYVVKDYEDFYLMNIPS

SEQ ID NO: 66150 - protein, 38 aa, Artificial Sequence; identical to SEQ ID NO: 20549
  Cyclic GFR-binding peptide
  MOD_RES (1)..(3)..(35)..(36): Xaa is C or S

SEQ ID NO: 66151 - protein, 34 aa, Artificial Sequence; identical to SEQ ID NO: 20551
  Cyclic GFR-binding peptide
  MOD_RES (2)..(34): Xaa is C or S

SEQ ID NO: 66152 - protein, 25 aa, Artificial Sequence
  Cyclic GFR-binding peptide
SMGEPIKGYTPVGMDDFYLVNIPSL

SEQ ID NO: 66153 - protein, 31 aa, Artificial Sequence; identical to SEQ ID NO: 20553
  Cyclic GFR-binding peptide

SEQ ID NO: 66154 - protein, 40 aa, Artificial Sequence; identical to SEQ ID NO: 20554
  Cyclic GFR-binding peptide
  MOD_RES (2)..(4)..(36)..(37): Xaa is C or S

SEQ ID NO: 66155 - protein, 38 aa, Artificial Sequence; identical to SEQ ID NO: 20555
  Cyclic GFR-binding peptide
  MOD_RES (2)..(4)..(36)..(37): Xaa is C or S

SEQ ID NO: 66156 - protein, 28 aa, Artificial Sequence
  Cyclic GFR-binding peptide
  MOD_RES (27)..(28): Xaa is C or S
DPIKGYVVNNAADFYLINIPSLRAPVXX

SEQ ID NO: 66157 - protein, 37 aa, Artificial Sequence; identical to SEQ ID NO: 20560
  Cyclic GFR-binding peptide
  MOD_RES (31)..(32): Xaa is C or S

SEQ ID NO: 66158 - protein, 33 aa, Artificial Sequence
  Cyclic GFR-binding peptide
  MOD_RES (29)..(30): Xaa is C or S
VMDPIKGYVVNNASDFYLINIPSLRTPVXXTPP

SEQ ID NO: 66159 - protein, 33 aa, Artificial Sequence
  Cyclic GFR-binding peptide
  MOD_RES (29)..(30): Xaa is C or S
VMNPIKGYIVNSSDDFYLVNIPSLQTPAXXPKP

SEQ ID NO: 66160 - protein, 32 aa, Artificial Sequence; identical to SEQ ID NO: 20562
  Cyclic GFR-binding peptide
  MOD_RES (32)..(32): Xaa is C or S

SEQ ID NO: 66161 - protein, 35 aa, Artificial Sequence; identical to SEQ ID NO: 20563
  Cyclic GFR-binding peptide
  MOD_RES (1)..(3)..(35): Xaa is C or S

SEQ ID NO: 66162 - protein, 24 aa, Artificial Sequence
  Cyclic GFR-binding peptide
PIKGYVVKDYEDFYLMNIPSLETP

SEQ ID NO: 66163 - protein, 36 aa, Artificial Sequence; identical to SEQ ID NO: 20567
  Cyclic GFR-binding peptide
  MOD_RES (31)..(31): Xaa is C or S

SEQ ID NO: 66164 - protein, 35 aa, Artificial Sequence
  Cyclic GFR-binding peptide
  MOD_RES (30)..(31): Xaa is C or S
VVMNPIKGYIVNSSDDFYLVNIPSLQTPAXXPKPV

SEQ ID NO: 66165 - protein, 39 aa, Artificial Sequence; identical to SEQ ID NO: 20568
  Cyclic GFR-binding peptide
  MOD_RES (1)..(33)..(34): Xaa is C or S

SEQ ID NO: 66166 - protein, 40 aa, Artificial Sequence; identical to SEQ ID NO: 20569
  Cyclic GFR-binding peptide
  MOD_RES (1)..(3)..(34)..(35): Xaa is C or S

SEQ ID NO: 66167 - protein, 38 aa, Artificial Sequence; identical to SEQ ID NO: 20570
  Cyclic GFR-binding peptide
  MOD_RES (2)..(34)..(35): Xaa is C or S

SEQ ID NO: 66168 - protein, 26 aa, Artificial Sequence
  Cyclic GFR-binding peptide
  MOD_RES (26)..(26): Xaa is C or S
PIKGYVVKENEDFYLMNIPSLETPVX

SEQ ID NO: 66169 - protein, 36 aa, Artificial Sequence; identical to SEQ ID NO: 20571
  Cyclic GFR-binding peptide
  MOD_RES (1)..(33)..(34): Xaa is C or S

SEQ ID NO: 66170 - protein, 36 aa, Artificial Sequence; identical to SEQ ID NO: 20573
  Cyclic GFR-binding peptide
  MOD_RES (2)..(33)..(34): Xaa is C or S

SEQ ID NO: 66171 - protein, 31 aa, Artificial Sequence
  Cyclic GFR-binding peptide
  MOD_RES (27)..(27): Xaa is C or S
NPIKGYIVNSSDDFYLVNIPSLKTPAXTPKT

SEQ ID NO: 66172 - protein, 29 aa, Artificial Sequence
  Cyclic GFR-binding peptide
SMGEPIKGYTPVGMDDFYLVNIPSLKTPV

SEQ ID NO: 66173 - protein, 28 aa, Artificial Sequence
  Cyclic GFR-binding peptide
ARVVMNPIKGYIVNSSDDFYLVNIPSLQ

SEQ ID NO: 66174 - protein, 33 aa, Artificial Sequence
  Cyclic GFR-binding peptide
  MOD_RES (27)..(28): Xaa is C or S
DPIKGYVVNNAADFYLINIPSLRAPVXXSAPAA

SEQ ID NO: 66175 - protein, 32 aa, Artificial Sequence
  Cyclic GFR-binding peptide
  MOD_RES (30)..(31): Xaa is C or S
VVMNPIKGYIVNSSDDFYLVNIPSLKTPAXXP

SEQ ID NO: 66176 - protein, 29 aa, Artificial Sequence
  Cyclic GFR-binding peptide
  MOD_RES (2)..(2): Xaa is C or S
GXEAVSMGEPIKGYTPVGMDDFYLVNIPS

SEQ ID NO: 66177 - protein, 32 aa, Artificial Sequence
  Cyclic GFR-binding peptide
  MOD_RES (2)..(4): Xaa is C or S
RXGXGEVVMDPIKGYVVKENEDFYLMNIPSLE

SEQ ID NO: 66178 - protein, 36 aa, Artificial Sequence
  Cyclic GFR-binding peptide
  MOD_RES (30)..(31): Xaa is C or S
EVIMPIKGYLLVRGNDFYLMNIPSTKVPAXXTSPVR

SEQ ID NO: 66179 - protein, 34 aa, Artificial Sequence
  Cyclic GFR-binding peptide
  MOD_RES (29)..(30): Xaa is C or S
VMDPIKGYVVKENEDFYLMNIPSLETPVXXAKPI

SEQ ID NO: 66180 - protein, 28 aa, Artificial Sequence
  Cyclic GFR-binding peptide
  MOD_RES (28)..(28): Xaa is C or S
MNPIKGYIVNSSDDFYLVNIPSLQTPAX

SEQ ID NO: 66181 - protein, 39 aa, Artificial Sequence; identical to SEQ ID NO: 20587
  Cyclic GFR-binding peptide
  MOD_RES (1)..(3)..(34)..(35): Xaa is C or S

SEQ ID NO: 66182 - protein, 42 aa, Artificial Sequence; identical to SEQ ID NO: 20590
  Cyclic GFR-binding peptide
  MOD_RES (2)..(4)..(36)..(37): Xaa is C or S

SEQ ID NO: 66183 - protein, 36 aa, Artificial Sequence; identical to SEQ ID NO: 20592
  Cyclic GFR-binding peptide
  MOD_RES (2)..(34)..(35): Xaa is C or S

SEQ ID NO: 66184 - protein, 38 aa, Artificial Sequence; identical to SEQ ID NO: 20593
  Cyclic GFR-binding peptide
  MOD_RES (32)..(33): Xaa is C or S

SEQ ID NO: 66185 - protein, 34 aa, Artificial Sequence
  Cyclic GFR-binding peptide
  MOD_RES (30)..(31): Xaa is C or S
VVMDPIKGYVVNNAADFYLINIPSLRAPVXXSAP

SEQ ID NO: 66186 - protein, 27 aa, Artificial Sequence
  Cyclic GFR-binding peptide
VMEPIKGYVVKDYEDFYLMNIPSLETP

SEQ ID NO: 66187 - protein, 29 aa, Artificial Sequence
  Cyclic GFR-binding peptide
  MOD_RES (1)..(3): Xaa is C or S
XGXARVVMNPIKGYIVNSSDDFYLVNIPS

SEQ ID NO: 66188 - protein, 35 aa, Artificial Sequence
  Cyclic GFR-binding peptide
  MOD_RES (30)..(31): Xaa is C or S
SMGEPIKGYTPVGMDDFYLVNIPSLKTPVXXAKGV

SEQ ID NO: 66189 - protein, 31 aa, Artificial Sequence
  Cyclic GFR-binding peptide
EAVSMGEPIKGYTPVGMDDFYLVNIPSLKTP

SEQ ID NO: 66190 - protein, 31 aa, Artificial Sequence; identical to SEQ ID NO: 20600
  Cyclic GFR-binding peptide

SEQ ID NO: 66191 - protein, 37 aa, Artificial Sequence; identical to SEQ ID NO: 20603
  Cyclic GFR-binding peptide
  MOD_RES (1)..(33)..(34): Xaa is C or S

SEQ ID NO: 66192 - protein, 37 aa, Artificial Sequence; identical to SEQ ID NO: 20604
  Cyclic GFR-binding peptide
  MOD_RES (31)..(32): Xaa is C or S

SEQ ID NO: 66193 - protein, 34 aa, Artificial Sequence; identical to SEQ ID NO: 20605
  Cyclic GFR-binding peptide
  MOD_RES (1)..(32)..(33): Xaa is C or S

SEQ ID NO: 66194 - protein, 31 aa, Artificial Sequence; identical to SEQ ID NO: 20607
  Cyclic GFR-binding peptide
  MOD_RES (31)..(31): Xaa is C or S

SEQ ID NO: 66195 - protein, 28 aa, Artificial Sequence
  Cyclic GFR-binding peptide
  MOD_RES (1)..(1): Xaa is C or S
XEAVSMGEPIKGYTPVGMDDFYLVNIPS

SEQ ID NO: 66196 - protein, 41 aa, Artificial Sequence; identical to SEQ ID NO: 20608
  Cyclic GFR-binding peptide
  MOD_RES (2)..(35)..(36): Xaa is C or S

SEQ ID NO: 66197 - protein, 33 aa, Artificial Sequence
  Cyclic GFR-binding peptide
  MOD_RES (27)..(28): Xaa is C or S
DPIKGYVVKENEDFYLMNIPSLETPVXXAKPIK

SEQ ID NO: 66198 - protein, 38 aa, Artificial Sequence; identical to SEQ ID NO: 20613
  Cyclic GFR-binding peptide
  MOD_RES (1)..(3)..(36)..(37): Xaa is C or S

SEQ ID NO: 66199 - protein, 34 aa, Artificial Sequence; identical to SEQ ID NO: 20615
  Cyclic GFR-binding peptide
  MOD_RES (31)..(32): Xaa is C or S

SEQ ID NO: 66200 - protein, 26 aa, Artificial Sequence
  Cyclic GFR-binding peptide
EVVMDPIKGYVVNNAADFYLINIPSL

SEQ ID NO: 66201 - protein, 32 aa, Artificial Sequence; identical to SEQ ID NO: 20617
  Cyclic GFR-binding peptide
  MOD_RES (31)..(32): Xaa is C or S

SEQ ID NO: 66202 - protein, 29 aa, Artificial Sequence
  Cyclic GFR-binding peptide
  MOD_RES (28)..(29): Xaa is C or S
MEPIKGYVVKDYEDFYLMNIPSLETPVXX

SEQ ID NO: 66203 - protein, 32 aa, Artificial Sequence
  Cyclic GFR-binding peptide
  MOD_RES (1)..(3): Xaa is C or S
XGXARVVMNPIKGYIVNSSDDFYLVNIPSLQT

SEQ ID NO: 66204 - protein, 28 aa, Artificial Sequence
  Cyclic GFR-binding peptide
  MOD_RES (27)..(28): Xaa is C or S
GPIKGYYTVVGKDFYLINIPSLKTPVXX

SEQ ID NO: 66205 - protein, 25 aa, Artificial Sequence
  Cyclic GFR-binding peptide
PIKGYIVNSSDDFYLVNIPSLKTPA

SEQ ID NO: 66206 - protein, 37 aa, Artificial Sequence; identical to SEQ ID NO: 20622
  Cyclic GFR-binding peptide
  MOD_RES (1)..(3)..(35)..(36): Xaa is C or S

SEQ ID NO: 66207 - protein, 34 aa, Artificial Sequence; identical to SEQ ID NO: 20626
  Cyclic GFR-binding peptide
  MOD_RES (31)..(32): Xaa is C or S

SEQ ID NO: 66208 - protein, 38 aa, Artificial Sequence; identical to SEQ ID NO: 20635
  Cyclic GFR-binding peptide
  MOD_RES (2)..(4)..(36)..(37): Xaa is C or S

SEQ ID NO: 66209 - protein, 30 aa, Artificial Sequence
  Cyclic GFR-binding peptide
  MOD_RES (1)..(3): Xaa is C or S
XGXAEVVMDPIKGYVVNNAADFYLINIPSL

SEQ ID NO: 66210 - protein, 33 aa, Artificial Sequence
  Cyclic GFR-binding peptide
  MOD_RES (2)..(2): Xaa is C or S
GXAKVVMNPIKGYIVNNSSDFYLVNIPSLKTPA

SEQ ID NO: 66211 - protein, 32 aa, Artificial Sequence
  Cyclic GFR-binding peptide
  MOD_RES (30)..(31): Xaa is C or S
EVIMPIKGYLLVRGNDFYLMNIPSTKVPAXXT

SEQ ID NO: 66212 - protein, 33 aa, Artificial Sequence; identical to SEQ ID NO: 20643
  Cyclic GFR-binding peptide
  MOD_RES (2)..(2): Xaa is C or S

SEQ ID NO: 66213 - protein, 35 aa, Artificial Sequence
  Cyclic GFR-binding peptide
  MOD_RES (29)..(30): Xaa is C or S
VMNPIKGYIVNSSDDFYLVNIPSLKTPAXXPKPVY

SEQ ID NO: 66214 - protein, 33 aa, Artificial Sequence; identical to SEQ ID NO: 20648
  Cyclic GFR-binding peptide
  MOD_RES (1)..(33): Xaa is C or S

SEQ ID NO: 66215 - protein, 29 aa, Artificial Sequence
  Cyclic GFR-binding peptide
  MOD_RES (1)..(1): Xaa is C or S
XARVVMNPIKGYIVNSSDDFYLVNIPSLQ

SEQ ID NO: 66216 - protein, 39 aa, Artificial Sequence; identical to SEQ ID NO: 20652
  Cyclic GFR-binding peptide
  MOD_RES (1)..(3)..(35)..(36): Xaa is C or S

SEQ ID NO: 66217 - protein, 32 aa, Artificial Sequence
  Cyclic GFR-binding peptide
  MOD_RES (2)..(4): Xaa is C or S
RXGXGEVVMEPIKGYVVKDYEDFYLMNIPSLE

SEQ ID NO: 66218 - protein, 30 aa, Artificial Sequence
  Cyclic GFR-binding peptide
  MOD_RES (28)..(29): Xaa is C or S
MDPIKGYVVNNAADFYLINIPSLRAPVXXS

SEQ ID NO: 66219 - protein, 30 aa, Artificial Sequence
  Cyclic GFR-binding peptide
  MOD_RES (1)..(3): Xaa is C or S
XGXAKVVMNPIKGYIVNNSSDFYLVNIPSL

SEQ ID NO: 66220 - protein, 35 aa, Artificial Sequence; identical to SEQ ID NO: 20657
  Cyclic GFR-binding peptide
  MOD_RES (32)..(33): Xaa is C or S

SEQ ID NO: 66221 - protein, 20 aa, Artificial Sequence
  Cyclic GFR-binding peptide
PIKGYIIQQKDNFYLMNIPS

SEQ ID NO: 66222 - protein, 33 aa, Artificial Sequence; identical to SEQ ID NO: 20662
  Cyclic GFR-binding peptide
  MOD_RES (32)..(33): Xaa is C or S

SEQ ID NO: 66223 - protein, 35 aa, Artificial Sequence; identical to SEQ ID NO: 20664
  Cyclic GFR-binding peptide
  MOD_RES (1)..(3)..(35): Xaa is C or S

SEQ ID NO: 66224 - protein, 29 aa, Artificial Sequence
  Cyclic GFR-binding peptide
  MOD_RES (26)..(27): Xaa is C or S
PIKGYTPVGMDDFYLVNIPSLKTPVXXAK

SEQ ID NO: 66225 - protein, 29 aa, Artificial Sequence
  Cyclic GFR-binding peptide
SEVVMDPIKGYVVNNASDFYLINIPSLRT

SEQ ID NO: 66226 - protein, 40 aa, Artificial Sequence; identical to SEQ ID NO: 20665
  Cyclic GFR-binding peptide
  MOD_RES (2)..(4)..(36)..(37): Xaa is C or S

SEQ ID NO: 66227 - protein, 21 aa, Artificial Sequence
  Cyclic GFR-binding peptide
DPIKGYVVNNASDFYLINIPS

SEQ ID NO: 66228 - protein, 41 aa, Artificial Sequence; identical to SEQ ID NO: 20666
  Cyclic GFR-binding peptide
  MOD_RES (1)..(3)..(35)..(36): Xaa is C or S

SEQ ID NO: 66229 - protein, 32 aa, Artificial Sequence
  Cyclic GFR-binding peptide
  MOD_RES (2)..(2): Xaa is C or S
GXSEVVMDPIKGYVVNNASDFYLINIPSLRTP

SEQ ID NO: 66230 - protein, 32 aa, Artificial Sequence; identical to SEQ ID NO: 20667
  Cyclic GFR-binding peptide
  MOD_RES (31)..(32): Xaa is C or S

SEQ ID NO: 66231 - protein, 28 aa, Artificial Sequence
  Cyclic GFR-binding peptide
VAMGPIKGYYTVVGKDFYLINIPSLKTP

SEQ ID NO: 66232 - protein, 26 aa, Artificial Sequence
  Cyclic GFR-binding peptide
MNPIKGYIVNSSDDFYLVNIPSLKTP

SEQ ID NO: 66233 - protein, 38 aa, Artificial Sequence; identical to SEQ ID NO: 20670
  Cyclic GFR-binding peptide
  MOD_RES (32)..(33): Xaa is C or S

SEQ ID NO: 66234 - protein, 26 aa, Artificial Sequence
  Cyclic GFR-binding peptide
KVVMNPIKGYIVNNSSDFYLVNIPSL

SEQ ID NO: 66235 - protein, 41 aa, Artificial Sequence; identical to SEQ ID NO: 20672
  Cyclic GFR-binding peptide
  MOD_RES (2)..(4)..(36)..(37): Xaa is C or S

SEQ ID NO: 66236 - protein, 41 aa, Artificial Sequence; identical to SEQ ID NO: 20674
  Cyclic GFR-binding peptide
  MOD_RES (1)..(3)..(35)..(36): Xaa is C or S

SEQ ID NO: 66237 - protein, 22 aa, Artificial Sequence
  Cyclic GFR-binding peptide
GPIKGYYTVVGKDFYLINIPSL

SEQ ID NO: 66238 - protein, 26 aa, Artificial Sequence
  Cyclic GFR-binding peptide
MDPIKGYVVNNASDFYLINIPSLRTP

SEQ ID NO: 66239 - protein, 35 aa, Artificial Sequence; identical to SEQ ID NO: 20676
  Cyclic GFR-binding peptide
  MOD_RES (2)..(33)..(34): Xaa is C or S

SEQ ID NO: 66240 - protein, 35 aa, Artificial Sequence
  Cyclic GFR-binding peptide
  MOD_RES (29)..(30): Xaa is C or S
VIMPIKGYLLVRGNDFYLMNIPSTKVPAXXTSPVR

SEQ ID NO: 66241 - protein, 33 aa, Artificial Sequence
  Cyclic GFR-binding peptide
  MOD_RES (2)..(4): Xaa is C or S
RXGXEAVSMGEPIKGYTPVGMDDFYLVNIPSLK

SEQ ID NO: 66242 - protein, 34 aa, Artificial Sequence; identical to SEQ ID NO: 20677
  Cyclic GFR-binding peptide
  MOD_RES (1)..(33)..(34): Xaa is C or S

SEQ ID NO: 66243 - protein, 24 aa, Artificial Sequence
  Cyclic GFR-binding peptide
VVMEPIKGYVVKDYEDFYLMNIPS

SEQ ID NO: 66244 - protein, 33 aa, Artificial Sequence
  Cyclic GFR-binding peptide
  MOD_RES (27)..(28): Xaa is C or S
NPIKGYIVNNSSDFYLVNIPSLKTPAXXAKPVA

SEQ ID NO: 66245 - protein, 35 aa, Artificial Sequence; identical to SEQ ID NO: 20678
  Cyclic GFR-binding peptide
  MOD_RES (32)..(33): Xaa is C or S

SEQ ID NO: 66246 - protein, 40 aa, Artificial Sequence; identical to SEQ ID NO: 20681
  Cyclic GFR-binding peptide
  MOD_RES (1)..(3)..(35)..(36): Xaa is C or S

SEQ ID NO: 66247 - protein, 33 aa, Artificial Sequence; identical to SEQ ID NO: 20682
  Cyclic GFR-binding peptide
  MOD_RES (33)..(33): Xaa is C or S

SEQ ID NO: 66248 - protein, 29 aa, Artificial Sequence
  Cyclic GFR-binding peptide
VAMGPIKGYYTVVGKDFYLINIPSLKTPV

SEQ ID NO: 66249 - protein, 33 aa, Artificial Sequence; identical to SEQ ID NO: 20689
  Cyclic GFR-binding peptide
  MOD_RES (1)..(33): Xaa is C or S

SEQ ID NO: 66250 - protein, 32 aa, Artificial Sequence
  Cyclic GFR-binding peptide
  MOD_RES (30)..(31): Xaa is C or S
VVMDPIKGYVVKENEDFYLMNIPSLETPVXXA

SEQ ID NO: 66251 - protein, 34 aa, Artificial Sequence
  Cyclic GFR-binding peptide
  MOD_RES (29)..(30): Xaa is C or S
VMDPIKGYVVNNAADFYLINIPSLRAPVXXSAPA

SEQ ID NO: 66252 - protein, 33 aa, Artificial Sequence
  Cyclic GFR-binding peptide
  MOD_RES (28)..(28): Xaa is C or S
MNPIKGYIVNSSDDFYLVNIPSLKTPAXTPKTV

SEQ ID NO: 66253 - protein, 27 aa, Artificial Sequence
  Cyclic GFR-binding peptide
VVMNPIKGYIVNSSDDFYLVNIPSLQT

SEQ ID NO: 66254 - protein, 34 aa, Artificial Sequence
  Cyclic GFR-binding peptide
  MOD_RES (2)..(4): Xaa is C or S
HXGXAKVVMNPIKGYIVNNSSDFYLVNIPSLKTP

SEQ ID NO: 66255 - protein, 34 aa, Artificial Sequence
  Cyclic GFR-binding peptide
  MOD_RES (29)..(29): Xaa is C or S
VMNPIKGYIVNSSDDFYLVNIPSLKTPAXTPKTV

SEQ ID NO: 66256 - protein, 38 aa, Artificial Sequence; identical to SEQ ID NO: 20703
  Cyclic GFR-binding peptide
  MOD_RES (2)..(4)..(36)..(37): Xaa is C or S

SEQ ID NO: 66257 - protein, 32 aa, Artificial Sequence
  Cyclic GFR-binding peptide
  MOD_RES (2)..(2): Xaa is C or S
GXGEVVMEPIKGYVVKDYEDFYLMNIPSLETP

SEQ ID NO: 66258 - protein, 31 aa, Artificial Sequence; identical to SEQ ID NO: 20706
  Cyclic GFR-binding peptide
  MOD_RES (1)..(1): Xaa is C or S

SEQ ID NO: 66259 - protein, 20 aa, Artificial Sequence
  Cyclic GFR-binding peptide
PIKGYVVKDYEDFYLMNIPS

SEQ ID NO: 66260 - protein, 30 aa, Artificial Sequence
  Cyclic GFR-binding peptide
  MOD_RES (29)..(30): Xaa is C or S
VMNPIKGYIVNSSDDFYLVNIPSLQTPAXX

SEQ ID NO: 66261 - protein, 39 aa, Artificial Sequence; identical to SEQ ID NO: 20709
  Cyclic GFR-binding peptide
  MOD_RES (1)..(33)..(34): Xaa is C or S

SEQ ID NO: 66262 - protein, 32 aa, Artificial Sequence
  Cyclic GFR-binding peptide
  MOD_RES (27)..(28): Xaa is C or S
EPIKGYVVKDYEDFYLMNIPSLETPVXXAKPI

SEQ ID NO: 66263 - protein, 32 aa, Artificial Sequence
  Cyclic GFR-binding peptide
  MOD_RES (1)..(3): Xaa is C or S
XGXAEVVMDPIKGYVVNNAADFYLINIPSLRA

SEQ ID NO: 66264 - protein, 25 aa, Artificial Sequence
  Cyclic GFR-binding peptide
EEVIMPIKGYLLVRGNDFYLMNIPS

SEQ ID NO: 66265 - protein, 41 aa, Artificial Sequence; identical to SEQ ID NO: 20712
  Cyclic GFR-binding peptide
  MOD_RES (2)..(4)..(36)..(37): Xaa is C or S

SEQ ID NO: 66266 - protein, 27 aa, Artificial Sequence
  Cyclic GFR-binding peptide
  MOD_RES (1)..(1): Xaa is C or S
XESVAMGPIKGYYTVVGKDFYLINIPS

SEQ ID NO: 66267 - protein, 37 aa, Artificial Sequence; identical to SEQ ID NO: 20716
  Cyclic GFR-binding peptide
  MOD_RES (1)..(33)..(34): Xaa is C or S

SEQ ID NO: 66268 - protein, 41 aa, Artificial Sequence; identical to SEQ ID NO: 20717
  Cyclic GFR-binding peptide
  MOD_RES (2)..(4)..(36)..(37): Xaa is C or S

SEQ ID NO: 66269 - protein, 35 aa, Artificial Sequence
  Cyclic GFR-binding peptide
  MOD_RES (29)..(30): Xaa is C or S
VMNPIKGYIVNNSSDFYLVNIPSLKTPAXXAKPVA

SEQ ID NO: 66270 - protein, 27 aa, Artificial Sequence
  Cyclic GFR-binding peptide
EVVMDPIKGYVVNNASDFYLINIPSLR

SEQ ID NO: 66271 - protein, 33 aa, Artificial Sequence; identical to SEQ ID NO: 20721
  Cyclic GFR-binding peptide
  MOD_RES (2)..(33): Xaa is C or S

SEQ ID NO: 66272 - protein, 32 aa, Artificial Sequence
  Cyclic GFR-binding peptide
  MOD_RES (26)..(26): Xaa is C or S
PIKGYIVNSSDDFYLVNIPSLKTPAXTPKTVH

SEQ ID NO: 66273 - protein, 28 aa, Artificial Sequence
  Cyclic GFR-binding peptide
VMDPIKGYVVNNAADFYLINIPSLRAPV

SEQ ID NO: 66274 - protein, 27 aa, Artificial Sequence
  Cyclic GFR-binding peptide
SMGEPIKGYTPVGMDDFYLVNIPSLKT

SEQ ID NO: 66275 - protein, 31 aa, Artificial Sequence
  Cyclic GFR-binding peptide
  MOD_RES (29)..(30): Xaa is C or S
VMNPIKGYIVNNSSDFYLVNIPSLKTPAXXA

SEQ ID NO: 66276 - protein, 36 aa, Artificial Sequence; identical to SEQ ID NO: 20727
  Cyclic GFR-binding peptide
  MOD_RES (1)..(33): Xaa is C or S

SEQ ID NO: 66277 - protein, 27 aa, Artificial Sequence
  Cyclic GFR-binding peptide
VIMPIKGYLLVRGNDFYLMNIPSTKVP

SEQ ID NO: 66278 - protein, 30 aa, Artificial Sequence
  Cyclic GFR-binding peptide
  MOD_RES (30)..(30): Xaa is C or S
SMGEPIKGYTPVGMDDFYLVNIPSLKTPVX

SEQ ID NO: 66279 - protein, 37 aa, Artificial Sequence
  Cyclic GFR-binding peptide
  MOD_RES (31)..(32): Xaa is C or S
VSMGEPIKGYTPVGMDDFYLVNIPSLKTPVXXAKGVK

SEQ ID NO: 66280 - protein, 31 aa, Artificial Sequence
  Cyclic GFR-binding peptide
  MOD_RES (2)..(2): Xaa is C or S
GXEAVSMGEPIKGYTPVGMDDFYLVNIPSLK

SEQ ID NO: 66281 - protein, 31 aa, Artificial Sequence
  Cyclic GFR-binding peptide
  MOD_RES (1)..(3): Xaa is C or S
XGXGEVVMEPIKGYVVKDYEDFYLMNIPSLE

SEQ ID NO: 66282 - protein, 26 aa, Artificial Sequence
  Cyclic GFR-binding peptide
SVAMGPIKGYYTVVGKDFYLINIPSL

SEQ ID NO: 66283 - protein, 34 aa, Artificial Sequence
  Cyclic GFR-binding peptide
  MOD_RES (29)..(30): Xaa is C or S
VIMPIKGYLLVRGNDFYLMNIPSTKVPAXXTSPV

SEQ ID NO: 66284 - protein, 26 aa, Artificial Sequence
  Cyclic GFR-binding peptide
VAMGPIKGYYTVVGKDFYLINIPSLK

SEQ ID NO: 66285 - protein, 31 aa, Artificial Sequence
  Cyclic GFR-binding peptide
  MOD_RES (30)..(31): Xaa is C or S
VVMNPIKGYIVNNSSDFYLVNIPSLKTPAXX

SEQ ID NO: 66286 - protein, 30 aa, Artificial Sequence
  Cyclic GFR-binding peptide
  MOD_RES (2)..(2): Xaa is C or S
GXESVAMGPIKGYYTVVGKDFYLINIPSLK

SEQ ID NO: 66287 - protein, 42 aa, Artificial Sequence
  Cyclic GFR-binding peptide
  MOD_RES (2)..(4)..(36)..(37): Xaa is C or S
RXGXAEVVMDPIKGYVVNNAADFYLINIPSLRAPVXXSAPAA

SEQ ID NO: 66288 - protein, 22 aa, Artificial Sequence
  Cyclic GFR-binding peptide
EPIKGYTPVGMDDFYLVNIPSL

SEQ ID NO: 66289 - protein, 37 aa, Artificial Sequence; identical to SEQ ID NO: 20744
  Cyclic GFR-binding peptide
  MOD_RES (31)..(32): Xaa is C or S

SEQ ID NO: 66290 - protein, 31 aa, Artificial Sequence
  Cyclic GFR-binding peptide
  MOD_RES (28)..(29): Xaa is C or S
MDPIKGYVVKENEDFYLMNIPSLETPVXXAK

SEQ ID NO: 66291 - protein, 30 aa, Artificial Sequence
  Cyclic GFR-binding peptide
  MOD_RES (27)..(28): Xaa is C or S
MPIKGYLLVRGNDFYLMNIPSTKVPAXXTS

SEQ ID NO: 66292 - protein, 29 aa, Artificial Sequence
  Cyclic GFR-binding peptide
  MOD_RES (28)..(29): Xaa is C or S
MNPIKGYIVNSSDDFYLVNIPSLQTPAXX

SEQ ID NO: 66293 - protein, 37 aa, Artificial Sequence; identical to SEQ ID NO: 20746
  Cyclic GFR-binding peptide
  MOD_RES (2)..(4)..(37): Xaa is C or S

SEQ ID NO: 66294 - protein, 33 aa, Artificial Sequence
  Cyclic GFR-binding peptide
  MOD_RES (29)..(30): Xaa is C or S
VMEPIKGYVVKDYEDFYLMNIPSLETPVXXAKP

SEQ ID NO: 66295 - protein, 31 aa, Artificial Sequence
  Cyclic GFR-binding peptide
  MOD_RES (1)..(1): Xaa is C or S
XSRVVMNPIKGYIVNSSDDFYLVNIPSLKTP

SEQ ID NO: 66296 - protein, 21 aa, Artificial Sequence
  Cyclic GFR-binding peptide
PIKGYVVKDYEDFYLMNIPSL

SEQ ID NO: 66297 - protein, 28 aa, Artificial Sequence
  Cyclic GFR-binding peptide
  MOD_RES (28)..(28): Xaa is C or S
GEPIKGYTPVGMDDFYLVNIPSLKTPVX

SEQ ID NO: 66298 - protein, 24 aa, Artificial Sequence
  Cyclic GFR-binding peptide
MGEPIKGYTPVGMDDFYLVNIPSL

SEQ ID NO: 66299 - protein, 24 aa, Artificial Sequence
  Cyclic GFR-binding peptide
PIKGYIVNSSDDFYLVNIPSLKTP

SEQ ID NO: 66300 - protein, 30 aa, Artificial Sequence
  Cyclic GFR-binding peptide
  MOD_RES (29)..(30): Xaa is C or S
VMDPIKGYVVNNAADFYLINIPSLRAPVXX

SEQ ID NO: 66301 - protein, 24 aa, Artificial Sequence
  Cyclic GFR-binding peptide
PIKGYTPVGMDDFYLVNIPSLKTP

SEQ ID NO: 66302 - protein, 24 aa, Artificial Sequence
  Cyclic GFR-binding peptide
NPIKGYIVNSSDDFYLVNIPSLQT

SEQ ID NO: 66303 - protein, 39 aa, Artificial Sequence; identical to SEQ ID NO: 20757
  Cyclic GFR-binding peptide
  MOD_RES (2)..(4)..(36)..(37): Xaa is C or S

SEQ ID NO: 66304 - protein, 37 aa, Artificial Sequence; identical to SEQ ID NO: 20758
  Cyclic GFR-binding peptide
  MOD_RES (2)..(4)..(35)..(36): Xaa is C or S

SEQ ID NO: 66305 - protein, 34 aa, Artificial Sequence
  Cyclic GFR-binding peptide
  MOD_RES (29)..(30): Xaa is C or S
VMNPIKGYIVNSSDDFYLVNIPSLKTPAXXPKPV

SEQ ID NO: 66306 - protein, 34 aa, Artificial Sequence
  Cyclic GFR-binding peptide
  MOD_RES (2)..(4): Xaa is C or S
RXGXAEVVMDPIKGYVVNNAADFYLINIPSLRAP

SEQ ID NO: 66307 - protein, 27 aa, Artificial Sequence
  Cyclic GFR-binding peptide
EVVMDPIKGYVVKENEDFYLMNIPSLE

SEQ ID NO: 66308 - protein, 26 aa, Artificial Sequence
  Cyclic GFR-binding peptide
EVVMDPIKGYVVNNASDFYLINIPSL

SEQ ID NO: 66309 - protein, 26 aa, Artificial Sequence
  Cyclic GFR-binding peptide
MNPIKGYIVNSSDDFYLVNIPSLQTP

SEQ ID NO: 66310 - protein, 38 aa, Artificial Sequence; identical to SEQ ID NO: 20772
  Cyclic GFR-binding peptide
  MOD_RES (1)..(33)..(34): Xaa is C or S

SEQ ID NO: 66311 - protein, 29 aa, Artificial Sequence
  Cyclic GFR-binding peptide
RVVMNPIKGYIVNSSDDFYLVNIPSLQTP

SEQ ID NO: 66312 - protein, 26 aa, Artificial Sequence
  Cyclic GFR-binding peptide
RVVMNPIKGYIVNSSDDFYLVNIPSL

SEQ ID NO: 66313 - protein, 25 aa, Artificial Sequence
  Cyclic GFR-binding peptide
VMNPIKGYIVNSSDDFYLVNIPSLK

SEQ ID NO: 66314 - protein, 25 aa, Artificial Sequence
  Cyclic GFR-binding peptide
VMNPIKGYIVNNSSDFYLVNIPSLK

SEQ ID NO: 66315 - protein, 32 aa, Artificial Sequence
  Cyclic GFR-binding peptide
  MOD_RES (1)..(3): Xaa is C or S
XGXESVAMGPIKGYYTVVGKDFYLINIPSLKT

SEQ ID NO: 66316 - protein, 38 aa, Artificial Sequence; identical to SEQ ID NO: 20779
  Cyclic GFR-binding peptide
  MOD_RES (2)..(4)..(36)..(37): Xaa is C or S

SEQ ID NO: 66317 - protein, 32 aa, Artificial Sequence
  Cyclic GFR-binding peptide
  MOD_RES (30)..(31): Xaa is C or S
VVMDPIKGYVVNNAADFYLINIPSLRAPVXXS

SEQ ID NO: 66318 - protein, 25 aa, Artificial Sequence
  Cyclic GFR-binding peptide
EVVMDPIKGYVVNNASDFYLINIPS

SEQ ID NO: 66319 - protein, 37 aa, Artificial Sequence; identical to SEQ ID NO: 20785
  Cyclic GFR-binding peptide
  MOD_RES (32)..(33): Xaa is C or S

SEQ ID NO: 66320 - protein, 35 aa, Artificial Sequence; identical to SEQ ID NO: 20787
  Cyclic GFR-binding peptide
  MOD_RES (2)..(35): Xaa is C or S

SEQ ID NO: 66321 - protein, 43 aa, Artificial Sequence; identical to SEQ ID NO: 20789
  Cyclic GFR-binding peptide
  MOD_RES (2)..(4)..(37)..(38): Xaa is C or S

SEQ ID NO: 66322 - protein, 23 aa, Artificial Sequence
  Cyclic GFR-binding peptide
MNPIKGYIVNNSSDFYLVNIPSL

SEQ ID NO: 66323 - protein, 36 aa, Artificial Sequence; identical to SEQ ID NO: 20790
  Cyclic GFR-binding peptide
  MOD_RES (1)..(34)..(35): Xaa is C or S

SEQ ID NO: 66324 - protein, 34 aa, Artificial Sequence
  Cyclic GFR-binding peptide
  MOD_RES (28)..(28): Xaa is C or S
MNPIKGYIVNSSDDFYLVNIPSLKTPAXTPKTVH

SEQ ID NO: 66325 - protein, 33 aa, Artificial Sequence; identical to SEQ ID NO: 20793
  Cyclic GFR-binding peptide
  MOD_RES (31)..(32): Xaa is C or S

SEQ ID NO: 66326 - protein, 20 aa, Artificial Sequence
  Cyclic GFR-binding peptide
PIKGYIVNSSDDFYLVNIPS

SEQ ID NO: 66327 - protein, 26 aa, Artificial Sequence
  Cyclic GFR-binding peptide
AMGPIKGYYTVVGKDFYLINIPSLKT

SEQ ID NO: 66328 - protein, 34 aa, Artificial Sequence
  Cyclic GFR-binding peptide
  MOD_RES (2)..(34): Xaa is C or S
GXARVVMNPIKGYIVNSSDDFYLVNIPSLQTPAX

SEQ ID NO: 66329 - protein, 26 aa, Artificial Sequence
  Cyclic GFR-binding peptide
VMNPIKGYIVNSSDDFYLVNIPSLQT

SEQ ID NO: 66330 - protein, 31 aa, Artificial Sequence
  Cyclic GFR-binding peptide
  MOD_RES (29)..(30): Xaa is C or S
VMDPIKGYVVKENEDFYLMNIPSLETPVXXA

SEQ ID NO: 66331 - protein, 28 aa, Artificial Sequence
  Cyclic GFR-binding peptide
VMNPIKGYIVNSSDDFYLVNIPSLQTPA

SEQ ID NO: 66332 - protein, 36 aa, Artificial Sequence; identical to SEQ ID NO: 20794
  Cyclic GFR-binding peptide
  MOD_RES (1)..(33)..(34): Xaa is C or S

SEQ ID NO: 66333 - protein, 29 aa, Artificial Sequence
  Cyclic GFR-binding peptide
  MOD_RES (1)..(1): Xaa is C or S
XGEVVMEPIKGYVVKDYEDFYLMNIPSLE

SEQ ID NO: 66334 - protein, 40 aa, Artificial Sequence; identical to SEQ ID NO: 20797
  Cyclic GFR-binding peptide
  MOD_RES (2)..(4)..(36)..(37): Xaa is C or S

SEQ ID NO: 66335 - protein, 28 aa, Artificial Sequence
  Cyclic GFR-binding peptide
  MOD_RES (28)..(28): Xaa is C or S
MEPIKGYVVKDYEDFYLMNIPSLETPVX

SEQ ID NO: 66336 - protein, 32 aa, Artificial Sequence
  Cyclic GFR-binding peptide
  MOD_RES (26)..(27): Xaa is C or S
PIKGYIVNNSSDFYLVNIPSLKTPAXXAKPVA

SEQ ID NO: 66337 - protein, 38 aa, Artificial Sequence; identical to SEQ ID NO: 20800
  Cyclic GFR-binding peptide
  MOD_RES (1)..(3)..(35)..(36): Xaa is C or S

SEQ ID NO: 66338 - protein, 34 aa, Artificial Sequence
  Cyclic GFR-binding peptide
  MOD_RES (28)..(29): Xaa is C or S
MNPIKGYIVNNSSDFYLVNIPSLKTPAXXAKPVA

SEQ ID NO: 66339 - protein, 40 aa, Artificial Sequence; identical to SEQ ID NO: 20803
  Cyclic GFR-binding peptide
  MOD_RES (2)..(35)..(36): Xaa is C or S

SEQ ID NO: 66340 - protein, 33 aa, Artificial Sequence
  Cyclic GFR-binding peptide
  MOD_RES (30)..(31): Xaa is C or S
VVMDPIKGYVVKENEDFYLMNIPSLETPVXXAK

SEQ ID NO: 66341 - protein, 30 aa, Artificial Sequence; identical to SEQ ID NO: 1964
  Cyclic GFR-binding peptide

SEQ ID NO: 66342 - protein, 28 aa, Artificial Sequence
  Cyclic GFR-binding peptide
  MOD_RES (1)..(1): Xaa is C or S
XGEVVMDPIKGYVVKENEDFYLMNIPSL

SEQ ID NO: 66343 - protein, 26 aa, Artificial Sequence
  Cyclic GFR-binding peptide
  MOD_RES (26)..(26): Xaa is C or S
PIKGYVVNNASDFYLINIPSLRTPVX

SEQ ID NO: 66344 - protein, 25 aa, Artificial Sequence
  Cyclic GFR-binding peptide
GEPIKGYTPVGMDDFYLVNIPSLKT

SEQ ID NO: 66345 - protein, 31 aa, Artificial Sequence
  Cyclic GFR-binding peptide
  MOD_RES (30)..(31): Xaa is C or S
VVMDPIKGYVVNNAADFYLINIPSLRAPVXX

SEQ ID NO: 66346 - protein, 33 aa, Artificial Sequence; identical to SEQ ID NO: 20811
  Cyclic GFR-binding peptide
  MOD_RES (31)..(32): Xaa is C or S

SEQ ID NO: 66347 - protein, 29 aa, Artificial Sequence
  Cyclic GFR-binding peptide
  MOD_RES (29)..(29): Xaa is C or S
VMNPIKGYIVNSSDDFYLVNIPSLKTPAX

SEQ ID NO: 66348 - protein, 28 aa, Artificial Sequence
  Cyclic GFR-binding peptide
EEVIMPIKGYLLVRGNDFYLMNIPSTKV

SEQ ID NO: 66349 - protein, 38 aa, Artificial Sequence; identical to SEQ ID NO: 20820
  Cyclic GFR-binding peptide
  MOD_RES (32)..(33): Xaa is C or S

SEQ ID NO: 66350 - protein, 29 aa, Artificial Sequence
  Cyclic GFR-binding peptide
  MOD_RES (26)..(27): Xaa is C or S
PIKGYVVKDYEDFYLMNIPSLETPVXXAK

SEQ ID NO: 66351 - protein, 34 aa, Artificial Sequence
  Cyclic GFR-binding peptide
  MOD_RES (32)..(33): Xaa is C or S
AVSMGEPIKGYTPVGMDDFYLVNIPSLKTPVXXA

SEQ ID NO: 66352 - protein, 30 aa, Artificial Sequence
  Cyclic GFR-binding peptide
  MOD_RES (26)..(27): Xaa is C or S
PIKGYTPVGMDDFYLVNIPSLKTPVXXAKG

SEQ ID NO: 66353 - protein, 38 aa, Artificial Sequence; identical to SEQ ID NO: 20824
  Cyclic GFR-binding peptide
  MOD_RES (2)..(34)..(35): Xaa is C or S

SEQ ID NO: 66354 - protein, 27 aa, Artificial Sequence
  Cyclic GFR-binding peptide
  MOD_RES (26)..(27): Xaa is C or S
PIKGYIVNSSDDFYLVNIPSLQTPAXX

SEQ ID NO: 66355 - protein, 27 aa, Artificial Sequence
  Cyclic GFR-binding peptide
  MOD_RES (26)..(26): Xaa is C or S
PIKGYIVNSSDDFYLVNIPSLKTPAXT

SEQ ID NO: 66356 - protein, 30 aa, Artificial Sequence
  Cyclic GFR-binding peptide
GEVVMDPIKGYVVKENEDFYLMNIPSLETP

SEQ ID NO: 66357 - protein, 28 aa, Artificial Sequence
  Cyclic GFR-binding peptide
VVMDPIKGYVVKENEDFYLMNIPSLETP

SEQ ID NO: 66358 - protein, 28 aa, Artificial Sequence
  Cyclic GFR-binding peptide
  MOD_RES (1)..(1): Xaa is C or S
XGEVVMEPIKGYVVKDYEDFYLMNIPSL

SEQ ID NO: 66359 - protein, 28 aa, Artificial Sequence
  Cyclic GFR-binding peptide
RVVMNPIKGYIVNSSDDFYLVNIPSLQT

SEQ ID NO: 66360 - protein, 38 aa, Artificial Sequence; identical to SEQ ID NO: 20832
  Cyclic GFR-binding peptide
  MOD_RES (2)..(4)..(35)..(36): Xaa is C or S

SEQ ID NO: 66361 - protein, 27 aa, Artificial Sequence
  Cyclic GFR-binding peptide
KVVMNPIKGYIVNNSSDFYLVNIPSLK

SEQ ID NO: 66362 - protein, 32 aa, Artificial Sequence
  Cyclic GFR-binding peptide
  MOD_RES (30)..(31): Xaa is C or S
VAMGPIKGYYTVVGKDFYLINIPSLKTPVXXA

SEQ ID NO: 66363 - protein, 27 aa, Artificial Sequence
  Cyclic GFR-binding peptide
VVMDPIKGYVVNNASDFYLINIPSLRT

SEQ ID NO: 66364 - protein, 40 aa, Artificial Sequence; identical to SEQ ID NO: 20836
  Cyclic GFR-binding peptide
  MOD_RES (1)..(3)..(35)..(36): Xaa is C or S

SEQ ID NO: 66365 - protein, 25 aa, Artificial Sequence
  Cyclic GFR-binding peptide
VIMPIKGYLLVRGNDFYLMNIPSTK

SEQ ID NO: 66366 - protein, 28 aa, Artificial Sequence
  Cyclic GFR-binding peptide
AVSMGEPIKGYTPVGMDDFYLVNIPSLK

SEQ ID NO: 66367 - protein, 28 aa, Artificial Sequence
  Cyclic GFR-binding peptide
SMGEPIKGYTPVGMDDFYLVNIPSLKTP

SEQ ID NO: 66368 - protein, 28 aa, Artificial Sequence
  Cyclic GFR-binding peptide
  MOD_RES (1)..(1): Xaa is C or S
XSRVVMNPIKGYIVNSSDDFYLVNIPSL

SEQ ID NO: 66369 - protein, 37 aa, Artificial Sequence; identical to SEQ ID NO: 20844
  Cyclic GFR-binding peptide
  MOD_RES (2)..(4)..(36)..(37): Xaa is C or S

SEQ ID NO: 66370 - protein, 37 aa, Artificial Sequence; identical to SEQ ID NO: 20845
  Cyclic GFR-binding peptide
  MOD_RES (2)..(34)..(35): Xaa is C or S

SEQ ID NO: 66371 - protein, 35 aa, Artificial Sequence
  Cyclic GFR-binding peptide
  MOD_RES (2)..(4): Xaa is C or S
RXGXEAVSMGEPIKGYTPVGMDDFYLVNIPSLKTP

SEQ ID NO: 66372 - protein, 38 aa, Artificial Sequence; identical to SEQ ID NO: 20847
  Cyclic GFR-binding peptide
  MOD_RES (1)..(3)..(35)..(36): Xaa is C or S

SEQ ID NO: 66373 - protein, 36 aa, Artificial Sequence; identical to SEQ ID NO: 20848
  Cyclic GFR-binding peptide
  MOD_RES (32)..(33): Xaa is C or S

SEQ ID NO: 66374 - protein, 28 aa, Artificial Sequence
  Cyclic GFR-binding peptide
  MOD_RES (26)..(27): Xaa is C or S
PIKGYVVNNAADFYLINIPSLRAPVXXS

SEQ ID NO: 66375 - protein, 35 aa, Artificial Sequence
  Cyclic GFR-binding peptide
  MOD_RES (30)..(31): Xaa is C or S
VVMNPIKGYIVNNSSDFYLVNIPSLKTPAXXAKPV

SEQ ID NO: 66376 - protein, 35 aa, Artificial Sequence; identical to SEQ ID NO: 20850
  Cyclic GFR-binding peptide
  MOD_RES (2)..(34)..(35): Xaa is C or S

SEQ ID NO: 66377 - protein, 25 aa, Artificial Sequence
  Cyclic GFR-binding peptide
MEPIKGYVVKDYEDFYLMNIPSLET

SEQ ID NO: 66378 - protein, 40 aa, Artificial Sequence; identical to SEQ ID NO: 20857
  Cyclic GFR-binding peptide
  MOD_RES (1)..(3)..(35)..(36): Xaa is C or S

SEQ ID NO: 66379 - protein, 32 aa, Artificial Sequence
  Cyclic GFR-binding peptide
  MOD_RES (30)..(31): Xaa is C or S
VVMEPIKGYVVKDYEDFYLMNIPSLETPVXXA

SEQ ID NO: 66380 - protein, 33 aa, Artificial Sequence
  Cyclic GFR-binding peptide
  MOD_RES (31)..(32): Xaa is C or S
VSMGEPIKGYTPVGMDDFYLVNIPSLKTPVXXA

SEQ ID NO: 66381 - protein, 36 aa, Artificial Sequence
  Cyclic GFR-binding peptide
  MOD_RES (30)..(31): Xaa is C or S
SMGEPIKGYTPVGMDDFYLVNIPSLKTPVXXAKGVK

SEQ ID NO: 66382 - protein, 24 aa, Artificial Sequence
  Cyclic GFR-binding peptide
PIKGYYTVVGKDFYLINIPSLKTP

SEQ ID NO: 66383 - protein, 27 aa, Artificial Sequence
  Cyclic GFR-binding peptide
  MOD_RES (27)..(27): Xaa is C or S
NPIKGYIVNSSDDFYLVNIPSLQTPAX

SEQ ID NO: 66384 - protein, 37 aa, Artificial Sequence; identical to SEQ ID NO: 20862
  Cyclic GFR-binding peptide
  MOD_RES (31)..(32): Xaa is C or S

SEQ ID NO: 66385 - protein, 33 aa, Artificial Sequence
  Cyclic GFR-binding peptide
  MOD_RES (30)..(31): Xaa is C or S
VVMEPIKGYVVKDYEDFYLMNIPSLETPVXXAK

SEQ ID NO: 66386 - protein, 25 aa, Artificial Sequence
  Cyclic GFR-binding peptide
IMPIKGYLLVRGNDFYLMNIPSTKV

SEQ ID NO: 66387 - protein, 36 aa, Artificial Sequence; identical to SEQ ID NO: 20866
  Cyclic GFR-binding peptide
  MOD_RES (1)..(3)..(35)..(36): Xaa is C or S

SEQ ID NO: 66388 - protein, 27 aa, Artificial Sequence
  Cyclic GFR-binding peptide
  MOD_RES (1)..(1): Xaa is C or S
XGEVVMDPIKGYVVKENEDFYLMNIPS

SEQ ID NO: 66389 - protein, 26 aa, Artificial Sequence
  Cyclic GFR-binding peptide
AKVVMNPIKGYIVNNSSDFYLVNIPS

SEQ ID NO: 66390 - protein, 21 aa, Artificial Sequence
  Cyclic GFR-binding peptide
NPIKGYIVNNSSDFYLVNIPS

SEQ ID NO: 66391 - protein, 31 aa, Artificial Sequence
  Cyclic GFR-binding peptide
  MOD_RES (29)..(29): Xaa is C or S
VMNPIKGYIVNSSDDFYLVNIPSLKTPAXTP

SEQ ID NO: 66392 - protein, 40 aa, Artificial Sequence; identical to SEQ ID NO: 20869
  Cyclic GFR-binding peptide
  MOD_RES (1)..(3)..(36)..(37): Xaa is C or S

SEQ ID NO: 66393 - protein, 26 aa, Artificial Sequence
  Cyclic GFR-binding peptide
EVVMEPIKGYVVKDYEDFYLMNIPSL

SEQ ID NO: 66394 - protein, 30 aa, Artificial Sequence
  Cyclic GFR-binding peptide
  MOD_RES (26)..(27): Xaa is C or S
PIKGYIVNSSDDFYLVNIPSLKTPAXXPKP

SEQ ID NO: 66395 - protein, 36 aa, Artificial Sequence; identical to SEQ ID NO: 20875
  Cyclic GFR-binding peptide
  MOD_RES (1)..(3)..(35): Xaa is C or S

SEQ ID NO: 66396 - protein, 27 aa, Artificial Sequence
  Cyclic GFR-binding peptide
MGEPIKGYTPVGMDDFYLVNIPSLKTP

SEQ ID NO: 66397 - protein, 36 aa, Artificial Sequence; identical to SEQ ID NO: 20877
  Cyclic GFR-binding peptide
  MOD_RES (2)..(4)..(36): Xaa is C or S

SEQ ID NO: 66398 - protein, 37 aa, Artificial Sequence; identical to SEQ ID NO: 20880
  Cyclic GFR-binding peptide
  MOD_RES (1)..(3)..(35): Xaa is C or S

SEQ ID NO: 66399 - protein, 39 aa, Artificial Sequence; identical to SEQ ID NO: 20884
  Cyclic GFR-binding peptide
  MOD_RES (1)..(34)..(35): Xaa is C or S

SEQ ID NO: 66400 - protein, 22 aa, Artificial Sequence
  Cyclic GFR-binding peptide
PIKGYYTVVGKDFYLINIPSLK

SEQ ID NO: 66401 - protein, 28 aa, Artificial Sequence
  Cyclic GFR-binding peptide
EVVMDPIKGYVVNNAADFYLINIPSLRA

SEQ ID NO: 66402 - protein, 33 aa, Artificial Sequence
  Cyclic GFR-binding peptide
  MOD_RES (1)..(3): Xaa is C or S
XGXGEVVMDPIKGYVVKENEDFYLMNIPSLETP

SEQ ID NO: 66403 - protein, 22 aa, Artificial Sequence
  Cyclic GFR-binding peptide
MPIKGYLLVRGNDFYLMNIPST

SEQ ID NO: 66404 - protein, 34 aa, Artificial Sequence
  Cyclic GFR-binding peptide
  MOD_RES (28)..(29): Xaa is C or S
MDPIKGYVVKENEDFYLMNIPSLETPVXXAKPIK

SEQ ID NO: 66405 - protein, 27 aa, Artificial Sequence
  Cyclic GFR-binding peptide
EAVSMGEPIKGYTPVGMDDFYLVNIPS

SEQ ID NO: 66406 - protein, 32 aa, Artificial Sequence
  Cyclic GFR-binding peptide
  MOD_RES (26)..(27): Xaa is C or S
PIKGYLLVRGNDFYLMNIPSTKVPAXXTSPVR

SEQ ID NO: 66407 - protein, 30 aa, Artificial Sequence
  Cyclic GFR-binding peptide
  MOD_RES (28)..(29): Xaa is C or S
MNPIKGYIVNNSSDFYLVNIPSLKTPAXXA

SEQ ID NO: 66408 - protein, 28 aa, Artificial Sequence
  Cyclic GFR-binding peptide
VVMNPIKGYIVNNSSDFYLVNIPSLKTP

SEQ ID NO: 66409 - protein, 38 aa, Artificial Sequence; identical to SEQ ID NO: 20895
  Cyclic GFR-binding peptide
  MOD_RES (33)..(34): Xaa is C or S

SEQ ID NO: 66410 - protein, 34 aa, Artificial Sequence
  Cyclic GFR-binding peptide
  MOD_RES (29)..(30): Xaa is C or S
VMNPIKGYIVNSSDDFYLVNIPSLQTPAXXPKPV

SEQ ID NO: 66411 - protein, 23 aa, Artificial Sequence
  Cyclic GFR-binding peptide
PIKGYTPVGMDDFYLVNIPSLKT

SEQ ID NO: 66412 - protein, 26 aa, Artificial Sequence
  Cyclic GFR-binding peptide
EVVMDPIKGYVVKENEDFYLMNIPSL

SEQ ID NO: 66413 - protein, 30 aa, Artificial Sequence
  Cyclic GFR-binding peptide
  MOD_RES (30)..(30): Xaa is C or S
EVIMPIKGYLLVRGNDFYLMNIPSTKVPAX

SEQ ID NO: 66414 - protein, 30 aa, Artificial Sequence
  Cyclic GFR-binding peptide
  MOD_RES (2)..(4): Xaa is C or S
RXGXAEVVMDPIKGYVVNNAADFYLINIPS

SEQ ID NO: 66415 - protein, 32 aa, Artificial Sequence
  Cyclic GFR-binding peptide
  MOD_RES (28)..(29): Xaa is C or S
IMPIKGYLLVRGNDFYLMNIPSTKVPAXXTSP

SEQ ID NO: 66416 - protein, 37 aa, Artificial Sequence; identical to SEQ ID NO: 20901
  Cyclic GFR-binding peptide
  MOD_RES (1)..(3)..(35)..(36): Xaa is C or S

SEQ ID NO: 66417 - protein, 41 aa, Artificial Sequence; identical to SEQ ID NO: 20902
  Cyclic GFR-binding peptide
  MOD_RES (2)..(4)..(36)..(37): Xaa is C or S

SEQ ID NO: 66418 - protein, 27 aa, Artificial Sequence
  Cyclic GFR-binding peptide
  MOD_RES (26)..(27): Xaa is C or S
PIKGYLLVRGNDFYLMNIPSTKVPAXX

SEQ ID NO: 66419 - protein, 33 aa, Artificial Sequence
  Cyclic GFR-binding peptide
  MOD_RES (2)..(2): Xaa is C or S
GXEAVSMGEPIKGYTPVGMDDFYLVNIPSLKTP

SEQ ID NO: 66420 - protein, 34 aa, Artificial Sequence; identical to SEQ ID NO: 20905
  Cyclic GFR-binding peptide
  MOD_RES (2)..(34): Xaa is C or S

SEQ ID NO: 66421 - protein, 35 aa, Artificial Sequence; identical to SEQ ID NO: 20906
  Cyclic GFR-binding peptide
  MOD_RES (31)..(32): Xaa is C or S

SEQ ID NO: 66422 - protein, 32 aa, Artificial Sequence
  Cyclic GFR-binding peptide
  MOD_RES (26)..(27): Xaa is C or S
PIKGYIVNSSDDFYLVNIPSLKTPAXXPKPVH

SEQ ID NO: 66423 - protein, 39 aa, Artificial Sequence; identical to SEQ ID NO: 20910
  Cyclic GFR-binding peptide
  MOD_RES (2)..(34)..(35): Xaa is C or S

SEQ ID NO: 66424 - protein, 24 aa, Artificial Sequence
  Cyclic GFR-binding peptide
VMNPIKGYIVNNSSDFYLVNIPSL

SEQ ID NO: 66425 - protein, 31 aa, Artificial Sequence
  Cyclic GFR-binding peptide
  MOD_RES (2)..(2): Xaa is C or S
GXEEVIMPIKGYLLVRGNDFYLMNIPSTKVP

SEQ ID NO: 66426 - protein, 32 aa, Artificial Sequence; identical to SEQ ID NO: 20913
  Cyclic GFR-binding peptide
  MOD_RES (1)..(1): Xaa is C or S

SEQ ID NO: 66427 - protein, 38 aa, Artificial Sequence; identical to SEQ ID NO: 20912
  Cyclic GFR-binding peptide
  MOD_RES (2)..(34)..(35): Xaa is C or S

SEQ ID NO: 66428 - protein, 35 aa, Artificial Sequence; identical to SEQ ID NO: 20915
  Cyclic GFR-binding peptide
  MOD_RES (31)..(32): Xaa is C or S

SEQ ID NO: 66429 - protein, 34 aa, Artificial Sequence; identical to SEQ ID NO: 20917
  Cyclic GFR-binding peptide
  MOD_RES (31)..(32): Xaa is C or S

SEQ ID NO: 66430 - protein, 28 aa, Artificial Sequence
  Cyclic GFR-binding peptide
  MOD_RES (26)..(26): Xaa is C or S
PIKGYIVNSSDDFYLVNIPSLKTPAXTP

SEQ ID NO: 66431 - protein, 41 aa, Artificial Sequence; identical to SEQ ID NO: 20918
  Cyclic GFR-binding peptide
  MOD_RES (1)..(3)..(35)..(36): Xaa is C or S

SEQ ID NO: 66432 - protein, 27 aa, Artificial Sequence
  Cyclic GFR-binding peptide
ESVAMGPIKGYYTVVGKDFYLINIPSL

SEQ ID NO: 66433 - protein, 29 aa, Artificial Sequence
  Cyclic GFR-binding peptide
AVSMGEPIKGYTPVGMDDFYLVNIPSLKT

SEQ ID NO: 66434 - protein, 38 aa, Artificial Sequence; identical to SEQ ID NO: 20923
  Cyclic GFR-binding peptide
  MOD_RES (2)..(34)..(35): Xaa is C or S

SEQ ID NO: 66435 - protein, 26 aa, Artificial Sequence
  Cyclic GFR-binding peptide
VMNPIKGYIVNSSDDFYLVNIPSLKT

SEQ ID NO: 66436 - protein, 34 aa, Artificial Sequence; identical to SEQ ID NO: 20932
  Cyclic GFR-binding peptide
  MOD_RES (2)..(2): Xaa is C or S

SEQ ID NO: 66437 - protein, 28 aa, Artificial Sequence
  Cyclic GFR-binding peptide
  MOD_RES (26)..(27): Xaa is C or S
PIKGYIVNSSDDFYLVNIPSLKTPAXXP

SEQ ID NO: 66438 - protein, 37 aa, Artificial Sequence; identical to SEQ ID NO: 20934
  Cyclic GFR-binding peptide
  MOD_RES (32)..(33): Xaa is C or S

SEQ ID NO: 66439 - protein, 27 aa, Artificial Sequence
  Cyclic GFR-binding peptide
EVVMEPIKGYVVKDYEDFYLMNIPSLE

SEQ ID NO: 66440 - protein, 35 aa, Artificial Sequence; identical to SEQ ID NO: 20936
  Cyclic GFR-binding peptide
  MOD_RES (32)..(33): Xaa is C or S

SEQ ID NO: 66441 - protein, 33 aa, Artificial Sequence
  Cyclic GFR-binding peptide
  MOD_RES (28)..(29): Xaa is C or S
IMPIKGYLLVRGNDFYLMNIPSTKVPAXXTSPV

SEQ ID NO: 66442 - protein, 31 aa, Artificial Sequence
  Cyclic GFR-binding peptide
  MOD_RES (28)..(28): Xaa is C or S
MNPIKGYIVNSSDDFYLVNIPSLKTPAXTPK

SEQ ID NO: 66443 - protein, 23 aa, Artificial Sequence
  Cyclic GFR-binding peptide
DPIKGYVVNNAADFYLINIPSLR

SEQ ID NO: 66444 - protein, 33 aa, Artificial Sequence
  Cyclic GFR-binding peptide
  MOD_RES (30)..(31): Xaa is C or S
VVMNPIKGYIVNNSSDFYLVNIPSLKTPAXXAK

SEQ ID NO: 66445 - protein, 33 aa, Artificial Sequence
  Cyclic GFR-binding peptide
  MOD_RES (1)..(3): Xaa is C or S
XGXGEVVMEPIKGYVVKDYEDFYLMNIPSLETP

SEQ ID NO: 66446 - protein, 32 aa, Artificial Sequence
  Cyclic GFR-binding peptide
  MOD_RES (27)..(28): Xaa is C or S
DPIKGYVVNNAADFYLINIPSLRAPVXXSAPA

SEQ ID NO: 66447 - protein, 30 aa, Artificial Sequence
  Cyclic GFR-binding peptide
  MOD_RES (1)..(1): Xaa is C or S
XSEVVMDPIKGYVVNNASDFYLINIPSLRT

SEQ ID NO: 66448 - protein, 41 aa, Artificial Sequence; identical to SEQ ID NO: 20951
  Cyclic GFR-binding peptide
  MOD_RES (2)..(4)..(37)..(38): Xaa is C or S

SEQ ID NO: 66449 - protein, 25 aa, Artificial Sequence
  Cyclic GFR-binding peptide
EVIMPIKGYLLVRGNDFYLMNIPST

SEQ ID NO: 66450 - protein, 41 aa, Artificial Sequence; identical to SEQ ID NO: 20953
  Cyclic GFR-binding peptide
  MOD_RES (2)..(4)..(36)..(37): Xaa is C or S

SEQ ID NO: 66451 - protein, 30 aa, Artificial Sequence
  Cyclic GFR-binding peptide
  MOD_RES (1)..(3): Xaa is C or S
XGXGEVVMEPIKGYVVKDYEDFYLMNIPSL

SEQ ID NO: 66452 - protein, 30 aa, Artificial Sequence
  Cyclic GFR-binding peptide
  MOD_RES (2)..(4): Xaa is C or S
LXGXEEVIMPIKGYLLVRGNDFYLMNIPST

SEQ ID NO: 66453 - protein, 31 aa, Artificial Sequence
  Cyclic GFR-binding peptide
  MOD_RES (1)..(1): Xaa is C or S
XARVVMNPIKGYIVNSSDDFYLVNIPSLQTP

SEQ ID NO: 66454 - protein, 38 aa, Artificial Sequence; identical to SEQ ID NO: 20956
  Cyclic GFR-binding peptide
  MOD_RES (1)..(33)..(34): Xaa is C or S

SEQ ID NO: 66455 - protein, 35 aa, Artificial Sequence; identical to SEQ ID NO: 20958
  Cyclic GFR-binding peptide
  MOD_RES (31)..(32): Xaa is C or S

SEQ ID NO: 66456 - protein, 30 aa, Artificial Sequence
  Cyclic GFR-binding peptide
  MOD_RES (1)..(1): Xaa is C or S
XESVAMGPIKGYYTVVGKDFYLINIPSLKT

SEQ ID NO: 66457 - protein, 35 aa, Artificial Sequence; identical to SEQ ID NO: 20961
  Cyclic GFR-binding peptide
  MOD_RES (1)..(33)..(34): Xaa is C or S

SEQ ID NO: 66458 - protein, 29 aa, Artificial Sequence
  Cyclic GFR-binding peptide
EEVIMPIKGYLLVRGNDFYLMNIPSTKVP

SEQ ID NO: 66459 - protein, 29 aa, Artificial Sequence
  Cyclic GFR-binding peptide
  MOD_RES (29)..(29): Xaa is C or S
MGEPIKGYTPVGMDDFYLVNIPSLKTPVX

SEQ ID NO: 66460 - protein, 27 aa, Artificial Sequence
  Cyclic GFR-binding peptide
  MOD_RES (26)..(27): Xaa is C or S
PIKGYTPVGMDDFYLVNIPSLKTPVXX

SEQ ID NO: 66461 - protein, 31 aa, Artificial Sequence
  Cyclic GFR-binding peptide
  MOD_RES (1)..(1): Xaa is C or S
XGEVVMEPIKGYVVKDYEDFYLMNIPSLETP

SEQ ID NO: 66462 - protein, 28 aa, Artificial Sequence
  Cyclic GFR-binding peptide
  MOD_RES (2)..(2): Xaa is C or S
GXESVAMGPIKGYYTVVGKDFYLINIPS

SEQ ID NO: 66463 - protein, 37 aa, Artificial Sequence; identical to SEQ ID NO: 20968
  Cyclic GFR-binding peptide
  MOD_RES (1)..(33)..(34): Xaa is C or S

SEQ ID NO: 66464 - protein, 34 aa, Artificial Sequence; identical to SEQ ID NO: 20970
  Cyclic GFR-binding peptide
  MOD_RES (33)..(34): Xaa is C or S

SEQ ID NO: 66465 - protein, 35 aa, Artificial Sequence; identical to SEQ ID NO: 20972
  Cyclic GFR-binding peptide
  MOD_RES (1)..(33)..(34): Xaa is C or S

SEQ ID NO: 66466 - protein, 20 aa, Artificial Sequence
  Cyclic GFR-binding peptide
PIKGYVVNNAADFYLINIPS

SEQ ID NO: 66467 - protein, 40 aa, Artificial Sequence; identical to SEQ ID NO: 20974
  Cyclic GFR-binding peptide
  MOD_RES (2)..(4)..(36)..(37): Xaa is C or S

SEQ ID NO: 66468 - protein, 36 aa, Artificial Sequence; identical to SEQ ID NO: 20975
  Cyclic GFR-binding peptide
  MOD_RES (1)..(3)..(35)..(36): Xaa is C or S

SEQ ID NO: 66469 - protein, 29 aa, Artificial Sequence
  Cyclic GFR-binding peptide
  MOD_RES (27)..(28): Xaa is C or S
NPIKGYIVNSSDDFYLVNIPSLKTPAXXP

SEQ ID NO: 66470 - protein, 32 aa, Artificial Sequence
  Cyclic GFR-binding peptide
  MOD_RES (29)..(30): Xaa is C or S
VMDPIKGYVVNNAADFYLINIPSLRAPVXXSA

SEQ ID NO: 66471 - protein, 33 aa, Artificial Sequence
  Cyclic GFR-binding peptide
  MOD_RES (27)..(28): Xaa is C or S
EPIKGYVVKDYEDFYLMNIPSLETPVXXAKPIS

SEQ ID NO: 66472 - protein, 24 aa, Artificial Sequence
  Cyclic GFR-binding peptide
PIKGYVVNNAADFYLINIPSLRAP

SEQ ID NO: 66473 - protein, 36 aa, Artificial Sequence
  Cyclic GFR-binding peptide
  MOD_RES (30)..(31): Xaa is C or S
VVMNPIKGYIVNNSSDFYLVNIPSLKTPAXXAKPVA

SEQ ID NO: 66474 - protein, 32 aa, Artificial Sequence
  Cyclic GFR-binding peptide
  MOD_RES (31)..(32): Xaa is C or S
VSMGEPIKGYTPVGMDDFYLVNIPSLKTPVXX

SEQ ID NO: 66475 - protein, 27 aa, Artificial Sequence
  Cyclic GFR-binding peptide
  MOD_RES (27)..(27): Xaa is C or S
EPIKGYTPVGMDDFYLVNIPSLKTPVX

SEQ ID NO: 66476 - protein, 29 aa, Artificial Sequence
  Cyclic GFR-binding peptide
  MOD_RES (29)..(29): Xaa is C or S
VMEPIKGYVVKDYEDFYLMNIPSLETPVX

SEQ ID NO: 66477 - protein, 26 aa, Artificial Sequence
  Cyclic GFR-binding peptide
VVMNPIKGYIVNNSSDFYLVNIPSLK

SEQ ID NO: 66478 - protein, 27 aa, Artificial Sequence
  Cyclic GFR-binding peptide
GEVVMEPIKGYVVKDYEDFYLMNIPSL

SEQ ID NO: 66479 - protein, 29 aa, Artificial Sequence
  Cyclic GFR-binding peptide
ARVVMNPIKGYIVNSSDDFYLVNIPSLQT

SEQ ID NO: 66480 - protein, 32 aa, Artificial Sequence; identical to SEQ ID NO: 20983
  Cyclic GFR-binding peptide

SEQ ID NO: 66481 - protein, 29 aa, Artificial Sequence
  Cyclic GFR-binding peptide
EVVMDPIKGYVVNNAADFYLINIPSLRAP

SEQ ID NO: 66482 - protein, 27 aa, Artificial Sequence
  Cyclic GFR-binding peptide
IMPIKGYLLVRGNDFYLMNIPSTKVPA

SEQ ID NO: 66483 - protein, 35 aa, Artificial Sequence; identical to SEQ ID NO: 20987
  Cyclic GFR-binding peptide
  MOD_RES (2)..(34)..(35): Xaa is C or S

SEQ ID NO: 66484 - protein, 36 aa, Artificial Sequence; identical to SEQ ID NO: 20988
  Cyclic GFR-binding peptide
  MOD_RES (31)..(32): Xaa is C or S

SEQ ID NO: 66485 - protein, 40 aa, Artificial Sequence; identical to SEQ ID NO: 20989
  Cyclic GFR-binding peptide
  MOD_RES (2)..(34): Xaa is C or S

SEQ ID NO: 66486 - protein, 39 aa, Artificial Sequence; identical to SEQ ID NO: 20990
  Cyclic GFR-binding peptide
  MOD_RES (2)..(4)..(36)..(37): Xaa is C or S

SEQ ID NO: 66487 - protein, 36 aa, Artificial Sequence; identical to SEQ ID NO: 20992
  Cyclic GFR-binding peptide
  MOD_RES (31)..(32): Xaa is C or S

SEQ ID NO: 66488 - protein, 37 aa, Artificial Sequence; identical to SEQ ID NO: 20993
  Cyclic GFR-binding peptide
  MOD_RES (1)..(3)..(34)..(35): Xaa is C or S

SEQ ID NO: 66489 - protein, 30 aa, Artificial Sequence
  Cyclic GFR-binding peptide
  MOD_RES (29)..(30): Xaa is C or S
AMGPIKGYYTVVGKDFYLINIPSLKTPVXX

SEQ ID NO: 66490 - protein, 23 aa, Artificial Sequence
  Cyclic GFR-binding peptide
NPIKGYIVNNSSDFYLVNIPSLK

SEQ ID NO: 66491 - protein, 39 aa, Artificial Sequence; identical to SEQ ID NO: 21000
  Cyclic GFR-binding peptide
  MOD_RES (2)..(34)..(35): Xaa is C or S

SEQ ID NO: 66492 - protein, 25 aa, Artificial Sequence
  Cyclic GFR-binding peptide
MNPIKGYIVNSSDDFYLVNIPSLQT

SEQ ID NO: 66493 - protein, 36 aa, Artificial Sequence; identical to SEQ ID NO: 21002
  Cyclic GFR-binding peptide
  MOD_RES (31)..(32): Xaa is C or S

SEQ ID NO: 66494 - protein, 37 aa, Artificial Sequence; identical to SEQ ID NO: 21003
  Cyclic GFR-binding peptide
  MOD_RES (1)..(3)..(35)..(36): Xaa is C or S

SEQ ID NO: 66495 - protein, 28 aa, Artificial Sequence
  Cyclic GFR-binding peptide
  MOD_RES (27)..(28): Xaa is C or S
EPIKGYTPVGMDDFYLVNIPSLKTPVXX

SEQ ID NO: 66496 - protein, 26 aa, Artificial Sequence
  Cyclic GFR-binding peptide
VIMPIKGYLLVRGNDFYLMNIPSTKV

SEQ ID NO: 66497 - protein, 29 aa, Artificial Sequence
  Cyclic GFR-binding peptide
  MOD_RES (26)..(27): Xaa is C or S
PIKGYVVNNASDFYLINIPSLRTPVXXTP

SEQ ID NO: 66498 - protein, 35 aa, Artificial Sequence
  Cyclic GFR-binding peptide
  MOD_RES (30)..(31): Xaa is C or S
VVMDPIKGYVVKENEDFYLMNIPSLETPVXXAKPI

SEQ ID NO: 66499 - protein, 23 aa, Artificial Sequence
  Cyclic GFR-binding peptide
AMGPIKGYYTVVGKDFYLINIPS

SEQ ID NO: 66500 - protein, 27 aa, Artificial Sequence
  Cyclic GFR-binding peptide
  MOD_RES (26)..(27): Xaa is C or S
PIKGYVVKDYEDFYLMNIPSLETPVXX

SEQ ID NO: 66501 - protein, 33 aa, Artificial Sequence
  Cyclic GFR-binding peptide
  MOD_RES (2)..(4): Xaa is C or S
HXGXARVVMNPIKGYIVNSSDDFYLVNIPSLQT

SEQ ID NO: 66502 - protein, 23 aa, Artificial Sequence
  Cyclic GFR-binding peptide
MGEPIKGYTPVGMDDFYLVNIPS

SEQ ID NO: 66503 - protein, 30 aa, Artificial Sequence
  Cyclic GFR-binding peptide
  MOD_RES (28)..(29): Xaa is C or S
MDPIKGYVVKENEDFYLMNIPSLETPVXXA

SEQ ID NO: 66504 - protein, 24 aa, Artificial Sequence
  Cyclic GFR-binding peptide
DPIKGYVVKENEDFYLMNIPSLET

SEQ ID NO: 66505 - protein, 36 aa, Artificial Sequence; identical to SEQ ID NO: 21010
  Cyclic GFR-binding peptide
  MOD_RES (2)..(4)..(36): Xaa is C or S

SEQ ID NO: 66506 - protein, 32 aa, Artificial Sequence
  Cyclic GFR-binding peptide
  MOD_RES (30)..(31): Xaa is C or S
SMGEPIKGYTPVGMDDFYLVNIPSLKTPVXXA

SEQ ID NO: 66507 - protein, 36 aa, Artificial Sequence; identical to SEQ ID NO: 21017
  Cyclic GFR-binding peptide
  MOD_RES (2)..(4)..(36): Xaa is C or S

SEQ ID NO: 66508 - protein, 33 aa, Artificial Sequence
  Cyclic GFR-binding peptide
  MOD_RES (29)..(30): Xaa is C or S
AMGPIKGYYTVVGKDFYLINIPSLKTPVXXAKS

SEQ ID NO: 66509 - protein, 34 aa, Artificial Sequence; identical to SEQ ID NO: 21020
  Cyclic GFR-binding peptide
  MOD_RES (32)..(33): Xaa is C or S

SEQ ID NO: 66510 - protein, 33 aa, Artificial Sequence
  Cyclic GFR-binding peptide
  MOD_RES (2)..(4): Xaa is C or S
RXGXGEVVMDPIKGYVVKENEDFYLMNIPSLET

SEQ ID NO: 66511 - protein, 40 aa, Artificial Sequence; identical to SEQ ID NO: 21024
  Cyclic GFR-binding peptide
  MOD_RES (2)..(34)..(35): Xaa is C or S

SEQ ID NO: 66512 - protein, 34 aa, Artificial Sequence; identical to SEQ ID NO: 21036
  Cyclic GFR-binding peptide
  MOD_RES (1)..(33): Xaa is C or S

SEQ ID NO: 66513 - protein, 28 aa, Artificial Sequence
  Cyclic GFR-binding peptide
  MOD_RES (26)..(27): Xaa is C or S
PIKGYVVKDYEDFYLMNIPSLETPVXXA

SEQ ID NO: 66514 - protein, 24 aa, Artificial Sequence
  Cyclic GFR-binding peptide
MGPIKGYYTVVGKDFYLINIPSLK

SEQ ID NO: 66515 - protein, 36 aa, Artificial Sequence; identical to SEQ ID NO: 21040
  Cyclic GFR-binding peptide
  MOD_RES (1)..(3)..(35)..(36): Xaa is C or S

SEQ ID NO: 66516 - protein, 40 aa, Artificial Sequence
  Cyclic GFR-binding peptide
  MOD_RES (1)..(3)..(35)..(36): Xaa is C or S
XGXAEVVMDPIKGYVVNNAADFYLINIPSLRAPVXXSAPA

SEQ ID NO: 66517 - protein, 28 aa, Artificial Sequence
  Cyclic GFR-binding peptide
  MOD_RES (27)..(28): Xaa is C or S
MPIKGYLLVRGNDFYLMNIPSTKVPAXX

SEQ ID NO: 66518 - protein, 35 aa, Artificial Sequence; identical to SEQ ID NO: 21043
  Cyclic GFR-binding peptide
  MOD_RES (2)..(34)..(35): Xaa is C or S

SEQ ID NO: 66519 - protein, 29 aa, Artificial Sequence
  Cyclic GFR-binding peptide
  MOD_RES (28)..(29): Xaa is C or S
GEPIKGYTPVGMDDFYLVNIPSLKTPVXX

SEQ ID NO: 66520 - protein, 30 aa, Artificial Sequence
  Cyclic GFR-binding peptide
  MOD_RES (1)..(3): Xaa is C or S
XGXSRVVMNPIKGYIVNSSDDFYLVNIPSL

SEQ ID NO: 66521 - protein, 27 aa, Artificial Sequence
  Cyclic GFR-binding peptide
VMNPIKGYIVNSSDDFYLVNIPSLQTP

SEQ ID NO: 66522 - protein, 32 aa, Artificial Sequence
  Cyclic GFR-binding peptide
  MOD_RES (26)..(27): Xaa is C or S
PIKGYIVNSSDDFYLVNIPSLKTPAXXPKPVY

SEQ ID NO: 66523 - protein, 34 aa, Artificial Sequence
  Cyclic GFR-binding peptide
  MOD_RES (2)..(4): Xaa is C or S
RXGXSEVVMDPIKGYVVNNASDFYLINIPSLRTP

SEQ ID NO: 66524 - protein, 27 aa, Artificial Sequence
  Cyclic GFR-binding peptide
  MOD_RES (1)..(1): Xaa is C or S
XAKVVMNPIKGYIVNNSSDFYLVNIPS

SEQ ID NO: 66525 - protein, 23 aa, Artificial Sequence
  Cyclic GFR-binding peptide
DPIKGYVVKENEDFYLMNIPSLE

SEQ ID NO: 66526 - protein, 29 aa, Artificial Sequence
  Cyclic GFR-binding peptide
  MOD_RES (27)..(28): Xaa is C or S
MPIKGYLLVRGNDFYLMNIPSTKVPAXXT

SEQ ID NO: 66527 - protein, 32 aa, Artificial Sequence
  Cyclic GFR-binding peptide
  MOD_RES (2)..(4): Xaa is C or S
RXGXEAVSMGEPIKGYTPVGMDDFYLVNIPSL

SEQ ID NO: 66528 - protein, 30 aa, Artificial Sequence
  Cyclic GFR-binding peptide
  MOD_RES (28)..(29): Xaa is C or S
MNPIKGYIVNSSDDFYLVNIPSLQTPAXXP

SEQ ID NO: 66529 - protein, 37 aa, Artificial Sequence; identical to SEQ ID NO: 21050
  Cyclic GFR-binding peptide
  MOD_RES (2)..(4)..(36)..(37): Xaa is C or S

SEQ ID NO: 66530 - protein, 32 aa, Artificial Sequence
  Cyclic GFR-binding peptide
  MOD_RES (30)..(30): Xaa is C or S
VVMNPIKGYIVNSSDDFYLVNIPSLKTPAXTP

SEQ ID NO: 66531 - protein, 38 aa, Artificial Sequence; identical to SEQ ID NO: 21054
  Cyclic GFR-binding peptide
  MOD_RES (2)..(34)..(35): Xaa is C or S

SEQ ID NO: 66532 - protein, 26 aa, Artificial Sequence
  Cyclic GFR-binding peptide
VMNPIKGYIVNNSSDFYLVNIPSLKT

SEQ ID NO: 66533 - protein, 40 aa, Artificial Sequence; identical to SEQ ID NO: 21056
  Cyclic GFR-binding peptide
  MOD_RES (2)..(4)..(35)..(36): Xaa is C or S

SEQ ID NO: 66534 - protein, 28 aa, Artificial Sequence
  Cyclic GFR-binding peptide
VVMEPIKGYVVKDYEDFYLMNIPSLETP

SEQ ID NO: 66535 - protein, 31 aa, Artificial Sequence
  Cyclic GFR-binding peptide
  MOD_RES (2)..(4): Xaa is C or S
RXGXGEVVMDPIKGYVVKENEDFYLMNIPSL

SEQ ID NO: 66536 - protein, 35 aa, Artificial Sequence; identical to SEQ ID NO: 21058
  Cyclic GFR-binding peptide
  MOD_RES (2)..(34)..(35): Xaa is C or S

SEQ ID NO: 66537 - protein, 31 aa, Artificial Sequence; identical to SEQ ID NO: 21059
  Cyclic GFR-binding peptide

SEQ ID NO: 66538 - protein, 35 aa, Artificial Sequence; identical to SEQ ID NO: 21060
  Cyclic GFR-binding peptide
  MOD_RES (31)..(32): Xaa is C or S

SEQ ID NO: 66539 - protein, 36 aa, Artificial Sequence; identical to SEQ ID NO: 21063
  Cyclic GFR-binding peptide
  MOD_RES (1)..(3)..(35)..(36): Xaa is C or S

SEQ ID NO: 66540 - protein, 33 aa, Artificial Sequence; identical to SEQ ID NO: 21064
  Cyclic GFR-binding peptide
  MOD_RES (31)..(32): Xaa is C or S

SEQ ID NO: 66541 - protein, 33 aa, Artificial Sequence
  Cyclic GFR-binding peptide
  MOD_RES (2)..(4): Xaa is C or S
HXGXAKVVMNPIKGYIVNNSSDFYLVNIPSLKT

SEQ ID NO: 66542 - protein, 34 aa, Artificial Sequence
  Cyclic GFR-binding peptide
  MOD_RES (30)..(31): Xaa is C or S
SMGEPIKGYTPVGMDDFYLVNIPSLKTPVXXAKG

SEQ ID NO: 66543 - protein, 36 aa, Artificial Sequence
  Cyclic GFR-binding peptide
  MOD_RES (30)..(31): Xaa is C or S
VVMDPIKGYVVNNAADFYLINIPSLRAPVXXSAPAA

SEQ ID NO: 66544 - protein, 32 aa, Artificial Sequence
  Cyclic GFR-binding peptide
  MOD_RES (30)..(31): Xaa is C or S
VVMNPIKGYIVNNSSDFYLVNIPSLKTPAXXA

SEQ ID NO: 66545 - protein, 29 aa, Artificial Sequence
  Cyclic GFR-binding peptide
  MOD_RES (26)..(27): Xaa is C or S
PIKGYIVNSSDDFYLVNIPSLKTPAXXPK

SEQ ID NO: 66546 - protein, 27 aa, Artificial Sequence
  Cyclic GFR-binding peptide
GEPIKGYTPVGMDDFYLVNIPSLKTPV

SEQ ID NO: 66547 - protein, 30 aa, Artificial Sequence
  Cyclic GFR-binding peptide
  MOD_RES (27)..(28): Xaa is C or S
DPIKGYVVNNASDFYLINIPSLRTPVXXTP

SEQ ID NO: 66548 - protein, 28 aa, Artificial Sequence
  Cyclic GFR-binding peptide
AEVVMDPIKGYVVNNAADFYLINIPSLR

SEQ ID NO: 66549 - protein, 33 aa, Artificial Sequence
  Cyclic GFR-binding peptide
  MOD_RES (28)..(29): Xaa is C or S
GEPIKGYTPVGMDDFYLVNIPSLKTPVXXAKGV

SEQ ID NO: 66550 - protein, 29 aa, Artificial Sequence
  Cyclic GFR-binding peptide
AEVVMDPIKGYVVNNAADFYLINIPSLRA

SEQ ID NO: 66551 - protein, 26 aa, Artificial Sequence
  Cyclic GFR-binding peptide
  MOD_RES (26)..(26): Xaa is C or S
PIKGYTPVGMDDFYLVNIPSLKTPVX

SEQ ID NO: 66552 - protein, 36 aa, Artificial Sequence; identical to SEQ ID NO: 21077
  Cyclic GFR-binding peptide
  MOD_RES (1)..(33)..(34): Xaa is C or S

SEQ ID NO: 66553 - protein, 35 aa, Artificial Sequence; identical to SEQ ID NO: 21079
  Cyclic GFR-binding peptide
  MOD_RES (31)..(31): Xaa is C or S

SEQ ID NO: 66554 - protein, 31 aa, Artificial Sequence
  Cyclic GFR-binding peptide
  MOD_RES (26)..(26): Xaa is C or S
PIKGYIVNSSDDFYLVNIPSLKTPAXTPKTV

SEQ ID NO: 66555 - protein, 28 aa, Artificial Sequence
  Cyclic GFR-binding peptide
VMEPIKGYVVKDYEDFYLMNIPSLETPV

SEQ ID NO: 66556 - protein, 22 aa, Artificial Sequence
  Cyclic GFR-binding peptide
PIKGYIVNSSDDFYLVNIPSLQ

SEQ ID NO: 66557 - protein, 31 aa, Artificial Sequence
  Cyclic GFR-binding peptide
  MOD_RES (30)..(31): Xaa is C or S
VVMEPIKGYVVKDYEDFYLMNIPSLETPVXX

SEQ ID NO: 66558 - protein, 35 aa, Artificial Sequence; identical to SEQ ID NO: 21084
  Cyclic GFR-binding peptide
  MOD_RES (1)..(33)..(34): Xaa is C or S

SEQ ID NO: 66559 - protein, 28 aa, Artificial Sequence
  Cyclic GFR-binding peptide
MGEPIKGYTPVGMDDFYLVNIPSLKTPV

SEQ ID NO: 66560 - protein, 27 aa, Artificial Sequence
  Cyclic GFR-binding peptide
  MOD_RES (1)..(1): Xaa is C or S
XGEVVMEPIKGYVVKDYEDFYLMNIPS

SEQ ID NO: 66561 - protein, 25 aa, Artificial Sequence
  Cyclic GFR-binding peptide
MPIKGYLLVRGNDFYLMNIPSTKVP

SEQ ID NO: 66562 - protein, 31 aa, Artificial Sequence
  Cyclic GFR-binding peptide
  MOD_RES (1)..(3): Xaa is C or S
XGXARVVMNPIKGYIVNSSDDFYLVNIPSLQ

SEQ ID NO: 66563 - protein, 40 aa, Artificial Sequence; identical to SEQ ID NO: 21088
  Cyclic GFR-binding peptide
  MOD_RES (1)..(3)..(35)..(36): Xaa is C or S

SEQ ID NO: 66564 - protein, 37 aa, Artificial Sequence; identical to SEQ ID NO: 21091
  Cyclic GFR-binding peptide
  MOD_RES (1)..(3)..(35)..(36): Xaa is C or S

SEQ ID NO: 66565 - protein, 38 aa, Artificial Sequence; identical to SEQ ID NO: 21092
  Cyclic GFR-binding peptide
  MOD_RES (32)..(33): Xaa is C or S

SEQ ID NO: 66566 - protein, 22 aa, Artificial Sequence
  Cyclic GFR-binding peptide
DPIKGYVVKENEDFYLMNIPSL

SEQ ID NO: 66567 - protein, 36 aa, Artificial Sequence; identical to SEQ ID NO: 21093
  Cyclic GFR-binding peptide
  MOD_RES (2)..(4)..(36): Xaa is C or S

SEQ ID NO: 66568 - protein, 28 aa, Artificial Sequence
  Cyclic GFR-binding peptide
  MOD_RES (27)..(27): Xaa is C or S
NPIKGYIVNSSDDFYLVNIPSLKTPAXT

SEQ ID NO: 66569 - protein, 38 aa, Artificial Sequence; identical to SEQ ID NO: 21095
  Cyclic GFR-binding peptide
  MOD_RES (2)..(4)..(36)..(37): Xaa is C or S

SEQ ID NO: 66570 - protein, 29 aa, Artificial Sequence
  Cyclic GFR-binding peptide
  MOD_RES (1)..(1): Xaa is C or S
XAKVVMNPIKGYIVNNSSDFYLVNIPSLK

SEQ ID NO: 66571 - protein, 30 aa, Artificial Sequence
  Cyclic GFR-binding peptide
  MOD_RES (27)..(28): Xaa is C or S
NPIKGYIVNSSDDFYLVNIPSLKTPAXXPK

SEQ ID NO: 66572 - protein, 24 aa, Artificial Sequence
  Cyclic GFR-binding peptide
NPIKGYIVNNSSDFYLVNIPSLKT

SEQ ID NO: 66573 - protein, 33 aa, Artificial Sequence; identical to SEQ ID NO: 21099
  Cyclic GFR-binding peptide
  MOD_RES (32)..(33): Xaa is C or S

SEQ ID NO: 66574 - protein, 28 aa, Artificial Sequence
  Cyclic GFR-binding peptide
  MOD_RES (2)..(2): Xaa is C or S
GXAEVVMDPIKGYVVNNAADFYLINIPS

SEQ ID NO: 66575 - protein, 28 aa, Artificial Sequence
  Cyclic GFR-binding peptide
ESVAMGPIKGYYTVVGKDFYLINIPSLK

SEQ ID NO: 66576 - protein, 37 aa, Artificial Sequence; identical to SEQ ID NO: 21102
  Cyclic GFR-binding peptide
  MOD_RES (1)..(3)..(35)..(36): Xaa is C or S

SEQ ID NO: 66577 - protein, 35 aa, Artificial Sequence; identical to SEQ ID NO: 21103
  Cyclic GFR-binding peptide
  MOD_RES (32)..(33): Xaa is C or S

SEQ ID NO: 66578 - protein, 27 aa, Artificial Sequence
  Cyclic GFR-binding peptide
SRVVMNPIKGYIVNSSDDFYLVNIPSL

SEQ ID NO: 66579 - protein, 31 aa, Artificial Sequence
  Cyclic GFR-binding peptide
  MOD_RES (29)..(30): Xaa is C or S
VMNPIKGYIVNSSDDFYLVNIPSLQTPAXXP

SEQ ID NO: 66580 - protein, 35 aa, Artificial Sequence; identical to SEQ ID NO: 21106
  Cyclic GFR-binding peptide
  MOD_RES (31)..(32): Xaa is C or S

SEQ ID NO: 66581 - protein, 32 aa, Artificial Sequence; identical to SEQ ID NO: 21108
  Cyclic GFR-binding peptide
  MOD_RES (32)..(32): Xaa is C or S

SEQ ID NO: 66582 - protein, 27 aa, Artificial Sequence
  Cyclic GFR-binding peptide
ARVVMNPIKGYIVNSSDDFYLVNIPSL

SEQ ID NO: 66583 - protein, 31 aa, Artificial Sequence
  Cyclic GFR-binding peptide
  MOD_RES (1)..(3): Xaa is C or S
XGXGEVVMDPIKGYVVKENEDFYLMNIPSLE

SEQ ID NO: 66584 - protein, 36 aa, Artificial Sequence; identical to SEQ ID NO: 21114
  Cyclic GFR-binding peptide
  MOD_RES (32)..(33): Xaa is C or S

SEQ ID NO: 66585 - protein, 29 aa, Artificial Sequence
  Cyclic GFR-binding peptide
  MOD_RES (28)..(29): Xaa is C or S
IMPIKGYLLVRGNDFYLMNIPSTKVPAXX

SEQ ID NO: 66586 - protein, 37 aa, Artificial Sequence; identical to SEQ ID NO: 21115
  Cyclic GFR-binding peptide
  MOD_RES (32)..(33): Xaa is C or S

SEQ ID NO: 66587 - protein, 23 aa, Artificial Sequence
  Cyclic GFR-binding peptide
MGPIKGYYTVVGKDFYLINIPSL

SEQ ID NO: 66588 - protein, 29 aa, Artificial Sequence
  Cyclic GFR-binding peptide
  MOD_RES (1)..(1): Xaa is C or S
XGEVVMDPIKGYVVKENEDFYLMNIPSLE

SEQ ID NO: 66589 - protein, 32 aa, Artificial Sequence; identical to SEQ ID NO: 21118
  Cyclic GFR-binding peptide
  MOD_RES (1)..(1): Xaa is C or S

SEQ ID NO: 66590 - protein, 31 aa, Artificial Sequence
  Cyclic GFR-binding peptide
  MOD_RES (28)..(29): Xaa is C or S
MDPIKGYVVNNASDFYLINIPSLRTPVXXTP

SEQ ID NO: 66591 - protein, 34 aa, Artificial Sequence
  Cyclic GFR-binding peptide
  MOD_RES (28)..(29): Xaa is C or S
MNPIKGYIVNSSDDFYLVNIPSLQTPAXXPKPVT

SEQ ID NO: 66592 - protein, 23 aa, Artificial Sequence
  Cyclic GFR-binding peptide
VMNPIKGYIVNSSDDFYLVNIPS

SEQ ID NO: 66593 - protein, 29 aa, Artificial Sequence
  Cyclic GFR-binding peptide
  MOD_RES (27)..(28): Xaa is C or S
EPIKGYVVKDYEDFYLMNIPSLETPVXXA

SEQ ID NO: 66594 - protein, 33 aa, Artificial Sequence
  Cyclic GFR-binding peptide
  MOD_RES (2)..(4): Xaa is C or S
LXGXEEVIMPIKGYLLVRGNDFYLMNIPSTKVP

SEQ ID NO: 66595 - protein, 27 aa, Artificial Sequence
  Cyclic GFR-binding peptide
AEVVMDPIKGYVVNNAADFYLINIPSL

SEQ ID NO: 66596 - protein, 38 aa, Artificial Sequence; identical to SEQ ID NO: 21123
  Cyclic GFR-binding peptide
  MOD_RES (1)..(33)..(34): Xaa is C or S

SEQ ID NO: 66597 - protein, 36 aa, Artificial Sequence; identical to SEQ ID NO: 21127
  Cyclic GFR-binding peptide
  MOD_RES (1)..(3)..(35)..(36): Xaa is C or S

SEQ ID NO: 66598 - protein, 34 aa, Artificial Sequence; identical to SEQ ID NO: 21130
  Cyclic GFR-binding peptide
  MOD_RES (32)..(33): Xaa is C or S

SEQ ID NO: 66599 - protein, 35 aa, Artificial Sequence
  Cyclic GFR-binding peptide
  MOD_RES (29)..(30): Xaa is C or S
VMDPIKGYVVNNASDFYLINIPSLRTPVXXTPPTS

SEQ ID NO: 66600 - protein, 31 aa, Artificial Sequence
  Cyclic GFR-binding peptide
  MOD_RES (27)..(28): Xaa is C or S
EPIKGYTPVGMDDFYLVNIPSLKTPVXXAKG

SEQ ID NO: 66601 - protein, 41 aa, Artificial Sequence; identical to SEQ ID NO: 21136
  Cyclic GFR-binding peptide
  MOD_RES (1)..(3)..(35)..(36): Xaa is C or S

SEQ ID NO: 66602 - protein, 29 aa, Artificial Sequence
  Cyclic GFR-binding peptide
  MOD_RES (2)..(2): Xaa is C or S
GXAKVVMNPIKGYIVNNSSDFYLVNIPSL

SEQ ID NO: 66603 - protein, 26 aa, Artificial Sequence
  Cyclic GFR-binding peptide
VSMGEPIKGYTPVGMDDFYLVNIPSL

SEQ ID NO: 66604 - protein, 36 aa, Artificial Sequence; identical to SEQ ID NO: 21138
  Cyclic GFR-binding peptide
  MOD_RES (32)..(32): Xaa is C or S

SEQ ID NO: 66605 - protein, 29 aa, Artificial Sequence
  Cyclic GFR-binding peptide
  MOD_RES (1)..(1): Xaa is C or S
XSEVVMDPIKGYVVNNASDFYLINIPSLR

SEQ ID NO: 66606 - protein, 23 aa, Artificial Sequence
  Cyclic GFR-binding peptide
PIKGYIVNSSDDFYLVNIPSLKT

SEQ ID NO: 66607 - protein, 33 aa, Artificial Sequence
  Cyclic GFR-binding peptide
  MOD_RES (30)..(31): Xaa is C or S
VVMDPIKGYVVNNAADFYLINIPSLRAPVXXSA

SEQ ID NO: 66608 - protein, 39 aa, Artificial Sequence; identical to SEQ ID NO: 21146
  Cyclic GFR-binding peptide
  MOD_RES (2)..(35)..(36): Xaa is C or S

SEQ ID NO: 66609 - protein, 29 aa, Artificial Sequence
  Cyclic GFR-binding peptide
  MOD_RES (2)..(2): Xaa is C or S
GXSEVVMDPIKGYVVNNASDFYLINIPSL

SEQ ID NO: 66610 - protein, 28 aa, Artificial Sequence
  Cyclic GFR-binding peptide
  MOD_RES (27)..(28): Xaa is C or S
NPIKGYIVNNSSDFYLVNIPSLKTPAXX

SEQ ID NO: 66611 - protein, 24 aa, Artificial Sequence
  Cyclic GFR-binding peptide
MPIKGYLLVRGNDFYLMNIPSTKV

SEQ ID NO: 66612 - protein, 22 aa, Artificial Sequence
  Cyclic GFR-binding peptide
PIKGYVVNNASDFYLINIPSLR

SEQ ID NO: 66613 - protein, 39 aa, Artificial Sequence; identical to SEQ ID NO: 21152
  Cyclic GFR-binding peptide
  MOD_RES (1)..(33)..(34): Xaa is C or S

SEQ ID NO: 66614 - protein, 30 aa, Artificial Sequence
  Cyclic GFR-binding peptide
  MOD_RES (27)..(28): Xaa is C or S
EPIKGYTPVGMDDFYLVNIPSLKTPVXXAK

SEQ ID NO: 66615 - protein, 30 aa, Artificial Sequence
  Cyclic GFR-binding peptide
  MOD_RES (26)..(27): Xaa is C or S
PIKGYVVKDYEDFYLMNIPSLETPVXXAKP

SEQ ID NO: 66616 - protein, 32 aa, Artificial Sequence
  Cyclic GFR-binding peptide
  MOD_RES (27)..(28): Xaa is C or S
NPIKGYIVNSSDDFYLVNIPSLQTPAXXPKPV

SEQ ID NO: 66617 - protein, 27 aa, Artificial Sequence
  Cyclic GFR-binding peptide
VAMGPIKGYYTVVGKDFYLINIPSLKT

SEQ ID NO: 66618 - protein, 25 aa, Artificial Sequence
  Cyclic GFR-binding peptide
MNPIKGYIVNNSSDFYLVNIPSLKT

SEQ ID NO: 66619 - protein, 33 aa, Artificial Sequence
  Cyclic GFR-binding peptide
  MOD_RES (29)..(30): Xaa is C or S
VMDPIKGYVVNNAADFYLINIPSLRAPVXXSAP

SEQ ID NO: 66620 - protein, 31 aa, Artificial Sequence
  Cyclic GFR-binding peptide
  MOD_RES (26)..(27): Xaa is C or S
PIKGYIVNSSDDFYLVNIPSLKTPAXXPKPV

SEQ ID NO: 66621 - protein, 33 aa, Artificial Sequence
  Cyclic GFR-binding peptide
  MOD_RES (28)..(29): Xaa is C or S
MEPIKGYVVKDYEDFYLMNIPSLETPVXXAKPI

SEQ ID NO: 66622 - protein, 31 aa, Artificial Sequence; identical to SEQ ID NO: 21160
  Cyclic GFR-binding peptide

SEQ ID NO: 66623 - protein, 27 aa, Artificial Sequence
  Cyclic GFR-binding peptide
VMDPIKGYVVNNAADFYLINIPSLRAP

SEQ ID NO: 66624 - protein, 38 aa, Artificial Sequence; identical to SEQ ID NO: 21163
  Cyclic GFR-binding peptide
  MOD_RES (1)..(33)..(34): Xaa is C or S

SEQ ID NO: 66625 - protein, 34 aa, Artificial Sequence; identical to SEQ ID NO: 21162
  Cyclic GFR-binding peptide
  MOD_RES (1)..(3): Xaa is C or S

SEQ ID NO: 66626 - protein, 37 aa, Artificial Sequence; identical to SEQ ID NO: 21164
  Cyclic GFR-binding peptide
  MOD_RES (2)..(4)..(36)..(37): Xaa is C or S

SEQ ID NO: 66627 - protein, 41 aa, Artificial Sequence; identical to SEQ ID NO: 21169
  Cyclic GFR-binding peptide
  MOD_RES (1)..(3)..(35)..(36): Xaa is C or S

SEQ ID NO: 66628 - protein, 27 aa, Artificial Sequence
  Cyclic GFR-binding peptide
MGPIKGYYTVVGKDFYLINIPSLKTPV

SEQ ID NO: 66629 - protein, 29 aa, Artificial Sequence
  Cyclic GFR-binding peptide
  MOD_RES (26)..(27): Xaa is C or S
PIKGYLLVRGNDFYLMNIPSTKVPAXXTS

SEQ ID NO: 66630 - protein, 37 aa, Artificial Sequence; identical to SEQ ID NO: 21172
  Cyclic GFR-binding peptide
  MOD_RES (2)..(33)..(34): Xaa is C or S

SEQ ID NO: 66631 - protein, 36 aa, Artificial Sequence; identical to SEQ ID NO: 21173
  Cyclic GFR-binding peptide
  MOD_RES (1)..(3)..(35)..(36): Xaa is C or S

SEQ ID NO: 66632 - protein, 31 aa, Artificial Sequence
  Cyclic GFR-binding peptide
  MOD_RES (2)..(2): Xaa is C or S
GXAKVVMNPIKGYIVNNSSDFYLVNIPSLKT

SEQ ID NO: 66633 - protein, 23 aa, Artificial Sequence
  Cyclic GFR-binding peptide
MDPIKGYVVNNAADFYLINIPSL

SEQ ID NO: 66634 - protein, 37 aa, Artificial Sequence; identical to SEQ ID NO: 21174
  Cyclic GFR-binding peptide
  MOD_RES (1)..(32)..(33): Xaa is C or S

SEQ ID NO: 66635 - protein, 26 aa, Artificial Sequence
  Cyclic GFR-binding peptide
DPIKGYVVNNAADFYLINIPSLRAPV

SEQ ID NO: 66636 - protein, 32 aa, Artificial Sequence; identical to SEQ ID NO: 21179
  Cyclic GFR-binding peptide
  MOD_RES (1)..(1): Xaa is C or S

SEQ ID NO: 66637 - protein, 22 aa, Artificial Sequence
  Cyclic GFR-binding peptide
NPIKGYIVNSSDDFYLVNIPSL

SEQ ID NO: 66638 - protein, 25 aa, Artificial Sequence
  Cyclic GFR-binding peptide
AMGPIKGYYTVVGKDFYLINIPSLK

SEQ ID NO: 66639 - protein, 31 aa, Artificial Sequence
  Cyclic GFR-binding peptide
  MOD_RES (29)..(30): Xaa is C or S
AMGPIKGYYTVVGKDFYLINIPSLKTPVXXA

SEQ ID NO: 66640 - protein, 42 aa, Artificial Sequence; identical to SEQ ID NO: 21183
  Cyclic GFR-binding peptide
  MOD_RES (2)..(4)..(36)..(37): Xaa is C or S

SEQ ID NO: 66641 - protein, 33 aa, Artificial Sequence
  Cyclic GFR-binding peptide
  MOD_RES (29)..(29): Xaa is C or S
VMNPIKGYIVNSSDDFYLVNIPSLKTPAXTPKT

SEQ ID NO: 66642 - protein, 32 aa, Artificial Sequence; identical to SEQ ID NO: 21185
  Cyclic GFR-binding peptide
  MOD_RES (1)..(32): Xaa is C or S

SEQ ID NO: 66643 - protein, 37 aa, Artificial Sequence; identical to SEQ ID NO: 21187
  Cyclic GFR-binding peptide
  MOD_RES (2)..(34)..(35): Xaa is C or S

SEQ ID NO: 66644 - protein, 37 aa, Artificial Sequence; identical to SEQ ID NO: 21188
  Cyclic GFR-binding peptide
  MOD_RES (31)..(32): Xaa is C or S

SEQ ID NO: 66645 - protein, 21 aa, Artificial Sequence
  Cyclic GFR-binding peptide
PIKGYVVKENEDFYLMNIPSL

SEQ ID NO: 66646 - protein, 32 aa, Artificial Sequence; identical to SEQ ID NO: 21191
  Cyclic GFR-binding peptide
  MOD_RES (31)..(32): Xaa is C or S

SEQ ID NO: 66647 - protein, 32 aa, Artificial Sequence
  Cyclic GFR-binding peptide
  MOD_RES (27)..(28): Xaa is C or S
NPIKGYIVNSSDDFYLVNIPSLKTPAXXPKPV

SEQ ID NO: 66648 - protein, 22 aa, Artificial Sequence
  Cyclic GFR-binding peptide
MDPIKGYVVNNASDFYLINIPS

SEQ ID NO: 66649 - protein, 26 aa, Artificial Sequence
  Cyclic GFR-binding peptide
  MOD_RES (26)..(26): Xaa is C or S
PIKGYIVNSSDDFYLVNIPSLQTPAX

SEQ ID NO: 66650 - protein, 38 aa, Artificial Sequence; identical to SEQ ID NO: 21198
  Cyclic GFR-binding peptide
  MOD_RES (32)..(33): Xaa is C or S

SEQ ID NO: 66651 - protein, 36 aa, Artificial Sequence; identical to SEQ ID NO: 21199
  Cyclic GFR-binding peptide
  MOD_RES (2)..(34)..(35): Xaa is C or S

SEQ ID NO: 66652 - protein, 31 aa, Artificial Sequence; identical to SEQ ID NO: 21202
  Cyclic GFR-binding peptide
  MOD_RES (31)..(31): Xaa is C or S

SEQ ID NO: 66653 - protein, 35 aa, Artificial Sequence; identical to SEQ ID NO: 21203
  Cyclic GFR-binding peptide
  MOD_RES (31)..(32): Xaa is C or S

SEQ ID NO: 66654 - protein, 33 aa, Artificial Sequence; identical to SEQ ID NO: 21206
  Cyclic GFR-binding peptide
  MOD_RES (31)..(32): Xaa is C or S

SEQ ID NO: 66655 - protein, 33 aa, Artificial Sequence; identical to SEQ ID NO: 21211
  Cyclic GFR-binding peptide
  MOD_RES (32)..(33): Xaa is C or S

SEQ ID NO: 66656 - protein, 30 aa, Artificial Sequence
  Cyclic GFR-binding peptide
ESVAMGPIKGYYTVVGKDFYLINIPSLKTP

SEQ ID NO: 66657 - protein, 27 aa, Artificial Sequence
  Cyclic GFR-binding peptide
VSMGEPIKGYTPVGMDDFYLVNIPSLK

SEQ ID NO: 66658 - protein, 39 aa, Artificial Sequence; identical to SEQ ID NO: 21213
  Cyclic GFR-binding peptide
  MOD_RES (2)..(4)..(36)..(37): Xaa is C or S

SEQ ID NO: 66659 - protein, 36 aa, Artificial Sequence; identical to SEQ ID NO: 21214
  Cyclic GFR-binding peptide
  MOD_RES (2)..(34)..(35): Xaa is C or S

SEQ ID NO: 66660 - protein, 24 aa, Artificial Sequence
  Cyclic GFR-binding peptide
IMPIKGYLLVRGNDFYLMNIPSTK

SEQ ID NO: 66661 - protein, 34 aa, Artificial Sequence
  Cyclic GFR-binding peptide
  MOD_RES (31)..(32): Xaa is C or S
VSMGEPIKGYTPVGMDDFYLVNIPSLKTPVXXAK

SEQ ID NO: 66662 - protein, 30 aa, Artificial Sequence
  Cyclic GFR-binding peptide
  MOD_RES (27)..(27): Xaa is C or S
NPIKGYIVNSSDDFYLVNIPSLKTPAXTPK

SEQ ID NO: 66663 - protein, 28 aa, Artificial Sequence
  Cyclic GFR-binding peptide
  MOD_RES (2)..(2): Xaa is C or S
GXSRVVMNPIKGYIVNSSDDFYLVNIPS

SEQ ID NO: 66664 - protein, 27 aa, Artificial Sequence
  Cyclic GFR-binding peptide
  MOD_RES (27)..(27): Xaa is C or S
MPIKGYLLVRGNDFYLMNIPSTKVPAX

SEQ ID NO: 66665 - protein, 36 aa, Artificial Sequence; identical to SEQ ID NO: 21221
  Cyclic GFR-binding peptide
  MOD_RES (1)..(3)..(35)..(36): Xaa is C or S

SEQ ID NO: 66666 - protein, 36 aa, Artificial Sequence; identical to SEQ ID NO: 21223
  Cyclic GFR-binding peptide
  MOD_RES (2)..(4)..(36): Xaa is C or S

SEQ ID NO: 66667 - protein, 42 aa, Artificial Sequence; identical to SEQ ID NO: 21229
  Cyclic GFR-binding peptide
  MOD_RES (1)..(3)..(36)..(37): Xaa is C or S

SEQ ID NO: 66668 - protein, 39 aa, Artificial Sequence; identical to SEQ ID NO: 21230
  Cyclic GFR-binding peptide
  MOD_RES (1)..(3)..(35)..(36): Xaa is C or S

SEQ ID NO: 66669 - protein, 26 aa, Artificial Sequence
  Cyclic GFR-binding peptide
AEVVMDPIKGYVVNNAADFYLINIPS

SEQ ID NO: 66670 - protein, 40 aa, Artificial Sequence; identical to SEQ ID NO: 21232
  Cyclic GFR-binding peptide
  MOD_RES (2)..(34)..(35): Xaa is C or S

SEQ ID NO: 66671 - protein, 23 aa, Artificial Sequence
  Cyclic GFR-binding peptide
IMPIKGYLLVRGNDFYLMNIPST

SEQ ID NO: 66672 - protein, 35 aa, Artificial Sequence
  Cyclic GFR-binding peptide
  MOD_RES (30)..(31): Xaa is C or S
VVMEPIKGYVVKDYEDFYLMNIPSLETPVXXAKPI

SEQ ID NO: 66673 - protein, 34 aa, Artificial Sequence; identical to SEQ ID NO: 21240
  Cyclic GFR-binding peptide
  MOD_RES (1)..(33)..(34): Xaa is C or S

SEQ ID NO: 66674 - protein, 29 aa, Artificial Sequence
  Cyclic GFR-binding peptide
EVVMDPIKGYVVNNASDFYLINIPSLRTP

SEQ ID NO: 66675 - protein, 38 aa, Artificial Sequence; identical to SEQ ID NO: 21246
  Cyclic GFR-binding peptide
  MOD_RES (1)..(3)..(35)..(36): Xaa is C or S

SEQ ID NO: 66676 - protein, 31 aa, Artificial Sequence; identical to SEQ ID NO: 21249
  Cyclic GFR-binding peptide

SEQ ID NO: 66677 - protein, 33 aa, Artificial Sequence
  Cyclic GFR-binding peptide
  MOD_RES (30)..(31): Xaa is C or S
VVMDPIKGYVVNNASDFYLINIPSLRTPVXXTP

SEQ ID NO: 66678 - protein, 32 aa, Artificial Sequence
  Cyclic GFR-binding peptide
  MOD_RES (2)..(4): Xaa is C or S
LXGXEEVIMPIKGYLLVRGNDFYLMNIPSTKV

SEQ ID NO: 66679 - protein, 40 aa, Artificial Sequence; identical to SEQ ID NO: 21256
  Cyclic GFR-binding peptide
  MOD_RES (2)..(4)..(36)..(37): Xaa is C or S

SEQ ID NO: 66680 - protein, 21 aa, Artificial Sequence
  Cyclic GFR-binding peptide
GPIKGYYTVVGKDFYLINIPS

SEQ ID NO: 66681 - protein, 28 aa, Artificial Sequence
  Cyclic GFR-binding peptide
VMDPIKGYVVNNASDFYLINIPSLRTPV

SEQ ID NO: 66682 - protein, 24 aa, Artificial Sequence
  Cyclic GFR-binding peptide
MDPIKGYVVKENEDFYLMNIPSLE

SEQ ID NO: 66683 - protein, 26 aa, Artificial Sequence
  Cyclic GFR-binding peptide
ESVAMGPIKGYYTVVGKDFYLINIPS

SEQ ID NO: 66684 - protein, 26 aa, Artificial Sequence
  Cyclic GFR-binding peptide
  MOD_RES (26)..(26): Xaa is C or S
PIKGYVVKDYEDFYLMNIPSLETPVX

SEQ ID NO: 66685 - protein, 26 aa, Artificial Sequence
  Cyclic GFR-binding peptide
MGPIKGYYTVVGKDFYLINIPSLKTP

SEQ ID NO: 66686 - protein, 28 aa, Artificial Sequence
  Cyclic GFR-binding peptide
  MOD_RES (2)..(2): Xaa is C or S
GXARVVMNPIKGYIVNSSDDFYLVNIPS

SEQ ID NO: 66687 - protein, 23 aa, Artificial Sequence
  Cyclic GFR-binding peptide
PIKGYYTVVGKDFYLINIPSLKT

SEQ ID NO: 66688 - protein, 29 aa, Artificial Sequence
  Cyclic GFR-binding peptide
  MOD_RES (29)..(29): Xaa is C or S
VMDPIKGYVVKENEDFYLMNIPSLETPVX

SEQ ID NO: 66689 - protein, 30 aa, Artificial Sequence
  Cyclic GFR-binding peptide
  MOD_RES (1)..(1): Xaa is C or S
XGEVVMDPIKGYVVKENEDFYLMNIPSLET

SEQ ID NO: 66690 - protein, 25 aa, Artificial Sequence
  Cyclic GFR-binding peptide
NPIKGYIVNNSSDFYLVNIPSLKTP

SEQ ID NO: 66691 - protein, 30 aa, Artificial Sequence
  Cyclic GFR-binding peptide
  MOD_RES (29)..(29): Xaa is C or S
VMNPIKGYIVNSSDDFYLVNIPSLKTPAXT

SEQ ID NO: 66692 - protein, 36 aa, Artificial Sequence; identical to SEQ ID NO: 21262
  Cyclic GFR-binding peptide
  MOD_RES (32)..(33): Xaa is C or S

SEQ ID NO: 66693 - protein, 28 aa, Artificial Sequence
  Cyclic GFR-binding peptide
VSMGEPIKGYTPVGMDDFYLVNIPSLKT

SEQ ID NO: 66694 - protein, 28 aa, Artificial Sequence
  Cyclic GFR-binding peptide
AKVVMNPIKGYIVNNSSDFYLVNIPSLK

SEQ ID NO: 66695 - protein, 27 aa, Artificial Sequence
  Cyclic GFR-binding peptide
  MOD_RES (27)..(27): Xaa is C or S
NPIKGYIVNNSSDFYLVNIPSLKTPAX

SEQ ID NO: 66696 - protein, 30 aa, Artificial Sequence
  Cyclic GFR-binding peptide
  MOD_RES (2)..(2): Xaa is C or S
GXEAVSMGEPIKGYTPVGMDDFYLVNIPSL

SEQ ID NO: 66697 - protein, 22 aa, Artificial Sequence
  Cyclic GFR-binding peptide
PIKGYIVNNSSDFYLVNIPSLK

SEQ ID NO: 66698 - protein, 37 aa, Artificial Sequence; identical to SEQ ID NO: 21276
  Cyclic GFR-binding peptide
  MOD_RES (1)..(33)..(34): Xaa is C or S

SEQ ID NO: 66699 - protein, 37 aa, Artificial Sequence; identical to SEQ ID NO: 21277
  Cyclic GFR-binding peptide
  MOD_RES (1)..(33)..(34): Xaa is C or S

SEQ ID NO: 66700 - protein, 33 aa, Artificial Sequence
  Cyclic GFR-binding peptide
  MOD_RES (27)..(27): Xaa is C or S
NPIKGYIVNSSDDFYLVNIPSLKTPAXTPKTVH

SEQ ID NO: 66701 - protein, 31 aa, Artificial Sequence; identical to SEQ ID NO: 21284
  Cyclic GFR-binding peptide
  MOD_RES (31)..(31): Xaa is C or S

SEQ ID NO: 66702 - protein, 30 aa, Artificial Sequence
  Cyclic GFR-binding peptide
  MOD_RES (28)..(29): Xaa is C or S
MDPIKGYVVNNASDFYLINIPSLRTPVXXT

SEQ ID NO: 66703 - protein, 34 aa, Artificial Sequence
  Cyclic GFR-binding peptide
  MOD_RES (28)..(29): Xaa is C or S
GEPIKGYTPVGMDDFYLVNIPSLKTPVXXAKGVK

SEQ ID NO: 66704 - protein, 39 aa, Artificial Sequence; identical to SEQ ID NO: 21289
  Cyclic GFR-binding peptide
  MOD_RES (2)..(34)..(35): Xaa is C or S

SEQ ID NO: 66705 - protein, 31 aa, Artificial Sequence
  Cyclic GFR-binding peptide
  MOD_RES (29)..(30): Xaa is C or S
VIMPIKGYLLVRGNDFYLMNIPSTKVPAXXT

SEQ ID NO: 66706 - protein, 29 aa, Artificial Sequence
  Cyclic GFR-binding peptide
SVAMGPIKGYYTVVGKDFYLINIPSLKTP

SEQ ID NO: 66707 - protein, 33 aa, Artificial Sequence; identical to SEQ ID NO: 21298
  Cyclic GFR-binding peptide
  MOD_RES (32)..(33): Xaa is C or S

SEQ ID NO: 66708 - protein, 31 aa, Artificial Sequence
  Cyclic GFR-binding peptide
  MOD_RES (2)..(2): Xaa is C or S
GXSEVVMDPIKGYVVNNASDFYLINIPSLRT

SEQ ID NO: 66709 - protein, 39 aa, Artificial Sequence; identical to SEQ ID NO: 21301
  Cyclic GFR-binding peptide
  MOD_RES (1)..(3)..(35)..(36): Xaa is C or S

SEQ ID NO: 66710 - protein, 38 aa, Artificial Sequence; identical to SEQ ID NO: 21308
  Cyclic GFR-binding peptide
  MOD_RES (2)..(4)..(37)..(38): Xaa is C or S

SEQ ID NO: 66711 - protein, 32 aa, Artificial Sequence
  Cyclic GFR-binding peptide
  MOD_RES (29)..(30): Xaa is C or S
VMNPIKGYIVNNSSDFYLVNIPSLKTPAXXAK

SEQ ID NO: 66712 - protein, 30 aa, Artificial Sequence
  Cyclic GFR-binding peptide
  MOD_RES (1)..(1): Xaa is C or S
XGEVVMEPIKGYVVKDYEDFYLMNIPSLET

SEQ ID NO: 66713 - protein, 30 aa, Artificial Sequence; identical to SEQ ID NO: 21310
  Cyclic GFR-binding peptide

SEQ ID NO: 66714 - protein, 29 aa, Artificial Sequence
  Cyclic GFR-binding peptide
  MOD_RES (2)..(2): Xaa is C or S
GXGEVVMDPIKGYVVKENEDFYLMNIPSL

SEQ ID NO: 66715 - protein, 39 aa, Artificial Sequence; identical to SEQ ID NO: 21315
  Cyclic GFR-binding peptide
  MOD_RES (2)..(33)..(34): Xaa is C or S

SEQ ID NO: 66716 - protein, 31 aa, Artificial Sequence
  Cyclic GFR-binding peptide
  MOD_RES (31)..(31): Xaa is C or S
VSMGEPIKGYTPVGMDDFYLVNIPSLKTPVX

SEQ ID NO: 66717 - protein, 34 aa, Artificial Sequence
  Cyclic GFR-binding peptide
  MOD_RES (28)..(29): Xaa is C or S
IMPIKGYLLVRGNDFYLMNIPSTKVPAXXTSPVR

SEQ ID NO: 66718 - protein, 33 aa, Artificial Sequence
  Cyclic GFR-binding peptide
  MOD_RES (2)..(4): Xaa is C or S
RXGXSEVVMDPIKGYVVNNASDFYLINIPSLRT

SEQ ID NO: 66719 - protein, 30 aa, Artificial Sequence
  Cyclic GFR-binding peptide
  MOD_RES (27)..(28): Xaa is C or S
DPIKGYVVNNAADFYLINIPSLRAPVXXSA

SEQ ID NO: 66720 - protein, 32 aa, Artificial Sequence
  Cyclic GFR-binding peptide
  MOD_RES (30)..(31): Xaa is C or S
VVMDPIKGYVVNNASDFYLINIPSLRTPVXXT

SEQ ID NO: 66721 - protein, 32 aa, Artificial Sequence
  Cyclic GFR-binding peptide
  MOD_RES (2)..(2): Xaa is C or S
GXAEVVMDPIKGYVVNNAADFYLINIPSLRAP

SEQ ID NO: 66722 - protein, 34 aa, Artificial Sequence; identical to SEQ ID NO: 21318
  Cyclic GFR-binding peptide
  MOD_RES (31)..(32): Xaa is C or S

SEQ ID NO: 66723 - protein, 30 aa, Artificial Sequence
  Cyclic GFR-binding peptide
  MOD_RES (1)..(1): Xaa is C or S
XARVVMNPIKGYIVNSSDDFYLVNIPSLQT

SEQ ID NO: 66724 - protein, 24 aa, Artificial Sequence
  Cyclic GFR-binding peptide
DPIKGYVVNNASDFYLINIPSLRT

SEQ ID NO: 66725 - protein, 32 aa, Artificial Sequence
  Cyclic GFR-binding peptide
  MOD_RES (27)..(28): Xaa is C or S
NPIKGYIVNNSSDFYLVNIPSLKTPAXXAKPV

SEQ ID NO: 66726 - protein, 34 aa, Artificial Sequence; identical to SEQ ID NO: 21319
  Cyclic GFR-binding peptide
  MOD_RES (31)..(31): Xaa is C or S

SEQ ID NO: 66727 - protein, 34 aa, Artificial Sequence
  Cyclic GFR-binding peptide
  MOD_RES (2)..(4): Xaa is C or S
RXGXESVAMGPIKGYYTVVGKDFYLINIPSLKTP

SEQ ID NO: 66728 - protein, 24 aa, Artificial Sequence
  Cyclic GFR-binding peptide
VVMNPIKGYIVNNSSDFYLVNIPS

SEQ ID NO: 66729 - protein, 26 aa, Artificial Sequence
  Cyclic GFR-binding peptide
GEVVMEPIKGYVVKDYEDFYLMNIPS

SEQ ID NO: 66730 - protein, 36 aa, Artificial Sequence; identical to SEQ ID NO: 21326
  Cyclic GFR-binding peptide
  MOD_RES (1)..(33)..(34): Xaa is C or S

SEQ ID NO: 66731 - protein, 28 aa, Artificial Sequence
  Cyclic GFR-binding peptide
VMDPIKGYVVKENEDFYLMNIPSLETPV

SEQ ID NO: 66732 - protein, 30 aa, Artificial Sequence
  Cyclic GFR-binding peptide
AKVVMNPIKGYIVNNSSDFYLVNIPSLKTP

SEQ ID NO: 66733 - protein, 27 aa, Artificial Sequence
  Cyclic GFR-binding peptide
VMDPIKGYVVNNASDFYLINIPSLRTP

SEQ ID NO: 66734 - protein, 38 aa, Artificial Sequence; identical to SEQ ID NO: 21330
  Cyclic GFR-binding peptide
  MOD_RES (1)..(33)..(34): Xaa is C or S

SEQ ID NO: 66735 - protein, 38 aa, Artificial Sequence; identical to SEQ ID NO: 21335
  Cyclic GFR-binding peptide
  MOD_RES (2)..(4)..(36)..(37): Xaa is C or S

SEQ ID NO: 66736 - protein, 41 aa, Artificial Sequence; identical to SEQ ID NO: 21337
  Cyclic GFR-binding peptide
  MOD_RES (2)..(4)..(36)..(37): Xaa is C or S

SEQ ID NO: 66737 - protein, 25 aa, Artificial Sequence
  Cyclic GFR-binding peptide
PIKGYVVNNASDFYLINIPSLRTPV

SEQ ID NO: 66738 - protein, 35 aa, Artificial Sequence
  Cyclic GFR-binding peptide
  MOD_RES (29)..(30): Xaa is C or S
VMEPIKGYVVKDYEDFYLMNIPSLETPVXXAKPIS

SEQ ID NO: 66739 - protein, 33 aa, Artificial Sequence; identical to SEQ ID NO: 21341
  Cyclic GFR-binding peptide
  MOD_RES (1)..(1): Xaa is C or S

SEQ ID NO: 66740 - protein, 31 aa, Artificial Sequence
  Cyclic GFR-binding peptide
  MOD_RES (30)..(30): Xaa is C or S
VVMNPIKGYIVNSSDDFYLVNIPSLKTPAXT

SEQ ID NO: 66741 - protein, 27 aa, Artificial Sequence
  Cyclic GFR-binding peptide
VMDPIKGYVVKENEDFYLMNIPSLETP

SEQ ID NO: 66742 - protein, 36 aa, Artificial Sequence
  Cyclic GFR-binding peptide
  MOD_RES (30)..(31): Xaa is C or S
VVMNPIKGYIVNSSDDFYLVNIPSLKTPAXXPKPVH

SEQ ID NO: 66743 - protein, 31 aa, Artificial Sequence
  Cyclic GFR-binding peptide
  MOD_RES (27)..(28): Xaa is C or S
EPIKGYVVKDYEDFYLMNIPSLETPVXXAKP

SEQ ID NO: 66744 - protein, 29 aa, Artificial Sequence
  Cyclic GFR-binding peptide
  MOD_RES (29)..(29): Xaa is C or S
VMDPIKGYVVNNAADFYLINIPSLRAPVX

SEQ ID NO: 66745 - protein, 25 aa, Artificial Sequence
  Cyclic GFR-binding peptide
VVMDPIKGYVVKENEDFYLMNIPSL

SEQ ID NO: 66746 - protein, 34 aa, Artificial Sequence
  Cyclic GFR-binding peptide
  MOD_RES (29)..(30): Xaa is C or S
VMEPIKGYVVKDYEDFYLMNIPSLETPVXXAKPI

SEQ ID NO: 66747 - protein, 22 aa, Artificial Sequence
  Cyclic GFR-binding peptide
PIKGYVVKENEDFYLMNIPSLE

SEQ ID NO: 66748 - protein, 38 aa, Artificial Sequence
  Cyclic GFR-binding peptide
  MOD_RES (32)..(33): Xaa is C or S
AVSMGEPIKGYTPVGMDDFYLVNIPSLKTPVXXAKGVK

SEQ ID NO: 66749 - protein, 33 aa, Artificial Sequence; identical to SEQ ID NO: 21345
  Cyclic GFR-binding peptide
  MOD_RES (2)..(2): Xaa is C or S

SEQ ID NO: 66750 - protein, 34 aa, Artificial Sequence; identical to SEQ ID NO: 21346
  Cyclic GFR-binding peptide
  MOD_RES (2)..(34): Xaa is C or S

SEQ ID NO: 66751 - protein, 30 aa, Artificial Sequence
  Cyclic GFR-binding peptide
  MOD_RES (2)..(2): Xaa is C or S
GXAEVVMDPIKGYVVNNAADFYLINIPSLR

SEQ ID NO: 66752 - protein, 20 aa, Artificial Sequence
  Cyclic GFR-binding peptide
PIKGYYTVVGKDFYLINIPS

SEQ ID NO: 66753 - protein, 27 aa, Artificial Sequence
  Cyclic GFR-binding peptide
  MOD_RES (1)..(1): Xaa is C or S
XAEVVMDPIKGYVVNNAADFYLINIPS

SEQ ID NO: 66754 - protein, 29 aa, Artificial Sequence
  Cyclic GFR-binding peptide
  MOD_RES (2)..(4): Xaa is C or S
LXGXEEVIMPIKGYLLVRGNDFYLMNIPS

SEQ ID NO: 66755 - protein, 30 aa, Artificial Sequence
  Cyclic GFR-binding peptide
  MOD_RES (2)..(4): Xaa is C or S
HXGXARVVMNPIKGYIVNSSDDFYLVNIPS

SEQ ID NO: 66756 - protein, 31 aa, Artificial Sequence
  Cyclic GFR-binding peptide
  MOD_RES (27)..(28): Xaa is C or S
MPIKGYLLVRGNDFYLMNIPSTKVPAXXTSP

SEQ ID NO: 66757 - protein, 33 aa, Artificial Sequence
  Cyclic GFR-binding peptide
  MOD_RES (28)..(29): Xaa is C or S
MDPIKGYVVNNASDFYLINIPSLRTPVXXTPPT

SEQ ID NO: 66758 - protein, 37 aa, Artificial Sequence; identical to SEQ ID NO: 21351
  Cyclic GFR-binding peptide
  MOD_RES (1)..(33)..(34): Xaa is C or S

SEQ ID NO: 66759 - protein, 26 aa, Artificial Sequence
  Cyclic GFR-binding peptide
  MOD_RES (26)..(26): Xaa is C or S
PIKGYVVNNAADFYLINIPSLRAPVX

SEQ ID NO: 66760 - protein, 31 aa, Artificial Sequence
  Cyclic GFR-binding peptide
  MOD_RES (30)..(31): Xaa is C or S
SMGEPIKGYTPVGMDDFYLVNIPSLKTPVXX

SEQ ID NO: 66761 - protein, 23 aa, Artificial Sequence
  Cyclic GFR-binding peptide
DPIKGYVVNNASDFYLINIPSLR

SEQ ID NO: 66762 - protein, 40 aa, Artificial Sequence; identical to SEQ ID NO: 21352
  Cyclic GFR-binding peptide
  MOD_RES (2)..(34)..(35): Xaa is C or S

SEQ ID NO: 66763 - protein, 33 aa, Artificial Sequence
  Cyclic GFR-binding peptide
  MOD_RES (1)..(3): Xaa is C or S
XGXSEVVMDPIKGYVVNNASDFYLINIPSLRTP

SEQ ID NO: 66764 - protein, 34 aa, Artificial Sequence; identical to SEQ ID NO: 21353
  Cyclic GFR-binding peptide
  MOD_RES (32)..(33): Xaa is C or S

SEQ ID NO: 66765 - protein, 37 aa, Artificial Sequence; identical to SEQ ID NO: 21355
  Cyclic GFR-binding peptide
  MOD_RES (32)..(32): Xaa is C or S

SEQ ID NO: 66766 - protein, 34 aa, Artificial Sequence
  Cyclic GFR-binding peptide
  MOD_RES (1)..(3): Xaa is C or S
XGXEAVSMGEPIKGYTPVGMDDFYLVNIPSLKTP

SEQ ID NO: 66767 - protein, 31 aa, Artificial Sequence
  Cyclic GFR-binding peptide
  MOD_RES (26)..(27): Xaa is C or S
PIKGYVVKDYEDFYLMNIPSLETPVXXAKPI

SEQ ID NO: 66768 - protein, 26 aa, Artificial Sequence
  Cyclic GFR-binding peptide
MNPIKGYIVNNSSDFYLVNIPSLKTP

SEQ ID NO: 66769 - protein, 30 aa, Artificial Sequence
  Cyclic GFR-binding peptide
  MOD_RES (28)..(28): Xaa is C or S
MNPIKGYIVNSSDDFYLVNIPSLKTPAXTP

SEQ ID NO: 66770 - protein, 35 aa, Artificial Sequence
  Cyclic GFR-binding peptide
  MOD_RES (29)..(30): Xaa is C or S
AMGPIKGYYTVVGKDFYLINIPSLKTPVXXAKSAK

SEQ ID NO: 66771 - protein, 25 aa, Artificial Sequence
  Cyclic GFR-binding peptide
PIKGYVVKENEDFYLMNIPSLETPV

SEQ ID NO: 66772 - protein, 32 aa, Artificial Sequence
  Cyclic GFR-binding peptide
  MOD_RES (29)..(30): Xaa is C or S
AMGPIKGYYTVVGKDFYLINIPSLKTPVXXAK

SEQ ID NO: 66773 - protein, 30 aa, Artificial Sequence
  Cyclic GFR-binding peptide
  MOD_RES (2)..(2): Xaa is C or S
GXARVVMNPIKGYIVNSSDDFYLVNIPSLQ

SEQ ID NO: 66774 - protein, 30 aa, Artificial Sequence
  Cyclic GFR-binding peptide
  MOD_RES (1)..(1): Xaa is C or S
XAEVVMDPIKGYVVNNAADFYLINIPSLRA

SEQ ID NO: 66775 - protein, 31 aa, Artificial Sequence; identical to SEQ ID NO: 21360
  Cyclic GFR-binding peptide

SEQ ID NO: 66776 - protein, 33 aa, Artificial Sequence
  Cyclic GFR-binding peptide
  MOD_RES (29)..(30): Xaa is C or S
VMNPIKGYIVNNSSDFYLVNIPSLKTPAXXAKP

SEQ ID NO: 66777 - protein, 36 aa, Artificial Sequence
  Cyclic GFR-binding peptide
  MOD_RES (30)..(31): Xaa is C or S
VVMDPIKGYVVNNASDFYLINIPSLRTPVXXTPPTS

SEQ ID NO: 66778 - protein, 39 aa, Artificial Sequence; identical to SEQ ID NO: 21363
  Cyclic GFR-binding peptide
  MOD_RES (2)..(4)..(36)..(37): Xaa is C or S

SEQ ID NO: 66779 - protein, 27 aa, Artificial Sequence
  Cyclic GFR-binding peptide
  MOD_RES (27)..(27): Xaa is C or S
DPIKGYVVNNAADFYLINIPSLRAPVX

SEQ ID NO: 66780 - protein, 25 aa, Artificial Sequence
  Cyclic GFR-binding peptide
DPIKGYVVNNASDFYLINIPSLRTP

SEQ ID NO: 66781 - protein, 26 aa, Artificial Sequence
  Cyclic GFR-binding peptide
GEVVMDPIKGYVVKENEDFYLMNIPS

SEQ ID NO: 66782 - protein, 31 aa, Artificial Sequence
  Cyclic GFR-binding peptide
  MOD_RES (1)..(1): Xaa is C or S
XEAVSMGEPIKGYTPVGMDDFYLVNIPSLKT

SEQ ID NO: 66783 - protein, 31 aa, Artificial Sequence
  Cyclic GFR-binding peptide
  MOD_RES (2)..(4): Xaa is C or S
RXGXAEVVMDPIKGYVVNNAADFYLINIPSL

SEQ ID NO: 66784 - protein, 32 aa, Artificial Sequence; identical to SEQ ID NO: 21375
  Cyclic GFR-binding peptide
  MOD_RES (31)..(32): Xaa is C or S

SEQ ID NO: 66785 - protein, 36 aa, Artificial Sequence; identical to SEQ ID NO: 21376
  Cyclic GFR-binding peptide
  MOD_RES (1)..(32)..(33): Xaa is C or S

SEQ ID NO: 66786 - protein, 35 aa, Artificial Sequence; identical to SEQ ID NO: 21377
  Cyclic GFR-binding peptide
  MOD_RES (1)..(33)..(34): Xaa is C or S

SEQ ID NO: 66787 - protein, 29 aa, Artificial Sequence
  Cyclic GFR-binding peptide
  MOD_RES (28)..(29): Xaa is C or S
MNPIKGYIVNNSSDFYLVNIPSLKTPAXX

SEQ ID NO: 66788 - protein, 31 aa, Artificial Sequence; identical to SEQ ID NO: 21379
  Cyclic GFR-binding peptide
  MOD_RES (31)..(31): Xaa is C or S

SEQ ID NO: 66789 - protein, 30 aa, Artificial Sequence
  Cyclic GFR-binding peptide
  MOD_RES (28)..(29): Xaa is C or S
MNPIKGYIVNSSDDFYLVNIPSLKTPAXXP

SEQ ID NO: 66790 - protein, 24 aa, Artificial Sequence
  Cyclic GFR-binding peptide
SMGEPIKGYTPVGMDDFYLVNIPS

SEQ ID NO: 66791 - protein, 33 aa, Artificial Sequence; identical to SEQ ID NO: 21381
  Cyclic GFR-binding peptide
  MOD_RES (1)..(33): Xaa is C or S

SEQ ID NO: 66792 - protein, 34 aa, Artificial Sequence; identical to SEQ ID NO: 21385
  Cyclic GFR-binding peptide
  MOD_RES (31)..(32): Xaa is C or S

SEQ ID NO: 66793 - protein, 24 aa, Artificial Sequence
  Cyclic GFR-binding peptide
EVIMPIKGYLLVRGNDFYLMNIPS

SEQ ID NO: 66794 - protein, 38 aa, Artificial Sequence; identical to SEQ ID NO: 21391
  Cyclic GFR-binding peptide
  MOD_RES (1)..(3)..(35)..(36): Xaa is C or S

SEQ ID NO: 66795 - protein, 30 aa, Artificial Sequence
  Cyclic GFR-binding peptide
  MOD_RES (2)..(2): Xaa is C or S
GXEEVIMPIKGYLLVRGNDFYLMNIPSTKV

SEQ ID NO: 66796 - protein, 37 aa, Artificial Sequence; identical to SEQ ID NO: 21392
  Cyclic GFR-binding peptide
  MOD_RES (31)..(32): Xaa is C or S

SEQ ID NO: 66797 - protein, 35 aa, Artificial Sequence
  Cyclic GFR-binding peptide
  MOD_RES (30)..(31): Xaa is C or S
EVIMPIKGYLLVRGNDFYLMNIPSTKVPAXXTSPV

SEQ ID NO: 66798 - protein, 27 aa, Artificial Sequence
  Cyclic GFR-binding peptide
  MOD_RES (1)..(1): Xaa is C or S
XARVVMNPIKGYIVNSSDDFYLVNIPS

SEQ ID NO: 66799 - protein, 25 aa, Artificial Sequence
  Cyclic GFR-binding peptide
SVAMGPIKGYYTVVGKDFYLINIPS

SEQ ID NO: 66800 - protein, 29 aa, Artificial Sequence
  Cyclic GFR-binding peptide
SRVVMNPIKGYIVNSSDDFYLVNIPSLKT

SEQ ID NO: 66801 - protein, 27 aa, Artificial Sequence
  Cyclic GFR-binding peptide
  MOD_RES (26)..(27): Xaa is C or S
PIKGYVVNNAADFYLINIPSLRAPVXX

SEQ ID NO: 66802 - protein, 39 aa, Artificial Sequence; identical to SEQ ID NO: 21403
  Cyclic GFR-binding peptide
  MOD_RES (2)..(34)..(35): Xaa is C or S

SEQ ID NO: 66803 - protein, 39 aa, Artificial Sequence; identical to SEQ ID NO: 21405
  Cyclic GFR-binding peptide
  MOD_RES (1)..(33)..(34): Xaa is C or S

SEQ ID NO: 66804 - protein, 40 aa, Artificial Sequence; identical to SEQ ID NO: 21408
  Cyclic GFR-binding peptide
  MOD_RES (2)..(4)..(37)..(38): Xaa is C or S

SEQ ID NO: 66805 - protein, 30 aa, Artificial Sequence
  Cyclic GFR-binding peptide
  MOD_RES (1)..(3): Xaa is C or S
XGXSEVVMDPIKGYVVNNASDFYLINIPSL

SEQ ID NO: 66806 - protein, 37 aa, Artificial Sequence; identical to SEQ ID NO: 21411
  Cyclic GFR-binding peptide
  MOD_RES (32)..(33): Xaa is C or S

SEQ ID NO: 66807 - protein, 31 aa, Artificial Sequence
  Cyclic GFR-binding peptide
  MOD_RES (1)..(3): Xaa is C or S
XGXSRVVMNPIKGYIVNSSDDFYLVNIPSLK

SEQ ID NO: 66808 - protein, 34 aa, Artificial Sequence; identical to SEQ ID NO: 21416
  Cyclic GFR-binding peptide
  MOD_RES (31)..(32): Xaa is C or S

SEQ ID NO: 66809 - protein, 25 aa, Artificial Sequence
  Cyclic GFR-binding peptide
VVMDPIKGYVVNNASDFYLINIPSL

SEQ ID NO: 66810 - protein, 33 aa, Artificial Sequence; identical to SEQ ID NO: 21417
  Cyclic GFR-binding peptide
  MOD_RES (32)..(33): Xaa is C or S

SEQ ID NO: 66811 - protein, 32 aa, Artificial Sequence
  Cyclic GFR-binding peptide
  MOD_RES (28)..(29): Xaa is C or S
MEPIKGYVVKDYEDFYLMNIPSLETPVXXAKP

SEQ ID NO: 66812 - protein, 32 aa, Artificial Sequence; identical to SEQ ID NO: 21419
  Cyclic GFR-binding peptide
  MOD_RES (31)..(32): Xaa is C or S

SEQ ID NO: 66813 - protein, 35 aa, Artificial Sequence; identical to SEQ ID NO: 21420
  Cyclic GFR-binding peptide
  MOD_RES (2)..(4)..(35): Xaa is C or S

SEQ ID NO: 66814 - protein, 31 aa, Artificial Sequence
  Cyclic GFR-binding peptide
  MOD_RES (2)..(4): Xaa is C or S
HXGXSRVVMNPIKGYIVNSSDDFYLVNIPSL

SEQ ID NO: 66815 - protein, 33 aa, Artificial Sequence; identical to SEQ ID NO: 21423
  Cyclic GFR-binding peptide
  MOD_RES (31)..(31): Xaa is C or S

SEQ ID NO: 66816 - protein, 29 aa, Artificial Sequence
  Cyclic GFR-binding peptide
  MOD_RES (26)..(27): Xaa is C or S
PIKGYYTVVGKDFYLINIPSLKTPVXXAK

SEQ ID NO: 66817 - protein, 25 aa, Artificial Sequence
  Cyclic GFR-binding peptide
VAMGPIKGYYTVVGKDFYLINIPSL

SEQ ID NO: 66818 - protein, 39 aa, Artificial Sequence; identical to SEQ ID NO: 21427
  Cyclic GFR-binding peptide
  MOD_RES (2)..(34)..(35): Xaa is C or S

SEQ ID NO: 66819 - protein, 42 aa, Artificial Sequence; identical to SEQ ID NO: 21428
  Cyclic GFR-binding peptide
  MOD_RES (2)..(4)..(36)..(37): Xaa is C or S

SEQ ID NO: 66820 - protein, 33 aa, Artificial Sequence
  Cyclic GFR-binding peptide
  MOD_RES (2)..(4): Xaa is C or S
RXGXESVAMGPIKGYYTVVGKDFYLINIPSLKT

SEQ ID NO: 66821 - protein, 35 aa, Artificial Sequence; identical to SEQ ID NO: 21433
  Cyclic GFR-binding peptide
  MOD_RES (1)..(33): Xaa is C or S

SEQ ID NO: 66822 - protein, 30 aa, Artificial Sequence
  Cyclic GFR-binding peptide
  MOD_RES (30)..(30): Xaa is C or S
VVMDPIKGYVVNNAADFYLINIPSLRAPVX

SEQ ID NO: 66823 - protein, 31 aa, Artificial Sequence
  Cyclic GFR-binding peptide
  MOD_RES (27)..(28): Xaa is C or S
DPIKGYVVKENEDFYLMNIPSLETPVXXAKP

SEQ ID NO: 66824 - protein, 30 aa, Artificial Sequence
  Cyclic GFR-binding peptide
EAVSMGEPIKGYTPVGMDDFYLVNIPSLKT

SEQ ID NO: 66825 - protein, 34 aa, Artificial Sequence
  Cyclic GFR-binding peptide
  MOD_RES (28)..(29): Xaa is C or S
MNPIKGYIVNSSDDFYLVNIPSLKTPAXXPKPVY

SEQ ID NO: 66826 - protein, 31 aa, Artificial Sequence; identical to SEQ ID NO: 21440
  Cyclic GFR-binding peptide

SEQ ID NO: 66827 - protein, 31 aa, Artificial Sequence
  Cyclic GFR-binding peptide
  MOD_RES (2)..(2): Xaa is C or S
GXGEVVMDPIKGYVVKENEDFYLMNIPSLET

SEQ ID NO: 66828 - protein, 38 aa, Artificial Sequence; identical to SEQ ID NO: 21450
  Cyclic GFR-binding peptide
  MOD_RES (1)..(32)..(33): Xaa is C or S

SEQ ID NO: 66829 - protein, 29 aa, Artificial Sequence
  Cyclic GFR-binding peptide
  MOD_RES (1)..(1): Xaa is C or S
XEAVSMGEPIKGYTPVGMDDFYLVNIPSL

SEQ ID NO: 66830 - protein, 34 aa, Artificial Sequence; identical to SEQ ID NO: 21451
  Cyclic GFR-binding peptide
  MOD_RES (2)..(34): Xaa is C or S

SEQ ID NO: 66831 - protein, 29 aa, Artificial Sequence
  Cyclic GFR-binding peptide
  MOD_RES (27)..(28): Xaa is C or S
DPIKGYVVKENEDFYLMNIPSLETPVXXA

SEQ ID NO: 66832 - protein, 26 aa, Artificial Sequence
  Cyclic GFR-binding peptide
SMGEPIKGYTPVGMDDFYLVNIPSLK

SEQ ID NO: 66833 - protein, 23 aa, Artificial Sequence
  Cyclic GFR-binding peptide
PIKGYIVNNSSDFYLVNIPSLKT

SEQ ID NO: 66834 - protein, 25 aa, Artificial Sequence
  Cyclic GFR-binding peptide
DPIKGYVVKENEDFYLMNIPSLETP

SEQ ID NO: 66835 - protein, 30 aa, Artificial Sequence; identical to SEQ ID NO: 21454
  Cyclic GFR-binding peptide

SEQ ID NO: 66836 - protein, 31 aa, Artificial Sequence
  Cyclic GFR-binding peptide
  MOD_RES (1)..(3): Xaa is C or S
XGXAKVVMNPIKGYIVNNSSDFYLVNIPSLK

SEQ ID NO: 66837 - protein, 30 aa, Artificial Sequence
  Cyclic GFR-binding peptide
  MOD_RES (28)..(29): Xaa is C or S
MGPIKGYYTVVGKDFYLINIPSLKTPVXXA

SEQ ID NO: 66838 - protein, 39 aa, Artificial Sequence; identical to SEQ ID NO: 21456
  Cyclic GFR-binding peptide
  MOD_RES (1)..(33): Xaa is C or S

SEQ ID NO: 66839 - protein, 32 aa, Artificial Sequence; identical to SEQ ID NO: 21457
  Cyclic GFR-binding peptide
  MOD_RES (32)..(32): Xaa is C or S

SEQ ID NO: 66840 - protein, 26 aa, Artificial Sequence
  Cyclic GFR-binding peptide
MPIKGYLLVRGNDFYLMNIPSTKVPA

SEQ ID NO: 66841 - protein, 33 aa, Artificial Sequence
  Cyclic GFR-binding peptide
  MOD_RES (30)..(30): Xaa is C or S
VVMNPIKGYIVNSSDDFYLVNIPSLKTPAXTPK

SEQ ID NO: 66842 - protein, 32 aa, Artificial Sequence
  Cyclic GFR-binding peptide
  MOD_RES (1)..(3): Xaa is C or S
XGXSEVVMDPIKGYVVNNASDFYLINIPSLRT

SEQ ID NO: 66843 - protein, 33 aa, Artificial Sequence; identical to SEQ ID NO: 21460
  Cyclic GFR-binding peptide
  MOD_RES (31)..(32): Xaa is C or S

SEQ ID NO: 66844 - protein, 37 aa, Artificial Sequence; identical to SEQ ID NO: 21461
  Cyclic GFR-binding peptide
  MOD_RES (1)..(3)..(36)..(37): Xaa is C or S

SEQ ID NO: 66845 - protein, 37 aa, Artificial Sequence; identical to SEQ ID NO: 20461
  Cyclic GFR-binding peptide
  MOD_RES (32)..(33): Xaa is C or S

SEQ ID NO: 66846 - protein, 27 aa, Artificial Sequence
  Cyclic GFR-binding peptide
VVMEPIKGYVVKDYEDFYLMNIPSLET

SEQ ID NO: 66847 - protein, 22 aa, Artificial Sequence
  Cyclic GFR-binding peptide
EPIKGYVVKDYEDFYLMNIPSL

SEQ ID NO: 66848 - protein, 32 aa, Artificial Sequence; identical to SEQ ID NO: 20463
  Cyclic GFR-binding peptide
  MOD_RES (2)..(2): Xaa is C or S

SEQ ID NO: 66849 - protein, 35 aa, Artificial Sequence; identical to SEQ ID NO: 20464
  Cyclic GFR-binding peptide
  MOD_RES (32)..(33): Xaa is C or S

SEQ ID NO: 66850 - protein, 25 aa, Artificial Sequence
  Cyclic GFR-binding peptide
PIKGYTPVGMDDFYLVNIPSLKTPV

SEQ ID NO: 66851 - protein, 27 aa, Artificial Sequence
  Cyclic GFR-binding peptide
  MOD_RES (27)..(27): Xaa is C or S
DPIKGYVVKENEDFYLMNIPSLETPVX

SEQ ID NO: 66852 - protein, 29 aa, Artificial Sequence
  Cyclic GFR-binding peptide
VVMDPIKGYVVNNAADFYLINIPSLRAPV

SEQ ID NO: 66853 - protein, 39 aa, Artificial Sequence; identical to SEQ ID NO: 20466
  Cyclic GFR-binding peptide
  MOD_RES (2)..(4)..(36)..(37): Xaa is C or S

SEQ ID NO: 66854 - protein, 35 aa, Artificial Sequence; identical to SEQ ID NO: 20468
  Cyclic GFR-binding peptide
  MOD_RES (1)..(33)..(34): Xaa is C or S

SEQ ID NO: 66855 - protein, 30 aa, Artificial Sequence
  Cyclic GFR-binding peptide
AEVVMDPIKGYVVNNAADFYLINIPSLRAP

SEQ ID NO: 66856 - protein, 31 aa, Artificial Sequence
  Cyclic GFR-binding peptide
  MOD_RES (26)..(27): Xaa is C or S
PIKGYVVNNASDFYLINIPSLRTPVXXTPPT

SEQ ID NO: 66857 - protein, 34 aa, Artificial Sequence; identical to SEQ ID NO: 20473
  Cyclic GFR-binding peptide
  MOD_RES (2)..(34): Xaa is C or S

SEQ ID NO: 66858 - protein, 27 aa, Artificial Sequence
  Cyclic GFR-binding peptide
  MOD_RES (2)..(2): Xaa is C or S
GXEEVIMPIKGYLLVRGNDFYLMNIPS

SEQ ID NO: 66859 - protein, 36 aa, Artificial Sequence; identical to SEQ ID NO: 20477
  Cyclic GFR-binding peptide
  MOD_RES (31)..(32): Xaa is C or S

SEQ ID NO: 66860 - protein, 32 aa, Artificial Sequence
  Cyclic GFR-binding peptide
  MOD_RES (29)..(30): Xaa is C or S
VMNPIKGYIVNSSDDFYLVNIPSLQTPAXXPK

SEQ ID NO: 66861 - protein, 25 aa, Artificial Sequence
  Cyclic GFR-binding peptide
MGPIKGYYTVVGKDFYLINIPSLKT

SEQ ID NO: 66862 - protein, 36 aa, Artificial Sequence; identical to SEQ ID NO: 20484
  Cyclic GFR-binding peptide
  MOD_RES (2)..(34)..(35): Xaa is C or S

SEQ ID NO: 66863 - protein, 21 aa, Artificial Sequence
  Cyclic GFR-binding peptide
PIKGYTPVGMDDFYLVNIPSL

SEQ ID NO: 66864 - protein, 42 aa, Artificial Sequence; identical to SEQ ID NO: 20485
  Cyclic GFR-binding peptide
  MOD_RES (2)..(4)..(37)..(38): Xaa is C or S

SEQ ID NO: 66865 - protein, 32 aa, Artificial Sequence
  Cyclic GFR-binding peptide
  MOD_RES (1)..(3): Xaa is C or S
XGXEEVIMPIKGYLLVRGNDFYLMNIPSTKVP

SEQ ID NO: 66866 - protein, 21 aa, Artificial Sequence
  Cyclic GFR-binding peptide
PIKGYIVNSSDDFYLVNIPSL

SEQ ID NO: 66867 - protein, 29 aa, Artificial Sequence
  Cyclic GFR-binding peptide
  MOD_RES (1)..(3): Xaa is C or S
XGXESVAMGPIKGYYTVVGKDFYLINIPS

SEQ ID NO: 66868 - protein, 29 aa, Artificial Sequence
  Cyclic GFR-binding peptide
EVVMEPIKGYVVKDYEDFYLMNIPSLETP

SEQ ID NO: 66869 - protein, 27 aa, Artificial Sequence
  Cyclic GFR-binding peptide
RVVMNPIKGYIVNSSDDFYLVNIPSLQ

SEQ ID NO: 66870 - protein, 23 aa, Artificial Sequence
  Cyclic GFR-binding peptide
VMDPIKGYVVNNAADFYLINIPS

SEQ ID NO: 66871 - protein, 31 aa, Artificial Sequence
  Cyclic GFR-binding peptide
  MOD_RES (1)..(1): Xaa is C or S
XESVAMGPIKGYYTVVGKDFYLINIPSLKTP

SEQ ID NO: 66872 - protein, 26 aa, Artificial Sequence
  Cyclic GFR-binding peptide
SRVVMNPIKGYIVNSSDDFYLVNIPS

SEQ ID NO: 66873 - protein, 26 aa, Artificial Sequence
  Cyclic GFR-binding peptide
DPIKGYVVNNASDFYLINIPSLRTPV

SEQ ID NO: 66874 - protein, 34 aa, Artificial Sequence; identical to SEQ ID NO: 20498
  Cyclic GFR-binding peptide
  MOD_RES (32)..(33): Xaa is C or S

SEQ ID NO: 66875 - protein, 24 aa, Artificial Sequence
  Cyclic GFR-binding peptide
EPIKGYTPVGMDDFYLVNIPSLKT

SEQ ID NO: 66876 - protein, 37 aa, Artificial Sequence; identical to SEQ ID NO: 20499
  Cyclic GFR-binding peptide
  MOD_RES (2)..(4)..(36): Xaa is C or S

SEQ ID NO: 66877 - protein, 24 aa, Artificial Sequence
  Cyclic GFR-binding peptide
EPIKGYVVKDYEDFYLMNIPSLET

SEQ ID NO: 66878 - protein, 31 aa, Artificial Sequence
  Cyclic GFR-binding peptide
  MOD_RES (1)..(3): Xaa is C or S
XGXEEVIMPIKGYLLVRGNDFYLMNIPSTKV

SEQ ID NO: 66879 - protein, 39 aa, Artificial Sequence; identical to SEQ ID NO: 20501
  Cyclic GFR-binding peptide
  MOD_RES (2)..(4)..(36)..(37): Xaa is C or S

SEQ ID NO: 66880 - protein, 37 aa, Artificial Sequence; identical to SEQ ID NO: 20502
  Cyclic GFR-binding peptide
  MOD_RES (2)..(35)..(36): Xaa is C or S

SEQ ID NO: 66881 - protein, 34 aa, Artificial Sequence; identical to SEQ ID NO: 20504
  Cyclic GFR-binding peptide
  MOD_RES (1)..(3)..(34): Xaa is C or S

SEQ ID NO: 66882 - protein, 33 aa, Artificial Sequence
  Cyclic GFR-binding peptide
  MOD_RES (30)..(31): Xaa is C or S
SMGEPIKGYTPVGMDDFYLVNIPSLKTPVXXAK

SEQ ID NO: 66883 - protein, 36 aa, Artificial Sequence; identical to SEQ ID NO: 20506
  Cyclic GFR-binding peptide
  MOD_RES (2)..(4)..(36): Xaa is C or S

SEQ ID NO: 66884 - protein, 31 aa, Artificial Sequence
  Cyclic GFR-binding peptide
  MOD_RES (28)..(29): Xaa is C or S
MDPIKGYVVNNAADFYLINIPSLRAPVXXSA

SEQ ID NO: 66885 - protein, 23 aa, Artificial Sequence
  Cyclic GFR-binding peptide
PIKGYVVKENEDFYLMNIPSLET

SEQ ID NO: 66886 - protein, 35 aa, Artificial Sequence; identical to SEQ ID NO: 20512
  Cyclic GFR-binding peptide
  MOD_RES (1)..(3)..(35): Xaa is C or S

SEQ ID NO: 66887 - protein, 29 aa, Artificial Sequence
  Cyclic GFR-binding peptide
  MOD_RES (28)..(29): Xaa is C or S
MDPIKGYVVKENEDFYLMNIPSLETPVXX

SEQ ID NO: 66888 - protein, 26 aa, Artificial Sequence
  Cyclic GFR-binding peptide
NPIKGYIVNNSSDFYLVNIPSLKTPA

SEQ ID NO: 66889 - protein, 26 aa, Artificial Sequence
  Cyclic GFR-binding peptide
ARVVMNPIKGYIVNSSDDFYLVNIPS

SEQ ID NO: 66890 - protein, 39 aa, Artificial Sequence; identical to SEQ ID NO: 20519
  Cyclic GFR-binding peptide
  MOD_RES (2)..(34): Xaa is C or S

SEQ ID NO: 66891 - protein, 30 aa, Artificial Sequence
  Cyclic GFR-binding peptide
  MOD_RES (1)..(3): Xaa is C or S
XGXARVVMNPIKGYIVNSSDDFYLVNIPSL

SEQ ID NO: 66892 - protein, 32 aa, Artificial Sequence
  Cyclic GFR-binding peptide
  MOD_RES (28)..(29): Xaa is C or S
MNPIKGYIVNNSSDFYLVNIPSLKTPAXXAKP

SEQ ID NO: 66893 - protein, 36 aa, Artificial Sequence
  Cyclic GFR-binding peptide
  MOD_RES (30)..(31): Xaa is C or S
VVMEPIKGYVVKDYEDFYLMNIPSLETPVXXAKPIS

SEQ ID NO: 66894 - protein, 32 aa, Artificial Sequence; identical to SEQ ID NO: 20524
  Cyclic GFR-binding peptide
  MOD_RES (32)..(32): Xaa is C or S

SEQ ID NO: 66895 - protein, 33 aa, Artificial Sequence
  Cyclic GFR-binding peptide
  MOD_RES (28)..(29): Xaa is C or S
MGPIKGYYTVVGKDFYLINIPSLKTPVXXAKSA

SEQ ID NO: 66896 - protein, 28 aa, Artificial Sequence
  Cyclic GFR-binding peptide
  MOD_RES (26)..(27): Xaa is C or S
PIKGYYTVVGKDFYLINIPSLKTPVXXA

SEQ ID NO: 66897 - protein, 27 aa, Artificial Sequence
  Cyclic GFR-binding peptide
  MOD_RES (27)..(27): Xaa is C or S
GPIKGYYTVVGKDFYLINIPSLKTPVX

SEQ ID NO: 66898 - protein, 31 aa, Artificial Sequence
  Cyclic GFR-binding peptide
  MOD_RES (26)..(27): Xaa is C or S
PIKGYYTVVGKDFYLINIPSLKTPVXXAKSA

SEQ ID NO: 66899 - protein, 23 aa, Artificial Sequence
  Cyclic GFR-binding peptide
EPIKGYTPVGMDDFYLVNIPSLK

SEQ ID NO: 66900 - protein, 37 aa, Artificial Sequence; identical to SEQ ID NO: 20530
  Cyclic GFR-binding peptide
  MOD_RES (32)..(33): Xaa is C or S

SEQ ID NO: 66901 - protein, 29 aa, Artificial Sequence
  Cyclic GFR-binding peptide
  MOD_RES (1)..(3): Xaa is C or S
XGXAKVVMNPIKGYIVNNSSDFYLVNIPS

SEQ ID NO: 66902 - protein, 34 aa, Artificial Sequence; identical to SEQ ID NO: 20529
  Cyclic GFR-binding peptide
  MOD_RES (2)..(34): Xaa is C or S

SEQ ID NO: 66903 - protein, 41 aa, Artificial Sequence; identical to SEQ ID NO: 20534
  Cyclic GFR-binding peptide
  MOD_RES (1)..(3)..(35): Xaa is C or S

SEQ ID NO: 66904 - protein, 30 aa, Artificial Sequence
  Cyclic GFR-binding peptide
  MOD_RES (2)..(4): Xaa is C or S
HXGXAKVVMNPIKGYIVNNSSDFYLVNIPS

SEQ ID NO: 66905 - protein, 31 aa, Artificial Sequence
  Cyclic GFR-binding peptide
  MOD_RES (2)..(4): Xaa is C or S
LXGXEEVIMPIKGYLLVRGNDFYLMNIPSTK

SEQ ID NO: 66906 - protein, 20 aa, Artificial Sequence
  Cyclic GFR-binding peptide
PIKGYLLVRGNDFYLMNIPS

SEQ ID NO: 66907 - protein, 31 aa, Artificial Sequence
  Cyclic GFR-binding peptide
  MOD_RES (2)..(4): Xaa is C or S
RXGXSEVVMDPIKGYVVNNASDFYLINIPSL

SEQ ID NO: 66908 - protein, 41 aa, Artificial Sequence; identical to SEQ ID NO: 20536
  Cyclic GFR-binding peptide
  MOD_RES (1)..(3)..(35)..(36): Xaa is C or S

SEQ ID NO: 66909 - protein, 31 aa, Artificial Sequence
  Cyclic GFR-binding peptide
  MOD_RES (30)..(31): Xaa is C or S
VVMNPIKGYIVNSSDDFYLVNIPSLQTPAXX

SEQ ID NO: 66910 - protein, 30 aa, Artificial Sequence
  Cyclic GFR-binding peptide
  MOD_RES (29)..(30): Xaa is C or S
VIMPIKGYLLVRGNDFYLMNIPSTKVPAXX

SEQ ID NO: 66911 - protein, 32 aa, Artificial Sequence
  Cyclic GFR-binding peptide
  MOD_RES (2)..(2): Xaa is C or S
GXAKVVMNPIKGYIVNNSSDFYLVNIPSLKTP

SEQ ID NO: 66912 - protein, 38 aa, Artificial Sequence; identical to SEQ ID NO: 20539
  Cyclic GFR-binding peptide
  MOD_RES (1)..(33)..(34): Xaa is C or S

SEQ ID NO: 66913 - protein, 35 aa, Artificial Sequence; identical to SEQ ID NO: 20541
  Cyclic GFR-binding peptide
  MOD_RES (31)..(32): Xaa is C or S

SEQ ID NO: 66914 - protein, 31 aa, Artificial Sequence
  Cyclic GFR-binding peptide
  MOD_RES (2)..(2): Xaa is C or S
GXAEVVMDPIKGYVVNNAADFYLINIPSLRA

SEQ ID NO: 66915 - protein, 39 aa, Artificial Sequence; identical to SEQ ID NO: 20543
  Cyclic GFR-binding peptide
  MOD_RES (33)..(34): Xaa is C or S

SEQ ID NO: 66916 - protein, 31 aa, Artificial Sequence; identical to SEQ ID NO: 20544
  Cyclic GFR-binding peptide

SEQ ID NO: 66917 - protein, 32 aa, Artificial Sequence
  Cyclic GFR-binding peptide
  MOD_RES (28)..(29): Xaa is C or S
MDPIKGYVVNNAADFYLINIPSLRAPVXXSAP

SEQ ID NO: 66918 - protein, 28 aa, Artificial Sequence
  Cyclic GFR-binding peptide
  MOD_RES (28)..(28): Xaa is C or S
MGPIKGYYTVVGKDFYLINIPSLKTPVX

SEQ ID NO: 66919 - protein, 30 aa, Artificial Sequence
  Cyclic GFR-binding peptide
  MOD_RES (2)..(4): Xaa is C or S
RXGXGEVVMDPIKGYVVKENEDFYLMNIPS

SEQ ID NO: 66920 - protein, 32 aa, Artificial Sequence
  Cyclic GFR-binding peptide
  MOD_RES (30)..(31): Xaa is C or S
VVMNPIKGYIVNSSDDFYLVNIPSLQTPAXXP

SEQ ID NO: 66921 - protein, 32 aa, Artificial Sequence
  Cyclic GFR-binding peptide
  MOD_RES (2)..(4): Xaa is C or S
HXGXSRVVMNPIKGYIVNSSDDFYLVNIPSLK

SEQ ID NO: 66922 - protein, 34 aa, Artificial Sequence
  Cyclic GFR-binding peptide
  MOD_RES (30)..(31): Xaa is C or S
VVMDPIKGYVVKENEDFYLMNIPSLETPVXXAKP

SEQ ID NO: 66923 - protein, 33 aa, Artificial Sequence
  Cyclic GFR-binding peptide
  MOD_RES (27)..(28): Xaa is C or S
DPIKGYVVNNASDFYLINIPSLRTPVXXTPPTS

SEQ ID NO: 66924 - protein, 35 aa, Artificial Sequence; identical to SEQ ID NO: 20552
  Cyclic GFR-binding peptide
  MOD_RES (2)..(34)..(35): Xaa is C or S

SEQ ID NO: 66925 - protein, 40 aa, Artificial Sequence; identical to SEQ ID NO: 20557
  Cyclic GFR-binding peptide
  MOD_RES (2)..(34)..(35): Xaa is C or S

SEQ ID NO: 66926 - protein, 36 aa, Artificial Sequence; identical to SEQ ID NO: 20558
  Cyclic GFR-binding peptide
  MOD_RES (2)..(34)..(35): Xaa is C or S

SEQ ID NO: 66927 - protein, 34 aa, Artificial Sequence; identical to SEQ ID NO: 20559
  Cyclic GFR-binding peptide
  MOD_RES (1)..(3): Xaa is C or S

SEQ ID NO: 66928 - protein, 30 aa, Artificial Sequence
  Cyclic GFR-binding peptide
ARVVMNPIKGYIVNSSDDFYLVNIPSLQTP

SEQ ID NO: 66929 - protein, 39 aa, Artificial Sequence; identical to SEQ ID NO: 20561
  Cyclic GFR-binding peptide
  MOD_RES (2)..(34)..(35): Xaa is C or S

SEQ ID NO: 66930 - protein, 27 aa, Artificial Sequence
  Cyclic GFR-binding peptide
MDPIKGYVVNNAADFYLINIPSLRAPV

SEQ ID NO: 66931 - protein, 22 aa, Artificial Sequence
  Cyclic GFR-binding peptide
MDPIKGYVVKENEDFYLMNIPS

SEQ ID NO: 66932 - protein, 36 aa, Artificial Sequence; identical to SEQ ID NO: 20564
  Cyclic GFR-binding peptide
  MOD_RES (32)..(33): Xaa is C or S

SEQ ID NO: 66933 - protein, 35 aa, Artificial Sequence; identical to SEQ ID NO: 20566
  Cyclic GFR-binding peptide
  MOD_RES (1)..(32)..(33): Xaa is C or S

SEQ ID NO: 66934 - protein, 28 aa, Artificial Sequence
  Cyclic GFR-binding peptide
GEVVMEPIKGYVVKDYEDFYLMNIPSLE

SEQ ID NO: 66935 - protein, 29 aa, Artificial Sequence
  Cyclic GFR-binding peptide
  MOD_RES (2)..(2): Xaa is C or S
GXGEVVMEPIKGYVVKDYEDFYLMNIPSL

SEQ ID NO: 66936 - protein, 23 aa, Artificial Sequence
  Cyclic GFR-binding peptide
VMEPIKGYVVKDYEDFYLMNIPS

SEQ ID NO: 66937 - protein, 32 aa, Artificial Sequence; identical to SEQ ID NO: 20575
  Cyclic GFR-binding peptide
  MOD_RES (31)..(32): Xaa is C or S

SEQ ID NO: 66938 - protein, 33 aa, Artificial Sequence
  Cyclic GFR-binding peptide
  MOD_RES (2)..(4): Xaa is C or S
RXGXAEVVMDPIKGYVVNNAADFYLINIPSLRA

SEQ ID NO: 66939 - protein, 33 aa, Artificial Sequence; identical to SEQ ID NO: 20582
  Cyclic GFR-binding peptide
  MOD_RES (32)..(33): Xaa is C or S

SEQ ID NO: 66940 - protein, 35 aa, Artificial Sequence
  Cyclic GFR-binding peptide
  MOD_RES (30)..(31): Xaa is C or S
VVMNPIKGYIVNSSDDFYLVNIPSLKTPAXXPKPV

SEQ ID NO: 66941 - protein, 35 aa, Artificial Sequence; identical to SEQ ID NO: 20583
  Cyclic GFR-binding peptide
  MOD_RES (1)..(3)..(35): Xaa is C or S

SEQ ID NO: 66942 - protein, 37 aa, Artificial Sequence; identical to SEQ ID NO: 20584
  Cyclic GFR-binding peptide
  MOD_RES (2)..(34)..(35): Xaa is C or S

SEQ ID NO: 66943 - protein, 34 aa, Artificial Sequence; identical to SEQ ID NO: 20588
  Cyclic GFR-binding peptide
  MOD_RES (31)..(32): Xaa is C or S

SEQ ID NO: 66944 - protein, 33 aa, Artificial Sequence
  Cyclic GFR-binding peptide
  MOD_RES (28)..(29): Xaa is C or S
MNPIKGYIVNSSDDFYLVNIPSLKTPAXXPKPV

SEQ ID NO: 66945 - protein, 36 aa, Artificial Sequence; identical to SEQ ID NO: 20596
  Cyclic GFR-binding peptide
  MOD_RES (31)..(32): Xaa is C or S

SEQ ID NO: 66946 - protein, 22 aa, Artificial Sequence
  Cyclic GFR-binding peptide
PIKGYVVKDYEDFYLMNIPSLE

SEQ ID NO: 66947 - protein, 40 aa, Artificial Sequence; identical to SEQ ID NO: 20602
  Cyclic GFR-binding peptide
  MOD_RES (1)..(3)..(35)..(36): Xaa is C or S

SEQ ID NO: 66948 - protein, 32 aa, Artificial Sequence
  Cyclic GFR-binding peptide
  MOD_RES (29)..(29): Xaa is C or S
VMNPIKGYIVNSSDDFYLVNIPSLKTPAXTPK

SEQ ID NO: 66949 - protein, 32 aa, Artificial Sequence; identical to SEQ ID NO: 20611
  Cyclic GFR-binding peptide
  MOD_RES (31)..(32): Xaa is C or S

SEQ ID NO: 66950 - protein, 36 aa, Artificial Sequence; identical to SEQ ID NO: 20614
  Cyclic GFR-binding peptide
  MOD_RES (2)..(34)..(35): Xaa is C or S

SEQ ID NO: 66951 - protein, 22 aa, Artificial Sequence
  Cyclic GFR-binding peptide
PIKGYLLVRGNDFYLMNIPSTK

SEQ ID NO: 66952 - protein, 30 aa, Artificial Sequence
  Cyclic GFR-binding peptide
  MOD_RES (26)..(27): Xaa is C or S
PIKGYIVNNSSDFYLVNIPSLKTPAXXAKP

SEQ ID NO: 66953 - protein, 33 aa, Artificial Sequence
  Cyclic GFR-binding peptide
  MOD_RES (1)..(3): Xaa is C or S
XGXEAVSMGEPIKGYTPVGMDDFYLVNIPSLKT

SEQ ID NO: 66954 - protein, 28 aa, Artificial Sequence
  Cyclic GFR-binding peptide
  MOD_RES (1)..(1): Xaa is C or S
XSEVVMDPIKGYVVNNASDFYLINIPSL

SEQ ID NO: 66955 - protein, 29 aa, Artificial Sequence
  Cyclic GFR-binding peptide
ESVAMGPIKGYYTVVGKDFYLINIPSLKT

SEQ ID NO: 66956 - protein, 36 aa, Artificial Sequence
  Cyclic GFR-binding peptide
  MOD_RES (32)..(33): Xaa is C or S
AVSMGEPIKGYTPVGMDDFYLVNIPSLKTPVXXAKG

SEQ ID NO: 66957 - protein, 36 aa, Artificial Sequence; identical to SEQ ID NO: 20618
  Cyclic GFR-binding peptide
  MOD_RES (1)..(3)..(35)..(36): Xaa is C or S

SEQ ID NO: 66958 - protein, 38 aa, Artificial Sequence; identical to SEQ ID NO: 20620
  Cyclic GFR-binding peptide
  MOD_RES (1)..(33)..(34): Xaa is C or S

SEQ ID NO: 66959 - protein, 31 aa, Artificial Sequence
  Cyclic GFR-binding peptide
  MOD_RES (27)..(28): Xaa is C or S
NPIKGYIVNSSDDFYLVNIPSLKTPAXXPKP

SEQ ID NO: 66960 - protein, 40 aa, Artificial Sequence; identical to SEQ ID NO: 20628
  Cyclic GFR-binding peptide
  MOD_RES (2)..(4)..(36): Xaa is C or S

SEQ ID NO: 66961 - protein, 39 aa, Artificial Sequence; identical to SEQ ID NO: 20629
  Cyclic GFR-binding peptide
  MOD_RES (1)..(3)..(35)..(36): Xaa is C or S

SEQ ID NO: 66962 - protein, 26 aa, Artificial Sequence
  Cyclic GFR-binding peptide
MEPIKGYVVKDYEDFYLMNIPSLETP

SEQ ID NO: 66963 - protein, 25 aa, Artificial Sequence
  Cyclic GFR-binding peptide
EPIKGYVVKDYEDFYLMNIPSLETP

SEQ ID NO: 66964 - protein, 34 aa, Artificial Sequence; identical to SEQ ID NO: 20634
  Cyclic GFR-binding peptide
  MOD_RES (32)..(33): Xaa is C or S

SEQ ID NO: 66965 - protein, 35 aa, Artificial Sequence
  Cyclic GFR-binding peptide
  MOD_RES (29)..(30): Xaa is C or S
MGEPIKGYTPVGMDDFYLVNIPSLKTPVXXAKGVK

SEQ ID NO: 66966 - protein, 33 aa, Artificial Sequence; identical to SEQ ID NO: 20636
  Cyclic GFR-binding peptide
  MOD_RES (31)..(32): Xaa is C or S

SEQ ID NO: 66967 - protein, 30 aa, Artificial Sequence
  Cyclic GFR-binding peptide
  MOD_RES (27)..(28): Xaa is C or S
GPIKGYYTVVGKDFYLINIPSLKTPVXXAK

SEQ ID NO: 66968 - protein, 32 aa, Artificial Sequence
  Cyclic GFR-binding peptide
  MOD_RES (27)..(28): Xaa is C or S
MPIKGYLLVRGNDFYLMNIPSTKVPAXXTSPV

SEQ ID NO: 66969 - protein, 32 aa, Artificial Sequence
  Cyclic GFR-binding peptide
  MOD_RES (28)..(29): Xaa is C or S
GEPIKGYTPVGMDDFYLVNIPSLKTPVXXAKG

SEQ ID NO: 66970 - protein, 39 aa, Artificial Sequence; identical to SEQ ID NO: 20642
  Cyclic GFR-binding peptide
  MOD_RES (1)..(3)..(35)..(36): Xaa is C or S

SEQ ID NO: 66971 - protein, 33 aa, Artificial Sequence; identical to SEQ ID NO: 20645
  Cyclic GFR-binding peptide
  MOD_RES (2)..(2): Xaa is C or S

SEQ ID NO: 66972 - protein, 30 aa, Artificial Sequence
  Cyclic GFR-binding peptide
  MOD_RES (30)..(30): Xaa is C or S
VVMNPIKGYIVNNSSDFYLVNIPSLKTPAX

SEQ ID NO: 66973 - protein, 24 aa, Artificial Sequence
  Cyclic GFR-binding peptide
MNPIKGYIVNNSSDFYLVNIPSLK

SEQ ID NO: 66974 - protein, 23 aa, Artificial Sequence
  Cyclic GFR-binding peptide
EPIKGYVVKDYEDFYLMNIPSLE

SEQ ID NO: 66975 - protein, 20 aa, Artificial Sequence
  Cyclic GFR-binding peptide
PIKGYVVKDYEDFYLMNIPS

SEQ ID NO: 66976 - protein, 28 aa, Artificial Sequence
  Cyclic GFR-binding peptide
  MOD_RES (26)..(27): Xaa is C or S
PIKGYLLVRGNDFYLMNIPSTKVPAXXT

SEQ ID NO: 66977 - protein, 35 aa, Artificial Sequence; identical to SEQ ID NO: 20650
  Cyclic GFR-binding peptide
  MOD_RES (33)..(34): Xaa is C or S

SEQ ID NO: 66978 - protein, 20 aa, Artificial Sequence
  Cyclic GFR-binding peptide
PIKGYVVKENEDFYLMNIPS

SEQ ID NO: 66979 - protein, 24 aa, Artificial Sequence
  Cyclic GFR-binding peptide
VVMNPIKGYIVNSSDDFYLVNIPS

SEQ ID NO: 66980 - protein, 28 aa, Artificial Sequence
  Cyclic GFR-binding peptide
  MOD_RES (2)..(2): Xaa is C or S
GXGEVVMEPIKGYVVKDYEDFYLMNIPS

SEQ ID NO: 66981 - protein, 25 aa, Artificial Sequence
  Cyclic GFR-binding peptide
VMNPIKGYIVNSSDDFYLVNIPSLQ

SEQ ID NO: 66982 - protein, 34 aa, Artificial Sequence
  Cyclic GFR-binding peptide
  MOD_RES (2)..(4): Xaa is C or S
RXGXGEVVMEPIKGYVVKDYEDFYLMNIPSLETP

SEQ ID NO: 66983 - protein, 33 aa, Artificial Sequence; identical to SEQ ID NO: 20656
  Cyclic GFR-binding peptide
  MOD_RES (2)..(2): Xaa is C or S

SEQ ID NO: 66984 - protein, 32 aa, Artificial Sequence
  Cyclic GFR-binding peptide
  MOD_RES (28)..(29): Xaa is C or S
MNPIKGYIVNSSDDFYLVNIPSLKTPAXXPKP

SEQ ID NO: 66985 - protein, 23 aa, Artificial Sequence
  Cyclic GFR-binding peptide
MEPIKGYVVKDYEDFYLMNIPSL

SEQ ID NO: 66986 - protein, 29 aa, Artificial Sequence
  Cyclic GFR-binding peptide
VVMNPIKGYIVNNSSDFYLVNIPSLKTPA

SEQ ID NO: 66987 - protein, 35 aa, Artificial Sequence; identical to SEQ ID NO: 20658
  Cyclic GFR-binding peptide
  MOD_RES (1)..(3)..(34)..(35): Xaa is C or S

SEQ ID NO: 66988 - protein, 42 aa, Artificial Sequence; identical to SEQ ID NO: 20659
  Cyclic GFR-binding peptide
  MOD_RES (2)..(4)..(36)..(37): Xaa is C or S

SEQ ID NO: 66989 - protein, 26 aa, Artificial Sequence
  Cyclic GFR-binding peptide
EPIKGYTPVGMDDFYLVNIPSLKTPV

SEQ ID NO: 66990 - protein, 29 aa, Artificial Sequence
  Cyclic GFR-binding peptide
  MOD_RES (28)..(29): Xaa is C or S
MDPIKGYVVNNASDFYLINIPSLRTPVXX

SEQ ID NO: 66991 - protein, 32 aa, Artificial Sequence
  Cyclic GFR-binding peptide
  MOD_RES (26)..(27): Xaa is C or S
PIKGYVVKENEDFYLMNIPSLETPVXXAKPIK

SEQ ID NO: 66992 - protein, 25 aa, Artificial Sequence
  Cyclic GFR-binding peptide
NPIKGYIVNSSDDFYLVNIPSLKTP

SEQ ID NO: 66993 - protein, 22 aa, Artificial Sequence
  Cyclic GFR-binding peptide
MNPIKGYIVNSSDDFYLVNIPS

SEQ ID NO: 66994 - protein, 30 aa, Artificial Sequence
  Cyclic GFR-binding peptide
  MOD_RES (27)..(28): Xaa is C or S
NPIKGYIVNNSSDFYLVNIPSLKTPAXXAK

SEQ ID NO: 66995 - protein, 27 aa, Artificial Sequence
  Cyclic GFR-binding peptide
  MOD_RES (27)..(27): Xaa is C or S
NPIKGYIVNSSDDFYLVNIPSLKTPAX

SEQ ID NO: 66996 - protein, 38 aa, Artificial Sequence; identical to SEQ ID NO: 20669
  Cyclic GFR-binding peptide
  MOD_RES (1)..(3)..(35)..(36): Xaa is C or S

SEQ ID NO: 66997 - protein, 23 aa, Artificial Sequence
  Cyclic GFR-binding peptide
VIMPIKGYLLVRGNDFYLMNIPS

SEQ ID NO: 66998 - protein, 25 aa, Artificial Sequence
  Cyclic GFR-binding peptide
PIKGYLLVRGNDFYLMNIPSTKVPA

SEQ ID NO: 66999 - protein, 26 aa, Artificial Sequence
  Cyclic GFR-binding peptide
EPIKGYVVKDYEDFYLMNIPSLETPV

SEQ ID NO: 67000 - protein, 27 aa, Artificial Sequence
  Cyclic GFR-binding peptide
MNPIKGYIVNNSSDFYLVNIPSLKTPA

SEQ ID NO: 67001 - protein, 28 aa, Artificial Sequence
  Cyclic GFR-binding peptide
  MOD_RES (26)..(27): Xaa is C or S
PIKGYIVNNSSDFYLVNIPSLKTPAXXA

SEQ ID NO: 67002 - protein, 24 aa, Artificial Sequence
  Cyclic GFR-binding peptide
NPIKGYIVNSSDDFYLVNIPSLKT

SEQ ID NO: 67003 - protein, 24 aa, Artificial Sequence
  Cyclic GFR-binding peptide
MNPIKGYIVNSSDDFYLVNIPSLQ

SEQ ID NO: 67004 - protein, 32 aa, Artificial Sequence
  Cyclic GFR-binding peptide
  MOD_RES (2)..(4): Xaa is C or S
HXGXAKVVMNPIKGYIVNNSSDFYLVNIPSLK

SEQ ID NO: 67005 - protein, 35 aa, Artificial Sequence
  Cyclic GFR-binding peptide
  MOD_RES (31)..(32): Xaa is C or S
VSMGEPIKGYTPVGMDDFYLVNIPSLKTPVXXAKG

SEQ ID NO: 67006 - protein, 28 aa, Artificial Sequence
  Cyclic GFR-binding peptide
VMNPIKGYIVNSSDDFYLVNIPSLKTPA

SEQ ID NO: 67007 - protein, 31 aa, Artificial Sequence
  Cyclic GFR-binding peptide
  MOD_RES (28)..(29): Xaa is C or S
MNPIKGYIVNSSDDFYLVNIPSLKTPAXXPK

SEQ ID NO: 67008 - protein, 38 aa, Artificial Sequence; identical to SEQ ID NO: 20685
  Cyclic GFR-binding peptide
  MOD_RES (2)..(34)..(35): Xaa is C or S

SEQ ID NO: 67009 - protein, 29 aa, Artificial Sequence
  Cyclic GFR-binding peptide
  MOD_RES (29)..(29): Xaa is C or S
VMDPIKGYVVNNASDFYLINIPSLRTPVX

SEQ ID NO: 67010 - protein, 21 aa, Artificial Sequence
  Cyclic GFR-binding peptide
DPIKGYVVNNAADFYLINIPS

SEQ ID NO: 67011 - protein, 33 aa, Artificial Sequence
  Cyclic GFR-binding peptide
  MOD_RES (28)..(29): Xaa is C or S
MNPIKGYIVNSSDDFYLVNIPSLQTPAXXPKPV

SEQ ID NO: 67012 - protein, 28 aa, Artificial Sequence
  Cyclic GFR-binding peptide
EVIMPIKGYLLVRGNDFYLMNIPSTKVP

SEQ ID NO: 67013 - protein, 39 aa, Artificial Sequence; identical to SEQ ID NO: 20693
  Cyclic GFR-binding peptide
  MOD_RES (1)..(3)..(36)..(37): Xaa is C or S

SEQ ID NO: 67014 - protein, 35 aa, Artificial Sequence
  Cyclic GFR-binding peptide
  MOD_RES (29)..(30): Xaa is C or S
VMNPIKGYIVNSSDDFYLVNIPSLQTPAXXPKPVT

SEQ ID NO: 67015 - protein, 34 aa, Artificial Sequence; identical to SEQ ID NO: 20694
  Cyclic GFR-binding peptide
  MOD_RES (32)..(33): Xaa is C or S

SEQ ID NO: 67016 - protein, 29 aa, Artificial Sequence
  Cyclic GFR-binding peptide
  MOD_RES (27)..(28): Xaa is C or S
GPIKGYYTVVGKDFYLINIPSLKTPVXXA

SEQ ID NO: 67017 - protein, 32 aa, Artificial Sequence; identical to SEQ ID NO: 20695
  Cyclic GFR-binding peptide
  MOD_RES (32)..(32): Xaa is C or S

SEQ ID NO: 67018 - protein, 33 aa, Artificial Sequence
  Cyclic GFR-binding peptide
  MOD_RES (1)..(3): Xaa is C or S
XGXARVVMNPIKGYIVNSSDDFYLVNIPSLQTP

SEQ ID NO: 67019 - protein, 39 aa, Artificial Sequence; identical to SEQ ID NO: 20696
  Cyclic GFR-binding peptide
  MOD_RES (1)..(3)..(35)..(36): Xaa is C or S

SEQ ID NO: 67020 - protein, 36 aa, Artificial Sequence; identical to SEQ ID NO: 20699
  Cyclic GFR-binding peptide
  MOD_RES (1)..(33)..(34): Xaa is C or S

SEQ ID NO: 67021 - protein, 29 aa, Artificial Sequence
  Cyclic GFR-binding peptide
  MOD_RES (1)..(1): Xaa is C or S
XESVAMGPIKGYYTVVGKDFYLINIPSLK

SEQ ID NO: 67022 - protein, 29 aa, Artificial Sequence
  Cyclic GFR-binding peptide
  MOD_RES (26)..(26): Xaa is C or S
PIKGYIVNSSDDFYLVNIPSLKTPAXTPK

SEQ ID NO: 67023 - protein, 26 aa, Artificial Sequence
  Cyclic GFR-binding peptide
IMPIKGYLLVRGNDFYLMNIPSTKVP

SEQ ID NO: 67024 - protein, 32 aa, Artificial Sequence
  Cyclic GFR-binding peptide
  MOD_RES (29)..(30): Xaa is C or S
VMEPIKGYVVKDYEDFYLMNIPSLETPVXXAK

SEQ ID NO: 67025 - protein, 28 aa, Artificial Sequence
  Cyclic GFR-binding peptide
EVVMDPIKGYVVNNASDFYLINIPSLRT

SEQ ID NO: 67026 - protein, 32 aa, Artificial Sequence; identical to SEQ ID NO: 20702
  Cyclic GFR-binding peptide
  MOD_RES (31)..(32): Xaa is C or S

SEQ ID NO: 67027 - protein, 29 aa, Artificial Sequence
  Cyclic GFR-binding peptide
  MOD_RES (27)..(28): Xaa is C or S
NPIKGYIVNNSSDFYLVNIPSLKTPAXXA

SEQ ID NO: 67028 - protein, 30 aa, Artificial Sequence
  Cyclic GFR-binding peptide
  MOD_RES (1)..(3): Xaa is C or S
XGXEAVSMGEPIKGYTPVGMDDFYLVNIPS

SEQ ID NO: 67029 - protein, 28 aa, Artificial Sequence
  Cyclic GFR-binding peptide
VIMPIKGYLLVRGNDFYLMNIPSTKVPA

SEQ ID NO: 67030 - protein, 30 aa, Artificial Sequence
  Cyclic GFR-binding peptide
  MOD_RES (29)..(30): Xaa is C or S
VMNPIKGYIVNNSSDFYLVNIPSLKTPAXX

SEQ ID NO: 67031 - protein, 36 aa, Artificial Sequence; identical to SEQ ID NO: 20705
  Cyclic GFR-binding peptide
  MOD_RES (32)..(33): Xaa is C or S

SEQ ID NO: 67032 - protein, 27 aa, Artificial Sequence
  Cyclic GFR-binding peptide
  MOD_RES (26)..(27): Xaa is C or S
PIKGYVVKENEDFYLMNIPSLETPVXX

SEQ ID NO: 67033 - protein, 28 aa, Artificial Sequence
  Cyclic GFR-binding peptide
  MOD_RES (28)..(28): Xaa is C or S
IMPIKGYLLVRGNDFYLMNIPSTKVPAX

SEQ ID NO: 67034 - protein, 30 aa, Artificial Sequence
  Cyclic GFR-binding peptide
  MOD_RES (30)..(30): Xaa is C or S
VVMNPIKGYIVNSSDDFYLVNIPSLKTPAX

SEQ ID NO: 67035 - protein, 31 aa, Artificial Sequence
  Cyclic GFR-binding peptide
  MOD_RES (28)..(29): Xaa is C or S
MNPIKGYIVNNSSDFYLVNIPSLKTPAXXAK

SEQ ID NO: 67036 - protein, 23 aa, Artificial Sequence
  Cyclic GFR-binding peptide
PIKGYLLVRGNDFYLMNIPSTKV

SEQ ID NO: 67037 - protein, 42 aa, Artificial Sequence; identical to SEQ ID NO: 20711
  Cyclic GFR-binding peptide
  MOD_RES (2)..(4)..(36)..(37): Xaa is C or S

SEQ ID NO: 67038 - protein, 27 aa, Artificial Sequence
  Cyclic GFR-binding peptide
GEVVMDPIKGYVVKENEDFYLMNIPSL

SEQ ID NO: 67039 - protein, 37 aa, Artificial Sequence; identical to SEQ ID NO: 20720
  Cyclic GFR-binding peptide
  MOD_RES (1)..(3)..(35)..(36): Xaa is C or S

SEQ ID NO: 67040 - protein, 33 aa, Artificial Sequence
  Cyclic GFR-binding peptide
  MOD_RES (1)..(3): Xaa is C or S
XGXAEVVMDPIKGYVVNNAADFYLINIPSLRAP

SEQ ID NO: 67041 - protein, 35 aa, Artificial Sequence; identical to SEQ ID NO: 20724
  Cyclic GFR-binding peptide
  MOD_RES (2)..(34)..(35): Xaa is C or S

SEQ ID NO: 67042 - protein, 32 aa, Artificial Sequence
  Cyclic GFR-binding peptide
  MOD_RES (26)..(27): Xaa is C or S
PIKGYIVNSSDDFYLVNIPSLQTPAXXPKPVT

SEQ ID NO: 67043 - protein, 26 aa, Artificial Sequence
  Cyclic GFR-binding peptide
VVMNPIKGYIVNSSDDFYLVNIPSLK

SEQ ID NO: 67044 - protein, 41 aa, Artificial Sequence; identical to SEQ ID NO: 20729
  Cyclic GFR-binding peptide
  MOD_RES (2)..(4)..(35)..(36): Xaa is C or S

SEQ ID NO: 67045 - protein, 25 aa, Artificial Sequence
  Cyclic GFR-binding peptide
EPIKGYTPVGMDDFYLVNIPSLKTP

SEQ ID NO: 67046 - protein, 32 aa, Artificial Sequence; identical to SEQ ID NO: 20733
  Cyclic GFR-binding peptide
  MOD_RES (31)..(32): Xaa is C or S

SEQ ID NO: 67047 - protein, 30 aa, Artificial Sequence
  Cyclic GFR-binding peptide
  MOD_RES (29)..(30): Xaa is C or S
VMDPIKGYVVKENEDFYLMNIPSLETPVXX

SEQ ID NO: 67048 - protein, 28 aa, Artificial Sequence
  Cyclic GFR-binding peptide
  MOD_RES (26)..(27): Xaa is C or S
PIKGYIVNSSDDFYLVNIPSLQTPAXXP

SEQ ID NO: 67049 - protein, 36 aa, Artificial Sequence; identical to SEQ ID NO: 20736
  Cyclic GFR-binding peptide
  MOD_RES (2)..(4)..(36): Xaa is C or S

SEQ ID NO: 67050 - protein, 28 aa, Artificial Sequence
  Cyclic GFR-binding peptide
VVMDPIKGYVVNNASDFYLINIPSLRTP

SEQ ID NO: 67051 - protein, 23 aa, Artificial Sequence
  Cyclic GFR-binding peptide
PIKGYVVKDYEDFYLMNIPSLET

SEQ ID NO: 67052 - protein, 34 aa, Artificial Sequence
  Cyclic GFR-binding peptide
  MOD_RES (29)..(30): Xaa is C or S
VMDPIKGYVVNNASDFYLINIPSLRTPVXXTPPT

SEQ ID NO: 67053 - protein, 22 aa, Artificial Sequence
  Cyclic GFR-binding peptide
DPIKGYVVNNASDFYLINIPSL

SEQ ID NO: 67054 - protein, 29 aa, Artificial Sequence
  Cyclic GFR-binding peptide
  MOD_RES (27)..(28): Xaa is C or S
DPIKGYVVNNASDFYLINIPSLRTPVXXT

SEQ ID NO: 67055 - protein, 38 aa, Artificial Sequence; identical to SEQ ID NO: 20748
  Cyclic GFR-binding peptide
  MOD_RES (2)..(34)..(35): Xaa is C or S

SEQ ID NO: 67056 - protein, 27 aa, Artificial Sequence
  Cyclic GFR-binding peptide
EEVIMPIKGYLLVRGNDFYLMNIPSTK

SEQ ID NO: 67057 - protein, 33 aa, Artificial Sequence; identical to SEQ ID NO: 20749
  Cyclic GFR-binding peptide
  MOD_RES (31)..(32): Xaa is C or S

SEQ ID NO: 67058 - protein, 29 aa, Artificial Sequence
  Cyclic GFR-binding peptide
  MOD_RES (2)..(2): Xaa is C or S
GXARVVMNPIKGYIVNSSDDFYLVNIPSL

SEQ ID NO: 67059 - protein, 38 aa, Artificial Sequence; identical to SEQ ID NO: 20753
  Cyclic GFR-binding peptide
  MOD_RES (2)..(4)..(36): Xaa is C or S

SEQ ID NO: 67060 - protein, 25 aa, Artificial Sequence
  Cyclic GFR-binding peptide
PIKGYVVNNAADFYLINIPSLRAPV

SEQ ID NO: 67061 - protein, 26 aa, Artificial Sequence
  Cyclic GFR-binding peptide
NPIKGYIVNSSDDFYLVNIPSLQTPA

SEQ ID NO: 67062 - protein, 31 aa, Artificial Sequence
  Cyclic GFR-binding peptide
  MOD_RES (1)..(3): Xaa is C or S
XGXESVAMGPIKGYYTVVGKDFYLINIPSLK

SEQ ID NO: 67063 - protein, 40 aa, Artificial Sequence; identical to SEQ ID NO: 20756
  Cyclic GFR-binding peptide
  MOD_RES (2)..(34)..(35): Xaa is C or S

SEQ ID NO: 67064 - protein, 29 aa, Artificial Sequence
  Cyclic GFR-binding peptide
  MOD_RES (27)..(28): Xaa is C or S
DPIKGYVVNNAADFYLINIPSLRAPVXXS

SEQ ID NO: 67065 - protein, 34 aa, Artificial Sequence
  Cyclic GFR-binding peptide
  MOD_RES (2)..(4): Xaa is C or S
HXGXARVVMNPIKGYIVNSSDDFYLVNIPSLQTP

SEQ ID NO: 67066 - protein, 26 aa, Artificial Sequence
  Cyclic GFR-binding peptide
  MOD_RES (26)..(26): Xaa is C or S
PIKGYYTVVGKDFYLINIPSLKTPVX

SEQ ID NO: 67067 - protein, 33 aa, Artificial Sequence; identical to SEQ ID NO: 20761
  Cyclic GFR-binding peptide
  MOD_RES (1)..(33): Xaa is C or S

SEQ ID NO: 67068 - protein, 28 aa, Artificial Sequence
  Cyclic GFR-binding peptide
  MOD_RES (28)..(28): Xaa is C or S
MDPIKGYVVKENEDFYLMNIPSLETPVX

SEQ ID NO: 67069 - protein, 30 aa, Artificial Sequence
  Cyclic GFR-binding peptide
  MOD_RES (1)..(1): Xaa is C or S
XEAVSMGEPIKGYTPVGMDDFYLVNIPSLK

SEQ ID NO: 67070 - protein, 36 aa, Artificial Sequence; identical to SEQ ID NO: 20763
  Cyclic GFR-binding peptide
  MOD_RES (2)..(34)..(35): Xaa is C or S

SEQ ID NO: 67071 - protein, 34 aa, Artificial Sequence
  Cyclic GFR-binding peptide
  MOD_RES (29)..(30): Xaa is C or S
VMNPIKGYIVNNSSDFYLVNIPSLKTPAXXAKPV

SEQ ID NO: 67072 - protein, 37 aa, Artificial Sequence; identical to SEQ ID NO: 20765
  Cyclic GFR-binding peptide
  MOD_RES (33)..(34): Xaa is C or S

SEQ ID NO: 67073 - protein, 35 aa, Artificial Sequence
  Cyclic GFR-binding peptide
  MOD_RES (30)..(31): Xaa is C or S
VAMGPIKGYYTVVGKDFYLINIPSLKTPVXXAKSA

SEQ ID NO: 67074 - protein, 34 aa, Artificial Sequence
  Cyclic GFR-binding peptide
  MOD_RES (30)..(31): Xaa is C or S
VVMNPIKGYIVNSSDDFYLVNIPSLKTPAXXPKP

SEQ ID NO: 67075 - protein, 30 aa, Artificial Sequence
  Cyclic GFR-binding peptide
  MOD_RES (2)..(2): Xaa is C or S
GXAKVVMNPIKGYIVNNSSDFYLVNIPSLK

SEQ ID NO: 67076 - protein, 31 aa, Artificial Sequence
  Cyclic GFR-binding peptide
  MOD_RES (29)..(30): Xaa is C or S
VMNPIKGYIVNSSDDFYLVNIPSLKTPAXXP

SEQ ID NO: 67077 - protein, 35 aa, Artificial Sequence
  Cyclic GFR-binding peptide
  MOD_RES (29)..(29): Xaa is C or S
VMNPIKGYIVNSSDDFYLVNIPSLKTPAXTPKTVH

SEQ ID NO: 67078 - protein, 36 aa, Artificial Sequence
  Cyclic GFR-binding peptide
  MOD_RES (30)..(31): Xaa is C or S
VAMGPIKGYYTVVGKDFYLINIPSLKTPVXXAKSAK

SEQ ID NO: 67079 - protein, 26 aa, Artificial Sequence
  Cyclic GFR-binding peptide
  MOD_RES (26)..(26): Xaa is C or S
PIKGYIVNNSSDFYLVNIPSLKTPAX

SEQ ID NO: 67080 - protein, 36 aa, Artificial Sequence; identical to SEQ ID NO: 20776
  Cyclic GFR-binding peptide
  MOD_RES (2)..(4)..(35)..(36): Xaa is C or S

SEQ ID NO: 67081 - protein, 30 aa, Artificial Sequence; identical to SEQ ID NO: 20777
  Cyclic GFR-binding peptide

SEQ ID NO: 67082 - protein, 30 aa, Artificial Sequence
  Cyclic GFR-binding peptide
  MOD_RES (2)..(4): Xaa is C or S
RXGXGEVVMEPIKGYVVKDYEDFYLMNIPS

SEQ ID NO: 67083 - protein, 37 aa, Artificial Sequence; identical to SEQ ID NO: 20778
  Cyclic GFR-binding peptide
  MOD_RES (1)..(34)..(35): Xaa is C or S

SEQ ID NO: 67084 - protein, 33 aa, Artificial Sequence
  Cyclic GFR-binding peptide
  MOD_RES (1)..(3): Xaa is C or S
XGXESVAMGPIKGYYTVVGKDFYLINIPSLKTP

SEQ ID NO: 67085 - protein, 33 aa, Artificial Sequence; identical to SEQ ID NO: 20780
  Cyclic GFR-binding peptide
  MOD_RES (1)..(33): Xaa is C or S

SEQ ID NO: 67086 - protein, 35 aa, Artificial Sequence; identical to SEQ ID NO: 20782
  Cyclic GFR-binding peptide
  MOD_RES (1)..(33)..(34): Xaa is C or S

SEQ ID NO: 67087 - protein, 34 aa, Artificial Sequence
  Cyclic GFR-binding peptide
  MOD_RES (28)..(29): Xaa is C or S
MDPIKGYVVNNAADFYLINIPSLRAPVXXSAPAA

SEQ ID NO: 67088 - protein, 21 aa, Artificial Sequence
  Cyclic GFR-binding peptide
MPIKGYLLVRGNDFYLMNIPS

SEQ ID NO: 67089 - protein, 29 aa, Artificial Sequence
  Cyclic GFR-binding peptide
  MOD_RES (28)..(28): Xaa is C or S
MNPIKGYIVNSSDDFYLVNIPSLKTPAXT

SEQ ID NO: 67090 - protein, 21 aa, Artificial Sequence
  Cyclic GFR-binding peptide
EPIKGYTPVGMDDFYLVNIPS

SEQ ID NO: 67091 - protein, 41 aa, Artificial Sequence; identical to SEQ ID NO: 20796
  Cyclic GFR-binding peptide
  MOD_RES (1)..(3)..(36)..(37): Xaa is C or S

SEQ ID NO: 67092 - protein, 35 aa, Artificial Sequence; identical to SEQ ID NO: 20798
  Cyclic GFR-binding peptide
  MOD_RES (2)..(34)..(35): Xaa is C or S

SEQ ID NO: 67093 - protein, 22 aa, Artificial Sequence
  Cyclic GFR-binding peptide
GEPIKGYTPVGMDDFYLVNIPS

SEQ ID NO: 67094 - protein, 30 aa, Artificial Sequence
  Cyclic GFR-binding peptide
  MOD_RES (1)..(3): Xaa is C or S
XGXEEVIMPIKGYLLVRGNDFYLMNIPSTK

SEQ ID NO: 67095 - protein, 36 aa, Artificial Sequence; identical to SEQ ID NO: 20804
  Cyclic GFR-binding peptide
  MOD_RES (33)..(34): Xaa is C or S

SEQ ID NO: 67096 - protein, 24 aa, Artificial Sequence
  Cyclic GFR-binding peptide
PIKGYIVNSSDDFYLVNIPSLQTP

SEQ ID NO: 67097 - protein, 31 aa, Artificial Sequence
  Cyclic GFR-binding peptide
  MOD_RES (30)..(31): Xaa is C or S
VVMDPIKGYVVKENEDFYLMNIPSLETPVXX

SEQ ID NO: 67098 - protein, 39 aa, Artificial Sequence; identical to SEQ ID NO: 20806
  Cyclic GFR-binding peptide
  MOD_RES (1)..(3)..(35): Xaa is C or S

SEQ ID NO: 67099 - protein, 31 aa, Artificial Sequence
  Cyclic GFR-binding peptide
  MOD_RES (27)..(28): Xaa is C or S
DPIKGYVVNNAADFYLINIPSLRAPVXXSAP

SEQ ID NO: 67100 - protein, 25 aa, Artificial Sequence
  Cyclic GFR-binding peptide
VVMNPIKGYIVNSSDDFYLVNIPSL

SEQ ID NO: 67101 - protein, 31 aa, Artificial Sequence
  Cyclic GFR-binding peptide
  MOD_RES (27)..(28): Xaa is C or S
DPIKGYVVNNASDFYLINIPSLRTPVXXTPP

SEQ ID NO: 67102 - protein, 32 aa, Artificial Sequence
  Cyclic GFR-binding peptide
  MOD_RES (27)..(28): Xaa is C or S
DPIKGYVVNNASDFYLINIPSLRTPVXXTPPT

SEQ ID NO: 67103 - protein, 28 aa, Artificial Sequence
  Cyclic GFR-binding peptide
  MOD_RES (26)..(27): Xaa is C or S
PIKGYTPVGMDDFYLVNIPSLKTPVXXA

SEQ ID NO: 67104 - protein, 21 aa, Artificial Sequence
  Cyclic GFR-binding peptide
PIKGYVVNNASDFYLINIPSL

SEQ ID NO: 67105 - protein, 32 aa, Artificial Sequence; identical to SEQ ID NO: 20814
  Cyclic GFR-binding peptide
  MOD_RES (32)..(32): Xaa is C or S

SEQ ID NO: 67106 - protein, 34 aa, Artificial Sequence; identical to SEQ ID NO: 20815
  Cyclic GFR-binding peptide
  MOD_RES (2)..(34): Xaa is C or S

SEQ ID NO: 67107 - protein, 28 aa, Artificial Sequence
  Cyclic GFR-binding peptide
SVAMGPIKGYYTVVGKDFYLINIPSLKT

SEQ ID NO: 67108 - protein, 34 aa, Artificial Sequence; identical to SEQ ID NO: 20819
  Cyclic GFR-binding peptide
  MOD_RES (1)..(33)..(34): Xaa is C or S

SEQ ID NO: 67109 - protein, 34 aa, Artificial Sequence
  Cyclic GFR-binding peptide
  MOD_RES (30)..(31): Xaa is C or S
VVMNPIKGYIVNNSSDFYLVNIPSLKTPAXXAKP

SEQ ID NO: 67110 - protein, 28 aa, Artificial Sequence
  Cyclic GFR-binding peptide
VVMDPIKGYVVNNAADFYLINIPSLRAP

SEQ ID NO: 67111 - protein, 30 aa, Artificial Sequence
  Cyclic GFR-binding peptide
AVSMGEPIKGYTPVGMDDFYLVNIPSLKTP

SEQ ID NO: 67112 - protein, 22 aa, Artificial Sequence
  Cyclic GFR-binding peptide
NPIKGYIVNNSSDFYLVNIPSL

SEQ ID NO: 67113 - protein, 31 aa, Artificial Sequence
  Cyclic GFR-binding peptide
  MOD_RES (2)..(4): Xaa is C or S
HXGXARVVMNPIKGYIVNSSDDFYLVNIPSL

SEQ ID NO: 67114 - protein, 26 aa, Artificial Sequence
  Cyclic GFR-binding peptide
GPIKGYYTVVGKDFYLINIPSLKTPV

SEQ ID NO: 67115 - protein, 26 aa, Artificial Sequence
  Cyclic GFR-binding peptide
VVMDPIKGYVVNNAADFYLINIPSLR

SEQ ID NO: 67116 - protein, 28 aa, Artificial Sequence
  Cyclic GFR-binding peptide
VVMNPIKGYIVNSSDDFYLVNIPSLQTP

SEQ ID NO: 67117 - protein, 32 aa, Artificial Sequence; identical to SEQ ID NO: 20828
  Cyclic GFR-binding peptide
  MOD_RES (1)..(1): Xaa is C or S

SEQ ID NO: 67118 - protein, 30 aa, Artificial Sequence
  Cyclic GFR-binding peptide
  MOD_RES (2)..(2): Xaa is C or S
GXGEVVMDPIKGYVVKENEDFYLMNIPSLE

SEQ ID NO: 67119 - protein, 34 aa, Artificial Sequence; identical to SEQ ID NO: 20834
  Cyclic GFR-binding peptide
  MOD_RES (1)..(3): Xaa is C or S

SEQ ID NO: 67120 - protein, 29 aa, Artificial Sequence
  Cyclic GFR-binding peptide
  MOD_RES (1)..(3): Xaa is C or S
XGXAEVVMDPIKGYVVNNAADFYLINIPS

SEQ ID NO: 67121 - protein, 24 aa, Artificial Sequence
  Cyclic GFR-binding peptide
VVMDPIKGYVVNNASDFYLINIPS

SEQ ID NO: 67122 - protein, 34 aa, Artificial Sequence; identical to SEQ ID NO: 20837
  Cyclic GFR-binding peptide
  MOD_RES (1)..(33)..(34): Xaa is C or S

SEQ ID NO: 67123 - protein, 21 aa, Artificial Sequence
  Cyclic GFR-binding peptide
NPIKGYIVNSSDDFYLVNIPS

SEQ ID NO: 67124 - protein, 33 aa, Artificial Sequence
  Cyclic GFR-binding peptide
  MOD_RES (27)..(28): Xaa is C or S
NPIKGYIVNSSDDFYLVNIPSLQTPAXXPKPVT

SEQ ID NO: 67125 - protein, 31 aa, Artificial Sequence
  Cyclic GFR-binding peptide
  MOD_RES (2)..(2): Xaa is C or S
GXARVVMNPIKGYIVNSSDDFYLVNIPSLQT

SEQ ID NO: 67126 - protein, 29 aa, Artificial Sequence
  Cyclic GFR-binding peptide
VSMGEPIKGYTPVGMDDFYLVNIPSLKTP

SEQ ID NO: 67127 - protein, 31 aa, Artificial Sequence
  Cyclic GFR-binding peptide
  MOD_RES (28)..(29): Xaa is C or S
MNPIKGYIVNSSDDFYLVNIPSLQTPAXXPK

SEQ ID NO: 67128 - protein, 35 aa, Artificial Sequence
  Cyclic GFR-binding peptide
  MOD_RES (29)..(30): Xaa is C or S
VMDPIKGYVVNNAADFYLINIPSLRAPVXXSAPAA

SEQ ID NO: 67129 - protein, 23 aa, Artificial Sequence
  Cyclic GFR-binding peptide
VMDPIKGYVVKENEDFYLMNIPS

SEQ ID NO: 67130 - protein, 37 aa, Artificial Sequence; identical to SEQ ID NO: 20842
  Cyclic GFR-binding peptide
  MOD_RES (2)..(4)..(36)..(37): Xaa is C or S

SEQ ID NO: 67131 - protein, 34 aa, Artificial Sequence
  Cyclic GFR-binding peptide
  MOD_RES (2)..(4): Xaa is C or S
RXGXGEVVMDPIKGYVVKENEDFYLMNIPSLETP

SEQ ID NO: 67132 - protein, 31 aa, Artificial Sequence
  Cyclic GFR-binding peptide
  MOD_RES (28)..(29): Xaa is C or S
GEPIKGYTPVGMDDFYLVNIPSLKTPVXXAK

SEQ ID NO: 67133 - protein, 27 aa, Artificial Sequence
  Cyclic GFR-binding peptide
AVSMGEPIKGYTPVGMDDFYLVNIPSL

SEQ ID NO: 67134 - protein, 25 aa, Artificial Sequence
  Cyclic GFR-binding peptide
PIKGYYTVVGKDFYLINIPSLKTPV

SEQ ID NO: 67135 - protein, 28 aa, Artificial Sequence
  Cyclic GFR-binding peptide
GEVVMDPIKGYVVKENEDFYLMNIPSLE

SEQ ID NO: 67136 - protein, 38 aa, Artificial Sequence; identical to SEQ ID NO: 20853
  Cyclic GFR-binding peptide
  MOD_RES (1)..(3)..(35)..(36): Xaa is C or S

SEQ ID NO: 67137 - protein, 38 aa, Artificial Sequence; identical to SEQ ID NO: 20854
  Cyclic GFR-binding peptide
  MOD_RES (32)..(32): Xaa is C or S

SEQ ID NO: 67138 - protein, 31 aa, Artificial Sequence
  Cyclic GFR-binding peptide
  MOD_RES (2)..(2): Xaa is C or S
GXSRVVMNPIKGYIVNSSDDFYLVNIPSLKT

SEQ ID NO: 67139 - protein, 29 aa, Artificial Sequence
  Cyclic GFR-binding peptide
  MOD_RES (26)..(27): Xaa is C or S
PIKGYVVNNAADFYLINIPSLRAPVXXSA

SEQ ID NO: 67140 - protein, 34 aa, Artificial Sequence; identical to SEQ ID NO: 20856
  Cyclic GFR-binding peptide
  MOD_RES (1)..(3): Xaa is C or S

SEQ ID NO: 67141 - protein, 27 aa, Artificial Sequence
  Cyclic GFR-binding peptide
  MOD_RES (1)..(1): Xaa is C or S
XSRVVMNPIKGYIVNSSDDFYLVNIPS

SEQ ID NO: 67142 - protein, 34 aa, Artificial Sequence
  Cyclic GFR-binding peptide
  MOD_RES (30)..(31): Xaa is C or S
VVMEPIKGYVVKDYEDFYLMNIPSLETPVXXAKP

SEQ ID NO: 67143 - protein, 30 aa, Artificial Sequence
  Cyclic GFR-binding peptide
  MOD_RES (27)..(28): Xaa is C or S
EPIKGYVVKDYEDFYLMNIPSLETPVXXAK

SEQ ID NO: 67144 - protein, 20 aa, Artificial Sequence
  Cyclic GFR-binding peptide
PIKGYVVNNAADFYLINIPS

SEQ ID NO: 67145 - protein, 31 aa, Artificial Sequence
  Cyclic GFR-binding peptide
  MOD_RES (30)..(31): Xaa is C or S
VAMGPIKGYYTVVGKDFYLINIPSLKTPVXX

SEQ ID NO: 67146 - protein, 28 aa, Artificial Sequence
  Cyclic GFR-binding peptide
  MOD_RES (2)..(2): Xaa is C or S
GXSEVVMDPIKGYVVNNASDFYLINIPS

SEQ ID NO: 67147 - protein, 33 aa, Artificial Sequence; identical to SEQ ID NO: 20860
  Cyclic GFR-binding peptide
  MOD_RES (1)..(3): Xaa is C or S

SEQ ID NO: 67148 - protein, 37 aa, Artificial Sequence; identical to SEQ ID NO: 20863
  Cyclic GFR-binding peptide
  MOD_RES (32)..(33): Xaa is C or S

SEQ ID NO: 67149 - protein, 25 aa, Artificial Sequence
  Cyclic GFR-binding peptide
PIKGYIVNNSSDFYLVNIPSLKTPA

SEQ ID NO: 67150 - protein, 27 aa, Artificial Sequence
  Cyclic GFR-binding peptide
  MOD_RES (1)..(1): Xaa is C or S
XEEVIMPIKGYLLVRGNDFYLMNIPST

SEQ ID NO: 67151 - protein, 23 aa, Artificial Sequence
  Cyclic GFR-binding peptide
NPIKGYIVNSSDDFYLVNIPSLK

SEQ ID NO: 67152 - protein, 32 aa, Artificial Sequence
  Cyclic GFR-binding peptide
  MOD_RES (27)..(28): Xaa is C or S
DPIKGYVVKENEDFYLMNIPSLETPVXXAKPI

SEQ ID NO: 67153 - protein, 29 aa, Artificial Sequence
  Cyclic GFR-binding peptide
VVMEPIKGYVVKDYEDFYLMNIPSLETPV

SEQ ID NO: 67154 - protein, 37 aa, Artificial Sequence; identical to SEQ ID NO: 20870
  Cyclic GFR-binding peptide
  MOD_RES (31)..(32): Xaa is C or S

SEQ ID NO: 67155 - protein, 22 aa, Artificial Sequence
  Cyclic GFR-binding peptide
IMPIKGYLLVRGNDFYLMNIPS

SEQ ID NO: 67156 - protein, 20 aa, Artificial Sequence
  Cyclic GFR-binding peptide
PIKGYLLVRGNDFYLMNIPS

SEQ ID NO: 67157 - protein, 35 aa, Artificial Sequence
  Cyclic GFR-binding peptide
  MOD_RES (32)..(33): Xaa is C or S
AVSMGEPIKGYTPVGMDDFYLVNIPSLKTPVXXAK

SEQ ID NO: 67158 - protein, 36 aa, Artificial Sequence; identical to SEQ ID NO: 20871
  Cyclic GFR-binding peptide
  MOD_RES (1)..(33)..(34): Xaa is C or S

SEQ ID NO: 67159 - protein, 26 aa, Artificial Sequence
  Cyclic GFR-binding peptide
MDPIKGYVVNNAADFYLINIPSLRAP

SEQ ID NO: 67160 - protein, 37 aa, Artificial Sequence; identical to SEQ ID NO: 20882
  Cyclic GFR-binding peptide
  MOD_RES (1)..(33)..(34): Xaa is C or S

SEQ ID NO: 67161 - protein, 27 aa, Artificial Sequence
  Cyclic GFR-binding peptide
VVMDPIKGYVVNNAADFYLINIPSLRA

SEQ ID NO: 67162 - protein, 31 aa, Artificial Sequence
  Cyclic GFR-binding peptide
  MOD_RES (26)..(27): Xaa is C or S
PIKGYIVNNSSDFYLVNIPSLKTPAXXAKPV

SEQ ID NO: 67163 - protein, 27 aa, Artificial Sequence
  Cyclic GFR-binding peptide
VVMNPIKGYIVNNSSDFYLVNIPSLKT

SEQ ID NO: 67164 - protein, 26 aa, Artificial Sequence
  Cyclic GFR-binding peptide
  MOD_RES (26)..(26): Xaa is C or S
PIKGYLLVRGNDFYLMNIPSTKVPAX

SEQ ID NO: 67165 - protein, 29 aa, Artificial Sequence
  Cyclic GFR-binding peptide
  MOD_RES (2)..(2): Xaa is C or S
GXSRVVMNPIKGYIVNSSDDFYLVNIPSL

SEQ ID NO: 67166 - protein, 32 aa, Artificial Sequence
  Cyclic GFR-binding peptide
  MOD_RES (1)..(3): Xaa is C or S
XGXEAVSMGEPIKGYTPVGMDDFYLVNIPSLK

SEQ ID NO: 67167 - protein, 38 aa, Artificial Sequence; identical to SEQ ID NO: 20888
  Cyclic GFR-binding peptide
  MOD_RES (2)..(4)..(36)..(37): Xaa is C or S

SEQ ID NO: 67168 - protein, 35 aa, Artificial Sequence
  Cyclic GFR-binding peptide
  MOD_RES (30)..(31): Xaa is C or S
VVMDPIKGYVVNNAADFYLINIPSLRAPVXXSAPA

SEQ ID NO: 67169 - protein, 32 aa, Artificial Sequence; identical to SEQ ID NO: 20893
  Cyclic GFR-binding peptide
  MOD_RES (32)..(32): Xaa is C or S

SEQ ID NO: 67170 - protein, 27 aa, Artificial Sequence
  Cyclic GFR-binding peptide
  MOD_RES (26)..(27): Xaa is C or S
PIKGYVVNNASDFYLINIPSLRTPVXX

SEQ ID NO: 67171 - protein, 29 aa, Artificial Sequence
  Cyclic GFR-binding peptide
  MOD_RES (2)..(2): Xaa is C or S
GXEEVIMPIKGYLLVRGNDFYLMNIPSTK

SEQ ID NO: 67172 - protein, 32 aa, Artificial Sequence
  Cyclic GFR-binding peptide
  MOD_RES (1)..(3): Xaa is C or S
XGXGEVVMDPIKGYVVKENEDFYLMNIPSLET

SEQ ID NO: 67173 - protein, 28 aa, Artificial Sequence
  Cyclic GFR-binding peptide
EVVMEPIKGYVVKDYEDFYLMNIPSLET

SEQ ID NO: 67174 - protein, 32 aa, Artificial Sequence; identical to SEQ ID NO: 20897
  Cyclic GFR-binding peptide
  MOD_RES (31)..(31): Xaa is C or S

SEQ ID NO: 67175 - protein, 31 aa, Artificial Sequence
  Cyclic GFR-binding peptide
  MOD_RES (29)..(30): Xaa is C or S
VMDPIKGYVVNNASDFYLINIPSLRTPVXXT

SEQ ID NO: 67176 - protein, 37 aa, Artificial Sequence; identical to SEQ ID NO: 20899
  Cyclic GFR-binding peptide
  MOD_RES (2)..(4)..(36)..(37): Xaa is C or S

SEQ ID NO: 67177 - protein, 30 aa, Artificial Sequence
  Cyclic GFR-binding peptide
  MOD_RES (2)..(4): Xaa is C or S
HXGXSRVVMNPIKGYIVNSSDDFYLVNIPS

SEQ ID NO: 67178 - protein, 37 aa, Artificial Sequence; identical to SEQ ID NO: 20900
  Cyclic GFR-binding peptide
  MOD_RES (1)..(3)..(35)..(36): Xaa is C or S

SEQ ID NO: 67179 - protein, 35 aa, Artificial Sequence; identical to SEQ ID NO: 20904
  Cyclic GFR-binding peptide
  MOD_RES (2)..(34): Xaa is C or S

SEQ ID NO: 67180 - protein, 24 aa, Artificial Sequence
  Cyclic GFR-binding peptide
VIMPIKGYLLVRGNDFYLMNIPST

SEQ ID NO: 67181 - protein, 26 aa, Artificial Sequence
  Cyclic GFR-binding peptide
DPIKGYVVKENEDFYLMNIPSLETPV

SEQ ID NO: 67182 - protein, 23 aa, Artificial Sequence
  Cyclic GFR-binding peptide
PIKGYIVNSSDDFYLVNIPSLQT

SEQ ID NO: 67183 - protein, 30 aa, Artificial Sequence
  Cyclic GFR-binding peptide
  MOD_RES (27)..(28): Xaa is C or S
DPIKGYVVKENEDFYLMNIPSLETPVXXAK

SEQ ID NO: 67184 - protein, 25 aa, Artificial Sequence
  Cyclic GFR-binding peptide
MNPIKGYIVNSSDDFYLVNIPSLKT

SEQ ID NO: 67185 - protein, 31 aa, Artificial Sequence
  Cyclic GFR-binding peptide
  MOD_RES (29)..(30): Xaa is C or S
VMDPIKGYVVNNAADFYLINIPSLRAPVXXS

SEQ ID NO: 67186 - protein, 29 aa, Artificial Sequence
  Cyclic GFR-binding peptide
GEVVMDPIKGYVVKENEDFYLMNIPSLET

SEQ ID NO: 67187 - protein, 23 aa, Artificial Sequence
  Cyclic GFR-binding peptide
PIKGYVVNNASDFYLINIPSLRT

SEQ ID NO: 67188 - protein, 34 aa, Artificial Sequence; identical to SEQ ID NO: 20907
  Cyclic GFR-binding peptide
  MOD_RES (1)..(33)..(34): Xaa is C or S

SEQ ID NO: 67189 - protein, 30 aa, Artificial Sequence
  Cyclic GFR-binding peptide
  MOD_RES (2)..(4): Xaa is C or S
RXGXESVAMGPIKGYYTVVGKDFYLINIPS

SEQ ID NO: 67190 - protein, 40 aa, Artificial Sequence; identical to SEQ ID NO: 20908
  Cyclic GFR-binding peptide
  MOD_RES (2)..(34)..(35): Xaa is C or S

SEQ ID NO: 67191 - protein, 24 aa, Artificial Sequence
  Cyclic GFR-binding peptide
PIKGYLLVRGNDFYLMNIPSTKVP

SEQ ID NO: 67192 - protein, 32 aa, Artificial Sequence
  Cyclic GFR-binding peptide
  MOD_RES (29)..(30): Xaa is C or S
MGEPIKGYTPVGMDDFYLVNIPSLKTPVXXAK

SEQ ID NO: 67193 - protein, 30 aa, Artificial Sequence
  Cyclic GFR-binding peptide
  MOD_RES (27)..(28): Xaa is C or S
NPIKGYIVNSSDDFYLVNIPSLQTPAXXPK

SEQ ID NO: 67194 - protein, 32 aa, Artificial Sequence
  Cyclic GFR-binding peptide
  MOD_RES (2)..(2): Xaa is C or S
GXGEVVMDPIKGYVVKENEDFYLMNIPSLETP

SEQ ID NO: 67195 - protein, 35 aa, Artificial Sequence; identical to SEQ ID NO: 20920
  Cyclic GFR-binding peptide
  MOD_RES (31)..(32): Xaa is C or S

SEQ ID NO: 67196 - protein, 39 aa, Artificial Sequence; identical to SEQ ID NO: 20924
  Cyclic GFR-binding peptide
  MOD_RES (1)..(3)..(35)..(36): Xaa is C or S

SEQ ID NO: 67197 - protein, 30 aa, Artificial Sequence
  Cyclic GFR-binding peptide
VSMGEPIKGYTPVGMDDFYLVNIPSLKTPV

SEQ ID NO: 67198 - protein, 27 aa, Artificial Sequence
  Cyclic GFR-binding peptide
MEPIKGYVVKDYEDFYLMNIPSLETPV

SEQ ID NO: 67199 - protein, 32 aa, Artificial Sequence; identical to SEQ ID NO: 20930
  Cyclic GFR-binding peptide
  MOD_RES (32)..(32): Xaa is C or S

SEQ ID NO: 67200 - protein, 38 aa, Artificial Sequence; identical to SEQ ID NO: 20931
  Cyclic GFR-binding peptide
  MOD_RES (32)..(33): Xaa is C or S

SEQ ID NO: 67201 - protein, 36 aa, Artificial Sequence
  Cyclic GFR-binding peptide
  MOD_RES (30)..(31): Xaa is C or S
VVMNPIKGYIVNSSDDFYLVNIPSLQTPAXXPKPVT

SEQ ID NO: 67202 - protein, 40 aa, Artificial Sequence; identical to SEQ ID NO: 20933
  Cyclic GFR-binding peptide
  MOD_RES (1)..(3)..(35): Xaa is C or S

SEQ ID NO: 67203 - protein, 30 aa, Artificial Sequence
  Cyclic GFR-binding peptide
  MOD_RES (2)..(4): Xaa is C or S
RXGXSEVVMDPIKGYVVNNASDFYLINIPS

SEQ ID NO: 67204 - protein, 29 aa, Artificial Sequence
  Cyclic GFR-binding peptide
  MOD_RES (28)..(29): Xaa is C or S
MGPIKGYYTVVGKDFYLINIPSLKTPVXX

SEQ ID NO: 67205 - protein, 37 aa, Artificial Sequence; identical to SEQ ID NO: 20935
  Cyclic GFR-binding peptide
  MOD_RES (31)..(32): Xaa is C or S

SEQ ID NO: 67206 - protein, 26 aa, Artificial Sequence
  Cyclic GFR-binding peptide
VVMEPIKGYVVKDYEDFYLMNIPSLE

SEQ ID NO: 67207 - protein, 36 aa, Artificial Sequence; identical to SEQ ID NO: 20938
  Cyclic GFR-binding peptide
  MOD_RES (31)..(32): Xaa is C or S

SEQ ID NO: 67208 - protein, 26 aa, Artificial Sequence
  Cyclic GFR-binding peptide
VMDPIKGYVVNNAADFYLINIPSLRA

SEQ ID NO: 67209 - protein, 31 aa, Artificial Sequence
  Cyclic GFR-binding peptide
  MOD_RES (1)..(1): Xaa is C or S
XGEVVMDPIKGYVVKENEDFYLMNIPSLETP

SEQ ID NO: 67210 - protein, 42 aa, Artificial Sequence; identical to SEQ ID NO: 20944
  Cyclic GFR-binding peptide
  MOD_RES (2)..(4)..(36): Xaa is C or S

SEQ ID NO: 67211 - protein, 33 aa, Artificial Sequence; identical to SEQ ID NO: 20946
  Cyclic GFR-binding peptide
  MOD_RES (1)..(32)..(33): Xaa is C or S

SEQ ID NO: 67212 - protein, 36 aa, Artificial Sequence
  Cyclic GFR-binding peptide
  MOD_RES (30)..(31): Xaa is C or S
VVMNPIKGYIVNSSDDFYLVNIPSLKTPAXXPKPVY

SEQ ID NO: 67213 - protein, 24 aa, Artificial Sequence
  Cyclic GFR-binding peptide
MDPIKGYVVNNASDFYLINIPSLR

SEQ ID NO: 67214 - protein, 32 aa, Artificial Sequence; identical to SEQ ID NO: 20952
  Cyclic GFR-binding peptide
  MOD_RES (1)..(1): Xaa is C or S

SEQ ID NO: 67215 - protein, 33 aa, Artificial Sequence
  Cyclic GFR-binding peptide
  MOD_RES (30)..(31): Xaa is C or S
VAMGPIKGYYTVVGKDFYLINIPSLKTPVXXAK

SEQ ID NO: 67216 - protein, 32 aa, Artificial Sequence
  Cyclic GFR-binding peptide
  MOD_RES (1)..(3): Xaa is C or S
XGXGEVVMEPIKGYVVKDYEDFYLMNIPSLET

SEQ ID NO: 67217 - protein, 29 aa, Artificial Sequence
  Cyclic GFR-binding peptide
  MOD_RES (29)..(29): Xaa is C or S
VMNPIKGYIVNSSDDFYLVNIPSLQTPAX

SEQ ID NO: 67218 - protein, 39 aa, Artificial Sequence; identical to SEQ ID NO: 20954
  Cyclic GFR-binding peptide
  MOD_RES (2)..(4)..(35)..(36): Xaa is C or S

SEQ ID NO: 67219 - protein, 26 aa, Artificial Sequence
  Cyclic GFR-binding peptide
  MOD_RES (1)..(1): Xaa is C or S
XEEVIMPIKGYLLVRGNDFYLMNIPS

SEQ ID NO: 67220 - protein, 31 aa, Artificial Sequence
  Cyclic GFR-binding peptide
  MOD_RES (28)..(29): Xaa is C or S
MEPIKGYVVKDYEDFYLMNIPSLETPVXXAK

SEQ ID NO: 67221 - protein, 27 aa, Artificial Sequence
  Cyclic GFR-binding peptide
VVMDPIKGYVVKENEDFYLMNIPSLET

SEQ ID NO: 67222 - protein, 27 aa, Artificial Sequence
  Cyclic GFR-binding peptide
  MOD_RES (26)..(27): Xaa is C or S
PIKGYIVNSSDDFYLVNIPSLKTPAXX

SEQ ID NO: 67223 - protein, 35 aa, Artificial Sequence; identical to SEQ ID NO: 20964
  Cyclic GFR-binding peptide
  MOD_RES (1)..(33)..(34): Xaa is C or S

SEQ ID NO: 67224 - protein, 25 aa, Artificial Sequence
  Cyclic GFR-binding peptide
MDPIKGYVVKENEDFYLMNIPSLET

SEQ ID NO: 67225 - protein, 32 aa, Artificial Sequence
  Cyclic GFR-binding peptide
  MOD_RES (1)..(1): Xaa is C or S
XEAVSMGEPIKGYTPVGMDDFYLVNIPSLKTP

SEQ ID NO: 67226 - protein, 22 aa, Artificial Sequence
  Cyclic GFR-binding peptide
PIKGYIVNSSDDFYLVNIPSLK

SEQ ID NO: 67227 - protein, 30 aa, Artificial Sequence
  Cyclic GFR-binding peptide
  MOD_RES (29)..(30): Xaa is C or S
VMEPIKGYVVKDYEDFYLMNIPSLETPVXX

SEQ ID NO: 67228 - protein, 40 aa, Artificial Sequence; identical to SEQ ID NO: 20976
  Cyclic GFR-binding peptide
  MOD_RES (2)..(4)..(36)..(37): Xaa is C or S

SEQ ID NO: 67229 - protein, 37 aa, Artificial Sequence; identical to SEQ ID NO: 20977
  Cyclic GFR-binding peptide
  MOD_RES (1)..(33): Xaa is C or S

SEQ ID NO: 67230 - protein, 41 aa, Artificial Sequence; identical to SEQ ID NO: 20978
  Cyclic GFR-binding peptide
  MOD_RES (2)..(4)..(36)..(37): Xaa is C or S

SEQ ID NO: 67231 - protein, 30 aa, Artificial Sequence
  Cyclic GFR-binding peptide
  MOD_RES (1)..(1): Xaa is C or S
XAKVVMNPIKGYIVNNSSDFYLVNIPSLKT

SEQ ID NO: 67232 - protein, 26 aa, Artificial Sequence
  Cyclic GFR-binding peptide
EEVIMPIKGYLLVRGNDFYLMNIPST

SEQ ID NO: 67233 - protein, 22 aa, Artificial Sequence
  Cyclic GFR-binding peptide
PIKGYVVNNAADFYLINIPSLR

SEQ ID NO: 67234 - protein, 36 aa, Artificial Sequence; identical to SEQ ID NO: 20981
  Cyclic GFR-binding peptide
  MOD_RES (2)..(34)..(35): Xaa is C or S

SEQ ID NO: 67235 - protein, 24 aa, Artificial Sequence
  Cyclic GFR-binding peptide
PIKGYIVNNSSDFYLVNIPSLKTP

SEQ ID NO: 67236 - protein, 28 aa, Artificial Sequence
  Cyclic GFR-binding peptide
KVVMNPIKGYIVNNSSDFYLVNIPSLKT

SEQ ID NO: 67237 - protein, 29 aa, Artificial Sequence
  Cyclic GFR-binding peptide
  MOD_RES (1)..(3): Xaa is C or S
XGXGEVVMDPIKGYVVKENEDFYLMNIPS

SEQ ID NO: 67238 - protein, 31 aa, Artificial Sequence
  Cyclic GFR-binding peptide
  MOD_RES (27)..(28): Xaa is C or S
NPIKGYIVNNSSDFYLVNIPSLKTPAXXAKP

SEQ ID NO: 67239 - protein, 35 aa, Artificial Sequence; identical to SEQ ID NO: 20991
  Cyclic GFR-binding peptide
  MOD_RES (1)..(3): Xaa is C or S

SEQ ID NO: 67240 - protein, 33 aa, Artificial Sequence
  Cyclic GFR-binding peptide
  MOD_RES (28)..(29): Xaa is C or S
MDPIKGYVVKENEDFYLMNIPSLETPVXXAKPI

SEQ ID NO: 67241 - protein, 41 aa, Artificial Sequence; identical to SEQ ID NO: 20994
  Cyclic GFR-binding peptide
  MOD_RES (1)..(3)..(35)..(36): Xaa is C or S

SEQ ID NO: 67242 - protein, 27 aa, Artificial Sequence
  Cyclic GFR-binding peptide
MNPIKGYIVNSSDDFYLVNIPSLKTPA

SEQ ID NO: 67243 - protein, 26 aa, Artificial Sequence
  Cyclic GFR-binding peptide
GEPIKGYTPVGMDDFYLVNIPSLKTP

SEQ ID NO: 67244 - protein, 30 aa, Artificial Sequence
  Cyclic GFR-binding peptide
  MOD_RES (1)..(3): Xaa is C or S
XGXGEVVMDPIKGYVVKENEDFYLMNIPSL

SEQ ID NO: 67245 - protein, 32 aa, Artificial Sequence
  Cyclic GFR-binding peptide
  MOD_RES (26)..(27): Xaa is C or S
PIKGYVVKDYEDFYLMNIPSLETPVXXAKPIS

SEQ ID NO: 67246 - protein, 41 aa, Artificial Sequence; identical to SEQ ID NO: 21006
  Cyclic GFR-binding peptide
  MOD_RES (2)..(4)..(36): Xaa is C or S

SEQ ID NO: 67247 - protein, 24 aa, Artificial Sequence
  Cyclic GFR-binding peptide
PIKGYVVNNASDFYLINIPSLRTP

SEQ ID NO: 67248 - protein, 22 aa, Artificial Sequence
  Cyclic GFR-binding peptide
MGPIKGYYTVVGKDFYLINIPS

SEQ ID NO: 67249 - protein, 33 aa, Artificial Sequence; identical to SEQ ID NO: 21009
  Cyclic GFR-binding peptide
  MOD_RES (32)..(33): Xaa is C or S

SEQ ID NO: 67250 - protein, 27 aa, Artificial Sequence
  Cyclic GFR-binding peptide
EVIMPIKGYLLVRGNDFYLMNIPSTKV

SEQ ID NO: 67251 - protein, 32 aa, Artificial Sequence; identical to SEQ ID NO: 21012
  Cyclic GFR-binding peptide
  MOD_RES (1)..(1): Xaa is C or S

SEQ ID NO: 67252 - protein, 29 aa, Artificial Sequence
  Cyclic GFR-binding peptide
GEVVMEPIKGYVVKDYEDFYLMNIPSLET

SEQ ID NO: 67253 - protein, 31 aa, Artificial Sequence; identical to SEQ ID NO: 21018
  Cyclic GFR-binding peptide
  MOD_RES (31)..(31): Xaa is C or S

SEQ ID NO: 67254 - protein, 24 aa, Artificial Sequence
  Cyclic GFR-binding peptide
GPIKGYYTVVGKDFYLINIPSLKT

SEQ ID NO: 67255 - protein, 34 aa, Artificial Sequence; identical to SEQ ID NO: 21021
  Cyclic GFR-binding peptide
  MOD_RES (1)..(3): Xaa is C or S

SEQ ID NO: 67256 - protein, 34 aa, Artificial Sequence; identical to SEQ ID NO: 21022
  Cyclic GFR-binding peptide
  MOD_RES (32)..(33): Xaa is C or S

SEQ ID NO: 67257 - protein, 40 aa, Artificial Sequence; identical to SEQ ID NO: 21027
  Cyclic GFR-binding peptide
  MOD_RES (2)..(34)..(35): Xaa is C or S

SEQ ID NO: 67258 - protein, 38 aa, Artificial Sequence; identical to SEQ ID NO: 21029
  Cyclic GFR-binding peptide
  MOD_RES (32)..(33): Xaa is C or S

SEQ ID NO: 67259 - protein, 23 aa, Artificial Sequence
  Cyclic GFR-binding peptide
VMDPIKGYVVNNASDFYLINIPS

SEQ ID NO: 67260 - protein, 29 aa, Artificial Sequence
  Cyclic GFR-binding peptide
EVVMDPIKGYVVKENEDFYLMNIPSLETP

SEQ ID NO: 67261 - protein, 29 aa, Artificial Sequence
  Cyclic GFR-binding peptide
  MOD_RES (26)..(27): Xaa is C or S
PIKGYVVKENEDFYLMNIPSLETPVXXAK

SEQ ID NO: 67262 - protein, 30 aa, Artificial Sequence
  Cyclic GFR-binding peptide
  MOD_RES (1)..(1): Xaa is C or S
XSRVVMNPIKGYIVNSSDDFYLVNIPSLKT

SEQ ID NO: 67263 - protein, 26 aa, Artificial Sequence
  Cyclic GFR-binding peptide
NPIKGYIVNSSDDFYLVNIPSLKTPA

SEQ ID NO: 67264 - protein, 34 aa, Artificial Sequence; identical to SEQ ID NO: 21045
  Cyclic GFR-binding peptide
  MOD_RES (1)..(3): Xaa is C or S

SEQ ID NO: 67265 - protein, 33 aa, Artificial Sequence; identical to SEQ ID NO: 21046
  Cyclic GFR-binding peptide
  MOD_RES (2)..(2): Xaa is C or S

SEQ ID NO: 67266 - protein, 32 aa, Artificial Sequence
  Cyclic GFR-binding peptide
  MOD_RES (27)..(28): Xaa is C or S
EPIKGYTPVGMDDFYLVNIPSLKTPVXXAKGV

SEQ ID NO: 67267 - protein, 34 aa, Artificial Sequence; identical to SEQ ID NO: 21047
  Cyclic GFR-binding peptide
  MOD_RES (31)..(32): Xaa is C or S

SEQ ID NO: 67268 - protein, 30 aa, Artificial Sequence
  Cyclic GFR-binding peptide
  MOD_RES (26)..(27): Xaa is C or S
PIKGYIVNSSDDFYLVNIPSLQTPAXXPKP

SEQ ID NO: 67269 - protein, 32 aa, Artificial Sequence
  Cyclic GFR-binding peptide
  MOD_RES (2)..(4): Xaa is C or S
RXGXESVAMGPIKGYYTVVGKDFYLINIPSLK

SEQ ID NO: 67270 - protein, 41 aa, Artificial Sequence; identical to SEQ ID NO: 21051
  Cyclic GFR-binding peptide
  MOD_RES (1)..(3)..(35)..(36): Xaa is C or S

SEQ ID NO: 67271 - protein, 41 aa, Artificial Sequence; identical to SEQ ID NO: 21052
  Cyclic GFR-binding peptide
  MOD_RES (1)..(3)..(35)..(36): Xaa is C or S

SEQ ID NO: 67272 - protein, 32 aa, Artificial Sequence
  Cyclic GFR-binding peptide
  MOD_RES (2)..(2): Xaa is C or S
GXEAVSMGEPIKGYTPVGMDDFYLVNIPSLKT

SEQ ID NO: 67273 - protein, 29 aa, Artificial Sequence
  Cyclic GFR-binding peptide
  MOD_RES (1)..(3): Xaa is C or S
XGXSRVVMNPIKGYIVNSSDDFYLVNIPS

SEQ ID NO: 67274 - protein, 36 aa, Artificial Sequence
  Cyclic GFR-binding peptide
  MOD_RES (30)..(31): Xaa is C or S
VVMDPIKGYVVKENEDFYLMNIPSLETPVXXAKPIK

SEQ ID NO: 67275 - protein, 28 aa, Artificial Sequence
  Cyclic GFR-binding peptide
  MOD_RES (27)..(28): Xaa is C or S
EPIKGYVVKDYEDFYLMNIPSLETPVXX

SEQ ID NO: 67276 - protein, 20 aa, Artificial Sequence
  Cyclic GFR-binding peptide
PIKGYVVKENEDFYLMNIPS

SEQ ID NO: 67277 - protein, 37 aa, Artificial Sequence; identical to SEQ ID NO: 21061
  Cyclic GFR-binding peptide
  MOD_RES (2)..(4)..(36)..(37): Xaa is C or S

SEQ ID NO: 67278 - protein, 20 aa, Artificial Sequence
  Cyclic GFR-binding peptide
PIKGYYTVVGKDFYLINIPS

SEQ ID NO: 67279 - protein, 33 aa, Artificial Sequence
  Cyclic GFR-binding peptide
  MOD_RES (27)..(28): Xaa is C or S
NPIKGYIVNSSDDFYLVNIPSLKTPAXXPKPVY

SEQ ID NO: 67280 - protein, 36 aa, Artificial Sequence; identical to SEQ ID NO: 21066
  Cyclic GFR-binding peptide
  MOD_RES (1)..(3)..(36): Xaa is C or S

SEQ ID NO: 67281 - protein, 31 aa, Artificial Sequence; identical to SEQ ID NO: 21067
  Cyclic GFR-binding peptide
  MOD_RES (31)..(31): Xaa is C or S

SEQ ID NO: 67282 - protein, 30 aa, Artificial Sequence; identical to SEQ ID NO: 1974
  Cyclic GFR-binding peptide

SEQ ID NO: 67283 - protein, 32 aa, Artificial Sequence
  Cyclic GFR-binding peptide
  MOD_RES (26)..(27): Xaa is C or S
PIKGYVVNNASDFYLINIPSLRTPVXXTPPTS

SEQ ID NO: 67284 - protein, 35 aa, Artificial Sequence
  Cyclic GFR-binding peptide
  MOD_RES (29)..(30): Xaa is C or S
VMNPIKGYIVNSSDDFYLVNIPSLKTPAXXPKPVH

SEQ ID NO: 67285 - protein, 33 aa, Artificial Sequence; identical to SEQ ID NO: 21070
  Cyclic GFR-binding peptide
  MOD_RES (31)..(32): Xaa is C or S

SEQ ID NO: 67286 - protein, 36 aa, Artificial Sequence; identical to SEQ ID NO: 21071
  Cyclic GFR-binding peptide
  MOD_RES (2)..(4)..(36): Xaa is C or S

SEQ ID NO: 67287 - protein, 28 aa, Artificial Sequence
  Cyclic GFR-binding peptide
  MOD_RES (2)..(2): Xaa is C or S
GXEEVIMPIKGYLLVRGNDFYLMNIPST

SEQ ID NO: 67288 - protein, 36 aa, Artificial Sequence
  Cyclic GFR-binding peptide
  MOD_RES (30)..(30): Xaa is C or S
VVMNPIKGYIVNSSDDFYLVNIPSLKTPAXTPKTVH

SEQ ID NO: 67289 - protein, 30 aa, Artificial Sequence
  Cyclic GFR-binding peptide
SEVVMDPIKGYVVNNASDFYLINIPSLRTP

SEQ ID NO: 67290 - protein, 28 aa, Artificial Sequence
  Cyclic GFR-binding peptide
EAVSMGEPIKGYTPVGMDDFYLVNIPSL

SEQ ID NO: 67291 - protein, 24 aa, Artificial Sequence
  Cyclic GFR-binding peptide
VAMGPIKGYYTVVGKDFYLINIPS

SEQ ID NO: 67292 - protein, 25 aa, Artificial Sequence
  Cyclic GFR-binding peptide
MDPIKGYVVNNAADFYLINIPSLRA

SEQ ID NO: 67293 - protein, 25 aa, Artificial Sequence
  Cyclic GFR-binding peptide
VSMGEPIKGYTPVGMDDFYLVNIPS

SEQ ID NO: 67294 - protein, 21 aa, Artificial Sequence
  Cyclic GFR-binding peptide
PIKGYVVNNAADFYLINIPSL

SEQ ID NO: 67295 - protein, 29 aa, Artificial Sequence
  Cyclic GFR-binding peptide
EAVSMGEPIKGYTPVGMDDFYLVNIPSLK

SEQ ID NO: 67296 - protein, 30 aa, Artificial Sequence
  Cyclic GFR-binding peptide
  MOD_RES (30)..(30): Xaa is C or S
VVMDPIKGYVVNNASDFYLINIPSLRTPVX

SEQ ID NO: 67297 - protein, 33 aa, Artificial Sequence
  Cyclic GFR-binding peptide
  MOD_RES (27)..(28): Xaa is C or S
NPIKGYIVNSSDDFYLVNIPSLKTPAXXPKPVH

SEQ ID NO: 67298 - protein, 26 aa, Artificial Sequence
  Cyclic GFR-binding peptide
  MOD_RES (26)..(26): Xaa is C or S
PIKGYIVNSSDDFYLVNIPSLKTPAX

SEQ ID NO: 67299 - protein, 27 aa, Artificial Sequence
  Cyclic GFR-binding peptide
RVVMNPIKGYIVNSSDDFYLVNIPSLK

SEQ ID NO: 67300 - protein, 28 aa, Artificial Sequence
  Cyclic GFR-binding peptide
VVMNPIKGYIVNSSDDFYLVNIPSLKTP

SEQ ID NO: 67301 - protein, 28 aa, Artificial Sequence
  Cyclic GFR-binding peptide
  MOD_RES (2)..(2): Xaa is C or S
GXAKVVMNPIKGYIVNNSSDFYLVNIPS

SEQ ID NO: 67302 - protein, 24 aa, Artificial Sequence
  Cyclic GFR-binding peptide
VMNPIKGYIVNSSDDFYLVNIPSL

SEQ ID NO: 67303 - protein, 33 aa, Artificial Sequence; identical to SEQ ID NO: 21089
  Cyclic GFR-binding peptide
  MOD_RES (1)..(33): Xaa is C or S

SEQ ID NO: 67304 - protein, 28 aa, Artificial Sequence
  Cyclic GFR-binding peptide
AMGPIKGYYTVVGKDFYLINIPSLKTPV

SEQ ID NO: 67305 - protein, 31 aa, Artificial Sequence
  Cyclic GFR-binding peptide
  MOD_RES (2)..(4): Xaa is C or S
HXGXAKVVMNPIKGYIVNNSSDFYLVNIPSL

SEQ ID NO: 67306 - protein, 28 aa, Artificial Sequence
  Cyclic GFR-binding peptide
SEVVMDPIKGYVVNNASDFYLINIPSLR

SEQ ID NO: 67307 - protein, 22 aa, Artificial Sequence
  Cyclic GFR-binding peptide
PIKGYTPVGMDDFYLVNIPSLK

SEQ ID NO: 67308 - protein, 28 aa, Artificial Sequence
  Cyclic GFR-binding peptide
  MOD_RES (1)..(1): Xaa is C or S
XAEVVMDPIKGYVVNNAADFYLINIPSL

SEQ ID NO: 67309 - protein, 24 aa, Artificial Sequence
  Cyclic GFR-binding peptide
DPIKGYVVNNAADFYLINIPSLRA

SEQ ID NO: 67310 - protein, 23 aa, Artificial Sequence
  Cyclic GFR-binding peptide
GEPIKGYTPVGMDDFYLVNIPSL

SEQ ID NO: 67311 - protein, 34 aa, Artificial Sequence
  Cyclic GFR-binding peptide
  MOD_RES (1)..(3): Xaa is C or S
XGXESVAMGPIKGYYTVVGKDFYLINIPSLKTPV

SEQ ID NO: 67312 - protein, 30 aa, Artificial Sequence
  Cyclic GFR-binding peptide
  MOD_RES (26)..(27): Xaa is C or S
PIKGYLLVRGNDFYLMNIPSTKVPAXXTSP

SEQ ID NO: 67313 - protein, 34 aa, Artificial Sequence; identical to SEQ ID NO: 21107
  Cyclic GFR-binding peptide
  MOD_RES (1)..(3): Xaa is C or S

SEQ ID NO: 67314 - protein, 31 aa, Artificial Sequence; identical to SEQ ID NO: 21109
  Cyclic GFR-binding peptide
  MOD_RES (31)..(31): Xaa is C or S

SEQ ID NO: 67315 - protein, 25 aa, Artificial Sequence
  Cyclic GFR-binding peptide
NPIKGYIVNSSDDFYLVNIPSLQTP

SEQ ID NO: 67316 - protein, 21 aa, Artificial Sequence
  Cyclic GFR-binding peptide
DPIKGYVVKENEDFYLMNIPS

SEQ ID NO: 67317 - protein, 32 aa, Artificial Sequence
  Cyclic GFR-binding peptide
  MOD_RES (26)..(27): Xaa is C or S
PIKGYVVNNAADFYLINIPSLRAPVXXSAPAA

SEQ ID NO: 67318 - protein, 29 aa, Artificial Sequence
  Cyclic GFR-binding peptide
  MOD_RES (26)..(27): Xaa is C or S
PIKGYIVNSSDDFYLVNIPSLQTPAXXPK

SEQ ID NO: 67319 - protein, 30 aa, Artificial Sequence
  Cyclic GFR-binding peptide
  MOD_RES (2)..(2): Xaa is C or S
GXSEVVMDPIKGYVVNNASDFYLINIPSLR

SEQ ID NO: 67320 - protein, 36 aa, Artificial Sequence; identical to SEQ ID NO: 21116
  Cyclic GFR-binding peptide
  MOD_RES (31)..(32): Xaa is C or S

SEQ ID NO: 67321 - protein, 25 aa, Artificial Sequence
  Cyclic GFR-binding peptide
MGEPIKGYTPVGMDDFYLVNIPSLK

SEQ ID NO: 67322 - protein, 28 aa, Artificial Sequence
  Cyclic GFR-binding peptide
EVVMDPIKGYVVKENEDFYLMNIPSLET

SEQ ID NO: 67323 - protein, 25 aa, Artificial Sequence
  Cyclic GFR-binding peptide
GPIKGYYTVVGKDFYLINIPSLKTP

SEQ ID NO: 67324 - protein, 25 aa, Artificial Sequence
  Cyclic GFR-binding peptide
VMDPIKGYVVNNAADFYLINIPSLR

SEQ ID NO: 67325 - protein, 34 aa, Artificial Sequence; identical to SEQ ID NO: 21117
  Cyclic GFR-binding peptide
  MOD_RES (32)..(33): Xaa is C or S

SEQ ID NO: 67326 - protein, 23 aa, Artificial Sequence
  Cyclic GFR-binding peptide
VMNPIKGYIVNNSSDFYLVNIPS

SEQ ID NO: 67327 - protein, 40 aa, Artificial Sequence; identical to SEQ ID NO: 21121
  Cyclic GFR-binding peptide
  MOD_RES (2)..(4)..(36)..(37): Xaa is C or S

SEQ ID NO: 67328 - protein, 32 aa, Artificial Sequence
  Cyclic GFR-binding peptide
  MOD_RES (26)..(27): Xaa is C or S
PIKGYYTVVGKDFYLINIPSLKTPVXXAKSAK

SEQ ID NO: 67329 - protein, 36 aa, Artificial Sequence
  Cyclic GFR-binding peptide
  MOD_RES (31)..(32): Xaa is C or S
VSMGEPIKGYTPVGMDDFYLVNIPSLKTPVXXAKGV

SEQ ID NO: 67330 - protein, 20 aa, Artificial Sequence
  Cyclic GFR-binding peptide
PIKGYIVNSSDDFYLVNIPS

SEQ ID NO: 67331 - protein, 30 aa, Artificial Sequence
  Cyclic GFR-binding peptide
  MOD_RES (26)..(27): Xaa is C or S
PIKGYVVKENEDFYLMNIPSLETPVXXAKP

SEQ ID NO: 67332 - protein, 36 aa, Artificial Sequence; identical to SEQ ID NO: 21126
  Cyclic GFR-binding peptide
  MOD_RES (1)..(3)..(34)..(35): Xaa is C or S

SEQ ID NO: 67333 - protein, 33 aa, Artificial Sequence; identical to SEQ ID NO: 21128
  Cyclic GFR-binding peptide
  MOD_RES (31)..(32): Xaa is C or S

SEQ ID NO: 67334 - protein, 34 aa, Artificial Sequence
  Cyclic GFR-binding peptide
  MOD_RES (28)..(29): Xaa is C or S
MGPIKGYYTVVGKDFYLINIPSLKTPVXXAKSAK

SEQ ID NO: 67335 - protein, 26 aa, Artificial Sequence
  Cyclic GFR-binding peptide
VMDPIKGYVVNNASDFYLINIPSLRT

SEQ ID NO: 67336 - protein, 38 aa, Artificial Sequence; identical to SEQ ID NO: 21131
  Cyclic GFR-binding peptide
  MOD_RES (2)..(34): Xaa is C or S

SEQ ID NO: 67337 - protein, 31 aa, Artificial Sequence
  Cyclic GFR-binding peptide
  MOD_RES (26)..(27): Xaa is C or S
PIKGYIVNSSDDFYLVNIPSLQTPAXXPKPV

SEQ ID NO: 67338 - protein, 28 aa, Artificial Sequence
  Cyclic GFR-binding peptide
  MOD_RES (1)..(3): Xaa is C or S
XGXEEVIMPIKGYLLVRGNDFYLMNIPS

SEQ ID NO: 67339 - protein, 30 aa, Artificial Sequence; identical to SEQ ID NO: 21134
  Cyclic GFR-binding peptide

SEQ ID NO: 67340 - protein, 38 aa, Artificial Sequence; identical to SEQ ID NO: 21135
  Cyclic GFR-binding peptide
  MOD_RES (1)..(33): Xaa is C or S

SEQ ID NO: 67341 - protein, 31 aa, Artificial Sequence
  Cyclic GFR-binding peptide
  MOD_RES (2)..(2): Xaa is C or S
GXGEVVMEPIKGYVVKDYEDFYLMNIPSLET

SEQ ID NO: 67342 - protein, 31 aa, Artificial Sequence
  Cyclic GFR-binding peptide
  MOD_RES (2)..(2): Xaa is C or S
GXESVAMGPIKGYYTVVGKDFYLINIPSLKT

SEQ ID NO: 67343 - protein, 20 aa, Artificial Sequence
  Cyclic GFR-binding peptide
PIKGYVVNNASDFYLINIPS

SEQ ID NO: 67344 - protein, 34 aa, Artificial Sequence
  Cyclic GFR-binding peptide
  MOD_RES (29)..(30): Xaa is C or S
MGEPIKGYTPVGMDDFYLVNIPSLKTPVXXAKGV

SEQ ID NO: 67345 - protein, 34 aa, Artificial Sequence; identical to SEQ ID NO: 21142
  Cyclic GFR-binding peptide
  MOD_RES (1)..(33)..(34): Xaa is C or S

SEQ ID NO: 67346 - protein, 29 aa, Artificial Sequence
  Cyclic GFR-binding peptide
  MOD_RES (2)..(2): Xaa is C or S
GXESVAMGPIKGYYTVVGKDFYLINIPSL

SEQ ID NO: 67347 - protein, 40 aa, Artificial Sequence; identical to SEQ ID NO: 21143
  Cyclic GFR-binding peptide
  MOD_RES (1)..(34)..(35): Xaa is C or S

SEQ ID NO: 67348 - protein, 39 aa, Artificial Sequence; identical to SEQ ID NO: 21144
  Cyclic GFR-binding peptide
  MOD_RES (1)..(3)..(35)..(36): Xaa is C or S

SEQ ID NO: 67349 - protein, 34 aa, Artificial Sequence; identical to SEQ ID NO: 21145
  Cyclic GFR-binding peptide
  MOD_RES (2)..(33)..(34): Xaa is C or S

SEQ ID NO: 67350 - protein, 31 aa, Artificial Sequence
  Cyclic GFR-binding peptide
  MOD_RES (1)..(1): Xaa is C or S
XAKVVMNPIKGYIVNNSSDFYLVNIPSLKTP

SEQ ID NO: 67351 - protein, 35 aa, Artificial Sequence; identical to SEQ ID NO: 21148
  Cyclic GFR-binding peptide
  MOD_RES (32)..(33): Xaa is C or S

SEQ ID NO: 67352 - protein, 32 aa, Artificial Sequence; identical to SEQ ID NO: 21151
  Cyclic GFR-binding peptide
  MOD_RES (1)..(1): Xaa is C or S

SEQ ID NO: 67353 - protein, 29 aa, Artificial Sequence
  Cyclic GFR-binding peptide
  MOD_RES (28)..(29): Xaa is C or S
MNPIKGYIVNSSDDFYLVNIPSLKTPAXX

SEQ ID NO: 67354 - protein, 20 aa, Artificial Sequence
  Cyclic GFR-binding peptide
PIKGYTPVGMDDFYLVNIPS

SEQ ID NO: 67355 - protein, 33 aa, Artificial Sequence; identical to SEQ ID NO: 21157
  Cyclic GFR-binding peptide
  MOD_RES (1)..(33): Xaa is C or S

SEQ ID NO: 67356 - protein, 31 aa, Artificial Sequence
  Cyclic GFR-binding peptide
  MOD_RES (26)..(27): Xaa is C or S
PIKGYLLVRGNDFYLMNIPSTKVPAXXTSPV

SEQ ID NO: 67357 - protein, 37 aa, Artificial Sequence; identical to SEQ ID NO: 21159
  Cyclic GFR-binding peptide
  MOD_RES (2)..(34)..(35): Xaa is C or S

SEQ ID NO: 67358 - protein, 32 aa, Artificial Sequence
  Cyclic GFR-binding peptide
  MOD_RES (28)..(29): Xaa is C or S
MGPIKGYYTVVGKDFYLINIPSLKTPVXXAKS

SEQ ID NO: 67359 - protein, 35 aa, Artificial Sequence
  Cyclic GFR-binding peptide
  MOD_RES (29)..(30): Xaa is C or S
VMDPIKGYVVKENEDFYLMNIPSLETPVXXAKPIK

SEQ ID NO: 67360 - protein, 34 aa, Artificial Sequence
  Cyclic GFR-binding peptide
  MOD_RES (30)..(30): Xaa is C or S
VVMNPIKGYIVNSSDDFYLVNIPSLKTPAXTPKT

SEQ ID NO: 67361 - protein, 30 aa, Artificial Sequence
  Cyclic GFR-binding peptide
  MOD_RES (28)..(29): Xaa is C or S
MEPIKGYVVKDYEDFYLMNIPSLETPVXXA

SEQ ID NO: 67362 - protein, 33 aa, Artificial Sequence
  Cyclic GFR-binding peptide
  MOD_RES (30)..(31): Xaa is C or S
EVIMPIKGYLLVRGNDFYLMNIPSTKVPAXXTS

SEQ ID NO: 67363 - protein, 24 aa, Artificial Sequence
  Cyclic GFR-binding peptide
VMEPIKGYVVKDYEDFYLMNIPSL

SEQ ID NO: 67364 - protein, 31 aa, Artificial Sequence
  Cyclic GFR-binding peptide
  MOD_RES (26)..(27): Xaa is C or S
PIKGYTPVGMDDFYLVNIPSLKTPVXXAKGV

SEQ ID NO: 67365 - protein, 27 aa, Artificial Sequence
  Cyclic GFR-binding peptide
  MOD_RES (27)..(27): Xaa is C or S
DPIKGYVVNNASDFYLINIPSLRTPVX

SEQ ID NO: 67366 - protein, 25 aa, Artificial Sequence
  Cyclic GFR-binding peptide
VVMDPIKGYVVNNAADFYLINIPSL

SEQ ID NO: 67367 - protein, 24 aa, Artificial Sequence
  Cyclic GFR-binding peptide
VMDPIKGYVVNNASDFYLINIPSL

SEQ ID NO: 67368 - protein, 27 aa, Artificial Sequence
  Cyclic GFR-binding peptide
SEVVMDPIKGYVVNNASDFYLINIPSL

SEQ ID NO: 67369 - protein, 31 aa, Artificial Sequence
  Cyclic GFR-binding peptide
  MOD_RES (1)..(1): Xaa is C or S
XAEVVMDPIKGYVVNNAADFYLINIPSLRAP

SEQ ID NO: 67370 - protein, 37 aa, Artificial Sequence; identical to SEQ ID NO: 21176
  Cyclic GFR-binding peptide
  MOD_RES (1)..(3)..(35)..(36): Xaa is C or S

SEQ ID NO: 67371 - protein, 25 aa, Artificial Sequence
  Cyclic GFR-binding peptide
VVMNPIKGYIVNNSSDFYLVNIPSL

SEQ ID NO: 67372 - protein, 30 aa, Artificial Sequence
  Cyclic GFR-binding peptide
  MOD_RES (26)..(27): Xaa is C or S
PIKGYVVNNASDFYLINIPSLRTPVXXTPP

SEQ ID NO: 67373 - protein, 30 aa, Artificial Sequence
  Cyclic GFR-binding peptide
  MOD_RES (30)..(30): Xaa is C or S
VVMEPIKGYVVKDYEDFYLMNIPSLETPVX

SEQ ID NO: 67374 - protein, 25 aa, Artificial Sequence
  Cyclic GFR-binding peptide
EVVMDPIKGYVVKENEDFYLMNIPS

SEQ ID NO: 67375 - protein, 30 aa, Artificial Sequence; identical to SEQ ID NO: 1966
  Cyclic GFR-binding peptide

SEQ ID NO: 67376 - protein, 30 aa, Artificial Sequence
  Cyclic GFR-binding peptide
  MOD_RES (1)..(1): Xaa is C or S
XEEVIMPIKGYLLVRGNDFYLMNIPSTKVP

SEQ ID NO: 67377 - protein, 38 aa, Artificial Sequence; identical to SEQ ID NO: 21181
  Cyclic GFR-binding peptide
  MOD_RES (32)..(33): Xaa is C or S

SEQ ID NO: 67378 - protein, 34 aa, Artificial Sequence; identical to SEQ ID NO: 21182
  Cyclic GFR-binding peptide
  MOD_RES (1)..(33)..(34): Xaa is C or S

SEQ ID NO: 67379 - protein, 32 aa, Artificial Sequence
  Cyclic GFR-binding peptide
  MOD_RES (27)..(27): Xaa is C or S
NPIKGYIVNSSDDFYLVNIPSLKTPAXTPKTV

SEQ ID NO: 67380 - protein, 33 aa, Artificial Sequence
  Cyclic GFR-binding peptide
  MOD_RES (28)..(29): Xaa is C or S
MDPIKGYVVNNAADFYLINIPSLRAPVXXSAPA

SEQ ID NO: 67381 - protein, 34 aa, Artificial Sequence; identical to SEQ ID NO: 21186
  Cyclic GFR-binding peptide
  MOD_RES (32)..(32): Xaa is C or S

SEQ ID NO: 67382 - protein, 33 aa, Artificial Sequence
  Cyclic GFR-binding peptide
  MOD_RES (30)..(31): Xaa is C or S
VVMNPIKGYIVNSSDDFYLVNIPSLKTPAXXPK

SEQ ID NO: 67383 - protein, 29 aa, Artificial Sequence
  Cyclic GFR-binding peptide
KVVMNPIKGYIVNNSSDFYLVNIPSLKTP

SEQ ID NO: 67384 - protein, 30 aa, Artificial Sequence
  Cyclic GFR-binding peptide
  MOD_RES (29)..(30): Xaa is C or S
MGEPIKGYTPVGMDDFYLVNIPSLKTPVXX

SEQ ID NO: 67385 - protein, 33 aa, Artificial Sequence
  Cyclic GFR-binding peptide
  MOD_RES (29)..(30): Xaa is C or S
VIMPIKGYLLVRGNDFYLMNIPSTKVPAXXTSP

SEQ ID NO: 67386 - protein, 28 aa, Artificial Sequence
  Cyclic GFR-binding peptide
  MOD_RES (27)..(28): Xaa is C or S
NPIKGYIVNSSDDFYLVNIPSLQTPAXX

SEQ ID NO: 67387 - protein, 31 aa, Artificial Sequence
  Cyclic GFR-binding peptide
  MOD_RES (29)..(30): Xaa is C or S
MGEPIKGYTPVGMDDFYLVNIPSLKTPVXXA

SEQ ID NO: 67388 - protein, 36 aa, Artificial Sequence; identical to SEQ ID NO: 21192
  Cyclic GFR-binding peptide
  MOD_RES (32)..(33): Xaa is C or S

SEQ ID NO: 67389 - protein, 32 aa, Artificial Sequence
  Cyclic GFR-binding peptide
  MOD_RES (28)..(29): Xaa is C or S
MDPIKGYVVNNASDFYLINIPSLRTPVXXTPP

SEQ ID NO: 67390 - protein, 33 aa, Artificial Sequence; identical to SEQ ID NO: 21195
  Cyclic GFR-binding peptide
  MOD_RES (32)..(32): Xaa is C or S

SEQ ID NO: 67391 - protein, 32 aa, Artificial Sequence
  Cyclic GFR-binding peptide
  MOD_RES (29)..(30): Xaa is C or S
VIMPIKGYLLVRGNDFYLMNIPSTKVPAXXTS

SEQ ID NO: 67392 - protein, 32 aa, Artificial Sequence
  Cyclic GFR-binding peptide
  MOD_RES (2)..(4): Xaa is C or S
RXGXAEVVMDPIKGYVVNNAADFYLINIPSLR

SEQ ID NO: 67393 - protein, 23 aa, Artificial Sequence
  Cyclic GFR-binding peptide
MPIKGYLLVRGNDFYLMNIPSTK

SEQ ID NO: 67394 - protein, 35 aa, Artificial Sequence; identical to SEQ ID NO: 21209
  Cyclic GFR-binding peptide
  MOD_RES (1)..(33)..(34): Xaa is C or S

SEQ ID NO: 67395 - protein, 34 aa, Artificial Sequence; identical to SEQ ID NO: 21212
  Cyclic GFR-binding peptide
  MOD_RES (1)..(33)..(34): Xaa is C or S

SEQ ID NO: 67396 - protein, 27 aa, Artificial Sequence
  Cyclic GFR-binding peptide
MNPIKGYIVNSSDDFYLVNIPSLQTPA

SEQ ID NO: 67397 - protein, 39 aa, Artificial Sequence; identical to SEQ ID NO: 21217
  Cyclic GFR-binding peptide
  MOD_RES (2)..(34)..(35): Xaa is C or S

SEQ ID NO: 67398 - protein, 25 aa, Artificial Sequence
  Cyclic GFR-binding peptide
RVVMNPIKGYIVNSSDDFYLVNIPS

SEQ ID NO: 67399 - protein, 37 aa, Artificial Sequence; identical to SEQ ID NO: 21219
  Cyclic GFR-binding peptide
  MOD_RES (2)..(34)..(35): Xaa is C or S

SEQ ID NO: 67400 - protein, 25 aa, Artificial Sequence
  Cyclic GFR-binding peptide
VMDPIKGYVVKENEDFYLMNIPSLE

SEQ ID NO: 67401 - protein, 37 aa, Artificial Sequence; identical to SEQ ID NO: 21224
  Cyclic GFR-binding peptide
  MOD_RES (32)..(33): Xaa is C or S

SEQ ID NO: 67402 - protein, 29 aa, Artificial Sequence
  Cyclic GFR-binding peptide
  MOD_RES (27)..(28): Xaa is C or S
EPIKGYTPVGMDDFYLVNIPSLKTPVXXA

SEQ ID NO: 67403 - protein, 31 aa, Artificial Sequence
  Cyclic GFR-binding peptide
  MOD_RES (30)..(31): Xaa is C or S
EVIMPIKGYLLVRGNDFYLMNIPSTKVPAXX

SEQ ID NO: 67404 - protein, 35 aa, Artificial Sequence
  Cyclic GFR-binding peptide
  MOD_RES (30)..(31): Xaa is C or S
VVMDPIKGYVVNNASDFYLINIPSLRTPVXXTPPT

SEQ ID NO: 67405 - protein, 26 aa, Artificial Sequence
  Cyclic GFR-binding peptide
VVMDPIKGYVVKENEDFYLMNIPSLE

SEQ ID NO: 67406 - protein, 37 aa, Artificial Sequence; identical to SEQ ID NO: 21225
  Cyclic GFR-binding peptide
  MOD_RES (2)..(34)..(35): Xaa is C or S

SEQ ID NO: 67407 - protein, 28 aa, Artificial Sequence
  Cyclic GFR-binding peptide
  MOD_RES (1)..(1): Xaa is C or S
XARVVMNPIKGYIVNSSDDFYLVNIPSL

SEQ ID NO: 67408 - protein, 39 aa, Artificial Sequence; identical to SEQ ID NO: 21227
  Cyclic GFR-binding peptide
  MOD_RES (2)..(4)..(36)..(37): Xaa is C or S

SEQ ID NO: 67409 - protein, 39 aa, Artificial Sequence; identical to SEQ ID NO: 21228
  Cyclic GFR-binding peptide
  MOD_RES (1)..(33)..(34): Xaa is C or S

SEQ ID NO: 67410 - protein, 28 aa, Artificial Sequence
  Cyclic GFR-binding peptide
  MOD_RES (28)..(28): Xaa is C or S
MNPIKGYIVNSSDDFYLVNIPSLKTPAX

SEQ ID NO: 67411 - protein, 31 aa, Artificial Sequence
  Cyclic GFR-binding peptide
  MOD_RES (1)..(3): Xaa is C or S
XGXEAVSMGEPIKGYTPVGMDDFYLVNIPSL

SEQ ID NO: 67412 - protein, 28 aa, Artificial Sequence
  Cyclic GFR-binding peptide
  MOD_RES (1)..(1): Xaa is C or S
XAKVVMNPIKGYIVNNSSDFYLVNIPSL

SEQ ID NO: 67413 - protein, 26 aa, Artificial Sequence
  Cyclic GFR-binding peptide
MGEPIKGYTPVGMDDFYLVNIPSLKT

SEQ ID NO: 67414 - protein, 39 aa, Artificial Sequence; identical to SEQ ID NO: 21236
  Cyclic GFR-binding peptide
  MOD_RES (2)..(34)..(35): Xaa is C or S

SEQ ID NO: 67415 - protein, 24 aa, Artificial Sequence
  Cyclic GFR-binding peptide
VMDPIKGYVVNNAADFYLINIPSL

SEQ ID NO: 67416 - protein, 37 aa, Artificial Sequence; identical to SEQ ID NO: 21239
  Cyclic GFR-binding peptide
  MOD_RES (1)..(33)..(34): Xaa is C or S

SEQ ID NO: 67417 - protein, 38 aa, Artificial Sequence; identical to SEQ ID NO: 21241
  Cyclic GFR-binding peptide
  MOD_RES (2)..(35)..(36): Xaa is C or S

SEQ ID NO: 67418 - protein, 32 aa, Artificial Sequence
  Cyclic GFR-binding peptide
  MOD_RES (2)..(2): Xaa is C or S
GXSRVVMNPIKGYIVNSSDDFYLVNIPSLKTP

SEQ ID NO: 67419 - protein, 28 aa, Artificial Sequence
  Cyclic GFR-binding peptide
  MOD_RES (28)..(28): Xaa is C or S
MDPIKGYVVNNASDFYLINIPSLRTPVX

SEQ ID NO: 67420 - protein, 33 aa, Artificial Sequence; identical to SEQ ID NO: 21254
  Cyclic GFR-binding peptide
  MOD_RES (1)..(33): Xaa is C or S

SEQ ID NO: 67421 - protein, 35 aa, Artificial Sequence; identical to SEQ ID NO: 21255
  Cyclic GFR-binding peptide
  MOD_RES (32)..(32): Xaa is C or S

SEQ ID NO: 67422 - protein, 33 aa, Artificial Sequence
  Cyclic GFR-binding peptide
  MOD_RES (29)..(30): Xaa is C or S
MGEPIKGYTPVGMDDFYLVNIPSLKTPVXXAKG

SEQ ID NO: 67423 - protein, 28 aa, Artificial Sequence
  Cyclic GFR-binding peptide
RVVMNPIKGYIVNSSDDFYLVNIPSLKT

SEQ ID NO: 67424 - protein, 26 aa, Artificial Sequence
  Cyclic GFR-binding peptide
SEVVMDPIKGYVVNNASDFYLINIPS

SEQ ID NO: 67425 - protein, 34 aa, Artificial Sequence
  Cyclic GFR-binding peptide
  MOD_RES (2)..(4): Xaa is C or S
RXGXEAVSMGEPIKGYTPVGMDDFYLVNIPSLKT

SEQ ID NO: 67426 - protein, 30 aa, Artificial Sequence
  Cyclic GFR-binding peptide
  MOD_RES (28)..(29): Xaa is C or S
IMPIKGYLLVRGNDFYLMNIPSTKVPAXXT

SEQ ID NO: 67427 - protein, 33 aa, Artificial Sequence
  Cyclic GFR-binding peptide
  MOD_RES (1)..(3): Xaa is C or S
XGXAKVVMNPIKGYIVNNSSDFYLVNIPSLKTP

SEQ ID NO: 67428 - protein, 24 aa, Artificial Sequence
  Cyclic GFR-binding peptide
MNPIKGYIVNSSDDFYLVNIPSLK

SEQ ID NO: 67429 - protein, 33 aa, Artificial Sequence
  Cyclic GFR-binding peptide
  MOD_RES (32)..(33): Xaa is C or S
AVSMGEPIKGYTPVGMDDFYLVNIPSLKTPVXX

SEQ ID NO: 67430 - protein, 25 aa, Artificial Sequence
  Cyclic GFR-binding peptide
DPIKGYVVNNAADFYLINIPSLRAP

SEQ ID NO: 67431 - protein, 42 aa, Artificial Sequence; identical to SEQ ID NO: 21267
  Cyclic GFR-binding peptide
  MOD_RES (2)..(4)..(36)..(37): Xaa is C or S

SEQ ID NO: 67432 - protein, 35 aa, Artificial Sequence; identical to SEQ ID NO: 21269
  Cyclic GFR-binding peptide
  MOD_RES (1)..(3)..(35): Xaa is C or S

SEQ ID NO: 67433 - protein, 36 aa, Artificial Sequence; identical to SEQ ID NO: 21270
  Cyclic GFR-binding peptide
  MOD_RES (2)..(35)..(36): Xaa is C or S

SEQ ID NO: 67434 - protein, 26 aa, Artificial Sequence
  Cyclic GFR-binding peptide
VMEPIKGYVVKDYEDFYLMNIPSLET

SEQ ID NO: 67435 - protein, 29 aa, Artificial Sequence
  Cyclic GFR-binding peptide
  MOD_RES (1)..(3): Xaa is C or S
XGXEEVIMPIKGYLLVRGNDFYLMNIPST

SEQ ID NO: 67436 - protein, 32 aa, Artificial Sequence; identical to SEQ ID NO: 21279
  Cyclic GFR-binding peptide
  MOD_RES (1)..(1): Xaa is C or S

SEQ ID NO: 67437 - protein, 33 aa, Artificial Sequence; identical to SEQ ID NO: 21280
  Cyclic GFR-binding peptide
  MOD_RES (2)..(2): Xaa is C or S

SEQ ID NO: 67438 - protein, 21 aa, Artificial Sequence
  Cyclic GFR-binding peptide
PIKGYIVNNSSDFYLVNIPSL

SEQ ID NO: 67439 - protein, 31 aa, Artificial Sequence
  Cyclic GFR-binding peptide
  MOD_RES (26)..(27): Xaa is C or S
PIKGYVVNNAADFYLINIPSLRAPVXXSAPA

SEQ ID NO: 67440 - protein, 30 aa, Artificial Sequence
  Cyclic GFR-binding peptide
  MOD_RES (29)..(30): Xaa is C or S
VMDPIKGYVVNNASDFYLINIPSLRTPVXX

SEQ ID NO: 67441 - protein, 24 aa, Artificial Sequence
  Cyclic GFR-binding peptide
MDPIKGYVVNNAADFYLINIPSLR

SEQ ID NO: 67442 - protein, 31 aa, Artificial Sequence
  Cyclic GFR-binding peptide
  MOD_RES (30)..(31): Xaa is C or S
VVMDPIKGYVVNNASDFYLINIPSLRTPVXX

SEQ ID NO: 67443 - protein, 33 aa, Artificial Sequence; identical to SEQ ID NO: 21291
  Cyclic GFR-binding peptide
  MOD_RES (2)..(2): Xaa is C or S

SEQ ID NO: 67444 - protein, 32 aa, Artificial Sequence
  Cyclic GFR-binding peptide
  MOD_RES (28)..(29): Xaa is C or S
MDPIKGYVVKENEDFYLMNIPSLETPVXXAKP

SEQ ID NO: 67445 - protein, 27 aa, Artificial Sequence
  Cyclic GFR-binding peptide
AKVVMNPIKGYIVNNSSDFYLVNIPSL

SEQ ID NO: 67446 - protein, 42 aa, Artificial Sequence; identical to SEQ ID NO: 21293
  Cyclic GFR-binding peptide
  MOD_RES (2)..(4)..(36)..(37): Xaa is C or S

SEQ ID NO: 67447 - protein, 35 aa, Artificial Sequence; identical to SEQ ID NO: 21296
  Cyclic GFR-binding peptide
  MOD_RES (32)..(33): Xaa is C or S

SEQ ID NO: 67448 - protein, 38 aa, Artificial Sequence; identical to SEQ ID NO: 21297
  Cyclic GFR-binding peptide
  MOD_RES (1)..(3)..(35): Xaa is C or S

SEQ ID NO: 67449 - protein, 32 aa, Artificial Sequence
  Cyclic GFR-binding peptide
  MOD_RES (1)..(3): Xaa is C or S
XGXSRVVMNPIKGYIVNSSDDFYLVNIPSLKT

SEQ ID NO: 67450 - protein, 38 aa, Artificial Sequence; identical to SEQ ID NO: 21299
  Cyclic GFR-binding peptide
  MOD_RES (32)..(33): Xaa is C or S

SEQ ID NO: 67451 - protein, 33 aa, Artificial Sequence
  Cyclic GFR-binding peptide
  MOD_RES (28)..(29): Xaa is C or S
MNPIKGYIVNNSSDFYLVNIPSLKTPAXXAKPV

SEQ ID NO: 67452 - protein, 20 aa, Artificial Sequence
  Cyclic GFR-binding peptide
PIKGYIVNNSSDFYLVNIPS

SEQ ID NO: 67453 - protein, 31 aa, Artificial Sequence; identical to SEQ ID NO: 21302
  Cyclic GFR-binding peptide
  MOD_RES (31)..(31): Xaa is C or S

SEQ ID NO: 67454 - protein, 38 aa, Artificial Sequence; identical to SEQ ID NO: 21305
  Cyclic GFR-binding peptide
  MOD_RES (1)..(33)..(34): Xaa is C or S

SEQ ID NO: 67455 - protein, 37 aa, Artificial Sequence; identical to SEQ ID NO: 21309
  Cyclic GFR-binding peptide
  MOD_RES (2)..(34)..(35): Xaa is C or S

SEQ ID NO: 67456 - protein, 31 aa, Artificial Sequence
  Cyclic GFR-binding peptide
  MOD_RES (1)..(3): Xaa is C or S
XGXAEVVMDPIKGYVVNNAADFYLINIPSLR

SEQ ID NO: 67457 - protein, 33 aa, Artificial Sequence
  Cyclic GFR-binding peptide
  MOD_RES (2)..(4): Xaa is C or S
RXGXGEVVMEPIKGYVVKDYEDFYLMNIPSLET

SEQ ID NO: 67458 - protein, 34 aa, Artificial Sequence
  Cyclic GFR-binding peptide
  MOD_RES (2)..(4): Xaa is C or S
HXGXSRVVMNPIKGYIVNSSDDFYLVNIPSLKTP

SEQ ID NO: 67459 - protein, 28 aa, Artificial Sequence
  Cyclic GFR-binding peptide
VMNPIKGYIVNNSSDFYLVNIPSLKTPA

SEQ ID NO: 67460 - protein, 31 aa, Artificial Sequence; identical to SEQ ID NO: 21312
  Cyclic GFR-binding peptide
  MOD_RES (31)..(31): Xaa is C or S

SEQ ID NO: 67461 - protein, 35 aa, Artificial Sequence; identical to SEQ ID NO: 21316
  Cyclic GFR-binding peptide
  MOD_RES (1)..(3)..(35): Xaa is C or S

SEQ ID NO: 67462 - protein, 29 aa, Artificial Sequence
  Cyclic GFR-binding peptide
  MOD_RES (28)..(29): Xaa is C or S
MDPIKGYVVNNAADFYLINIPSLRAPVXX

SEQ ID NO: 67463 - protein, 30 aa, Artificial Sequence
  Cyclic GFR-binding peptide
  MOD_RES (26)..(27): Xaa is C or S
PIKGYVVNNAADFYLINIPSLRAPVXXSAP

SEQ ID NO: 67464 - protein, 36 aa, Artificial Sequence; identical to SEQ ID NO: 21323
  Cyclic GFR-binding peptide
  MOD_RES (1)..(33)..(34): Xaa is C or S

SEQ ID NO: 67465 - protein, 32 aa, Artificial Sequence
  Cyclic GFR-binding peptide
  MOD_RES (28)..(29): Xaa is C or S
MNPIKGYIVNSSDDFYLVNIPSLQTPAXXPKP

SEQ ID NO: 67466 - protein, 32 aa, Artificial Sequence
  Cyclic GFR-binding peptide
  MOD_RES (2)..(4): Xaa is C or S
RXGXSEVVMDPIKGYVVNNASDFYLINIPSLR

SEQ ID NO: 67467 - protein, 34 aa, Artificial Sequence
  Cyclic GFR-binding peptide
  MOD_RES (30)..(31): Xaa is C or S
VVMNPIKGYIVNSSDDFYLVNIPSLQTPAXXPKP

SEQ ID NO: 67468 - protein, 29 aa, Artificial Sequence
  Cyclic GFR-binding peptide
  MOD_RES (1)..(1): Xaa is C or S
XSRVVMNPIKGYIVNSSDDFYLVNIPSLK

SEQ ID NO: 67469 - protein, 31 aa, Artificial Sequence
  Cyclic GFR-binding peptide
  MOD_RES (2)..(4): Xaa is C or S
RXGXGEVVMEPIKGYVVKDYEDFYLMNIPSL

SEQ ID NO: 67470 - protein, 28 aa, Artificial Sequence
  Cyclic GFR-binding peptide
  MOD_RES (26)..(27): Xaa is C or S
PIKGYVVKENEDFYLMNIPSLETPVXXA

SEQ ID NO: 67471 - protein, 36 aa, Artificial Sequence; identical to SEQ ID NO: 21325
  Cyclic GFR-binding peptide
  MOD_RES (32)..(33): Xaa is C or S

SEQ ID NO: 67472 - protein, 29 aa, Artificial Sequence
  Cyclic GFR-binding peptide
  MOD_RES (27)..(28): Xaa is C or S
NPIKGYIVNSSDDFYLVNIPSLQTPAXXP

SEQ ID NO: 67473 - protein, 29 aa, Artificial Sequence
  Cyclic GFR-binding peptide
  MOD_RES (1)..(1): Xaa is C or S
XAEVVMDPIKGYVVNNAADFYLINIPSLR

SEQ ID NO: 67474 - protein, 37 aa, Artificial Sequence; identical to SEQ ID NO: 21329
  Cyclic GFR-binding peptide
  MOD_RES (31)..(31): Xaa is C or S

SEQ ID NO: 67475 - protein, 30 aa, Artificial Sequence
  Cyclic GFR-binding peptide
  MOD_RES (29)..(30): Xaa is C or S
VMNPIKGYIVNSSDDFYLVNIPSLKTPAXX

SEQ ID NO: 67476 - protein, 23 aa, Artificial Sequence
  Cyclic GFR-binding peptide
NPIKGYIVNSSDDFYLVNIPSLQ

SEQ ID NO: 67477 - protein, 29 aa, Artificial Sequence
  Cyclic GFR-binding peptide
VVMNPIKGYIVNSSDDFYLVNIPSLQTPA

SEQ ID NO: 67478 - protein, 35 aa, Artificial Sequence; identical to SEQ ID NO: 21340
  Cyclic GFR-binding peptide
  MOD_RES (2)..(34)..(35): Xaa is C or S

SEQ ID NO: 67479 - protein, 31 aa, Artificial Sequence
  Cyclic GFR-binding peptide
  MOD_RES (1)..(1): Xaa is C or S
XSEVVMDPIKGYVVNNASDFYLINIPSLRTP

SEQ ID NO: 67480 - protein, 21 aa, Artificial Sequence
  Cyclic GFR-binding peptide
PIKGYYTVVGKDFYLINIPSL

SEQ ID NO: 67481 - protein, 32 aa, Artificial Sequence
  Cyclic GFR-binding peptide
  MOD_RES (28)..(28): Xaa is C or S
MNPIKGYIVNSSDDFYLVNIPSLKTPAXTPKT

SEQ ID NO: 67482 - protein, 29 aa, Artificial Sequence
  Cyclic GFR-binding peptide
  MOD_RES (26)..(27): Xaa is C or S
PIKGYIVNNSSDFYLVNIPSLKTPAXXAK

SEQ ID NO: 67483 - protein, 29 aa, Artificial Sequence
  Cyclic GFR-binding peptide
VVMDPIKGYVVKENEDFYLMNIPSLETPV

SEQ ID NO: 67484 - protein, 29 aa, Artificial Sequence
  Cyclic GFR-binding peptide
AKVVMNPIKGYIVNNSSDFYLVNIPSLKT

SEQ ID NO: 67485 - protein, 31 aa, Artificial Sequence
  Cyclic GFR-binding peptide
  MOD_RES (28)..(29): Xaa is C or S
IMPIKGYLLVRGNDFYLMNIPSTKVPAXXTS

SEQ ID NO: 67486 - protein, 34 aa, Artificial Sequence; identical to SEQ ID NO: 21343
  Cyclic GFR-binding peptide
  MOD_RES (1)..(34): Xaa is C or S

SEQ ID NO: 67487 - protein, 24 aa, Artificial Sequence
  Cyclic GFR-binding peptide
GEPIKGYTPVGMDDFYLVNIPSLK

SEQ ID NO: 67488 - protein, 39 aa, Artificial Sequence; identical to SEQ ID NO: 21344
  Cyclic GFR-binding peptide
  MOD_RES (1)..(33)..(34): Xaa is C or S

SEQ ID NO: 67489 - protein, 32 aa, Artificial Sequence
  Cyclic GFR-binding peptide
  MOD_RES (26)..(27): Xaa is C or S
PIKGYTPVGMDDFYLVNIPSLKTPVXXAKGVK

SEQ ID NO: 67490 - protein, 23 aa, Artificial Sequence
  Cyclic GFR-binding peptide
PIKGYVVNNAADFYLINIPSLRA

SEQ ID NO: 67491 - protein, 29 aa, Artificial Sequence
  Cyclic GFR-binding peptide
VVMNPIKGYIVNSSDDFYLVNIPSLKTPA

SEQ ID NO: 67492 - protein, 33 aa, Artificial Sequence
  Cyclic GFR-binding peptide
  MOD_RES (27)..(28): Xaa is C or S
GPIKGYYTVVGKDFYLINIPSLKTPVXXAKSAK

SEQ ID NO: 67493 - protein, 32 aa, Artificial Sequence
  Cyclic GFR-binding peptide
  MOD_RES (29)..(30): Xaa is C or S
VMNPIKGYIVNSSDDFYLVNIPSLKTPAXXPK

SEQ ID NO: 67494 - protein, 30 aa, Artificial Sequence
  Cyclic GFR-binding peptide
  MOD_RES (30)..(30): Xaa is C or S
VVMNPIKGYIVNSSDDFYLVNIPSLQTPAX

SEQ ID NO: 67495 - protein, 38 aa, Artificial Sequence; identical to SEQ ID NO: 21359
  Cyclic GFR-binding peptide
  MOD_RES (2)..(34)..(35): Xaa is C or S

SEQ ID NO: 67496 - protein, 29 aa, Artificial Sequence
  Cyclic GFR-binding peptide
  MOD_RES (1)..(3): Xaa is C or S
XGXGEVVMEPIKGYVVKDYEDFYLMNIPS

SEQ ID NO: 67497 - protein, 29 aa, Artificial Sequence
  Cyclic GFR-binding peptide
  MOD_RES (2)..(2): Xaa is C or S
GXAEVVMDPIKGYVVNNAADFYLINIPSL

SEQ ID NO: 67498 - protein, 39 aa, Artificial Sequence; identical to SEQ ID NO: 21361
  Cyclic GFR-binding peptide
  MOD_RES (1)..(33)..(34): Xaa is C or S

SEQ ID NO: 67499 - protein, 31 aa, Artificial Sequence
  Cyclic GFR-binding peptide
AVSMGEPIKGYTPVGMDDFYLVNIPSLKTPV

SEQ ID NO: 67500 - protein, 26 aa, Artificial Sequence
  Cyclic GFR-binding peptide
VVMDPIKGYVVNNASDFYLINIPSLR

SEQ ID NO: 67501 - protein, 34 aa, Artificial Sequence
  Cyclic GFR-binding peptide
  MOD_RES (28)..(29): Xaa is C or S
MEPIKGYVVKDYEDFYLMNIPSLETPVXXAKPIS

SEQ ID NO: 67502 - protein, 33 aa, Artificial Sequence
  Cyclic GFR-binding peptide
  MOD_RES (27)..(28): Xaa is C or S
MPIKGYLLVRGNDFYLMNIPSTKVPAXXTSPVR

SEQ ID NO: 67503 - protein, 32 aa, Artificial Sequence
  Cyclic GFR-binding peptide
  MOD_RES (29)..(30): Xaa is C or S
VMDPIKGYVVNNASDFYLINIPSLRTPVXXTP

SEQ ID NO: 67504 - protein, 24 aa, Artificial Sequence
  Cyclic GFR-binding peptide
PIKGYVVKENEDFYLMNIPSLETP

SEQ ID NO: 67505 - protein, 30 aa, Artificial Sequence; identical to SEQ ID NO: 21370
  Cyclic GFR-binding peptide

SEQ ID NO: 67506 - protein, 23 aa, Artificial Sequence
  Cyclic GFR-binding peptide
GPIKGYYTVVGKDFYLINIPSLK

SEQ ID NO: 67507 - protein, 36 aa, Artificial Sequence; identical to SEQ ID NO: 21374
  Cyclic GFR-binding peptide
  MOD_RES (31)..(32): Xaa is C or S

SEQ ID NO: 67508 - protein, 35 aa, Artificial Sequence
  Cyclic GFR-binding peptide
  MOD_RES (30)..(30): Xaa is C or S
VVMNPIKGYIVNSSDDFYLVNIPSLKTPAXTPKTV

SEQ ID NO: 67509 - protein, 29 aa, Artificial Sequence
  Cyclic GFR-binding peptide
  MOD_RES (29)..(29): Xaa is C or S
VMNPIKGYIVNNSSDFYLVNIPSLKTPAX

SEQ ID NO: 67510 - protein, 31 aa, Artificial Sequence
  Cyclic GFR-binding peptide
  MOD_RES (1)..(3): Xaa is C or S
XGXSEVVMDPIKGYVVNNASDFYLINIPSLR

SEQ ID NO: 67511 - protein, 40 aa, Artificial Sequence; identical to SEQ ID NO: 21384
  Cyclic GFR-binding peptide
  MOD_RES (2)..(4)..(36)..(37): Xaa is C or S

SEQ ID NO: 67512 - protein, 32 aa, Artificial Sequence
  Cyclic GFR-binding peptide
  MOD_RES (2)..(2): Xaa is C or S
GXARVVMNPIKGYIVNSSDDFYLVNIPSLQTP

SEQ ID NO: 67513 - protein, 34 aa, Artificial Sequence
  Cyclic GFR-binding peptide
  MOD_RES (28)..(29): Xaa is C or S
MDPIKGYVVNNASDFYLINIPSLRTPVXXTPPTS

SEQ ID NO: 67514 - protein, 32 aa, Artificial Sequence
  Cyclic GFR-binding peptide
  MOD_RES (1)..(3): Xaa is C or S
XGXAKVVMNPIKGYIVNNSSDFYLVNIPSLKT

SEQ ID NO: 67515 - protein, 26 aa, Artificial Sequence
  Cyclic GFR-binding peptide
EVIMPIKGYLLVRGNDFYLMNIPSTK

SEQ ID NO: 67516 - protein, 36 aa, Artificial Sequence; identical to SEQ ID NO: 21388
  Cyclic GFR-binding peptide
  MOD_RES (1)..(33)..(34): Xaa is C or S

SEQ ID NO: 67517 - protein, 22 aa, Artificial Sequence
  Cyclic GFR-binding peptide
MDPIKGYVVNNAADFYLINIPS

SEQ ID NO: 67518 - protein, 33 aa, Artificial Sequence
  Cyclic GFR-binding peptide
  MOD_RES (2)..(4): Xaa is C or S
HXGXSRVVMNPIKGYIVNSSDDFYLVNIPSLKT

SEQ ID NO: 67519 - protein, 28 aa, Artificial Sequence
  Cyclic GFR-binding peptide
  MOD_RES (2)..(2): Xaa is C or S
GXGEVVMDPIKGYVVKENEDFYLMNIPS

SEQ ID NO: 67520 - protein, 22 aa, Artificial Sequence
  Cyclic GFR-binding peptide
MNPIKGYIVNNSSDFYLVNIPS

SEQ ID NO: 67521 - protein, 25 aa, Artificial Sequence
  Cyclic GFR-binding peptide
PIKGYVVKDYEDFYLMNIPSLETPV

SEQ ID NO: 67522 - protein, 38 aa, Artificial Sequence; identical to SEQ ID NO: 21393
  Cyclic GFR-binding peptide
  MOD_RES (2)..(4)..(36)..(37): Xaa is C or S

SEQ ID NO: 67523 - protein, 23 aa, Artificial Sequence
  Cyclic GFR-binding peptide
MNPIKGYIVNSSDDFYLVNIPSL

SEQ ID NO: 67524 - protein, 33 aa, Artificial Sequence
  Cyclic GFR-binding peptide
  MOD_RES (1)..(3): Xaa is C or S
XGXSRVVMNPIKGYIVNSSDDFYLVNIPSLKTP

SEQ ID NO: 67525 - protein, 31 aa, Artificial Sequence
  Cyclic GFR-binding peptide
  MOD_RES (27)..(28): Xaa is C or S
NPIKGYIVNSSDDFYLVNIPSLQTPAXXPKP

SEQ ID NO: 67526 - protein, 39 aa, Artificial Sequence; identical to SEQ ID NO: 21395
  Cyclic GFR-binding peptide
  MOD_RES (2)..(4)..(36): Xaa is C or S

SEQ ID NO: 67527 - protein, 28 aa, Artificial Sequence
  Cyclic GFR-binding peptide
  MOD_RES (27)..(28): Xaa is C or S
DPIKGYVVNNASDFYLINIPSLRTPVXX

SEQ ID NO: 67528 - protein, 32 aa, Artificial Sequence
  Cyclic GFR-binding peptide
  MOD_RES (27)..(28): Xaa is C or S
GPIKGYYTVVGKDFYLINIPSLKTPVXXAKSA

SEQ ID NO: 67529 - protein, 30 aa, Artificial Sequence
  Cyclic GFR-binding peptide
  MOD_RES (26)..(26): Xaa is C or S
PIKGYIVNSSDDFYLVNIPSLKTPAXTPKT

SEQ ID NO: 67530 - protein, 24 aa, Artificial Sequence
  Cyclic GFR-binding peptide
AMGPIKGYYTVVGKDFYLINIPSL

SEQ ID NO: 67531 - protein, 29 aa, Artificial Sequence
  Cyclic GFR-binding peptide
VVMDPIKGYVVNNASDFYLINIPSLRTPV

SEQ ID NO: 67532 - protein, 20 aa, Artificial Sequence
  Cyclic GFR-binding peptide
PIKGYTPVGMDDFYLVNIPS

SEQ ID NO: 67533 - protein, 20 aa, Artificial Sequence
  Cyclic GFR-binding peptide
PIKGYIVNNSSDFYLVNIPS

SEQ ID NO: 67534 - protein, 37 aa, Artificial Sequence; identical to SEQ ID NO: 21413
  Cyclic GFR-binding peptide
  MOD_RES (31)..(32): Xaa is C or S

SEQ ID NO: 67535 - protein, 31 aa, Artificial Sequence
  Cyclic GFR-binding peptide
  MOD_RES (26)..(27): Xaa is C or S
PIKGYVVKENEDFYLMNIPSLETPVXXAKPI

SEQ ID NO: 67536 - protein, 26 aa, Artificial Sequence
  Cyclic GFR-binding peptide
AVSMGEPIKGYTPVGMDDFYLVNIPS

SEQ ID NO: 67537 - protein, 33 aa, Artificial Sequence
  Cyclic GFR-binding peptide
  MOD_RES (29)..(30): Xaa is C or S
VMNPIKGYIVNSSDDFYLVNIPSLKTPAXXPKP

SEQ ID NO: 67538 - protein, 37 aa, Artificial Sequence
  Cyclic GFR-binding peptide
  MOD_RES (32)..(33): Xaa is C or S
AVSMGEPIKGYTPVGMDDFYLVNIPSLKTPVXXAKGV

SEQ ID NO: 67539 - protein, 34 aa, Artificial Sequence
  Cyclic GFR-binding peptide
  MOD_RES (29)..(30): Xaa is C or S
AMGPIKGYYTVVGKDFYLINIPSLKTPVXXAKSA

SEQ ID NO: 67540 - protein, 34 aa, Artificial Sequence
  Cyclic GFR-binding peptide
  MOD_RES (30)..(31): Xaa is C or S
EVIMPIKGYLLVRGNDFYLMNIPSTKVPAXXTSP

SEQ ID NO: 67541 - protein, 31 aa, Artificial Sequence
  Cyclic GFR-binding peptide
  MOD_RES (29)..(30): Xaa is C or S
VMEPIKGYVVKDYEDFYLMNIPSLETPVXXA

SEQ ID NO: 67542 - protein, 27 aa, Artificial Sequence
  Cyclic GFR-binding peptide
  MOD_RES (1)..(1): Xaa is C or S
XSEVVMDPIKGYVVNNASDFYLINIPS

SEQ ID NO: 67543 - protein, 37 aa, Artificial Sequence; identical to SEQ ID NO: 21418
  Cyclic GFR-binding peptide
  MOD_RES (2)..(4)..(36)..(37): Xaa is C or S

SEQ ID NO: 67544 - protein, 30 aa, Artificial Sequence
  Cyclic GFR-binding peptide
SRVVMNPIKGYIVNSSDDFYLVNIPSLKTP

SEQ ID NO: 67545 - protein, 28 aa, Artificial Sequence
  Cyclic GFR-binding peptide
  MOD_RES (1)..(1): Xaa is C or S
XEEVIMPIKGYLLVRGNDFYLMNIPSTK

SEQ ID NO: 67546 - protein, 25 aa, Artificial Sequence
  Cyclic GFR-binding peptide
PIKGYIVNSSDDFYLVNIPSLQTPA

SEQ ID NO: 67547 - protein, 38 aa, Artificial Sequence; identical to SEQ ID NO: 21422
  Cyclic GFR-binding peptide
  MOD_RES (1)..(34)..(35): Xaa is C or S

SEQ ID NO: 67548 - protein, 35 aa, Artificial Sequence; identical to SEQ ID NO: 21426
  Cyclic GFR-binding peptide
  MOD_RES (1)..(3)..(35): Xaa is C or S

SEQ ID NO: 67549 - protein, 24 aa, Artificial Sequence
  Cyclic GFR-binding peptide
VMDPIKGYVVKENEDFYLMNIPSL

SEQ ID NO: 67550 - protein, 33 aa, Artificial Sequence
  Cyclic GFR-binding peptide
  MOD_RES (27)..(28): Xaa is C or S
EPIKGYTPVGMDDFYLVNIPSLKTPVXXAKGVK

SEQ ID NO: 67551 - protein, 42 aa, Artificial Sequence; identical to SEQ ID NO: 21430
  Cyclic GFR-binding peptide
  MOD_RES (2)..(4)..(36)..(37): Xaa is C or S

SEQ ID NO: 67552 - protein, 33 aa, Artificial Sequence
  Cyclic GFR-binding peptide
  MOD_RES (30)..(31): Xaa is C or S
VVMNPIKGYIVNSSDDFYLVNIPSLQTPAXXPK

SEQ ID NO: 67553 - protein, 31 aa, Artificial Sequence
  Cyclic GFR-binding peptide
  MOD_RES (2)..(4): Xaa is C or S
RXGXESVAMGPIKGYYTVVGKDFYLINIPSL

SEQ ID NO: 67554 - protein, 28 aa, Artificial Sequence
  Cyclic GFR-binding peptide
  MOD_RES (28)..(28): Xaa is C or S
MDPIKGYVVNNAADFYLINIPSLRAPVX

SEQ ID NO: 67555 - protein, 27 aa, Artificial Sequence
  Cyclic GFR-binding peptide
EVVMDPIKGYVVNNAADFYLINIPSLR

SEQ ID NO: 67556 - protein, 32 aa, Artificial Sequence
  Cyclic GFR-binding peptide
  MOD_RES (29)..(30): Xaa is C or S
VMDPIKGYVVKENEDFYLMNIPSLETPVXXAK

SEQ ID NO: 67557 - protein, 27 aa, Artificial Sequence
  Cyclic GFR-binding peptide
VVMNPIKGYIVNSSDDFYLVNIPSLKT

SEQ ID NO: 67558 - protein, 23 aa, Artificial Sequence
  Cyclic GFR-binding peptide
MDPIKGYVVNNASDFYLINIPSL

SEQ ID NO: 67559 - protein, 28 aa, Artificial Sequence
  Cyclic GFR-binding peptide
  MOD_RES (1)..(1): Xaa is C or S
XESVAMGPIKGYYTVVGKDFYLINIPSL

SEQ ID NO: 67560 - protein, 27 aa, Artificial Sequence
  Cyclic GFR-binding peptide
  MOD_RES (27)..(27): Xaa is C or S
EPIKGYVVKDYEDFYLMNIPSLETPVX

SEQ ID NO: 67561 - protein, 25 aa, Artificial Sequence
  Cyclic GFR-binding peptide
VMEPIKGYVVKDYEDFYLMNIPSLE

SEQ ID NO: 67562 - protein, 21 aa, Artificial Sequence
  Cyclic GFR-binding peptide
PIKGYLLVRGNDFYLMNIPST

SEQ ID NO: 67563 - protein, 26 aa, Artificial Sequence
  Cyclic GFR-binding peptide
VVMNPIKGYIVNSSDDFYLVNIPSLQ

SEQ ID NO: 67564 - protein, 38 aa, Artificial Sequence; identical to SEQ ID NO: 21446
  Cyclic GFR-binding peptide
  MOD_RES (1)..(3)..(34)..(35): Xaa is C or S

SEQ ID NO: 67565 - protein, 37 aa, Artificial Sequence; identical to SEQ ID NO: 21449
  Cyclic GFR-binding peptide
  MOD_RES (2)..(4)..(36)..(37): Xaa is C or S

SEQ ID NO: 67566 - protein, 29 aa, Artificial Sequence
  Cyclic GFR-binding peptide
  MOD_RES (29)..(29): Xaa is C or S
AMGPIKGYYTVVGKDFYLINIPSLKTPVX

SEQ ID NO: 67567 - protein, 25 aa, Artificial Sequence
  Cyclic GFR-binding peptide
KVVMNPIKGYIVNNSSDFYLVNIPS

SEQ ID NO: 67568 - protein, 25 aa, Artificial Sequence
  Cyclic GFR-binding peptide
VMDPIKGYVVNNASDFYLINIPSLR

SEQ ID NO: 67569 - protein, 33 aa, Artificial Sequence
  Cyclic GFR-binding peptide
  MOD_RES (29)..(30): Xaa is C or S
VMDPIKGYVVKENEDFYLMNIPSLETPVXXAKP

SEQ ID NO: 67570 - protein, 36 aa, Artificial Sequence; identical to SEQ ID NO: 21458
  Cyclic GFR-binding peptide
  MOD_RES (2)..(34): Xaa is C or S

SEQ ID NO: 67571 - protein, 28 aa, Artificial Sequence
  Cyclic GFR-binding peptide
SRVVMNPIKGYIVNSSDDFYLVNIPSLK

SEQ ID NO: 67572 - protein, 25 aa, Artificial Sequence
  Cyclic GFR-binding peptide
MDPIKGYVVNNASDFYLINIPSLRT

SEQ ID NO: 67573 - protein, 30 aa, Artificial Sequence
  Cyclic GFR-binding peptide
  MOD_RES (30)..(30): Xaa is C or S
VVMDPIKGYVVKENEDFYLMNIPSLETPVX

SEQ ID NO: 67574 - protein, 24 aa, Artificial Sequence
  Cyclic GFR-binding peptide
MEPIKGYVVKDYEDFYLMNIPSLE

SEQ ID NO: 67575 - protein, 29 aa, Artificial Sequence
  Cyclic GFR-binding peptide
RVVMNPIKGYIVNSSDDFYLVNIPSLKTP

SEQ ID NO: 67576 - protein, 39 aa, Artificial Sequence; identical to SEQ ID NO: 21466
  Cyclic GFR-binding peptide
  MOD_RES (6)..(7)..(39): Xaa is C or S

SEQ ID NO: 67577 - protein, 30 aa, Artificial Sequence
  Cyclic GFR-binding peptide
  MOD_RES (4)..(5): Xaa is C or S
SKAXXVPTKLSPINILYFDKGVVTYYGKIP

SEQ ID NO: 67578 - protein, 27 aa, Artificial Sequence
  Cyclic GFR-binding peptide
  MOD_RES (1)..(2): Xaa is C or S
XXAPTKLSPINVLYFDSSNNVIYGKIP

SEQ ID NO: 67579 - protein, 34 aa, Artificial Sequence
  Cyclic GFR-binding peptide
  MOD_RES (4)..(5): Xaa is C or S
PPTXXVPTRLSPINILYFDSANNVVYGKIPDMVV

SEQ ID NO: 67580 - protein, 40 aa, Artificial Sequence; identical to SEQ ID NO: 21477
  Cyclic GFR-binding peptide
  MOD_RES (5)..(6)..(38)..(40): Xaa is C or S

SEQ ID NO: 67581 - protein, 37 aa, Artificial Sequence; identical to SEQ ID NO: 21478
  Cyclic GFR-binding peptide
  MOD_RES (4)..(36): Xaa is C or S

SEQ ID NO: 67582 - protein, 32 aa, Artificial Sequence
  Cyclic GFR-binding peptide
  MOD_RES (29)..(31): Xaa is C or S
QLSPINVLYFDDSSNVIYGKIPNMVVRAXGXH

SEQ ID NO: 67583 - protein, 35 aa, Artificial Sequence; identical to SEQ ID NO: 21483
  Cyclic GFR-binding peptide
  MOD_RES (3)..(4): Xaa is C or S

SEQ ID NO: 67584 - protein, 23 aa, Artificial Sequence
  Cyclic GFR-binding peptide
LSPINMLYFDENEKVVYGKIPDM

SEQ ID NO: 67585 - protein, 29 aa, Artificial Sequence
  Cyclic GFR-binding peptide
APVKTSPINMLYFDNGRVLLYGKIPMIVE

SEQ ID NO: 67586 - protein, 34 aa, Artificial Sequence
  Cyclic GFR-binding peptide
  MOD_RES (4)..(5): Xaa is C or S
SKAXXVPTKLSPINILYFDKGVVTYYGKIPGMAV

SEQ ID NO: 67587 - protein, 22 aa, Artificial Sequence
  Cyclic GFR-binding peptide
LSPINILYFDAANNVVYGKIPD

SEQ ID NO: 67588 - protein, 39 aa, Artificial Sequence; identical to SEQ ID NO: 21487
  Cyclic GFR-binding peptide
  MOD_RES (2)..(3)..(36)..(38): Xaa is C or S

SEQ ID NO: 67589 - protein, 36 aa, Artificial Sequence; identical to SEQ ID NO: 21489
  Cyclic GFR-binding peptide
  MOD_RES (4)..(5): Xaa is C or S

SEQ ID NO: 67590 - protein, 30 aa, Artificial Sequence
  Cyclic GFR-binding peptide
PTELSPINMLYFDEYDKVVYGKIPEMVVEG

SEQ ID NO: 67591 - protein, 33 aa, Artificial Sequence; identical to SEQ ID NO: 21493
  Cyclic GFR-binding peptide
  MOD_RES (1)..(2): Xaa is C or S

SEQ ID NO: 67592 - protein, 27 aa, Artificial Sequence
  Cyclic GFR-binding peptide
VPTRLSPINILYFDSANNVVYGKIPDM

SEQ ID NO: 67593 - protein, 31 aa, Artificial Sequence
  Cyclic GFR-binding peptide
  MOD_RES (1)..(2): Xaa is C or S
XXAPTKLSPINVLYFDDSSNVIYGKIPNMVV

SEQ ID NO: 67594 - protein, 35 aa, Artificial Sequence; identical to SEQ ID NO: 21494
  Cyclic GFR-binding peptide
  MOD_RES (1)..(33)..(35): Xaa is C or S

SEQ ID NO: 67595 - protein, 39 aa, Artificial Sequence; identical to SEQ ID NO: 21495
  Cyclic GFR-binding peptide
  MOD_RES (3)..(4)..(36)..(38): Xaa is C or S

SEQ ID NO: 67596 - protein, 35 aa, Artificial Sequence; identical to SEQ ID NO: 21496
  Cyclic GFR-binding peptide
  MOD_RES (1)..(2)..(35): Xaa is C or S

SEQ ID NO: 67597 - protein, 30 aa, Artificial Sequence
  Cyclic GFR-binding peptide
  MOD_RES (28)..(30): Xaa is C or S
LSPINILYFDKGVVTYYGKIPGMAVSEXGX

SEQ ID NO: 67598 - protein, 27 aa, Artificial Sequence
  Cyclic GFR-binding peptide
  MOD_RES (1)..(2): Xaa is C or S
XXVPTKLSPINILYFDKGVVTYYGKIP

SEQ ID NO: 67599 - protein, 38 aa, Artificial Sequence; identical to SEQ ID NO: 21497
  Cyclic GFR-binding peptide
  MOD_RES (5)..(6)..(37): Xaa is C or S

SEQ ID NO: 67600 - protein, 28 aa, Artificial Sequence
  Cyclic GFR-binding peptide
  MOD_RES (1)..(2): Xaa is C or S
XXVPTELSPINMLYFDENEKVVYGKIPD

SEQ ID NO: 67601 - protein, 31 aa, Artificial Sequence
  Cyclic GFR-binding peptide
  MOD_RES (28)..(30): Xaa is C or S
SPINVLYFDDMGVPTYGKIPEGMSVAEXGXR

SEQ ID NO: 67602 - protein, 29 aa, Artificial Sequence
  Cyclic GFR-binding peptide
  MOD_RES (29)..(29): Xaa is C or S
VKTSPINMLYFDNGRVLLYGKIPMIVEEX

SEQ ID NO: 67603 - protein, 22 aa, Artificial Sequence
  Cyclic GFR-binding peptide
SPINMLYFDEYDKVVYGKIPEM

SEQ ID NO: 67604 - protein, 31 aa, Artificial Sequence
  Cyclic GFR-binding peptide
  MOD_RES (3)..(4): Xaa is C or S
KAXXVPTKLSPINILYFDKGVVTYYGKIPGM

SEQ ID NO: 67605 - protein, 25 aa, Artificial Sequence
  Cyclic GFR-binding peptide
SPINILYFDAANNVVYGKIPDMVVE

SEQ ID NO: 67606 - protein, 39 aa, Artificial Sequence; identical to SEQ ID NO: 21503
  Cyclic GFR-binding peptide
  MOD_RES (6)..(7)..(39): Xaa is C or S

SEQ ID NO: 67607 - protein, 27 aa, Artificial Sequence
  Cyclic GFR-binding peptide
VPTELSPINMLYFDENEKVVYGKIPDM

SEQ ID NO: 67608 - protein, 30 aa, Artificial Sequence
  Cyclic GFR-binding peptide
  MOD_RES (29)..(29): Xaa is C or S
KLSPINVLYFDDSSNVIYGKIPNMVVRSXG

SEQ ID NO: 67609 - protein, 32 aa, Artificial Sequence
  Cyclic GFR-binding peptide
  MOD_RES (31)..(31): Xaa is C or S
PTKLSPINILYFDKGVVTYYGKIPGMAVSEXG

SEQ ID NO: 67610 - protein, 30 aa, Artificial Sequence
  Cyclic GFR-binding peptide
  MOD_RES (2)..(3): Xaa is C or S
AXXVPTKLSPINVLYFDDMGVPTYGKIPEG

SEQ ID NO: 67611 - protein, 29 aa, Artificial Sequence
  Cyclic GFR-binding peptide
  MOD_RES (27)..(29): Xaa is C or S
SPINILYFDSANNVVYGKIPDMVVESXGX

SEQ ID NO: 67612 - protein, 37 aa, Artificial Sequence; identical to SEQ ID NO: 21514
  Cyclic GFR-binding peptide
  MOD_RES (6)..(7): Xaa is C or S

SEQ ID NO: 67613 - protein, 31 aa, Artificial Sequence
  Cyclic GFR-binding peptide
  MOD_RES (4)..(5): Xaa is C or S
SKAXXVPTKLSPINILYFDKGVVTYYGKIPG

SEQ ID NO: 67614 - protein, 40 aa, Artificial Sequence; identical to SEQ ID NO: 21515
  Cyclic GFR-binding peptide
  MOD_RES (6)..(7)..(39): Xaa is C or S

SEQ ID NO: 67615 - protein, 26 aa, Artificial Sequence
  Cyclic GFR-binding peptide
PTELSPINMLYFDENEKVVYGKIPDM

SEQ ID NO: 67616 - protein, 34 aa, Artificial Sequence
  Cyclic GFR-binding peptide
  MOD_RES (6)..(7): Xaa is C or S
HVPKPXXAPTKLSPINVLYFDDSSNVIYGKIPNM

SEQ ID NO: 67617 - protein, 24 aa, Artificial Sequence
  Cyclic GFR-binding peptide
SPINMLYFDENEKVVYGKIPDMVV

SEQ ID NO: 67618 - protein, 36 aa, Artificial Sequence; identical to SEQ ID NO: 21521
  Cyclic GFR-binding peptide
  MOD_RES (5)..(6): Xaa is C or S

SEQ ID NO: 67619 - protein, 28 aa, Artificial Sequence
  Cyclic GFR-binding peptide
  MOD_RES (2)..(3): Xaa is C or S
TXXVPTRLSPINILYFDSANNVVYGKIP

SEQ ID NO: 67620 - protein, 38 aa, Artificial Sequence; identical to SEQ ID NO: 21522
  Cyclic GFR-binding peptide
  MOD_RES (3)..(4)..(36)..(38): Xaa is C or S

SEQ ID NO: 67621 - protein, 26 aa, Artificial Sequence
  Cyclic GFR-binding peptide
TELSPINMLYFDENEKVVYGKIPDMV

SEQ ID NO: 67622 - protein, 27 aa, Artificial Sequence
  Cyclic GFR-binding peptide
KLSPINILYFDKGVVTYYGKIPGMAVS

SEQ ID NO: 67623 - protein, 28 aa, Artificial Sequence
  Cyclic GFR-binding peptide
  MOD_RES (1)..(2): Xaa is C or S
XXAPTKLSPINVLYFDDSSNVIYGKIPN

SEQ ID NO: 67624 - protein, 30 aa, Artificial Sequence
  Cyclic GFR-binding peptide
  MOD_RES (1)..(1): Xaa is C or S
XVPTKLSPINILYFDKGVVTYYGKIPGMAV

SEQ ID NO: 67625 - protein, 40 aa, Artificial Sequence; identical to SEQ ID NO: 21528
  Cyclic GFR-binding peptide
  MOD_RES (6)..(7)..(39): Xaa is C or S

SEQ ID NO: 67626 - protein, 27 aa, Artificial Sequence
  Cyclic GFR-binding peptide
PTKLSPINVLYFDDSSNVIYGKIPNMV

SEQ ID NO: 67627 - protein, 27 aa, Artificial Sequence
  Cyclic GFR-binding peptide
PTKLSPINVLYFDSSNNVIYGKIPNMV

SEQ ID NO: 67628 - protein, 37 aa, Artificial Sequence; identical to SEQ ID NO: 21532
  Cyclic GFR-binding peptide
  MOD_RES (3)..(4)..(36): Xaa is C or S

SEQ ID NO: 67629 - protein, 25 aa, Artificial Sequence
  Cyclic GFR-binding peptide
LSPINMLYFDEYDKVVYGKIPEMVV

SEQ ID NO: 67630 - protein, 24 aa, Artificial Sequence
  Cyclic GFR-binding peptide
SPINILYFDAANNVVYGKIPDMVV

SEQ ID NO: 67631 - protein, 40 aa, Artificial Sequence; identical to SEQ ID NO: 21534
  Cyclic GFR-binding peptide
  MOD_RES (5)..(6)..(38)..(40): Xaa is C or S

SEQ ID NO: 67632 - protein, 30 aa, Artificial Sequence
  Cyclic GFR-binding peptide
  MOD_RES (29)..(29): Xaa is C or S
ELSPINMLYFDEYDKVVYGKIPEMVVEGXG

SEQ ID NO: 67633 - protein, 32 aa, Artificial Sequence
  Cyclic GFR-binding peptide
  MOD_RES (1)..(1): Xaa is C or S
XVPTKLSPINVLYFDDMGVPTYGKIPEGMSVA

SEQ ID NO: 67634 - protein, 20 aa, Artificial Sequence
  Cyclic GFR-binding peptide
SPINILYFDSANNVVYGKIP

SEQ ID NO: 67635 - protein, 29 aa, Artificial Sequence
  Cyclic GFR-binding peptide
  MOD_RES (1)..(1): Xaa is C or S
XAPVKTSPINMLYFDNGRVLLYGKIPMIV

SEQ ID NO: 67636 - protein, 28 aa, Artificial Sequence
  Cyclic GFR-binding peptide
  MOD_RES (1)..(1): Xaa is C or S
XAPTKLSPINVLYFDSSNNVIYGKIPNM

SEQ ID NO: 67637 - protein, 41 aa, Artificial Sequence; identical to SEQ ID NO: 21539
  Cyclic GFR-binding peptide
  MOD_RES (5)..(6)..(38)..(40): Xaa is C or S

SEQ ID NO: 67638 - protein, 29 aa, Artificial Sequence
  Cyclic GFR-binding peptide
  MOD_RES (3)..(3): Xaa is C or S
PTXAPTKLSPINVLYFDDSSNVIYGKIPN

SEQ ID NO: 67639 - protein, 27 aa, Artificial Sequence
  Cyclic GFR-binding peptide
PTKLSPINILYFDKGVVTYYGKIPGMA

SEQ ID NO: 67640 - protein, 34 aa, Artificial Sequence; identical to SEQ ID NO: 21540
  Cyclic GFR-binding peptide
  MOD_RES (3)..(4): Xaa is C or S

SEQ ID NO: 67641 - protein, 35 aa, Artificial Sequence; identical to SEQ ID NO: 21542
  Cyclic GFR-binding peptide
  MOD_RES (4)..(5): Xaa is C or S

SEQ ID NO: 67642 - protein, 25 aa, Artificial Sequence
  Cyclic GFR-binding peptide
SPINMLYFDEYDKVVYGKIPEMVVE

SEQ ID NO: 67643 - protein, 21 aa, Artificial Sequence
  Cyclic GFR-binding peptide
SPINMLYFDEYDKVVYGKIPE

SEQ ID NO: 67644 - protein, 38 aa, Artificial Sequence; identical to SEQ ID NO: 21556
  Cyclic GFR-binding peptide
  MOD_RES (3)..(4)..(36)..(38): Xaa is C or S

SEQ ID NO: 67645 - protein, 34 aa, Artificial Sequence; identical to SEQ ID NO: 21558
  Cyclic GFR-binding peptide
  MOD_RES (1)..(33): Xaa is C or S

SEQ ID NO: 67646 - protein, 25 aa, Artificial Sequence
  Cyclic GFR-binding peptide
LSPINVLYFDDMGVPTYGKIPEGMS

SEQ ID NO: 67647 - protein, 31 aa, Artificial Sequence; identical to SEQ ID NO: 21560
  Cyclic GFR-binding peptide

SEQ ID NO: 67648 - protein, 40 aa, Artificial Sequence; identical to SEQ ID NO: 21561
  Cyclic GFR-binding peptide
  MOD_RES (4)..(5)..(37)..(39): Xaa is C or S

SEQ ID NO: 67649 - protein, 38 aa, Artificial Sequence; identical to SEQ ID NO: 21562
  Cyclic GFR-binding peptide
  MOD_RES (2)..(3)..(35)..(37): Xaa is C or S

SEQ ID NO: 67650 - protein, 28 aa, Artificial Sequence
  Cyclic GFR-binding peptide
  MOD_RES (1)..(2): Xaa is C or S
XXVPARLSPINILYFDAANNVVYGKIPD

SEQ ID NO: 67651 - protein, 37 aa, Artificial Sequence; identical to SEQ ID NO: 21567
  Cyclic GFR-binding peptide
  MOD_RES (6)..(7): Xaa is C or S

SEQ ID NO: 67652 - protein, 33 aa, Artificial Sequence
  Cyclic GFR-binding peptide
  MOD_RES (4)..(5): Xaa is C or S
PPTXXVPTRLSPINILYFDSANNVVYGKIPDMV

SEQ ID NO: 67653 - protein, 33 aa, Artificial Sequence
  Cyclic GFR-binding peptide
  MOD_RES (4)..(5): Xaa is C or S
PKPXXAPTQLSPINVLYFDDSSNVIYGKIPNMV

SEQ ID NO: 67654 - protein, 32 aa, Artificial Sequence; identical to SEQ ID NO: 21569
  Cyclic GFR-binding peptide
  MOD_RES (1)..(1): Xaa is C or S

SEQ ID NO: 67655 - protein, 35 aa, Artificial Sequence; identical to SEQ ID NO: 21570
  Cyclic GFR-binding peptide
  MOD_RES (1)..(33)..(35): Xaa is C or S

SEQ ID NO: 67656 - protein, 24 aa, Artificial Sequence
  Cyclic GFR-binding peptide
PTELSPINMLYFDEYDKVVYGKIP

SEQ ID NO: 67657 - protein, 36 aa, Artificial Sequence; identical to SEQ ID NO: 21574
  Cyclic GFR-binding peptide
  MOD_RES (6)..(6): Xaa is C or S

SEQ ID NO: 67658 - protein, 35 aa, Artificial Sequence
  Cyclic GFR-binding peptide
  MOD_RES (5)..(6): Xaa is C or S
VPKPXXAPTQLSPINVLYFDDSSNVIYGKIPNMVV

SEQ ID NO: 67659 - protein, 39 aa, Artificial Sequence; identical to SEQ ID NO: 21575
  Cyclic GFR-binding peptide
  MOD_RES (6)..(7)..(39): Xaa is C or S

SEQ ID NO: 67660 - protein, 40 aa, Artificial Sequence; identical to SEQ ID NO: 21576
  Cyclic GFR-binding peptide
  MOD_RES (6)..(7)..(38)..(40): Xaa is C or S

SEQ ID NO: 67661 - protein, 38 aa, Artificial Sequence; identical to SEQ ID NO: 21577
  Cyclic GFR-binding peptide
  MOD_RES (4)..(5)..(37): Xaa is C or S

SEQ ID NO: 67662 - protein, 26 aa, Artificial Sequence
  Cyclic GFR-binding peptide
  MOD_RES (1)..(1): Xaa is C or S
XVPTELSPINMLYFDENEKVVYGKIP

SEQ ID NO: 67663 - protein, 36 aa, Artificial Sequence; identical to SEQ ID NO: 21578
  Cyclic GFR-binding peptide
  MOD_RES (3)..(4)..(36): Xaa is C or S

SEQ ID NO: 67664 - protein, 36 aa, Artificial Sequence; identical to SEQ ID NO: 21580
  Cyclic GFR-binding peptide
  MOD_RES (3)..(4)..(35): Xaa is C or S

SEQ ID NO: 67665 - protein, 31 aa, Artificial Sequence
  Cyclic GFR-binding peptide
  MOD_RES (5)..(5): Xaa is C or S
TKPTXAPTKLSPINVLYFDDSSNVIYGKIPN

SEQ ID NO: 67666 - protein, 29 aa, Artificial Sequence
  Cyclic GFR-binding peptide
VPTKLSPINVLYFDDMGVPTYGKIPEGMS

SEQ ID NO: 67667 - protein, 28 aa, Artificial Sequence
  Cyclic GFR-binding peptide
QLSPINVLYFDDSSNVIYGKIPNMVVRA

SEQ ID NO: 67668 - protein, 33 aa, Artificial Sequence
  Cyclic GFR-binding peptide
  MOD_RES (6)..(7): Xaa is C or S
AAPASXXVPARLSPINILYFDAANNVVYGKIPD

SEQ ID NO: 67669 - protein, 32 aa, Artificial Sequence
  Cyclic GFR-binding peptide
  MOD_RES (2)..(3): Xaa is C or S
PXXAPTKLSPINVLYFDDSSNVIYGKIPNMVV

SEQ ID NO: 67670 - protein, 29 aa, Artificial Sequence
  Cyclic GFR-binding peptide
  MOD_RES (28)..(28): Xaa is C or S
SPINVLYFDDMGVPTYGKIPEGMSVAEXG

SEQ ID NO: 67671 - protein, 32 aa, Artificial Sequence
  Cyclic GFR-binding peptide
  MOD_RES (29)..(31): Xaa is C or S
ELSPINMLYFDENEKVVYGKIPDMVVEGXGXR

SEQ ID NO: 67672 - protein, 36 aa, Artificial Sequence
  Cyclic GFR-binding peptide
  MOD_RES (6)..(7): Xaa is C or S
RVPSTXXAPVKTSPINMLYFDNGRVLLYGKIPMIVE

SEQ ID NO: 67673 - protein, 34 aa, Artificial Sequence
  Cyclic GFR-binding peptide
  MOD_RES (5)..(6): Xaa is C or S
IPKAXXVPTELSPINMLYFDENEKVVYGKIPDMV

SEQ ID NO: 67674 - protein, 28 aa, Artificial Sequence
  Cyclic GFR-binding peptide
  MOD_RES (1)..(1): Xaa is C or S
XAPTQLSPINVLYFDDSSNVIYGKIPNM

SEQ ID NO: 67675 - protein, 39 aa, Artificial Sequence; identical to SEQ ID NO: 21594
  Cyclic GFR-binding peptide
  MOD_RES (5)..(6)..(37)..(39): Xaa is C or S

SEQ ID NO: 67676 - protein, 42 aa, Artificial Sequence; identical to SEQ ID NO: 21597
  Cyclic GFR-binding peptide
  MOD_RES (6)..(7)..(39)..(41): Xaa is C or S

SEQ ID NO: 67677 - protein, 36 aa, Artificial Sequence; identical to SEQ ID NO: 21599
  Cyclic GFR-binding peptide
  MOD_RES (2)..(3)..(35): Xaa is C or S

SEQ ID NO: 67678 - protein, 38 aa, Artificial Sequence; identical to SEQ ID NO: 21600
  Cyclic GFR-binding peptide
  MOD_RES (6)..(7): Xaa is C or S

SEQ ID NO: 67679 - protein, 34 aa, Artificial Sequence
  Cyclic GFR-binding peptide
  MOD_RES (4)..(5): Xaa is C or S
PASXXVPARLSPINILYFDAANNVVYGKIPDMVV

SEQ ID NO: 67680 - protein, 27 aa, Artificial Sequence
  Cyclic GFR-binding peptide
PTELSPINMLYFDEYDKVVYGKIPEMV

SEQ ID NO: 67681 - protein, 29 aa, Artificial Sequence
  Cyclic GFR-binding peptide
  MOD_RES (27)..(29): Xaa is C or S
SPINVLYFDDSSNVIYGKIPNMVVRAXGX

SEQ ID NO: 67682 - protein, 35 aa, Artificial Sequence
  Cyclic GFR-binding peptide
  MOD_RES (5)..(6): Xaa is C or S
VGKAXXVPTKLSPINVLYFDDMGVPTYGKIPEGMS

SEQ ID NO: 67683 - protein, 31 aa, Artificial Sequence
  Cyclic GFR-binding peptide
PTKLSPINVLYFDDMGVPTYGKIPEGMSVAE

SEQ ID NO: 67684 - protein, 31 aa, Artificial Sequence; identical to SEQ ID NO: 21607
  Cyclic GFR-binding peptide

SEQ ID NO: 67685 - protein, 37 aa, Artificial Sequence; identical to SEQ ID NO: 21610
  Cyclic GFR-binding peptide
  MOD_RES (4)..(5)..(37): Xaa is C or S

SEQ ID NO: 67686 - protein, 37 aa, Artificial Sequence; identical to SEQ ID NO: 21611
  Cyclic GFR-binding peptide
  MOD_RES (6)..(7): Xaa is C or S

SEQ ID NO: 67687 - protein, 34 aa, Artificial Sequence; identical to SEQ ID NO: 21612
  Cyclic GFR-binding peptide
  MOD_RES (2)..(3)..(34): Xaa is C or S

SEQ ID NO: 67688 - protein, 31 aa, Artificial Sequence; identical to SEQ ID NO: 21614
  Cyclic GFR-binding peptide
  MOD_RES (1)..(1): Xaa is C or S

SEQ ID NO: 67689 - protein, 28 aa, Artificial Sequence
  Cyclic GFR-binding peptide
  MOD_RES (28)..(28): Xaa is C or S
SPINVLYFDDMGVPTYGKIPEGMSVAEX

SEQ ID NO: 67690 - protein, 41 aa, Artificial Sequence; identical to SEQ ID NO: 21615
  Cyclic GFR-binding peptide
  MOD_RES (6)..(7)..(40): Xaa is C or S

SEQ ID NO: 67691 - protein, 33 aa, Artificial Sequence
  Cyclic GFR-binding peptide
  MOD_RES (6)..(7): Xaa is C or S
KIPKAXXVPTELSPINMLYFDENEKVVYGKIPD

SEQ ID NO: 67692 - protein, 38 aa, Artificial Sequence; identical to SEQ ID NO: 21620
  Cyclic GFR-binding peptide
  MOD_RES (2)..(3)..(36)..(38): Xaa is C or S

SEQ ID NO: 67693 - protein, 34 aa, Artificial Sequence; identical to SEQ ID NO: 21622
  Cyclic GFR-binding peptide
  MOD_RES (3)..(4): Xaa is C or S

SEQ ID NO: 67694 - protein, 26 aa, Artificial Sequence
  Cyclic GFR-binding peptide
LSPINILYFDAANNVVYGKIPDMVVE

SEQ ID NO: 67695 - protein, 32 aa, Artificial Sequence; identical to SEQ ID NO: 21624
  Cyclic GFR-binding peptide
  MOD_RES (1)..(2): Xaa is C or S

SEQ ID NO: 67696 - protein, 29 aa, Artificial Sequence
  Cyclic GFR-binding peptide
  MOD_RES (1)..(2): Xaa is C or S
XXVPTELSPINMLYFDEYDKVVYGKIPEM

SEQ ID NO: 67697 - protein, 32 aa, Artificial Sequence
  Cyclic GFR-binding peptide
  MOD_RES (30)..(32): Xaa is C or S
TQLSPINVLYFDDSSNVIYGKIPNMVVRAXGX

SEQ ID NO: 67698 - protein, 28 aa, Artificial Sequence
  Cyclic GFR-binding peptide
  MOD_RES (1)..(2): Xaa is C or S
XXVPTKLSPINILYFDKGVVTYYGKIPG

SEQ ID NO: 67699 - protein, 25 aa, Artificial Sequence
  Cyclic GFR-binding peptide
APTKLSPINVLYFDDSSNVIYGKIP

SEQ ID NO: 67700 - protein, 37 aa, Artificial Sequence; identical to SEQ ID NO: 21629
  Cyclic GFR-binding peptide
  MOD_RES (2)..(3)..(35)..(37): Xaa is C or S

SEQ ID NO: 67701 - protein, 34 aa, Artificial Sequence; identical to SEQ ID NO: 21633
  Cyclic GFR-binding peptide
  MOD_RES (3)..(4): Xaa is C or S

SEQ ID NO: 67702 - protein, 38 aa, Artificial Sequence; identical to SEQ ID NO: 21642
  Cyclic GFR-binding peptide
  MOD_RES (2)..(3)..(35)..(37): Xaa is C or S

SEQ ID NO: 67703 - protein, 30 aa, Artificial Sequence
  Cyclic GFR-binding peptide
  MOD_RES (28)..(30): Xaa is C or S
LSPINILYFDAANNVVYGKIPDMVVEAXGX

SEQ ID NO: 67704 - protein, 33 aa, Artificial Sequence; identical to SEQ ID NO: 21645
  Cyclic GFR-binding peptide
  MOD_RES (32)..(32): Xaa is C or S

SEQ ID NO: 67705 - protein, 32 aa, Artificial Sequence
  Cyclic GFR-binding peptide
  MOD_RES (2)..(3): Xaa is C or S
TXXAPVKTSPINMLYFDNGRVLLYGKIPMIVE

SEQ ID NO: 67706 - protein, 33 aa, Artificial Sequence; identical to SEQ ID NO: 21651
  Cyclic GFR-binding peptide
  MOD_RES (32)..(32): Xaa is C or S

SEQ ID NO: 67707 - protein, 35 aa, Artificial Sequence
  Cyclic GFR-binding peptide
  MOD_RES (6)..(7): Xaa is C or S
YVPKPXXAPTKLSPINVLYFDDSSNVIYGKIPNMV

SEQ ID NO: 67708 - protein, 33 aa, Artificial Sequence; identical to SEQ ID NO: 21656
  Cyclic GFR-binding peptide
  MOD_RES (1)..(33): Xaa is C or S

SEQ ID NO: 67709 - protein, 29 aa, Artificial Sequence
  Cyclic GFR-binding peptide
  MOD_RES (29)..(29): Xaa is C or S
QLSPINVLYFDDSSNVIYGKIPNMVVRAX

SEQ ID NO: 67710 - protein, 39 aa, Artificial Sequence; identical to SEQ ID NO: 21660
  Cyclic GFR-binding peptide
  MOD_RES (4)..(5)..(37)..(39): Xaa is C or S

SEQ ID NO: 67711 - protein, 32 aa, Artificial Sequence
  Cyclic GFR-binding peptide
  MOD_RES (29)..(31): Xaa is C or S
ELSPINMLYFDEYDKVVYGKIPEMVVEGXGXR

SEQ ID NO: 67712 - protein, 30 aa, Artificial Sequence
  Cyclic GFR-binding peptide
  MOD_RES (2)..(3): Xaa is C or S
SXXVPARLSPINILYFDAANNVVYGKIPDM

SEQ ID NO: 67713 - protein, 30 aa, Artificial Sequence
  Cyclic GFR-binding peptide
  MOD_RES (28)..(30): Xaa is C or S
LSPINVLYFDSSNNVIYGKIPNMVVKAXGX

SEQ ID NO: 67714 - protein, 35 aa, Artificial Sequence; identical to SEQ ID NO: 21665
  Cyclic GFR-binding peptide
  MOD_RES (3)..(4): Xaa is C or S

SEQ ID NO: 67715 - protein, 20 aa, Artificial Sequence
  Cyclic GFR-binding peptide
SPINMLYFNDKQQIIYGKIP

SEQ ID NO: 67716 - protein, 33 aa, Artificial Sequence; identical to SEQ ID NO: 21670
  Cyclic GFR-binding peptide
  MOD_RES (1)..(2): Xaa is C or S

SEQ ID NO: 67717 - protein, 35 aa, Artificial Sequence; identical to SEQ ID NO: 21672
  Cyclic GFR-binding peptide
  MOD_RES (1)..(33)..(35): Xaa is C or S

SEQ ID NO: 67718 - protein, 29 aa, Artificial Sequence
  Cyclic GFR-binding peptide
  MOD_RES (3)..(4): Xaa is C or S
KAXXVPTKLSPINVLYFDDMGVPTYGKIP

SEQ ID NO: 67719 - protein, 29 aa, Artificial Sequence
  Cyclic GFR-binding peptide
TRLSPINILYFDSANNVVYGKIPDMVVES

SEQ ID NO: 67720 - protein, 40 aa, Artificial Sequence; identical to SEQ ID NO: 21673
  Cyclic GFR-binding peptide
  MOD_RES (4)..(5)..(37)..(39): Xaa is C or S

SEQ ID NO: 67721 - protein, 21 aa, Artificial Sequence
  Cyclic GFR-binding peptide
SPINILYFDSANNVVYGKIPD

SEQ ID NO: 67722 - protein, 41 aa, Artificial Sequence; identical to SEQ ID NO: 21674
  Cyclic GFR-binding peptide
  MOD_RES (6)..(7)..(39)..(41): Xaa is C or S

SEQ ID NO: 67723 - protein, 32 aa, Artificial Sequence
  Cyclic GFR-binding peptide
  MOD_RES (31)..(31): Xaa is C or S
PTRLSPINILYFDSANNVVYGKIPDMVVESXG

SEQ ID NO: 67724 - protein, 32 aa, Artificial Sequence; identical to SEQ ID NO: 21675
  Cyclic GFR-binding peptide
  MOD_RES (1)..(2): Xaa is C or S

SEQ ID NO: 67725 - protein, 28 aa, Artificial Sequence
  Cyclic GFR-binding peptide
PTKLSPINILYFDKGVVTYYGKIPGMAV

SEQ ID NO: 67726 - protein, 26 aa, Artificial Sequence
  Cyclic GFR-binding peptide
PTKLSPINVLYFDDSSNVIYGKIPNM

SEQ ID NO: 67727 - protein, 38 aa, Artificial Sequence; identical to SEQ ID NO: 21678
  Cyclic GFR-binding peptide
  MOD_RES (6)..(7): Xaa is C or S

SEQ ID NO: 67728 - protein, 26 aa, Artificial Sequence
  Cyclic GFR-binding peptide
LSPINVLYFDSSNNVIYGKIPNMVVK

SEQ ID NO: 67729 - protein, 41 aa, Artificial Sequence; identical to SEQ ID NO: 21680
  Cyclic GFR-binding peptide
  MOD_RES (5)..(6)..(38)..(40): Xaa is C or S

SEQ ID NO: 67730 - protein, 41 aa, Artificial Sequence; identical to SEQ ID NO: 21682
  Cyclic GFR-binding peptide
  MOD_RES (6)..(7)..(39)..(41): Xaa is C or S

SEQ ID NO: 67731 - protein, 22 aa, Artificial Sequence
  Cyclic GFR-binding peptide
LSPINILYFDKGVVTYYGKIPG

SEQ ID NO: 67732 - protein, 26 aa, Artificial Sequence
  Cyclic GFR-binding peptide
PTRLSPINILYFDSANNVVYGKIPDM

SEQ ID NO: 67733 - protein, 35 aa, Artificial Sequence; identical to SEQ ID NO: 21684
  Cyclic GFR-binding peptide
  MOD_RES (2)..(3)..(34): Xaa is C or S

SEQ ID NO: 67734 - protein, 35 aa, Artificial Sequence
  Cyclic GFR-binding peptide
  MOD_RES (6)..(7): Xaa is C or S
RVPSTXXAPVKTSPINMLYFDNGRVLLYGKIPMIV

SEQ ID NO: 67735 - protein, 33 aa, Artificial Sequence
  Cyclic GFR-binding peptide
  MOD_RES (30)..(32): Xaa is C or S
KLSPINVLYFDDMGVPTYGKIPEGMSVAEXGXR

SEQ ID NO: 67736 - protein, 34 aa, Artificial Sequence; identical to SEQ ID NO: 21685
  Cyclic GFR-binding peptide
  MOD_RES (1)..(2)..(34): Xaa is C or S

SEQ ID NO: 67737 - protein, 24 aa, Artificial Sequence
  Cyclic GFR-binding peptide
SPINMLYFDEYDKVVYGKIPEMVV

SEQ ID NO: 67738 - protein, 33 aa, Artificial Sequence
  Cyclic GFR-binding peptide
  MOD_RES (6)..(7): Xaa is C or S
AVPKAXXAPTKLSPINVLYFDSSNNVIYGKIPN

SEQ ID NO: 67739 - protein, 35 aa, Artificial Sequence; identical to SEQ ID NO: 21686
  Cyclic GFR-binding peptide
  MOD_RES (3)..(4): Xaa is C or S

SEQ ID NO: 67740 - protein, 40 aa, Artificial Sequence; identical to SEQ ID NO: 21689
  Cyclic GFR-binding peptide
  MOD_RES (5)..(6)..(38)..(40): Xaa is C or S

SEQ ID NO: 67741 - protein, 33 aa, Artificial Sequence; identical to SEQ ID NO: 21690
  Cyclic GFR-binding peptide
  MOD_RES (1)..(1): Xaa is C or S

SEQ ID NO: 67742 - protein, 29 aa, Artificial Sequence
  Cyclic GFR-binding peptide
VPTKLSPINILYFDKGVVTYYGKIPGMAV

SEQ ID NO: 67743 - protein, 33 aa, Artificial Sequence; identical to SEQ ID NO: 21697
  Cyclic GFR-binding peptide
  MOD_RES (1)..(33): Xaa is C or S

SEQ ID NO: 67744 - protein, 32 aa, Artificial Sequence
  Cyclic GFR-binding peptide
  MOD_RES (2)..(3): Xaa is C or S
AXXVPTELSPINMLYFDENEKVVYGKIPDMVV

SEQ ID NO: 67745 - protein, 34 aa, Artificial Sequence
  Cyclic GFR-binding peptide
  MOD_RES (5)..(6): Xaa is C or S
APASXXVPARLSPINILYFDAANNVVYGKIPDMV

SEQ ID NO: 67746 - protein, 33 aa, Artificial Sequence
  Cyclic GFR-binding peptide
  MOD_RES (6)..(6): Xaa is C or S
VTKPTXAPTKLSPINVLYFDDSSNVIYGKIPNM

SEQ ID NO: 67747 - protein, 27 aa, Artificial Sequence
  Cyclic GFR-binding peptide
TQLSPINVLYFDDSSNVIYGKIPNMVV

SEQ ID NO: 67748 - protein, 34 aa, Artificial Sequence
  Cyclic GFR-binding peptide
  MOD_RES (31)..(33): Xaa is C or S
PTKLSPINVLYFDSSNNVIYGKIPNMVVKAXGXH

SEQ ID NO: 67749 - protein, 34 aa, Artificial Sequence
  Cyclic GFR-binding peptide
  MOD_RES (6)..(6): Xaa is C or S
VTKPTXAPTKLSPINVLYFDDSSNVIYGKIPNMV

SEQ ID NO: 67750 - protein, 38 aa, Artificial Sequence; identical to SEQ ID NO: 21711
  Cyclic GFR-binding peptide
  MOD_RES (2)..(3)..(35)..(37): Xaa is C or S

SEQ ID NO: 67751 - protein, 32 aa, Artificial Sequence
  Cyclic GFR-binding peptide
  MOD_RES (31)..(31): Xaa is C or S
PTELSPINMLYFDEYDKVVYGKIPEMVVEGXG

SEQ ID NO: 67752 - protein, 31 aa, Artificial Sequence; identical to SEQ ID NO: 21714
  Cyclic GFR-binding peptide
  MOD_RES (31)..(31): Xaa is C or S

SEQ ID NO: 67753 - protein, 20 aa, Artificial Sequence
  Cyclic GFR-binding peptide
SPINMLYFDEYDKVVYGKIP

SEQ ID NO: 67754 - protein, 30 aa, Artificial Sequence
  Cyclic GFR-binding peptide
  MOD_RES (1)..(2): Xaa is C or S
XXAPTQLSPINVLYFDDSSNVIYGKIPNMV

SEQ ID NO: 67755 - protein, 39 aa, Artificial Sequence; identical to SEQ ID NO: 21717
  Cyclic GFR-binding peptide
  MOD_RES (6)..(7)..(39): Xaa is C or S

SEQ ID NO: 67756 - protein, 32 aa, Artificial Sequence
  Cyclic GFR-binding peptide
  MOD_RES (5)..(6): Xaa is C or S
IPKAXXVPTELSPINMLYFDEYDKVVYGKIPE

SEQ ID NO: 67757 - protein, 32 aa, Artificial Sequence
  Cyclic GFR-binding peptide
  MOD_RES (30)..(32): Xaa is C or S
ARLSPINILYFDAANNVVYGKIPDMVVEAXGX

SEQ ID NO: 67758 - protein, 25 aa, Artificial Sequence
  Cyclic GFR-binding peptide
SPINMLYFDNGRVLLYGKIPMIVEE

SEQ ID NO: 67759 - protein, 41 aa, Artificial Sequence; identical to SEQ ID NO: 21720
  Cyclic GFR-binding peptide
  MOD_RES (5)..(6)..(38)..(40): Xaa is C or S

SEQ ID NO: 67760 - protein, 27 aa, Artificial Sequence
  Cyclic GFR-binding peptide
  MOD_RES (27)..(27): Xaa is C or S
SPINILYFDKGVVTYYGKIPGMAVSEX

SEQ ID NO: 67761 - protein, 37 aa, Artificial Sequence; identical to SEQ ID NO: 21724
  Cyclic GFR-binding peptide
  MOD_RES (4)..(5)..(37): Xaa is C or S

SEQ ID NO: 67762 - protein, 41 aa, Artificial Sequence; identical to SEQ ID NO: 21725
  Cyclic GFR-binding peptide
  MOD_RES (5)..(6)..(38)..(40): Xaa is C or S

SEQ ID NO: 67763 - protein, 35 aa, Artificial Sequence
  Cyclic GFR-binding peptide
  MOD_RES (6)..(7): Xaa is C or S
AVPKAXXAPTKLSPINVLYFDSSNNVIYGKIPNMV

SEQ ID NO: 67764 - protein, 27 aa, Artificial Sequence
  Cyclic GFR-binding peptide
RLSPINILYFDSANNVVYGKIPDMVVE

SEQ ID NO: 67765 - protein, 33 aa, Artificial Sequence; identical to SEQ ID NO: 21729
  Cyclic GFR-binding peptide
  MOD_RES (1)..(32): Xaa is C or S

SEQ ID NO: 67766 - protein, 32 aa, Artificial Sequence
  Cyclic GFR-binding peptide
  MOD_RES (7)..(7): Xaa is C or S
HVTKPTXAPTKLSPINVLYFDDSSNVIYGKIP

SEQ ID NO: 67767 - protein, 28 aa, Artificial Sequence
  Cyclic GFR-binding peptide
VPARLSPINILYFDAANNVVYGKIPDMV

SEQ ID NO: 67768 - protein, 27 aa, Artificial Sequence
  Cyclic GFR-binding peptide
TKLSPINVLYFDDMGVPTYGKIPEGMS

SEQ ID NO: 67769 - protein, 31 aa, Artificial Sequence
  Cyclic GFR-binding peptide
  MOD_RES (2)..(3): Xaa is C or S
AXXAPTKLSPINVLYFDSSNNVIYGKIPNMV

SEQ ID NO: 67770 - protein, 36 aa, Artificial Sequence; identical to SEQ ID NO: 21735
  Cyclic GFR-binding peptide
  MOD_RES (4)..(36): Xaa is C or S

SEQ ID NO: 67771 - protein, 27 aa, Artificial Sequence
  Cyclic GFR-binding peptide
PVKTSPINMLYFDNGRVLLYGKIPMIV

SEQ ID NO: 67772 - protein, 30 aa, Artificial Sequence
  Cyclic GFR-binding peptide
  MOD_RES (1)..(1): Xaa is C or S
XVPTKLSPINVLYFDDMGVPTYGKIPEGMS

SEQ ID NO: 67773 - protein, 37 aa, Artificial Sequence
  Cyclic GFR-binding peptide
  MOD_RES (6)..(7): Xaa is C or S
KVGKAXXVPTKLSPINVLYFDDMGVPTYGKIPEGMSV

SEQ ID NO: 67774 - protein, 31 aa, Artificial Sequence
  Cyclic GFR-binding peptide
  MOD_RES (30)..(30): Xaa is C or S
KLSPINVLYFDDMGVPTYGKIPEGMSVAEXG

SEQ ID NO: 67775 - protein, 31 aa, Artificial Sequence
  Cyclic GFR-binding peptide
  MOD_RES (29)..(31): Xaa is C or S
ELSPINMLYFDEYDKVVYGKIPEMVVEGXGX

SEQ ID NO: 67776 - protein, 26 aa, Artificial Sequence
  Cyclic GFR-binding peptide
LSPINILYFDKGVVTYYGKIPGMAVS

SEQ ID NO: 67777 - protein, 34 aa, Artificial Sequence
  Cyclic GFR-binding peptide
  MOD_RES (5)..(6): Xaa is C or S
VPSTXXAPVKTSPINMLYFDNGRVLLYGKIPMIV

SEQ ID NO: 67778 - protein, 26 aa, Artificial Sequence
  Cyclic GFR-binding peptide
KLSPINILYFDKGVVTYYGKIPGMAV

SEQ ID NO: 67779 - protein, 31 aa, Artificial Sequence
  Cyclic GFR-binding peptide
  MOD_RES (1)..(2): Xaa is C or S
XXAPTKLSPINVLYFDSSNNVIYGKIPNMVV

SEQ ID NO: 67780 - protein, 30 aa, Artificial Sequence
  Cyclic GFR-binding peptide
  MOD_RES (29)..(29): Xaa is C or S
KLSPINILYFDKGVVTYYGKIPGMAVSEXG

SEQ ID NO: 67781 - protein, 42 aa, Artificial Sequence; identical to SEQ ID NO: 21749
  Cyclic GFR-binding peptide
  MOD_RES (6)..(7)..(39)..(41): Xaa is C or S

SEQ ID NO: 67782 - protein, 22 aa, Artificial Sequence
  Cyclic GFR-binding peptide
LSPINVLYFDDMGVPTYGKIPE

SEQ ID NO: 67783 - protein, 37 aa, Artificial Sequence; identical to SEQ ID NO: 21753
  Cyclic GFR-binding peptide
  MOD_RES (6)..(7): Xaa is C or S

SEQ ID NO: 67784 - protein, 31 aa, Artificial Sequence
  Cyclic GFR-binding peptide
  MOD_RES (3)..(4): Xaa is C or S
KAXXVPTELSPINMLYFDENEKVVYGKIPDM

SEQ ID NO: 67785 - protein, 30 aa, Artificial Sequence
  Cyclic GFR-binding peptide
  MOD_RES (3)..(4): Xaa is C or S
STXXAPVKTSPINMLYFDNGRVLLYGKIPM

SEQ ID NO: 67786 - protein, 29 aa, Artificial Sequence
  Cyclic GFR-binding peptide
  MOD_RES (1)..(2): Xaa is C or S
XXAPTQLSPINVLYFDDSSNVIYGKIPNM

SEQ ID NO: 67787 - protein, 37 aa, Artificial Sequence; identical to SEQ ID NO: 21755
  Cyclic GFR-binding peptide
  MOD_RES (1)..(34)..(36): Xaa is C or S

SEQ ID NO: 67788 - protein, 33 aa, Artificial Sequence
  Cyclic GFR-binding peptide
  MOD_RES (4)..(5): Xaa is C or S
PKAXXVPTELSPINMLYFDEYDKVVYGKIPEMV

SEQ ID NO: 67789 - protein, 31 aa, Artificial Sequence
  Cyclic GFR-binding peptide
  MOD_RES (31)..(31): Xaa is C or S
PTKLSPINVLYFDDSSNVIYGKIPNMVVRSX

SEQ ID NO: 67790 - protein, 21 aa, Artificial Sequence
  Cyclic GFR-binding peptide
LSPINMLYFDEYDKVVYGKIP

SEQ ID NO: 67791 - protein, 28 aa, Artificial Sequence
  Cyclic GFR-binding peptide
  MOD_RES (1)..(1): Xaa is C or S
XVPTKLSPINVLYFDDMGVPTYGKIPEG

SEQ ID NO: 67792 - protein, 24 aa, Artificial Sequence
  Cyclic GFR-binding peptide
LSPINVLYFDDMGVPTYGKIPEGM

SEQ ID NO: 67793 - protein, 24 aa, Artificial Sequence
  Cyclic GFR-binding peptide
PTKLSPINVLYFDDSSNVIYGKIP

SEQ ID NO: 67794 - protein, 30 aa, Artificial Sequence
  Cyclic GFR-binding peptide
  MOD_RES (1)..(2): Xaa is C or S
XXVPARLSPINILYFDAANNVVYGKIPDMV

SEQ ID NO: 67795 - protein, 24 aa, Artificial Sequence
  Cyclic GFR-binding peptide
PTKLSPINVLYFDDMGVPTYGKIP

SEQ ID NO: 67796 - protein, 24 aa, Artificial Sequence
  Cyclic GFR-binding peptide
TQLSPINVLYFDDSSNVIYGKIPN

SEQ ID NO: 67797 - protein, 39 aa, Artificial Sequence; identical to SEQ ID NO: 21766
  Cyclic GFR-binding peptide
  MOD_RES (3)..(4)..(36)..(38): Xaa is C or S

SEQ ID NO: 67798 - protein, 37 aa, Artificial Sequence; identical to SEQ ID NO: 21767
  Cyclic GFR-binding peptide
  MOD_RES (2)..(3)..(34)..(36): Xaa is C or S

SEQ ID NO: 67799 - protein, 34 aa, Artificial Sequence
  Cyclic GFR-binding peptide
  MOD_RES (5)..(6): Xaa is C or S
VPKPXXAPTKLSPINVLYFDDSSNVIYGKIPNMV

SEQ ID NO: 67800 - protein, 34 aa, Artificial Sequence
  Cyclic GFR-binding peptide
  MOD_RES (31)..(33): Xaa is C or S
PARLSPINILYFDAANNVVYGKIPDMVVEAXGXR

SEQ ID NO: 67801 - protein, 27 aa, Artificial Sequence
  Cyclic GFR-binding peptide
ELSPINMLYFDENEKVVYGKIPDMVVE

SEQ ID NO: 67802 - protein, 26 aa, Artificial Sequence
  Cyclic GFR-binding peptide
LSPINILYFDSANNVVYGKIPDMVVE

SEQ ID NO: 67803 - protein, 26 aa, Artificial Sequence
  Cyclic GFR-binding peptide
PTQLSPINVLYFDDSSNVIYGKIPNM

SEQ ID NO: 67804 - protein, 38 aa, Artificial Sequence; identical to SEQ ID NO: 21781
  Cyclic GFR-binding peptide
  MOD_RES (5)..(6)..(38): Xaa is C or S

SEQ ID NO: 67805 - protein, 29 aa, Artificial Sequence
  Cyclic GFR-binding peptide
PTQLSPINVLYFDDSSNVIYGKIPNMVVR

SEQ ID NO: 67806 - protein, 26 aa, Artificial Sequence
  Cyclic GFR-binding peptide
LSPINVLYFDDSSNVIYGKIPNMVVR

SEQ ID NO: 67807 - protein, 25 aa, Artificial Sequence
  Cyclic GFR-binding peptide
KLSPINVLYFDDSSNVIYGKIPNMV

SEQ ID NO: 67808 - protein, 25 aa, Artificial Sequence
  Cyclic GFR-binding peptide
KLSPINVLYFDSSNNVIYGKIPNMV

SEQ ID NO: 67809 - protein, 32 aa, Artificial Sequence
  Cyclic GFR-binding peptide
  MOD_RES (30)..(32): Xaa is C or S
TKLSPINILYFDKGVVTYYGKIPGMAVSEXGX

SEQ ID NO: 67810 - protein, 38 aa, Artificial Sequence; identical to SEQ ID NO: 21788
  Cyclic GFR-binding peptide
  MOD_RES (2)..(3)..(35)..(37): Xaa is C or S

SEQ ID NO: 67811 - protein, 32 aa, Artificial Sequence
  Cyclic GFR-binding peptide
  MOD_RES (2)..(3): Xaa is C or S
SXXVPARLSPINILYFDAANNVVYGKIPDMVV

SEQ ID NO: 67812 - protein, 25 aa, Artificial Sequence
  Cyclic GFR-binding peptide
SPINILYFDSANNVVYGKIPDMVVE

SEQ ID NO: 67813 - protein, 37 aa, Artificial Sequence; identical to SEQ ID NO: 21794
  Cyclic GFR-binding peptide
  MOD_RES (5)..(6): Xaa is C or S

SEQ ID NO: 67814 - protein, 35 aa, Artificial Sequence; identical to SEQ ID NO: 21796
  Cyclic GFR-binding peptide
  MOD_RES (1)..(34): Xaa is C or S

SEQ ID NO: 67815 - protein, 43 aa, Artificial Sequence; identical to SEQ ID NO: 21798
  Cyclic GFR-binding peptide
  MOD_RES (6)..(7)..(40)..(42): Xaa is C or S

SEQ ID NO: 67816 - protein, 23 aa, Artificial Sequence
  Cyclic GFR-binding peptide
LSPINVLYFDSSNNVIYGKIPNM

SEQ ID NO: 67817 - protein, 36 aa, Artificial Sequence; identical to SEQ ID NO: 21799
  Cyclic GFR-binding peptide
  MOD_RES (2)..(3)..(36): Xaa is C or S

SEQ ID NO: 67818 - protein, 34 aa, Artificial Sequence
  Cyclic GFR-binding peptide
  MOD_RES (7)..(7): Xaa is C or S
HVTKPTXAPTKLSPINVLYFDDSSNVIYGKIPNM

SEQ ID NO: 67819 - protein, 33 aa, Artificial Sequence; identical to SEQ ID NO: 21802
  Cyclic GFR-binding peptide
  MOD_RES (2)..(3): Xaa is C or S

SEQ ID NO: 67820 - protein, 20 aa, Artificial Sequence
  Cyclic GFR-binding peptide
SPINVLYFDDSSNVIYGKIP

SEQ ID NO: 67821 - protein, 26 aa, Artificial Sequence
  Cyclic GFR-binding peptide
TKLSPINILYFDKGVVTYYGKIPGMA

SEQ ID NO: 67822 - protein, 34 aa, Artificial Sequence; identical to SEQ ID NO: 21803
  Cyclic GFR-binding peptide
  MOD_RES (1)..(33): Xaa is C or S

SEQ ID NO: 67823 - protein, 26 aa, Artificial Sequence
  Cyclic GFR-binding peptide
TQLSPINVLYFDDSSNVIYGKIPNMV

SEQ ID NO: 67824 - protein, 31 aa, Artificial Sequence
  Cyclic GFR-binding peptide
  MOD_RES (2)..(3): Xaa is C or S
AXXVPTELSPINMLYFDENEKVVYGKIPDMV

SEQ ID NO: 67825 - protein, 28 aa, Artificial Sequence
  Cyclic GFR-binding peptide
APTQLSPINVLYFDDSSNVIYGKIPNMV

SEQ ID NO: 67826 - protein, 36 aa, Artificial Sequence; identical to SEQ ID NO: 21804
  Cyclic GFR-binding peptide
  MOD_RES (3)..(4)..(36): Xaa is C or S

SEQ ID NO: 67827 - protein, 29 aa, Artificial Sequence
  Cyclic GFR-binding peptide
  MOD_RES (29)..(29): Xaa is C or S
ELSPINMLYFDEYDKVVYGKIPEMVVEGX

SEQ ID NO: 67828 - protein, 40 aa, Artificial Sequence; identical to SEQ ID NO: 21807
  Cyclic GFR-binding peptide
  MOD_RES (4)..(5)..(37)..(39): Xaa is C or S

SEQ ID NO: 67829 - protein, 28 aa, Artificial Sequence
  Cyclic GFR-binding peptide
  MOD_RES (1)..(1): Xaa is C or S
XVPTELSPINMLYFDEYDKVVYGKIPEM

SEQ ID NO: 67830 - protein, 32 aa, Artificial Sequence
  Cyclic GFR-binding peptide
  MOD_RES (6)..(7): Xaa is C or S
AVPKAXXAPTKLSPINVLYFDSSNNVIYGKIP

SEQ ID NO: 67831 - protein, 38 aa, Artificial Sequence; identical to SEQ ID NO: 21810
  Cyclic GFR-binding peptide
  MOD_RES (3)..(4)..(36)..(38): Xaa is C or S

SEQ ID NO: 67832 - protein, 34 aa, Artificial Sequence
  Cyclic GFR-binding peptide
  MOD_RES (6)..(7): Xaa is C or S
AVPKAXXAPTKLSPINVLYFDSSNNVIYGKIPNM

SEQ ID NO: 67833 - protein, 40 aa, Artificial Sequence; identical to SEQ ID NO: 21813
  Cyclic GFR-binding peptide
  MOD_RES (5)..(6)..(39): Xaa is C or S

SEQ ID NO: 67834 - protein, 33 aa, Artificial Sequence
  Cyclic GFR-binding peptide
  MOD_RES (3)..(4): Xaa is C or S
KAXXVPTELSPINMLYFDENEKVVYGKIPDMVV

SEQ ID NO: 67835 - protein, 30 aa, Artificial Sequence; identical to SEQ ID NO: 909
  Cyclic GFR-binding peptide

SEQ ID NO: 67836 - protein, 28 aa, Artificial Sequence
  Cyclic GFR-binding peptide
  MOD_RES (28)..(28): Xaa is C or S
LSPINMLYFDENEKVVYGKIPDMVVEGX

SEQ ID NO: 67837 - protein, 26 aa, Artificial Sequence
  Cyclic GFR-binding peptide
  MOD_RES (1)..(1): Xaa is C or S
XVPTRLSPINILYFDSANNVVYGKIP

SEQ ID NO: 67838 - protein, 25 aa, Artificial Sequence
  Cyclic GFR-binding peptide
TKLSPINVLYFDDMGVPTYGKIPEG

SEQ ID NO: 67839 - protein, 31 aa, Artificial Sequence
  Cyclic GFR-binding peptide
  MOD_RES (1)..(2): Xaa is C or S
XXVPARLSPINILYFDAANNVVYGKIPDMVV

SEQ ID NO: 67840 - protein, 33 aa, Artificial Sequence; identical to SEQ ID NO: 21821
  Cyclic GFR-binding peptide
  MOD_RES (2)..(3): Xaa is C or S

SEQ ID NO: 67841 - protein, 29 aa, Artificial Sequence
  Cyclic GFR-binding peptide
  MOD_RES (1)..(1): Xaa is C or S
XAPTKLSPINVLYFDDSSNVIYGKIPNMV

SEQ ID NO: 67842 - protein, 28 aa, Artificial Sequence
  Cyclic GFR-binding peptide
VKTSPINMLYFDNGRVLLYGKIPMIVEE

SEQ ID NO: 67843 - protein, 38 aa, Artificial Sequence; identical to SEQ ID NO: 21830
  Cyclic GFR-binding peptide
  MOD_RES (6)..(7): Xaa is C or S

SEQ ID NO: 67844 - protein, 29 aa, Artificial Sequence
  Cyclic GFR-binding peptide
  MOD_RES (3)..(4): Xaa is C or S
KAXXVPTELSPINMLYFDEYDKVVYGKIP

SEQ ID NO: 67845 - protein, 34 aa, Artificial Sequence
  Cyclic GFR-binding peptide
  MOD_RES (2)..(3): Xaa is C or S
AXXVPTKLSPINVLYFDDMGVPTYGKIPEGMSVA

SEQ ID NO: 67846 - protein, 30 aa, Artificial Sequence
  Cyclic GFR-binding peptide
  MOD_RES (4)..(5): Xaa is C or S
GKAXXVPTKLSPINVLYFDDMGVPTYGKIP

SEQ ID NO: 67847 - protein, 38 aa, Artificial Sequence; identical to SEQ ID NO: 21834
  Cyclic GFR-binding peptide
  MOD_RES (4)..(5)..(37): Xaa is C or S

SEQ ID NO: 67848 - protein, 27 aa, Artificial Sequence
  Cyclic GFR-binding peptide
  MOD_RES (1)..(2): Xaa is C or S
XXAPTQLSPINVLYFDDSSNVIYGKIP

SEQ ID NO: 67849 - protein, 27 aa, Artificial Sequence
  Cyclic GFR-binding peptide
  MOD_RES (2)..(2): Xaa is C or S
TXAPTKLSPINVLYFDDSSNVIYGKIP

SEQ ID NO: 67850 - protein, 30 aa, Artificial Sequence
  Cyclic GFR-binding peptide
PTELSPINMLYFDENEKVVYGKIPDMVVEG

SEQ ID NO: 67851 - protein, 28 aa, Artificial Sequence
  Cyclic GFR-binding peptide
PTELSPINMLYFDENEKVVYGKIPDMVV

SEQ ID NO: 67852 - protein, 28 aa, Artificial Sequence
  Cyclic GFR-binding peptide
  MOD_RES (28)..(28): Xaa is C or S
LSPINMLYFDEYDKVVYGKIPEMVVEGX

SEQ ID NO: 67853 - protein, 28 aa, Artificial Sequence
  Cyclic GFR-binding peptide
TQLSPINVLYFDDSSNVIYGKIPNMVVR

SEQ ID NO: 67854 - protein, 38 aa, Artificial Sequence; identical to SEQ ID NO: 21842
  Cyclic GFR-binding peptide
  MOD_RES (3)..(4)..(35)..(37): Xaa is C or S

SEQ ID NO: 67855 - protein, 27 aa, Artificial Sequence
  Cyclic GFR-binding peptide
KLSPINVLYFDSSNNVIYGKIPNMVVK

SEQ ID NO: 67856 - protein, 32 aa, Artificial Sequence
  Cyclic GFR-binding peptide
  MOD_RES (2)..(3): Xaa is C or S
AXXVPTKLSPINILYFDKGVVTYYGKIPGMAV

SEQ ID NO: 67857 - protein, 27 aa, Artificial Sequence
  Cyclic GFR-binding peptide
TRLSPINILYFDSANNVVYGKIPDMVV

SEQ ID NO: 67858 - protein, 40 aa, Artificial Sequence; identical to SEQ ID NO: 21846
  Cyclic GFR-binding peptide
  MOD_RES (5)..(6)..(38)..(40): Xaa is C or S

SEQ ID NO: 67859 - protein, 25 aa, Artificial Sequence
  Cyclic GFR-binding peptide
KTSPINMLYFDNGRVLLYGKIPMIV

SEQ ID NO: 67860 - protein, 28 aa, Artificial Sequence
  Cyclic GFR-binding peptide
KLSPINVLYFDDMGVPTYGKIPEGMSVA

SEQ ID NO: 67861 - protein, 28 aa, Artificial Sequence
  Cyclic GFR-binding peptide
PTKLSPINVLYFDDMGVPTYGKIPEGMS

SEQ ID NO: 67862 - protein, 28 aa, Artificial Sequence
  Cyclic GFR-binding peptide
  MOD_RES (28)..(28): Xaa is C or S
LSPINVLYFDDSSNVIYGKIPNMVVRSX

SEQ ID NO: 67863 - protein, 37 aa, Artificial Sequence; identical to SEQ ID NO: 21854
  Cyclic GFR-binding peptide
  MOD_RES (1)..(2)..(34)..(36): Xaa is C or S

SEQ ID NO: 67864 - protein, 37 aa, Artificial Sequence; identical to SEQ ID NO: 21855
  Cyclic GFR-binding peptide
  MOD_RES (3)..(4)..(36): Xaa is C or S

SEQ ID NO: 67865 - protein, 35 aa, Artificial Sequence
  Cyclic GFR-binding peptide
  MOD_RES (32)..(34): Xaa is C or S
PTKLSPINVLYFDDMGVPTYGKIPEGMSVAEXGXR

SEQ ID NO: 67866 - protein, 38 aa, Artificial Sequence; identical to SEQ ID NO: 21857
  Cyclic GFR-binding peptide
  MOD_RES (3)..(4)..(36)..(38): Xaa is C or S

SEQ ID NO: 67867 - protein, 36 aa, Artificial Sequence; identical to SEQ ID NO: 21858
  Cyclic GFR-binding peptide
  MOD_RES (4)..(5): Xaa is C or S

SEQ ID NO: 67868 - protein, 28 aa, Artificial Sequence
  Cyclic GFR-binding peptide
  MOD_RES (2)..(3): Xaa is C or S
SXXVPARLSPINILYFDAANNVVYGKIP

SEQ ID NO: 67869 - protein, 35 aa, Artificial Sequence
  Cyclic GFR-binding peptide
  MOD_RES (5)..(6): Xaa is C or S
VPKAXXAPTKLSPINVLYFDSSNNVIYGKIPNMVV

SEQ ID NO: 67870 - protein, 35 aa, Artificial Sequence; identical to SEQ ID NO: 21860
  Cyclic GFR-binding peptide
  MOD_RES (1)..(2)..(34): Xaa is C or S

SEQ ID NO: 67871 - protein, 25 aa, Artificial Sequence
  Cyclic GFR-binding peptide
TELSPINMLYFDEYDKVVYGKIPEM

SEQ ID NO: 67872 - protein, 40 aa, Artificial Sequence; identical to SEQ ID NO: 21867
  Cyclic GFR-binding peptide
  MOD_RES (5)..(6)..(38)..(40): Xaa is C or S

SEQ ID NO: 67873 - protein, 32 aa, Artificial Sequence
  Cyclic GFR-binding peptide
  MOD_RES (2)..(3): Xaa is C or S
AXXVPTELSPINMLYFDEYDKVVYGKIPEMVV

SEQ ID NO: 67874 - protein, 33 aa, Artificial Sequence
  Cyclic GFR-binding peptide
  MOD_RES (2)..(3): Xaa is C or S
AXXVPTKLSPINVLYFDDMGVPTYGKIPEGMSV

SEQ ID NO: 67875 - protein, 36 aa, Artificial Sequence
  Cyclic GFR-binding peptide
  MOD_RES (6)..(7): Xaa is C or S
KVGKAXXVPTKLSPINVLYFDDMGVPTYGKIPEGMS

SEQ ID NO: 67876 - protein, 24 aa, Artificial Sequence
  Cyclic GFR-binding peptide
PTKLSPINILYFDKGVVTYYGKIP

SEQ ID NO: 67877 - protein, 27 aa, Artificial Sequence
  Cyclic GFR-binding peptide
  MOD_RES (1)..(1): Xaa is C or S
XAPTQLSPINVLYFDDSSNVIYGKIPN

SEQ ID NO: 67878 - protein, 37 aa, Artificial Sequence; identical to SEQ ID NO: 21872
  Cyclic GFR-binding peptide
  MOD_RES (6)..(7): Xaa is C or S

SEQ ID NO: 67879 - protein, 33 aa, Artificial Sequence
  Cyclic GFR-binding peptide
  MOD_RES (3)..(4): Xaa is C or S
KAXXVPTELSPINMLYFDEYDKVVYGKIPEMVV

SEQ ID NO: 67880 - protein, 25 aa, Artificial Sequence
  Cyclic GFR-binding peptide
VKTSPINMLYFDNGRVLLYGKIPMI

SEQ ID NO: 67881 - protein, 36 aa, Artificial Sequence; identical to SEQ ID NO: 21876
  Cyclic GFR-binding peptide
  MOD_RES (1)..(2)..(34)..(36): Xaa is C or S

SEQ ID NO: 67882 - protein, 27 aa, Artificial Sequence
  Cyclic GFR-binding peptide
  MOD_RES (27)..(27): Xaa is C or S
SPINMLYFDENEKVVYGKIPDMVVEGX

SEQ ID NO: 67883 - protein, 26 aa, Artificial Sequence
  Cyclic GFR-binding peptide
SPINVLYFDSSNNVIYGKIPNMVVKA

SEQ ID NO: 67884 - protein, 21 aa, Artificial Sequence
  Cyclic GFR-binding peptide
SPINVLYFDSSNNVIYGKIPN

SEQ ID NO: 67885 - protein, 31 aa, Artificial Sequence
  Cyclic GFR-binding peptide
  MOD_RES (3)..(3): Xaa is C or S
PTXAPTKLSPINVLYFDDSSNVIYGKIPNMV

SEQ ID NO: 67886 - protein, 40 aa, Artificial Sequence; identical to SEQ ID NO: 21879
  Cyclic GFR-binding peptide
  MOD_RES (4)..(5)..(38)..(40): Xaa is C or S

SEQ ID NO: 67887 - protein, 26 aa, Artificial Sequence
  Cyclic GFR-binding peptide
LSPINMLYFDEYDKVVYGKIPEMVVE

SEQ ID NO: 67888 - protein, 30 aa, Artificial Sequence
  Cyclic GFR-binding peptide
  MOD_RES (4)..(5): Xaa is C or S
PKPXXAPTKLSPINVLYFDDSSNVIYGKIP

SEQ ID NO: 67889 - protein, 36 aa, Artificial Sequence; identical to SEQ ID NO: 21885
  Cyclic GFR-binding peptide
  MOD_RES (2)..(34)..(36): Xaa is C or S

SEQ ID NO: 67890 - protein, 27 aa, Artificial Sequence
  Cyclic GFR-binding peptide
PTKLSPINVLYFDDMGVPTYGKIPEGM

SEQ ID NO: 67891 - protein, 36 aa, Artificial Sequence; identical to SEQ ID NO: 21887
  Cyclic GFR-binding peptide
  MOD_RES (1)..(33)..(35): Xaa is C or S

SEQ ID NO: 67892 - protein, 37 aa, Artificial Sequence; identical to SEQ ID NO: 21890
  Cyclic GFR-binding peptide
  MOD_RES (3)..(35)..(37): Xaa is C or S

SEQ ID NO: 67893 - protein, 39 aa, Artificial Sequence; identical to SEQ ID NO: 21894
  Cyclic GFR-binding peptide
  MOD_RES (5)..(6)..(39): Xaa is C or S

SEQ ID NO: 67894 - protein, 22 aa, Artificial Sequence
  Cyclic GFR-binding peptide
KLSPINILYFDKGVVTYYGKIP

SEQ ID NO: 67895 - protein, 28 aa, Artificial Sequence
  Cyclic GFR-binding peptide
ARLSPINILYFDAANNVVYGKIPDMVVE

SEQ ID NO: 67896 - protein, 33 aa, Artificial Sequence
  Cyclic GFR-binding peptide
  MOD_RES (31)..(33): Xaa is C or S
PTELSPINMLYFDENEKVVYGKIPDMVVEGXGX

SEQ ID NO: 67897 - protein, 22 aa, Artificial Sequence
  Cyclic GFR-binding peptide
TSPINMLYFDNGRVLLYGKIPM

SEQ ID NO: 67898 - protein, 34 aa, Artificial Sequence
  Cyclic GFR-binding peptide
  MOD_RES (6)..(7): Xaa is C or S
KIPKAXXVPTELSPINMLYFDENEKVVYGKIPDM

SEQ ID NO: 67899 - protein, 27 aa, Artificial Sequence
  Cyclic GFR-binding peptide
SPINVLYFDDMGVPTYGKIPEGMSVAE

SEQ ID NO: 67900 - protein, 32 aa, Artificial Sequence
  Cyclic GFR-binding peptide
  MOD_RES (6)..(7): Xaa is C or S
RVPSTXXAPVKTSPINMLYFDNGRVLLYGKIP

SEQ ID NO: 67901 - protein, 30 aa, Artificial Sequence
  Cyclic GFR-binding peptide
  MOD_RES (2)..(3): Xaa is C or S
AXXAPTKLSPINVLYFDSSNNVIYGKIPNM

SEQ ID NO: 67902 - protein, 28 aa, Artificial Sequence
  Cyclic GFR-binding peptide
PTKLSPINVLYFDSSNNVIYGKIPNMVV

SEQ ID NO: 67903 - protein, 38 aa, Artificial Sequence; identical to SEQ ID NO: 21905
  Cyclic GFR-binding peptide
  MOD_RES (5)..(6): Xaa is C or S

SEQ ID NO: 67904 - protein, 34 aa, Artificial Sequence
  Cyclic GFR-binding peptide
  MOD_RES (5)..(6): Xaa is C or S
VPKPXXAPTQLSPINVLYFDDSSNVIYGKIPNMV

SEQ ID NO: 67905 - protein, 23 aa, Artificial Sequence
  Cyclic GFR-binding peptide
TKLSPINVLYFDDMGVPTYGKIP

SEQ ID NO: 67906 - protein, 26 aa, Artificial Sequence
  Cyclic GFR-binding peptide
LSPINMLYFDENEKVVYGKIPDMVVE

SEQ ID NO: 67907 - protein, 30 aa, Artificial Sequence
  Cyclic GFR-binding peptide
  MOD_RES (1)..(1): Xaa is C or S
XAPVKTSPINMLYFDNGRVLLYGKIPMIVE

SEQ ID NO: 67908 - protein, 30 aa, Artificial Sequence
  Cyclic GFR-binding peptide
  MOD_RES (27)..(29): Xaa is C or S
SPINILYFDAANNVVYGKIPDMVVEAXGXR

SEQ ID NO: 67909 - protein, 32 aa, Artificial Sequence
  Cyclic GFR-binding peptide
  MOD_RES (4)..(5): Xaa is C or S
PSTXXAPVKTSPINMLYFDNGRVLLYGKIPMI

SEQ ID NO: 67910 - protein, 37 aa, Artificial Sequence; identical to SEQ ID NO: 21911
  Cyclic GFR-binding peptide
  MOD_RES (2)..(3)..(35)..(37): Xaa is C or S

SEQ ID NO: 67911 - protein, 41 aa, Artificial Sequence; identical to SEQ ID NO: 21912
  Cyclic GFR-binding peptide
  MOD_RES (5)..(6)..(38)..(40): Xaa is C or S

SEQ ID NO: 67912 - protein, 27 aa, Artificial Sequence
  Cyclic GFR-binding peptide
  MOD_RES (1)..(2): Xaa is C or S
XXAPVKTSPINMLYFDNGRVLLYGKIP

SEQ ID NO: 67913 - protein, 33 aa, Artificial Sequence
  Cyclic GFR-binding peptide
  MOD_RES (32)..(32): Xaa is C or S
PTKLSPINVLYFDDMGVPTYGKIPEGMSVAEXG

SEQ ID NO: 67914 - protein, 34 aa, Artificial Sequence; identical to SEQ ID NO: 21915
  Cyclic GFR-binding peptide
  MOD_RES (1)..(33): Xaa is C or S

SEQ ID NO: 67915 - protein, 35 aa, Artificial Sequence; identical to SEQ ID NO: 21916
  Cyclic GFR-binding peptide
  MOD_RES (4)..(5): Xaa is C or S

SEQ ID NO: 67916 - protein, 32 aa, Artificial Sequence
  Cyclic GFR-binding peptide
  MOD_RES (6)..(7): Xaa is C or S
HVPKPXXAPTKLSPINVLYFDDSSNVIYGKIP

SEQ ID NO: 67917 - protein, 39 aa, Artificial Sequence; identical to SEQ ID NO: 21920
  Cyclic GFR-binding peptide
  MOD_RES (5)..(6)..(38): Xaa is C or S

SEQ ID NO: 67918 - protein, 24 aa, Artificial Sequence
  Cyclic GFR-binding peptide
LSPINVLYFDSSNNVIYGKIPNMV

SEQ ID NO: 67919 - protein, 31 aa, Artificial Sequence
  Cyclic GFR-binding peptide
  MOD_RES (30)..(30): Xaa is C or S
PVKTSPINMLYFDNGRVLLYGKIPMIVEEXG

SEQ ID NO: 67920 - protein, 32 aa, Artificial Sequence; identical to SEQ ID NO: 21923
  Cyclic GFR-binding peptide
  MOD_RES (32)..(32): Xaa is C or S

SEQ ID NO: 67921 - protein, 38 aa, Artificial Sequence; identical to SEQ ID NO: 21922
  Cyclic GFR-binding peptide
  MOD_RES (4)..(5)..(37): Xaa is C or S

SEQ ID NO: 67922 - protein, 35 aa, Artificial Sequence; identical to SEQ ID NO: 21925
  Cyclic GFR-binding peptide
  MOD_RES (4)..(5): Xaa is C or S

SEQ ID NO: 67923 - protein, 34 aa, Artificial Sequence; identical to SEQ ID NO: 21927
  Cyclic GFR-binding peptide
  MOD_RES (3)..(4): Xaa is C or S

SEQ ID NO: 67924 - protein, 28 aa, Artificial Sequence
  Cyclic GFR-binding peptide
  MOD_RES (3)..(3): Xaa is C or S
PTXAPTKLSPINVLYFDDSSNVIYGKIP

SEQ ID NO: 67925 - protein, 41 aa, Artificial Sequence; identical to SEQ ID NO: 21928
  Cyclic GFR-binding peptide
  MOD_RES (6)..(7)..(39)..(41): Xaa is C or S

SEQ ID NO: 67926 - protein, 27 aa, Artificial Sequence
  Cyclic GFR-binding peptide
LSPINILYFDKGVVTYYGKIPGMAVSE

SEQ ID NO: 67927 - protein, 29 aa, Artificial Sequence
  Cyclic GFR-binding peptide
TKLSPINVLYFDDMGVPTYGKIPEGMSVA

SEQ ID NO: 67928 - protein, 38 aa, Artificial Sequence; identical to SEQ ID NO: 21933
  Cyclic GFR-binding peptide
  MOD_RES (4)..(5)..(37): Xaa is C or S

SEQ ID NO: 67929 - protein, 26 aa, Artificial Sequence
  Cyclic GFR-binding peptide
TKLSPINVLYFDDSSNVIYGKIPNMV

SEQ ID NO: 67930 - protein, 34 aa, Artificial Sequence; identical to SEQ ID NO: 21942
  Cyclic GFR-binding peptide
  MOD_RES (33)..(33): Xaa is C or S

SEQ ID NO: 67931 - protein, 28 aa, Artificial Sequence
  Cyclic GFR-binding peptide
  MOD_RES (2)..(3): Xaa is C or S
PXXAPTKLSPINVLYFDDSSNVIYGKIP

SEQ ID NO: 67932 - protein, 37 aa, Artificial Sequence; identical to SEQ ID NO: 21944
  Cyclic GFR-binding peptide
  MOD_RES (5)..(6): Xaa is C or S

SEQ ID NO: 67933 - protein, 27 aa, Artificial Sequence
  Cyclic GFR-binding peptide
ELSPINMLYFDEYDKVVYGKIPEMVVE

SEQ ID NO: 67934 - protein, 35 aa, Artificial Sequence; identical to SEQ ID NO: 21946
  Cyclic GFR-binding peptide
  MOD_RES (3)..(4): Xaa is C or S

SEQ ID NO: 67935 - protein, 33 aa, Artificial Sequence
  Cyclic GFR-binding peptide
  MOD_RES (5)..(6): Xaa is C or S
VPSTXXAPVKTSPINMLYFDNGRVLLYGKIPMI

SEQ ID NO: 67936 - protein, 31 aa, Artificial Sequence
  Cyclic GFR-binding peptide
  MOD_RES (4)..(4): Xaa is C or S
KPTXAPTKLSPINVLYFDDSSNVIYGKIPNM

SEQ ID NO: 67937 - protein, 23 aa, Artificial Sequence
  Cyclic GFR-binding peptide
RLSPINILYFDAANNVVYGKIPD

SEQ ID NO: 67938 - protein, 33 aa, Artificial Sequence
  Cyclic GFR-binding peptide
  MOD_RES (3)..(4): Xaa is C or S
KAXXAPTKLSPINVLYFDSSNNVIYGKIPNMVV

SEQ ID NO: 67939 - protein, 33 aa, Artificial Sequence
  Cyclic GFR-binding peptide
  MOD_RES (31)..(33): Xaa is C or S
PTELSPINMLYFDEYDKVVYGKIPEMVVEGXGX

SEQ ID NO: 67940 - protein, 32 aa, Artificial Sequence
  Cyclic GFR-binding peptide
  MOD_RES (5)..(6): Xaa is C or S
APASXXVPARLSPINILYFDAANNVVYGKIPD

SEQ ID NO: 67941 - protein, 30 aa, Artificial Sequence
  Cyclic GFR-binding peptide
  MOD_RES (30)..(30): Xaa is C or S
TRLSPINILYFDSANNVVYGKIPDMVVESX

SEQ ID NO: 67942 - protein, 41 aa, Artificial Sequence; identical to SEQ ID NO: 21961
  Cyclic GFR-binding peptide
  MOD_RES (4)..(5)..(38)..(40): Xaa is C or S

SEQ ID NO: 67943 - protein, 25 aa, Artificial Sequence
  Cyclic GFR-binding peptide
TSPINMLYFDNGRVLLYGKIPMIVE

SEQ ID NO: 67944 - protein, 41 aa, Artificial Sequence; identical to SEQ ID NO: 21963
  Cyclic GFR-binding peptide
  MOD_RES (5)..(6)..(38)..(40): Xaa is C or S

SEQ ID NO: 67945 - protein, 30 aa, Artificial Sequence
  Cyclic GFR-binding peptide
  MOD_RES (28)..(30): Xaa is C or S
LSPINMLYFDEYDKVVYGKIPEMVVEGXGX

SEQ ID NO: 67946 - protein, 30 aa, Artificial Sequence
  Cyclic GFR-binding peptide
  MOD_RES (27)..(29): Xaa is C or S
TSPINMLYFDNGRVLLYGKIPMIVEEXGXL

SEQ ID NO: 67947 - protein, 31 aa, Artificial Sequence
  Cyclic GFR-binding peptide
  MOD_RES (31)..(31): Xaa is C or S
PTQLSPINVLYFDDSSNVIYGKIPNMVVRAX

SEQ ID NO: 67948 - protein, 38 aa, Artificial Sequence; identical to SEQ ID NO: 21966
  Cyclic GFR-binding peptide
  MOD_RES (5)..(6)..(38): Xaa is C or S

SEQ ID NO: 67949 - protein, 35 aa, Artificial Sequence; identical to SEQ ID NO: 21968
  Cyclic GFR-binding peptide
  MOD_RES (4)..(5): Xaa is C or S

SEQ ID NO: 67950 - protein, 30 aa, Artificial Sequence
  Cyclic GFR-binding peptide
  MOD_RES (30)..(30): Xaa is C or S
TKLSPINILYFDKGVVTYYGKIPGMAVSEX

SEQ ID NO: 67951 - protein, 35 aa, Artificial Sequence; identical to SEQ ID NO: 21971
  Cyclic GFR-binding peptide
  MOD_RES (2)..(3)..(35): Xaa is C or S

SEQ ID NO: 67952 - protein, 29 aa, Artificial Sequence
  Cyclic GFR-binding peptide
PVKTSPINMLYFDNGRVLLYGKIPMIVEE

SEQ ID NO: 67953 - protein, 29 aa, Artificial Sequence
  Cyclic GFR-binding peptide
  MOD_RES (1)..(1): Xaa is C or S
XVPTKLSPINVLYFDDMGVPTYGKIPEGM

SEQ ID NO: 67954 - protein, 27 aa, Artificial Sequence
  Cyclic GFR-binding peptide
  MOD_RES (1)..(2): Xaa is C or S
XXVPTKLSPINVLYFDDMGVPTYGKIP

SEQ ID NO: 67955 - protein, 31 aa, Artificial Sequence
  Cyclic GFR-binding peptide
  MOD_RES (31)..(31): Xaa is C or S
PTELSPINMLYFDEYDKVVYGKIPEMVVEGX

SEQ ID NO: 67956 - protein, 28 aa, Artificial Sequence
  Cyclic GFR-binding peptide
  MOD_RES (27)..(27): Xaa is C or S
SPINILYFDKGVVTYYGKIPGMAVSEXG

SEQ ID NO: 67957 - protein, 37 aa, Artificial Sequence; identical to SEQ ID NO: 21978
  Cyclic GFR-binding peptide
  MOD_RES (4)..(5)..(37): Xaa is C or S

SEQ ID NO: 67958 - protein, 34 aa, Artificial Sequence; identical to SEQ ID NO: 21980
  Cyclic GFR-binding peptide
  MOD_RES (1)..(2): Xaa is C or S

SEQ ID NO: 67959 - protein, 35 aa, Artificial Sequence; identical to SEQ ID NO: 21982
  Cyclic GFR-binding peptide
  MOD_RES (2)..(3)..(35): Xaa is C or S

SEQ ID NO: 67960 - protein, 20 aa, Artificial Sequence
  Cyclic GFR-binding peptide
SPINILYFDAANNVVYGKIP

SEQ ID NO: 67961 - protein, 40 aa, Artificial Sequence; identical to SEQ ID NO: 21984
  Cyclic GFR-binding peptide
  MOD_RES (4)..(5)..(37)..(39): Xaa is C or S

SEQ ID NO: 67962 - protein, 36 aa, Artificial Sequence; identical to SEQ ID NO: 21985
  Cyclic GFR-binding peptide
  MOD_RES (1)..(2)..(34)..(36): Xaa is C or S

SEQ ID NO: 67963 - protein, 29 aa, Artificial Sequence
  Cyclic GFR-binding peptide
  MOD_RES (2)..(3): Xaa is C or S
PXXAPTKLSPINVLYFDDSSNVIYGKIPN

SEQ ID NO: 67964 - protein, 32 aa, Artificial Sequence
  Cyclic GFR-binding peptide
  MOD_RES (3)..(4): Xaa is C or S
ASXXVPARLSPINILYFDAANNVVYGKIPDMV

SEQ ID NO: 67965 - protein, 33 aa, Artificial Sequence
  Cyclic GFR-binding peptide
  MOD_RES (6)..(7): Xaa is C or S
SIPKAXXVPTELSPINMLYFDEYDKVVYGKIPE

SEQ ID NO: 67966 - protein, 24 aa, Artificial Sequence
  Cyclic GFR-binding peptide
PARLSPINILYFDAANNVVYGKIP

SEQ ID NO: 67967 - protein, 36 aa, Artificial Sequence
  Cyclic GFR-binding peptide
  MOD_RES (6)..(7): Xaa is C or S
AVPKAXXAPTKLSPINVLYFDSSNNVIYGKIPNMVV

SEQ ID NO: 67968 - protein, 32 aa, Artificial Sequence
  Cyclic GFR-binding peptide
  MOD_RES (1)..(2): Xaa is C or S
XXVPTKLSPINVLYFDDMGVPTYGKIPEGMSV

SEQ ID NO: 67969 - protein, 27 aa, Artificial Sequence
  Cyclic GFR-binding peptide
  MOD_RES (1)..(1): Xaa is C or S
XVPTKLSPINVLYFDDMGVPTYGKIPE

SEQ ID NO: 67970 - protein, 29 aa, Artificial Sequence
  Cyclic GFR-binding peptide
  MOD_RES (1)..(1): Xaa is C or S
XVPTELSPINMLYFDEYDKVVYGKIPEMV

SEQ ID NO: 67971 - protein, 26 aa, Artificial Sequence
  Cyclic GFR-binding peptide
KLSPINVLYFDSSNNVIYGKIPNMVV

SEQ ID NO: 67972 - protein, 27 aa, Artificial Sequence
  Cyclic GFR-binding peptide
LSPINMLYFDEYDKVVYGKIPEMVVEG

SEQ ID NO: 67973 - protein, 29 aa, Artificial Sequence
  Cyclic GFR-binding peptide
TQLSPINVLYFDDSSNVIYGKIPNMVVRA

SEQ ID NO: 67974 - protein, 32 aa, Artificial Sequence; identical to SEQ ID NO: 21993
  Cyclic GFR-binding peptide

SEQ ID NO: 67975 - protein, 29 aa, Artificial Sequence
  Cyclic GFR-binding peptide
PARLSPINILYFDAANNVVYGKIPDMVVE

SEQ ID NO: 67976 - protein, 27 aa, Artificial Sequence
  Cyclic GFR-binding peptide
APVKTSPINMLYFDNGRVLLYGKIPMI

SEQ ID NO: 67977 - protein, 35 aa, Artificial Sequence; identical to SEQ ID NO: 21997
  Cyclic GFR-binding peptide
  MOD_RES (1)..(2)..(34): Xaa is C or S

SEQ ID NO: 67978 - protein, 36 aa, Artificial Sequence; identical to SEQ ID NO: 21998
  Cyclic GFR-binding peptide
  MOD_RES (5)..(6): Xaa is C or S

SEQ ID NO: 67979 - protein, 40 aa, Artificial Sequence; identical to SEQ ID NO: 21999
  Cyclic GFR-binding peptide
  MOD_RES (7)..(39): Xaa is C or S

SEQ ID NO: 67980 - protein, 39 aa, Artificial Sequence; identical to SEQ ID NO: 22000
  Cyclic GFR-binding peptide
  MOD_RES (3)..(4)..(36)..(38): Xaa is C or S

SEQ ID NO: 67981 - protein, 36 aa, Artificial Sequence; identical to SEQ ID NO: 22002
  Cyclic GFR-binding peptide
  MOD_RES (5)..(6): Xaa is C or S

SEQ ID NO: 67982 - protein, 37 aa, Artificial Sequence; identical to SEQ ID NO: 22003
  Cyclic GFR-binding peptide
  MOD_RES (3)..(4)..(35)..(37): Xaa is C or S

SEQ ID NO: 67983 - protein, 30 aa, Artificial Sequence
  Cyclic GFR-binding peptide
  MOD_RES (1)..(2): Xaa is C or S
XXVPTKLSPINILYFDKGVVTYYGKIPGMA

SEQ ID NO: 67984 - protein, 23 aa, Artificial Sequence
  Cyclic GFR-binding peptide
KLSPINVLYFDSSNNVIYGKIPN

SEQ ID NO: 67985 - protein, 39 aa, Artificial Sequence; identical to SEQ ID NO: 22010
  Cyclic GFR-binding peptide
  MOD_RES (5)..(6)..(38): Xaa is C or S

SEQ ID NO: 67986 - protein, 25 aa, Artificial Sequence
  Cyclic GFR-binding peptide
TQLSPINVLYFDDSSNVIYGKIPNM

SEQ ID NO: 67987 - protein, 36 aa, Artificial Sequence; identical to SEQ ID NO: 22012
  Cyclic GFR-binding peptide
  MOD_RES (5)..(6): Xaa is C or S

SEQ ID NO: 67988 - protein, 37 aa, Artificial Sequence; identical to SEQ ID NO: 22013
  Cyclic GFR-binding peptide
  MOD_RES (2)..(3)..(35)..(37): Xaa is C or S

SEQ ID NO: 67989 - protein, 28 aa, Artificial Sequence
  Cyclic GFR-binding peptide
  MOD_RES (1)..(2): Xaa is C or S
XXVPTKLSPINVLYFDDMGVPTYGKIPE

SEQ ID NO: 67990 - protein, 26 aa, Artificial Sequence
  Cyclic GFR-binding peptide
VKTSPINMLYFDNGRVLLYGKIPMIV

SEQ ID NO: 67991 - protein, 29 aa, Artificial Sequence
  Cyclic GFR-binding peptide
  MOD_RES (3)..(4): Xaa is C or S
PTXXVPTRLSPINILYFDSANNVVYGKIP

SEQ ID NO: 67992 - protein, 35 aa, Artificial Sequence
  Cyclic GFR-binding peptide
  MOD_RES (5)..(6): Xaa is C or S
IPKAXXVPTELSPINMLYFDENEKVVYGKIPDMVV

SEQ ID NO: 67993 - protein, 23 aa, Artificial Sequence
  Cyclic GFR-binding peptide
SPINILYFDKGVVTYYGKIPGMA

SEQ ID NO: 67994 - protein, 27 aa, Artificial Sequence
  Cyclic GFR-binding peptide
  MOD_RES (1)..(2): Xaa is C or S
XXVPTELSPINMLYFDEYDKVVYGKIP

SEQ ID NO: 67995 - protein, 33 aa, Artificial Sequence
  Cyclic GFR-binding peptide
  MOD_RES (30)..(32): Xaa is C or S
TQLSPINVLYFDDSSNVIYGKIPNMVVRAXGXH

SEQ ID NO: 67996 - protein, 23 aa, Artificial Sequence
  Cyclic GFR-binding peptide
SPINVLYFDDMGVPTYGKIPEGM

SEQ ID NO: 67997 - protein, 30 aa, Artificial Sequence
  Cyclic GFR-binding peptide
  MOD_RES (2)..(3): Xaa is C or S
AXXVPTELSPINMLYFDENEKVVYGKIPDM

SEQ ID NO: 67998 - protein, 24 aa, Artificial Sequence
  Cyclic GFR-binding peptide
TELSPINMLYFDENEKVVYGKIPD

SEQ ID NO: 67999 - protein, 36 aa, Artificial Sequence; identical to SEQ ID NO: 22020
  Cyclic GFR-binding peptide
  MOD_RES (1)..(33)..(35): Xaa is C or S

SEQ ID NO: 68000 - protein, 32 aa, Artificial Sequence
  Cyclic GFR-binding peptide
  MOD_RES (2)..(3): Xaa is C or S
AXXVPTKLSPINVLYFDDMGVPTYGKIPEGMS

SEQ ID NO: 68001 - protein, 36 aa, Artificial Sequence; identical to SEQ ID NO: 22027
  Cyclic GFR-binding peptide
  MOD_RES (1)..(33)..(35): Xaa is C or S

SEQ ID NO: 68002 - protein, 33 aa, Artificial Sequence
  Cyclic GFR-binding peptide
  MOD_RES (4)..(5): Xaa is C or S
SKAXXVPTKLSPINILYFDKGVVTYYGKIPGMA

SEQ ID NO: 68003 - protein, 34 aa, Artificial Sequence; identical to SEQ ID NO: 22030
  Cyclic GFR-binding peptide
  MOD_RES (2)..(3): Xaa is C or S

SEQ ID NO: 68004 - protein, 33 aa, Artificial Sequence
  Cyclic GFR-binding peptide
  MOD_RES (30)..(32): Xaa is C or S
TELSPINMLYFDENEKVVYGKIPDMVVEGXGXR

SEQ ID NO: 68005 - protein, 40 aa, Artificial Sequence; identical to SEQ ID NO: 22034
  Cyclic GFR-binding peptide
  MOD_RES (6)..(7)..(39): Xaa is C or S

SEQ ID NO: 68006 - protein, 34 aa, Artificial Sequence; identical to SEQ ID NO: 22046
  Cyclic GFR-binding peptide
  MOD_RES (2)..(34): Xaa is C or S

SEQ ID NO: 68007 - protein, 28 aa, Artificial Sequence
  Cyclic GFR-binding peptide
  MOD_RES (2)..(3): Xaa is C or S
AXXVPTELSPINMLYFDEYDKVVYGKIP

SEQ ID NO: 68008 - protein, 24 aa, Artificial Sequence
  Cyclic GFR-binding peptide
KLSPINILYFDKGVVTYYGKIPGM

SEQ ID NO: 68009 - protein, 36 aa, Artificial Sequence; identical to SEQ ID NO: 22051
  Cyclic GFR-binding peptide
  MOD_RES (1)..(2)..(34)..(36): Xaa is C or S

SEQ ID NO: 68010 - protein, 40 aa, Artificial Sequence; identical to SEQ ID NO: 22050
  Cyclic GFR-binding peptide
  MOD_RES (5)..(6)..(38)..(40): Xaa is C or S

SEQ ID NO: 68011 - protein, 28 aa, Artificial Sequence
  Cyclic GFR-binding peptide
  MOD_RES (1)..(2): Xaa is C or S
XXAPVKTSPINMLYFDNGRVLLYGKIPM

SEQ ID NO: 68012 - protein, 35 aa, Artificial Sequence; identical to SEQ ID NO: 22054
  Cyclic GFR-binding peptide
  MOD_RES (1)..(2)..(34): Xaa is C or S

SEQ ID NO: 68013 - protein, 29 aa, Artificial Sequence
  Cyclic GFR-binding peptide
  MOD_RES (1)..(2): Xaa is C or S
XXVPTKLSPINVLYFDDMGVPTYGKIPEG

SEQ ID NO: 68014 - protein, 30 aa, Artificial Sequence
  Cyclic GFR-binding peptide
  MOD_RES (28)..(30): Xaa is C or S
LSPINVLYFDDSSNVIYGKIPNMVVRSXGX

SEQ ID NO: 68015 - protein, 27 aa, Artificial Sequence
  Cyclic GFR-binding peptide
PTQLSPINVLYFDDSSNVIYGKIPNMV

SEQ ID NO: 68016 - protein, 32 aa, Artificial Sequence
  Cyclic GFR-binding peptide
  MOD_RES (6)..(7): Xaa is C or S
YVPKPXXAPTKLSPINVLYFDDSSNVIYGKIP

SEQ ID NO: 68017 - protein, 34 aa, Artificial Sequence
  Cyclic GFR-binding peptide
  MOD_RES (31)..(33): Xaa is C or S
PTRLSPINILYFDSANNVVYGKIPDMVVESXGXR

SEQ ID NO: 68018 - protein, 27 aa, Artificial Sequence
  Cyclic GFR-binding peptide
  MOD_RES (27)..(27): Xaa is C or S
SPINVLYFDSSNNVIYGKIPNMVVKAX

SEQ ID NO: 68019 - protein, 23 aa, Artificial Sequence
  Cyclic GFR-binding peptide
ELSPINMLYFDENEKVVYGKIPD

SEQ ID NO: 68020 - protein, 29 aa, Artificial Sequence
  Cyclic GFR-binding peptide
  MOD_RES (2)..(3): Xaa is C or S
TXXAPVKTSPINMLYFDNGRVLLYGKIPM

SEQ ID NO: 68021 - protein, 32 aa, Artificial Sequence
  Cyclic GFR-binding peptide
  MOD_RES (29)..(31): Xaa is C or S
LSPINVLYFDDMGVPTYGKIPEGMSVAEXGXR

SEQ ID NO: 68022 - protein, 30 aa, Artificial Sequence
  Cyclic GFR-binding peptide
  MOD_RES (2)..(3): Xaa is C or S
PXXAPTQLSPINVLYFDDSSNVIYGKIPNM

SEQ ID NO: 68023 - protein, 37 aa, Artificial Sequence; identical to SEQ ID NO: 22061
  Cyclic GFR-binding peptide
  MOD_RES (1)..(2)..(34)..(36): Xaa is C or S

SEQ ID NO: 68024 - protein, 32 aa, Artificial Sequence
  Cyclic GFR-binding peptide
  MOD_RES (3)..(3): Xaa is C or S
PTXAPTKLSPINVLYFDDSSNVIYGKIPNMVV

SEQ ID NO: 68025 - protein, 38 aa, Artificial Sequence; identical to SEQ ID NO: 22065
  Cyclic GFR-binding peptide
  MOD_RES (4)..(5)..(37): Xaa is C or S

SEQ ID NO: 68026 - protein, 26 aa, Artificial Sequence
  Cyclic GFR-binding peptide
TKLSPINVLYFDSSNNVIYGKIPNMV

SEQ ID NO: 68027 - protein, 40 aa, Artificial Sequence; identical to SEQ ID NO: 22067
  Cyclic GFR-binding peptide
  MOD_RES (5)..(6)..(37)..(39): Xaa is C or S

SEQ ID NO: 68028 - protein, 28 aa, Artificial Sequence
  Cyclic GFR-binding peptide
PTELSPINMLYFDEYDKVVYGKIPEMVV

SEQ ID NO: 68029 - protein, 31 aa, Artificial Sequence
  Cyclic GFR-binding peptide
  MOD_RES (28)..(30): Xaa is C or S
LSPINMLYFDENEKVVYGKIPDMVVEGXGXR

SEQ ID NO: 68030 - protein, 35 aa, Artificial Sequence; identical to SEQ ID NO: 22069
  Cyclic GFR-binding peptide
  MOD_RES (1)..(2)..(34): Xaa is C or S

SEQ ID NO: 68031 - protein, 31 aa, Artificial Sequence; identical to SEQ ID NO: 22070
  Cyclic GFR-binding peptide

SEQ ID NO: 68032 - protein, 35 aa, Artificial Sequence; identical to SEQ ID NO: 22071
  Cyclic GFR-binding peptide
  MOD_RES (4)..(5): Xaa is C or S

SEQ ID NO: 68033 - protein, 36 aa, Artificial Sequence; identical to SEQ ID NO: 22074
  Cyclic GFR-binding peptide
  MOD_RES (1)..(2)..(34)..(36): Xaa is C or S

SEQ ID NO: 68034 - protein, 33 aa, Artificial Sequence; identical to SEQ ID NO: 22075
  Cyclic GFR-binding peptide
  MOD_RES (2)..(3): Xaa is C or S

SEQ ID NO: 68035 - protein, 33 aa, Artificial Sequence
  Cyclic GFR-binding peptide
  MOD_RES (30)..(32): Xaa is C or S
TKLSPINVLYFDSSNNVIYGKIPNMVVKAXGXH

SEQ ID NO: 68036 - protein, 34 aa, Artificial Sequence
  Cyclic GFR-binding peptide
  MOD_RES (4)..(5): Xaa is C or S
GKAXXVPTKLSPINVLYFDDMGVPTYGKIPEGMS

SEQ ID NO: 68037 - protein, 36 aa, Artificial Sequence
  Cyclic GFR-binding peptide
  MOD_RES (6)..(7): Xaa is C or S
AAPASXXVPARLSPINILYFDAANNVVYGKIPDMVV

SEQ ID NO: 68038 - protein, 32 aa, Artificial Sequence
  Cyclic GFR-binding peptide
  MOD_RES (2)..(3): Xaa is C or S
AXXAPTKLSPINVLYFDSSNNVIYGKIPNMVV

SEQ ID NO: 68039 - protein, 29 aa, Artificial Sequence
  Cyclic GFR-binding peptide
  MOD_RES (3)..(4): Xaa is C or S
KPXXAPTKLSPINVLYFDDSSNVIYGKIP

SEQ ID NO: 68040 - protein, 27 aa, Artificial Sequence
  Cyclic GFR-binding peptide
VPTKLSPINVLYFDDMGVPTYGKIPEG

SEQ ID NO: 68041 - protein, 30 aa, Artificial Sequence
  Cyclic GFR-binding peptide
  MOD_RES (3)..(4): Xaa is C or S
PTXXVPTRLSPINILYFDSANNVVYGKIPD

SEQ ID NO: 68042 - protein, 28 aa, Artificial Sequence
  Cyclic GFR-binding peptide
RLSPINILYFDAANNVVYGKIPDMVVEA

SEQ ID NO: 68043 - protein, 33 aa, Artificial Sequence
  Cyclic GFR-binding peptide
  MOD_RES (5)..(6): Xaa is C or S
VGKAXXVPTKLSPINVLYFDDMGVPTYGKIPEG

SEQ ID NO: 68044 - protein, 29 aa, Artificial Sequence
  Cyclic GFR-binding peptide
ARLSPINILYFDAANNVVYGKIPDMVVEA

SEQ ID NO: 68045 - protein, 26 aa, Artificial Sequence
  Cyclic GFR-binding peptide
  MOD_RES (1)..(1): Xaa is C or S
XVPTKLSPINVLYFDDMGVPTYGKIP

SEQ ID NO: 68046 - protein, 36 aa, Artificial Sequence; identical to SEQ ID NO: 22088
  Cyclic GFR-binding peptide
  MOD_RES (3)..(4)..(36): Xaa is C or S

SEQ ID NO: 68047 - protein, 35 aa, Artificial Sequence; identical to SEQ ID NO: 22090
  Cyclic GFR-binding peptide
  MOD_RES (5)..(5): Xaa is C or S

SEQ ID NO: 68048 - protein, 31 aa, Artificial Sequence
  Cyclic GFR-binding peptide
  MOD_RES (6)..(6): Xaa is C or S
VTKPTXAPTKLSPINVLYFDDSSNVIYGKIP

SEQ ID NO: 68049 - protein, 28 aa, Artificial Sequence
  Cyclic GFR-binding peptide
VPTELSPINMLYFDEYDKVVYGKIPEMV

SEQ ID NO: 68050 - protein, 22 aa, Artificial Sequence
  Cyclic GFR-binding peptide
QLSPINVLYFDDSSNVIYGKIP

SEQ ID NO: 68051 - protein, 31 aa, Artificial Sequence
  Cyclic GFR-binding peptide
  MOD_RES (1)..(2): Xaa is C or S
XXVPTELSPINMLYFDEYDKVVYGKIPEMVV

SEQ ID NO: 68052 - protein, 35 aa, Artificial Sequence; identical to SEQ ID NO: 22095
  Cyclic GFR-binding peptide
  MOD_RES (2)..(3)..(35): Xaa is C or S

SEQ ID NO: 68053 - protein, 28 aa, Artificial Sequence
  Cyclic GFR-binding peptide
VPTKLSPINVLYFDDMGVPTYGKIPEGM

SEQ ID NO: 68054 - protein, 27 aa, Artificial Sequence
  Cyclic GFR-binding peptide
  MOD_RES (27)..(27): Xaa is C or S
SPINMLYFDEYDKVVYGKIPEMVVEGX

SEQ ID NO: 68055 - protein, 25 aa, Artificial Sequence
  Cyclic GFR-binding peptide
PVKTSPINMLYFDNGRVLLYGKIPM

SEQ ID NO: 68056 - protein, 31 aa, Artificial Sequence
  Cyclic GFR-binding peptide
  MOD_RES (29)..(31): Xaa is C or S
QLSPINVLYFDDSSNVIYGKIPNMVVRAXGX

SEQ ID NO: 68057 - protein, 40 aa, Artificial Sequence; identical to SEQ ID NO: 22099
  Cyclic GFR-binding peptide
  MOD_RES (5)..(6)..(38)..(40): Xaa is C or S

SEQ ID NO: 68058 - protein, 37 aa, Artificial Sequence; identical to SEQ ID NO: 22102
  Cyclic GFR-binding peptide
  MOD_RES (2)..(3)..(35)..(37): Xaa is C or S

SEQ ID NO: 68059 - protein, 38 aa, Artificial Sequence; identical to SEQ ID NO: 22103
  Cyclic GFR-binding peptide
  MOD_RES (6)..(7): Xaa is C or S

SEQ ID NO: 68060 - protein, 22 aa, Artificial Sequence
  Cyclic GFR-binding peptide
LSPINMLYFDENEKVVYGKIPD

SEQ ID NO: 68061 - protein, 36 aa, Artificial Sequence; identical to SEQ ID NO: 22104
  Cyclic GFR-binding peptide
  MOD_RES (1)..(33)..(35): Xaa is C or S

SEQ ID NO: 68062 - protein, 28 aa, Artificial Sequence
  Cyclic GFR-binding peptide
  MOD_RES (2)..(2): Xaa is C or S
TXAPTKLSPINVLYFDDSSNVIYGKIPN

SEQ ID NO: 68063 - protein, 38 aa, Artificial Sequence; identical to SEQ ID NO: 22106
  Cyclic GFR-binding peptide
  MOD_RES (2)..(3)..(35)..(37): Xaa is C or S

SEQ ID NO: 68064 - protein, 29 aa, Artificial Sequence
  Cyclic GFR-binding peptide
  MOD_RES (29)..(29): Xaa is C or S
KLSPINVLYFDSSNNVIYGKIPNMVVKAX

SEQ ID NO: 68065 - protein, 30 aa, Artificial Sequence
  Cyclic GFR-binding peptide
  MOD_RES (3)..(4): Xaa is C or S
KPXXAPTKLSPINVLYFDDSSNVIYGKIPN

SEQ ID NO: 68066 - protein, 24 aa, Artificial Sequence
  Cyclic GFR-binding peptide
TKLSPINVLYFDSSNNVIYGKIPN

SEQ ID NO: 68067 - protein, 33 aa, Artificial Sequence; identical to SEQ ID NO: 22110
  Cyclic GFR-binding peptide
  MOD_RES (1)..(2): Xaa is C or S

SEQ ID NO: 68068 - protein, 28 aa, Artificial Sequence
  Cyclic GFR-binding peptide
  MOD_RES (27)..(27): Xaa is C or S
SPINILYFDAANNVVYGKIPDMVVEAXG

SEQ ID NO: 68069 - protein, 28 aa, Artificial Sequence
  Cyclic GFR-binding peptide
KLSPINILYFDKGVVTYYGKIPGMAVSE

SEQ ID NO: 68070 - protein, 37 aa, Artificial Sequence; identical to SEQ ID NO: 22113
  Cyclic GFR-binding peptide
  MOD_RES (2)..(3)..(35)..(37): Xaa is C or S

SEQ ID NO: 68071 - protein, 35 aa, Artificial Sequence; identical to SEQ ID NO: 22114
  Cyclic GFR-binding peptide
  MOD_RES (3)..(4): Xaa is C or S

SEQ ID NO: 68072 - protein, 27 aa, Artificial Sequence
  Cyclic GFR-binding peptide
LSPINVLYFDDSSNVIYGKIPNMVVRS

SEQ ID NO: 68073 - protein, 31 aa, Artificial Sequence
  Cyclic GFR-binding peptide
  MOD_RES (2)..(3): Xaa is C or S
PXXAPTQLSPINVLYFDDSSNVIYGKIPNMV

SEQ ID NO: 68074 - protein, 35 aa, Artificial Sequence; identical to SEQ ID NO: 22118
  Cyclic GFR-binding peptide
  MOD_RES (4)..(5): Xaa is C or S

SEQ ID NO: 68075 - protein, 32 aa, Artificial Sequence; identical to SEQ ID NO: 22120
  Cyclic GFR-binding peptide
  MOD_RES (1)..(1): Xaa is C or S

SEQ ID NO: 68076 - protein, 27 aa, Artificial Sequence
  Cyclic GFR-binding peptide
LSPINVLYFDDSSNVIYGKIPNMVVRA

SEQ ID NO: 68077 - protein, 31 aa, Artificial Sequence
  Cyclic GFR-binding peptide
  MOD_RES (29)..(31): Xaa is C or S
ELSPINMLYFDENEKVVYGKIPDMVVEGXGX

SEQ ID NO: 68078 - protein, 36 aa, Artificial Sequence; identical to SEQ ID NO: 22126
  Cyclic GFR-binding peptide
  MOD_RES (4)..(5): Xaa is C or S

SEQ ID NO: 68079 - protein, 29 aa, Artificial Sequence
  Cyclic GFR-binding peptide
  MOD_RES (1)..(2): Xaa is C or S
XXAPVKTSPINMLYFDNGRVLLYGKIPMI

SEQ ID NO: 68080 - protein, 37 aa, Artificial Sequence; identical to SEQ ID NO: 22127
  Cyclic GFR-binding peptide
  MOD_RES (5)..(6): Xaa is C or S

SEQ ID NO: 68081 - protein, 23 aa, Artificial Sequence
  Cyclic GFR-binding peptide
LSPINILYFDKGVVTYYGKIPGM

SEQ ID NO: 68082 - protein, 29 aa, Artificial Sequence
  Cyclic GFR-binding peptide
  MOD_RES (29)..(29): Xaa is C or S
ELSPINMLYFDENEKVVYGKIPDMVVEGX

SEQ ID NO: 68083 - protein, 32 aa, Artificial Sequence; identical to SEQ ID NO: 22130
  Cyclic GFR-binding peptide
  MOD_RES (32)..(32): Xaa is C or S

SEQ ID NO: 68084 - protein, 31 aa, Artificial Sequence
  Cyclic GFR-binding peptide
  MOD_RES (3)..(4): Xaa is C or S
PTXXVPTRLSPINILYFDSANNVVYGKIPDM

SEQ ID NO: 68085 - protein, 34 aa, Artificial Sequence
  Cyclic GFR-binding peptide
  MOD_RES (6)..(7): Xaa is C or S
TVPKPXXAPTQLSPINVLYFDDSSNVIYGKIPNM

SEQ ID NO: 68086 - protein, 23 aa, Artificial Sequence
  Cyclic GFR-binding peptide
SPINVLYFDDSSNVIYGKIPNMV

SEQ ID NO: 68087 - protein, 29 aa, Artificial Sequence
  Cyclic GFR-binding peptide
  MOD_RES (2)..(3): Xaa is C or S
AXXVPTELSPINMLYFDEYDKVVYGKIPE

SEQ ID NO: 68088 - protein, 33 aa, Artificial Sequence
  Cyclic GFR-binding peptide
  MOD_RES (30)..(32): Xaa is C or S
PVKTSPINMLYFDNGRVLLYGKIPMIVEEXGXL

SEQ ID NO: 68089 - protein, 27 aa, Artificial Sequence
  Cyclic GFR-binding peptide
LSPINILYFDAANNVVYGKIPDMVVEA

SEQ ID NO: 68090 - protein, 38 aa, Artificial Sequence; identical to SEQ ID NO: 22135
  Cyclic GFR-binding peptide
  MOD_RES (5)..(6)..(38): Xaa is C or S

SEQ ID NO: 68091 - protein, 36 aa, Artificial Sequence; identical to SEQ ID NO: 22139
  Cyclic GFR-binding peptide
  MOD_RES (1)..(2)..(34)..(36): Xaa is C or S

SEQ ID NO: 68092 - protein, 34 aa, Artificial Sequence; identical to SEQ ID NO: 22142
  Cyclic GFR-binding peptide
  MOD_RES (2)..(3): Xaa is C or S

SEQ ID NO: 68093 - protein, 35 aa, Artificial Sequence
  Cyclic GFR-binding peptide
  MOD_RES (6)..(7): Xaa is C or S
STPPTXXVPTRLSPINILYFDSANNVVYGKIPDMV

SEQ ID NO: 68094 - protein, 31 aa, Artificial Sequence
  Cyclic GFR-binding peptide
  MOD_RES (4)..(5): Xaa is C or S
GKAXXVPTKLSPINVLYFDDMGVPTYGKIPE

SEQ ID NO: 68095 - protein, 41 aa, Artificial Sequence; identical to SEQ ID NO: 22148
  Cyclic GFR-binding peptide
  MOD_RES (6)..(7)..(39)..(41): Xaa is C or S

SEQ ID NO: 68096 - protein, 29 aa, Artificial Sequence
  Cyclic GFR-binding peptide
  MOD_RES (28)..(28): Xaa is C or S
LSPINVLYFDSSNNVIYGKIPNMVVKAXG

SEQ ID NO: 68097 - protein, 26 aa, Artificial Sequence
  Cyclic GFR-binding peptide
LSPINVLYFDDMGVPTYGKIPEGMSV

SEQ ID NO: 68098 - protein, 36 aa, Artificial Sequence; identical to SEQ ID NO: 22150
  Cyclic GFR-binding peptide
  MOD_RES (5)..(5): Xaa is C or S

SEQ ID NO: 68099 - protein, 29 aa, Artificial Sequence
  Cyclic GFR-binding peptide
  MOD_RES (29)..(29): Xaa is C or S
RLSPINILYFDSANNVVYGKIPDMVVESX

SEQ ID NO: 68100 - protein, 23 aa, Artificial Sequence
  Cyclic GFR-binding peptide
TKLSPINVLYFDDSSNVIYGKIP

SEQ ID NO: 68101 - protein, 33 aa, Artificial Sequence
  Cyclic GFR-binding peptide
  MOD_RES (3)..(4): Xaa is C or S
ASXXVPARLSPINILYFDAANNVVYGKIPDMVV

SEQ ID NO: 68102 - protein, 39 aa, Artificial Sequence; identical to SEQ ID NO: 22158
  Cyclic GFR-binding peptide
  MOD_RES (4)..(5)..(38): Xaa is C or S

SEQ ID NO: 68103 - protein, 29 aa, Artificial Sequence
  Cyclic GFR-binding peptide
  MOD_RES (28)..(28): Xaa is C or S
LSPINILYFDSANNVVYGKIPDMVVESXG

SEQ ID NO: 68104 - protein, 28 aa, Artificial Sequence
  Cyclic GFR-binding peptide
  MOD_RES (1)..(2): Xaa is C or S
XXAPTKLSPINVLYFDSSNNVIYGKIPN

SEQ ID NO: 68105 - protein, 24 aa, Artificial Sequence
  Cyclic GFR-binding peptide
VKTSPINMLYFDNGRVLLYGKIPM

SEQ ID NO: 68106 - protein, 22 aa, Artificial Sequence
  Cyclic GFR-binding peptide
RLSPINILYFDSANNVVYGKIP

SEQ ID NO: 68107 - protein, 39 aa, Artificial Sequence; identical to SEQ ID NO: 22164
  Cyclic GFR-binding peptide
  MOD_RES (6)..(7)..(39): Xaa is C or S

SEQ ID NO: 68108 - protein, 30 aa, Artificial Sequence
  Cyclic GFR-binding peptide
  MOD_RES (3)..(4): Xaa is C or S
KAXXVPTKLSPINVLYFDDMGVPTYGKIPE

SEQ ID NO: 68109 - protein, 30 aa, Artificial Sequence
  Cyclic GFR-binding peptide
  MOD_RES (4)..(5): Xaa is C or S
PKAXXVPTELSPINMLYFDEYDKVVYGKIP

SEQ ID NO: 68110 - protein, 32 aa, Artificial Sequence
  Cyclic GFR-binding peptide
  MOD_RES (5)..(6): Xaa is C or S
VPKPXXAPTQLSPINVLYFDDSSNVIYGKIPN

SEQ ID NO: 68111 - protein, 27 aa, Artificial Sequence
  Cyclic GFR-binding peptide
TKLSPINILYFDKGVVTYYGKIPGMAV

SEQ ID NO: 68112 - protein, 25 aa, Artificial Sequence
  Cyclic GFR-binding peptide
TKLSPINVLYFDSSNNVIYGKIPNM

SEQ ID NO: 68113 - protein, 33 aa, Artificial Sequence
  Cyclic GFR-binding peptide
  MOD_RES (4)..(5): Xaa is C or S
PASXXVPARLSPINILYFDAANNVVYGKIPDMV

SEQ ID NO: 68114 - protein, 31 aa, Artificial Sequence
  Cyclic GFR-binding peptide
  MOD_RES (5)..(6): Xaa is C or S
VPKPXXAPTKLSPINVLYFDDSSNVIYGKIP

SEQ ID NO: 68115 - protein, 33 aa, Artificial Sequence
  Cyclic GFR-binding peptide
  MOD_RES (5)..(6): Xaa is C or S
IPKAXXVPTELSPINMLYFDEYDKVVYGKIPEM

SEQ ID NO: 68116 - protein, 31 aa, Artificial Sequence; identical to SEQ ID NO: 22172
  Cyclic GFR-binding peptide

SEQ ID NO: 68117 - protein, 27 aa, Artificial Sequence
  Cyclic GFR-binding peptide
PARLSPINILYFDAANNVVYGKIPDMV

SEQ ID NO: 68118 - protein, 38 aa, Artificial Sequence; identical to SEQ ID NO: 22175
  Cyclic GFR-binding peptide
  MOD_RES (5)..(6)..(38): Xaa is C or S

SEQ ID NO: 68119 - protein, 34 aa, Artificial Sequence; identical to SEQ ID NO: 22174
  Cyclic GFR-binding peptide
  MOD_RES (32)..(34): Xaa is C or S

SEQ ID NO: 68120 - protein, 37 aa, Artificial Sequence; identical to SEQ ID NO: 22176
  Cyclic GFR-binding peptide
  MOD_RES (1)..(2)..(34)..(36): Xaa is C or S

SEQ ID NO: 68121 - protein, 41 aa, Artificial Sequence; identical to SEQ ID NO: 22181
  Cyclic GFR-binding peptide
  MOD_RES (6)..(7)..(39)..(41): Xaa is C or S

SEQ ID NO: 68122 - protein, 27 aa, Artificial Sequence
  Cyclic GFR-binding peptide
VPTKLSPINILYFDKGVVTYYGKIPGM

SEQ ID NO: 68123 - protein, 29 aa, Artificial Sequence
  Cyclic GFR-binding peptide
  MOD_RES (3)..(4): Xaa is C or S
STXXAPVKTSPINMLYFDNGRVLLYGKIP

SEQ ID NO: 68124 - protein, 37 aa, Artificial Sequence; identical to SEQ ID NO: 22184
  Cyclic GFR-binding peptide
  MOD_RES (4)..(5)..(36): Xaa is C or S

SEQ ID NO: 68125 - protein, 36 aa, Artificial Sequence; identical to SEQ ID NO: 22185
  Cyclic GFR-binding peptide
  MOD_RES (1)..(2)..(34)..(36): Xaa is C or S

SEQ ID NO: 68126 - protein, 31 aa, Artificial Sequence
  Cyclic GFR-binding peptide
  MOD_RES (30)..(30): Xaa is C or S
TKLSPINVLYFDSSNNVIYGKIPNMVVKAXG

SEQ ID NO: 68127 - protein, 23 aa, Artificial Sequence
  Cyclic GFR-binding peptide
LSPINILYFDAANNVVYGKIPDM

SEQ ID NO: 68128 - protein, 37 aa, Artificial Sequence; identical to SEQ ID NO: 22186
  Cyclic GFR-binding peptide
  MOD_RES (5)..(6)..(37): Xaa is C or S

SEQ ID NO: 68129 - protein, 26 aa, Artificial Sequence
  Cyclic GFR-binding peptide
VPARLSPINILYFDAANNVVYGKIPD

SEQ ID NO: 68130 - protein, 32 aa, Artificial Sequence; identical to SEQ ID NO: 22191
  Cyclic GFR-binding peptide
  MOD_RES (32)..(32): Xaa is C or S

SEQ ID NO: 68131 - protein, 22 aa, Artificial Sequence
  Cyclic GFR-binding peptide
LSPINVLYFDDSSNVIYGKIPN

SEQ ID NO: 68132 - protein, 25 aa, Artificial Sequence
  Cyclic GFR-binding peptide
KLSPINILYFDKGVVTYYGKIPGMA

SEQ ID NO: 68133 - protein, 31 aa, Artificial Sequence
  Cyclic GFR-binding peptide
  MOD_RES (2)..(3): Xaa is C or S
AXXVPTKLSPINILYFDKGVVTYYGKIPGMA

SEQ ID NO: 68134 - protein, 42 aa, Artificial Sequence; identical to SEQ ID NO: 22195
  Cyclic GFR-binding peptide
  MOD_RES (6)..(7)..(39)..(41): Xaa is C or S

SEQ ID NO: 68135 - protein, 33 aa, Artificial Sequence
  Cyclic GFR-binding peptide
  MOD_RES (5)..(5): Xaa is C or S
TKPTXAPTKLSPINVLYFDDSSNVIYGKIPNMV

SEQ ID NO: 68136 - protein, 32 aa, Artificial Sequence; identical to SEQ ID NO: 22197
  Cyclic GFR-binding peptide
  MOD_RES (1)..(32): Xaa is C or S

SEQ ID NO: 68137 - protein, 37 aa, Artificial Sequence; identical to SEQ ID NO: 22199
  Cyclic GFR-binding peptide
  MOD_RES (3)..(4)..(36): Xaa is C or S

SEQ ID NO: 68138 - protein, 37 aa, Artificial Sequence; identical to SEQ ID NO: 22200
  Cyclic GFR-binding peptide
  MOD_RES (6)..(7): Xaa is C or S

SEQ ID NO: 68139 - protein, 21 aa, Artificial Sequence
  Cyclic GFR-binding peptide
LSPINMLYFDENEKVVYGKIP

SEQ ID NO: 68140 - protein, 32 aa, Artificial Sequence; identical to SEQ ID NO: 22203
  Cyclic GFR-binding peptide
  MOD_RES (1)..(2): Xaa is C or S

SEQ ID NO: 68141 - protein, 32 aa, Artificial Sequence
  Cyclic GFR-binding peptide
  MOD_RES (5)..(6): Xaa is C or S
VPKPXXAPTKLSPINVLYFDDSSNVIYGKIPN

SEQ ID NO: 68142 - protein, 22 aa, Artificial Sequence
  Cyclic GFR-binding peptide
SPINILYFDSANNVVYGKIPDM

SEQ ID NO: 68143 - protein, 26 aa, Artificial Sequence
  Cyclic GFR-binding peptide
  MOD_RES (1)..(1): Xaa is C or S
XAPTQLSPINVLYFDDSSNVIYGKIP

SEQ ID NO: 68144 - protein, 38 aa, Artificial Sequence; identical to SEQ ID NO: 22210
  Cyclic GFR-binding peptide
  MOD_RES (6)..(7): Xaa is C or S

SEQ ID NO: 68145 - protein, 36 aa, Artificial Sequence; identical to SEQ ID NO: 22211
  Cyclic GFR-binding peptide
  MOD_RES (2)..(3)..(35): Xaa is C or S

SEQ ID NO: 68146 - protein, 31 aa, Artificial Sequence; identical to SEQ ID NO: 22214
  Cyclic GFR-binding peptide
  MOD_RES (1)..(1): Xaa is C or S

SEQ ID NO: 68147 - protein, 35 aa, Artificial Sequence; identical to SEQ ID NO: 22215
  Cyclic GFR-binding peptide
  MOD_RES (4)..(5): Xaa is C or S

SEQ ID NO: 68148 - protein, 33 aa, Artificial Sequence; identical to SEQ ID NO: 22218
  Cyclic GFR-binding peptide
  MOD_RES (2)..(3): Xaa is C or S

SEQ ID NO: 68149 - protein, 33 aa, Artificial Sequence; identical to SEQ ID NO: 22223
  Cyclic GFR-binding peptide
  MOD_RES (1)..(2): Xaa is C or S

SEQ ID NO: 68150 - protein, 30 aa, Artificial Sequence
  Cyclic GFR-binding peptide
PTKLSPINILYFDKGVVTYYGKIPGMAVSE

SEQ ID NO: 68151 - protein, 27 aa, Artificial Sequence
  Cyclic GFR-binding peptide
KLSPINVLYFDDMGVPTYGKIPEGMSV

SEQ ID NO: 68152 - protein, 39 aa, Artificial Sequence; identical to SEQ ID NO: 22225
  Cyclic GFR-binding peptide
  MOD_RES (3)..(4)..(36)..(38): Xaa is C or S

SEQ ID NO: 68153 - protein, 36 aa, Artificial Sequence; identical to SEQ ID NO: 22226
  Cyclic GFR-binding peptide
  MOD_RES (2)..(3)..(35): Xaa is C or S

SEQ ID NO: 68154 - protein, 24 aa, Artificial Sequence
  Cyclic GFR-binding peptide
KTSPINMLYFDNGRVLLYGKIPMI

SEQ ID NO: 68155 - protein, 34 aa, Artificial Sequence
  Cyclic GFR-binding peptide
  MOD_RES (3)..(4): Xaa is C or S
KAXXVPTKLSPINVLYFDDMGVPTYGKIPEGMSV

SEQ ID NO: 68156 - protein, 30 aa, Artificial Sequence
  Cyclic GFR-binding peptide
  MOD_RES (4)..(4): Xaa is C or S
KPTXAPTKLSPINVLYFDDSSNVIYGKIPN

SEQ ID NO: 68157 - protein, 28 aa, Artificial Sequence
  Cyclic GFR-binding peptide
  MOD_RES (27)..(27): Xaa is C or S
SPINVLYFDDSSNVIYGKIPNMVVRSXG

SEQ ID NO: 68158 - protein, 27 aa, Artificial Sequence
  Cyclic GFR-binding peptide
  MOD_RES (1)..(1): Xaa is C or S
XAPVKTSPINMLYFDNGRVLLYGKIPM

SEQ ID NO: 68159 - protein, 36 aa, Artificial Sequence; identical to SEQ ID NO: 22233
  Cyclic GFR-binding peptide
  MOD_RES (1)..(2)..(34)..(36): Xaa is C or S

SEQ ID NO: 68160 - protein, 36 aa, Artificial Sequence; identical to SEQ ID NO: 22235
  Cyclic GFR-binding peptide
  MOD_RES (1)..(33)..(35): Xaa is C or S

SEQ ID NO: 68161 - protein, 42 aa, Artificial Sequence; identical to SEQ ID NO: 22241
  Cyclic GFR-binding peptide
  MOD_RES (6)..(7)..(40)..(42): Xaa is C or S

SEQ ID NO: 68162 - protein, 39 aa, Artificial Sequence; identical to SEQ ID NO: 22242
  Cyclic GFR-binding peptide
  MOD_RES (4)..(5)..(37)..(39): Xaa is C or S

SEQ ID NO: 68163 - protein, 26 aa, Artificial Sequence
  Cyclic GFR-binding peptide
SPINILYFDAANNVVYGKIPDMVVEA

SEQ ID NO: 68164 - protein, 40 aa, Artificial Sequence; identical to SEQ ID NO: 22244
  Cyclic GFR-binding peptide
  MOD_RES (6)..(7)..(39): Xaa is C or S

SEQ ID NO: 68165 - protein, 23 aa, Artificial Sequence
  Cyclic GFR-binding peptide
TSPINMLYFDNGRVLLYGKIPMI

SEQ ID NO: 68166 - protein, 35 aa, Artificial Sequence
  Cyclic GFR-binding peptide
  MOD_RES (5)..(6): Xaa is C or S
IPKAXXVPTELSPINMLYFDEYDKVVYGKIPEMVV

SEQ ID NO: 68167 - protein, 34 aa, Artificial Sequence; identical to SEQ ID NO: 22252
  Cyclic GFR-binding peptide
  MOD_RES (1)..(2)..(34): Xaa is C or S

SEQ ID NO: 68168 - protein, 29 aa, Artificial Sequence
  Cyclic GFR-binding peptide
PTRLSPINILYFDSANNVVYGKIPDMVVE

SEQ ID NO: 68169 - protein, 38 aa, Artificial Sequence; identical to SEQ ID NO: 22258
  Cyclic GFR-binding peptide
  MOD_RES (3)..(4)..(36)..(38): Xaa is C or S

SEQ ID NO: 68170 - protein, 31 aa, Artificial Sequence; identical to SEQ ID NO: 22261
  Cyclic GFR-binding peptide

SEQ ID NO: 68171 - protein, 33 aa, Artificial Sequence
  Cyclic GFR-binding peptide
  MOD_RES (3)..(4): Xaa is C or S
PTXXVPTRLSPINILYFDSANNVVYGKIPDMVV

SEQ ID NO: 68172 - protein, 32 aa, Artificial Sequence
  Cyclic GFR-binding peptide
  MOD_RES (29)..(31): Xaa is C or S
VKTSPINMLYFDNGRVLLYGKIPMIVEEXGXL

SEQ ID NO: 68173 - protein, 40 aa, Artificial Sequence; identical to SEQ ID NO: 22268
  Cyclic GFR-binding peptide
  MOD_RES (4)..(5)..(37)..(39): Xaa is C or S

SEQ ID NO: 68174 - protein, 21 aa, Artificial Sequence
  Cyclic GFR-binding peptide
SPINILYFDKGVVTYYGKIPG

SEQ ID NO: 68175 - protein, 28 aa, Artificial Sequence
  Cyclic GFR-binding peptide
VPTRLSPINILYFDSANNVVYGKIPDMV

SEQ ID NO: 68176 - protein, 24 aa, Artificial Sequence
  Cyclic GFR-binding peptide
ELSPINMLYFDENEKVVYGKIPDM

SEQ ID NO: 68177 - protein, 26 aa, Artificial Sequence
  Cyclic GFR-binding peptide
SPINILYFDKGVVTYYGKIPGMAVSE

SEQ ID NO: 68178 - protein, 26 aa, Artificial Sequence
  Cyclic GFR-binding peptide
  MOD_RES (1)..(1): Xaa is C or S
XVPTELSPINMLYFDEYDKVVYGKIP

SEQ ID NO: 68179 - protein, 26 aa, Artificial Sequence
  Cyclic GFR-binding peptide
PTKLSPINILYFDKGVVTYYGKIPGM

SEQ ID NO: 68180 - protein, 28 aa, Artificial Sequence
  Cyclic GFR-binding peptide
  MOD_RES (27)..(27): Xaa is C or S
SPINVLYFDDSSNVIYGKIPNMVVRAXG

SEQ ID NO: 68181 - protein, 23 aa, Artificial Sequence
  Cyclic GFR-binding peptide
TKLSPINILYFDKGVVTYYGKIP

SEQ ID NO: 68182 - protein, 29 aa, Artificial Sequence
  Cyclic GFR-binding peptide
  MOD_RES (1)..(1): Xaa is C or S
XVPTELSPINMLYFDENEKVVYGKIPDMV

SEQ ID NO: 68183 - protein, 30 aa, Artificial Sequence
  Cyclic GFR-binding peptide
  MOD_RES (30)..(30): Xaa is C or S
TELSPINMLYFDENEKVVYGKIPDMVVEGX

SEQ ID NO: 68184 - protein, 25 aa, Artificial Sequence
  Cyclic GFR-binding peptide
PTKLSPINVLYFDSSNNVIYGKIPN

SEQ ID NO: 68185 - protein, 30 aa, Artificial Sequence
  Cyclic GFR-binding peptide
  MOD_RES (2)..(2): Xaa is C or S
TXAPTKLSPINVLYFDDSSNVIYGKIPNMV

SEQ ID NO: 68186 - protein, 36 aa, Artificial Sequence; identical to SEQ ID NO: 22274
  Cyclic GFR-binding peptide
  MOD_RES (4)..(5): Xaa is C or S

SEQ ID NO: 68187 - protein, 28 aa, Artificial Sequence
  Cyclic GFR-binding peptide
TKLSPINVLYFDDMGVPTYGKIPEGMSV

SEQ ID NO: 68188 - protein, 28 aa, Artificial Sequence
  Cyclic GFR-binding peptide
KLSPINVLYFDSSNNVIYGKIPNMVVKA

SEQ ID NO: 68189 - protein, 27 aa, Artificial Sequence
  Cyclic GFR-binding peptide
  MOD_RES (1)..(1): Xaa is C or S
XAPTKLSPINVLYFDSSNNVIYGKIPN

SEQ ID NO: 68190 - protein, 30 aa, Artificial Sequence
  Cyclic GFR-binding peptide
  MOD_RES (29)..(29): Xaa is C or S
LSPINVLYFDDMGVPTYGKIPEGMSVAEXG

SEQ ID NO: 68191 - protein, 22 aa, Artificial Sequence
  Cyclic GFR-binding peptide
KLSPINVLYFDSSNNVIYGKIP

SEQ ID NO: 68192 - protein, 37 aa, Artificial Sequence; identical to SEQ ID NO: 22288
  Cyclic GFR-binding peptide
  MOD_RES (4)..(5)..(37): Xaa is C or S

SEQ ID NO: 68193 - protein, 37 aa, Artificial Sequence; identical to SEQ ID NO: 22289
  Cyclic GFR-binding peptide
  MOD_RES (4)..(5)..(37): Xaa is C or S

SEQ ID NO: 68194 - protein, 33 aa, Artificial Sequence
  Cyclic GFR-binding peptide
  MOD_RES (7)..(7): Xaa is C or S
HVTKPTXAPTKLSPINVLYFDDSSNVIYGKIPN

SEQ ID NO: 68195 - protein, 31 aa, Artificial Sequence; identical to SEQ ID NO: 22296
  Cyclic GFR-binding peptide
  MOD_RES (1)..(1): Xaa is C or S

SEQ ID NO: 68196 - protein, 30 aa, Artificial Sequence
  Cyclic GFR-binding peptide
  MOD_RES (2)..(3): Xaa is C or S
TXXVPTRLSPINILYFDSANNVVYGKIPDM

SEQ ID NO: 68197 - protein, 34 aa, Artificial Sequence
  Cyclic GFR-binding peptide
  MOD_RES (6)..(7): Xaa is C or S
KVGKAXXVPTKLSPINVLYFDDMGVPTYGKIPEG

SEQ ID NO: 68198 - protein, 39 aa, Artificial Sequence; identical to SEQ ID NO: 22301
  Cyclic GFR-binding peptide
  MOD_RES (5)..(6)..(38): Xaa is C or S

SEQ ID NO: 68199 - protein, 31 aa, Artificial Sequence
  Cyclic GFR-binding peptide
  MOD_RES (2)..(3): Xaa is C or S
TXXAPVKTSPINMLYFDNGRVLLYGKIPMIV

SEQ ID NO: 68200 - protein, 29 aa, Artificial Sequence
  Cyclic GFR-binding peptide
PTKLSPINILYFDKGVVTYYGKIPGMAVS

SEQ ID NO: 68201 - protein, 33 aa, Artificial Sequence; identical to SEQ ID NO: 22310
  Cyclic GFR-binding peptide
  MOD_RES (1)..(2): Xaa is C or S

SEQ ID NO: 68202 - protein, 31 aa, Artificial Sequence
  Cyclic GFR-binding peptide
  MOD_RES (30)..(30): Xaa is C or S
TRLSPINILYFDSANNVVYGKIPDMVVESXG

SEQ ID NO: 68203 - protein, 39 aa, Artificial Sequence; identical to SEQ ID NO: 22313
  Cyclic GFR-binding peptide
  MOD_RES (4)..(5)..(37)..(39): Xaa is C or S

SEQ ID NO: 68204 - protein, 38 aa, Artificial Sequence; identical to SEQ ID NO: 22319
  Cyclic GFR-binding peptide
  MOD_RES (1)..(2)..(35)..(37): Xaa is C or S

SEQ ID NO: 68205 - protein, 32 aa, Artificial Sequence
  Cyclic GFR-binding peptide
  MOD_RES (3)..(4): Xaa is C or S
KAXXAPTKLSPINVLYFDSSNNVIYGKIPNMV

SEQ ID NO: 68206 - protein, 30 aa, Artificial Sequence
  Cyclic GFR-binding peptide
  MOD_RES (30)..(30): Xaa is C or S
TELSPINMLYFDEYDKVVYGKIPEMVVEGX

SEQ ID NO: 68207 - protein, 30 aa, Artificial Sequence; identical to SEQ ID NO: 22321
  Cyclic GFR-binding peptide

SEQ ID NO: 68208 - protein, 29 aa, Artificial Sequence
  Cyclic GFR-binding peptide
  MOD_RES (28)..(28): Xaa is C or S
LSPINMLYFDENEKVVYGKIPDMVVEGXG

SEQ ID NO: 68209 - protein, 39 aa, Artificial Sequence; identical to SEQ ID NO: 22326
  Cyclic GFR-binding peptide
  MOD_RES (6)..(7)..(38): Xaa is C or S

SEQ ID NO: 68210 - protein, 31 aa, Artificial Sequence
  Cyclic GFR-binding peptide
  MOD_RES (1)..(1): Xaa is C or S
XVPTKLSPINVLYFDDMGVPTYGKIPEGMSV

SEQ ID NO: 68211 - protein, 34 aa, Artificial Sequence
  Cyclic GFR-binding peptide
  MOD_RES (6)..(7): Xaa is C or S
RVPSTXXAPVKTSPINMLYFDNGRVLLYGKIPMI

SEQ ID NO: 68212 - protein, 33 aa, Artificial Sequence
  Cyclic GFR-binding peptide
  MOD_RES (30)..(32): Xaa is C or S
TRLSPINILYFDSANNVVYGKIPDMVVESXGXR

SEQ ID NO: 68213 - protein, 30 aa, Artificial Sequence
  Cyclic GFR-binding peptide
  MOD_RES (3)..(4): Xaa is C or S
ASXXVPARLSPINILYFDAANNVVYGKIPD

SEQ ID NO: 68214 - protein, 32 aa, Artificial Sequence
  Cyclic GFR-binding peptide
  MOD_RES (2)..(3): Xaa is C or S
TXXVPTRLSPINILYFDSANNVVYGKIPDMVV

SEQ ID NO: 68215 - protein, 32 aa, Artificial Sequence
  Cyclic GFR-binding peptide
  MOD_RES (31)..(31): Xaa is C or S
PARLSPINILYFDAANNVVYGKIPDMVVEAXG

SEQ ID NO: 68216 - protein, 34 aa, Artificial Sequence; identical to SEQ ID NO: 22329
  Cyclic GFR-binding peptide
  MOD_RES (3)..(4): Xaa is C or S

SEQ ID NO: 68217 - protein, 30 aa, Artificial Sequence
  Cyclic GFR-binding peptide
  MOD_RES (30)..(30): Xaa is C or S
TQLSPINVLYFDDSSNVIYGKIPNMVVRAX

SEQ ID NO: 68218 - protein, 24 aa, Artificial Sequence
  Cyclic GFR-binding peptide
TRLSPINILYFDSANNVVYGKIPD

SEQ ID NO: 68219 - protein, 32 aa, Artificial Sequence
  Cyclic GFR-binding peptide
  MOD_RES (5)..(6): Xaa is C or S
VPKAXXAPTKLSPINVLYFDSSNNVIYGKIPN

SEQ ID NO: 68220 - protein, 34 aa, Artificial Sequence; identical to SEQ ID NO: 22330
  Cyclic GFR-binding peptide
  MOD_RES (4)..(4): Xaa is C or S

SEQ ID NO: 68221 - protein, 34 aa, Artificial Sequence
  Cyclic GFR-binding peptide
  MOD_RES (31)..(33): Xaa is C or S
PTKLSPINILYFDKGVVTYYGKIPGMAVSEXGXR

SEQ ID NO: 68222 - protein, 24 aa, Artificial Sequence
  Cyclic GFR-binding peptide
SPINVLYFDSSNNVIYGKIPNMVV

SEQ ID NO: 68223 - protein, 26 aa, Artificial Sequence
  Cyclic GFR-binding peptide
SPINMLYFDEYDKVVYGKIPEMVVEG

SEQ ID NO: 68224 - protein, 36 aa, Artificial Sequence; identical to SEQ ID NO: 22337
  Cyclic GFR-binding peptide
  MOD_RES (3)..(4)..(36): Xaa is C or S

SEQ ID NO: 68225 - protein, 28 aa, Artificial Sequence
  Cyclic GFR-binding peptide
VPTELSPINMLYFDENEKVVYGKIPDMV

SEQ ID NO: 68226 - protein, 30 aa, Artificial Sequence
  Cyclic GFR-binding peptide
PTKLSPINVLYFDSSNNVIYGKIPNMVVKA

SEQ ID NO: 68227 - protein, 27 aa, Artificial Sequence
  Cyclic GFR-binding peptide
PTRLSPINILYFDSANNVVYGKIPDMV

SEQ ID NO: 68228 - protein, 38 aa, Artificial Sequence; identical to SEQ ID NO: 22341
  Cyclic GFR-binding peptide
  MOD_RES (5)..(6)..(38): Xaa is C or S

SEQ ID NO: 68229 - protein, 38 aa, Artificial Sequence; identical to SEQ ID NO: 22346
  Cyclic GFR-binding peptide
  MOD_RES (2)..(3)..(35)..(37): Xaa is C or S

SEQ ID NO: 68230 - protein, 41 aa, Artificial Sequence; identical to SEQ ID NO: 22348
  Cyclic GFR-binding peptide
  MOD_RES (5)..(6)..(38)..(40): Xaa is C or S

SEQ ID NO: 68231 - protein, 25 aa, Artificial Sequence
  Cyclic GFR-binding peptide
VPTRLSPINILYFDSANNVVYGKIP

SEQ ID NO: 68232 - protein, 35 aa, Artificial Sequence
  Cyclic GFR-binding peptide
  MOD_RES (6)..(7): Xaa is C or S
SIPKAXXVPTELSPINMLYFDEYDKVVYGKIPEMV

SEQ ID NO: 68233 - protein, 33 aa, Artificial Sequence; identical to SEQ ID NO: 22352
  Cyclic GFR-binding peptide
  MOD_RES (33)..(33): Xaa is C or S

SEQ ID NO: 68234 - protein, 31 aa, Artificial Sequence
  Cyclic GFR-binding peptide
  MOD_RES (2)..(2): Xaa is C or S
TXAPTKLSPINVLYFDDSSNVIYGKIPNMVV

SEQ ID NO: 68235 - protein, 27 aa, Artificial Sequence
  Cyclic GFR-binding peptide
PTELSPINMLYFDENEKVVYGKIPDMV

SEQ ID NO: 68236 - protein, 36 aa, Artificial Sequence
  Cyclic GFR-binding peptide
  MOD_RES (6)..(7): Xaa is C or S
HVPKPXXAPTKLSPINVLYFDDSSNVIYGKIPNMVV

SEQ ID NO: 68237 - protein, 31 aa, Artificial Sequence
  Cyclic GFR-binding peptide
  MOD_RES (4)..(5): Xaa is C or S
PKAXXVPTELSPINMLYFDEYDKVVYGKIPE

SEQ ID NO: 68238 - protein, 29 aa, Artificial Sequence
  Cyclic GFR-binding peptide
  MOD_RES (1)..(1): Xaa is C or S
XVPARLSPINILYFDAANNVVYGKIPDMV

SEQ ID NO: 68239 - protein, 25 aa, Artificial Sequence
  Cyclic GFR-binding peptide
LSPINMLYFDENEKVVYGKIPDMVV

SEQ ID NO: 68240 - protein, 34 aa, Artificial Sequence
  Cyclic GFR-binding peptide
  MOD_RES (5)..(6): Xaa is C or S
IPKAXXVPTELSPINMLYFDEYDKVVYGKIPEMV

SEQ ID NO: 68241 - protein, 22 aa, Artificial Sequence
  Cyclic GFR-binding peptide
ELSPINMLYFDENEKVVYGKIP

SEQ ID NO: 68242 - protein, 38 aa, Artificial Sequence
  Cyclic GFR-binding peptide
  MOD_RES (6)..(7): Xaa is C or S
KVGKAXXVPTKLSPINVLYFDDMGVPTYGKIPEGMSVA

SEQ ID NO: 68243 - protein, 33 aa, Artificial Sequence; identical to SEQ ID NO: 22356
  Cyclic GFR-binding peptide
  MOD_RES (32)..(32): Xaa is C or S

SEQ ID NO: 68244 - protein, 34 aa, Artificial Sequence; identical to SEQ ID NO: 22357
  Cyclic GFR-binding peptide
  MOD_RES (1)..(33): Xaa is C or S

SEQ ID NO: 68245 - protein, 30 aa, Artificial Sequence
  Cyclic GFR-binding peptide
  MOD_RES (29)..(29): Xaa is C or S
RLSPINILYFDAANNVVYGKIPDMVVEAXG

SEQ ID NO: 68246 - protein, 20 aa, Artificial Sequence
  Cyclic GFR-binding peptide
SPINILYFDKGVVTYYGKIP

SEQ ID NO: 68247 - protein, 27 aa, Artificial Sequence
  Cyclic GFR-binding peptide
  MOD_RES (27)..(27): Xaa is C or S
SPINILYFDAANNVVYGKIPDMVVEAX

SEQ ID NO: 68248 - protein, 29 aa, Artificial Sequence
  Cyclic GFR-binding peptide
  MOD_RES (26)..(28): Xaa is C or S
SPINMLYFDNGRVLLYGKIPMIVEEXGXL

SEQ ID NO: 68249 - protein, 30 aa, Artificial Sequence
  Cyclic GFR-binding peptide
  MOD_RES (27)..(29): Xaa is C or S
SPINVLYFDDSSNVIYGKIPNMVVRAXGXH

SEQ ID NO: 68250 - protein, 31 aa, Artificial Sequence
  Cyclic GFR-binding peptide
  MOD_RES (4)..(5): Xaa is C or S
PSTXXAPVKTSPINMLYFDNGRVLLYGKIPM

SEQ ID NO: 68251 - protein, 33 aa, Artificial Sequence
  Cyclic GFR-binding peptide
  MOD_RES (5)..(6): Xaa is C or S
TPPTXXVPTRLSPINILYFDSANNVVYGKIPDM

SEQ ID NO: 68252 - protein, 37 aa, Artificial Sequence; identical to SEQ ID NO: 22362
  Cyclic GFR-binding peptide
  MOD_RES (4)..(5)..(37): Xaa is C or S

SEQ ID NO: 68253 - protein, 26 aa, Artificial Sequence
  Cyclic GFR-binding peptide
  MOD_RES (1)..(1): Xaa is C or S
XVPARLSPINILYFDAANNVVYGKIP

SEQ ID NO: 68254 - protein, 31 aa, Artificial Sequence
  Cyclic GFR-binding peptide
  MOD_RES (1)..(2): Xaa is C or S
XXVPTKLSPINVLYFDDMGVPTYGKIPEGMS

SEQ ID NO: 68255 - protein, 23 aa, Artificial Sequence
  Cyclic GFR-binding peptide
RLSPINILYFDSANNVVYGKIPD

SEQ ID NO: 68256 - protein, 40 aa, Artificial Sequence; identical to SEQ ID NO: 22363
  Cyclic GFR-binding peptide
  MOD_RES (6)..(7)..(39): Xaa is C or S

SEQ ID NO: 68257 - protein, 33 aa, Artificial Sequence
  Cyclic GFR-binding peptide
  MOD_RES (31)..(33): Xaa is C or S
PTRLSPINILYFDSANNVVYGKIPDMVVESXGX

SEQ ID NO: 68258 - protein, 34 aa, Artificial Sequence; identical to SEQ ID NO: 22364
  Cyclic GFR-binding peptide
  MOD_RES (2)..(3): Xaa is C or S

SEQ ID NO: 68259 - protein, 37 aa, Artificial Sequence; identical to SEQ ID NO: 22366
  Cyclic GFR-binding peptide
  MOD_RES (6)..(6): Xaa is C or S

SEQ ID NO: 68260 - protein, 34 aa, Artificial Sequence
  Cyclic GFR-binding peptide
  MOD_RES (32)..(34): Xaa is C or S
PTKLSPINVLYFDDMGVPTYGKIPEGMSVAEXGX

SEQ ID NO: 68261 - protein, 31 aa, Artificial Sequence
  Cyclic GFR-binding peptide
  MOD_RES (5)..(6): Xaa is C or S
IPKAXXVPTELSPINMLYFDEYDKVVYGKIP

SEQ ID NO: 68262 - protein, 26 aa, Artificial Sequence
  Cyclic GFR-binding peptide
PTKLSPINVLYFDSSNNVIYGKIPNM

SEQ ID NO: 68263 - protein, 30 aa, Artificial Sequence
  Cyclic GFR-binding peptide
  MOD_RES (3)..(3): Xaa is C or S
PTXAPTKLSPINVLYFDDSSNVIYGKIPNM

SEQ ID NO: 68264 - protein, 35 aa, Artificial Sequence
  Cyclic GFR-binding peptide
  MOD_RES (6)..(7): Xaa is C or S
KASKAXXVPTKLSPINILYFDKGVVTYYGKIPGMA

SEQ ID NO: 68265 - protein, 25 aa, Artificial Sequence
  Cyclic GFR-binding peptide
VPTELSPINMLYFDENEKVVYGKIP

SEQ ID NO: 68266 - protein, 32 aa, Artificial Sequence
  Cyclic GFR-binding peptide
  MOD_RES (3)..(4): Xaa is C or S
KAXXVPTKLSPINILYFDKGVVTYYGKIPGMA

SEQ ID NO: 68267 - protein, 30 aa, Artificial Sequence
  Cyclic GFR-binding peptide
  MOD_RES (29)..(29): Xaa is C or S
QLSPINVLYFDDSSNVIYGKIPNMVVRAXG

SEQ ID NO: 68268 - protein, 30 aa, Artificial Sequence
  Cyclic GFR-binding peptide
  MOD_RES (30)..(30): Xaa is C or S
ARLSPINILYFDAANNVVYGKIPDMVVEAX

SEQ ID NO: 68269 - protein, 31 aa, Artificial Sequence; identical to SEQ ID NO: 22371
  Cyclic GFR-binding peptide

SEQ ID NO: 68270 - protein, 33 aa, Artificial Sequence
  Cyclic GFR-binding peptide
  MOD_RES (4)..(5): Xaa is C or S
PKAXXAPTKLSPINVLYFDSSNNVIYGKIPNMV

SEQ ID NO: 68271 - protein, 36 aa, Artificial Sequence
  Cyclic GFR-binding peptide
  MOD_RES (6)..(7): Xaa is C or S
STPPTXXVPTRLSPINILYFDSANNVVYGKIPDMVV

SEQ ID NO: 68272 - protein, 39 aa, Artificial Sequence; identical to SEQ ID NO: 22374
  Cyclic GFR-binding peptide
  MOD_RES (3)..(4)..(36)..(38): Xaa is C or S

SEQ ID NO: 68273 - protein, 27 aa, Artificial Sequence
  Cyclic GFR-binding peptide
  MOD_RES (1)..(1): Xaa is C or S
XVPARLSPINILYFDAANNVVYGKIPD

SEQ ID NO: 68274 - protein, 25 aa, Artificial Sequence
  Cyclic GFR-binding peptide
PTRLSPINILYFDSANNVVYGKIPD

SEQ ID NO: 68275 - protein, 26 aa, Artificial Sequence
  Cyclic GFR-binding peptide
SPINMLYFDENEKVVYGKIPDMVVEG

SEQ ID NO: 68276 - protein, 31 aa, Artificial Sequence
  Cyclic GFR-binding peptide
  MOD_RES (31)..(31): Xaa is C or S
TKLSPINVLYFDDMGVPTYGKIPEGMSVAEX

SEQ ID NO: 68277 - protein, 31 aa, Artificial Sequence
  Cyclic GFR-binding peptide
  MOD_RES (28)..(30): Xaa is C or S
LSPINILYFDAANNVVYGKIPDMVVEAXGXR

SEQ ID NO: 68278 - protein, 32 aa, Artificial Sequence; identical to SEQ ID NO: 22386
  Cyclic GFR-binding peptide
  MOD_RES (1)..(2): Xaa is C or S

SEQ ID NO: 68279 - protein, 36 aa, Artificial Sequence; identical to SEQ ID NO: 22387
  Cyclic GFR-binding peptide
  MOD_RES (4)..(5)..(36): Xaa is C or S

SEQ ID NO: 68280 - protein, 35 aa, Artificial Sequence; identical to SEQ ID NO: 22388
  Cyclic GFR-binding peptide
  MOD_RES (2)..(3)..(35): Xaa is C or S

SEQ ID NO: 68281 - protein, 29 aa, Artificial Sequence
  Cyclic GFR-binding peptide
  MOD_RES (1)..(2): Xaa is C or S
XXAPTKLSPINVLYFDSSNNVIYGKIPNM

SEQ ID NO: 68282 - protein, 31 aa, Artificial Sequence; identical to SEQ ID NO: 22390
  Cyclic GFR-binding peptide
  MOD_RES (1)..(1): Xaa is C or S

SEQ ID NO: 68283 - protein, 30 aa, Artificial Sequence
  Cyclic GFR-binding peptide
  MOD_RES (2)..(3): Xaa is C or S
PXXAPTKLSPINVLYFDDSSNVIYGKIPNM

SEQ ID NO: 68284 - protein, 24 aa, Artificial Sequence
  Cyclic GFR-binding peptide
SPINVLYFDDMGVPTYGKIPEGMS

SEQ ID NO: 68285 - protein, 33 aa, Artificial Sequence; identical to SEQ ID NO: 22392
  Cyclic GFR-binding peptide
  MOD_RES (1)..(33): Xaa is C or S

SEQ ID NO: 68286 - protein, 34 aa, Artificial Sequence; identical to SEQ ID NO: 22396
  Cyclic GFR-binding peptide
  MOD_RES (3)..(4): Xaa is C or S

SEQ ID NO: 68287 - protein, 24 aa, Artificial Sequence
  Cyclic GFR-binding peptide
SPINMLYFDNGRVLLYGKIPMIVE

SEQ ID NO: 68288 - protein, 38 aa, Artificial Sequence; identical to SEQ ID NO: 22402
  Cyclic GFR-binding peptide
  MOD_RES (3)..(4)..(36)..(38): Xaa is C or S

SEQ ID NO: 68289 - protein, 30 aa, Artificial Sequence
  Cyclic GFR-binding peptide
  MOD_RES (29)..(29): Xaa is C or S
VKTSPINMLYFDNGRVLLYGKIPMIVEEXG

SEQ ID NO: 68290 - protein, 37 aa, Artificial Sequence; identical to SEQ ID NO: 22403
  Cyclic GFR-binding peptide
  MOD_RES (6)..(7): Xaa is C or S

SEQ ID NO: 68291 - protein, 35 aa, Artificial Sequence
  Cyclic GFR-binding peptide
  MOD_RES (5)..(6): Xaa is C or S
VPSTXXAPVKTSPINMLYFDNGRVLLYGKIPMIVE

SEQ ID NO: 68292 - protein, 27 aa, Artificial Sequence
  Cyclic GFR-binding peptide
  MOD_RES (27)..(27): Xaa is C or S
SPINVLYFDDSSNVIYGKIPNMVVRAX

SEQ ID NO: 68293 - protein, 25 aa, Artificial Sequence
  Cyclic GFR-binding peptide
SPINILYFDKGVVTYYGKIPGMAVS

SEQ ID NO: 68294 - protein, 29 aa, Artificial Sequence
  Cyclic GFR-binding peptide
TKLSPINVLYFDDSSNVIYGKIPNMVVRS

SEQ ID NO: 68295 - protein, 27 aa, Artificial Sequence
  Cyclic GFR-binding peptide
  MOD_RES (1)..(2): Xaa is C or S
XXVPARLSPINILYFDAANNVVYGKIP

SEQ ID NO: 68296 - protein, 39 aa, Artificial Sequence; identical to SEQ ID NO: 22414
  Cyclic GFR-binding peptide
  MOD_RES (5)..(6)..(38): Xaa is C or S

SEQ ID NO: 68297 - protein, 39 aa, Artificial Sequence; identical to SEQ ID NO: 22416
  Cyclic GFR-binding peptide
  MOD_RES (6)..(7)..(39): Xaa is C or S

SEQ ID NO: 68298 - protein, 40 aa, Artificial Sequence; identical to SEQ ID NO: 22419
  Cyclic GFR-binding peptide
  MOD_RES (3)..(4)..(37)..(39): Xaa is C or S

SEQ ID NO: 68299 - protein, 30 aa, Artificial Sequence
  Cyclic GFR-binding peptide
  MOD_RES (28)..(30): Xaa is C or S
LSPINILYFDSANNVVYGKIPDMVVESXGX

SEQ ID NO: 68300 - protein, 37 aa, Artificial Sequence; identical to SEQ ID NO: 22422
  Cyclic GFR-binding peptide
  MOD_RES (5)..(6): Xaa is C or S

SEQ ID NO: 68301 - protein, 31 aa, Artificial Sequence
  Cyclic GFR-binding peptide
  MOD_RES (29)..(31): Xaa is C or S
KLSPINVLYFDDSSNVIYGKIPNMVVRSXGX

SEQ ID NO: 68302 - protein, 34 aa, Artificial Sequence; identical to SEQ ID NO: 22427
  Cyclic GFR-binding peptide
  MOD_RES (3)..(4): Xaa is C or S

SEQ ID NO: 68303 - protein, 25 aa, Artificial Sequence
  Cyclic GFR-binding peptide
LSPINILYFDSANNVVYGKIPDMVV

SEQ ID NO: 68304 - protein, 33 aa, Artificial Sequence; identical to SEQ ID NO: 22428
  Cyclic GFR-binding peptide
  MOD_RES (1)..(2): Xaa is C or S

SEQ ID NO: 68305 - protein, 32 aa, Artificial Sequence
  Cyclic GFR-binding peptide
  MOD_RES (4)..(5): Xaa is C or S
PKAXXVPTELSPINMLYFDEYDKVVYGKIPEM

SEQ ID NO: 68306 - protein, 32 aa, Artificial Sequence; identical to SEQ ID NO: 22430
  Cyclic GFR-binding peptide
  MOD_RES (1)..(2): Xaa is C or S

SEQ ID NO: 68307 - protein, 35 aa, Artificial Sequence; identical to SEQ ID NO: 22431
  Cyclic GFR-binding peptide
  MOD_RES (1)..(32)..(34): Xaa is C or S

SEQ ID NO: 68308 - protein, 31 aa, Artificial Sequence
  Cyclic GFR-binding peptide
  MOD_RES (28)..(30): Xaa is C or S
LSPINVLYFDDSSNVIYGKIPNMVVRSXGXH

SEQ ID NO: 68309 - protein, 33 aa, Artificial Sequence; identical to SEQ ID NO: 22434
  Cyclic GFR-binding peptide
  MOD_RES (3)..(3): Xaa is C or S

SEQ ID NO: 68310 - protein, 29 aa, Artificial Sequence
  Cyclic GFR-binding peptide
  MOD_RES (3)..(4): Xaa is C or S
KAXXVPTKLSPINILYFDKGVVTYYGKIP

SEQ ID NO: 68311 - protein, 25 aa, Artificial Sequence
  Cyclic GFR-binding peptide
LSPINILYFDKGVVTYYGKIPGMAV

SEQ ID NO: 68312 - protein, 39 aa, Artificial Sequence; identical to SEQ ID NO: 22438
  Cyclic GFR-binding peptide
  MOD_RES (5)..(6)..(38): Xaa is C or S

SEQ ID NO: 68313 - protein, 42 aa, Artificial Sequence; identical to SEQ ID NO: 22439
  Cyclic GFR-binding peptide
  MOD_RES (6)..(7)..(39)..(41): Xaa is C or S

SEQ ID NO: 68314 - protein, 33 aa, Artificial Sequence
  Cyclic GFR-binding peptide
  MOD_RES (30)..(32): Xaa is C or S
TKLSPINILYFDKGVVTYYGKIPGMAVSEXGXR

SEQ ID NO: 68315 - protein, 35 aa, Artificial Sequence; identical to SEQ ID NO: 22444
  Cyclic GFR-binding peptide
  MOD_RES (3)..(35): Xaa is C or S

SEQ ID NO: 68316 - protein, 30 aa, Artificial Sequence
  Cyclic GFR-binding peptide
  MOD_RES (1)..(1): Xaa is C or S
XVPARLSPINILYFDAANNVVYGKIPDMVV

SEQ ID NO: 68317 - protein, 31 aa, Artificial Sequence
  Cyclic GFR-binding peptide
  MOD_RES (4)..(5): Xaa is C or S
PKAXXVPTELSPINMLYFDENEKVVYGKIPD

SEQ ID NO: 68318 - protein, 30 aa, Artificial Sequence
  Cyclic GFR-binding peptide
TKLSPINVLYFDDMGVPTYGKIPEGMSVAE

SEQ ID NO: 68319 - protein, 34 aa, Artificial Sequence
  Cyclic GFR-binding peptide
  MOD_RES (6)..(7): Xaa is C or S
YVPKPXXAPTKLSPINVLYFDDSSNVIYGKIPNM

SEQ ID NO: 68320 - protein, 31 aa, Artificial Sequence; identical to SEQ ID NO: 22451
  Cyclic GFR-binding peptide

SEQ ID NO: 68321 - protein, 31 aa, Artificial Sequence
  Cyclic GFR-binding peptide
  MOD_RES (30)..(30): Xaa is C or S
TELSPINMLYFDENEKVVYGKIPDMVVEGXG

SEQ ID NO: 68322 - protein, 38 aa, Artificial Sequence; identical to SEQ ID NO: 22461
  Cyclic GFR-binding peptide
  MOD_RES (6)..(7)..(38): Xaa is C or S

SEQ ID NO: 68323 - protein, 29 aa, Artificial Sequence
  Cyclic GFR-binding peptide
  MOD_RES (29)..(29): Xaa is C or S
LSPINVLYFDDMGVPTYGKIPEGMSVAEX

SEQ ID NO: 68324 - protein, 34 aa, Artificial Sequence; identical to SEQ ID NO: 22462
  Cyclic GFR-binding peptide
  MOD_RES (1)..(33): Xaa is C or S

SEQ ID NO: 68325 - protein, 29 aa, Artificial Sequence
  Cyclic GFR-binding peptide
  MOD_RES (2)..(3): Xaa is C or S
AXXVPTELSPINMLYFDENEKVVYGKIPD

SEQ ID NO: 68326 - protein, 26 aa, Artificial Sequence
  Cyclic GFR-binding peptide
KLSPINVLYFDDMGVPTYGKIPEGMS

SEQ ID NO: 68327 - protein, 23 aa, Artificial Sequence
  Cyclic GFR-binding peptide
TKLSPINVLYFDSSNNVIYGKIP

SEQ ID NO: 68328 - protein, 25 aa, Artificial Sequence
  Cyclic GFR-binding peptide
PTELSPINMLYFDENEKVVYGKIPD

SEQ ID NO: 68329 - protein, 30 aa, Artificial Sequence; identical to SEQ ID NO: 22465
  Cyclic GFR-binding peptide

SEQ ID NO: 68330 - protein, 31 aa, Artificial Sequence
  Cyclic GFR-binding peptide
  MOD_RES (29)..(31): Xaa is C or S
KLSPINVLYFDSSNNVIYGKIPNMVVKAXGX

SEQ ID NO: 68331 - protein, 30 aa, Artificial Sequence
  Cyclic GFR-binding peptide
  MOD_RES (2)..(3): Xaa is C or S
AXXVPTKLSPINILYFDKGVVTYYGKIPGM

SEQ ID NO: 68332 - protein, 39 aa, Artificial Sequence; identical to SEQ ID NO: 22467
  Cyclic GFR-binding peptide
  MOD_RES (7)..(39): Xaa is C or S

SEQ ID NO: 68333 - protein, 32 aa, Artificial Sequence; identical to SEQ ID NO: 22468
  Cyclic GFR-binding peptide
  MOD_RES (1)..(1): Xaa is C or S

SEQ ID NO: 68334 - protein, 26 aa, Artificial Sequence
  Cyclic GFR-binding peptide
APVKTSPINMLYFDNGRVLLYGKIPM

SEQ ID NO: 68335 - protein, 33 aa, Artificial Sequence
  Cyclic GFR-binding peptide
  MOD_RES (4)..(4): Xaa is C or S
KPTXAPTKLSPINVLYFDDSSNVIYGKIPNMVV

SEQ ID NO: 68336 - protein, 32 aa, Artificial Sequence
  Cyclic GFR-binding peptide
  MOD_RES (30)..(32): Xaa is C or S
TRLSPINILYFDSANNVVYGKIPDMVVESXGX

SEQ ID NO: 68337 - protein, 33 aa, Artificial Sequence; identical to SEQ ID NO: 22471
  Cyclic GFR-binding peptide
  MOD_RES (2)..(3): Xaa is C or S

SEQ ID NO: 68338 - protein, 37 aa, Artificial Sequence; identical to SEQ ID NO: 22472
  Cyclic GFR-binding peptide
  MOD_RES (1)..(2)..(35)..(37): Xaa is C or S

SEQ ID NO: 68339 - protein, 37 aa, Artificial Sequence; identical to SEQ ID NO: 21468
  Cyclic GFR-binding peptide
  MOD_RES (5)..(6): Xaa is C or S

SEQ ID NO: 68340 - protein, 27 aa, Artificial Sequence
  Cyclic GFR-binding peptide
TELSPINMLYFDEYDKVVYGKIPEMVV

SEQ ID NO: 68341 - protein, 22 aa, Artificial Sequence
  Cyclic GFR-binding peptide
LSPINMLYFDEYDKVVYGKIPE

SEQ ID NO: 68342 - protein, 32 aa, Artificial Sequence; identical to SEQ ID NO: 21470
  Cyclic GFR-binding peptide
  MOD_RES (31)..(31): Xaa is C or S

SEQ ID NO: 68343 - protein, 35 aa, Artificial Sequence; identical to SEQ ID NO: 21471
  Cyclic GFR-binding peptide
  MOD_RES (3)..(4): Xaa is C or S

SEQ ID NO: 68344 - protein, 25 aa, Artificial Sequence
  Cyclic GFR-binding peptide
VPTKLSPINVLYFDDMGVPTYGKIP

SEQ ID NO: 68345 - protein, 27 aa, Artificial Sequence
  Cyclic GFR-binding peptide
  MOD_RES (1)..(1): Xaa is C or S
XVPTELSPINMLYFDENEKVVYGKIPD

SEQ ID NO: 68346 - protein, 29 aa, Artificial Sequence
  Cyclic GFR-binding peptide
VPARLSPINILYFDAANNVVYGKIPDMVV

SEQ ID NO: 68347 - protein, 39 aa, Artificial Sequence; identical to SEQ ID NO: 21473
  Cyclic GFR-binding peptide
  MOD_RES (3)..(4)..(36)..(38): Xaa is C or S

SEQ ID NO: 68348 - protein, 35 aa, Artificial Sequence; identical to SEQ ID NO: 21475
  Cyclic GFR-binding peptide
  MOD_RES (2)..(3)..(35): Xaa is C or S

SEQ ID NO: 68349 - protein, 30 aa, Artificial Sequence
  Cyclic GFR-binding peptide
PARLSPINILYFDAANNVVYGKIPDMVVEA

SEQ ID NO: 68350 - protein, 31 aa, Artificial Sequence
  Cyclic GFR-binding peptide
  MOD_RES (5)..(6): Xaa is C or S
TPPTXXVPTRLSPINILYFDSANNVVYGKIP

SEQ ID NO: 68351 - protein, 34 aa, Artificial Sequence; identical to SEQ ID NO: 21480
  Cyclic GFR-binding peptide
  MOD_RES (1)..(33): Xaa is C or S

SEQ ID NO: 68352 - protein, 27 aa, Artificial Sequence
  Cyclic GFR-binding peptide
  MOD_RES (26)..(26): Xaa is C or S
SPINMLYFDNGRVLLYGKIPMIVEEXG

SEQ ID NO: 68353 - protein, 36 aa, Artificial Sequence; identical to SEQ ID NO: 21484
  Cyclic GFR-binding peptide
  MOD_RES (5)..(6): Xaa is C or S

SEQ ID NO: 68354 - protein, 32 aa, Artificial Sequence
  Cyclic GFR-binding peptide
  MOD_RES (3)..(4): Xaa is C or S
KPXXAPTQLSPINVLYFDDSSNVIYGKIPNMV

SEQ ID NO: 68355 - protein, 25 aa, Artificial Sequence
  Cyclic GFR-binding peptide
TKLSPINILYFDKGVVTYYGKIPGM

SEQ ID NO: 68356 - protein, 36 aa, Artificial Sequence; identical to SEQ ID NO: 21491
  Cyclic GFR-binding peptide
  MOD_RES (2)..(3)..(35): Xaa is C or S

SEQ ID NO: 68357 - protein, 21 aa, Artificial Sequence
  Cyclic GFR-binding peptide
LSPINVLYFDDMGVPTYGKIP

SEQ ID NO: 68358 - protein, 42 aa, Artificial Sequence; identical to SEQ ID NO: 21492
  Cyclic GFR-binding peptide
  MOD_RES (5)..(6)..(39)..(41): Xaa is C or S

SEQ ID NO: 68359 - protein, 32 aa, Artificial Sequence
  Cyclic GFR-binding peptide
  MOD_RES (30)..(32): Xaa is C or S
PVKTSPINMLYFDNGRVLLYGKIPMIVEEXGX

SEQ ID NO: 68360 - protein, 21 aa, Artificial Sequence
  Cyclic GFR-binding peptide
LSPINVLYFDDSSNVIYGKIP

SEQ ID NO: 68361 - protein, 29 aa, Artificial Sequence
  Cyclic GFR-binding peptide
  MOD_RES (27)..(29): Xaa is C or S
SPINILYFDKGVVTYYGKIPGMAVSEXGX

SEQ ID NO: 68362 - protein, 29 aa, Artificial Sequence
  Cyclic GFR-binding peptide
PTELSPINMLYFDEYDKVVYGKIPEMVVE

SEQ ID NO: 68363 - protein, 27 aa, Artificial Sequence
  Cyclic GFR-binding peptide
QLSPINVLYFDDSSNVIYGKIPNMVVR

SEQ ID NO: 68364 - protein, 23 aa, Artificial Sequence
  Cyclic GFR-binding peptide
SPINILYFDAANNVVYGKIPDMV

SEQ ID NO: 68365 - protein, 31 aa, Artificial Sequence
  Cyclic GFR-binding peptide
  MOD_RES (31)..(31): Xaa is C or S
PTKLSPINILYFDKGVVTYYGKIPGMAVSEX

SEQ ID NO: 68366 - protein, 26 aa, Artificial Sequence
  Cyclic GFR-binding peptide
SPINVLYFDDSSNVIYGKIPNMVVRS

SEQ ID NO: 68367 - protein, 26 aa, Artificial Sequence
  Cyclic GFR-binding peptide
VPTRLSPINILYFDSANNVVYGKIPD

SEQ ID NO: 68368 - protein, 34 aa, Artificial Sequence; identical to SEQ ID NO: 21505
  Cyclic GFR-binding peptide
  MOD_RES (2)..(3): Xaa is C or S

SEQ ID NO: 68369 - protein, 24 aa, Artificial Sequence
  Cyclic GFR-binding peptide
TKLSPINVLYFDDMGVPTYGKIPE

SEQ ID NO: 68370 - protein, 37 aa, Artificial Sequence; identical to SEQ ID NO: 21506
  Cyclic GFR-binding peptide
  MOD_RES (2)..(34)..(36): Xaa is C or S

SEQ ID NO: 68371 - protein, 24 aa, Artificial Sequence
  Cyclic GFR-binding peptide
TELSPINMLYFDEYDKVVYGKIPE

SEQ ID NO: 68372 - protein, 31 aa, Artificial Sequence
  Cyclic GFR-binding peptide
  MOD_RES (29)..(31): Xaa is C or S
VKTSPINMLYFDNGRVLLYGKIPMIVEEXGX

SEQ ID NO: 68373 - protein, 39 aa, Artificial Sequence; identical to SEQ ID NO: 21508
  Cyclic GFR-binding peptide
  MOD_RES (3)..(4)..(36)..(38): Xaa is C or S

SEQ ID NO: 68374 - protein, 37 aa, Artificial Sequence; identical to SEQ ID NO: 21509
  Cyclic GFR-binding peptide
  MOD_RES (2)..(3)..(36): Xaa is C or S

SEQ ID NO: 68375 - protein, 34 aa, Artificial Sequence; identical to SEQ ID NO: 21511
  Cyclic GFR-binding peptide
  MOD_RES (1)..(32)..(34): Xaa is C or S

SEQ ID NO: 68376 - protein, 33 aa, Artificial Sequence
  Cyclic GFR-binding peptide
  MOD_RES (3)..(4): Xaa is C or S
KAXXVPTKLSPINVLYFDDMGVPTYGKIPEGMS

SEQ ID NO: 68377 - protein, 36 aa, Artificial Sequence; identical to SEQ ID NO: 21513
  Cyclic GFR-binding peptide
  MOD_RES (1)..(33)..(35): Xaa is C or S

SEQ ID NO: 68378 - protein, 31 aa, Artificial Sequence
  Cyclic GFR-binding peptide
  MOD_RES (3)..(4): Xaa is C or S
ASXXVPARLSPINILYFDAANNVVYGKIPDM

SEQ ID NO: 68379 - protein, 23 aa, Artificial Sequence
  Cyclic GFR-binding peptide
TELSPINMLYFDENEKVVYGKIP

SEQ ID NO: 68380 - protein, 35 aa, Artificial Sequence; identical to SEQ ID NO: 21519
  Cyclic GFR-binding peptide
  MOD_RES (1)..(33)..(35): Xaa is C or S

SEQ ID NO: 68381 - protein, 29 aa, Artificial Sequence
  Cyclic GFR-binding peptide
  MOD_RES (1)..(2): Xaa is C or S
XXVPTELSPINMLYFDENEKVVYGKIPDM

SEQ ID NO: 68382 - protein, 26 aa, Artificial Sequence
  Cyclic GFR-binding peptide
APTKLSPINVLYFDSSNNVIYGKIPN

SEQ ID NO: 68383 - protein, 26 aa, Artificial Sequence
  Cyclic GFR-binding peptide
SPINVLYFDDSSNVIYGKIPNMVVRA

SEQ ID NO: 68384 - protein, 39 aa, Artificial Sequence; identical to SEQ ID NO: 21526
  Cyclic GFR-binding peptide
  MOD_RES (6)..(38): Xaa is C or S

SEQ ID NO: 68385 - protein, 30 aa, Artificial Sequence
  Cyclic GFR-binding peptide
  MOD_RES (28)..(30): Xaa is C or S
LSPINVLYFDDSSNVIYGKIPNMVVRAXGX

SEQ ID NO: 68386 - protein, 32 aa, Artificial Sequence
  Cyclic GFR-binding peptide
  MOD_RES (4)..(5): Xaa is C or S
PKAXXAPTKLSPINVLYFDSSNNVIYGKIPNM

SEQ ID NO: 68387 - protein, 36 aa, Artificial Sequence
  Cyclic GFR-binding peptide
  MOD_RES (6)..(7): Xaa is C or S
SIPKAXXVPTELSPINMLYFDEYDKVVYGKIPEMVV

SEQ ID NO: 68388 - protein, 32 aa, Artificial Sequence; identical to SEQ ID NO: 21531
  Cyclic GFR-binding peptide
  MOD_RES (1)..(1): Xaa is C or S

SEQ ID NO: 68389 - protein, 33 aa, Artificial Sequence
  Cyclic GFR-binding peptide
  MOD_RES (5)..(6): Xaa is C or S
ASKAXXVPTKLSPINILYFDKGVVTYYGKIPGM

SEQ ID NO: 68390 - protein, 28 aa, Artificial Sequence
  Cyclic GFR-binding peptide
  MOD_RES (2)..(3): Xaa is C or S
AXXVPTKLSPINILYFDKGVVTYYGKIP

SEQ ID NO: 68391 - protein, 27 aa, Artificial Sequence
  Cyclic GFR-binding peptide
  MOD_RES (1)..(1): Xaa is C or S
XVPTKLSPINILYFDKGVVTYYGKIPG

SEQ ID NO: 68392 - protein, 31 aa, Artificial Sequence
  Cyclic GFR-binding peptide
  MOD_RES (5)..(6): Xaa is C or S
ASKAXXVPTKLSPINILYFDKGVVTYYGKIP

SEQ ID NO: 68393 - protein, 23 aa, Artificial Sequence
  Cyclic GFR-binding peptide
KLSPINVLYFDDMGVPTYGKIPE

SEQ ID NO: 68394 - protein, 37 aa, Artificial Sequence; identical to SEQ ID NO: 21537
  Cyclic GFR-binding peptide
  MOD_RES (5)..(6): Xaa is C or S

SEQ ID NO: 68395 - protein, 29 aa, Artificial Sequence
  Cyclic GFR-binding peptide
  MOD_RES (27)..(29): Xaa is C or S
SPINVLYFDSSNNVIYGKIPNMVVKAXGX

SEQ ID NO: 68396 - protein, 34 aa, Artificial Sequence; identical to SEQ ID NO: 21536
  Cyclic GFR-binding peptide
  MOD_RES (1)..(33): Xaa is C or S

SEQ ID NO: 68397 - protein, 41 aa, Artificial Sequence; identical to SEQ ID NO: 21541
  Cyclic GFR-binding peptide
  MOD_RES (7)..(39)..(41): Xaa is C or S

SEQ ID NO: 68398 - protein, 30 aa, Artificial Sequence
  Cyclic GFR-binding peptide
  MOD_RES (27)..(29): Xaa is C or S
SPINVLYFDSSNNVIYGKIPNMVVKAXGXH

SEQ ID NO: 68399 - protein, 31 aa, Artificial Sequence
  Cyclic GFR-binding peptide
  MOD_RES (28)..(30): Xaa is C or S
KTSPINMLYFDNGRVLLYGKIPMIVEEXGXL

SEQ ID NO: 68400 - protein, 20 aa, Artificial Sequence
  Cyclic GFR-binding peptide
SPINMLYFDNGRVLLYGKIP

SEQ ID NO: 68401 - protein, 31 aa, Artificial Sequence
  Cyclic GFR-binding peptide
  MOD_RES (28)..(30): Xaa is C or S
LSPINILYFDSANNVVYGKIPDMVVESXGXR

SEQ ID NO: 68402 - protein, 41 aa, Artificial Sequence; identical to SEQ ID NO: 21543
  Cyclic GFR-binding peptide
  MOD_RES (6)..(7)..(39)..(41): Xaa is C or S

SEQ ID NO: 68403 - protein, 31 aa, Artificial Sequence
  Cyclic GFR-binding peptide
  MOD_RES (1)..(2): Xaa is C or S
XXAPTQLSPINVLYFDDSSNVIYGKIPNMVV

SEQ ID NO: 68404 - protein, 30 aa, Artificial Sequence
  Cyclic GFR-binding peptide
  MOD_RES (1)..(2): Xaa is C or S
XXAPVKTSPINMLYFDNGRVLLYGKIPMIV

SEQ ID NO: 68405 - protein, 32 aa, Artificial Sequence
  Cyclic GFR-binding peptide
  MOD_RES (31)..(31): Xaa is C or S
PTKLSPINVLYFDSSNNVIYGKIPNMVVKAXG

SEQ ID NO: 68406 - protein, 38 aa, Artificial Sequence; identical to SEQ ID NO: 21546
  Cyclic GFR-binding peptide
  MOD_RES (5)..(6)..(38): Xaa is C or S

SEQ ID NO: 68407 - protein, 35 aa, Artificial Sequence; identical to SEQ ID NO: 21548
  Cyclic GFR-binding peptide
  MOD_RES (4)..(5): Xaa is C or S

SEQ ID NO: 68408 - protein, 31 aa, Artificial Sequence
  Cyclic GFR-binding peptide
  MOD_RES (30)..(30): Xaa is C or S
ARLSPINILYFDAANNVVYGKIPDMVVEAXG

SEQ ID NO: 68409 - protein, 39 aa, Artificial Sequence; identical to SEQ ID NO: 21550
  Cyclic GFR-binding peptide
  MOD_RES (6)..(7): Xaa is C or S

SEQ ID NO: 68410 - protein, 31 aa, Artificial Sequence; identical to SEQ ID NO: 21551
  Cyclic GFR-binding peptide

SEQ ID NO: 68411 - protein, 32 aa, Artificial Sequence
  Cyclic GFR-binding peptide
  MOD_RES (4)..(5): Xaa is C or S
PASXXVPARLSPINILYFDAANNVVYGKIPDM

SEQ ID NO: 68412 - protein, 28 aa, Artificial Sequence
  Cyclic GFR-binding peptide
  MOD_RES (1)..(1): Xaa is C or S
XVPTKLSPINILYFDKGVVTYYGKIPGM

SEQ ID NO: 68413 - protein, 30 aa, Artificial Sequence
  Cyclic GFR-binding peptide
  MOD_RES (27)..(29): Xaa is C or S
SPINMLYFDENEKVVYGKIPDMVVEGXGXR

SEQ ID NO: 68414 - protein, 32 aa, Artificial Sequence
  Cyclic GFR-binding peptide
  MOD_RES (2)..(3): Xaa is C or S
PXXAPTQLSPINVLYFDDSSNVIYGKIPNMVV

SEQ ID NO: 68415 - protein, 32 aa, Artificial Sequence
  Cyclic GFR-binding peptide
  MOD_RES (29)..(31): Xaa is C or S
KLSPINVLYFDDSSNVIYGKIPNMVVRSXGXH

SEQ ID NO: 68416 - protein, 34 aa, Artificial Sequence
  Cyclic GFR-binding peptide
  MOD_RES (4)..(5): Xaa is C or S
PKAXXVPTELSPINMLYFDENEKVVYGKIPDMVV

SEQ ID NO: 68417 - protein, 33 aa, Artificial Sequence
  Cyclic GFR-binding peptide
  MOD_RES (6)..(7): Xaa is C or S
STPPTXXVPTRLSPINILYFDSANNVVYGKIPD

SEQ ID NO: 68418 - protein, 35 aa, Artificial Sequence; identical to SEQ ID NO: 21559
  Cyclic GFR-binding peptide
  MOD_RES (1)..(2)..(34): Xaa is C or S

SEQ ID NO: 68419 - protein, 40 aa, Artificial Sequence; identical to SEQ ID NO: 21564
  Cyclic GFR-binding peptide
  MOD_RES (6)..(7)..(39): Xaa is C or S

SEQ ID NO: 68420 - protein, 36 aa, Artificial Sequence; identical to SEQ ID NO: 21565
  Cyclic GFR-binding peptide
  MOD_RES (2)..(3)..(35): Xaa is C or S

SEQ ID NO: 68421 - protein, 34 aa, Artificial Sequence; identical to SEQ ID NO: 21566
  Cyclic GFR-binding peptide
  MOD_RES (32)..(34): Xaa is C or S

SEQ ID NO: 68422 - protein, 30 aa, Artificial Sequence
  Cyclic GFR-binding peptide
PTQLSPINVLYFDDSSNVIYGKIPNMVVRA

SEQ ID NO: 68423 - protein, 39 aa, Artificial Sequence; identical to SEQ ID NO: 21568
  Cyclic GFR-binding peptide
  MOD_RES (5)..(6)..(38): Xaa is C or S

SEQ ID NO: 68424 - protein, 27 aa, Artificial Sequence
  Cyclic GFR-binding peptide
VPARLSPINILYFDAANNVVYGKIPDM

SEQ ID NO: 68425 - protein, 22 aa, Artificial Sequence
  Cyclic GFR-binding peptide
SPINMLYFDENEKVVYGKIPDM

SEQ ID NO: 68426 - protein, 36 aa, Artificial Sequence; identical to SEQ ID NO: 21571
  Cyclic GFR-binding peptide
  MOD_RES (4)..(5): Xaa is C or S

SEQ ID NO: 68427 - protein, 35 aa, Artificial Sequence; identical to SEQ ID NO: 21573
  Cyclic GFR-binding peptide
  MOD_RES (3)..(4)..(35): Xaa is C or S

SEQ ID NO: 68428 - protein, 28 aa, Artificial Sequence
  Cyclic GFR-binding peptide
ELSPINMLYFDEYDKVVYGKIPEMVVEG

SEQ ID NO: 68429 - protein, 29 aa, Artificial Sequence
  Cyclic GFR-binding peptide
  MOD_RES (28)..(28): Xaa is C or S
LSPINMLYFDEYDKVVYGKIPEMVVEGXG

SEQ ID NO: 68430 - protein, 23 aa, Artificial Sequence
  Cyclic GFR-binding peptide
SPINMLYFDEYDKVVYGKIPEMV

SEQ ID NO: 68431 - protein, 32 aa, Artificial Sequence; identical to SEQ ID NO: 21582
  Cyclic GFR-binding peptide
  MOD_RES (1)..(2): Xaa is C or S

SEQ ID NO: 68432 - protein, 33 aa, Artificial Sequence
  Cyclic GFR-binding peptide
  MOD_RES (30)..(32): Xaa is C or S
ARLSPINILYFDAANNVVYGKIPDMVVEAXGXR

SEQ ID NO: 68433 - protein, 33 aa, Artificial Sequence; identical to SEQ ID NO: 21589
  Cyclic GFR-binding peptide
  MOD_RES (1)..(2): Xaa is C or S

SEQ ID NO: 68434 - protein, 35 aa, Artificial Sequence
  Cyclic GFR-binding peptide
  MOD_RES (5)..(6): Xaa is C or S
VPKPXXAPTKLSPINVLYFDDSSNVIYGKIPNMVV

SEQ ID NO: 68435 - protein, 35 aa, Artificial Sequence; identical to SEQ ID NO: 21590
  Cyclic GFR-binding peptide
  MOD_RES (1)..(33)..(35): Xaa is C or S

SEQ ID NO: 68436 - protein, 37 aa, Artificial Sequence; identical to SEQ ID NO: 21591
  Cyclic GFR-binding peptide
  MOD_RES (3)..(4)..(36): Xaa is C or S

SEQ ID NO: 68437 - protein, 34 aa, Artificial Sequence; identical to SEQ ID NO: 21595
  Cyclic GFR-binding peptide
  MOD_RES (3)..(4): Xaa is C or S

SEQ ID NO: 68438 - protein, 33 aa, Artificial Sequence
  Cyclic GFR-binding peptide
  MOD_RES (5)..(6): Xaa is C or S
VPKPXXAPTKLSPINVLYFDDSSNVIYGKIPNM

SEQ ID NO: 68439 - protein, 36 aa, Artificial Sequence; identical to SEQ ID NO: 21603
  Cyclic GFR-binding peptide
  MOD_RES (5)..(6): Xaa is C or S

SEQ ID NO: 68440 - protein, 22 aa, Artificial Sequence
  Cyclic GFR-binding peptide
ELSPINMLYFDEYDKVVYGKIP

SEQ ID NO: 68441 - protein, 40 aa, Artificial Sequence; identical to SEQ ID NO: 21609
  Cyclic GFR-binding peptide
  MOD_RES (5)..(6)..(38)..(40): Xaa is C or S

SEQ ID NO: 68442 - protein, 32 aa, Artificial Sequence
  Cyclic GFR-binding peptide
  MOD_RES (4)..(4): Xaa is C or S
KPTXAPTKLSPINVLYFDDSSNVIYGKIPNMV

SEQ ID NO: 68443 - protein, 32 aa, Artificial Sequence; identical to SEQ ID NO: 21618
  Cyclic GFR-binding peptide
  MOD_RES (1)..(2): Xaa is C or S

SEQ ID NO: 68444 - protein, 36 aa, Artificial Sequence; identical to SEQ ID NO: 21621
  Cyclic GFR-binding peptide
  MOD_RES (2)..(3)..(35): Xaa is C or S

SEQ ID NO: 68445 - protein, 22 aa, Artificial Sequence
  Cyclic GFR-binding peptide
KTSPINMLYFDNGRVLLYGKIP

SEQ ID NO: 68446 - protein, 30 aa, Artificial Sequence
  Cyclic GFR-binding peptide
  MOD_RES (4)..(5): Xaa is C or S
PKAXXAPTKLSPINVLYFDSSNNVIYGKIP

SEQ ID NO: 68447 - protein, 33 aa, Artificial Sequence
  Cyclic GFR-binding peptide
  MOD_RES (31)..(33): Xaa is C or S
TKLSPINVLYFDDMGVPTYGKIPEGMSVAEXGX

SEQ ID NO: 68448 - protein, 28 aa, Artificial Sequence
  Cyclic GFR-binding peptide
  MOD_RES (28)..(28): Xaa is C or S
LSPINILYFDSANNVVYGKIPDMVVESX

SEQ ID NO: 68449 - protein, 29 aa, Artificial Sequence
  Cyclic GFR-binding peptide
TKLSPINILYFDKGVVTYYGKIPGMAVSE

SEQ ID NO: 68450 - protein, 36 aa, Artificial Sequence
  Cyclic GFR-binding peptide
  MOD_RES (4)..(5): Xaa is C or S
GKAXXVPTKLSPINVLYFDDMGVPTYGKIPEGMSVA

SEQ ID NO: 68451 - protein, 36 aa, Artificial Sequence; identical to SEQ ID NO: 21625
  Cyclic GFR-binding peptide
  MOD_RES (1)..(2)..(34)..(36): Xaa is C or S

SEQ ID NO: 68452 - protein, 38 aa, Artificial Sequence; identical to SEQ ID NO: 21627
  Cyclic GFR-binding peptide
  MOD_RES (5)..(6)..(38): Xaa is C or S

SEQ ID NO: 68453 - protein, 31 aa, Artificial Sequence
  Cyclic GFR-binding peptide
  MOD_RES (4)..(5): Xaa is C or S
PKPXXAPTKLSPINVLYFDDSSNVIYGKIPN

SEQ ID NO: 68454 - protein, 40 aa, Artificial Sequence; identical to SEQ ID NO: 21635
  Cyclic GFR-binding peptide
  MOD_RES (5)..(37)..(39): Xaa is C or S

SEQ ID NO: 68455 - protein, 39 aa, Artificial Sequence; identical to SEQ ID NO: 21636
  Cyclic GFR-binding peptide
  MOD_RES (4)..(5)..(37)..(39): Xaa is C or S

SEQ ID NO: 68456 - protein, 26 aa, Artificial Sequence
  Cyclic GFR-binding peptide
PTELSPINMLYFDEYDKVVYGKIPEM

SEQ ID NO: 68457 - protein, 25 aa, Artificial Sequence
  Cyclic GFR-binding peptide
PTELSPINMLYFDEYDKVVYGKIPE

SEQ ID NO: 68458 - protein, 34 aa, Artificial Sequence; identical to SEQ ID NO: 21641
  Cyclic GFR-binding peptide
  MOD_RES (2)..(3): Xaa is C or S

SEQ ID NO: 68459 - protein, 35 aa, Artificial Sequence
  Cyclic GFR-binding peptide
  MOD_RES (6)..(7): Xaa is C or S
KVGKAXXVPTKLSPINVLYFDDMGVPTYGKIPEGM

SEQ ID NO: 68460 - protein, 33 aa, Artificial Sequence; identical to SEQ ID NO: 21643
  Cyclic GFR-binding peptide
  MOD_RES (2)..(3): Xaa is C or S

SEQ ID NO: 68461 - protein, 30 aa, Artificial Sequence
  Cyclic GFR-binding peptide
  MOD_RES (3)..(4): Xaa is C or S
KAXXVPTKLSPINILYFDKGVVTYYGKIPG

SEQ ID NO: 68462 - protein, 32 aa, Artificial Sequence
  Cyclic GFR-binding peptide
  MOD_RES (5)..(6): Xaa is C or S
VPSTXXAPVKTSPINMLYFDNGRVLLYGKIPM

SEQ ID NO: 68463 - protein, 32 aa, Artificial Sequence
  Cyclic GFR-binding peptide
  MOD_RES (4)..(5): Xaa is C or S
GKAXXVPTKLSPINVLYFDDMGVPTYGKIPEG

SEQ ID NO: 68464 - protein, 39 aa, Artificial Sequence; identical to SEQ ID NO: 21650
  Cyclic GFR-binding peptide
  MOD_RES (4)..(5)..(37)..(39): Xaa is C or S

SEQ ID NO: 68465 - protein, 33 aa, Artificial Sequence; identical to SEQ ID NO: 21653
  Cyclic GFR-binding peptide
  MOD_RES (32)..(32): Xaa is C or S

SEQ ID NO: 68466 - protein, 30 aa, Artificial Sequence
  Cyclic GFR-binding peptide
  MOD_RES (1)..(1): Xaa is C or S
XAPTKLSPINVLYFDSSNNVIYGKIPNMVV

SEQ ID NO: 68467 - protein, 24 aa, Artificial Sequence
  Cyclic GFR-binding peptide
KLSPINVLYFDSSNNVIYGKIPNM

SEQ ID NO: 68468 - protein, 23 aa, Artificial Sequence
  Cyclic GFR-binding peptide
ELSPINMLYFDEYDKVVYGKIPE

SEQ ID NO: 68469 - protein, 20 aa, Artificial Sequence
  Cyclic GFR-binding peptide
SPINMLYFDEYDKVVYGKIP

SEQ ID NO: 68470 - protein, 28 aa, Artificial Sequence
  Cyclic GFR-binding peptide
  MOD_RES (2)..(3): Xaa is C or S
TXXAPVKTSPINMLYFDNGRVLLYGKIP

SEQ ID NO: 68471 - protein, 35 aa, Artificial Sequence; identical to SEQ ID NO: 21658
  Cyclic GFR-binding peptide
  MOD_RES (2)..(3): Xaa is C or S

SEQ ID NO: 68472 - protein, 20 aa, Artificial Sequence
  Cyclic GFR-binding peptide
SPINMLYFDENEKVVYGKIP

SEQ ID NO: 68473 - protein, 24 aa, Artificial Sequence
  Cyclic GFR-binding peptide
SPINVLYFDDSSNVIYGKIPNMVV

SEQ ID NO: 68474 - protein, 28 aa, Artificial Sequence
  Cyclic GFR-binding peptide
  MOD_RES (27)..(27): Xaa is C or S
SPINMLYFDEYDKVVYGKIPEMVVEGXG

SEQ ID NO: 68475 - protein, 25 aa, Artificial Sequence
  Cyclic GFR-binding peptide
QLSPINVLYFDDSSNVIYGKIPNMV

SEQ ID NO: 68476 - protein, 34 aa, Artificial Sequence
  Cyclic GFR-binding peptide
  MOD_RES (31)..(33): Xaa is C or S
PTELSPINMLYFDEYDKVVYGKIPEMVVEGXGXR

SEQ ID NO: 68477 - protein, 33 aa, Artificial Sequence; identical to SEQ ID NO: 21664
  Cyclic GFR-binding peptide
  MOD_RES (32)..(32): Xaa is C or S

SEQ ID NO: 68478 - protein, 32 aa, Artificial Sequence
  Cyclic GFR-binding peptide
  MOD_RES (4)..(5): Xaa is C or S
PKPXXAPTKLSPINVLYFDDSSNVIYGKIPNM

SEQ ID NO: 68479 - protein, 23 aa, Artificial Sequence
  Cyclic GFR-binding peptide
LSPINMLYFDEYDKVVYGKIPEM

SEQ ID NO: 68480 - protein, 29 aa, Artificial Sequence
  Cyclic GFR-binding peptide
APTKLSPINVLYFDSSNNVIYGKIPNMVV

SEQ ID NO: 68481 - protein, 35 aa, Artificial Sequence; identical to SEQ ID NO: 21666
  Cyclic GFR-binding peptide
  MOD_RES (1)..(2)..(33)..(35): Xaa is C or S

SEQ ID NO: 68482 - protein, 42 aa, Artificial Sequence; identical to SEQ ID NO: 21667
  Cyclic GFR-binding peptide
  MOD_RES (6)..(7)..(39)..(41): Xaa is C or S

SEQ ID NO: 68483 - protein, 26 aa, Artificial Sequence
  Cyclic GFR-binding peptide
VPTKLSPINVLYFDDMGVPTYGKIPE

SEQ ID NO: 68484 - protein, 29 aa, Artificial Sequence
  Cyclic GFR-binding peptide
  MOD_RES (1)..(2): Xaa is C or S
XXVPTRLSPINILYFDSANNVVYGKIPDM

SEQ ID NO: 68485 - protein, 32 aa, Artificial Sequence
  Cyclic GFR-binding peptide
  MOD_RES (6)..(7): Xaa is C or S
KIPKAXXVPTELSPINMLYFDENEKVVYGKIP

SEQ ID NO: 68486 - protein, 25 aa, Artificial Sequence
  Cyclic GFR-binding peptide
PTKLSPINVLYFDDSSNVIYGKIPN

SEQ ID NO: 68487 - protein, 22 aa, Artificial Sequence
  Cyclic GFR-binding peptide
SPINVLYFDDSSNVIYGKIPNM

SEQ ID NO: 68488 - protein, 30 aa, Artificial Sequence
  Cyclic GFR-binding peptide
  MOD_RES (3)..(4): Xaa is C or S
KAXXAPTKLSPINVLYFDSSNNVIYGKIPN

SEQ ID NO: 68489 - protein, 27 aa, Artificial Sequence
  Cyclic GFR-binding peptide
  MOD_RES (1)..(1): Xaa is C or S
XAPTKLSPINVLYFDDSSNVIYGKIPN

SEQ ID NO: 68490 - protein, 38 aa, Artificial Sequence; identical to SEQ ID NO: 21677
  Cyclic GFR-binding peptide
  MOD_RES (3)..(4)..(36)..(38): Xaa is C or S

SEQ ID NO: 68491 - protein, 23 aa, Artificial Sequence
  Cyclic GFR-binding peptide
SPINMLYFDNGRVLLYGKIPMIV

SEQ ID NO: 68492 - protein, 25 aa, Artificial Sequence
  Cyclic GFR-binding peptide
APVKTSPINMLYFDNGRVLLYGKIP

SEQ ID NO: 68493 - protein, 26 aa, Artificial Sequence
  Cyclic GFR-binding peptide
VPTELSPINMLYFDEYDKVVYGKIPE

SEQ ID NO: 68494 - protein, 27 aa, Artificial Sequence
  Cyclic GFR-binding peptide
APTKLSPINVLYFDSSNNVIYGKIPNM

SEQ ID NO: 68495 - protein, 28 aa, Artificial Sequence
  Cyclic GFR-binding peptide
  MOD_RES (2)..(3): Xaa is C or S
AXXAPTKLSPINVLYFDSSNNVIYGKIP

SEQ ID NO: 68496 - protein, 24 aa, Artificial Sequence
  Cyclic GFR-binding peptide
TKLSPINVLYFDDSSNVIYGKIPN

SEQ ID NO: 68497 - protein, 24 aa, Artificial Sequence
  Cyclic GFR-binding peptide
QLSPINVLYFDDSSNVIYGKIPNM

SEQ ID NO: 68498 - protein, 32 aa, Artificial Sequence
  Cyclic GFR-binding peptide
  MOD_RES (29)..(31): Xaa is C or S
KLSPINVLYFDSSNNVIYGKIPNMVVKAXGXH

SEQ ID NO: 68499 - protein, 35 aa, Artificial Sequence
  Cyclic GFR-binding peptide
  MOD_RES (4)..(5): Xaa is C or S
GKAXXVPTKLSPINVLYFDDMGVPTYGKIPEGMSV

SEQ ID NO: 68500 - protein, 28 aa, Artificial Sequence
  Cyclic GFR-binding peptide
APTKLSPINVLYFDDSSNVIYGKIPNMV

SEQ ID NO: 68501 - protein, 31 aa, Artificial Sequence
  Cyclic GFR-binding peptide
  MOD_RES (3)..(4): Xaa is C or S
KPXXAPTKLSPINVLYFDDSSNVIYGKIPNM

SEQ ID NO: 68502 - protein, 38 aa, Artificial Sequence; identical to SEQ ID NO: 21693
  Cyclic GFR-binding peptide
  MOD_RES (4)..(5)..(37): Xaa is C or S

SEQ ID NO: 68503 - protein, 29 aa, Artificial Sequence
  Cyclic GFR-binding peptide
  MOD_RES (1)..(1): Xaa is C or S
XVPTRLSPINILYFDSANNVVYGKIPDMV

SEQ ID NO: 68504 - protein, 21 aa, Artificial Sequence
  Cyclic GFR-binding peptide
SPINILYFDAANNVVYGKIPD

SEQ ID NO: 68505 - protein, 33 aa, Artificial Sequence
  Cyclic GFR-binding peptide
  MOD_RES (5)..(6): Xaa is C or S
VPKPXXAPTQLSPINVLYFDDSSNVIYGKIPNM

SEQ ID NO: 68506 - protein, 28 aa, Artificial Sequence
  Cyclic GFR-binding peptide
PVKTSPINMLYFDNGRVLLYGKIPMIVE

SEQ ID NO: 68507 - protein, 39 aa, Artificial Sequence; identical to SEQ ID NO: 21701
  Cyclic GFR-binding peptide
  MOD_RES (3)..(4)..(37)..(39): Xaa is C or S

SEQ ID NO: 68508 - protein, 35 aa, Artificial Sequence
  Cyclic GFR-binding peptide
  MOD_RES (6)..(7): Xaa is C or S
TVPKPXXAPTQLSPINVLYFDDSSNVIYGKIPNMV

SEQ ID NO: 68509 - protein, 34 aa, Artificial Sequence; identical to SEQ ID NO: 21702
  Cyclic GFR-binding peptide
  MOD_RES (2)..(3): Xaa is C or S

SEQ ID NO: 68510 - protein, 29 aa, Artificial Sequence
  Cyclic GFR-binding peptide
  MOD_RES (2)..(3): Xaa is C or S
AXXVPTKLSPINILYFDKGVVTYYGKIPG

SEQ ID NO: 68511 - protein, 32 aa, Artificial Sequence; identical to SEQ ID NO: 21703
  Cyclic GFR-binding peptide
  MOD_RES (1)..(1): Xaa is C or S

SEQ ID NO: 68512 - protein, 33 aa, Artificial Sequence
  Cyclic GFR-binding peptide
  MOD_RES (31)..(33): Xaa is C or S
PTQLSPINVLYFDDSSNVIYGKIPNMVVRAXGX

SEQ ID NO: 68513 - protein, 39 aa, Artificial Sequence; identical to SEQ ID NO: 21704
  Cyclic GFR-binding peptide
  MOD_RES (4)..(5)..(37)..(39): Xaa is C or S

SEQ ID NO: 68514 - protein, 36 aa, Artificial Sequence; identical to SEQ ID NO: 21707
  Cyclic GFR-binding peptide
  MOD_RES (3)..(4)..(36): Xaa is C or S

SEQ ID NO: 68515 - protein, 29 aa, Artificial Sequence
  Cyclic GFR-binding peptide
  MOD_RES (29)..(29): Xaa is C or S
KLSPINILYFDKGVVTYYGKIPGMAVSEX

SEQ ID NO: 68516 - protein, 29 aa, Artificial Sequence
  Cyclic GFR-binding peptide
  MOD_RES (4)..(4): Xaa is C or S
KPTXAPTKLSPINVLYFDDSSNVIYGKIP

SEQ ID NO: 68517 - protein, 26 aa, Artificial Sequence
  Cyclic GFR-binding peptide
PVKTSPINMLYFDNGRVLLYGKIPMI

SEQ ID NO: 68518 - protein, 32 aa, Artificial Sequence
  Cyclic GFR-binding peptide
  MOD_RES (3)..(4): Xaa is C or S
KAXXVPTELSPINMLYFDEYDKVVYGKIPEMV

SEQ ID NO: 68519 - protein, 28 aa, Artificial Sequence
  Cyclic GFR-binding peptide
TRLSPINILYFDSANNVVYGKIPDMVVE

SEQ ID NO: 68520 - protein, 32 aa, Artificial Sequence; identical to SEQ ID NO: 21710
  Cyclic GFR-binding peptide
  MOD_RES (1)..(2): Xaa is C or S

SEQ ID NO: 68521 - protein, 29 aa, Artificial Sequence
  Cyclic GFR-binding peptide
  MOD_RES (2)..(3): Xaa is C or S
AXXAPTKLSPINVLYFDSSNNVIYGKIPN

SEQ ID NO: 68522 - protein, 30 aa, Artificial Sequence
  Cyclic GFR-binding peptide
  MOD_RES (28)..(30): Xaa is C or S
SPINVLYFDDMGVPTYGKIPEGMSVAEXGX

SEQ ID NO: 68523 - protein, 28 aa, Artificial Sequence
  Cyclic GFR-binding peptide
APVKTSPINMLYFDNGRVLLYGKIPMIV

SEQ ID NO: 68524 - protein, 30 aa, Artificial Sequence
  Cyclic GFR-binding peptide
  MOD_RES (1)..(2): Xaa is C or S
XXAPTKLSPINVLYFDSSNNVIYGKIPNMV

SEQ ID NO: 68525 - protein, 36 aa, Artificial Sequence; identical to SEQ ID NO: 21713
  Cyclic GFR-binding peptide
  MOD_RES (4)..(5): Xaa is C or S

SEQ ID NO: 68526 - protein, 27 aa, Artificial Sequence
  Cyclic GFR-binding peptide
  MOD_RES (1)..(2): Xaa is C or S
XXVPTELSPINMLYFDENEKVVYGKIP

SEQ ID NO: 68527 - protein, 28 aa, Artificial Sequence
  Cyclic GFR-binding peptide
  MOD_RES (1)..(1): Xaa is C or S
XAPVKTSPINMLYFDNGRVLLYGKIPMI

SEQ ID NO: 68528 - protein, 30 aa, Artificial Sequence
  Cyclic GFR-binding peptide
  MOD_RES (1)..(1): Xaa is C or S
XAPTKLSPINVLYFDDSSNVIYGKIPNMVV

SEQ ID NO: 68529 - protein, 31 aa, Artificial Sequence
  Cyclic GFR-binding peptide
  MOD_RES (3)..(4): Xaa is C or S
KAXXAPTKLSPINVLYFDSSNNVIYGKIPNM

SEQ ID NO: 68530 - protein, 23 aa, Artificial Sequence
  Cyclic GFR-binding peptide
VKTSPINMLYFDNGRVLLYGKIP

SEQ ID NO: 68531 - protein, 42 aa, Artificial Sequence; identical to SEQ ID NO: 21719
  Cyclic GFR-binding peptide
  MOD_RES (6)..(7)..(39)..(41): Xaa is C or S

SEQ ID NO: 68532 - protein, 27 aa, Artificial Sequence
  Cyclic GFR-binding peptide
LSPINMLYFDENEKVVYGKIPDMVVEG

SEQ ID NO: 68533 - protein, 37 aa, Artificial Sequence; identical to SEQ ID NO: 21728
  Cyclic GFR-binding peptide
  MOD_RES (2)..(3)..(35)..(37): Xaa is C or S

SEQ ID NO: 68534 - protein, 33 aa, Artificial Sequence
  Cyclic GFR-binding peptide
  MOD_RES (31)..(33): Xaa is C or S
PARLSPINILYFDAANNVVYGKIPDMVVEAXGX

SEQ ID NO: 68535 - protein, 35 aa, Artificial Sequence; identical to SEQ ID NO: 21732
  Cyclic GFR-binding peptide
  MOD_RES (1)..(2)..(34): Xaa is C or S

SEQ ID NO: 68536 - protein, 32 aa, Artificial Sequence
  Cyclic GFR-binding peptide
  MOD_RES (6)..(7): Xaa is C or S
TVPKPXXAPTQLSPINVLYFDDSSNVIYGKIP

SEQ ID NO: 68537 - protein, 26 aa, Artificial Sequence
  Cyclic GFR-binding peptide
KLSPINVLYFDDSSNVIYGKIPNMVV

SEQ ID NO: 68538 - protein, 41 aa, Artificial Sequence; identical to SEQ ID NO: 21737
  Cyclic GFR-binding peptide
  MOD_RES (6)..(7)..(38)..(40): Xaa is C or S

SEQ ID NO: 68539 - protein, 25 aa, Artificial Sequence
  Cyclic GFR-binding peptide
PTKLSPINVLYFDDMGVPTYGKIPE

SEQ ID NO: 68540 - protein, 32 aa, Artificial Sequence; identical to SEQ ID NO: 21741
  Cyclic GFR-binding peptide
  MOD_RES (1)..(2): Xaa is C or S

SEQ ID NO: 68541 - protein, 30 aa, Artificial Sequence
  Cyclic GFR-binding peptide
  MOD_RES (1)..(2): Xaa is C or S
XXVPTELSPINMLYFDENEKVVYGKIPDMV

SEQ ID NO: 68542 - protein, 28 aa, Artificial Sequence
  Cyclic GFR-binding peptide
  MOD_RES (2)..(3): Xaa is C or S
PXXAPTQLSPINVLYFDDSSNVIYGKIP

SEQ ID NO: 68543 - protein, 36 aa, Artificial Sequence; identical to SEQ ID NO: 21744
  Cyclic GFR-binding peptide
  MOD_RES (1)..(33)..(35): Xaa is C or S

SEQ ID NO: 68544 - protein, 28 aa, Artificial Sequence
  Cyclic GFR-binding peptide
PTRLSPINILYFDSANNVVYGKIPDMVV

SEQ ID NO: 68545 - protein, 23 aa, Artificial Sequence
  Cyclic GFR-binding peptide
TELSPINMLYFDEYDKVVYGKIP

SEQ ID NO: 68546 - protein, 34 aa, Artificial Sequence
  Cyclic GFR-binding peptide
  MOD_RES (5)..(6): Xaa is C or S
TPPTXXVPTRLSPINILYFDSANNVVYGKIPDMV

SEQ ID NO: 68547 - protein, 22 aa, Artificial Sequence
  Cyclic GFR-binding peptide
LSPINILYFDSANNVVYGKIPD

SEQ ID NO: 68548 - protein, 29 aa, Artificial Sequence
  Cyclic GFR-binding peptide
  MOD_RES (2)..(3): Xaa is C or S
TXXVPTRLSPINILYFDSANNVVYGKIPD

SEQ ID NO: 68549 - protein, 38 aa, Artificial Sequence; identical to SEQ ID NO: 21757
  Cyclic GFR-binding peptide
  MOD_RES (4)..(5)..(37): Xaa is C or S

SEQ ID NO: 68550 - protein, 27 aa, Artificial Sequence
  Cyclic GFR-binding peptide
KTSPINMLYFDNGRVLLYGKIPMIVEE

SEQ ID NO: 68551 - protein, 33 aa, Artificial Sequence; identical to SEQ ID NO: 21758
  Cyclic GFR-binding peptide
  MOD_RES (2)..(3): Xaa is C or S

SEQ ID NO: 68552 - protein, 29 aa, Artificial Sequence
  Cyclic GFR-binding peptide
  MOD_RES (28)..(28): Xaa is C or S
LSPINVLYFDDSSNVIYGKIPNMVVRAXG

SEQ ID NO: 68553 - protein, 38 aa, Artificial Sequence; identical to SEQ ID NO: 21762
  Cyclic GFR-binding peptide
  MOD_RES (3)..(35)..(37): Xaa is C or S

SEQ ID NO: 68554 - protein, 25 aa, Artificial Sequence
  Cyclic GFR-binding peptide
VPARLSPINILYFDAANNVVYGKIP

SEQ ID NO: 68555 - protein, 26 aa, Artificial Sequence
  Cyclic GFR-binding peptide
APTQLSPINVLYFDDSSNVIYGKIPN

SEQ ID NO: 68556 - protein, 31 aa, Artificial Sequence
  Cyclic GFR-binding peptide
  MOD_RES (29)..(31): Xaa is C or S
KLSPINILYFDKGVVTYYGKIPGMAVSEXGX

SEQ ID NO: 68557 - protein, 40 aa, Artificial Sequence; identical to SEQ ID NO: 21765
  Cyclic GFR-binding peptide
  MOD_RES (6)..(7)..(39): Xaa is C or S

SEQ ID NO: 68558 - protein, 29 aa, Artificial Sequence
  Cyclic GFR-binding peptide
  MOD_RES (2)..(3): Xaa is C or S
SXXVPARLSPINILYFDAANNVVYGKIPD

SEQ ID NO: 68559 - protein, 34 aa, Artificial Sequence
  Cyclic GFR-binding peptide
  MOD_RES (31)..(33): Xaa is C or S
PTQLSPINVLYFDDSSNVIYGKIPNMVVRAXGXH

SEQ ID NO: 68560 - protein, 26 aa, Artificial Sequence
  Cyclic GFR-binding peptide
  MOD_RES (1)..(1): Xaa is C or S
XVPTKLSPINILYFDKGVVTYYGKIP

SEQ ID NO: 68561 - protein, 33 aa, Artificial Sequence; identical to SEQ ID NO: 21770
  Cyclic GFR-binding peptide
  MOD_RES (1)..(33): Xaa is C or S

SEQ ID NO: 68562 - protein, 28 aa, Artificial Sequence
  Cyclic GFR-binding peptide
  MOD_RES (1)..(1): Xaa is C or S
XVPTELSPINMLYFDENEKVVYGKIPDM

SEQ ID NO: 68563 - protein, 30 aa, Artificial Sequence
  Cyclic GFR-binding peptide
  MOD_RES (30)..(30): Xaa is C or S
KLSPINVLYFDDMGVPTYGKIPEGMSVAEX

SEQ ID NO: 68564 - protein, 36 aa, Artificial Sequence; identical to SEQ ID NO: 21772
  Cyclic GFR-binding peptide
  MOD_RES (2)..(3)..(35): Xaa is C or S

SEQ ID NO: 68565 - protein, 34 aa, Artificial Sequence
  Cyclic GFR-binding peptide
  MOD_RES (5)..(6): Xaa is C or S
VPKAXXAPTKLSPINVLYFDSSNNVIYGKIPNMV

SEQ ID NO: 68566 - protein, 37 aa, Artificial Sequence; identical to SEQ ID NO: 21774
  Cyclic GFR-binding peptide
  MOD_RES (4)..(5): Xaa is C or S

SEQ ID NO: 68567 - protein, 35 aa, Artificial Sequence
  Cyclic GFR-binding peptide
  MOD_RES (5)..(6): Xaa is C or S
ASKAXXVPTKLSPINILYFDKGVVTYYGKIPGMAV

SEQ ID NO: 68568 - protein, 34 aa, Artificial Sequence
  Cyclic GFR-binding peptide
  MOD_RES (4)..(5): Xaa is C or S
PKPXXAPTKLSPINVLYFDDSSNVIYGKIPNMVV

SEQ ID NO: 68569 - protein, 30 aa, Artificial Sequence
  Cyclic GFR-binding peptide
  MOD_RES (29)..(29): Xaa is C or S
KLSPINVLYFDSSNNVIYGKIPNMVVKAXG

SEQ ID NO: 68570 - protein, 31 aa, Artificial Sequence
  Cyclic GFR-binding peptide
  MOD_RES (2)..(3): Xaa is C or S
PXXAPTKLSPINVLYFDDSSNVIYGKIPNMV

SEQ ID NO: 68571 - protein, 35 aa, Artificial Sequence
  Cyclic GFR-binding peptide
  MOD_RES (7)..(7): Xaa is C or S
HVTKPTXAPTKLSPINVLYFDDSSNVIYGKIPNMV

SEQ ID NO: 68572 - protein, 36 aa, Artificial Sequence
  Cyclic GFR-binding peptide
  MOD_RES (6)..(7): Xaa is C or S
KASKAXXVPTKLSPINILYFDKGVVTYYGKIPGMAV

SEQ ID NO: 68573 - protein, 26 aa, Artificial Sequence
  Cyclic GFR-binding peptide
  MOD_RES (1)..(1): Xaa is C or S
XAPTKLSPINVLYFDSSNNVIYGKIP

SEQ ID NO: 68574 - protein, 36 aa, Artificial Sequence; identical to SEQ ID NO: 21785
  Cyclic GFR-binding peptide
  MOD_RES (1)..(2)..(33)..(35): Xaa is C or S

SEQ ID NO: 68575 - protein, 30 aa, Artificial Sequence; identical to SEQ ID NO: 21786
  Cyclic GFR-binding peptide

SEQ ID NO: 68576 - protein, 30 aa, Artificial Sequence
  Cyclic GFR-binding peptide
  MOD_RES (27)..(29): Xaa is C or S
SPINMLYFDEYDKVVYGKIPEMVVEGXGXR

SEQ ID NO: 68577 - protein, 37 aa, Artificial Sequence; identical to SEQ ID NO: 21787
  Cyclic GFR-binding peptide
  MOD_RES (3)..(4)..(37): Xaa is C or S

SEQ ID NO: 68578 - protein, 33 aa, Artificial Sequence
  Cyclic GFR-binding peptide
  MOD_RES (31)..(33): Xaa is C or S
PTKLSPINILYFDKGVVTYYGKIPGMAVSEXGX

SEQ ID NO: 68579 - protein, 33 aa, Artificial Sequence; identical to SEQ ID NO: 21789
  Cyclic GFR-binding peptide
  MOD_RES (1)..(33): Xaa is C or S

SEQ ID NO: 68580 - protein, 35 aa, Artificial Sequence; identical to SEQ ID NO: 21791
  Cyclic GFR-binding peptide
  MOD_RES (2)..(3)..(35): Xaa is C or S

SEQ ID NO: 68581 - protein, 34 aa, Artificial Sequence
  Cyclic GFR-binding peptide
  MOD_RES (6)..(7): Xaa is C or S
AAPASXXVPARLSPINILYFDAANNVVYGKIPDM

SEQ ID NO: 68582 - protein, 21 aa, Artificial Sequence
  Cyclic GFR-binding peptide
SPINMLYFDNGRVLLYGKIPM

SEQ ID NO: 68583 - protein, 29 aa, Artificial Sequence
  Cyclic GFR-binding peptide
  MOD_RES (2)..(2): Xaa is C or S
TXAPTKLSPINVLYFDDSSNVIYGKIPNM

SEQ ID NO: 68584 - protein, 21 aa, Artificial Sequence
  Cyclic GFR-binding peptide
SPINVLYFDDMGVPTYGKIPE

SEQ ID NO: 68585 - protein, 41 aa, Artificial Sequence; identical to SEQ ID NO: 21806
  Cyclic GFR-binding peptide
  MOD_RES (5)..(6)..(39)..(41): Xaa is C or S

SEQ ID NO: 68586 - protein, 35 aa, Artificial Sequence; identical to SEQ ID NO: 21808
  Cyclic GFR-binding peptide
  MOD_RES (1)..(2)..(34): Xaa is C or S

SEQ ID NO: 68587 - protein, 22 aa, Artificial Sequence
  Cyclic GFR-binding peptide
SPINVLYFDDMGVPTYGKIPEG

SEQ ID NO: 68588 - protein, 30 aa, Artificial Sequence
  Cyclic GFR-binding peptide
  MOD_RES (28)..(30): Xaa is C or S
KTSPINMLYFDNGRVLLYGKIPMIVEEXGX

SEQ ID NO: 68589 - protein, 36 aa, Artificial Sequence; identical to SEQ ID NO: 21814
  Cyclic GFR-binding peptide
  MOD_RES (3)..(4): Xaa is C or S

SEQ ID NO: 68590 - protein, 24 aa, Artificial Sequence
  Cyclic GFR-binding peptide
PTQLSPINVLYFDDSSNVIYGKIP

SEQ ID NO: 68591 - protein, 31 aa, Artificial Sequence
  Cyclic GFR-binding peptide
  MOD_RES (1)..(2): Xaa is C or S
XXVPTELSPINMLYFDENEKVVYGKIPDMVV

SEQ ID NO: 68592 - protein, 39 aa, Artificial Sequence; identical to SEQ ID NO: 21816
  Cyclic GFR-binding peptide
  MOD_RES (5)..(37)..(39): Xaa is C or S

SEQ ID NO: 68593 - protein, 31 aa, Artificial Sequence
  Cyclic GFR-binding peptide
  MOD_RES (4)..(5): Xaa is C or S
PASXXVPARLSPINILYFDAANNVVYGKIPD

SEQ ID NO: 68594 - protein, 25 aa, Artificial Sequence
  Cyclic GFR-binding peptide
LSPINVLYFDDSSNVIYGKIPNMVV

SEQ ID NO: 68595 - protein, 31 aa, Artificial Sequence
  Cyclic GFR-binding peptide
  MOD_RES (4)..(5): Xaa is C or S
PPTXXVPTRLSPINILYFDSANNVVYGKIPD

SEQ ID NO: 68596 - protein, 32 aa, Artificial Sequence
  Cyclic GFR-binding peptide
  MOD_RES (5)..(6): Xaa is C or S
TPPTXXVPTRLSPINILYFDSANNVVYGKIPD

SEQ ID NO: 68597 - protein, 28 aa, Artificial Sequence
  Cyclic GFR-binding peptide
  MOD_RES (2)..(3): Xaa is C or S
AXXVPTKLSPINVLYFDDMGVPTYGKIP

SEQ ID NO: 68598 - protein, 21 aa, Artificial Sequence
  Cyclic GFR-binding peptide
LSPINILYFDSANNVVYGKIP

SEQ ID NO: 68599 - protein, 32 aa, Artificial Sequence; identical to SEQ ID NO: 21824
  Cyclic GFR-binding peptide
  MOD_RES (1)..(1): Xaa is C or S

SEQ ID NO: 68600 - protein, 34 aa, Artificial Sequence; identical to SEQ ID NO: 21825
  Cyclic GFR-binding peptide
  MOD_RES (1)..(33): Xaa is C or S

SEQ ID NO: 68601 - protein, 28 aa, Artificial Sequence
  Cyclic GFR-binding peptide
TKLSPINILYFDKGVVTYYGKIPGMAVS

SEQ ID NO: 68602 - protein, 34 aa, Artificial Sequence; identical to SEQ ID NO: 21829
  Cyclic GFR-binding peptide
  MOD_RES (1)..(2)..(34): Xaa is C or S

SEQ ID NO: 68603 - protein, 34 aa, Artificial Sequence
  Cyclic GFR-binding peptide
  MOD_RES (4)..(5): Xaa is C or S
PKAXXAPTKLSPINVLYFDSSNNVIYGKIPNMVV

SEQ ID NO: 68604 - protein, 28 aa, Artificial Sequence
  Cyclic GFR-binding peptide
PARLSPINILYFDAANNVVYGKIPDMVV

SEQ ID NO: 68605 - protein, 30 aa, Artificial Sequence
  Cyclic GFR-binding peptide
PTKLSPINVLYFDDMGVPTYGKIPEGMSVA

SEQ ID NO: 68606 - protein, 22 aa, Artificial Sequence
  Cyclic GFR-binding peptide
LSPINVLYFDSSNNVIYGKIPN

SEQ ID NO: 68607 - protein, 31 aa, Artificial Sequence
  Cyclic GFR-binding peptide
  MOD_RES (28)..(30): Xaa is C or S
LSPINVLYFDDSSNVIYGKIPNMVVRAXGXH

SEQ ID NO: 68608 - protein, 26 aa, Artificial Sequence
  Cyclic GFR-binding peptide
VPTKLSPINILYFDKGVVTYYGKIPG

SEQ ID NO: 68609 - protein, 26 aa, Artificial Sequence
  Cyclic GFR-binding peptide
RLSPINILYFDAANNVVYGKIPDMVV

SEQ ID NO: 68610 - protein, 28 aa, Artificial Sequence
  Cyclic GFR-binding peptide
PTQLSPINVLYFDDSSNVIYGKIPNMVV

SEQ ID NO: 68611 - protein, 32 aa, Artificial Sequence; identical to SEQ ID NO: 21838
  Cyclic GFR-binding peptide
  MOD_RES (32)..(32): Xaa is C or S

SEQ ID NO: 68612 - protein, 30 aa, Artificial Sequence
  Cyclic GFR-binding peptide
  MOD_RES (29)..(29): Xaa is C or S
ELSPINMLYFDENEKVVYGKIPDMVVEGXG

SEQ ID NO: 68613 - protein, 34 aa, Artificial Sequence; identical to SEQ ID NO: 21844
  Cyclic GFR-binding peptide
  MOD_RES (32)..(34): Xaa is C or S

SEQ ID NO: 68614 - protein, 29 aa, Artificial Sequence
  Cyclic GFR-binding peptide
  MOD_RES (27)..(29): Xaa is C or S
SPINILYFDAANNVVYGKIPDMVVEAXGX

SEQ ID NO: 68615 - protein, 24 aa, Artificial Sequence
  Cyclic GFR-binding peptide
SPINILYFDSANNVVYGKIPDMVV

SEQ ID NO: 68616 - protein, 34 aa, Artificial Sequence; identical to SEQ ID NO: 21847
  Cyclic GFR-binding peptide
  MOD_RES (1)..(2)..(34): Xaa is C or S

SEQ ID NO: 68617 - protein, 21 aa, Artificial Sequence
  Cyclic GFR-binding peptide
SPINVLYFDDSSNVIYGKIPN

SEQ ID NO: 68618 - protein, 33 aa, Artificial Sequence
  Cyclic GFR-binding peptide
  MOD_RES (6)..(7): Xaa is C or S
TVPKPXXAPTQLSPINVLYFDDSSNVIYGKIPN

SEQ ID NO: 68619 - protein, 31 aa, Artificial Sequence
  Cyclic GFR-binding peptide
  MOD_RES (30)..(30): Xaa is C or S
TQLSPINVLYFDDSSNVIYGKIPNMVVRAXG

SEQ ID NO: 68620 - protein, 29 aa, Artificial Sequence
  Cyclic GFR-binding peptide
PTKLSPINVLYFDDMGVPTYGKIPEGMSV

SEQ ID NO: 68621 - protein, 31 aa, Artificial Sequence
  Cyclic GFR-binding peptide
  MOD_RES (3)..(4): Xaa is C or S
KPXXAPTQLSPINVLYFDDSSNVIYGKIPNM

SEQ ID NO: 68622 - protein, 35 aa, Artificial Sequence
  Cyclic GFR-binding peptide
  MOD_RES (6)..(7): Xaa is C or S
AAPASXXVPARLSPINILYFDAANNVVYGKIPDMV

SEQ ID NO: 68623 - protein, 23 aa, Artificial Sequence
  Cyclic GFR-binding peptide
SPINMLYFDENEKVVYGKIPDMV

SEQ ID NO: 68624 - protein, 37 aa, Artificial Sequence; identical to SEQ ID NO: 21852
  Cyclic GFR-binding peptide
  MOD_RES (1)..(2)..(34)..(36): Xaa is C or S

SEQ ID NO: 68625 - protein, 34 aa, Artificial Sequence
  Cyclic GFR-binding peptide
  MOD_RES (31)..(33): Xaa is C or S
PTELSPINMLYFDENEKVVYGKIPDMVVEGXGXR

SEQ ID NO: 68626 - protein, 31 aa, Artificial Sequence
  Cyclic GFR-binding peptide
  MOD_RES (3)..(4): Xaa is C or S
KAXXVPTKLSPINVLYFDDMGVPTYGKIPEG

SEQ ID NO: 68627 - protein, 27 aa, Artificial Sequence
  Cyclic GFR-binding peptide
LSPINVLYFDDMGVPTYGKIPEGMSVA

SEQ ID NO: 68628 - protein, 25 aa, Artificial Sequence
  Cyclic GFR-binding peptide
VPTKLSPINILYFDKGVVTYYGKIP

SEQ ID NO: 68629 - protein, 28 aa, Artificial Sequence
  Cyclic GFR-binding peptide
ELSPINMLYFDENEKVVYGKIPDMVVEG

SEQ ID NO: 68630 - protein, 38 aa, Artificial Sequence; identical to SEQ ID NO: 21863
  Cyclic GFR-binding peptide
  MOD_RES (3)..(4)..(36)..(38): Xaa is C or S

SEQ ID NO: 68631 - protein, 38 aa, Artificial Sequence; identical to SEQ ID NO: 21864
  Cyclic GFR-binding peptide
  MOD_RES (7)..(7): Xaa is C or S

SEQ ID NO: 68632 - protein, 31 aa, Artificial Sequence
  Cyclic GFR-binding peptide
  MOD_RES (30)..(30): Xaa is C or S
TKLSPINVLYFDDSSNVIYGKIPNMVVRSXG

SEQ ID NO: 68633 - protein, 29 aa, Artificial Sequence
  Cyclic GFR-binding peptide
  MOD_RES (3)..(4): Xaa is C or S
ASXXVPARLSPINILYFDAANNVVYGKIP

SEQ ID NO: 68634 - protein, 34 aa, Artificial Sequence; identical to SEQ ID NO: 21866
  Cyclic GFR-binding peptide
  MOD_RES (32)..(34): Xaa is C or S

SEQ ID NO: 68635 - protein, 27 aa, Artificial Sequence
  Cyclic GFR-binding peptide
  MOD_RES (27)..(27): Xaa is C or S
SPINVLYFDDSSNVIYGKIPNMVVRSX

SEQ ID NO: 68636 - protein, 34 aa, Artificial Sequence
  Cyclic GFR-binding peptide
  MOD_RES (4)..(5): Xaa is C or S
PKAXXVPTELSPINMLYFDEYDKVVYGKIPEMVV

SEQ ID NO: 68637 - protein, 30 aa, Artificial Sequence
  Cyclic GFR-binding peptide
  MOD_RES (3)..(4): Xaa is C or S
KAXXVPTELSPINMLYFDEYDKVVYGKIPE

SEQ ID NO: 68638 - protein, 20 aa, Artificial Sequence
  Cyclic GFR-binding peptide
SPINILYFDAANNVVYGKIP

SEQ ID NO: 68639 - protein, 31 aa, Artificial Sequence
  Cyclic GFR-binding peptide
  MOD_RES (1)..(2): Xaa is C or S
XXVPTKLSPINILYFDKGVVTYYGKIPGMAV

SEQ ID NO: 68640 - protein, 28 aa, Artificial Sequence
  Cyclic GFR-binding peptide
  MOD_RES (27)..(27): Xaa is C or S
SPINILYFDSANNVVYGKIPDMVVESXG

SEQ ID NO: 68641 - protein, 33 aa, Artificial Sequence; identical to SEQ ID NO: 21870
  Cyclic GFR-binding peptide
  MOD_RES (31)..(33): Xaa is C or S

SEQ ID NO: 68642 - protein, 37 aa, Artificial Sequence; identical to SEQ ID NO: 21873
  Cyclic GFR-binding peptide
  MOD_RES (5)..(6): Xaa is C or S

SEQ ID NO: 68643 - protein, 25 aa, Artificial Sequence
  Cyclic GFR-binding peptide
APTKLSPINVLYFDSSNNVIYGKIP

SEQ ID NO: 68644 - protein, 27 aa, Artificial Sequence
  Cyclic GFR-binding peptide
  MOD_RES (27)..(27): Xaa is C or S
TSPINMLYFDNGRVLLYGKIPMIVEEX

SEQ ID NO: 68645 - protein, 23 aa, Artificial Sequence
  Cyclic GFR-binding peptide
KLSPINVLYFDDSSNVIYGKIPN

SEQ ID NO: 68646 - protein, 32 aa, Artificial Sequence
  Cyclic GFR-binding peptide
  MOD_RES (5)..(6): Xaa is C or S
IPKAXXVPTELSPINMLYFDENEKVVYGKIPD

SEQ ID NO: 68647 - protein, 29 aa, Artificial Sequence
  Cyclic GFR-binding peptide
VPTELSPINMLYFDEYDKVVYGKIPEMVV

SEQ ID NO: 68648 - protein, 37 aa, Artificial Sequence; identical to SEQ ID NO: 21880
  Cyclic GFR-binding peptide
  MOD_RES (6)..(7): Xaa is C or S

SEQ ID NO: 68649 - protein, 22 aa, Artificial Sequence
  Cyclic GFR-binding peptide
SPINMLYFDNGRVLLYGKIPMI

SEQ ID NO: 68650 - protein, 20 aa, Artificial Sequence
  Cyclic GFR-binding peptide
SPINMLYFDNGRVLLYGKIP

SEQ ID NO: 68651 - protein, 35 aa, Artificial Sequence
  Cyclic GFR-binding peptide
  MOD_RES (3)..(4): Xaa is C or S
KAXXVPTKLSPINVLYFDDMGVPTYGKIPEGMSVA

SEQ ID NO: 68652 - protein, 36 aa, Artificial Sequence; identical to SEQ ID NO: 21881
  Cyclic GFR-binding peptide
  MOD_RES (3)..(4)..(36): Xaa is C or S

SEQ ID NO: 68653 - protein, 26 aa, Artificial Sequence
  Cyclic GFR-binding peptide
PARLSPINILYFDAANNVVYGKIPDM

SEQ ID NO: 68654 - protein, 37 aa, Artificial Sequence; identical to SEQ ID NO: 21892
  Cyclic GFR-binding peptide
  MOD_RES (4)..(5)..(37): Xaa is C or S

SEQ ID NO: 68655 - protein, 27 aa, Artificial Sequence
  Cyclic GFR-binding peptide
ARLSPINILYFDAANNVVYGKIPDMVV

SEQ ID NO: 68656 - protein, 31 aa, Artificial Sequence
  Cyclic GFR-binding peptide
  MOD_RES (5)..(6): Xaa is C or S
VPKAXXAPTKLSPINVLYFDSSNNVIYGKIP

SEQ ID NO: 68657 - protein, 27 aa, Artificial Sequence
  Cyclic GFR-binding peptide
TKLSPINVLYFDSSNNVIYGKIPNMVV

SEQ ID NO: 68658 - protein, 26 aa, Artificial Sequence
  Cyclic GFR-binding peptide
  MOD_RES (1)..(1): Xaa is C or S
XAPVKTSPINMLYFDNGRVLLYGKIP

SEQ ID NO: 68659 - protein, 29 aa, Artificial Sequence
  Cyclic GFR-binding peptide
  MOD_RES (28)..(28): Xaa is C or S
LSPINVLYFDDSSNVIYGKIPNMVVRSXG

SEQ ID NO: 68660 - protein, 32 aa, Artificial Sequence
  Cyclic GFR-binding peptide
  MOD_RES (30)..(32): Xaa is C or S
KLSPINVLYFDDMGVPTYGKIPEGMSVAEXGX

SEQ ID NO: 68661 - protein, 38 aa, Artificial Sequence; identical to SEQ ID NO: 21898
  Cyclic GFR-binding peptide
  MOD_RES (2)..(3)..(35)..(37): Xaa is C or S

SEQ ID NO: 68662 - protein, 35 aa, Artificial Sequence
  Cyclic GFR-binding peptide
  MOD_RES (5)..(6): Xaa is C or S
APASXXVPARLSPINILYFDAANNVVYGKIPDMVV

SEQ ID NO: 68663 - protein, 32 aa, Artificial Sequence; identical to SEQ ID NO: 21903
  Cyclic GFR-binding peptide
  MOD_RES (1)..(1): Xaa is C or S

SEQ ID NO: 68664 - protein, 27 aa, Artificial Sequence
  Cyclic GFR-binding peptide
  MOD_RES (1)..(2): Xaa is C or S
XXVPTRLSPINILYFDSANNVVYGKIP

SEQ ID NO: 68665 - protein, 29 aa, Artificial Sequence
  Cyclic GFR-binding peptide
  MOD_RES (28)..(28): Xaa is C or S
KTSPINMLYFDNGRVLLYGKIPMIVEEXG

SEQ ID NO: 68666 - protein, 32 aa, Artificial Sequence
  Cyclic GFR-binding peptide
  MOD_RES (30)..(32): Xaa is C or S
TELSPINMLYFDENEKVVYGKIPDMVVEGXGX

SEQ ID NO: 68667 - protein, 28 aa, Artificial Sequence
  Cyclic GFR-binding peptide
TELSPINMLYFDEYDKVVYGKIPEMVVE

SEQ ID NO: 68668 - protein, 32 aa, Artificial Sequence; identical to SEQ ID NO: 21907
  Cyclic GFR-binding peptide
  MOD_RES (2)..(2): Xaa is C or S

SEQ ID NO: 68669 - protein, 31 aa, Artificial Sequence
  Cyclic GFR-binding peptide
  MOD_RES (2)..(3): Xaa is C or S
TXXVPTRLSPINILYFDSANNVVYGKIPDMV

SEQ ID NO: 68670 - protein, 37 aa, Artificial Sequence; identical to SEQ ID NO: 21909
  Cyclic GFR-binding peptide
  MOD_RES (1)..(2)..(34)..(36): Xaa is C or S

SEQ ID NO: 68671 - protein, 30 aa, Artificial Sequence
  Cyclic GFR-binding peptide
  MOD_RES (27)..(29): Xaa is C or S
SPINVLYFDDSSNVIYGKIPNMVVRSXGXH

SEQ ID NO: 68672 - protein, 37 aa, Artificial Sequence; identical to SEQ ID NO: 21910
  Cyclic GFR-binding peptide
  MOD_RES (2)..(3)..(35)..(37): Xaa is C or S

SEQ ID NO: 68673 - protein, 35 aa, Artificial Sequence; identical to SEQ ID NO: 21914
  Cyclic GFR-binding peptide
  MOD_RES (2)..(34): Xaa is C or S

SEQ ID NO: 68674 - protein, 24 aa, Artificial Sequence
  Cyclic GFR-binding peptide
TSPINMLYFDNGRVLLYGKIPMIV

SEQ ID NO: 68675 - protein, 26 aa, Artificial Sequence
  Cyclic GFR-binding peptide
VPTELSPINMLYFDENEKVVYGKIPD

SEQ ID NO: 68676 - protein, 23 aa, Artificial Sequence
  Cyclic GFR-binding peptide
TQLSPINVLYFDDSSNVIYGKIP

SEQ ID NO: 68677 - protein, 30 aa, Artificial Sequence
  Cyclic GFR-binding peptide
  MOD_RES (3)..(4): Xaa is C or S
KAXXVPTELSPINMLYFDENEKVVYGKIPD

SEQ ID NO: 68678 - protein, 25 aa, Artificial Sequence
  Cyclic GFR-binding peptide
TKLSPINVLYFDDSSNVIYGKIPNM

SEQ ID NO: 68679 - protein, 31 aa, Artificial Sequence
  Cyclic GFR-binding peptide
  MOD_RES (2)..(3): Xaa is C or S
SXXVPARLSPINILYFDAANNVVYGKIPDMV

SEQ ID NO: 68680 - protein, 29 aa, Artificial Sequence
  Cyclic GFR-binding peptide
TELSPINMLYFDENEKVVYGKIPDMVVEG

SEQ ID NO: 68681 - protein, 23 aa, Artificial Sequence
  Cyclic GFR-binding peptide
TRLSPINILYFDSANNVVYGKIP

SEQ ID NO: 68682 - protein, 34 aa, Artificial Sequence; identical to SEQ ID NO: 21917
  Cyclic GFR-binding peptide
  MOD_RES (1)..(2)..(34): Xaa is C or S

SEQ ID NO: 68683 - protein, 30 aa, Artificial Sequence
  Cyclic GFR-binding peptide
  MOD_RES (27)..(29): Xaa is C or S
SPINILYFDKGVVTYYGKIPGMAVSEXGXR

SEQ ID NO: 68684 - protein, 40 aa, Artificial Sequence; identical to SEQ ID NO: 21918
  Cyclic GFR-binding peptide
  MOD_RES (6)..(7)..(39): Xaa is C or S

SEQ ID NO: 68685 - protein, 24 aa, Artificial Sequence
  Cyclic GFR-binding peptide
PVKTSPINMLYFDNGRVLLYGKIP

SEQ ID NO: 68686 - protein, 32 aa, Artificial Sequence
  Cyclic GFR-binding peptide
  MOD_RES (3)..(4): Xaa is C or S
KAXXVPTKLSPINVLYFDDMGVPTYGKIPEGM

SEQ ID NO: 68687 - protein, 30 aa, Artificial Sequence
  Cyclic GFR-binding peptide
  MOD_RES (3)..(4): Xaa is C or S
KPXXAPTQLSPINVLYFDDSSNVIYGKIPN

SEQ ID NO: 68688 - protein, 32 aa, Artificial Sequence
  Cyclic GFR-binding peptide
  MOD_RES (31)..(31): Xaa is C or S
PTELSPINMLYFDENEKVVYGKIPDMVVEGXG

SEQ ID NO: 68689 - protein, 35 aa, Artificial Sequence; identical to SEQ ID NO: 21930
  Cyclic GFR-binding peptide
  MOD_RES (4)..(5): Xaa is C or S

SEQ ID NO: 68690 - protein, 39 aa, Artificial Sequence; identical to SEQ ID NO: 21934
  Cyclic GFR-binding peptide
  MOD_RES (4)..(5)..(37)..(39): Xaa is C or S

SEQ ID NO: 68691 - protein, 30 aa, Artificial Sequence
  Cyclic GFR-binding peptide
VPTKLSPINVLYFDDMGVPTYGKIPEGMSV

SEQ ID NO: 68692 - protein, 27 aa, Artificial Sequence
  Cyclic GFR-binding peptide
VPTELSPINMLYFDEYDKVVYGKIPEM

SEQ ID NO: 68693 - protein, 32 aa, Artificial Sequence; identical to SEQ ID NO: 21940
  Cyclic GFR-binding peptide
  MOD_RES (1)..(1): Xaa is C or S

SEQ ID NO: 68694 - protein, 38 aa, Artificial Sequence; identical to SEQ ID NO: 21941
  Cyclic GFR-binding peptide
  MOD_RES (6)..(7): Xaa is C or S

SEQ ID NO: 68695 - protein, 36 aa, Artificial Sequence
  Cyclic GFR-binding peptide
  MOD_RES (6)..(7): Xaa is C or S
TVPKPXXAPTQLSPINVLYFDDSSNVIYGKIPNMVV

SEQ ID NO: 68696 - protein, 40 aa, Artificial Sequence; identical to SEQ ID NO: 21943
  Cyclic GFR-binding peptide
  MOD_RES (6)..(38)..(40): Xaa is C or S

SEQ ID NO: 68697 - protein, 30 aa, Artificial Sequence
  Cyclic GFR-binding peptide
  MOD_RES (27)..(29): Xaa is C or S
SPINILYFDSANNVVYGKIPDMVVESXGXR

SEQ ID NO: 68698 - protein, 29 aa, Artificial Sequence
  Cyclic GFR-binding peptide
  MOD_RES (1)..(2): Xaa is C or S
XXVPTKLSPINILYFDKGVVTYYGKIPGM

SEQ ID NO: 68699 - protein, 37 aa, Artificial Sequence; identical to SEQ ID NO: 21945
  Cyclic GFR-binding peptide
  MOD_RES (6)..(7): Xaa is C or S

SEQ ID NO: 68700 - protein, 26 aa, Artificial Sequence
  Cyclic GFR-binding peptide
ELSPINMLYFDEYDKVVYGKIPEMVV

SEQ ID NO: 68701 - protein, 36 aa, Artificial Sequence; identical to SEQ ID NO: 21948
  Cyclic GFR-binding peptide
  MOD_RES (5)..(6): Xaa is C or S

SEQ ID NO: 68702 - protein, 26 aa, Artificial Sequence
  Cyclic GFR-binding peptide
ARLSPINILYFDAANNVVYGKIPDMV

SEQ ID NO: 68703 - protein, 31 aa, Artificial Sequence
  Cyclic GFR-binding peptide
  MOD_RES (31)..(31): Xaa is C or S
PTELSPINMLYFDENEKVVYGKIPDMVVEGX

SEQ ID NO: 68704 - protein, 42 aa, Artificial Sequence; identical to SEQ ID NO: 21954
  Cyclic GFR-binding peptide
  MOD_RES (7)..(39)..(41): Xaa is C or S

SEQ ID NO: 68705 - protein, 33 aa, Artificial Sequence; identical to SEQ ID NO: 21956
  Cyclic GFR-binding peptide
  MOD_RES (1)..(2)..(33): Xaa is C or S

SEQ ID NO: 68706 - protein, 36 aa, Artificial Sequence
  Cyclic GFR-binding peptide
  MOD_RES (6)..(7): Xaa is C or S
YVPKPXXAPTKLSPINVLYFDDSSNVIYGKIPNMVV

SEQ ID NO: 68707 - protein, 24 aa, Artificial Sequence
  Cyclic GFR-binding peptide
RLSPINILYFDSANNVVYGKIPDM

SEQ ID NO: 68708 - protein, 32 aa, Artificial Sequence; identical to SEQ ID NO: 21962
  Cyclic GFR-binding peptide
  MOD_RES (32)..(32): Xaa is C or S

SEQ ID NO: 68709 - protein, 33 aa, Artificial Sequence
  Cyclic GFR-binding peptide
  MOD_RES (3)..(4): Xaa is C or S
KAXXVPTKLSPINILYFDKGVVTYYGKIPGMAV

SEQ ID NO: 68710 - protein, 32 aa, Artificial Sequence
  Cyclic GFR-binding peptide
  MOD_RES (30)..(32): Xaa is C or S
TELSPINMLYFDEYDKVVYGKIPEMVVEGXGX

SEQ ID NO: 68711 - protein, 29 aa, Artificial Sequence
  Cyclic GFR-binding peptide
  MOD_RES (1)..(1): Xaa is C or S
XAPTQLSPINVLYFDDSSNVIYGKIPNMV

SEQ ID NO: 68712 - protein, 39 aa, Artificial Sequence; identical to SEQ ID NO: 21964
  Cyclic GFR-binding peptide
  MOD_RES (4)..(5)..(36)..(38): Xaa is C or S

SEQ ID NO: 68713 - protein, 26 aa, Artificial Sequence
  Cyclic GFR-binding peptide
  MOD_RES (26)..(26): Xaa is C or S
SPINMLYFDNGRVLLYGKIPMIVEEX

SEQ ID NO: 68714 - protein, 31 aa, Artificial Sequence
  Cyclic GFR-binding peptide
  MOD_RES (3)..(4): Xaa is C or S
KAXXVPTELSPINMLYFDEYDKVVYGKIPEM

SEQ ID NO: 68715 - protein, 27 aa, Artificial Sequence
  Cyclic GFR-binding peptide
TELSPINMLYFDENEKVVYGKIPDMVV

SEQ ID NO: 68716 - protein, 27 aa, Artificial Sequence
  Cyclic GFR-binding peptide
  MOD_RES (1)..(2): Xaa is C or S
XXAPTKLSPINVLYFDDSSNVIYGKIP

SEQ ID NO: 68717 - protein, 35 aa, Artificial Sequence; identical to SEQ ID NO: 21974
  Cyclic GFR-binding peptide
  MOD_RES (2)..(3)..(35): Xaa is C or S

SEQ ID NO: 68718 - protein, 25 aa, Artificial Sequence
  Cyclic GFR-binding peptide
TELSPINMLYFDENEKVVYGKIPDM

SEQ ID NO: 68719 - protein, 32 aa, Artificial Sequence
  Cyclic GFR-binding peptide
  MOD_RES (32)..(32): Xaa is C or S
PTKLSPINVLYFDDMGVPTYGKIPEGMSVAEX

SEQ ID NO: 68720 - protein, 22 aa, Artificial Sequence
  Cyclic GFR-binding peptide
KLSPINVLYFDDSSNVIYGKIP

SEQ ID NO: 68721 - protein, 30 aa, Artificial Sequence
  Cyclic GFR-binding peptide
  MOD_RES (1)..(2): Xaa is C or S
XXVPTELSPINMLYFDEYDKVVYGKIPEMV

SEQ ID NO: 68722 - protein, 40 aa, Artificial Sequence; identical to SEQ ID NO: 21986
  Cyclic GFR-binding peptide
  MOD_RES (4)..(5)..(37)..(39): Xaa is C or S

SEQ ID NO: 68723 - protein, 37 aa, Artificial Sequence; identical to SEQ ID NO: 21987
  Cyclic GFR-binding peptide
  MOD_RES (5)..(37): Xaa is C or S

SEQ ID NO: 68724 - protein, 41 aa, Artificial Sequence; identical to SEQ ID NO: 21988
  Cyclic GFR-binding peptide
  MOD_RES (5)..(6)..(38)..(40): Xaa is C or S

SEQ ID NO: 68725 - protein, 30 aa, Artificial Sequence
  Cyclic GFR-binding peptide
  MOD_RES (30)..(30): Xaa is C or S
TKLSPINVLYFDSSNNVIYGKIPNMVVKAX

SEQ ID NO: 68726 - protein, 26 aa, Artificial Sequence
  Cyclic GFR-binding peptide
TSPINMLYFDNGRVLLYGKIPMIVEE

SEQ ID NO: 68727 - protein, 22 aa, Artificial Sequence
  Cyclic GFR-binding peptide
RLSPINILYFDAANNVVYGKIP

SEQ ID NO: 68728 - protein, 36 aa, Artificial Sequence; identical to SEQ ID NO: 21991
  Cyclic GFR-binding peptide
  MOD_RES (2)..(3)..(35): Xaa is C or S

SEQ ID NO: 68729 - protein, 24 aa, Artificial Sequence
  Cyclic GFR-binding peptide
PTKLSPINVLYFDSSNNVIYGKIP

SEQ ID NO: 68730 - protein, 28 aa, Artificial Sequence
  Cyclic GFR-binding peptide
TKLSPINVLYFDSSNNVIYGKIPNMVVK

SEQ ID NO: 68731 - protein, 29 aa, Artificial Sequence
  Cyclic GFR-binding peptide
  MOD_RES (27)..(29): Xaa is C or S
SPINMLYFDENEKVVYGKIPDMVVEGXGX

SEQ ID NO: 68732 - protein, 31 aa, Artificial Sequence
  Cyclic GFR-binding peptide
  MOD_RES (4)..(5): Xaa is C or S
PKAXXAPTKLSPINVLYFDSSNNVIYGKIPN

SEQ ID NO: 68733 - protein, 35 aa, Artificial Sequence; identical to SEQ ID NO: 22001
  Cyclic GFR-binding peptide
  MOD_RES (33)..(35): Xaa is C or S

SEQ ID NO: 68734 - protein, 33 aa, Artificial Sequence
  Cyclic GFR-binding peptide
  MOD_RES (5)..(6): Xaa is C or S
IPKAXXVPTELSPINMLYFDENEKVVYGKIPDM

SEQ ID NO: 68735 - protein, 41 aa, Artificial Sequence; identical to SEQ ID NO: 22004
  Cyclic GFR-binding peptide
  MOD_RES (6)..(7)..(39)..(41): Xaa is C or S

SEQ ID NO: 68736 - protein, 27 aa, Artificial Sequence
  Cyclic GFR-binding peptide
APTKLSPINVLYFDDSSNVIYGKIPNM

SEQ ID NO: 68737 - protein, 26 aa, Artificial Sequence
  Cyclic GFR-binding peptide
PTKLSPINVLYFDDMGVPTYGKIPEG

SEQ ID NO: 68738 - protein, 30 aa, Artificial Sequence
  Cyclic GFR-binding peptide
  MOD_RES (28)..(30): Xaa is C or S
LSPINMLYFDENEKVVYGKIPDMVVEGXGX

SEQ ID NO: 68739 - protein, 32 aa, Artificial Sequence
  Cyclic GFR-binding peptide
  MOD_RES (6)..(7): Xaa is C or S
SIPKAXXVPTELSPINMLYFDEYDKVVYGKIP

SEQ ID NO: 68740 - protein, 41 aa, Artificial Sequence; identical to SEQ ID NO: 22016
  Cyclic GFR-binding peptide
  MOD_RES (6)..(38)..(40): Xaa is C or S

SEQ ID NO: 68741 - protein, 24 aa, Artificial Sequence
  Cyclic GFR-binding peptide
PTRLSPINILYFDSANNVVYGKIP

SEQ ID NO: 68742 - protein, 22 aa, Artificial Sequence
  Cyclic GFR-binding peptide
SPINILYFDKGVVTYYGKIPGM

SEQ ID NO: 68743 - protein, 33 aa, Artificial Sequence; identical to SEQ ID NO: 22019
  Cyclic GFR-binding peptide
  MOD_RES (1)..(2): Xaa is C or S

SEQ ID NO: 68744 - protein, 27 aa, Artificial Sequence
  Cyclic GFR-binding peptide
VKTSPINMLYFDNGRVLLYGKIPMIVE

SEQ ID NO: 68745 - protein, 32 aa, Artificial Sequence; identical to SEQ ID NO: 22022
  Cyclic GFR-binding peptide
  MOD_RES (32)..(32): Xaa is C or S

SEQ ID NO: 68746 - protein, 29 aa, Artificial Sequence
  Cyclic GFR-binding peptide
TELSPINMLYFDEYDKVVYGKIPEMVVEG

SEQ ID NO: 68747 - protein, 31 aa, Artificial Sequence; identical to SEQ ID NO: 22028
  Cyclic GFR-binding peptide
  MOD_RES (1)..(1): Xaa is C or S

SEQ ID NO: 68748 - protein, 24 aa, Artificial Sequence
  Cyclic GFR-binding peptide
TKLSPINILYFDKGVVTYYGKIPG

SEQ ID NO: 68749 - protein, 34 aa, Artificial Sequence; identical to SEQ ID NO: 22031
  Cyclic GFR-binding peptide
  MOD_RES (32)..(34): Xaa is C or S

SEQ ID NO: 68750 - protein, 34 aa, Artificial Sequence; identical to SEQ ID NO: 22032
  Cyclic GFR-binding peptide
  MOD_RES (2)..(3): Xaa is C or S

SEQ ID NO: 68751 - protein, 40 aa, Artificial Sequence; identical to SEQ ID NO: 22037
  Cyclic GFR-binding peptide
  MOD_RES (6)..(7)..(39): Xaa is C or S

SEQ ID NO: 68752 - protein, 38 aa, Artificial Sequence; identical to SEQ ID NO: 22039
  Cyclic GFR-binding peptide
  MOD_RES (6)..(7): Xaa is C or S

SEQ ID NO: 68753 - protein, 23 aa, Artificial Sequence
  Cyclic GFR-binding peptide
SPINILYFDSANNVVYGKIPDMV

SEQ ID NO: 68754 - protein, 29 aa, Artificial Sequence
  Cyclic GFR-binding peptide
PTELSPINMLYFDENEKVVYGKIPDMVVE

SEQ ID NO: 68755 - protein, 29 aa, Artificial Sequence
  Cyclic GFR-binding peptide
  MOD_RES (3)..(4): Xaa is C or S
KAXXVPTELSPINMLYFDENEKVVYGKIP

SEQ ID NO: 68756 - protein, 30 aa, Artificial Sequence
  Cyclic GFR-binding peptide
  MOD_RES (30)..(30): Xaa is C or S
TKLSPINVLYFDDSSNVIYGKIPNMVVRSX

SEQ ID NO: 68757 - protein, 26 aa, Artificial Sequence
  Cyclic GFR-binding peptide
APTKLSPINVLYFDDSSNVIYGKIPN

SEQ ID NO: 68758 - protein, 34 aa, Artificial Sequence; identical to SEQ ID NO: 22056
  Cyclic GFR-binding peptide
  MOD_RES (32)..(34): Xaa is C or S

SEQ ID NO: 68759 - protein, 33 aa, Artificial Sequence; identical to SEQ ID NO: 22057
  Cyclic GFR-binding peptide
  MOD_RES (32)..(32): Xaa is C or S

SEQ ID NO: 68760 - protein, 32 aa, Artificial Sequence
  Cyclic GFR-binding peptide
  MOD_RES (5)..(6): Xaa is C or S
VGKAXXVPTKLSPINVLYFDDMGVPTYGKIPE

SEQ ID NO: 68761 - protein, 34 aa, Artificial Sequence; identical to SEQ ID NO: 22058
  Cyclic GFR-binding peptide
  MOD_RES (3)..(4): Xaa is C or S

SEQ ID NO: 68762 - protein, 30 aa, Artificial Sequence
  Cyclic GFR-binding peptide
  MOD_RES (4)..(5): Xaa is C or S
PKPXXAPTQLSPINVLYFDDSSNVIYGKIP

SEQ ID NO: 68763 - protein, 32 aa, Artificial Sequence
  Cyclic GFR-binding peptide
  MOD_RES (29)..(31): Xaa is C or S
KLSPINILYFDKGVVTYYGKIPGMAVSEXGXR

SEQ ID NO: 68764 - protein, 41 aa, Artificial Sequence; identical to SEQ ID NO: 22062
  Cyclic GFR-binding peptide
  MOD_RES (6)..(7)..(39)..(41): Xaa is C or S

SEQ ID NO: 68765 - protein, 41 aa, Artificial Sequence; identical to SEQ ID NO: 22063
  Cyclic GFR-binding peptide
  MOD_RES (6)..(7)..(39)..(41): Xaa is C or S

SEQ ID NO: 68766 - protein, 32 aa, Artificial Sequence
  Cyclic GFR-binding peptide
  MOD_RES (31)..(31): Xaa is C or S
TKLSPINVLYFDDMGVPTYGKIPEGMSVAEXG

SEQ ID NO: 68767 - protein, 29 aa, Artificial Sequence
  Cyclic GFR-binding peptide
  MOD_RES (27)..(29): Xaa is C or S
SPINVLYFDDSSNVIYGKIPNMVVRSXGX

SEQ ID NO: 68768 - protein, 36 aa, Artificial Sequence
  Cyclic GFR-binding peptide
  MOD_RES (6)..(7): Xaa is C or S
KIPKAXXVPTELSPINMLYFDENEKVVYGKIPDMVV

SEQ ID NO: 68769 - protein, 28 aa, Artificial Sequence
  Cyclic GFR-binding peptide
  MOD_RES (1)..(2): Xaa is C or S
XXVPTELSPINMLYFDEYDKVVYGKIPE

SEQ ID NO: 68770 - protein, 20 aa, Artificial Sequence
  Cyclic GFR-binding peptide
SPINMLYFDENEKVVYGKIP

SEQ ID NO: 68771 - protein, 37 aa, Artificial Sequence; identical to SEQ ID NO: 22072
  Cyclic GFR-binding peptide
  MOD_RES (1)..(2)..(34)..(36): Xaa is C or S

SEQ ID NO: 68772 - protein, 20 aa, Artificial Sequence
  Cyclic GFR-binding peptide
SPINILYFDKGVVTYYGKIP

SEQ ID NO: 68773 - protein, 33 aa, Artificial Sequence
  Cyclic GFR-binding peptide
  MOD_RES (6)..(7): Xaa is C or S
YVPKPXXAPTKLSPINVLYFDDSSNVIYGKIPN

SEQ ID NO: 68774 - protein, 36 aa, Artificial Sequence; identical to SEQ ID NO: 22077
  Cyclic GFR-binding peptide
  MOD_RES (1)..(34)..(36): Xaa is C or S

SEQ ID NO: 68775 - protein, 31 aa, Artificial Sequence; identical to SEQ ID NO: 22078
  Cyclic GFR-binding peptide
  MOD_RES (1)..(1): Xaa is C or S

SEQ ID NO: 68776 - protein, 30 aa, Artificial Sequence; identical to SEQ ID NO: 919
  Cyclic GFR-binding peptide

SEQ ID NO: 68777 - protein, 32 aa, Artificial Sequence
  Cyclic GFR-binding peptide
  MOD_RES (6)..(7): Xaa is C or S
STPPTXXVPTRLSPINILYFDSANNVVYGKIP

SEQ ID NO: 68778 - protein, 35 aa, Artificial Sequence
  Cyclic GFR-binding peptide
  MOD_RES (6)..(7): Xaa is C or S
HVPKPXXAPTKLSPINVLYFDDSSNVIYGKIPNMV

SEQ ID NO: 68779 - protein, 33 aa, Artificial Sequence; identical to SEQ ID NO: 22081
  Cyclic GFR-binding peptide
  MOD_RES (2)..(3): Xaa is C or S

SEQ ID NO: 68780 - protein, 36 aa, Artificial Sequence; identical to SEQ ID NO: 22082
  Cyclic GFR-binding peptide
  MOD_RES (1)..(33)..(35): Xaa is C or S

SEQ ID NO: 68781 - protein, 28 aa, Artificial Sequence
  Cyclic GFR-binding peptide
  MOD_RES (27)..(27): Xaa is C or S
TSPINMLYFDNGRVLLYGKIPMIVEEXG

SEQ ID NO: 68782 - protein, 36 aa, Artificial Sequence
  Cyclic GFR-binding peptide
  MOD_RES (7)..(7): Xaa is C or S
HVTKPTXAPTKLSPINVLYFDDSSNVIYGKIPNMVV

SEQ ID NO: 68783 - protein, 30 aa, Artificial Sequence
  Cyclic GFR-binding peptide
PTRLSPINILYFDSANNVVYGKIPDMVVES

SEQ ID NO: 68784 - protein, 28 aa, Artificial Sequence
  Cyclic GFR-binding peptide
LSPINVLYFDDMGVPTYGKIPEGMSVAE

SEQ ID NO: 68785 - protein, 24 aa, Artificial Sequence
  Cyclic GFR-binding peptide
SPINILYFDKGVVTYYGKIPGMAV

SEQ ID NO: 68786 - protein, 25 aa, Artificial Sequence
  Cyclic GFR-binding peptide
ARLSPINILYFDAANNVVYGKIPDM

SEQ ID NO: 68787 - protein, 25 aa, Artificial Sequence
  Cyclic GFR-binding peptide
SPINVLYFDDMGVPTYGKIPEGMSV

SEQ ID NO: 68788 - protein, 21 aa, Artificial Sequence
  Cyclic GFR-binding peptide
LSPINILYFDAANNVVYGKIP

SEQ ID NO: 68789 - protein, 29 aa, Artificial Sequence
  Cyclic GFR-binding peptide
KLSPINVLYFDDMGVPTYGKIPEGMSVAE

SEQ ID NO: 68790 - protein, 30 aa, Artificial Sequence
  Cyclic GFR-binding peptide
  MOD_RES (1)..(1): Xaa is C or S
XVPTRLSPINILYFDSANNVVYGKIPDMVV

SEQ ID NO: 68791 - protein, 33 aa, Artificial Sequence
  Cyclic GFR-binding peptide
  MOD_RES (6)..(7): Xaa is C or S
HVPKPXXAPTKLSPINVLYFDDSSNVIYGKIPN

SEQ ID NO: 68792 - protein, 26 aa, Artificial Sequence
  Cyclic GFR-binding peptide
  MOD_RES (1)..(1): Xaa is C or S
XAPTKLSPINVLYFDDSSNVIYGKIP

SEQ ID NO: 68793 - protein, 27 aa, Artificial Sequence
  Cyclic GFR-binding peptide
KLSPINVLYFDDSSNVIYGKIPNMVVR

SEQ ID NO: 68794 - protein, 28 aa, Artificial Sequence
  Cyclic GFR-binding peptide
PTKLSPINVLYFDDSSNVIYGKIPNMVV

SEQ ID NO: 68795 - protein, 28 aa, Artificial Sequence
  Cyclic GFR-binding peptide
  MOD_RES (27)..(27): Xaa is C or S
SPINVLYFDSSNNVIYGKIPNMVVKAXG

SEQ ID NO: 68796 - protein, 24 aa, Artificial Sequence
  Cyclic GFR-binding peptide
LSPINVLYFDDSSNVIYGKIPNMV

SEQ ID NO: 68797 - protein, 33 aa, Artificial Sequence; identical to SEQ ID NO: 22100
  Cyclic GFR-binding peptide
  MOD_RES (1)..(33): Xaa is C or S

SEQ ID NO: 68798 - protein, 28 aa, Artificial Sequence
  Cyclic GFR-binding peptide
VPTKLSPINILYFDKGVVTYYGKIPGMA

SEQ ID NO: 68799 - protein, 31 aa, Artificial Sequence
  Cyclic GFR-binding peptide
  MOD_RES (28)..(30): Xaa is C or S
LSPINVLYFDSSNNVIYGKIPNMVVKAXGXH

SEQ ID NO: 68800 - protein, 28 aa, Artificial Sequence
  Cyclic GFR-binding peptide
RLSPINILYFDSANNVVYGKIPDMVVES

SEQ ID NO: 68801 - protein, 22 aa, Artificial Sequence
  Cyclic GFR-binding peptide
KLSPINVLYFDDMGVPTYGKIP

SEQ ID NO: 68802 - protein, 28 aa, Artificial Sequence
  Cyclic GFR-binding peptide
  MOD_RES (28)..(28): Xaa is C or S
LSPINILYFDAANNVVYGKIPDMVVEAX

SEQ ID NO: 68803 - protein, 24 aa, Artificial Sequence
  Cyclic GFR-binding peptide
ARLSPINILYFDAANNVVYGKIPD

SEQ ID NO: 68804 - protein, 23 aa, Artificial Sequence
  Cyclic GFR-binding peptide
LSPINVLYFDDMGVPTYGKIPEG

SEQ ID NO: 68805 - protein, 34 aa, Artificial Sequence; identical to SEQ ID NO: 22115
  Cyclic GFR-binding peptide
  MOD_RES (32)..(34): Xaa is C or S

SEQ ID NO: 68806 - protein, 30 aa, Artificial Sequence
  Cyclic GFR-binding peptide
  MOD_RES (4)..(5): Xaa is C or S
PSTXXAPVKTSPINMLYFDNGRVLLYGKIP

SEQ ID NO: 68807 - protein, 34 aa, Artificial Sequence; identical to SEQ ID NO: 22119
  Cyclic GFR-binding peptide
  MOD_RES (32)..(34): Xaa is C or S

SEQ ID NO: 68808 - protein, 31 aa, Artificial Sequence; identical to SEQ ID NO: 22121
  Cyclic GFR-binding peptide
  MOD_RES (1)..(1): Xaa is C or S

SEQ ID NO: 68809 - protein, 25 aa, Artificial Sequence
  Cyclic GFR-binding peptide
PTQLSPINVLYFDDSSNVIYGKIPN

SEQ ID NO: 68810 - protein, 21 aa, Artificial Sequence
  Cyclic GFR-binding peptide
SPINMLYFDENEKVVYGKIPD

SEQ ID NO: 68811 - protein, 32 aa, Artificial Sequence
  Cyclic GFR-binding peptide
  MOD_RES (6)..(7): Xaa is C or S
AAPASXXVPARLSPINILYFDAANNVVYGKIP

SEQ ID NO: 68812 - protein, 29 aa, Artificial Sequence
  Cyclic GFR-binding peptide
  MOD_RES (3)..(4): Xaa is C or S
KPXXAPTQLSPINVLYFDDSSNVIYGKIP

SEQ ID NO: 68813 - protein, 30 aa, Artificial Sequence
  Cyclic GFR-binding peptide
  MOD_RES (29)..(29): Xaa is C or S
RLSPINILYFDSANNVVYGKIPDMVVESXG

SEQ ID NO: 68814 - protein, 36 aa, Artificial Sequence; identical to SEQ ID NO: 22128
  Cyclic GFR-binding peptide
  MOD_RES (5)..(6): Xaa is C or S

SEQ ID NO: 68815 - protein, 25 aa, Artificial Sequence
  Cyclic GFR-binding peptide
KLSPINVLYFDDMGVPTYGKIPEGM

SEQ ID NO: 68816 - protein, 28 aa, Artificial Sequence
  Cyclic GFR-binding peptide
TELSPINMLYFDENEKVVYGKIPDMVVE

SEQ ID NO: 68817 - protein, 25 aa, Artificial Sequence
  Cyclic GFR-binding peptide
PTKLSPINILYFDKGVVTYYGKIPG

SEQ ID NO: 68818 - protein, 25 aa, Artificial Sequence
  Cyclic GFR-binding peptide
RLSPINILYFDAANNVVYGKIPDMV

SEQ ID NO: 68819 - protein, 34 aa, Artificial Sequence; identical to SEQ ID NO: 22129
  Cyclic GFR-binding peptide
  MOD_RES (2)..(3): Xaa is C or S

SEQ ID NO: 68820 - protein, 23 aa, Artificial Sequence
  Cyclic GFR-binding peptide
SPINVLYFDSSNNVIYGKIPNMV

SEQ ID NO: 68821 - protein, 40 aa, Artificial Sequence; identical to SEQ ID NO: 22133
  Cyclic GFR-binding peptide
  MOD_RES (4)..(5)..(37)..(39): Xaa is C or S

SEQ ID NO: 68822 - protein, 32 aa, Artificial Sequence
  Cyclic GFR-binding peptide
  MOD_RES (6)..(7): Xaa is C or S
KASKAXXVPTKLSPINILYFDKGVVTYYGKIP

SEQ ID NO: 68823 - protein, 36 aa, Artificial Sequence
  Cyclic GFR-binding peptide
  MOD_RES (5)..(6): Xaa is C or S
VGKAXXVPTKLSPINVLYFDDMGVPTYGKIPEGMSV

SEQ ID NO: 68824 - protein, 20 aa, Artificial Sequence
  Cyclic GFR-binding peptide
SPINVLYFDDSSNVIYGKIP

SEQ ID NO: 68825 - protein, 30 aa, Artificial Sequence
  Cyclic GFR-binding peptide
  MOD_RES (4)..(5): Xaa is C or S
PKAXXVPTELSPINMLYFDENEKVVYGKIP

SEQ ID NO: 68826 - protein, 36 aa, Artificial Sequence; identical to SEQ ID NO: 22138
  Cyclic GFR-binding peptide
  MOD_RES (2)..(3)..(34)..(36): Xaa is C or S

SEQ ID NO: 68827 - protein, 33 aa, Artificial Sequence; identical to SEQ ID NO: 22140
  Cyclic GFR-binding peptide
  MOD_RES (2)..(3): Xaa is C or S

SEQ ID NO: 68828 - protein, 34 aa, Artificial Sequence
  Cyclic GFR-binding peptide
  MOD_RES (6)..(7): Xaa is C or S
KASKAXXVPTKLSPINILYFDKGVVTYYGKIPGM

SEQ ID NO: 68829 - protein, 26 aa, Artificial Sequence
  Cyclic GFR-binding peptide
TRLSPINILYFDSANNVVYGKIPDMV

SEQ ID NO: 68830 - protein, 38 aa, Artificial Sequence; identical to SEQ ID NO: 22143
  Cyclic GFR-binding peptide
  MOD_RES (5)..(37): Xaa is C or S

SEQ ID NO: 68831 - protein, 31 aa, Artificial Sequence
  Cyclic GFR-binding peptide
  MOD_RES (5)..(6): Xaa is C or S
VPKPXXAPTQLSPINVLYFDDSSNVIYGKIP

SEQ ID NO: 68832 - protein, 28 aa, Artificial Sequence
  Cyclic GFR-binding peptide
  MOD_RES (26)..(28): Xaa is C or S
SPINMLYFDNGRVLLYGKIPMIVEEXGX

SEQ ID NO: 68833 - protein, 30 aa, Artificial Sequence; identical to SEQ ID NO: 22146
  Cyclic GFR-binding peptide

SEQ ID NO: 68834 - protein, 38 aa, Artificial Sequence; identical to SEQ ID NO: 22147
  Cyclic GFR-binding peptide
  MOD_RES (6)..(38): Xaa is C or S

SEQ ID NO: 68835 - protein, 31 aa, Artificial Sequence
  Cyclic GFR-binding peptide
  MOD_RES (30)..(30): Xaa is C or S
TELSPINMLYFDEYDKVVYGKIPEMVVEGXG

SEQ ID NO: 68836 - protein, 31 aa, Artificial Sequence
  Cyclic GFR-binding peptide
  MOD_RES (30)..(30): Xaa is C or S
TKLSPINILYFDKGVVTYYGKIPGMAVSEXG

SEQ ID NO: 68837 - protein, 20 aa, Artificial Sequence
  Cyclic GFR-binding peptide
SPINILYFDSANNVVYGKIP

SEQ ID NO: 68838 - protein, 34 aa, Artificial Sequence
  Cyclic GFR-binding peptide
  MOD_RES (5)..(6): Xaa is C or S
VGKAXXVPTKLSPINVLYFDDMGVPTYGKIPEGM

SEQ ID NO: 68839 - protein, 34 aa, Artificial Sequence; identical to SEQ ID NO: 22154
  Cyclic GFR-binding peptide
  MOD_RES (1)..(2)..(34): Xaa is C or S

SEQ ID NO: 68840 - protein, 29 aa, Artificial Sequence
  Cyclic GFR-binding peptide
  MOD_RES (28)..(28): Xaa is C or S
LSPINILYFDKGVVTYYGKIPGMAVSEXG

SEQ ID NO: 68841 - protein, 40 aa, Artificial Sequence; identical to SEQ ID NO: 22155
  Cyclic GFR-binding peptide
  MOD_RES (6)..(7)..(40): Xaa is C or S

SEQ ID NO: 68842 - protein, 39 aa, Artificial Sequence; identical to SEQ ID NO: 22156
  Cyclic GFR-binding peptide
  MOD_RES (4)..(5)..(37)..(39): Xaa is C or S

SEQ ID NO: 68843 - protein, 34 aa, Artificial Sequence; identical to SEQ ID NO: 22157
  Cyclic GFR-binding peptide
  MOD_RES (1)..(2)..(33): Xaa is C or S

SEQ ID NO: 68844 - protein, 31 aa, Artificial Sequence
  Cyclic GFR-binding peptide
  MOD_RES (31)..(31): Xaa is C or S
PTKLSPINVLYFDSSNNVIYGKIPNMVVKAX

SEQ ID NO: 68845 - protein, 35 aa, Artificial Sequence; identical to SEQ ID NO: 22160
  Cyclic GFR-binding peptide
  MOD_RES (3)..(4): Xaa is C or S

SEQ ID NO: 68846 - protein, 32 aa, Artificial Sequence; identical to SEQ ID NO: 22163
  Cyclic GFR-binding peptide
  MOD_RES (32)..(32): Xaa is C or S

SEQ ID NO: 68847 - protein, 29 aa, Artificial Sequence
  Cyclic GFR-binding peptide
  MOD_RES (1)..(2): Xaa is C or S
XXAPTKLSPINVLYFDDSSNVIYGKIPNM

SEQ ID NO: 68848 - protein, 20 aa, Artificial Sequence
  Cyclic GFR-binding peptide
SPINVLYFDDMGVPTYGKIP

SEQ ID NO: 68849 - protein, 33 aa, Artificial Sequence; identical to SEQ ID NO: 22169
  Cyclic GFR-binding peptide
  MOD_RES (1)..(33): Xaa is C or S

SEQ ID NO: 68850 - protein, 31 aa, Artificial Sequence
  Cyclic GFR-binding peptide
  MOD_RES (5)..(6): Xaa is C or S
VPSTXXAPVKTSPINMLYFDNGRVLLYGKIP

SEQ ID NO: 68851 - protein, 37 aa, Artificial Sequence; identical to SEQ ID NO: 22171
  Cyclic GFR-binding peptide
  MOD_RES (3)..(4)..(36): Xaa is C or S

SEQ ID NO: 68852 - protein, 32 aa, Artificial Sequence
  Cyclic GFR-binding peptide
  MOD_RES (4)..(5): Xaa is C or S
SKAXXVPTKLSPINILYFDKGVVTYYGKIPGM

SEQ ID NO: 68853 - protein, 35 aa, Artificial Sequence
  Cyclic GFR-binding peptide
  MOD_RES (6)..(7): Xaa is C or S
KIPKAXXVPTELSPINMLYFDENEKVVYGKIPDMV

SEQ ID NO: 68854 - protein, 34 aa, Artificial Sequence
  Cyclic GFR-binding peptide
  MOD_RES (5)..(5): Xaa is C or S
TKPTXAPTKLSPINVLYFDDSSNVIYGKIPNMVV

SEQ ID NO: 68855 - protein, 30 aa, Artificial Sequence
  Cyclic GFR-binding peptide
  MOD_RES (2)..(3): Xaa is C or S
AXXVPTELSPINMLYFDEYDKVVYGKIPEM

SEQ ID NO: 68856 - protein, 33 aa, Artificial Sequence
  Cyclic GFR-binding peptide
  MOD_RES (3)..(4): Xaa is C or S
STXXAPVKTSPINMLYFDNGRVLLYGKIPMIVE

SEQ ID NO: 68857 - protein, 24 aa, Artificial Sequence
  Cyclic GFR-binding peptide
LSPINMLYFDEYDKVVYGKIPEMV

SEQ ID NO: 68858 - protein, 31 aa, Artificial Sequence
  Cyclic GFR-binding peptide
  MOD_RES (5)..(6): Xaa is C or S
VGKAXXVPTKLSPINVLYFDDMGVPTYGKIP

SEQ ID NO: 68859 - protein, 27 aa, Artificial Sequence
  Cyclic GFR-binding peptide
  MOD_RES (1)..(1): Xaa is C or S
XVPTRLSPINILYFDSANNVVYGKIPD

SEQ ID NO: 68860 - protein, 25 aa, Artificial Sequence
  Cyclic GFR-binding peptide
LSPINILYFDAANNVVYGKIPDMVV

SEQ ID NO: 68861 - protein, 24 aa, Artificial Sequence
  Cyclic GFR-binding peptide
LSPINILYFDSANNVVYGKIPDMV

SEQ ID NO: 68862 - protein, 27 aa, Artificial Sequence
  Cyclic GFR-binding peptide
LSPINILYFDSANNVVYGKIPDMVVES

SEQ ID NO: 68863 - protein, 31 aa, Artificial Sequence
  Cyclic GFR-binding peptide
  MOD_RES (31)..(31): Xaa is C or S
PARLSPINILYFDAANNVVYGKIPDMVVEAX

SEQ ID NO: 68864 - protein, 37 aa, Artificial Sequence; identical to SEQ ID NO: 22188
  Cyclic GFR-binding peptide
  MOD_RES (2)..(3)..(35)..(37): Xaa is C or S

SEQ ID NO: 68865 - protein, 25 aa, Artificial Sequence
  Cyclic GFR-binding peptide
LSPINVLYFDSSNNVIYGKIPNMVV

SEQ ID NO: 68866 - protein, 30 aa, Artificial Sequence
  Cyclic GFR-binding peptide
  MOD_RES (4)..(5): Xaa is C or S
PPTXXVPTRLSPINILYFDSANNVVYGKIP

SEQ ID NO: 68867 - protein, 30 aa, Artificial Sequence
  Cyclic GFR-binding peptide
  MOD_RES (1)..(1): Xaa is C or S
XVPTELSPINMLYFDEYDKVVYGKIPEMVV

SEQ ID NO: 68868 - protein, 25 aa, Artificial Sequence
  Cyclic GFR-binding peptide
SPINMLYFDENEKVVYGKIPDMVVE

SEQ ID NO: 68869 - protein, 30 aa, Artificial Sequence; identical to SEQ ID NO: 911
  Cyclic GFR-binding peptide

SEQ ID NO: 68870 - protein, 30 aa, Artificial Sequence
  Cyclic GFR-binding peptide
  MOD_RES (30)..(30): Xaa is C or S
PVKTSPINMLYFDNGRVLLYGKIPMIVEEX

SEQ ID NO: 68871 - protein, 38 aa, Artificial Sequence; identical to SEQ ID NO: 22193
  Cyclic GFR-binding peptide
  MOD_RES (6)..(7): Xaa is C or S

SEQ ID NO: 68872 - protein, 34 aa, Artificial Sequence; identical to SEQ ID NO: 22194
  Cyclic GFR-binding peptide
  MOD_RES (1)..(2)..(34): Xaa is C or S

SEQ ID NO: 68873 - protein, 32 aa, Artificial Sequence
  Cyclic GFR-binding peptide
  MOD_RES (6)..(6): Xaa is C or S
VTKPTXAPTKLSPINVLYFDDSSNVIYGKIPN

SEQ ID NO: 68874 - protein, 33 aa, Artificial Sequence
  Cyclic GFR-binding peptide
  MOD_RES (5)..(6): Xaa is C or S
APASXXVPARLSPINILYFDAANNVVYGKIPDM

SEQ ID NO: 68875 - protein, 34 aa, Artificial Sequence; identical to SEQ ID NO: 22198
  Cyclic GFR-binding peptide
  MOD_RES (3)..(3): Xaa is C or S

SEQ ID NO: 68876 - protein, 33 aa, Artificial Sequence
  Cyclic GFR-binding peptide
  MOD_RES (3)..(4): Xaa is C or S
KPXXAPTKLSPINVLYFDDSSNVIYGKIPNMVV

SEQ ID NO: 68877 - protein, 29 aa, Artificial Sequence
  Cyclic GFR-binding peptide
PTKLSPINVLYFDSSNNVIYGKIPNMVVK

SEQ ID NO: 68878 - protein, 30 aa, Artificial Sequence
  Cyclic GFR-binding peptide
  MOD_RES (1)..(2): Xaa is C or S
XXVPTKLSPINVLYFDDMGVPTYGKIPEGM

SEQ ID NO: 68879 - protein, 33 aa, Artificial Sequence
  Cyclic GFR-binding peptide
  MOD_RES (4)..(5): Xaa is C or S
PSTXXAPVKTSPINMLYFDNGRVLLYGKIPMIV

SEQ ID NO: 68880 - protein, 28 aa, Artificial Sequence
  Cyclic GFR-binding peptide
  MOD_RES (1)..(2): Xaa is C or S
XXAPTQLSPINVLYFDDSSNVIYGKIPN

SEQ ID NO: 68881 - protein, 31 aa, Artificial Sequence
  Cyclic GFR-binding peptide
  MOD_RES (2)..(3): Xaa is C or S
AXXVPTKLSPINVLYFDDMGVPTYGKIPEGM

SEQ ID NO: 68882 - protein, 36 aa, Artificial Sequence; identical to SEQ ID NO: 22204
  Cyclic GFR-binding peptide
  MOD_RES (4)..(5): Xaa is C or S

SEQ ID NO: 68883 - protein, 32 aa, Artificial Sequence
  Cyclic GFR-binding peptide
  MOD_RES (4)..(5): Xaa is C or S
PPTXXVPTRLSPINILYFDSANNVVYGKIPDM

SEQ ID NO: 68884 - protein, 33 aa, Artificial Sequence; identical to SEQ ID NO: 22207
  Cyclic GFR-binding peptide
  MOD_RES (2)..(2): Xaa is C or S

SEQ ID NO: 68885 - protein, 32 aa, Artificial Sequence
  Cyclic GFR-binding peptide
  MOD_RES (3)..(4): Xaa is C or S
STXXAPVKTSPINMLYFDNGRVLLYGKIPMIV

SEQ ID NO: 68886 - protein, 32 aa, Artificial Sequence
  Cyclic GFR-binding peptide
  MOD_RES (29)..(31): Xaa is C or S
RLSPINILYFDAANNVVYGKIPDMVVEAXGXR

SEQ ID NO: 68887 - protein, 23 aa, Artificial Sequence
  Cyclic GFR-binding peptide
KTSPINMLYFDNGRVLLYGKIPM

SEQ ID NO: 68888 - protein, 35 aa, Artificial Sequence; identical to SEQ ID NO: 22221
  Cyclic GFR-binding peptide
  MOD_RES (2)..(3)..(35): Xaa is C or S

SEQ ID NO: 68889 - protein, 34 aa, Artificial Sequence; identical to SEQ ID NO: 22224
  Cyclic GFR-binding peptide
  MOD_RES (1)..(2)..(34): Xaa is C or S

SEQ ID NO: 68890 - protein, 27 aa, Artificial Sequence
  Cyclic GFR-binding peptide
APTQLSPINVLYFDDSSNVIYGKIPNM

SEQ ID NO: 68891 - protein, 39 aa, Artificial Sequence; identical to SEQ ID NO: 22229
  Cyclic GFR-binding peptide
  MOD_RES (5)..(6)..(38): Xaa is C or S

SEQ ID NO: 68892 - protein, 25 aa, Artificial Sequence
  Cyclic GFR-binding peptide
SPINVLYFDDSSNVIYGKIPNMVVR

SEQ ID NO: 68893 - protein, 37 aa, Artificial Sequence; identical to SEQ ID NO: 22231
  Cyclic GFR-binding peptide
  MOD_RES (3)..(4)..(36): Xaa is C or S

SEQ ID NO: 68894 - protein, 25 aa, Artificial Sequence
  Cyclic GFR-binding peptide
ELSPINMLYFDENEKVVYGKIPDMV

SEQ ID NO: 68895 - protein, 37 aa, Artificial Sequence; identical to SEQ ID NO: 22236
  Cyclic GFR-binding peptide
  MOD_RES (5)..(6): Xaa is C or S

SEQ ID NO: 68896 - protein, 29 aa, Artificial Sequence
  Cyclic GFR-binding peptide
  MOD_RES (2)..(3): Xaa is C or S
AXXVPTKLSPINVLYFDDMGVPTYGKIPE

SEQ ID NO: 68897 - protein, 31 aa, Artificial Sequence
  Cyclic GFR-binding peptide
  MOD_RES (1)..(2): Xaa is C or S
XXAPVKTSPINMLYFDNGRVLLYGKIPMIVE

SEQ ID NO: 68898 - protein, 35 aa, Artificial Sequence
  Cyclic GFR-binding peptide
  MOD_RES (5)..(6): Xaa is C or S
TPPTXXVPTRLSPINILYFDSANNVVYGKIPDMVV

SEQ ID NO: 68899 - protein, 26 aa, Artificial Sequence
  Cyclic GFR-binding peptide
ELSPINMLYFDENEKVVYGKIPDMVV

SEQ ID NO: 68900 - protein, 37 aa, Artificial Sequence; identical to SEQ ID NO: 22237
  Cyclic GFR-binding peptide
  MOD_RES (3)..(4)..(36): Xaa is C or S

SEQ ID NO: 68901 - protein, 28 aa, Artificial Sequence
  Cyclic GFR-binding peptide
  MOD_RES (28)..(28): Xaa is C or S
LSPINVLYFDDSSNVIYGKIPNMVVRAX

SEQ ID NO: 68902 - protein, 39 aa, Artificial Sequence; identical to SEQ ID NO: 22239
  Cyclic GFR-binding peptide
  MOD_RES (3)..(4)..(36)..(38): Xaa is C or S

SEQ ID NO: 68903 - protein, 39 aa, Artificial Sequence; identical to SEQ ID NO: 22240
  Cyclic GFR-binding peptide
  MOD_RES (6)..(7)..(39): Xaa is C or S

SEQ ID NO: 68904 - protein, 28 aa, Artificial Sequence
  Cyclic GFR-binding peptide
  MOD_RES (1)..(1): Xaa is C or S
XAPTKLSPINVLYFDDSSNVIYGKIPNM

SEQ ID NO: 68905 - protein, 31 aa, Artificial Sequence
  Cyclic GFR-binding peptide
  MOD_RES (29)..(31): Xaa is C or S
LSPINVLYFDDMGVPTYGKIPEGMSVAEXGX

SEQ ID NO: 68906 - protein, 28 aa, Artificial Sequence
  Cyclic GFR-binding peptide
  MOD_RES (28)..(28): Xaa is C or S
LSPINVLYFDSSNNVIYGKIPNMVVKAX

SEQ ID NO: 68907 - protein, 26 aa, Artificial Sequence
  Cyclic GFR-binding peptide
TKLSPINVLYFDDMGVPTYGKIPEGM

SEQ ID NO: 68908 - protein, 39 aa, Artificial Sequence; identical to SEQ ID NO: 22248
  Cyclic GFR-binding peptide
  MOD_RES (5)..(6)..(38): Xaa is C or S

SEQ ID NO: 68909 - protein, 24 aa, Artificial Sequence
  Cyclic GFR-binding peptide
LSPINILYFDAANNVVYGKIPDMV

SEQ ID NO: 68910 - protein, 37 aa, Artificial Sequence; identical to SEQ ID NO: 22251
  Cyclic GFR-binding peptide
  MOD_RES (4)..(5)..(37): Xaa is C or S

SEQ ID NO: 68911 - protein, 38 aa, Artificial Sequence; identical to SEQ ID NO: 22253
  Cyclic GFR-binding peptide
  MOD_RES (3)..(4)..(37): Xaa is C or S

SEQ ID NO: 68912 - protein, 32 aa, Artificial Sequence
  Cyclic GFR-binding peptide
  MOD_RES (31)..(31): Xaa is C or S
PTKLSPINVLYFDDSSNVIYGKIPNMVVRSXG

SEQ ID NO: 68913 - protein, 28 aa, Artificial Sequence
  Cyclic GFR-binding peptide
  MOD_RES (1)..(1): Xaa is C or S
XVPTRLSPINILYFDSANNVVYGKIPDM

SEQ ID NO: 68914 - protein, 33 aa, Artificial Sequence; identical to SEQ ID NO: 22266
  Cyclic GFR-binding peptide
  MOD_RES (1)..(33): Xaa is C or S

SEQ ID NO: 68915 - protein, 35 aa, Artificial Sequence; identical to SEQ ID NO: 22267
  Cyclic GFR-binding peptide
  MOD_RES (4)..(4): Xaa is C or S

SEQ ID NO: 68916 - protein, 33 aa, Artificial Sequence
  Cyclic GFR-binding peptide
  MOD_RES (4)..(5): Xaa is C or S
GKAXXVPTKLSPINVLYFDDMGVPTYGKIPEGM

SEQ ID NO: 68917 - protein, 28 aa, Artificial Sequence
  Cyclic GFR-binding peptide
TKLSPINVLYFDDSSNVIYGKIPNMVVR

SEQ ID NO: 68918 - protein, 26 aa, Artificial Sequence
  Cyclic GFR-binding peptide
SPINILYFDSANNVVYGKIPDMVVES

SEQ ID NO: 68919 - protein, 34 aa, Artificial Sequence
  Cyclic GFR-binding peptide
  MOD_RES (31)..(33): Xaa is C or S
TKLSPINVLYFDDMGVPTYGKIPEGMSVAEXGXR

SEQ ID NO: 68920 - protein, 30 aa, Artificial Sequence
  Cyclic GFR-binding peptide
  MOD_RES (2)..(3): Xaa is C or S
TXXAPVKTSPINMLYFDNGRVLLYGKIPMI

SEQ ID NO: 68921 - protein, 33 aa, Artificial Sequence
  Cyclic GFR-binding peptide
  MOD_RES (31)..(33): Xaa is C or S
PTKLSPINVLYFDSSNNVIYGKIPNMVVKAXGX

SEQ ID NO: 68922 - protein, 24 aa, Artificial Sequence
  Cyclic GFR-binding peptide
KLSPINVLYFDDSSNVIYGKIPNM

SEQ ID NO: 68923 - protein, 33 aa, Artificial Sequence
  Cyclic GFR-binding peptide
  MOD_RES (1)..(2): Xaa is C or S
XXVPTKLSPINVLYFDDMGVPTYGKIPEGMSVA

SEQ ID NO: 68924 - protein, 25 aa, Artificial Sequence
  Cyclic GFR-binding peptide
PARLSPINILYFDAANNVVYGKIPD

SEQ ID NO: 68925 - protein, 42 aa, Artificial Sequence; identical to SEQ ID NO: 22279
  Cyclic GFR-binding peptide
  MOD_RES (6)..(7)..(39)..(41): Xaa is C or S

SEQ ID NO: 68926 - protein, 35 aa, Artificial Sequence; identical to SEQ ID NO: 22281
  Cyclic GFR-binding peptide
  MOD_RES (1)..(33)..(35): Xaa is C or S

SEQ ID NO: 68927 - protein, 36 aa, Artificial Sequence; identical to SEQ ID NO: 22282
  Cyclic GFR-binding peptide
  MOD_RES (1)..(2)..(35): Xaa is C or S

SEQ ID NO: 68928 - protein, 26 aa, Artificial Sequence
  Cyclic GFR-binding peptide
TELSPINMLYFDEYDKVVYGKIPEMV

SEQ ID NO: 68929 - protein, 29 aa, Artificial Sequence
  Cyclic GFR-binding peptide
  MOD_RES (27)..(29): Xaa is C or S
TSPINMLYFDNGRVLLYGKIPMIVEEXGX

SEQ ID NO: 68930 - protein, 32 aa, Artificial Sequence; identical to SEQ ID NO: 22291
  Cyclic GFR-binding peptide
  MOD_RES (32)..(32): Xaa is C or S

SEQ ID NO: 68931 - protein, 33 aa, Artificial Sequence; identical to SEQ ID NO: 22292
  Cyclic GFR-binding peptide
  MOD_RES (32)..(32): Xaa is C or S

SEQ ID NO: 68932 - protein, 21 aa, Artificial Sequence
  Cyclic GFR-binding peptide
LSPINVLYFDSSNNVIYGKIP

SEQ ID NO: 68933 - protein, 31 aa, Artificial Sequence
  Cyclic GFR-binding peptide
  MOD_RES (5)..(6): Xaa is C or S
APASXXVPARLSPINILYFDAANNVVYGKIP

SEQ ID NO: 68934 - protein, 30 aa, Artificial Sequence
  Cyclic GFR-binding peptide
  MOD_RES (1)..(2): Xaa is C or S
XXVPTRLSPINILYFDSANNVVYGKIPDMV

SEQ ID NO: 68935 - protein, 24 aa, Artificial Sequence
  Cyclic GFR-binding peptide
RLSPINILYFDAANNVVYGKIPDM

SEQ ID NO: 68936 - protein, 31 aa, Artificial Sequence
  Cyclic GFR-binding peptide
  MOD_RES (1)..(2): Xaa is C or S
XXVPTRLSPINILYFDSANNVVYGKIPDMVV

SEQ ID NO: 68937 - protein, 33 aa, Artificial Sequence; identical to SEQ ID NO: 22303
  Cyclic GFR-binding peptide
  MOD_RES (32)..(32): Xaa is C or S

SEQ ID NO: 68938 - protein, 32 aa, Artificial Sequence
  Cyclic GFR-binding peptide
  MOD_RES (4)..(5): Xaa is C or S
PKAXXVPTELSPINMLYFDENEKVVYGKIPDM

SEQ ID NO: 68939 - protein, 27 aa, Artificial Sequence
  Cyclic GFR-binding peptide
LSPINVLYFDSSNNVIYGKIPNMVVKA

SEQ ID NO: 68940 - protein, 42 aa, Artificial Sequence; identical to SEQ ID NO: 22305
  Cyclic GFR-binding peptide
  MOD_RES (6)..(7)..(39)..(41): Xaa is C or S

SEQ ID NO: 68941 - protein, 35 aa, Artificial Sequence; identical to SEQ ID NO: 22308
  Cyclic GFR-binding peptide
  MOD_RES (3)..(4): Xaa is C or S

SEQ ID NO: 68942 - protein, 38 aa, Artificial Sequence; identical to SEQ ID NO: 22309
  Cyclic GFR-binding peptide
  MOD_RES (4)..(36)..(38): Xaa is C or S

SEQ ID NO: 68943 - protein, 32 aa, Artificial Sequence
  Cyclic GFR-binding peptide
  MOD_RES (30)..(32): Xaa is C or S
TKLSPINVLYFDDSSNVIYGKIPNMVVRSXGX

SEQ ID NO: 68944 - protein, 38 aa, Artificial Sequence; identical to SEQ ID NO: 22311
  Cyclic GFR-binding peptide
  MOD_RES (6)..(7): Xaa is C or S

SEQ ID NO: 68945 - protein, 33 aa, Artificial Sequence
  Cyclic GFR-binding peptide
  MOD_RES (5)..(6): Xaa is C or S
VPKAXXAPTKLSPINVLYFDSSNNVIYGKIPNM

SEQ ID NO: 68946 - protein, 20 aa, Artificial Sequence
  Cyclic GFR-binding peptide
SPINVLYFDSSNNVIYGKIP

SEQ ID NO: 68947 - protein, 31 aa, Artificial Sequence; identical to SEQ ID NO: 22314
  Cyclic GFR-binding peptide
  MOD_RES (1)..(1): Xaa is C or S

SEQ ID NO: 68948 - protein, 38 aa, Artificial Sequence; identical to SEQ ID NO: 22317
  Cyclic GFR-binding peptide
  MOD_RES (5)..(6)..(38): Xaa is C or S

SEQ ID NO: 68949 - protein, 37 aa, Artificial Sequence; identical to SEQ ID NO: 22320
  Cyclic GFR-binding peptide
  MOD_RES (3)..(4)..(36): Xaa is C or S

SEQ ID NO: 68950 - protein, 31 aa, Artificial Sequence
  Cyclic GFR-binding peptide
  MOD_RES (29)..(31): Xaa is C or S
RLSPINILYFDAANNVVYGKIPDMVVEAXGX

SEQ ID NO: 68951 - protein, 33 aa, Artificial Sequence
  Cyclic GFR-binding peptide
  MOD_RES (30)..(32): Xaa is C or S
TELSPINMLYFDEYDKVVYGKIPEMVVEGXGXR

SEQ ID NO: 68952 - protein, 34 aa, Artificial Sequence
  Cyclic GFR-binding peptide
  MOD_RES (31)..(33): Xaa is C or S
PTKLSPINVLYFDDSSNVIYGKIPNMVVRSXGXH

SEQ ID NO: 68953 - protein, 28 aa, Artificial Sequence
  Cyclic GFR-binding peptide
APTKLSPINVLYFDSSNNVIYGKIPNMV

SEQ ID NO: 68954 - protein, 31 aa, Artificial Sequence; identical to SEQ ID NO: 22323
  Cyclic GFR-binding peptide
  MOD_RES (1)..(1): Xaa is C or S

SEQ ID NO: 68955 - protein, 35 aa, Artificial Sequence; identical to SEQ ID NO: 22327
  Cyclic GFR-binding peptide
  MOD_RES (1)..(33)..(35): Xaa is C or S

SEQ ID NO: 68956 - protein, 29 aa, Artificial Sequence
  Cyclic GFR-binding peptide
  MOD_RES (1)..(2): Xaa is C or S
XXVPARLSPINILYFDAANNVVYGKIPDM

SEQ ID NO: 68957 - protein, 30 aa, Artificial Sequence
  Cyclic GFR-binding peptide
  MOD_RES (4)..(5): Xaa is C or S
PASXXVPARLSPINILYFDAANNVVYGKIP

SEQ ID NO: 68958 - protein, 36 aa, Artificial Sequence; identical to SEQ ID NO: 22334
  Cyclic GFR-binding peptide
  MOD_RES (3)..(4)..(36): Xaa is C or S

SEQ ID NO: 68959 - protein, 32 aa, Artificial Sequence
  Cyclic GFR-binding peptide
  MOD_RES (4)..(5): Xaa is C or S
PKPXXAPTQLSPINVLYFDDSSNVIYGKIPNM

SEQ ID NO: 68960 - protein, 32 aa, Artificial Sequence
  Cyclic GFR-binding peptide
  MOD_RES (29)..(31): Xaa is C or S
RLSPINILYFDSANNVVYGKIPDMVVESXGXR

SEQ ID NO: 68961 - protein, 34 aa, Artificial Sequence
  Cyclic GFR-binding peptide
  MOD_RES (4)..(5): Xaa is C or S
PKPXXAPTQLSPINVLYFDDSSNVIYGKIPNMVV

SEQ ID NO: 68962 - protein, 29 aa, Artificial Sequence
  Cyclic GFR-binding peptide
  MOD_RES (29)..(29): Xaa is C or S
KLSPINVLYFDDSSNVIYGKIPNMVVRSX

SEQ ID NO: 68963 - protein, 31 aa, Artificial Sequence
  Cyclic GFR-binding peptide
  MOD_RES (28)..(30): Xaa is C or S
LSPINMLYFDEYDKVVYGKIPEMVVEGXGXR

SEQ ID NO: 68964 - protein, 28 aa, Artificial Sequence
  Cyclic GFR-binding peptide
  MOD_RES (2)..(3): Xaa is C or S
AXXVPTELSPINMLYFDENEKVVYGKIP

SEQ ID NO: 68965 - protein, 36 aa, Artificial Sequence; identical to SEQ ID NO: 22336
  Cyclic GFR-binding peptide
  MOD_RES (4)..(5): Xaa is C or S

SEQ ID NO: 68966 - protein, 29 aa, Artificial Sequence
  Cyclic GFR-binding peptide
  MOD_RES (2)..(3): Xaa is C or S
PXXAPTQLSPINVLYFDDSSNVIYGKIPN

SEQ ID NO: 68967 - protein, 29 aa, Artificial Sequence
  Cyclic GFR-binding peptide
  MOD_RES (29)..(29): Xaa is C or S
RLSPINILYFDAANNVVYGKIPDMVVEAX

SEQ ID NO: 68968 - protein, 37 aa, Artificial Sequence; identical to SEQ ID NO: 22340
  Cyclic GFR-binding peptide
  MOD_RES (7)..(7): Xaa is C or S

SEQ ID NO: 68969 - protein, 30 aa, Artificial Sequence
  Cyclic GFR-binding peptide
  MOD_RES (1)..(2): Xaa is C or S
XXAPTKLSPINVLYFDDSSNVIYGKIPNMV

SEQ ID NO: 68970 - protein, 23 aa, Artificial Sequence
  Cyclic GFR-binding peptide
QLSPINVLYFDDSSNVIYGKIPN

SEQ ID NO: 68971 - protein, 29 aa, Artificial Sequence
  Cyclic GFR-binding peptide
APTQLSPINVLYFDDSSNVIYGKIPNMVV

SEQ ID NO: 68972 - protein, 35 aa, Artificial Sequence; identical to SEQ ID NO: 22351
  Cyclic GFR-binding peptide
  MOD_RES (1)..(2)..(34): Xaa is C or S

SEQ ID NO: 68973 - protein, 31 aa, Artificial Sequence
  Cyclic GFR-binding peptide
  MOD_RES (31)..(31): Xaa is C or S
PTRLSPINILYFDSANNVVYGKIPDMVVESX

SEQ ID NO: 68974 - protein, 21 aa, Artificial Sequence
  Cyclic GFR-binding peptide
LSPINILYFDKGVVTYYGKIP

SEQ ID NO: 68975 - protein, 32 aa, Artificial Sequence
  Cyclic GFR-binding peptide
  MOD_RES (5)..(5): Xaa is C or S
TKPTXAPTKLSPINVLYFDDSSNVIYGKIPNM

SEQ ID NO: 68976 - protein, 29 aa, Artificial Sequence
  Cyclic GFR-binding peptide
  MOD_RES (3)..(4): Xaa is C or S
KAXXAPTKLSPINVLYFDSSNNVIYGKIP

SEQ ID NO: 68977 - protein, 29 aa, Artificial Sequence
  Cyclic GFR-binding peptide
VPTELSPINMLYFDENEKVVYGKIPDMVV

SEQ ID NO: 68978 - protein, 29 aa, Artificial Sequence
  Cyclic GFR-binding peptide
TKLSPINVLYFDSSNNVIYGKIPNMVVKA

SEQ ID NO: 68979 - protein, 31 aa, Artificial Sequence
  Cyclic GFR-binding peptide
  MOD_RES (3)..(4): Xaa is C or S
STXXAPVKTSPINMLYFDNGRVLLYGKIPMI

SEQ ID NO: 68980 - protein, 34 aa, Artificial Sequence; identical to SEQ ID NO: 22354
  Cyclic GFR-binding peptide
  MOD_RES (1)..(34): Xaa is C or S

SEQ ID NO: 68981 - protein, 24 aa, Artificial Sequence
  Cyclic GFR-binding peptide
KLSPINVLYFDDMGVPTYGKIPEG

SEQ ID NO: 68982 - protein, 39 aa, Artificial Sequence; identical to SEQ ID NO: 22355
  Cyclic GFR-binding peptide
  MOD_RES (6)..(7)..(39): Xaa is C or S

SEQ ID NO: 68983 - protein, 32 aa, Artificial Sequence
  Cyclic GFR-binding peptide
  MOD_RES (6)..(7): Xaa is C or S
KVGKAXXVPTKLSPINVLYFDDMGVPTYGKIP

SEQ ID NO: 68984 - protein, 23 aa, Artificial Sequence
  Cyclic GFR-binding peptide
ARLSPINILYFDAANNVVYGKIP

SEQ ID NO: 68985 - protein, 29 aa, Artificial Sequence
  Cyclic GFR-binding peptide
APTKLSPINVLYFDDSSNVIYGKIPNMVV

SEQ ID NO: 68986 - protein, 33 aa, Artificial Sequence
  Cyclic GFR-binding peptide
  MOD_RES (6)..(7): Xaa is C or S
KASKAXXVPTKLSPINILYFDKGVVTYYGKIPG

SEQ ID NO: 68987 - protein, 32 aa, Artificial Sequence
  Cyclic GFR-binding peptide
  MOD_RES (3)..(4): Xaa is C or S
KPXXAPTKLSPINVLYFDDSSNVIYGKIPNMV

SEQ ID NO: 68988 - protein, 30 aa, Artificial Sequence
  Cyclic GFR-binding peptide
  MOD_RES (1)..(1): Xaa is C or S
XAPTQLSPINVLYFDDSSNVIYGKIPNMVV

SEQ ID NO: 68989 - protein, 38 aa, Artificial Sequence; identical to SEQ ID NO: 22370
  Cyclic GFR-binding peptide
  MOD_RES (4)..(5)..(37): Xaa is C or S

SEQ ID NO: 68990 - protein, 29 aa, Artificial Sequence
  Cyclic GFR-binding peptide
  MOD_RES (27)..(29): Xaa is C or S
SPINMLYFDEYDKVVYGKIPEMVVEGXGX

SEQ ID NO: 68991 - protein, 29 aa, Artificial Sequence
  Cyclic GFR-binding peptide
  MOD_RES (28)..(28): Xaa is C or S
LSPINILYFDAANNVVYGKIPDMVVEAXG

SEQ ID NO: 68992 - protein, 39 aa, Artificial Sequence; identical to SEQ ID NO: 22372
  Cyclic GFR-binding peptide
  MOD_RES (6)..(7)..(39): Xaa is C or S

SEQ ID NO: 68993 - protein, 31 aa, Artificial Sequence
  Cyclic GFR-binding peptide
VPTKLSPINVLYFDDMGVPTYGKIPEGMSVA

SEQ ID NO: 68994 - protein, 26 aa, Artificial Sequence
  Cyclic GFR-binding peptide
RLSPINILYFDSANNVVYGKIPDMVV

SEQ ID NO: 68995 - protein, 34 aa, Artificial Sequence
  Cyclic GFR-binding peptide
  MOD_RES (6)..(7): Xaa is C or S
SIPKAXXVPTELSPINMLYFDEYDKVVYGKIPEM

SEQ ID NO: 68996 - protein, 33 aa, Artificial Sequence
  Cyclic GFR-binding peptide
  MOD_RES (6)..(7): Xaa is C or S
RVPSTXXAPVKTSPINMLYFDNGRVLLYGKIPM

SEQ ID NO: 68997 - protein, 32 aa, Artificial Sequence
  Cyclic GFR-binding peptide
  MOD_RES (3)..(4): Xaa is C or S
PTXXVPTRLSPINILYFDSANNVVYGKIPDMV

SEQ ID NO: 68998 - protein, 24 aa, Artificial Sequence
  Cyclic GFR-binding peptide
PTELSPINMLYFDENEKVVYGKIP

SEQ ID NO: 68999 - protein, 30 aa, Artificial Sequence; identical to SEQ ID NO: 22381
  Cyclic GFR-binding peptide

SEQ ID NO: 69000 - protein, 23 aa, Artificial Sequence
  Cyclic GFR-binding peptide
KLSPINILYFDKGVVTYYGKIPG

SEQ ID NO: 69001 - protein, 36 aa, Artificial Sequence; identical to SEQ ID NO: 22385
  Cyclic GFR-binding peptide
  MOD_RES (5)..(6): Xaa is C or S

SEQ ID NO: 69002 - protein, 35 aa, Artificial Sequence
  Cyclic GFR-binding peptide
  MOD_RES (6)..(6): Xaa is C or S
VTKPTXAPTKLSPINVLYFDDSSNVIYGKIPNMVV

SEQ ID NO: 69003 - protein, 29 aa, Artificial Sequence
  Cyclic GFR-binding peptide
  MOD_RES (1)..(1): Xaa is C or S
XAPTKLSPINVLYFDSSNNVIYGKIPNMV

SEQ ID NO: 69004 - protein, 31 aa, Artificial Sequence
  Cyclic GFR-binding peptide
  MOD_RES (29)..(31): Xaa is C or S
RLSPINILYFDSANNVVYGKIPDMVVESXGX

SEQ ID NO: 69005 - protein, 40 aa, Artificial Sequence; identical to SEQ ID NO: 22395
  Cyclic GFR-binding peptide
  MOD_RES (4)..(5)..(37)..(39): Xaa is C or S

SEQ ID NO: 69006 - protein, 32 aa, Artificial Sequence
  Cyclic GFR-binding peptide
  MOD_RES (31)..(31): Xaa is C or S
PTQLSPINVLYFDDSSNVIYGKIPNMVVRAXG

SEQ ID NO: 69007 - protein, 34 aa, Artificial Sequence
  Cyclic GFR-binding peptide
  MOD_RES (6)..(7): Xaa is C or S
STPPTXXVPTRLSPINILYFDSANNVVYGKIPDM

SEQ ID NO: 69008 - protein, 32 aa, Artificial Sequence
  Cyclic GFR-binding peptide
  MOD_RES (30)..(32): Xaa is C or S
TKLSPINVLYFDSSNNVIYGKIPNMVVKAXGX

SEQ ID NO: 69009 - protein, 26 aa, Artificial Sequence
  Cyclic GFR-binding peptide
KTSPINMLYFDNGRVLLYGKIPMIVE

SEQ ID NO: 69010 - protein, 36 aa, Artificial Sequence; identical to SEQ ID NO: 22399
  Cyclic GFR-binding peptide
  MOD_RES (3)..(4)..(36): Xaa is C or S

SEQ ID NO: 69011 - protein, 22 aa, Artificial Sequence
  Cyclic GFR-binding peptide
SPINILYFDAANNVVYGKIPDM

SEQ ID NO: 69012 - protein, 33 aa, Artificial Sequence
  Cyclic GFR-binding peptide
  MOD_RES (30)..(32): Xaa is C or S
TKLSPINVLYFDDSSNVIYGKIPNMVVRSXGXH

SEQ ID NO: 69013 - protein, 28 aa, Artificial Sequence
  Cyclic GFR-binding peptide
  MOD_RES (27)..(27): Xaa is C or S
SPINMLYFDENEKVVYGKIPDMVVEGXG

SEQ ID NO: 69014 - protein, 22 aa, Artificial Sequence
  Cyclic GFR-binding peptide
SPINVLYFDSSNNVIYGKIPNM

SEQ ID NO: 69015 - protein, 25 aa, Artificial Sequence
  Cyclic GFR-binding peptide
VPTELSPINMLYFDEYDKVVYGKIP

SEQ ID NO: 69016 - protein, 38 aa, Artificial Sequence; identical to SEQ ID NO: 22404
  Cyclic GFR-binding peptide
  MOD_RES (2)..(3)..(35)..(37): Xaa is C or S

SEQ ID NO: 69017 - protein, 23 aa, Artificial Sequence
  Cyclic GFR-binding peptide
LSPINVLYFDDSSNVIYGKIPNM

SEQ ID NO: 69018 - protein, 33 aa, Artificial Sequence
  Cyclic GFR-binding peptide
  MOD_RES (31)..(33): Xaa is C or S
PTKLSPINVLYFDDSSNVIYGKIPNMVVRSXGX

SEQ ID NO: 69019 - protein, 31 aa, Artificial Sequence
  Cyclic GFR-binding peptide
  MOD_RES (4)..(5): Xaa is C or S
PKPXXAPTQLSPINVLYFDDSSNVIYGKIPN

SEQ ID NO: 69020 - protein, 39 aa, Artificial Sequence; identical to SEQ ID NO: 22406
  Cyclic GFR-binding peptide
  MOD_RES (4)..(36)..(38): Xaa is C or S

SEQ ID NO: 69021 - protein, 28 aa, Artificial Sequence
  Cyclic GFR-binding peptide
  MOD_RES (1)..(2): Xaa is C or S
XXVPTRLSPINILYFDSANNVVYGKIPD

SEQ ID NO: 69022 - protein, 32 aa, Artificial Sequence
  Cyclic GFR-binding peptide
  MOD_RES (5)..(6): Xaa is C or S
ASKAXXVPTKLSPINILYFDKGVVTYYGKIPG

SEQ ID NO: 69023 - protein, 30 aa, Artificial Sequence
  Cyclic GFR-binding peptide
  MOD_RES (5)..(5): Xaa is C or S
TKPTXAPTKLSPINVLYFDDSSNVIYGKIP

SEQ ID NO: 69024 - protein, 24 aa, Artificial Sequence
  Cyclic GFR-binding peptide
LSPINILYFDKGVVTYYGKIPGMA

SEQ ID NO: 69025 - protein, 29 aa, Artificial Sequence
  Cyclic GFR-binding peptide
VPTRLSPINILYFDSANNVVYGKIPDMVV

SEQ ID NO: 69026 - protein, 20 aa, Artificial Sequence
  Cyclic GFR-binding peptide
SPINVLYFDDMGVPTYGKIP

SEQ ID NO: 69027 - protein, 20 aa, Artificial Sequence
  Cyclic GFR-binding peptide
SPINVLYFDSSNNVIYGKIP

SEQ ID NO: 69028 - protein, 37 aa, Artificial Sequence; identical to SEQ ID NO: 22424
  Cyclic GFR-binding peptide
  MOD_RES (6)..(7): Xaa is C or S

SEQ ID NO: 69029 - protein, 31 aa, Artificial Sequence
  Cyclic GFR-binding peptide
  MOD_RES (5)..(6): Xaa is C or S
IPKAXXVPTELSPINMLYFDENEKVVYGKIP

SEQ ID NO: 69030 - protein, 26 aa, Artificial Sequence
  Cyclic GFR-binding peptide
SPINVLYFDDMGVPTYGKIPEGMSVA

SEQ ID NO: 69031 - protein, 33 aa, Artificial Sequence
  Cyclic GFR-binding peptide
  MOD_RES (4)..(5): Xaa is C or S
PKPXXAPTKLSPINVLYFDDSSNVIYGKIPNMV

SEQ ID NO: 69032 - protein, 37 aa, Artificial Sequence
  Cyclic GFR-binding peptide
  MOD_RES (5)..(6): Xaa is C or S
VGKAXXVPTKLSPINVLYFDDMGVPTYGKIPEGMSVA

SEQ ID NO: 69033 - protein, 34 aa, Artificial Sequence
  Cyclic GFR-binding peptide
  MOD_RES (5)..(6): Xaa is C or S
ASKAXXVPTKLSPINILYFDKGVVTYYGKIPGMA

SEQ ID NO: 69034 - protein, 34 aa, Artificial Sequence
  Cyclic GFR-binding peptide
  MOD_RES (4)..(5): Xaa is C or S
PSTXXAPVKTSPINMLYFDNGRVLLYGKIPMIVE

SEQ ID NO: 69035 - protein, 31 aa, Artificial Sequence
  Cyclic GFR-binding peptide
  MOD_RES (2)..(3): Xaa is C or S
AXXVPTELSPINMLYFDEYDKVVYGKIPEMV

SEQ ID NO: 69036 - protein, 27 aa, Artificial Sequence
  Cyclic GFR-binding peptide
  MOD_RES (27)..(27): Xaa is C or S
SPINILYFDSANNVVYGKIPDMVVESX

SEQ ID NO: 69037 - protein, 37 aa, Artificial Sequence; identical to SEQ ID NO: 22429
  Cyclic GFR-binding peptide
  MOD_RES (1)..(2)..(34)..(36): Xaa is C or S

SEQ ID NO: 69038 - protein, 30 aa, Artificial Sequence
  Cyclic GFR-binding peptide
PTKLSPINVLYFDDSSNVIYGKIPNMVVRS

SEQ ID NO: 69039 - protein, 28 aa, Artificial Sequence
  Cyclic GFR-binding peptide
  MOD_RES (28)..(28): Xaa is C or S
KTSPINMLYFDNGRVLLYGKIPMIVEEX

SEQ ID NO: 69040 - protein, 25 aa, Artificial Sequence
  Cyclic GFR-binding peptide
APTQLSPINVLYFDDSSNVIYGKIP

SEQ ID NO: 69041 - protein, 38 aa, Artificial Sequence; identical to SEQ ID NO: 22433
  Cyclic GFR-binding peptide
  MOD_RES (4)..(5)..(38): Xaa is C or S

SEQ ID NO: 69042 - protein, 35 aa, Artificial Sequence; identical to SEQ ID NO: 22437
  Cyclic GFR-binding peptide
  MOD_RES (1)..(33)..(35): Xaa is C or S

SEQ ID NO: 69043 - protein, 24 aa, Artificial Sequence
  Cyclic GFR-binding peptide
LSPINMLYFDENEKVVYGKIPDMV

SEQ ID NO: 69044 - protein, 33 aa, Artificial Sequence
  Cyclic GFR-binding peptide
  MOD_RES (6)..(7): Xaa is C or S
KVGKAXXVPTKLSPINVLYFDDMGVPTYGKIPE

SEQ ID NO: 69045 - protein, 42 aa, Artificial Sequence; identical to SEQ ID NO: 22441
  Cyclic GFR-binding peptide
  MOD_RES (6)..(7)..(39)..(41): Xaa is C or S

SEQ ID NO: 69046 - protein, 33 aa, Artificial Sequence
  Cyclic GFR-binding peptide
  MOD_RES (3)..(4): Xaa is C or S
KPXXAPTQLSPINVLYFDDSSNVIYGKIPNMVV

SEQ ID NO: 69047 - protein, 31 aa, Artificial Sequence
  Cyclic GFR-binding peptide
  MOD_RES (28)..(30): Xaa is C or S
LSPINILYFDKGVVTYYGKIPGMAVSEXGXR

SEQ ID NO: 69048 - protein, 28 aa, Artificial Sequence
  Cyclic GFR-binding peptide
  MOD_RES (1)..(1): Xaa is C or S
XVPARLSPINILYFDAANNVVYGKIPDM

SEQ ID NO: 69049 - protein, 27 aa, Artificial Sequence
  Cyclic GFR-binding peptide
RLSPINILYFDAANNVVYGKIPDMVVE

SEQ ID NO: 69050 - protein, 32 aa, Artificial Sequence
  Cyclic GFR-binding peptide
  MOD_RES (3)..(4): Xaa is C or S
KAXXVPTELSPINMLYFDENEKVVYGKIPDMV

SEQ ID NO: 69051 - protein, 27 aa, Artificial Sequence
  Cyclic GFR-binding peptide
TKLSPINVLYFDDSSNVIYGKIPNMVV

SEQ ID NO: 69052 - protein, 23 aa, Artificial Sequence
  Cyclic GFR-binding peptide
LSPINILYFDSANNVVYGKIPDM

SEQ ID NO: 69053 - protein, 28 aa, Artificial Sequence
  Cyclic GFR-binding peptide
  MOD_RES (28)..(28): Xaa is C or S
LSPINILYFDKGVVTYYGKIPGMAVSEX

SEQ ID NO: 69054 - protein, 27 aa, Artificial Sequence
  Cyclic GFR-binding peptide
  MOD_RES (1)..(1): Xaa is C or S
XVPTELSPINMLYFDEYDKVVYGKIPE

SEQ ID NO: 69055 - protein, 25 aa, Artificial Sequence
  Cyclic GFR-binding peptide
ELSPINMLYFDEYDKVVYGKIPEMV

SEQ ID NO: 69056 - protein, 21 aa, Artificial Sequence
  Cyclic GFR-binding peptide
TSPINMLYFDNGRVLLYGKIP

SEQ ID NO: 69057 - protein, 26 aa, Artificial Sequence
  Cyclic GFR-binding peptide
QLSPINVLYFDDSSNVIYGKIPNMVV

SEQ ID NO: 69058 - protein, 38 aa, Artificial Sequence; identical to SEQ ID NO: 22457
  Cyclic GFR-binding peptide
  MOD_RES (4)..(5)..(36)..(38): Xaa is C or S

SEQ ID NO: 69059 - protein, 37 aa, Artificial Sequence; identical to SEQ ID NO: 22460
  Cyclic GFR-binding peptide
  MOD_RES (1)..(2)..(34)..(36): Xaa is C or S

SEQ ID NO: 69060 - protein, 29 aa, Artificial Sequence
  Cyclic GFR-binding peptide
  MOD_RES (1)..(1): Xaa is C or S
XVPTKLSPINILYFDKGVVTYYGKIPGMA

SEQ ID NO: 69061 - protein, 25 aa, Artificial Sequence
  Cyclic GFR-binding peptide
SPINVLYFDSSNNVIYGKIPNMVVK

SEQ ID NO: 69062 - protein, 25 aa, Artificial Sequence
  Cyclic GFR-binding peptide
RLSPINILYFDSANNVVYGKIPDMV

SEQ ID NO: 69063 - protein, 33 aa, Artificial Sequence
  Cyclic GFR-binding peptide
  MOD_RES (4)..(5): Xaa is C or S
PKAXXVPTELSPINMLYFDENEKVVYGKIPDMV

SEQ ID NO: 69064 - protein, 36 aa, Artificial Sequence; identical to SEQ ID NO: 22469
  Cyclic GFR-binding peptide
  MOD_RES (3)..(35): Xaa is C or S

SEQ ID NO: 69065 - protein, 28 aa, Artificial Sequence
  Cyclic GFR-binding peptide
KLSPINVLYFDDSSNVIYGKIPNMVVRS

SEQ ID NO: 69066 - protein, 25 aa, Artificial Sequence
  Cyclic GFR-binding peptide
TRLSPINILYFDSANNVVYGKIPDM

SEQ ID NO: 69067 - protein, 30 aa, Artificial Sequence
  Cyclic GFR-binding peptide
  MOD_RES (1)..(1): Xaa is C or S
XVPTELSPINMLYFDENEKVVYGKIPDMVV

SEQ ID NO: 69068 - protein, 24 aa, Artificial Sequence
  Cyclic GFR-binding peptide
ELSPINMLYFDEYDKVVYGKIPEM

SEQ ID NO: 69069 - protein, 29 aa, Artificial Sequence
  Cyclic GFR-binding peptide
PTKLSPINVLYFDDSSNVIYGKIPNMVVR

SEQ ID NO: 69070 - protein, 24 aa, Artificial Sequence
  Cyclic GFR-binding peptide
EYQKYLLVRGNDIYLMSIPSTKVP

SEQ ID NO: 69071 - protein, 35 aa, Artificial Sequence; identical to SEQ ID NO: 22479
  Cyclic GFR-binding peptide
  MOD_RES (31)..(32): Xaa is C or S

SEQ ID NO: 69072 - protein, 25 aa, Artificial Sequence
  Cyclic GFR-binding peptide
VVMDEYQKYVVNNASDIYLISIPSL

SEQ ID NO: 69073 - protein, 27 aa, Artificial Sequence
  Cyclic GFR-binding peptide
  MOD_RES (2)..(2): Xaa is C or S
GXEEVIMEYQKYLLVRGNDIYLMSIPS

SEQ ID NO: 69074 - protein, 32 aa, Artificial Sequence; identical to SEQ ID NO: 22480
  Cyclic GFR-binding peptide
  MOD_RES (2)..(2): Xaa is C or S

SEQ ID NO: 69075 - protein, 30 aa, Artificial Sequence
  Cyclic GFR-binding peptide
  MOD_RES (27)..(28): Xaa is C or S
MEYQKYLLVRGNDIYLMSIPSTKVPAXXTS

SEQ ID NO: 69076 - protein, 21 aa, Artificial Sequence
  Cyclic GFR-binding peptide
EYQKYIIQQKDNIYLMSIPSM

SEQ ID NO: 69077 - protein, 32 aa, Artificial Sequence; identical to SEQ ID NO: 22483
  Cyclic GFR-binding peptide
  MOD_RES (1)..(32): Xaa is C or S

SEQ ID NO: 69078 - protein, 28 aa, Artificial Sequence
  Cyclic GFR-binding peptide
  MOD_RES (2)..(2): Xaa is C or S
GXSEVVMDEYQKYVVNNASDIYLISIPS

SEQ ID NO: 69079 - protein, 31 aa, Artificial Sequence
  Cyclic GFR-binding peptide
  MOD_RES (29)..(30): Xaa is C or S
VMDEYQKYVVNNASDIYLISIPSLRTPVXXT

SEQ ID NO: 69080 - protein, 27 aa, Artificial Sequence
  Cyclic GFR-binding peptide
EVVMDEYQKYVVNNASDIYLISIPSLR

SEQ ID NO: 69081 - protein, 33 aa, Artificial Sequence; identical to SEQ ID NO: 22484
  Cyclic GFR-binding peptide
  MOD_RES (1)..(33): Xaa is C or S

SEQ ID NO: 69082 - protein, 24 aa, Artificial Sequence
  Cyclic GFR-binding peptide
EYQKYVVNNASDIYLISIPSLRTP

SEQ ID NO: 69083 - protein, 29 aa, Artificial Sequence
  Cyclic GFR-binding peptide
  MOD_RES (2)..(4): Xaa is C or S
LXGXEEVIMEYQKYLLVRGNDIYLMSIPS

SEQ ID NO: 69084 - protein, 33 aa, Artificial Sequence; identical to SEQ ID NO: 22490
  Cyclic GFR-binding peptide
  MOD_RES (32)..(33): Xaa is C or S

SEQ ID NO: 69085 - protein, 29 aa, Artificial Sequence
  Cyclic GFR-binding peptide
  MOD_RES (28)..(29): Xaa is C or S
IMEYQKYLLVRGNDIYLMSIPSTKVPAXX

SEQ ID NO: 69086 - protein, 22 aa, Artificial Sequence
  Cyclic GFR-binding peptide
IMEYQKYLLVRGNDIYLMSIPS

SEQ ID NO: 69087 - protein, 32 aa, Artificial Sequence
  Cyclic GFR-binding peptide
  MOD_RES (29)..(30): Xaa is C or S
VMDEYQKYVVNNASDIYLISIPSLRTPVXXTP

SEQ ID NO: 69088 - protein, 22 aa, Artificial Sequence
  Cyclic GFR-binding peptide
MEYQKYLLVRGNDIYLMSIPST

SEQ ID NO: 69089 - protein, 33 aa, Artificial Sequence
  Cyclic GFR-binding peptide
  MOD_RES (30)..(31): Xaa is C or S
VVMGEYQKYIIQQKDNIYLMSIPSMKTPTXXPG

SEQ ID NO: 69090 - protein, 24 aa, Artificial Sequence
  Cyclic GFR-binding peptide
MEYQKYLLVRGNDIYLMSIPSTKV

SEQ ID NO: 69091 - protein, 36 aa, Artificial Sequence
  Cyclic GFR-binding peptide
  MOD_RES (1)..(33)..(34): Xaa is C or S
XSEVVMDEYQKYVVNNASDIYLISIPSLRTPVXXTP

SEQ ID NO: 69092 - protein, 28 aa, Artificial Sequence
  Cyclic GFR-binding peptide
  MOD_RES (26)..(27): Xaa is C or S
EYQKYIIQQKDNIYLMSIPSMKTPTXXP

SEQ ID NO: 69093 - protein, 33 aa, Artificial Sequence
  Cyclic GFR-binding peptide
  MOD_RES (30)..(31): Xaa is C or S
EVIMEYQKYLLVRGNDIYLMSIPSTKVPAXXTS

SEQ ID NO: 69094 - protein, 36 aa, Artificial Sequence; identical to SEQ ID NO: 22496
  Cyclic GFR-binding peptide
  MOD_RES (1)..(32)..(33): Xaa is C or S

SEQ ID NO: 69095 - protein, 41 aa, Artificial Sequence; identical to SEQ ID NO: 22497
  Cyclic GFR-binding peptide
  MOD_RES (2)..(4)..(36)..(37): Xaa is C or S

SEQ ID NO: 69096 - protein, 23 aa, Artificial Sequence
  Cyclic GFR-binding peptide
IMEYQKYLLVRGNDIYLMSIPST

SEQ ID NO: 69097 - protein, 35 aa, Artificial Sequence
  Cyclic GFR-binding peptide
  MOD_RES (30)..(31): Xaa is C or S
VVMGEYQKYIIQQKDNIYLMSIPSMKTPTXXPGAS

SEQ ID NO: 69098 - protein, 33 aa, Artificial Sequence
  Cyclic GFR-binding peptide
  MOD_RES (27)..(28): Xaa is C or S
MEYQKYLLVRGNDIYLMSIPSTKVPAXXTSPVR

SEQ ID NO: 69099 - protein, 28 aa, Artificial Sequence
  Cyclic GFR-binding peptide
  MOD_RES (1)..(1): Xaa is C or S
XRDVVMGEYQKYIIQQKDNIYLMSIPSM

SEQ ID NO: 69100 - protein, 30 aa, Artificial Sequence
  Cyclic GFR-binding peptide
  MOD_RES (28)..(29): Xaa is C or S
MGEYQKYIIQQKDNIYLMSIPSMKTPTXXP

SEQ ID NO: 69101 - protein, 30 aa, Artificial Sequence
  Cyclic GFR-binding peptide
  MOD_RES (30)..(30): Xaa is C or S
VVMGEYQKYIIQQKDNIYLMSIPSMKTPTX

SEQ ID NO: 69102 - protein, 39 aa, Artificial Sequence
  Cyclic GFR-binding peptide
  MOD_RES (2)..(34)..(35): Xaa is C or S
GXSEVVMDEYQKYVVNNASDIYLISIPSLRTPVXXTPPT

SEQ ID NO: 69103 - protein, 28 aa, Artificial Sequence
  Cyclic GFR-binding peptide
  MOD_RES (28)..(28): Xaa is C or S
IMEYQKYLLVRGNDIYLMSIPSTKVPAX

SEQ ID NO: 69104 - protein, 32 aa, Artificial Sequence
  Cyclic GFR-binding peptide
  MOD_RES (26)..(27): Xaa is C or S
EYQKYIVNSSDDIYLVSIPSLKTPAXXPKPVH

SEQ ID NO: 69105 - protein, 23 aa, Artificial Sequence
  Cyclic GFR-binding peptide
VIMEYQKYLLVRGNDIYLMSIPS

SEQ ID NO: 69106 - protein, 35 aa, Artificial Sequence
  Cyclic GFR-binding peptide
  MOD_RES (30)..(31): Xaa is C or S
VVMDEYQKYVVNNASDIYLISIPSLRTPVXXTPPT

SEQ ID NO: 69107 - protein, 31 aa, Artificial Sequence
  Cyclic GFR-binding peptide
  MOD_RES (30)..(31): Xaa is C or S
EVIMEYQKYLLVRGNDIYLMSIPSTKVPAXX

SEQ ID NO: 69108 - protein, 30 aa, Artificial Sequence; identical to SEQ ID NO: 22508
  Cyclic GFR-binding peptide

SEQ ID NO: 69109 - protein, 32 aa, Artificial Sequence
  Cyclic GFR-binding peptide
  MOD_RES (2)..(4): Xaa is C or S
RXGXSEVVMDEYQKYVVNNASDIYLISIPSLR

SEQ ID NO: 69110 - protein, 40 aa, Artificial Sequence
  Cyclic GFR-binding peptide
  MOD_RES (1)..(3)..(35)..(36): Xaa is C or S
XGXSEVVMDEYQKYVVNNASDIYLISIPSLRTPVXXTPPT

SEQ ID NO: 69111 - protein, 25 aa, Artificial Sequence
  Cyclic GFR-binding peptide
DVVMGEYQKYIIQQKDNIYLMSIPS

SEQ ID NO: 69112 - protein, 40 aa, Artificial Sequence; identical to SEQ ID NO: 22513
  Cyclic GFR-binding peptide
  MOD_RES (2)..(34)..(35): Xaa is C or S

SEQ ID NO: 69113 - protein, 33 aa, Artificial Sequence; identical to SEQ ID NO: 22517
  Cyclic GFR-binding peptide
  MOD_RES (1)..(3): Xaa is C or S

SEQ ID NO: 69114 - protein, 38 aa, Artificial Sequence
  Cyclic GFR-binding peptide
  MOD_RES (2)..(34)..(35): Xaa is C or S
GXSEVVMDEYQKYVVNNASDIYLISIPSLRTPVXXTPP

SEQ ID NO: 69115 - protein, 30 aa, Artificial Sequence
  Cyclic GFR-binding peptide
  MOD_RES (1)..(1): Xaa is C or S
XEEVIMEYQKYLLVRGNDIYLMSIPSTKVP

SEQ ID NO: 69116 - protein, 27 aa, Artificial Sequence
  Cyclic GFR-binding peptide
  MOD_RES (1)..(1): Xaa is C or S
XRDVVMGEYQKYIIQQKDNIYLMSIPS

SEQ ID NO: 69117 - protein, 25 aa, Artificial Sequence
  Cyclic GFR-binding peptide
EEVIMEYQKYLLVRGNDIYLMSIPS

SEQ ID NO: 69118 - protein, 28 aa, Artificial Sequence
  Cyclic GFR-binding peptide
VIMEYQKYLLVRGNDIYLMSIPSTKVPA

SEQ ID NO: 69119 - protein, 26 aa, Artificial Sequence
  Cyclic GFR-binding peptide
MGEYQKYIIQQKDNIYLMSIPSMKTP

SEQ ID NO: 69120 - protein, 37 aa, Artificial Sequence; identical to SEQ ID NO: 22518
  Cyclic GFR-binding peptide
  MOD_RES (2)..(34)..(35): Xaa is C or S

SEQ ID NO: 69121 - protein, 32 aa, Artificial Sequence
  Cyclic GFR-binding peptide
  MOD_RES (2)..(2): Xaa is C or S
GXRDVVMGEYQKYIIQQKDNIYLMSIPSMKTP

SEQ ID NO: 69122 - protein, 28 aa, Artificial Sequence
  Cyclic GFR-binding peptide
VMGEYQKYIIQQKDNIYLMSIPSMKTPT

SEQ ID NO: 69123 - protein, 37 aa, Artificial Sequence
  Cyclic GFR-binding peptide
  MOD_RES (2)..(34)..(35): Xaa is C or S
GXSEVVMDEYQKYVVNNASDIYLISIPSLRTPVXXTP

SEQ ID NO: 69124 - protein, 34 aa, Artificial Sequence; identical to SEQ ID NO: 22523
  Cyclic GFR-binding peptide
  MOD_RES (1)..(3): Xaa is C or S

SEQ ID NO: 69125 - protein, 38 aa, Artificial Sequence; identical to SEQ ID NO: 22524
  Cyclic GFR-binding peptide
  MOD_RES (1)..(3)..(34)..(35): Xaa is C or S

SEQ ID NO: 69126 - protein, 22 aa, Artificial Sequence
  Cyclic GFR-binding peptide
GEYQKYIIQQKDNIYLMSIPSM

SEQ ID NO: 69127 - protein, 37 aa, Artificial Sequence; identical to SEQ ID NO: 22527
  Cyclic GFR-binding peptide
  MOD_RES (1)..(33)..(34): Xaa is C or S

SEQ ID NO: 69128 - protein, 37 aa, Artificial Sequence
  Cyclic GFR-binding peptide
  MOD_RES (32)..(33): Xaa is C or S
SEVVMDEYQKYVVNNASDIYLISIPSLRTPVXXTPPT

SEQ ID NO: 69129 - protein, 36 aa, Artificial Sequence; identical to SEQ ID NO: 22529
  Cyclic GFR-binding peptide
  MOD_RES (32)..(33): Xaa is C or S

SEQ ID NO: 69130 - protein, 30 aa, Artificial Sequence
  Cyclic GFR-binding peptide
  MOD_RES (29)..(30): Xaa is C or S
VMGEYQKYIIQQKDNIYLMSIPSMKTPTXX

SEQ ID NO: 69131 - protein, 31 aa, Artificial Sequence
  Cyclic GFR-binding peptide
  MOD_RES (2)..(4): Xaa is C or S
SXGXRDVVMGEYQKYIIQQKDNIYLMSIPSM

SEQ ID NO: 69132 - protein, 30 aa, Artificial Sequence
  Cyclic GFR-binding peptide
  MOD_RES (26)..(27): Xaa is C or S
EYQKYIIQQKDNIYLMSIPSMKTPTXXPGA

SEQ ID NO: 69133 - protein, 36 aa, Artificial Sequence; identical to SEQ ID NO: 22532
  Cyclic GFR-binding peptide
  MOD_RES (1)..(3)..(34)..(35): Xaa is C or S

SEQ ID NO: 69134 - protein, 29 aa, Artificial Sequence
  Cyclic GFR-binding peptide
  MOD_RES (1)..(3): Xaa is C or S
XGXSEVVMDEYQKYVVNNASDIYLISIPS

SEQ ID NO: 69135 - protein, 27 aa, Artificial Sequence
  Cyclic GFR-binding peptide
  MOD_RES (27)..(27): Xaa is C or S
MEYQKYLLVRGNDIYLMSIPSTKVPAX

SEQ ID NO: 69136 - protein, 36 aa, Artificial Sequence; identical to SEQ ID NO: 22535
  Cyclic GFR-binding peptide
  MOD_RES (31)..(32): Xaa is C or S

SEQ ID NO: 69137 - protein, 24 aa, Artificial Sequence
  Cyclic GFR-binding peptide
VVMGEYQKYIIQQKDNIYLMSIPS

SEQ ID NO: 69138 - protein, 29 aa, Artificial Sequence
  Cyclic GFR-binding peptide
  MOD_RES (1)..(1): Xaa is C or S
XSEVVMDEYQKYVVNNASDIYLISIPSLR

SEQ ID NO: 69139 - protein, 33 aa, Artificial Sequence
  Cyclic GFR-binding peptide
  MOD_RES (2)..(2): Xaa is C or S
GXSEVVMDEYQKYVVNNASDIYLISIPSLRTPV

SEQ ID NO: 69140 - protein, 33 aa, Artificial Sequence
  Cyclic GFR-binding peptide
  MOD_RES (29)..(30): Xaa is C or S
VMGEYQKYIIQQKDNIYLMSIPSMKTPTXXPGA

SEQ ID NO: 69141 - protein, 31 aa, Artificial Sequence; identical to SEQ ID NO: 22539
  Cyclic GFR-binding peptide

SEQ ID NO: 69142 - protein, 32 aa, Artificial Sequence
  Cyclic GFR-binding peptide
  MOD_RES (26)..(27): Xaa is C or S
EYQKYVVNNASDIYLISIPSLRTPVXXTPPTS

SEQ ID NO: 69143 - protein, 27 aa, Artificial Sequence
  Cyclic GFR-binding peptide
  MOD_RES (1)..(1): Xaa is C or S
XEEVIMEYQKYLLVRGNDIYLMSIPST

SEQ ID NO: 69144 - protein, 40 aa, Artificial Sequence; identical to SEQ ID NO: 22543
  Cyclic GFR-binding peptide
  MOD_RES (2)..(4)..(36)..(37): Xaa is C or S

SEQ ID NO: 69145 - protein, 33 aa, Artificial Sequence
  Cyclic GFR-binding peptide
  MOD_RES (28)..(29): Xaa is C or S
MDEYQKYVVNNASDIYLISIPSLRTPVXXTPPT

SEQ ID NO: 69146 - protein, 20 aa, Artificial Sequence
  Cyclic GFR-binding peptide
EYQKYIIQQKDNIYLMSIPS

SEQ ID NO: 69147 - protein, 34 aa, Artificial Sequence
  Cyclic GFR-binding peptide
  MOD_RES (31)..(32): Xaa is C or S
EVVMDEYQKYVVNNASDIYLISIPSLRTPVXXTP

SEQ ID NO: 69148 - protein, 31 aa, Artificial Sequence
  Cyclic GFR-binding peptide
  MOD_RES (30)..(31): Xaa is C or S
VVMDEYQKYVVNNASDIYLISIPSLRTPVXX

SEQ ID NO: 69149 - protein, 34 aa, Artificial Sequence
  Cyclic GFR-binding peptide
  MOD_RES (2)..(34): Xaa is C or S
GXSEVVMDEYQKYVVNNASDIYLISIPSLRTPVX

SEQ ID NO: 69150 - protein, 37 aa, Artificial Sequence
  Cyclic GFR-binding peptide
  MOD_RES (1)..(3)..(35)..(36): Xaa is C or S
XGXSEVVMDEYQKYVVNNASDIYLISIPSLRTPVXXT

SEQ ID NO: 69151 - protein, 34 aa, Artificial Sequence; identical to SEQ ID NO: 22547
  Cyclic GFR-binding peptide
  MOD_RES (1)..(32)..(33): Xaa is C or S

SEQ ID NO: 69152 - protein, 33 aa, Artificial Sequence
  Cyclic GFR-binding peptide
  MOD_RES (32)..(33): Xaa is C or S
SEVVMDEYQKYVVNNASDIYLISIPSLRTPVXX

SEQ ID NO: 69153 - protein, 29 aa, Artificial Sequence
  Cyclic GFR-binding peptide
  MOD_RES (26)..(27): Xaa is C or S
EYQKYLLVRGNDIYLMSIPSTKVPAXXTS

SEQ ID NO: 69154 - protein, 28 aa, Artificial Sequence
  Cyclic GFR-binding peptide
  MOD_RES (1)..(1): Xaa is C or S
XSEVVMDEYQKYVVNNASDIYLISIPSL

SEQ ID NO: 69155 - protein, 28 aa, Artificial Sequence
  Cyclic GFR-binding peptide
  MOD_RES (1)..(3): Xaa is C or S
XGXEEVIMEYQKYLLVRGNDIYLMSIPS

SEQ ID NO: 69156 - protein, 34 aa, Artificial Sequence
  Cyclic GFR-binding peptide
  MOD_RES (2)..(4): Xaa is C or S
SXGXRDVVMGEYQKYIIQQKDNIYLMSIPSMKTP

SEQ ID NO: 69157 - protein, 25 aa, Artificial Sequence
  Cyclic GFR-binding peptide
EYQKYLLVRGNDIYLMSIPSTKVPA

SEQ ID NO: 69158 - protein, 30 aa, Artificial Sequence; identical to SEQ ID NO: 2004
  Cyclic GFR-binding peptide

SEQ ID NO: 69159 - protein, 29 aa, Artificial Sequence
  Cyclic GFR-binding peptide
  MOD_RES (2)..(2): Xaa is C or S
GXEEVIMEYQKYLLVRGNDIYLMSIPSTK

SEQ ID NO: 69160 - protein, 37 aa, Artificial Sequence; identical to SEQ ID NO: 22550
  Cyclic GFR-binding peptide
  MOD_RES (2)..(4)..(35)..(36): Xaa is C or S

SEQ ID NO: 69161 - protein, 36 aa, Artificial Sequence
  Cyclic GFR-binding peptide
  MOD_RES (30)..(31): Xaa is C or S
VVMGEYQKYIIQQKDNIYLMSIPSMKTPTXXPGASG

SEQ ID NO: 69162 - protein, 33 aa, Artificial Sequence; identical to SEQ ID NO: 22553
  Cyclic GFR-binding peptide
  MOD_RES (31)..(32): Xaa is C or S

SEQ ID NO: 69163 - protein, 33 aa, Artificial Sequence
  Cyclic GFR-binding peptide
  MOD_RES (30)..(31): Xaa is C or S
VVMDEYQKYVVNNASDIYLISIPSLRTPVXXTP

SEQ ID NO: 69164 - protein, 36 aa, Artificial Sequence
  Cyclic GFR-binding peptide
  MOD_RES (30)..(31): Xaa is C or S
VVMNEYQKYIVNSSDDIYLVSIPSLKTPAXXPKPVH

SEQ ID NO: 69165 - protein, 30 aa, Artificial Sequence
  Cyclic GFR-binding peptide
  MOD_RES (2)..(4): Xaa is C or S
RXGXSEVVMDEYQKYVVNNASDIYLISIPS

SEQ ID NO: 69166 - protein, 23 aa, Artificial Sequence
  Cyclic GFR-binding peptide
MGEYQKYIIQQKDNIYLMSIPSM

SEQ ID NO: 69167 - protein, 31 aa, Artificial Sequence
  Cyclic GFR-binding peptide
  MOD_RES (26)..(27): Xaa is C or S
EYQKYVVNNASDIYLISIPSLRTPVXXTPPT

SEQ ID NO: 69168 - protein, 33 aa, Artificial Sequence; identical to SEQ ID NO: 22558
  Cyclic GFR-binding peptide
  MOD_RES (1)..(32)..(33): Xaa is C or S

SEQ ID NO: 69169 - protein, 34 aa, Artificial Sequence; identical to SEQ ID NO: 22559
  Cyclic GFR-binding peptide
  MOD_RES (31)..(32): Xaa is C or S

SEQ ID NO: 69170 - protein, 29 aa, Artificial Sequence
  Cyclic GFR-binding peptide
  MOD_RES (26)..(27): Xaa is C or S
EYQKYVVNNASDIYLISIPSLRTPVXXTP

SEQ ID NO: 69171 - protein, 35 aa, Artificial Sequence
  Cyclic GFR-binding peptide
  MOD_RES (32)..(33): Xaa is C or S
SEVVMDEYQKYVVNNASDIYLISIPSLRTPVXXTP

SEQ ID NO: 69172 - protein, 31 aa, Artificial Sequence
  Cyclic GFR-binding peptide
SEVVMDEYQKYVVNNASDIYLISIPSLRTPV

SEQ ID NO: 69173 - protein, 35 aa, Artificial Sequence
  Cyclic GFR-binding peptide
  MOD_RES (30)..(31): Xaa is C or S
EVIMEYQKYLLVRGNDIYLMSIPSTKVPAXXTSPV

SEQ ID NO: 69174 - protein, 21 aa, Artificial Sequence
  Cyclic GFR-binding peptide
GEYQKYIIQQKDNIYLMSIPS

SEQ ID NO: 69175 - protein, 39 aa, Artificial Sequence; identical to SEQ ID NO: 22564
  Cyclic GFR-binding peptide
  MOD_RES (2)..(4)..(36)..(37): Xaa is C or S

SEQ ID NO: 69176 - protein, 25 aa, Artificial Sequence
  Cyclic GFR-binding peptide
MEYQKYLLVRGNDIYLMSIPSTKVP

SEQ ID NO: 69177 - protein, 27 aa, Artificial Sequence
  Cyclic GFR-binding peptide
MGEYQKYIIQQKDNIYLMSIPSMKTPT

SEQ ID NO: 69178 - protein, 29 aa, Artificial Sequence
  Cyclic GFR-binding peptide
  MOD_RES (1)..(1): Xaa is C or S
XRDVVMGEYQKYIIQQKDNIYLMSIPSMK

SEQ ID NO: 69179 - protein, 38 aa, Artificial Sequence
  Cyclic GFR-binding peptide
  MOD_RES (1)..(3)..(35)..(36): Xaa is C or S
XGXSEVVMDEYQKYVVNNASDIYLISIPSLRTPVXXTP

SEQ ID NO: 69180 - protein, 33 aa, Artificial Sequence
  Cyclic GFR-binding peptide
  MOD_RES (29)..(30): Xaa is C or S
VIMEYQKYLLVRGNDIYLMSIPSTKVPAXXTSP

SEQ ID NO: 69181 - protein, 24 aa, Artificial Sequence
  Cyclic GFR-binding peptide
EVIMEYQKYLLVRGNDIYLMSIPS

SEQ ID NO: 69182 - protein, 31 aa, Artificial Sequence
  Cyclic GFR-binding peptide
  MOD_RES (28)..(29): Xaa is C or S
MGEYQKYIIQQKDNIYLMSIPSMKTPTXXPG

SEQ ID NO: 69183 - protein, 38 aa, Artificial Sequence
  Cyclic GFR-binding peptide
  MOD_RES (32)..(33): Xaa is C or S
SEVVMDEYQKYVVNNASDIYLISIPSLRTPVXXTPPTS

SEQ ID NO: 69184 - protein, 33 aa, Artificial Sequence
  Cyclic GFR-binding peptide
  MOD_RES (27)..(28): Xaa is C or S
GEYQKYIIQQKDNIYLMSIPSMKTPTXXPGASG

SEQ ID NO: 69185 - protein, 37 aa, Artificial Sequence; identical to SEQ ID NO: 22580
  Cyclic GFR-binding peptide
  MOD_RES (31)..(32): Xaa is C or S

SEQ ID NO: 69186 - protein, 30 aa, Artificial Sequence
  Cyclic GFR-binding peptide
  MOD_RES (2)..(4): Xaa is C or S
SXGXRDVVMGEYQKYIIQQKDNIYLMSIPS

SEQ ID NO: 69187 - protein, 33 aa, Artificial Sequence
  Cyclic GFR-binding peptide
  MOD_RES (1)..(3): Xaa is C or S
XGXRDVVMGEYQKYIIQQKDNIYLMSIPSMKTP

SEQ ID NO: 69188 - protein, 41 aa, Artificial Sequence; identical to SEQ ID NO: 22581
  Cyclic GFR-binding peptide
  MOD_RES (2)..(4)..(35)..(36): Xaa is C or S

SEQ ID NO: 69189 - protein, 32 aa, Artificial Sequence; identical to SEQ ID NO: 22582
  Cyclic GFR-binding peptide
  MOD_RES (31)..(32): Xaa is C or S

SEQ ID NO: 69190 - protein, 29 aa, Artificial Sequence
  Cyclic GFR-binding peptide
  MOD_RES (27)..(28): Xaa is C or S
DEYQKYVVNNASDIYLISIPSLRTPVXXT

SEQ ID NO: 69191 - protein, 26 aa, Artificial Sequence
  Cyclic GFR-binding peptide
GEYQKYIIQQKDNIYLMSIPSMKTPT

SEQ ID NO: 69192 - protein, 34 aa, Artificial Sequence
  Cyclic GFR-binding peptide
  MOD_RES (30)..(31): Xaa is C or S
VVMGEYQKYIIQQKDNIYLMSIPSMKTPTXXPGA

SEQ ID NO: 69193 - protein, 30 aa, Artificial Sequence; identical to SEQ ID NO: 22586
  Cyclic GFR-binding peptide

SEQ ID NO: 69194 - protein, 35 aa, Artificial Sequence; identical to SEQ ID NO: 22589
  Cyclic GFR-binding peptide
  MOD_RES (1)..(33)..(34): Xaa is C or S

SEQ ID NO: 69195 - protein, 37 aa, Artificial Sequence; identical to SEQ ID NO: 22590
  Cyclic GFR-binding peptide
  MOD_RES (2)..(33)..(34): Xaa is C or S

SEQ ID NO: 69196 - protein, 34 aa, Artificial Sequence
  Cyclic GFR-binding peptide
  MOD_RES (30)..(31): Xaa is C or S
VVMDEYQKYVVNNASDIYLISIPSLRTPVXXTPP

SEQ ID NO: 69197 - protein, 32 aa, Artificial Sequence
  Cyclic GFR-binding peptide
  MOD_RES (30)..(31): Xaa is C or S
EVIMEYQKYLLVRGNDIYLMSIPSTKVPAXXT

SEQ ID NO: 69198 - protein, 35 aa, Artificial Sequence; identical to SEQ ID NO: 22591
  Cyclic GFR-binding peptide
  MOD_RES (2)..(4)..(35): Xaa is C or S

SEQ ID NO: 69199 - protein, 39 aa, Artificial Sequence
  Cyclic GFR-binding peptide
  MOD_RES (1)..(3)..(35)..(36): Xaa is C or S
XGXSEVVMDEYQKYVVNNASDIYLISIPSLRTPVXXTPP

SEQ ID NO: 69200 - protein, 32 aa, Artificial Sequence
  Cyclic GFR-binding peptide
  MOD_RES (1)..(3): Xaa is C or S
XGXEEVIMEYQKYLLVRGNDIYLMSIPSTKVP

SEQ ID NO: 69201 - protein, 26 aa, Artificial Sequence
  Cyclic GFR-binding peptide
  MOD_RES (26)..(26): Xaa is C or S
EYQKYVVNNASDIYLISIPSLRTPVX

SEQ ID NO: 69202 - protein, 33 aa, Artificial Sequence
  Cyclic GFR-binding peptide
  MOD_RES (2)..(4): Xaa is C or S
RXGXSEVVMDEYQKYVVNNASDIYLISIPSLRT

SEQ ID NO: 69203 - protein, 26 aa, Artificial Sequence
  Cyclic GFR-binding peptide
VMGEYQKYIIQQKDNIYLMSIPSMKT

SEQ ID NO: 69204 - protein, 26 aa, Artificial Sequence
  Cyclic GFR-binding peptide
IMEYQKYLLVRGNDIYLMSIPSTKVP

SEQ ID NO: 69205 - protein, 32 aa, Artificial Sequence
  Cyclic GFR-binding peptide
  MOD_RES (27)..(28): Xaa is C or S
GEYQKYIIQQKDNIYLMSIPSMKTPTXXPGAS

SEQ ID NO: 69206 - protein, 31 aa, Artificial Sequence
  Cyclic GFR-binding peptide
  MOD_RES (31)..(31): Xaa is C or S
EVVMDEYQKYVVNNASDIYLISIPSLRTPVX

SEQ ID NO: 69207 - protein, 26 aa, Artificial Sequence
  Cyclic GFR-binding peptide
MDEYQKYVVNNASDIYLISIPSLRTP

SEQ ID NO: 69208 - protein, 32 aa, Artificial Sequence
  Cyclic GFR-binding peptide
  MOD_RES (28)..(29): Xaa is C or S
MGEYQKYIIQQKDNIYLMSIPSMKTPTXXPGA

SEQ ID NO: 69209 - protein, 34 aa, Artificial Sequence
  Cyclic GFR-binding peptide
  MOD_RES (28)..(29): Xaa is C or S
MGEYQKYIIQQKDNIYLMSIPSMKTPTXXPGASG

SEQ ID NO: 69210 - protein, 32 aa, Artificial Sequence
  Cyclic GFR-binding peptide
  MOD_RES (2)..(4): Xaa is C or S
LXGXEEVIMEYQKYLLVRGNDIYLMSIPSTKV

SEQ ID NO: 69211 - protein, 37 aa, Artificial Sequence
  Cyclic GFR-binding peptide
  MOD_RES (1)..(33)..(34): Xaa is C or S
XSEVVMDEYQKYVVNNASDIYLISIPSLRTPVXXTPP

SEQ ID NO: 69212 - protein, 22 aa, Artificial Sequence
  Cyclic GFR-binding peptide
MDEYQKYVVNNASDIYLISIPS

SEQ ID NO: 69213 - protein, 32 aa, Artificial Sequence
  Cyclic GFR-binding peptide
  MOD_RES (29)..(30): Xaa is C or S
VIMEYQKYLLVRGNDIYLMSIPSTKVPAXXTS

SEQ ID NO: 69214 - protein, 38 aa, Artificial Sequence
  Cyclic GFR-binding peptide
  MOD_RES (1)..(33)..(34): Xaa is C or S
XSEVVMDEYQKYVVNNASDIYLISIPSLRTPVXXTPPT

SEQ ID NO: 69215 - protein, 32 aa, Artificial Sequence
  Cyclic GFR-binding peptide
  MOD_RES (27)..(28): Xaa is C or S
DEYQKYVVNNASDIYLISIPSLRTPVXXTPPT

SEQ ID NO: 69216 - protein, 38 aa, Artificial Sequence; identical to SEQ ID NO: 22607
  Cyclic GFR-binding peptide
  MOD_RES (32)..(33): Xaa is C or S

SEQ ID NO: 69217 - protein, 22 aa, Artificial Sequence
  Cyclic GFR-binding peptide
EYQKYIIQQKDNIYLMSIPSMK

SEQ ID NO: 69218 - protein, 39 aa, Artificial Sequence; identical to SEQ ID NO: 22610
  Cyclic GFR-binding peptide
  MOD_RES (2)..(33)..(34): Xaa is C or S

SEQ ID NO: 69219 - protein, 41 aa, Artificial Sequence; identical to SEQ ID NO: 22612
  Cyclic GFR-binding peptide
  MOD_RES (1)..(3)..(35)..(36): Xaa is C or S

SEQ ID NO: 69220 - protein, 35 aa, Artificial Sequence
  Cyclic GFR-binding peptide
  MOD_RES (1)..(33)..(34): Xaa is C or S
XSEVVMDEYQKYVVNNASDIYLISIPSLRTPVXXT

SEQ ID NO: 69221 - protein, 42 aa, Artificial Sequence; identical to SEQ ID NO: 22613
  Cyclic GFR-binding peptide
  MOD_RES (2)..(4)..(36)..(37): Xaa is C or S

SEQ ID NO: 69222 - protein, 40 aa, Artificial Sequence
  Cyclic GFR-binding peptide
  MOD_RES (2)..(34)..(35): Xaa is C or S
GXSEVVMDEYQKYVVNNASDIYLISIPSLRTPVXXTPPTS

SEQ ID NO: 69223 - protein, 31 aa, Artificial Sequence
  Cyclic GFR-binding peptide
  MOD_RES (2)..(2): Xaa is C or S
GXRDVVMGEYQKYIIQQKDNIYLMSIPSMKT

SEQ ID NO: 69224 - protein, 31 aa, Artificial Sequence; identical to SEQ ID NO: 22620
  Cyclic GFR-binding peptide
  MOD_RES (1)..(1): Xaa is C or S

SEQ ID NO: 69225 - protein, 27 aa, Artificial Sequence
  Cyclic GFR-binding peptide
  MOD_RES (26)..(27): Xaa is C or S
EYQKYVVNNASDIYLISIPSLRTPVXX

SEQ ID NO: 69226 - protein, 29 aa, Artificial Sequence
  Cyclic GFR-binding peptide
  MOD_RES (2)..(2): Xaa is C or S
GXRDVVMGEYQKYIIQQKDNIYLMSIPSM

SEQ ID NO: 69227 - protein, 37 aa, Artificial Sequence; identical to SEQ ID NO: 22629
  Cyclic GFR-binding peptide
  MOD_RES (2)..(4)..(36)..(37): Xaa is C or S

SEQ ID NO: 69228 - protein, 24 aa, Artificial Sequence
  Cyclic GFR-binding peptide
VMGEYQKYIIQQKDNIYLMSIPSM

SEQ ID NO: 69229 - protein, 33 aa, Artificial Sequence
  Cyclic GFR-binding peptide
  MOD_RES (28)..(29): Xaa is C or S
IMEYQKYLLVRGNDIYLMSIPSTKVPAXXTSPV

SEQ ID NO: 69230 - protein, 29 aa, Artificial Sequence
  Cyclic GFR-binding peptide
  MOD_RES (1)..(3): Xaa is C or S
XGXEEVIMEYQKYLLVRGNDIYLMSIPST

SEQ ID NO: 69231 - protein, 28 aa, Artificial Sequence
  Cyclic GFR-binding peptide
RDVVMGEYQKYIIQQKDNIYLMSIPSMK

SEQ ID NO: 69232 - protein, 28 aa, Artificial Sequence
  Cyclic GFR-binding peptide
VVMGEYQKYIIQQKDNIYLMSIPSMKTP

SEQ ID NO: 69233 - protein, 33 aa, Artificial Sequence
  Cyclic GFR-binding peptide
  MOD_RES (27)..(28): Xaa is C or S
NEYQKYIVNSSDDIYLVSIPSLKTPAXXPKPVH

SEQ ID NO: 69234 - protein, 29 aa, Artificial Sequence
  Cyclic GFR-binding peptide
  MOD_RES (29)..(29): Xaa is C or S
VMGEYQKYIIQQKDNIYLMSIPSMKTPTX

SEQ ID NO: 69235 - protein, 39 aa, Artificial Sequence; identical to SEQ ID NO: 22637
  Cyclic GFR-binding peptide
  MOD_RES (1)..(33)..(34): Xaa is C or S

SEQ ID NO: 69236 - protein, 29 aa, Artificial Sequence
  Cyclic GFR-binding peptide
SEVVMDEYQKYVVNNASDIYLISIPSLRT

SEQ ID NO: 69237 - protein, 25 aa, Artificial Sequence
  Cyclic GFR-binding peptide
EYQKYIIQQKDNIYLMSIPSMKTPT

SEQ ID NO: 69238 - protein, 24 aa, Artificial Sequence
  Cyclic GFR-binding peptide
VVMDEYQKYVVNNASDIYLISIPS

SEQ ID NO: 69239 - protein, 30 aa, Artificial Sequence
  Cyclic GFR-binding peptide
  MOD_RES (1)..(3): Xaa is C or S
XGXSEVVMDEYQKYVVNNASDIYLISIPSL

SEQ ID NO: 69240 - protein, 30 aa, Artificial Sequence
  Cyclic GFR-binding peptide
RDVVMGEYQKYIIQQKDNIYLMSIPSMKTP

SEQ ID NO: 69241 - protein, 27 aa, Artificial Sequence
  Cyclic GFR-binding peptide
EEVIMEYQKYLLVRGNDIYLMSIPSTK

SEQ ID NO: 69242 - protein, 27 aa, Artificial Sequence
  Cyclic GFR-binding peptide
VVMGEYQKYIIQQKDNIYLMSIPSMKT

SEQ ID NO: 69243 - protein, 31 aa, Artificial Sequence
  Cyclic GFR-binding peptide
  MOD_RES (29)..(30): Xaa is C or S
VMGEYQKYIIQQKDNIYLMSIPSMKTPTXXP

SEQ ID NO: 69244 - protein, 25 aa, Artificial Sequence
  Cyclic GFR-binding peptide
IMEYQKYLLVRGNDIYLMSIPSTKV

SEQ ID NO: 69245 - protein, 32 aa, Artificial Sequence; identical to SEQ ID NO: 22639
  Cyclic GFR-binding peptide
  MOD_RES (32)..(32): Xaa is C or S

SEQ ID NO: 69246 - protein, 34 aa, Artificial Sequence
  Cyclic GFR-binding peptide
  MOD_RES (29)..(30): Xaa is C or S
VIMEYQKYLLVRGNDIYLMSIPSTKVPAXXTSPV

SEQ ID NO: 69247 - protein, 33 aa, Artificial Sequence
  Cyclic GFR-binding peptide
  MOD_RES (2)..(4): Xaa is C or S
LXGXEEVIMEYQKYLLVRGNDIYLMSIPSTKVP

SEQ ID NO: 69248 - protein, 25 aa, Artificial Sequence
  Cyclic GFR-binding peptide
EVVMDEYQKYVVNNASDIYLISIPS

SEQ ID NO: 69249 - protein, 39 aa, Artificial Sequence
  Cyclic GFR-binding peptide
  MOD_RES (2)..(4)..(36)..(37): Xaa is C or S
RXGXSEVVMDEYQKYVVNNASDIYLISIPSLRTPVXXTP

SEQ ID NO: 69250 - protein, 31 aa, Artificial Sequence
  Cyclic GFR-binding peptide
  MOD_RES (28)..(29): Xaa is C or S
MDEYQKYVVNNASDIYLISIPSLRTPVXXTP

SEQ ID NO: 69251 - protein, 28 aa, Artificial Sequence
  Cyclic GFR-binding peptide
EEVIMEYQKYLLVRGNDIYLMSIPSTKV

SEQ ID NO: 69252 - protein, 25 aa, Artificial Sequence
  Cyclic GFR-binding peptide
VIMEYQKYLLVRGNDIYLMSIPSTK

SEQ ID NO: 69253 - protein, 28 aa, Artificial Sequence
  Cyclic GFR-binding peptide
  MOD_RES (27)..(28): Xaa is C or S
DEYQKYVVNNASDIYLISIPSLRTPVXX

SEQ ID NO: 69254 - protein, 30 aa, Artificial Sequence
  Cyclic GFR-binding peptide
  MOD_RES (29)..(30): Xaa is C or S
VIMEYQKYLLVRGNDIYLMSIPSTKVPAXX

SEQ ID NO: 69255 - protein, 32 aa, Artificial Sequence
  Cyclic GFR-binding peptide
  MOD_RES (1)..(3): Xaa is C or S
XGXRDVVMGEYQKYIIQQKDNIYLMSIPSMKT

SEQ ID NO: 69256 - protein, 36 aa, Artificial Sequence
  Cyclic GFR-binding peptide
  MOD_RES (32)..(33): Xaa is C or S
SEVVMDEYQKYVVNNASDIYLISIPSLRTPVXXTPP

SEQ ID NO: 69257 - protein, 35 aa, Artificial Sequence; identical to SEQ ID NO: 22648
  Cyclic GFR-binding peptide
  MOD_RES (32)..(33): Xaa is C or S

SEQ ID NO: 69258 - protein, 31 aa, Artificial Sequence
  Cyclic GFR-binding peptide
  MOD_RES (2)..(4): Xaa is C or S
RXGXSEVVMDEYQKYVVNNASDIYLISIPSL

SEQ ID NO: 69259 - protein, 27 aa, Artificial Sequence
  Cyclic GFR-binding peptide
  MOD_RES (27)..(27): Xaa is C or S
DEYQKYVVNNASDIYLISIPSLRTPVX

SEQ ID NO: 69260 - protein, 28 aa, Artificial Sequence
  Cyclic GFR-binding peptide
VVMDEYQKYVVNNASDIYLISIPSLRTP

SEQ ID NO: 69261 - protein, 30 aa, Artificial Sequence
  Cyclic GFR-binding peptide
  MOD_RES (2)..(2): Xaa is C or S
GXEEVIMEYQKYLLVRGNDIYLMSIPSTKV

SEQ ID NO: 69262 - protein, 27 aa, Artificial Sequence
  Cyclic GFR-binding peptide
  MOD_RES (27)..(27): Xaa is C or S
GEYQKYIIQQKDNIYLMSIPSMKTPTX

SEQ ID NO: 69263 - protein, 24 aa, Artificial Sequence
  Cyclic GFR-binding peptide
MDEYQKYVVNNASDIYLISIPSLR

SEQ ID NO: 69264 - protein, 25 aa, Artificial Sequence
  Cyclic GFR-binding peptide
MGEYQKYIIQQKDNIYLMSIPSMKT

SEQ ID NO: 69265 - protein, 32 aa, Artificial Sequence
  Cyclic GFR-binding peptide
  MOD_RES (1)..(3): Xaa is C or S
XGXSEVVMDEYQKYVVNNASDIYLISIPSLRT

SEQ ID NO: 69266 - protein, 38 aa, Artificial Sequence; identical to SEQ ID NO: 22654
  Cyclic GFR-binding peptide
  MOD_RES (1)..(32)..(33): Xaa is C or S

SEQ ID NO: 69267 - protein, 29 aa, Artificial Sequence
  Cyclic GFR-binding peptide
EEVIMEYQKYLLVRGNDIYLMSIPSTKVP

SEQ ID NO: 69268 - protein, 37 aa, Artificial Sequence
  Cyclic GFR-binding peptide
  MOD_RES (31)..(32): Xaa is C or S
EVVMDEYQKYVVNNASDIYLISIPSLRTPVXXTPPTS

SEQ ID NO: 69269 - protein, 28 aa, Artificial Sequence
  Cyclic GFR-binding peptide
  MOD_RES (26)..(27): Xaa is C or S
EYQKYLLVRGNDIYLMSIPSTKVPAXXT

SEQ ID NO: 69270 - protein, 25 aa, Artificial Sequence
  Cyclic GFR-binding peptide
EVIMEYQKYLLVRGNDIYLMSIPST

SEQ ID NO: 69271 - protein, 25 aa, Artificial Sequence
  Cyclic GFR-binding peptide
GEYQKYIIQQKDNIYLMSIPSMKTP

SEQ ID NO: 69272 - protein, 22 aa, Artificial Sequence
  Cyclic GFR-binding peptide
EYQKYLLVRGNDIYLMSIPSTK

SEQ ID NO: 69273 - protein, 32 aa, Artificial Sequence
  Cyclic GFR-binding peptide
  MOD_RES (2)..(2): Xaa is C or S
GXSEVVMDEYQKYVVNNASDIYLISIPSLRTP

SEQ ID NO: 69274 - protein, 36 aa, Artificial Sequence; identical to SEQ ID NO: 22661
  Cyclic GFR-binding peptide
  MOD_RES (2)..(33)..(34): Xaa is C or S

SEQ ID NO: 69275 - protein, 32 aa, Artificial Sequence
  Cyclic GFR-binding peptide
  MOD_RES (2)..(4): Xaa is C or S
SXGXRDVVMGEYQKYIIQQKDNIYLMSIPSMK

SEQ ID NO: 69276 - protein, 29 aa, Artificial Sequence
  Cyclic GFR-binding peptide
  MOD_RES (2)..(2): Xaa is C or S
GXSEVVMDEYQKYVVNNASDIYLISIPSL

SEQ ID NO: 69277 - protein, 37 aa, Artificial Sequence; identical to SEQ ID NO: 22665
  Cyclic GFR-binding peptide
  MOD_RES (32)..(33): Xaa is C or S

SEQ ID NO: 69278 - protein, 24 aa, Artificial Sequence
  Cyclic GFR-binding peptide
GEYQKYIIQQKDNIYLMSIPSMKT

SEQ ID NO: 69279 - protein, 38 aa, Artificial Sequence; identical to SEQ ID NO: 22478
  Cyclic GFR-binding peptide
  MOD_RES (2)..(33)..(34): Xaa is C or S

SEQ ID NO: 69280 - protein, 34 aa, Artificial Sequence
  Cyclic GFR-binding peptide
  MOD_RES (28)..(29): Xaa is C or S
MDEYQKYVVNNASDIYLISIPSLRTPVXXTPPTS

SEQ ID NO: 69281 - protein, 26 aa, Artificial Sequence
  Cyclic GFR-binding peptide
EVIMEYQKYLLVRGNDIYLMSIPSTK

SEQ ID NO: 69282 - protein, 29 aa, Artificial Sequence
  Cyclic GFR-binding peptide
VVMDEYQKYVVNNASDIYLISIPSLRTPV

SEQ ID NO: 69283 - protein, 29 aa, Artificial Sequence
  Cyclic GFR-binding peptide
  MOD_RES (28)..(29): Xaa is C or S
MGEYQKYIIQQKDNIYLMSIPSMKTPTXX

SEQ ID NO: 69284 - protein, 26 aa, Artificial Sequence
  Cyclic GFR-binding peptide
  MOD_RES (1)..(1): Xaa is C or S
XEEVIMEYQKYLLVRGNDIYLMSIPS

SEQ ID NO: 69285 - protein, 26 aa, Artificial Sequence
  Cyclic GFR-binding peptide
VVMDEYQKYVVNNASDIYLISIPSLR

SEQ ID NO: 69286 - protein, 31 aa, Artificial Sequence
  Cyclic GFR-binding peptide
  MOD_RES (2)..(2): Xaa is C or S
GXSEVVMDEYQKYVVNNASDIYLISIPSLRT

SEQ ID NO: 69287 - protein, 21 aa, Artificial Sequence
  Cyclic GFR-binding peptide
MEYQKYLLVRGNDIYLMSIPS

SEQ ID NO: 69288 - protein, 35 aa, Artificial Sequence; identical to SEQ ID NO: 22485
  Cyclic GFR-binding peptide
  MOD_RES (2)..(33)..(34): Xaa is C or S

SEQ ID NO: 69289 - protein, 37 aa, Artificial Sequence; identical to SEQ ID NO: 22486
  Cyclic GFR-binding peptide
  MOD_RES (1)..(3)..(34)..(35): Xaa is C or S

SEQ ID NO: 69290 - protein, 33 aa, Artificial Sequence
  Cyclic GFR-binding peptide
  MOD_RES (1)..(3): Xaa is C or S
XGXSEVVMDEYQKYVVNNASDIYLISIPSLRTP

SEQ ID NO: 69291 - protein, 23 aa, Artificial Sequence
  Cyclic GFR-binding peptide
VMGEYQKYIIQQKDNIYLMSIPS

SEQ ID NO: 69292 - protein, 36 aa, Artificial Sequence; identical to SEQ ID NO: 22489
  Cyclic GFR-binding peptide
  MOD_RES (1)..(33)..(34): Xaa is C or S

SEQ ID NO: 69293 - protein, 39 aa, Artificial Sequence
  Cyclic GFR-binding peptide
  MOD_RES (1)..(33)..(34): Xaa is C or S
XSEVVMDEYQKYVVNNASDIYLISIPSLRTPVXXTPPTS

SEQ ID NO: 69294 - protein, 34 aa, Artificial Sequence
  Cyclic GFR-binding peptide
  MOD_RES (1)..(33)..(34): Xaa is C or S
XSEVVMDEYQKYVVNNASDIYLISIPSLRTPVXX

SEQ ID NO: 69295 - protein, 24 aa, Artificial Sequence
  Cyclic GFR-binding peptide
IMEYQKYLLVRGNDIYLMSIPSTK

SEQ ID NO: 69296 - protein, 31 aa, Artificial Sequence
  Cyclic GFR-binding peptide
  MOD_RES (2)..(2): Xaa is C or S
GXEEVIMEYQKYLLVRGNDIYLMSIPSTKVP

SEQ ID NO: 69297 - protein, 23 aa, Artificial Sequence
  Cyclic GFR-binding peptide
GEYQKYIIQQKDNIYLMSIPSMK

SEQ ID NO: 69298 - protein, 39 aa, Artificial Sequence; identical to SEQ ID NO: 22494
  Cyclic GFR-binding peptide
  MOD_RES (2)..(34)..(35): Xaa is C or S

SEQ ID NO: 69299 - protein, 25 aa, Artificial Sequence
  Cyclic GFR-binding peptide
DEYQKYVVNNASDIYLISIPSLRTP

SEQ ID NO: 69300 - protein, 27 aa, Artificial Sequence
  Cyclic GFR-binding peptide
EVIMEYQKYLLVRGNDIYLMSIPSTKV

SEQ ID NO: 69301 - protein, 37 aa, Artificial Sequence
  Cyclic GFR-binding peptide
  MOD_RES (2)..(4)..(36)..(37): Xaa is C or S
RXGXSEVVMDEYQKYVVNNASDIYLISIPSLRTPVXX

SEQ ID NO: 69302 - protein, 28 aa, Artificial Sequence
  Cyclic GFR-binding peptide
  MOD_RES (2)..(2): Xaa is C or S
GXRDVVMGEYQKYIIQQKDNIYLMSIPS

SEQ ID NO: 69303 - protein, 32 aa, Artificial Sequence
  Cyclic GFR-binding peptide
  MOD_RES (31)..(32): Xaa is C or S
EVVMDEYQKYVVNNASDIYLISIPSLRTPVXX

SEQ ID NO: 69304 - protein, 31 aa, Artificial Sequence
  Cyclic GFR-binding peptide
  MOD_RES (30)..(31): Xaa is C or S
VVMGEYQKYIIQQKDNIYLMSIPSMKTPTXX

SEQ ID NO: 69305 - protein, 35 aa, Artificial Sequence
  Cyclic GFR-binding peptide
  MOD_RES (2)..(34)..(35): Xaa is C or S
GXSEVVMDEYQKYVVNNASDIYLISIPSLRTPVXX

SEQ ID NO: 69306 - protein, 30 aa, Artificial Sequence
  Cyclic GFR-binding peptide
  MOD_RES (26)..(27): Xaa is C or S
EYQKYLLVRGNDIYLMSIPSTKVPAXXTSP

SEQ ID NO: 69307 - protein, 36 aa, Artificial Sequence
  Cyclic GFR-binding peptide
  MOD_RES (31)..(32): Xaa is C or S
EVVMDEYQKYVVNNASDIYLISIPSLRTPVXXTPPT

SEQ ID NO: 69308 - protein, 33 aa, Artificial Sequence
  Cyclic GFR-binding peptide
  MOD_RES (29)..(30): Xaa is C or S
VMDEYQKYVVNNASDIYLISIPSLRTPVXXTPP

SEQ ID NO: 69309 - protein, 29 aa, Artificial Sequence
  Cyclic GFR-binding peptide
DVVMGEYQKYIIQQKDNIYLMSIPSMKTP

SEQ ID NO: 69310 - protein, 28 aa, Artificial Sequence
  Cyclic GFR-binding peptide
  MOD_RES (27)..(28): Xaa is C or S
GEYQKYIIQQKDNIYLMSIPSMKTPTXX

SEQ ID NO: 69311 - protein, 27 aa, Artificial Sequence
  Cyclic GFR-binding peptide
VVMDEYQKYVVNNASDIYLISIPSLRT

SEQ ID NO: 69312 - protein, 27 aa, Artificial Sequence
  Cyclic GFR-binding peptide
VMDEYQKYVVNNASDIYLISIPSLRTP

SEQ ID NO: 69313 - protein, 32 aa, Artificial Sequence
  Cyclic GFR-binding peptide
  MOD_RES (30)..(31): Xaa is C or S
VVMGEYQKYIIQQKDNIYLMSIPSMKTPTXXP

SEQ ID NO: 69314 - protein, 35 aa, Artificial Sequence; identical to SEQ ID NO: 22502
  Cyclic GFR-binding peptide
  MOD_RES (1)..(3)..(35): Xaa is C or S

SEQ ID NO: 69315 - protein, 30 aa, Artificial Sequence
  Cyclic GFR-binding peptide
  MOD_RES (1)..(3): Xaa is C or S
XGXRDVVMGEYQKYIIQQKDNIYLMSIPSM

SEQ ID NO: 69316 - protein, 27 aa, Artificial Sequence
  Cyclic GFR-binding peptide
IMEYQKYLLVRGNDIYLMSIPSTKVPA

SEQ ID NO: 69317 - protein, 33 aa, Artificial Sequence
  Cyclic GFR-binding peptide
  MOD_RES (2)..(4): Xaa is C or S
SXGXRDVVMGEYQKYIIQQKDNIYLMSIPSMKT

SEQ ID NO: 69318 - protein, 25 aa, Artificial Sequence
  Cyclic GFR-binding peptide
VVMGEYQKYIIQQKDNIYLMSIPSM

SEQ ID NO: 69319 - protein, 27 aa, Artificial Sequence
  Cyclic GFR-binding peptide
VMGEYQKYIIQQKDNIYLMSIPSMKTP

SEQ ID NO: 69320 - protein, 32 aa, Artificial Sequence; identical to SEQ ID NO: 22506
  Cyclic GFR-binding peptide
  MOD_RES (1)..(1): Xaa is C or S

SEQ ID NO: 69321 - protein, 32 aa, Artificial Sequence
  Cyclic GFR-binding peptide
  MOD_RES (27)..(28): Xaa is C or S
MEYQKYLLVRGNDIYLMSIPSTKVPAXXTSPV

SEQ ID NO: 69322 - protein, 20 aa, Artificial Sequence
  Cyclic GFR-binding peptide
EYQKYVVNNASDIYLISIPS

SEQ ID NO: 69323 - protein, 37 aa, Artificial Sequence; identical to SEQ ID NO: 22507
  Cyclic GFR-binding peptide
  MOD_RES (1)..(32)..(33): Xaa is C or S

SEQ ID NO: 69324 - protein, 33 aa, Artificial Sequence
  Cyclic GFR-binding peptide
  MOD_RES (27)..(28): Xaa is C or S
DEYQKYVVNNASDIYLISIPSLRTPVXXTPPTS

SEQ ID NO: 69325 - protein, 30 aa, Artificial Sequence
  Cyclic GFR-binding peptide
  MOD_RES (30)..(30): Xaa is C or S
VVMDEYQKYVVNNASDIYLISIPSLRTPVX

SEQ ID NO: 69326 - protein, 31 aa, Artificial Sequence
  Cyclic GFR-binding peptide
  MOD_RES (27)..(28): Xaa is C or S
DEYQKYVVNNASDIYLISIPSLRTPVXXTPP

SEQ ID NO: 69327 - protein, 38 aa, Artificial Sequence
  Cyclic GFR-binding peptide
  MOD_RES (2)..(4)..(36)..(37): Xaa is C or S
RXGXSEVVMDEYQKYVVNNASDIYLISIPSLRTPVXXT

SEQ ID NO: 69328 - protein, 34 aa, Artificial Sequence
  Cyclic GFR-binding peptide
  MOD_RES (2)..(4): Xaa is C or S
RXGXSEVVMDEYQKYVVNNASDIYLISIPSLRTP

SEQ ID NO: 69329 - protein, 31 aa, Artificial Sequence
  Cyclic GFR-binding peptide
  MOD_RES (29)..(30): Xaa is C or S
VIMEYQKYLLVRGNDIYLMSIPSTKVPAXXT

SEQ ID NO: 69330 - protein, 32 aa, Artificial Sequence; identical to SEQ ID NO: 22511
  Cyclic GFR-binding peptide
  MOD_RES (31)..(32): Xaa is C or S

SEQ ID NO: 69331 - protein, 24 aa, Artificial Sequence
  Cyclic GFR-binding peptide
EYQKYIIQQKDNIYLMSIPSMKTP

SEQ ID NO: 69332 - protein, 32 aa, Artificial Sequence
  Cyclic GFR-binding peptide
  MOD_RES (32)..(32): Xaa is C or S
SEVVMDEYQKYVVNNASDIYLISIPSLRTPVX

SEQ ID NO: 69333 - protein, 35 aa, Artificial Sequence; identical to SEQ ID NO: 22514
  Cyclic GFR-binding peptide
  MOD_RES (2)..(34)..(35): Xaa is C or S

SEQ ID NO: 69334 - protein, 35 aa, Artificial Sequence; identical to SEQ ID NO: 22515
  Cyclic GFR-binding peptide
  MOD_RES (31)..(32): Xaa is C or S

SEQ ID NO: 69335 - protein, 27 aa, Artificial Sequence
  Cyclic GFR-binding peptide
VIMEYQKYLLVRGNDIYLMSIPSTKVP

SEQ ID NO: 69336 - protein, 32 aa, Artificial Sequence
  Cyclic GFR-binding peptide
  MOD_RES (26)..(27): Xaa is C or S
EYQKYLLVRGNDIYLMSIPSTKVPAXXTSPVR

SEQ ID NO: 69337 - protein, 21 aa, Artificial Sequence
  Cyclic GFR-binding peptide
EYQKYLLVRGNDIYLMSIPST

SEQ ID NO: 69338 - protein, 23 aa, Artificial Sequence
  Cyclic GFR-binding peptide
DEYQKYVVNNASDIYLISIPSLR

SEQ ID NO: 69339 - protein, 24 aa, Artificial Sequence
  Cyclic GFR-binding peptide
VMDEYQKYVVNNASDIYLISIPSL

SEQ ID NO: 69340 - protein, 28 aa, Artificial Sequence
  Cyclic GFR-binding peptide
EVVMDEYQKYVVNNASDIYLISIPSLRT

SEQ ID NO: 69341 - protein, 35 aa, Artificial Sequence
  Cyclic GFR-binding peptide
  MOD_RES (2)..(4): Xaa is C or S
RXGXSEVVMDEYQKYVVNNASDIYLISIPSLRTPV

SEQ ID NO: 69342 - protein, 34 aa, Artificial Sequence; identical to SEQ ID NO: 22519
  Cyclic GFR-binding peptide
  MOD_RES (32)..(33): Xaa is C or S

SEQ ID NO: 69343 - protein, 22 aa, Artificial Sequence
  Cyclic GFR-binding peptide
EYQKYVVNNASDIYLISIPSLR

SEQ ID NO: 69344 - protein, 26 aa, Artificial Sequence
  Cyclic GFR-binding peptide
DEYQKYVVNNASDIYLISIPSLRTPV

SEQ ID NO: 69345 - protein, 20 aa, Artificial Sequence
  Cyclic GFR-binding peptide
EYQKYIIQQKDNIYLMSIPS

SEQ ID NO: 69346 - protein, 41 aa, Artificial Sequence; identical to SEQ ID NO: 22521
  Cyclic GFR-binding peptide
  MOD_RES (1)..(3)..(35)..(36): Xaa is C or S

SEQ ID NO: 69347 - protein, 36 aa, Artificial Sequence
  Cyclic GFR-binding peptide
  MOD_RES (1)..(3)..(35)..(36): Xaa is C or S
XGXSEVVMDEYQKYVVNNASDIYLISIPSLRTPVXX

SEQ ID NO: 69348 - protein, 33 aa, Artificial Sequence; identical to SEQ ID NO: 22522
  Cyclic GFR-binding peptide
  MOD_RES (31)..(32): Xaa is C or S

SEQ ID NO: 69349 - protein, 23 aa, Artificial Sequence
  Cyclic GFR-binding peptide
MDEYQKYVVNNASDIYLISIPSL

SEQ ID NO: 69350 - protein, 26 aa, Artificial Sequence
  Cyclic GFR-binding peptide
  MOD_RES (26)..(26): Xaa is C or S
EYQKYLLVRGNDIYLMSIPSTKVPAX

SEQ ID NO: 69351 - protein, 23 aa, Artificial Sequence
  Cyclic GFR-binding peptide
MEYQKYLLVRGNDIYLMSIPSTK

SEQ ID NO: 69352 - protein, 29 aa, Artificial Sequence
  Cyclic GFR-binding peptide
EVVMDEYQKYVVNNASDIYLISIPSLRTP

SEQ ID NO: 69353 - protein, 34 aa, Artificial Sequence
  Cyclic GFR-binding peptide
  MOD_RES (30)..(31): Xaa is C or S
EVIMEYQKYLLVRGNDIYLMSIPSTKVPAXXTSP

SEQ ID NO: 69354 - protein, 34 aa, Artificial Sequence; identical to SEQ ID NO: 22528
  Cyclic GFR-binding peptide
  MOD_RES (2)..(4): Xaa is C or S

SEQ ID NO: 69355 - protein, 36 aa, Artificial Sequence
  Cyclic GFR-binding peptide
  MOD_RES (2)..(34)..(35): Xaa is C or S
GXSEVVMDEYQKYVVNNASDIYLISIPSLRTPVXXT

SEQ ID NO: 69356 - protein, 33 aa, Artificial Sequence
  Cyclic GFR-binding peptide
  MOD_RES (28)..(29): Xaa is C or S
MGEYQKYIIQQKDNIYLMSIPSMKTPTXXPGAS

SEQ ID NO: 69357 - protein, 25 aa, Artificial Sequence
  Cyclic GFR-binding peptide
VMGEYQKYIIQQKDNIYLMSIPSMK

SEQ ID NO: 69358 - protein, 30 aa, Artificial Sequence
  Cyclic GFR-binding peptide
  MOD_RES (1)..(3): Xaa is C or S
XGXEEVIMEYQKYLLVRGNDIYLMSIPSTK

SEQ ID NO: 69359 - protein, 40 aa, Artificial Sequence; identical to SEQ ID NO: 22534
  Cyclic GFR-binding peptide
  MOD_RES (2)..(4)..(35)..(36): Xaa is C or S

SEQ ID NO: 69360 - protein, 28 aa, Artificial Sequence
  Cyclic GFR-binding peptide
  MOD_RES (28)..(28): Xaa is C or S
MGEYQKYIIQQKDNIYLMSIPSMKTPTX

SEQ ID NO: 69361 - protein, 25 aa, Artificial Sequence
  Cyclic GFR-binding peptide
EYQKYVVNNASDIYLISIPSLRTPV

SEQ ID NO: 69362 - protein, 27 aa, Artificial Sequence
  Cyclic GFR-binding peptide
RDVVMGEYQKYIIQQKDNIYLMSIPSM

SEQ ID NO: 69363 - protein, 34 aa, Artificial Sequence
  Cyclic GFR-binding peptide
  MOD_RES (1)..(3): Xaa is C or S
XGXSEVVMDEYQKYVVNNASDIYLISIPSLRTPV

SEQ ID NO: 69364 - protein, 32 aa, Artificial Sequence
  Cyclic GFR-binding peptide
  MOD_RES (28)..(29): Xaa is C or S
MDEYQKYVVNNASDIYLISIPSLRTPVXXTPP

SEQ ID NO: 69365 - protein, 38 aa, Artificial Sequence; identical to SEQ ID NO: 22537
  Cyclic GFR-binding peptide
  MOD_RES (1)..(3)..(35)..(36): Xaa is C or S

SEQ ID NO: 69366 - protein, 25 aa, Artificial Sequence
  Cyclic GFR-binding peptide
MDEYQKYVVNNASDIYLISIPSLRT

SEQ ID NO: 69367 - protein, 36 aa, Artificial Sequence; identical to SEQ ID NO: 22542
  Cyclic GFR-binding peptide
  MOD_RES (2)..(4)..(35)..(36): Xaa is C or S

SEQ ID NO: 69368 - protein, 36 aa, Artificial Sequence; identical to SEQ ID NO: 22544
  Cyclic GFR-binding peptide
  MOD_RES (2)..(34)..(35): Xaa is C or S

SEQ ID NO: 69369 - protein, 29 aa, Artificial Sequence
  Cyclic GFR-binding peptide
  MOD_RES (29)..(29): Xaa is C or S
VIMEYQKYLLVRGNDIYLMSIPSTKVPAX

SEQ ID NO: 69370 - protein, 28 aa, Artificial Sequence
  Cyclic GFR-binding peptide
VMDEYQKYVVNNASDIYLISIPSLRTPV

SEQ ID NO: 69371 - protein, 22 aa, Artificial Sequence
  Cyclic GFR-binding peptide
MGEYQKYIIQQKDNIYLMSIPS

SEQ ID NO: 69372 - protein, 32 aa, Artificial Sequence
  Cyclic GFR-binding peptide
  MOD_RES (26)..(27): Xaa is C or S
EYQKYIIQQKDNIYLMSIPSMKTPTXXPGASG

SEQ ID NO: 69373 - protein, 32 aa, Artificial Sequence
  Cyclic GFR-binding peptide
  MOD_RES (30)..(31): Xaa is C or S
VVMDEYQKYVVNNASDIYLISIPSLRTPVXXT

SEQ ID NO: 69374 - protein, 35 aa, Artificial Sequence; identical to SEQ ID NO: 22549
  Cyclic GFR-binding peptide
  MOD_RES (1)..(3)..(34)..(35): Xaa is C or S

SEQ ID NO: 69375 - protein, 25 aa, Artificial Sequence
  Cyclic GFR-binding peptide
VMDEYQKYVVNNASDIYLISIPSLR

SEQ ID NO: 69376 - protein, 30 aa, Artificial Sequence
  Cyclic GFR-binding peptide
  MOD_RES (28)..(29): Xaa is C or S
MDEYQKYVVNNASDIYLISIPSLRTPVXXT

SEQ ID NO: 69377 - protein, 30 aa, Artificial Sequence
  Cyclic GFR-binding peptide
  MOD_RES (2)..(4): Xaa is C or S
LXGXEEVIMEYQKYLLVRGNDIYLMSIPST

SEQ ID NO: 69378 - protein, 26 aa, Artificial Sequence
  Cyclic GFR-binding peptide
VVMGEYQKYIIQQKDNIYLMSIPSMK

SEQ ID NO: 69379 - protein, 31 aa, Artificial Sequence
  Cyclic GFR-binding peptide
  MOD_RES (26)..(27): Xaa is C or S
EYQKYIIQQKDNIYLMSIPSMKTPTXXPGAS

SEQ ID NO: 69380 - protein, 29 aa, Artificial Sequence
  Cyclic GFR-binding peptide
  MOD_RES (27)..(28): Xaa is C or S
GEYQKYIIQQKDNIYLMSIPSMKTPTXXP

SEQ ID NO: 69381 - protein, 30 aa, Artificial Sequence
  Cyclic GFR-binding peptide
  MOD_RES (28)..(29): Xaa is C or S
IMEYQKYLLVRGNDIYLMSIPSTKVPAXXT

SEQ ID NO: 69382 - protein, 27 aa, Artificial Sequence
  Cyclic GFR-binding peptide
MDEYQKYVVNNASDIYLISIPSLRTPV

SEQ ID NO: 69383 - protein, 36 aa, Artificial Sequence
  Cyclic GFR-binding peptide
  MOD_RES (30)..(31): Xaa is C or S
EVIMEYQKYLLVRGNDIYLMSIPSTKVPAXXTSPVR

SEQ ID NO: 69384 - protein, 31 aa, Artificial Sequence; identical to SEQ ID NO: 22555
  Cyclic GFR-binding peptide
  MOD_RES (31)..(31): Xaa is C or S

SEQ ID NO: 69385 - protein, 34 aa, Artificial Sequence; identical to SEQ ID NO: 22557
  Cyclic GFR-binding peptide
  MOD_RES (2)..(34): Xaa is C or S

SEQ ID NO: 69386 - protein, 36 aa, Artificial Sequence
  Cyclic GFR-binding peptide
  MOD_RES (30)..(31): Xaa is C or S
VVMDEYQKYVVNNASDIYLISIPSLRTPVXXTPPTS

SEQ ID NO: 69387 - protein, 23 aa, Artificial Sequence
  Cyclic GFR-binding peptide
EYQKYIIQQKDNIYLMSIPSMKT

SEQ ID NO: 69388 - protein, 42 aa, Artificial Sequence; identical to SEQ ID NO: 22560
  Cyclic GFR-binding peptide
  MOD_RES (2)..(4)..(36)..(37): Xaa is C or S

SEQ ID NO: 69389 - protein, 24 aa, Artificial Sequence
  Cyclic GFR-binding peptide
MGEYQKYIIQQKDNIYLMSIPSMK

SEQ ID NO: 69390 - protein, 28 aa, Artificial Sequence
  Cyclic GFR-binding peptide
  MOD_RES (27)..(28): Xaa is C or S
MEYQKYLLVRGNDIYLMSIPSTKVPAXX

SEQ ID NO: 69391 - protein, 37 aa, Artificial Sequence; identical to SEQ ID NO: 22562
  Cyclic GFR-binding peptide
  MOD_RES (1)..(3)..(35)..(36): Xaa is C or S

SEQ ID NO: 69392 - protein, 30 aa, Artificial Sequence
  Cyclic GFR-binding peptide
  MOD_RES (29)..(30): Xaa is C or S
VMDEYQKYVVNNASDIYLISIPSLRTPVXX

SEQ ID NO: 69393 - protein, 36 aa, Artificial Sequence
  Cyclic GFR-binding peptide
  MOD_RES (2)..(4)..(36): Xaa is C or S
RXGXSEVVMDEYQKYVVNNASDIYLISIPSLRTPVX

SEQ ID NO: 69394 - protein, 26 aa, Artificial Sequence
  Cyclic GFR-binding peptide
RDVVMGEYQKYIIQQKDNIYLMSIPS

SEQ ID NO: 69395 - protein, 26 aa, Artificial Sequence
  Cyclic GFR-binding peptide
VIMEYQKYLLVRGNDIYLMSIPSTKV

SEQ ID NO: 69396 - protein, 34 aa, Artificial Sequence
  Cyclic GFR-binding peptide
  MOD_RES (29)..(30): Xaa is C or S
VMGEYQKYIIQQKDNIYLMSIPSMKTPTXXPGAS

SEQ ID NO: 69397 - protein, 39 aa, Artificial Sequence; identical to SEQ ID NO: 22566
  Cyclic GFR-binding peptide
  MOD_RES (1)..(33)..(34): Xaa is C or S

SEQ ID NO: 69398 - protein, 32 aa, Artificial Sequence
  Cyclic GFR-binding peptide
  MOD_RES (28)..(29): Xaa is C or S
IMEYQKYLLVRGNDIYLMSIPSTKVPAXXTSP

SEQ ID NO: 69399 - protein, 31 aa, Artificial Sequence
  Cyclic GFR-binding peptide
  MOD_RES (1)..(3): Xaa is C or S
XGXEEVIMEYQKYLLVRGNDIYLMSIPSTKV

SEQ ID NO: 69400 - protein, 28 aa, Artificial Sequence
  Cyclic GFR-binding peptide
EVIMEYQKYLLVRGNDIYLMSIPSTKVP

SEQ ID NO: 69401 - protein, 32 aa, Artificial Sequence
  Cyclic GFR-binding peptide
  MOD_RES (1)..(1): Xaa is C or S
XSEVVMDEYQKYVVNNASDIYLISIPSLRTPV

SEQ ID NO: 69402 - protein, 33 aa, Artificial Sequence; identical to SEQ ID NO: 22569
  Cyclic GFR-binding peptide
  MOD_RES (2)..(2): Xaa is C or S

SEQ ID NO: 69403 - protein, 36 aa, Artificial Sequence; identical to SEQ ID NO: 22570
  Cyclic GFR-binding peptide
  MOD_RES (2)..(4)..(36): Xaa is C or S

SEQ ID NO: 69404 - protein, 39 aa, Artificial Sequence; identical to SEQ ID NO: 22571
  Cyclic GFR-binding peptide
  MOD_RES (2)..(4)..(35)..(36): Xaa is C or S

SEQ ID NO: 69405 - protein, 28 aa, Artificial Sequence
  Cyclic GFR-binding peptide
  MOD_RES (2)..(2): Xaa is C or S
GXEEVIMEYQKYLLVRGNDIYLMSIPST

SEQ ID NO: 69406 - protein, 27 aa, Artificial Sequence
  Cyclic GFR-binding peptide
  MOD_RES (26)..(27): Xaa is C or S
EYQKYLLVRGNDIYLMSIPSTKVPAXX

SEQ ID NO: 69407 - protein, 26 aa, Artificial Sequence
  Cyclic GFR-binding peptide
VMDEYQKYVVNNASDIYLISIPSLRT

SEQ ID NO: 69408 - protein, 31 aa, Artificial Sequence; identical to SEQ ID NO: 22575
  Cyclic GFR-binding peptide
  MOD_RES (31)..(31): Xaa is C or S

SEQ ID NO: 69409 - protein, 31 aa, Artificial Sequence
  Cyclic GFR-binding peptide
  MOD_RES (28)..(29): Xaa is C or S
IMEYQKYLLVRGNDIYLMSIPSTKVPAXXTS

SEQ ID NO: 69410 - protein, 38 aa, Artificial Sequence; identical to SEQ ID NO: 22577
  Cyclic GFR-binding peptide
  MOD_RES (2)..(4)..(35)..(36): Xaa is C or S

SEQ ID NO: 69411 - protein, 34 aa, Artificial Sequence
  Cyclic GFR-binding peptide
  MOD_RES (28)..(29): Xaa is C or S
IMEYQKYLLVRGNDIYLMSIPSTKVPAXXTSPVR

SEQ ID NO: 69412 - protein, 39 aa, Artificial Sequence; identical to SEQ ID NO: 22578
  Cyclic GFR-binding peptide
  MOD_RES (1)..(3)..(35)..(36): Xaa is C or S

SEQ ID NO: 69413 - protein, 26 aa, Artificial Sequence
  Cyclic GFR-binding peptide
EEVIMEYQKYLLVRGNDIYLMSIPST

SEQ ID NO: 69414 - protein, 21 aa, Artificial Sequence
  Cyclic GFR-binding peptide
DEYQKYVVNNASDIYLISIPS

SEQ ID NO: 69415 - protein, 20 aa, Artificial Sequence
  Cyclic GFR-binding peptide
EYQKYLLVRGNDIYLMSIPS

SEQ ID NO: 69416 - protein, 34 aa, Artificial Sequence; identical to SEQ ID NO: 22583
  Cyclic GFR-binding peptide
  MOD_RES (31)..(32): Xaa is C or S

SEQ ID NO: 69417 - protein, 36 aa, Artificial Sequence; identical to SEQ ID NO: 22585
  Cyclic GFR-binding peptide
  MOD_RES (31)..(32): Xaa is C or S

SEQ ID NO: 69418 - protein, 35 aa, Artificial Sequence
  Cyclic GFR-binding peptide
  MOD_RES (29)..(30): Xaa is C or S
VMNEYQKYIVNSSDDIYLVSIPSLKTPAXXPKPVH

SEQ ID NO: 69419 - protein, 22 aa, Artificial Sequence
  Cyclic GFR-binding peptide
DEYQKYVVNNASDIYLISIPSL

SEQ ID NO: 69420 - protein, 26 aa, Artificial Sequence
  Cyclic GFR-binding peptide
SEVVMDEYQKYVVNNASDIYLISIPS

SEQ ID NO: 69421 - protein, 29 aa, Artificial Sequence
  Cyclic GFR-binding peptide
  MOD_RES (1)..(1): Xaa is C or S
XEEVIMEYQKYLLVRGNDIYLMSIPSTKV

SEQ ID NO: 69422 - protein, 35 aa, Artificial Sequence; identical to SEQ ID NO: 22592
  Cyclic GFR-binding peptide
  MOD_RES (2)..(4): Xaa is C or S

SEQ ID NO: 69423 - protein, 23 aa, Artificial Sequence
  Cyclic GFR-binding peptide
VMDEYQKYVVNNASDIYLISIPS

SEQ ID NO: 69424 - protein, 40 aa, Artificial Sequence; identical to SEQ ID NO: 22593
  Cyclic GFR-binding peptide
  MOD_RES (1)..(3)..(34)..(35): Xaa is C or S

SEQ ID NO: 69425 - protein, 26 aa, Artificial Sequence
  Cyclic GFR-binding peptide
MEYQKYLLVRGNDIYLMSIPSTKVPA

SEQ ID NO: 69426 - protein, 31 aa, Artificial Sequence
  Cyclic GFR-binding peptide
  MOD_RES (1)..(3): Xaa is C or S
XGXSEVVMDEYQKYVVNNASDIYLISIPSLR

SEQ ID NO: 69427 - protein, 30 aa, Artificial Sequence
  Cyclic GFR-binding peptide
  MOD_RES (1)..(1): Xaa is C or S
XSEVVMDEYQKYVVNNASDIYLISIPSLRT

SEQ ID NO: 69428 - protein, 26 aa, Artificial Sequence
  Cyclic GFR-binding peptide
DVVMGEYQKYIIQQKDNIYLMSIPSM

SEQ ID NO: 69429 - protein, 30 aa, Artificial Sequence
  Cyclic GFR-binding peptide
  MOD_RES (1)..(1): Xaa is C or S
XRDVVMGEYQKYIIQQKDNIYLMSIPSMKT

SEQ ID NO: 69430 - protein, 40 aa, Artificial Sequence; identical to SEQ ID NO: 22600
  Cyclic GFR-binding peptide
  MOD_RES (1)..(3)..(35)..(36): Xaa is C or S

SEQ ID NO: 69431 - protein, 27 aa, Artificial Sequence
  Cyclic GFR-binding peptide
  MOD_RES (26)..(27): Xaa is C or S
EYQKYIIQQKDNIYLMSIPSMKTPTXX

SEQ ID NO: 69432 - protein, 28 aa, Artificial Sequence
  Cyclic GFR-binding peptide
  MOD_RES (26)..(27): Xaa is C or S
EYQKYVVNNASDIYLISIPSLRTPVXXT

SEQ ID NO: 69433 - protein, 33 aa, Artificial Sequence
  Cyclic GFR-binding peptide
  MOD_RES (1)..(33): Xaa is C or S
XSEVVMDEYQKYVVNNASDIYLISIPSLRTPVX

SEQ ID NO: 69434 - protein, 37 aa, Artificial Sequence; identical to SEQ ID NO: 22603
  Cyclic GFR-binding peptide
  MOD_RES (31)..(32): Xaa is C or S

SEQ ID NO: 69435 - protein, 34 aa, Artificial Sequence
  Cyclic GFR-binding peptide
  MOD_RES (28)..(29): Xaa is C or S
MNEYQKYIVNSSDDIYLVSIPSLKTPAXXPKPVH

SEQ ID NO: 69436 - protein, 39 aa, Artificial Sequence; identical to SEQ ID NO: 22604
  Cyclic GFR-binding peptide
  MOD_RES (1)..(3)..(34)..(35): Xaa is C or S

SEQ ID NO: 69437 - protein, 40 aa, Artificial Sequence
  Cyclic GFR-binding peptide
  MOD_RES (2)..(4)..(36)..(37): Xaa is C or S
RXGXSEVVMDEYQKYVVNNASDIYLISIPSLRTPVXXTPP

SEQ ID NO: 69438 - protein, 23 aa, Artificial Sequence
  Cyclic GFR-binding peptide
EYQKYVVNNASDIYLISIPSLRT

SEQ ID NO: 69439 - protein, 33 aa, Artificial Sequence
  Cyclic GFR-binding peptide
  MOD_RES (31)..(32): Xaa is C or S
EVVMDEYQKYVVNNASDIYLISIPSLRTPVXXT

SEQ ID NO: 69440 - protein, 28 aa, Artificial Sequence
  Cyclic GFR-binding peptide
  MOD_RES (28)..(28): Xaa is C or S
MDEYQKYVVNNASDIYLISIPSLRTPVX

SEQ ID NO: 69441 - protein, 41 aa, Artificial Sequence
  Cyclic GFR-binding peptide
  MOD_RES (2)..(4)..(36)..(37): Xaa is C or S
RXGXSEVVMDEYQKYVVNNASDIYLISIPSLRTPVXXTPPT

SEQ ID NO: 69442 - protein, 31 aa, Artificial Sequence
  Cyclic GFR-binding peptide
  MOD_RES (27)..(28): Xaa is C or S
MEYQKYLLVRGNDIYLMSIPSTKVPAXXTSP

SEQ ID NO: 69443 - protein, 40 aa, Artificial Sequence; identical to SEQ ID NO: 22608
  Cyclic GFR-binding peptide
  MOD_RES (2)..(34)..(35): Xaa is C or S

SEQ ID NO: 69444 - protein, 34 aa, Artificial Sequence; identical to SEQ ID NO: 22609
  Cyclic GFR-binding peptide
  MOD_RES (1)..(3)..(34): Xaa is C or S

SEQ ID NO: 69445 - protein, 36 aa, Artificial Sequence; identical to SEQ ID NO: 22611
  Cyclic GFR-binding peptide
  MOD_RES (1)..(3)..(35)..(36): Xaa is C or S

SEQ ID NO: 69446 - protein, 30 aa, Artificial Sequence
  Cyclic GFR-binding peptide
  MOD_RES (27)..(28): Xaa is C or S
DEYQKYVVNNASDIYLISIPSLRTPVXXTP

SEQ ID NO: 69447 - protein, 31 aa, Artificial Sequence
  Cyclic GFR-binding peptide
  MOD_RES (1)..(1): Xaa is C or S
XRDVVMGEYQKYIIQQKDNIYLMSIPSMKTP

SEQ ID NO: 69448 - protein, 35 aa, Artificial Sequence; identical to SEQ ID NO: 22616
  Cyclic GFR-binding peptide
  MOD_RES (1)..(32)..(33): Xaa is C or S

SEQ ID NO: 69449 - protein, 29 aa, Artificial Sequence
  Cyclic GFR-binding peptide
  MOD_RES (28)..(29): Xaa is C or S
MDEYQKYVVNNASDIYLISIPSLRTPVXX

SEQ ID NO: 69450 - protein, 29 aa, Artificial Sequence
  Cyclic GFR-binding peptide
  MOD_RES (29)..(29): Xaa is C or S
VMDEYQKYVVNNASDIYLISIPSLRTPVX

SEQ ID NO: 69451 - protein, 31 aa, Artificial Sequence
  Cyclic GFR-binding peptide
  MOD_RES (1)..(1): Xaa is C or S
XSEVVMDEYQKYVVNNASDIYLISIPSLRTP

SEQ ID NO: 69452 - protein, 29 aa, Artificial Sequence
  Cyclic GFR-binding peptide
  MOD_RES (27)..(28): Xaa is C or S
MEYQKYLLVRGNDIYLMSIPSTKVPAXXT

SEQ ID NO: 69453 - protein, 31 aa, Artificial Sequence
  Cyclic GFR-binding peptide
  MOD_RES (2)..(4): Xaa is C or S
LXGXEEVIMEYQKYLLVRGNDIYLMSIPSTK

SEQ ID NO: 69454 - protein, 38 aa, Artificial Sequence; identical to SEQ ID NO: 22626
  Cyclic GFR-binding peptide
  MOD_RES (1)..(33)..(34): Xaa is C or S

SEQ ID NO: 69455 - protein, 35 aa, Artificial Sequence
  Cyclic GFR-binding peptide
  MOD_RES (29)..(30): Xaa is C or S
VIMEYQKYLLVRGNDIYLMSIPSTKVPAXXTSPVR

SEQ ID NO: 69456 - protein, 38 aa, Artificial Sequence; identical to SEQ ID NO: 22628
  Cyclic GFR-binding peptide
  MOD_RES (2)..(34)..(35): Xaa is C or S

SEQ ID NO: 69457 - protein, 29 aa, Artificial Sequence
  Cyclic GFR-binding peptide
VVMGEYQKYIIQQKDNIYLMSIPSMKTPT

SEQ ID NO: 69458 - protein, 30 aa, Artificial Sequence
  Cyclic GFR-binding peptide
  MOD_RES (27)..(28): Xaa is C or S
GEYQKYIIQQKDNIYLMSIPSMKTPTXXPG

SEQ ID NO: 69459 - protein, 35 aa, Artificial Sequence
  Cyclic GFR-binding peptide
  MOD_RES (29)..(30): Xaa is C or S
VMDEYQKYVVNNASDIYLISIPSLRTPVXXTPPTS

SEQ ID NO: 69460 - protein, 29 aa, Artificial Sequence
  Cyclic GFR-binding peptide
RDVVMGEYQKYIIQQKDNIYLMSIPSMKT

SEQ ID NO: 69461 - protein, 30 aa, Artificial Sequence
  Cyclic GFR-binding peptide
SEVVMDEYQKYVVNNASDIYLISIPSLRTP

SEQ ID NO: 69462 - protein, 24 aa, Artificial Sequence
  Cyclic GFR-binding peptide
VIMEYQKYLLVRGNDIYLMSIPST

SEQ ID NO: 69463 - protein, 30 aa, Artificial Sequence
  Cyclic GFR-binding peptide
  MOD_RES (2)..(2): Xaa is C or S
GXRDVVMGEYQKYIIQQKDNIYLMSIPSMK

SEQ ID NO: 69464 - protein, 37 aa, Artificial Sequence; identical to SEQ ID NO: 22632
  Cyclic GFR-binding peptide
  MOD_RES (31)..(32): Xaa is C or S

SEQ ID NO: 69465 - protein, 29 aa, Artificial Sequence
  Cyclic GFR-binding peptide
  MOD_RES (1)..(3): Xaa is C or S
XGXRDVVMGEYQKYIIQQKDNIYLMSIPS

SEQ ID NO: 69466 - protein, 28 aa, Artificial Sequence
  Cyclic GFR-binding peptide
  MOD_RES (1)..(1): Xaa is C or S
XEEVIMEYQKYLLVRGNDIYLMSIPSTK

SEQ ID NO: 69467 - protein, 35 aa, Artificial Sequence
  Cyclic GFR-binding peptide
  MOD_RES (29)..(30): Xaa is C or S
VMGEYQKYIIQQKDNIYLMSIPSMKTPTXXPGASG

SEQ ID NO: 69468 - protein, 29 aa, Artificial Sequence
  Cyclic GFR-binding peptide
  MOD_RES (26)..(27): Xaa is C or S
EYQKYIIQQKDNIYLMSIPSMKTPTXXPG

SEQ ID NO: 69469 - protein, 26 aa, Artificial Sequence
  Cyclic GFR-binding peptide
EVVMDEYQKYVVNNASDIYLISIPSL

SEQ ID NO: 69470 - protein, 34 aa, Artificial Sequence
  Cyclic GFR-binding peptide
  MOD_RES (29)..(30): Xaa is C or S
VMDEYQKYVVNNASDIYLISIPSLRTPVXXTPPT

SEQ ID NO: 69471 - protein, 27 aa, Artificial Sequence
  Cyclic GFR-binding peptide
  MOD_RES (1)..(1): Xaa is C or S
XSEVVMDEYQKYVVNNASDIYLISIPS

SEQ ID NO: 69472 - protein, 35 aa, Artificial Sequence
  Cyclic GFR-binding peptide
  MOD_RES (1)..(3)..(35): Xaa is C or S
XGXSEVVMDEYQKYVVNNASDIYLISIPSLRTPVX

SEQ ID NO: 69473 - protein, 30 aa, Artificial Sequence
  Cyclic GFR-binding peptide
  MOD_RES (2)..(2): Xaa is C or S
GXSEVVMDEYQKYVVNNASDIYLISIPSLR

SEQ ID NO: 69474 - protein, 30 aa, Artificial Sequence
  Cyclic GFR-binding peptide
  MOD_RES (30)..(30): Xaa is C or S
EVIMEYQKYLLVRGNDIYLMSIPSTKVPAX

SEQ ID NO: 69475 - protein, 21 aa, Artificial Sequence
  Cyclic GFR-binding peptide
EYQKYVVNNASDIYLISIPSL

SEQ ID NO: 69476 - protein, 33 aa, Artificial Sequence; identical to SEQ ID NO: 22642
  Cyclic GFR-binding peptide
  MOD_RES (2)..(33): Xaa is C or S

SEQ ID NO: 69477 - protein, 38 aa, Artificial Sequence; identical to SEQ ID NO: 22645
  Cyclic GFR-binding peptide
  MOD_RES (32)..(33): Xaa is C or S

SEQ ID NO: 69478 - protein, 30 aa, Artificial Sequence
  Cyclic GFR-binding peptide
  MOD_RES (26)..(27): Xaa is C or S
EYQKYVVNNASDIYLISIPSLRTPVXXTPP

SEQ ID NO: 69479 - protein, 20 aa, Artificial Sequence
  Cyclic GFR-binding peptide
EYQKYVVNNASDIYLISIPS

SEQ ID NO: 69480 - protein, 26 aa, Artificial Sequence
  Cyclic GFR-binding peptide
  MOD_RES (26)..(26): Xaa is C or S
EYQKYIIQQKDNIYLMSIPSMKTPTX

SEQ ID NO: 69481 - protein, 27 aa, Artificial Sequence
  Cyclic GFR-binding peptide
DVVMGEYQKYIIQQKDNIYLMSIPSMK

SEQ ID NO: 69482 - protein, 41 aa, Artificial Sequence
  Cyclic GFR-binding peptide
  MOD_RES (1)..(3)..(35)..(36): Xaa is C or S
XGXSEVVMDEYQKYVVNNASDIYLISIPSLRTPVXXTPPTS

SEQ ID NO: 69483 - protein, 38 aa, Artificial Sequence; identical to SEQ ID NO: 22649
  Cyclic GFR-binding peptide
  MOD_RES (2)..(4)..(36)..(37): Xaa is C or S

SEQ ID NO: 69484 - protein, 35 aa, Artificial Sequence
  Cyclic GFR-binding peptide
  MOD_RES (31)..(32): Xaa is C or S
EVVMDEYQKYVVNNASDIYLISIPSLRTPVXXTPP

SEQ ID NO: 69485 - protein, 27 aa, Artificial Sequence
  Cyclic GFR-binding peptide
SEVVMDEYQKYVVNNASDIYLISIPSL

SEQ ID NO: 69486 - protein, 34 aa, Artificial Sequence; identical to SEQ ID NO: 22651
  Cyclic GFR-binding peptide
  MOD_RES (2)..(33)..(34): Xaa is C or S

SEQ ID NO: 69487 - protein, 23 aa, Artificial Sequence
  Cyclic GFR-binding peptide
EYQKYLLVRGNDIYLMSIPSTKV

SEQ ID NO: 69488 - protein, 34 aa, Artificial Sequence
  Cyclic GFR-binding peptide
  MOD_RES (32)..(33): Xaa is C or S
SEVVMDEYQKYVVNNASDIYLISIPSLRTPVXXT

SEQ ID NO: 69489 - protein, 31 aa, Artificial Sequence
  Cyclic GFR-binding peptide
  MOD_RES (26)..(27): Xaa is C or S
EYQKYLLVRGNDIYLMSIPSTKVPAXXTSPV

SEQ ID NO: 69490 - protein, 31 aa, Artificial Sequence
  Cyclic GFR-binding peptide
  MOD_RES (27)..(28): Xaa is C or S
GEYQKYIIQQKDNIYLMSIPSMKTPTXXPGA

SEQ ID NO: 69491 - protein, 20 aa, Artificial Sequence
  Cyclic GFR-binding peptide
EYQKYLLVRGNDIYLMSIPS

SEQ ID NO: 69492 - protein, 42 aa, Artificial Sequence; identical to SEQ ID NO: 22657
  Cyclic GFR-binding peptide
  MOD_RES (2)..(4)..(36)..(37): Xaa is C or S

SEQ ID NO: 69493 - protein, 34 aa, Artificial Sequence; identical to SEQ ID NO: 22659
  Cyclic GFR-binding peptide
  MOD_RES (1)..(33)..(34): Xaa is C or S

SEQ ID NO: 69494 - protein, 31 aa, Artificial Sequence
  Cyclic GFR-binding peptide
  MOD_RES (1)..(3): Xaa is C or S
XGXRDVVMGEYQKYIIQQKDNIYLMSIPSMK

SEQ ID NO: 69495 - protein, 32 aa, Artificial Sequence
  Cyclic GFR-binding peptide
  MOD_RES (29)..(30): Xaa is C or S
VMGEYQKYIIQQKDNIYLMSIPSMKTPTXXPG

SEQ ID NO: 69496 - protein, 29 aa, Artificial Sequence
  Cyclic GFR-binding peptide
EVIMEYQKYLLVRGNDIYLMSIPSTKVPA

SEQ ID NO: 69497 - protein, 28 aa, Artificial Sequence
  Cyclic GFR-binding peptide
SEVVMDEYQKYVVNNASDIYLISIPSLR

SEQ ID NO: 69498 - protein, 24 aa, Artificial Sequence
  Cyclic GFR-binding peptide
DEYQKYVVNNASDIYLISIPSLRT

SEQ ID NO: 69499 - protein, 28 aa, Artificial Sequence
  Cyclic GFR-binding peptide
DVVMGEYQKYIIQQKDNIYLMSIPSMKT

SEQ ID NO: 69500 - protein, 24 aa, Artificial Sequence
  Cyclic GFR-binding peptide
PVKTSPISMLYIDNGRVLLYKQYE

SEQ ID NO: 69501 - protein, 35 aa, Artificial Sequence; identical to SEQ ID NO: 22668
  Cyclic GFR-binding peptide
  MOD_RES (4)..(5): Xaa is C or S

SEQ ID NO: 69502 - protein, 25 aa, Artificial Sequence
  Cyclic GFR-binding peptide
LSPISILYIDSANNVVYKQYEDMVV

SEQ ID NO: 69503 - protein, 27 aa, Artificial Sequence
  Cyclic GFR-binding peptide
  MOD_RES (26)..(26): Xaa is C or S
SPISMLYIDNGRVLLYKQYEMIVEEXG

SEQ ID NO: 69504 - protein, 32 aa, Artificial Sequence; identical to SEQ ID NO: 22669
  Cyclic GFR-binding peptide
  MOD_RES (31)..(31): Xaa is C or S

SEQ ID NO: 69505 - protein, 30 aa, Artificial Sequence
  Cyclic GFR-binding peptide
  MOD_RES (3)..(4): Xaa is C or S
STXXAPVKTSPISMLYIDNGRVLLYKQYEM

SEQ ID NO: 69506 - protein, 21 aa, Artificial Sequence
  Cyclic GFR-binding peptide
MSPISMLYINDKQQIIYKQYE

SEQ ID NO: 69507 - protein, 32 aa, Artificial Sequence; identical to SEQ ID NO: 22672
  Cyclic GFR-binding peptide
  MOD_RES (1)..(32): Xaa is C or S

SEQ ID NO: 69508 - protein, 28 aa, Artificial Sequence
  Cyclic GFR-binding peptide
  MOD_RES (27)..(27): Xaa is C or S
SPISILYIDSANNVVYKQYEDMVVESXG

SEQ ID NO: 69509 - protein, 31 aa, Artificial Sequence
  Cyclic GFR-binding peptide
  MOD_RES (2)..(3): Xaa is C or S
TXXVPTRLSPISILYIDSANNVVYKQYEDMV

SEQ ID NO: 69510 - protein, 27 aa, Artificial Sequence
  Cyclic GFR-binding peptide
RLSPISILYIDSANNVVYKQYEDMVVE

SEQ ID NO: 69511 - protein, 33 aa, Artificial Sequence; identical to SEQ ID NO: 22673
  Cyclic GFR-binding peptide
  MOD_RES (1)..(33): Xaa is C or S

SEQ ID NO: 69512 - protein, 24 aa, Artificial Sequence
  Cyclic GFR-binding peptide
PTRLSPISILYIDSANNVVYKQYE

SEQ ID NO: 69513 - protein, 29 aa, Artificial Sequence
  Cyclic GFR-binding peptide
  MOD_RES (26)..(28): Xaa is C or S
SPISMLYIDNGRVLLYKQYEMIVEEXGXL

SEQ ID NO: 69514 - protein, 33 aa, Artificial Sequence; identical to SEQ ID NO: 22679
  Cyclic GFR-binding peptide
  MOD_RES (1)..(2): Xaa is C or S

SEQ ID NO: 69515 - protein, 29 aa, Artificial Sequence
  Cyclic GFR-binding peptide
  MOD_RES (1)..(2): Xaa is C or S
XXAPVKTSPISMLYIDNGRVLLYKQYEMI

SEQ ID NO: 69516 - protein, 22 aa, Artificial Sequence
  Cyclic GFR-binding peptide
SPISMLYIDNGRVLLYKQYEMI

SEQ ID NO: 69517 - protein, 32 aa, Artificial Sequence
  Cyclic GFR-binding peptide
  MOD_RES (3)..(4): Xaa is C or S
PTXXVPTRLSPISILYIDSANNVVYKQYEDMV

SEQ ID NO: 69518 - protein, 22 aa, Artificial Sequence
  Cyclic GFR-binding peptide
TSPISMLYIDNGRVLLYKQYEM

SEQ ID NO: 69519 - protein, 33 aa, Artificial Sequence
  Cyclic GFR-binding peptide
  MOD_RES (3)..(4): Xaa is C or S
GPXXTPTKMSPISMLYINDKQQIIYKQYEGMVV

SEQ ID NO: 69520 - protein, 24 aa, Artificial Sequence
  Cyclic GFR-binding peptide
VKTSPISMLYIDNGRVLLYKQYEM

SEQ ID NO: 69521 - protein, 36 aa, Artificial Sequence
  Cyclic GFR-binding peptide
  MOD_RES (3)..(4)..(36): Xaa is C or S
PTXXVPTRLSPISILYIDSANNVVYKQYEDMVVESX

SEQ ID NO: 69522 - protein, 28 aa, Artificial Sequence
  Cyclic GFR-binding peptide
  MOD_RES (2)..(3): Xaa is C or S
PXXTPTKMSPISMLYINDKQQIIYKQYE

SEQ ID NO: 69523 - protein, 33 aa, Artificial Sequence
  Cyclic GFR-binding peptide
  MOD_RES (3)..(4): Xaa is C or S
STXXAPVKTSPISMLYIDNGRVLLYKQYEMIVE

SEQ ID NO: 69524 - protein, 36 aa, Artificial Sequence; identical to SEQ ID NO: 22685
  Cyclic GFR-binding peptide
  MOD_RES (4)..(5)..(36): Xaa is C or S

SEQ ID NO: 69525 - protein, 41 aa, Artificial Sequence; identical to SEQ ID NO: 22686
  Cyclic GFR-binding peptide
  MOD_RES (5)..(6)..(38)..(40): Xaa is C or S

SEQ ID NO: 69526 - protein, 23 aa, Artificial Sequence
  Cyclic GFR-binding peptide
TSPISMLYIDNGRVLLYKQYEMI

SEQ ID NO: 69527 - protein, 35 aa, Artificial Sequence
  Cyclic GFR-binding peptide
  MOD_RES (5)..(6): Xaa is C or S
SAGPXXTPTKMSPISMLYINDKQQIIYKQYEGMVV

SEQ ID NO: 69528 - protein, 33 aa, Artificial Sequence
  Cyclic GFR-binding peptide
  MOD_RES (6)..(7): Xaa is C or S
RVPSTXXAPVKTSPISMLYIDNGRVLLYKQYEM

SEQ ID NO: 69529 - protein, 28 aa, Artificial Sequence
  Cyclic GFR-binding peptide
  MOD_RES (28)..(28): Xaa is C or S
MSPISMLYINDKQQIIYKQYEGMVVDRX

SEQ ID NO: 69530 - protein, 30 aa, Artificial Sequence
  Cyclic GFR-binding peptide
  MOD_RES (2)..(3): Xaa is C or S
PXXTPTKMSPISMLYINDKQQIIYKQYEGM

SEQ ID NO: 69531 - protein, 30 aa, Artificial Sequence
  Cyclic GFR-binding peptide
  MOD_RES (1)..(1): Xaa is C or S
XTPTKMSPISMLYINDKQQIIYKQYEGMVV

SEQ ID NO: 69532 - protein, 39 aa, Artificial Sequence
  Cyclic GFR-binding peptide
  MOD_RES (5)..(6)..(38): Xaa is C or S
TPPTXXVPTRLSPISILYIDSANNVVYKQYEDMVVESXG

SEQ ID NO: 69533 - protein, 28 aa, Artificial Sequence
  Cyclic GFR-binding peptide
  MOD_RES (1)..(1): Xaa is C or S
XAPVKTSPISMLYIDNGRVLLYKQYEMI

SEQ ID NO: 69534 - protein, 32 aa, Artificial Sequence
  Cyclic GFR-binding peptide
  MOD_RES (6)..(7): Xaa is C or S
HVPKPXXAPTKLSPISVLYIDDSSNVIYKQYE

SEQ ID NO: 69535 - protein, 23 aa, Artificial Sequence
  Cyclic GFR-binding peptide
SPISMLYIDNGRVLLYKQYEMIV

SEQ ID NO: 69536 - protein, 35 aa, Artificial Sequence
  Cyclic GFR-binding peptide
  MOD_RES (5)..(6): Xaa is C or S
TPPTXXVPTRLSPISILYIDSANNVVYKQYEDMVV

SEQ ID NO: 69537 - protein, 31 aa, Artificial Sequence
  Cyclic GFR-binding peptide
  MOD_RES (1)..(2): Xaa is C or S
XXAPVKTSPISMLYIDNGRVLLYKQYEMIVE

SEQ ID NO: 69538 - protein, 30 aa, Artificial Sequence; identical to SEQ ID NO: 22697
  Cyclic GFR-binding peptide

SEQ ID NO: 69539 - protein, 32 aa, Artificial Sequence
  Cyclic GFR-binding peptide
  MOD_RES (29)..(31): Xaa is C or S
RLSPISILYIDSANNVVYKQYEDMVVESXGXR

SEQ ID NO: 69540 - protein, 40 aa, Artificial Sequence
  Cyclic GFR-binding peptide
  MOD_RES (5)..(6)..(38)..(40): Xaa is C or S
TPPTXXVPTRLSPISILYIDSANNVVYKQYEDMVVESXGX

SEQ ID NO: 69541 - protein, 25 aa, Artificial Sequence
  Cyclic GFR-binding peptide
SPISMLYINDKQQIIYKQYEGMVVD

SEQ ID NO: 69542 - protein, 40 aa, Artificial Sequence; identical to SEQ ID NO: 22702
  Cyclic GFR-binding peptide
  MOD_RES (6)..(7)..(39): Xaa is C or S

SEQ ID NO: 69543 - protein, 33 aa, Artificial Sequence; identical to SEQ ID NO: 22706
  Cyclic GFR-binding peptide
  MOD_RES (31)..(33): Xaa is C or S

SEQ ID NO: 69544 - protein, 38 aa, Artificial Sequence
  Cyclic GFR-binding peptide
  MOD_RES (4)..(5)..(37): Xaa is C or S
PPTXXVPTRLSPISILYIDSANNVVYKQYEDMVVESXG

SEQ ID NO: 69545 - protein, 30 aa, Artificial Sequence
  Cyclic GFR-binding peptide
  MOD_RES (30)..(30): Xaa is C or S
PVKTSPISMLYIDNGRVLLYKQYEMIVEEX

SEQ ID NO: 69546 - protein, 27 aa, Artificial Sequence
  Cyclic GFR-binding peptide
  MOD_RES (27)..(27): Xaa is C or S
SPISMLYINDKQQIIYKQYEGMVVDRX

SEQ ID NO: 69547 - protein, 25 aa, Artificial Sequence
  Cyclic GFR-binding peptide
SPISMLYIDNGRVLLYKQYEMIVEE

SEQ ID NO: 69548 - protein, 28 aa, Artificial Sequence
  Cyclic GFR-binding peptide
APVKTSPISMLYIDNGRVLLYKQYEMIV

SEQ ID NO: 69549 - protein, 26 aa, Artificial Sequence
  Cyclic GFR-binding peptide
PTKMSPISMLYINDKQQIIYKQYEGM

SEQ ID NO: 69550 - protein, 37 aa, Artificial Sequence; identical to SEQ ID NO: 22707
  Cyclic GFR-binding peptide
  MOD_RES (3)..(4)..(36): Xaa is C or S

SEQ ID NO: 69551 - protein, 32 aa, Artificial Sequence
  Cyclic GFR-binding peptide
  MOD_RES (31)..(31): Xaa is C or S
PTKMSPISMLYINDKQQIIYKQYEGMVVDRXG

SEQ ID NO: 69552 - protein, 28 aa, Artificial Sequence
  Cyclic GFR-binding peptide
TPTKMSPISMLYINDKQQIIYKQYEGMV

SEQ ID NO: 69553 - protein, 37 aa, Artificial Sequence
  Cyclic GFR-binding peptide
  MOD_RES (3)..(4)..(36): Xaa is C or S
PTXXVPTRLSPISILYIDSANNVVYKQYEDMVVESXG

SEQ ID NO: 69554 - protein, 34 aa, Artificial Sequence; identical to SEQ ID NO: 22711
  Cyclic GFR-binding peptide
  MOD_RES (32)..(34): Xaa is C or S

SEQ ID NO: 69555 - protein, 38 aa, Artificial Sequence; identical to SEQ ID NO: 22712
  Cyclic GFR-binding peptide
  MOD_RES (4)..(5)..(36)..(38): Xaa is C or S

SEQ ID NO: 69556 - protein, 22 aa, Artificial Sequence
  Cyclic GFR-binding peptide
MSPISMLYINDKQQIIYKQYEG

SEQ ID NO: 69557 - protein, 37 aa, Artificial Sequence; identical to SEQ ID NO: 22715
  Cyclic GFR-binding peptide
  MOD_RES (4)..(5)..(37): Xaa is C or S

SEQ ID NO: 69558 - protein, 37 aa, Artificial Sequence
  Cyclic GFR-binding peptide
  MOD_RES (5)..(6): Xaa is C or S
TPPTXXVPTRLSPISILYIDSANNVVYKQYEDMVVES

SEQ ID NO: 69559 - protein, 36 aa, Artificial Sequence; identical to SEQ ID NO: 22717
  Cyclic GFR-binding peptide
  MOD_RES (4)..(5): Xaa is C or S

SEQ ID NO: 69560 - protein, 30 aa, Artificial Sequence
  Cyclic GFR-binding peptide
  MOD_RES (1)..(2): Xaa is C or S
XXTPTKMSPISMLYINDKQQIIYKQYEGMV

SEQ ID NO: 69561 - protein, 31 aa, Artificial Sequence
  Cyclic GFR-binding peptide
  MOD_RES (28)..(30): Xaa is C or S
MSPISMLYINDKQQIIYKQYEGMVVDRXGXS

SEQ ID NO: 69562 - protein, 30 aa, Artificial Sequence
  Cyclic GFR-binding peptide
  MOD_RES (4)..(5): Xaa is C or S
AGPXXTPTKMSPISMLYINDKQQIIYKQYE

SEQ ID NO: 69563 - protein, 36 aa, Artificial Sequence; identical to SEQ ID NO: 22720
  Cyclic GFR-binding peptide
  MOD_RES (2)..(3)..(34)..(36): Xaa is C or S

SEQ ID NO: 69564 - protein, 29 aa, Artificial Sequence
  Cyclic GFR-binding peptide
  MOD_RES (27)..(29): Xaa is C or S
SPISILYIDSANNVVYKQYEDMVVESXGX

SEQ ID NO: 69565 - protein, 27 aa, Artificial Sequence
  Cyclic GFR-binding peptide
  MOD_RES (1)..(1): Xaa is C or S
XAPVKTSPISMLYIDNGRVLLYKQYEM

SEQ ID NO: 69566 - protein, 36 aa, Artificial Sequence; identical to SEQ ID NO: 22723
  Cyclic GFR-binding peptide
  MOD_RES (5)..(6): Xaa is C or S

SEQ ID NO: 69567 - protein, 24 aa, Artificial Sequence
  Cyclic GFR-binding peptide
SPISMLYINDKQQIIYKQYEGMVV

SEQ ID NO: 69568 - protein, 29 aa, Artificial Sequence
  Cyclic GFR-binding peptide
  MOD_RES (29)..(29): Xaa is C or S
RLSPISILYIDSANNVVYKQYEDMVVESX

SEQ ID NO: 69569 - protein, 33 aa, Artificial Sequence
  Cyclic GFR-binding peptide
  MOD_RES (32)..(32): Xaa is C or S
VPTRLSPISILYIDSANNVVYKQYEDMVVESXG

SEQ ID NO: 69570 - protein, 33 aa, Artificial Sequence
  Cyclic GFR-binding peptide
  MOD_RES (4)..(5): Xaa is C or S
AGPXXTPTKMSPISMLYINDKQQIIYKQYEGMV

SEQ ID NO: 69571 - protein, 31 aa, Artificial Sequence; identical to SEQ ID NO: 22727
  Cyclic GFR-binding peptide

SEQ ID NO: 69572 - protein, 32 aa, Artificial Sequence
  Cyclic GFR-binding peptide
  MOD_RES (6)..(7): Xaa is C or S
STPPTXXVPTRLSPISILYIDSANNVVYKQYE

SEQ ID NO: 69573 - protein, 27 aa, Artificial Sequence
  Cyclic GFR-binding peptide
  MOD_RES (27)..(27): Xaa is C or S
TSPISMLYIDNGRVLLYKQYEMIVEEX

SEQ ID NO: 69574 - protein, 40 aa, Artificial Sequence; identical to SEQ ID NO: 22731
  Cyclic GFR-binding peptide
  MOD_RES (4)..(5)..(37)..(39): Xaa is C or S

SEQ ID NO: 69575 - protein, 33 aa, Artificial Sequence
  Cyclic GFR-binding peptide
  MOD_RES (5)..(6): Xaa is C or S
TPPTXXVPTRLSPISILYIDSANNVVYKQYEDM

SEQ ID NO: 69576 - protein, 20 aa, Artificial Sequence
  Cyclic GFR-binding peptide
SPISMLYINDKQQIIYKQYE

SEQ ID NO: 69577 - protein, 34 aa, Artificial Sequence
  Cyclic GFR-binding peptide
  MOD_RES (3)..(4): Xaa is C or S
PTXXVPTRLSPISILYIDSANNVVYKQYEDMVVE

SEQ ID NO: 69578 - protein, 31 aa, Artificial Sequence
  Cyclic GFR-binding peptide
  MOD_RES (1)..(2): Xaa is C or S
XXVPTRLSPISILYIDSANNVVYKQYEDMVV

SEQ ID NO: 69579 - protein, 34 aa, Artificial Sequence
  Cyclic GFR-binding peptide
  MOD_RES (1)..(33): Xaa is C or S
XVPTRLSPISILYIDSANNVVYKQYEDMVVESXG

SEQ ID NO: 69580 - protein, 37 aa, Artificial Sequence
  Cyclic GFR-binding peptide
  MOD_RES (2)..(3)..(35)..(37): Xaa is C or S
TXXVPTRLSPISILYIDSANNVVYKQYEDMVVESXGX

SEQ ID NO: 69581 - protein, 34 aa, Artificial Sequence; identical to SEQ ID NO: 22735
  Cyclic GFR-binding peptide
  MOD_RES (2)..(3)..(34): Xaa is C or S

SEQ ID NO: 69582 - protein, 33 aa, Artificial Sequence
  Cyclic GFR-binding peptide
  MOD_RES (1)..(2): Xaa is C or S
XXVPTRLSPISILYIDSANNVVYKQYEDMVVES

SEQ ID NO: 69583 - protein, 29 aa, Artificial Sequence
  Cyclic GFR-binding peptide
  MOD_RES (3)..(4): Xaa is C or S
STXXAPVKTSPISMLYIDNGRVLLYKQYE

SEQ ID NO: 69584 - protein, 28 aa, Artificial Sequence
  Cyclic GFR-binding peptide
  MOD_RES (28)..(28): Xaa is C or S
LSPISILYIDSANNVVYKQYEDMVVESX

SEQ ID NO: 69585 - protein, 28 aa, Artificial Sequence
  Cyclic GFR-binding peptide
  MOD_RES (26)..(28): Xaa is C or S
SPISMLYIDNGRVLLYKQYEMIVEEXGX

SEQ ID NO: 69586 - protein, 34 aa, Artificial Sequence
  Cyclic GFR-binding peptide
  MOD_RES (31)..(33): Xaa is C or S
PTKMSPISMLYINDKQQIIYKQYEGMVVDRXGXS

SEQ ID NO: 69587 - protein, 25 aa, Artificial Sequence
  Cyclic GFR-binding peptide
APVKTSPISMLYIDNGRVLLYKQYE

SEQ ID NO: 69588 - protein, 30 aa, Artificial Sequence; identical to SEQ ID NO: 949
  Cyclic GFR-binding peptide

SEQ ID NO: 69589 - protein, 29 aa, Artificial Sequence
  Cyclic GFR-binding peptide
  MOD_RES (28)..(28): Xaa is C or S
KTSPISMLYIDNGRVLLYKQYEMIVEEXG

SEQ ID NO: 69590 - protein, 37 aa, Artificial Sequence; identical to SEQ ID NO: 22738
  Cyclic GFR-binding peptide
  MOD_RES (2)..(3)..(34)..(36): Xaa is C or S

SEQ ID NO: 69591 - protein, 36 aa, Artificial Sequence
  Cyclic GFR-binding peptide
  MOD_RES (6)..(7): Xaa is C or S
GSAGPXXTPTKMSPISMLYINDKQQIIYKQYEGMVV

SEQ ID NO: 69592 - protein, 33 aa, Artificial Sequence; identical to SEQ ID NO: 22741
  Cyclic GFR-binding peptide
  MOD_RES (2)..(3): Xaa is C or S

SEQ ID NO: 69593 - protein, 33 aa, Artificial Sequence
  Cyclic GFR-binding peptide
  MOD_RES (3)..(4): Xaa is C or S
PTXXVPTRLSPISILYIDSANNVVYKQYEDMVV

SEQ ID NO: 69594 - protein, 36 aa, Artificial Sequence
  Cyclic GFR-binding peptide
  MOD_RES (6)..(7): Xaa is C or S
HVPKPXXAPTKLSPISVLYIDDSSNVIYKQYENMVV

SEQ ID NO: 69595 - protein, 30 aa, Artificial Sequence
  Cyclic GFR-binding peptide
  MOD_RES (27)..(29): Xaa is C or S
SPISILYIDSANNVVYKQYEDMVVESXGXR

SEQ ID NO: 69596 - protein, 23 aa, Artificial Sequence
  Cyclic GFR-binding peptide
MSPISMLYINDKQQIIYKQYEGM

SEQ ID NO: 69597 - protein, 31 aa, Artificial Sequence
  Cyclic GFR-binding peptide
  MOD_RES (5)..(6): Xaa is C or S
TPPTXXVPTRLSPISILYIDSANNVVYKQYE

SEQ ID NO: 69598 - protein, 33 aa, Artificial Sequence; identical to SEQ ID NO: 22746
  Cyclic GFR-binding peptide
  MOD_RES (1)..(2)..(33): Xaa is C or S

SEQ ID NO: 69599 - protein, 34 aa, Artificial Sequence; identical to SEQ ID NO: 22747
  Cyclic GFR-binding peptide
  MOD_RES (3)..(4): Xaa is C or S

SEQ ID NO: 69600 - protein, 29 aa, Artificial Sequence
  Cyclic GFR-binding peptide
  MOD_RES (3)..(4): Xaa is C or S
PTXXVPTRLSPISILYIDSANNVVYKQYE

SEQ ID NO: 69601 - protein, 35 aa, Artificial Sequence
  Cyclic GFR-binding peptide
  MOD_RES (3)..(4): Xaa is C or S
PTXXVPTRLSPISILYIDSANNVVYKQYEDMVVES

SEQ ID NO: 69602 - protein, 35 aa, Artificial Sequence
  Cyclic GFR-binding peptide
  MOD_RES (5)..(6): Xaa is C or S
VPSTXXAPVKTSPISMLYIDNGRVLLYKQYEMIVE

SEQ ID NO: 69603 - protein, 21 aa, Artificial Sequence
  Cyclic GFR-binding peptide
SPISMLYINDKQQIIYKQYEG

SEQ ID NO: 69604 - protein, 39 aa, Artificial Sequence; identical to SEQ ID NO: 22752
  Cyclic GFR-binding peptide
  MOD_RES (3)..(4)..(36)..(38): Xaa is C or S

SEQ ID NO: 69605 - protein, 25 aa, Artificial Sequence
  Cyclic GFR-binding peptide
PVKTSPISMLYIDNGRVLLYKQYEM

SEQ ID NO: 69606 - protein, 27 aa, Artificial Sequence
  Cyclic GFR-binding peptide
TPTKMSPISMLYINDKQQIIYKQYEGM

SEQ ID NO: 69607 - protein, 29 aa, Artificial Sequence
  Cyclic GFR-binding peptide
  MOD_RES (29)..(29): Xaa is C or S
KMSPISMLYINDKQQIIYKQYEGMVVDRX

SEQ ID NO: 69608 - protein, 38 aa, Artificial Sequence
  Cyclic GFR-binding peptide
  MOD_RES (3)..(4)..(36)..(38): Xaa is C or S
PTXXVPTRLSPISILYIDSANNVVYKQYEDMVVESXGX

SEQ ID NO: 69609 - protein, 33 aa, Artificial Sequence
  Cyclic GFR-binding peptide
  MOD_RES (4)..(5): Xaa is C or S
PSTXXAPVKTSPISMLYIDNGRVLLYKQYEMIV

SEQ ID NO: 69610 - protein, 24 aa, Artificial Sequence
  Cyclic GFR-binding peptide
SPISMLYIDNGRVLLYKQYEMIVE

SEQ ID NO: 69611 - protein, 31 aa, Artificial Sequence
  Cyclic GFR-binding peptide
  MOD_RES (3)..(4): Xaa is C or S
GPXXTPTKMSPISMLYINDKQQIIYKQYEGM

SEQ ID NO: 69612 - protein, 38 aa, Artificial Sequence
  Cyclic GFR-binding peptide
  MOD_RES (6)..(7): Xaa is C or S
STPPTXXVPTRLSPISILYIDSANNVVYKQYEDMVVES

SEQ ID NO: 69613 - protein, 33 aa, Artificial Sequence
  Cyclic GFR-binding peptide
  MOD_RES (6)..(7): Xaa is C or S
GSAGPXXTPTKMSPISMLYINDKQQIIYKQYEG

SEQ ID NO: 69614 - protein, 37 aa, Artificial Sequence; identical to SEQ ID NO: 22768
  Cyclic GFR-binding peptide
  MOD_RES (6)..(7): Xaa is C or S

SEQ ID NO: 69615 - protein, 30 aa, Artificial Sequence
  Cyclic GFR-binding peptide
  MOD_RES (27)..(29): Xaa is C or S
SPISMLYINDKQQIIYKQYEGMVVDRXGXS

SEQ ID NO: 69616 - protein, 33 aa, Artificial Sequence
  Cyclic GFR-binding peptide
  MOD_RES (31)..(33): Xaa is C or S
PTKMSPISMLYINDKQQIIYKQYEGMVVDRXGX

SEQ ID NO: 69617 - protein, 41 aa, Artificial Sequence; identical to SEQ ID NO: 22769
  Cyclic GFR-binding peptide
  MOD_RES (6)..(7)..(38)..(40): Xaa is C or S

SEQ ID NO: 69618 - protein, 32 aa, Artificial Sequence; identical to SEQ ID NO: 22770
  Cyclic GFR-binding peptide
  MOD_RES (1)..(2): Xaa is C or S

SEQ ID NO: 69619 - protein, 29 aa, Artificial Sequence
  Cyclic GFR-binding peptide
  MOD_RES (2)..(3): Xaa is C or S
TXXVPTRLSPISILYIDSANNVVYKQYED

SEQ ID NO: 69620 - protein, 26 aa, Artificial Sequence
  Cyclic GFR-binding peptide
TPTKMSPISMLYINDKQQIIYKQYEG

SEQ ID NO: 69621 - protein, 34 aa, Artificial Sequence
  Cyclic GFR-binding peptide
  MOD_RES (4)..(5): Xaa is C or S
AGPXXTPTKMSPISMLYINDKQQIIYKQYEGMVV

SEQ ID NO: 69622 - protein, 30 aa, Artificial Sequence; identical to SEQ ID NO: 22774
  Cyclic GFR-binding peptide

SEQ ID NO: 69623 - protein, 35 aa, Artificial Sequence; identical to SEQ ID NO: 22777
  Cyclic GFR-binding peptide
  MOD_RES (2)..(3)..(35): Xaa is C or S

SEQ ID NO: 69624 - protein, 37 aa, Artificial Sequence; identical to SEQ ID NO: 22778
  Cyclic GFR-binding peptide
  MOD_RES (4)..(5)..(36): Xaa is C or S

SEQ ID NO: 69625 - protein, 34 aa, Artificial Sequence
  Cyclic GFR-binding peptide
  MOD_RES (4)..(5): Xaa is C or S
PPTXXVPTRLSPISILYIDSANNVVYKQYEDMVV

SEQ ID NO: 69626 - protein, 32 aa, Artificial Sequence
  Cyclic GFR-binding peptide
  MOD_RES (2)..(3): Xaa is C or S
TXXAPVKTSPISMLYIDNGRVLLYKQYEMIVE

SEQ ID NO: 69627 - protein, 35 aa, Artificial Sequence; identical to SEQ ID NO: 22780
  Cyclic GFR-binding peptide
  MOD_RES (1)..(32)..(34): Xaa is C or S

SEQ ID NO: 69628 - protein, 39 aa, Artificial Sequence
  Cyclic GFR-binding peptide
  MOD_RES (4)..(5)..(37)..(39): Xaa is C or S
PPTXXVPTRLSPISILYIDSANNVVYKQYEDMVVESXGX

SEQ ID NO: 69629 - protein, 32 aa, Artificial Sequence
  Cyclic GFR-binding peptide
  MOD_RES (30)..(32): Xaa is C or S
PVKTSPISMLYIDNGRVLLYKQYEMIVEEXGX

SEQ ID NO: 69630 - protein, 26 aa, Artificial Sequence
  Cyclic GFR-binding peptide
  MOD_RES (1)..(1): Xaa is C or S
XVPTRLSPISILYIDSANNVVYKQYE

SEQ ID NO: 69631 - protein, 33 aa, Artificial Sequence
  Cyclic GFR-binding peptide
  MOD_RES (30)..(32): Xaa is C or S
TRLSPISILYIDSANNVVYKQYEDMVVESXGXR

SEQ ID NO: 69632 - protein, 26 aa, Artificial Sequence
  Cyclic GFR-binding peptide
TKMSPISMLYINDKQQIIYKQYEGMV

SEQ ID NO: 69633 - protein, 26 aa, Artificial Sequence
  Cyclic GFR-binding peptide
PVKTSPISMLYIDNGRVLLYKQYEMI

SEQ ID NO: 69634 - protein, 32 aa, Artificial Sequence
  Cyclic GFR-binding peptide
  MOD_RES (5)..(6): Xaa is C or S
SAGPXXTPTKMSPISMLYINDKQQIIYKQYEG

SEQ ID NO: 69635 - protein, 31 aa, Artificial Sequence
  Cyclic GFR-binding peptide
  MOD_RES (1)..(1): Xaa is C or S
XVPTRLSPISILYIDSANNVVYKQYEDMVVE

SEQ ID NO: 69636 - protein, 26 aa, Artificial Sequence
  Cyclic GFR-binding peptide
PTRLSPISILYIDSANNVVYKQYEDM

SEQ ID NO: 69637 - protein, 32 aa, Artificial Sequence
  Cyclic GFR-binding peptide
  MOD_RES (4)..(5): Xaa is C or S
AGPXXTPTKMSPISMLYINDKQQIIYKQYEGM

SEQ ID NO: 69638 - protein, 34 aa, Artificial Sequence
  Cyclic GFR-binding peptide
  MOD_RES (6)..(7): Xaa is C or S
GSAGPXXTPTKMSPISMLYINDKQQIIYKQYEGM

SEQ ID NO: 69639 - protein, 32 aa, Artificial Sequence
  Cyclic GFR-binding peptide
  MOD_RES (29)..(31): Xaa is C or S
VKTSPISMLYIDNGRVLLYKQYEMIVEEXGXL

SEQ ID NO: 69640 - protein, 37 aa, Artificial Sequence
  Cyclic GFR-binding peptide
  MOD_RES (4)..(5)..(37): Xaa is C or S
PPTXXVPTRLSPISILYIDSANNVVYKQYEDMVVESX

SEQ ID NO: 69641 - protein, 22 aa, Artificial Sequence
  Cyclic GFR-binding peptide
SPISILYIDSANNVVYKQYEDM

SEQ ID NO: 69642 - protein, 32 aa, Artificial Sequence
  Cyclic GFR-binding peptide
  MOD_RES (3)..(4): Xaa is C or S
STXXAPVKTSPISMLYIDNGRVLLYKQYEMIV

SEQ ID NO: 69643 - protein, 38 aa, Artificial Sequence
  Cyclic GFR-binding peptide
  MOD_RES (5)..(6)..(38): Xaa is C or S
TPPTXXVPTRLSPISILYIDSANNVVYKQYEDMVVESX

SEQ ID NO: 69644 - protein, 32 aa, Artificial Sequence
  Cyclic GFR-binding peptide
  MOD_RES (5)..(6): Xaa is C or S
TPPTXXVPTRLSPISILYIDSANNVVYKQYED

SEQ ID NO: 69645 - protein, 38 aa, Artificial Sequence; identical to SEQ ID NO: 22796
  Cyclic GFR-binding peptide
  MOD_RES (6)..(7): Xaa is C or S

SEQ ID NO: 69646 - protein, 22 aa, Artificial Sequence
  Cyclic GFR-binding peptide
KMSPISMLYINDKQQIIYKQYE

SEQ ID NO: 69647 - protein, 39 aa, Artificial Sequence; identical to SEQ ID NO: 22799
  Cyclic GFR-binding peptide
  MOD_RES (6)..(7)..(38): Xaa is C or S

SEQ ID NO: 69648 - protein, 41 aa, Artificial Sequence; identical to SEQ ID NO: 22801
  Cyclic GFR-binding peptide
  MOD_RES (6)..(7)..(39)..(41): Xaa is C or S

SEQ ID NO: 69649 - protein, 35 aa, Artificial Sequence
  Cyclic GFR-binding peptide
  MOD_RES (2)..(3)..(35): Xaa is C or S
TXXVPTRLSPISILYIDSANNVVYKQYEDMVVESX

SEQ ID NO: 69650 - protein, 42 aa, Artificial Sequence; identical to SEQ ID NO: 22802
  Cyclic GFR-binding peptide
  MOD_RES (6)..(7)..(39)..(41): Xaa is C or S

SEQ ID NO: 69651 - protein, 40 aa, Artificial Sequence
  Cyclic GFR-binding peptide
  MOD_RES (6)..(7)..(39): Xaa is C or S
STPPTXXVPTRLSPISILYIDSANNVVYKQYEDMVVESXG

SEQ ID NO: 69652 - protein, 31 aa, Artificial Sequence
  Cyclic GFR-binding peptide
  MOD_RES (30)..(30): Xaa is C or S
TKMSPISMLYINDKQQIIYKQYEGMVVDRXG

SEQ ID NO: 69653 - protein, 31 aa, Artificial Sequence; identical to SEQ ID NO: 22809
  Cyclic GFR-binding peptide
  MOD_RES (31)..(31): Xaa is C or S

SEQ ID NO: 69654 - protein, 27 aa, Artificial Sequence
  Cyclic GFR-binding peptide
  MOD_RES (1)..(2): Xaa is C or S
XXVPTRLSPISILYIDSANNVVYKQYE

SEQ ID NO: 69655 - protein, 29 aa, Artificial Sequence
  Cyclic GFR-binding peptide
  MOD_RES (28)..(28): Xaa is C or S
MSPISMLYINDKQQIIYKQYEGMVVDRXG

SEQ ID NO: 69656 - protein, 37 aa, Artificial Sequence; identical to SEQ ID NO: 22818
  Cyclic GFR-binding peptide
  MOD_RES (1)..(2)..(34)..(36): Xaa is C or S

SEQ ID NO: 69657 - protein, 24 aa, Artificial Sequence
  Cyclic GFR-binding peptide
MSPISMLYINDKQQIIYKQYEGMV

SEQ ID NO: 69658 - protein, 33 aa, Artificial Sequence
  Cyclic GFR-binding peptide
  MOD_RES (5)..(6): Xaa is C or S
VPSTXXAPVKTSPISMLYIDNGRVLLYKQYEMI

SEQ ID NO: 69659 - protein, 29 aa, Artificial Sequence
  Cyclic GFR-binding peptide
  MOD_RES (27)..(29): Xaa is C or S
TSPISMLYIDNGRVLLYKQYEMIVEEXGX

SEQ ID NO: 69660 - protein, 28 aa, Artificial Sequence
  Cyclic GFR-binding peptide
KMSPISMLYINDKQQIIYKQYEGMVVDR

SEQ ID NO: 69661 - protein, 28 aa, Artificial Sequence
  Cyclic GFR-binding peptide
PTKMSPISMLYINDKQQIIYKQYEGMVV

SEQ ID NO: 69662 - protein, 33 aa, Artificial Sequence
  Cyclic GFR-binding peptide
  MOD_RES (6)..(7): Xaa is C or S
HVPKPXXAPTKLSPISVLYIDDSSNVIYKQYEN

SEQ ID NO: 69663 - protein, 29 aa, Artificial Sequence
  Cyclic GFR-binding peptide
  MOD_RES (1)..(1): Xaa is C or S
XTPTKMSPISMLYINDKQQIIYKQYEGMV

SEQ ID NO: 69664 - protein, 39 aa, Artificial Sequence; identical to SEQ ID NO: 22826
  Cyclic GFR-binding peptide
  MOD_RES (6)..(7)..(39): Xaa is C or S

SEQ ID NO: 69665 - protein, 29 aa, Artificial Sequence
  Cyclic GFR-binding peptide
TRLSPISILYIDSANNVVYKQYEDMVVES

SEQ ID NO: 69666 - protein, 25 aa, Artificial Sequence
  Cyclic GFR-binding peptide
TPTKMSPISMLYINDKQQIIYKQYE

SEQ ID NO: 69667 - protein, 24 aa, Artificial Sequence
  Cyclic GFR-binding peptide
SPISILYIDSANNVVYKQYEDMVV

SEQ ID NO: 69668 - protein, 30 aa, Artificial Sequence
  Cyclic GFR-binding peptide
  MOD_RES (28)..(30): Xaa is C or S
LSPISILYIDSANNVVYKQYEDMVVESXGX

SEQ ID NO: 69669 - protein, 30 aa, Artificial Sequence
  Cyclic GFR-binding peptide
PTKMSPISMLYINDKQQIIYKQYEGMVVDR

SEQ ID NO: 69670 - protein, 27 aa, Artificial Sequence
  Cyclic GFR-binding peptide
KTSPISMLYIDNGRVLLYKQYEMIVEE

SEQ ID NO: 69671 - protein, 27 aa, Artificial Sequence
  Cyclic GFR-binding peptide
TKMSPISMLYINDKQQIIYKQYEGMVV

SEQ ID NO: 69672 - protein, 31 aa, Artificial Sequence
  Cyclic GFR-binding peptide
  MOD_RES (2)..(3): Xaa is C or S
PXXTPTKMSPISMLYINDKQQIIYKQYEGMV

SEQ ID NO: 69673 - protein, 25 aa, Artificial Sequence
  Cyclic GFR-binding peptide
VKTSPISMLYIDNGRVLLYKQYEMI

SEQ ID NO: 69674 - protein, 32 aa, Artificial Sequence; identical to SEQ ID NO: 22828
  Cyclic GFR-binding peptide
  MOD_RES (1)..(1): Xaa is C or S

SEQ ID NO: 69675 - protein, 34 aa, Artificial Sequence
  Cyclic GFR-binding peptide
  MOD_RES (5)..(6): Xaa is C or S
VPSTXXAPVKTSPISMLYIDNGRVLLYKQYEMIV

SEQ ID NO: 69676 - protein, 33 aa, Artificial Sequence
  Cyclic GFR-binding peptide
  MOD_RES (30)..(32): Xaa is C or S
PVKTSPISMLYIDNGRVLLYKQYEMIVEEXGXL

SEQ ID NO: 69677 - protein, 25 aa, Artificial Sequence
  Cyclic GFR-binding peptide
SPISILYIDSANNVVYKQYEDMVVE

SEQ ID NO: 69678 - protein, 39 aa, Artificial Sequence
  Cyclic GFR-binding peptide
  MOD_RES (3)..(4)..(36)..(38): Xaa is C or S
PTXXVPTRLSPISILYIDSANNVVYKQYEDMVVESXGXR

SEQ ID NO: 69679 - protein, 31 aa, Artificial Sequence
  Cyclic GFR-binding peptide
  MOD_RES (3)..(4): Xaa is C or S
PTXXVPTRLSPISILYIDSANNVVYKQYEDM

SEQ ID NO: 69680 - protein, 28 aa, Artificial Sequence
  Cyclic GFR-binding peptide
VKTSPISMLYIDNGRVLLYKQYEMIVEE

SEQ ID NO: 69681 - protein, 25 aa, Artificial Sequence
  Cyclic GFR-binding peptide
KTSPISMLYIDNGRVLLYKQYEMIV

SEQ ID NO: 69682 - protein, 28 aa, Artificial Sequence
  Cyclic GFR-binding peptide
  MOD_RES (1)..(2): Xaa is C or S
XXVPTRLSPISILYIDSANNVVYKQYED

SEQ ID NO: 69683 - protein, 30 aa, Artificial Sequence
  Cyclic GFR-binding peptide
  MOD_RES (1)..(2): Xaa is C or S
XXAPVKTSPISMLYIDNGRVLLYKQYEMIV

SEQ ID NO: 69684 - protein, 32 aa, Artificial Sequence
  Cyclic GFR-binding peptide
  MOD_RES (30)..(32): Xaa is C or S
TKMSPISMLYINDKQQIIYKQYEGMVVDRXGX

SEQ ID NO: 69685 - protein, 36 aa, Artificial Sequence
  Cyclic GFR-binding peptide
  MOD_RES (4)..(5): Xaa is C or S
PPTXXVPTRLSPISILYIDSANNVVYKQYEDMVVES

SEQ ID NO: 69686 - protein, 35 aa, Artificial Sequence; identical to SEQ ID NO: 22837
  Cyclic GFR-binding peptide
  MOD_RES (3)..(4): Xaa is C or S

SEQ ID NO: 69687 - protein, 31 aa, Artificial Sequence
  Cyclic GFR-binding peptide
  MOD_RES (28)..(30): Xaa is C or S
LSPISILYIDSANNVVYKQYEDMVVESXGXR

SEQ ID NO: 69688 - protein, 27 aa, Artificial Sequence
  Cyclic GFR-binding peptide
  MOD_RES (1)..(1): Xaa is C or S
XVPTRLSPISILYIDSANNVVYKQYED

SEQ ID NO: 69689 - protein, 28 aa, Artificial Sequence
  Cyclic GFR-binding peptide
PTRLSPISILYIDSANNVVYKQYEDMVV

SEQ ID NO: 69690 - protein, 30 aa, Artificial Sequence
  Cyclic GFR-binding peptide
  MOD_RES (29)..(29): Xaa is C or S
VKTSPISMLYIDNGRVLLYKQYEMIVEEXG

SEQ ID NO: 69691 - protein, 27 aa, Artificial Sequence
  Cyclic GFR-binding peptide
  MOD_RES (1)..(1): Xaa is C or S
XTPTKMSPISMLYINDKQQIIYKQYEG

SEQ ID NO: 69692 - protein, 24 aa, Artificial Sequence
  Cyclic GFR-binding peptide
RLSPISILYIDSANNVVYKQYEDM

SEQ ID NO: 69693 - protein, 25 aa, Artificial Sequence
  Cyclic GFR-binding peptide
TKMSPISMLYINDKQQIIYKQYEGM

SEQ ID NO: 69694 - protein, 32 aa, Artificial Sequence
  Cyclic GFR-binding peptide
  MOD_RES (30)..(32): Xaa is C or S
TRLSPISILYIDSANNVVYKQYEDMVVESXGX

SEQ ID NO: 69695 - protein, 38 aa, Artificial Sequence; identical to SEQ ID NO: 22843
  Cyclic GFR-binding peptide
  MOD_RES (6)..(7)..(38): Xaa is C or S

SEQ ID NO: 69696 - protein, 29 aa, Artificial Sequence
  Cyclic GFR-binding peptide
PVKTSPISMLYIDNGRVLLYKQYEMIVEE

SEQ ID NO: 69697 - protein, 37 aa, Artificial Sequence
  Cyclic GFR-binding peptide
  MOD_RES (6)..(7): Xaa is C or S
STPPTXXVPTRLSPISILYIDSANNVVYKQYEDMVVE

SEQ ID NO: 69698 - protein, 28 aa, Artificial Sequence
  Cyclic GFR-binding peptide
  MOD_RES (2)..(3): Xaa is C or S
TXXAPVKTSPISMLYIDNGRVLLYKQYE

SEQ ID NO: 69699 - protein, 25 aa, Artificial Sequence
  Cyclic GFR-binding peptide
TSPISMLYIDNGRVLLYKQYEMIVE

SEQ ID NO: 69700 - protein, 25 aa, Artificial Sequence
  Cyclic GFR-binding peptide
PTKMSPISMLYINDKQQIIYKQYEG

SEQ ID NO: 69701 - protein, 22 aa, Artificial Sequence
  Cyclic GFR-binding peptide
KTSPISMLYIDNGRVLLYKQYE

SEQ ID NO: 69702 - protein, 32 aa, Artificial Sequence
  Cyclic GFR-binding peptide
  MOD_RES (31)..(31): Xaa is C or S
PTRLSPISILYIDSANNVVYKQYEDMVVESXG

SEQ ID NO: 69703 - protein, 36 aa, Artificial Sequence; identical to SEQ ID NO: 22850
  Cyclic GFR-binding peptide
  MOD_RES (3)..(4)..(35): Xaa is C or S

SEQ ID NO: 69704 - protein, 32 aa, Artificial Sequence
  Cyclic GFR-binding peptide
  MOD_RES (29)..(31): Xaa is C or S
KMSPISMLYINDKQQIIYKQYEGMVVDRXGXS

SEQ ID NO: 69705 - protein, 29 aa, Artificial Sequence
  Cyclic GFR-binding peptide
  MOD_RES (28)..(28): Xaa is C or S
LSPISILYIDSANNVVYKQYEDMVVESXG

SEQ ID NO: 69706 - protein, 37 aa, Artificial Sequence; identical to SEQ ID NO: 22854
  Cyclic GFR-binding peptide
  MOD_RES (5)..(6): Xaa is C or S

SEQ ID NO: 69707 - protein, 24 aa, Artificial Sequence
  Cyclic GFR-binding peptide
TKMSPISMLYINDKQQIIYKQYEG

SEQ ID NO: 69708 - protein, 38 aa, Artificial Sequence; identical to SEQ ID NO: 22667
  Cyclic GFR-binding peptide
  MOD_RES (5)..(6)..(37): Xaa is C or S

SEQ ID NO: 69709 - protein, 34 aa, Artificial Sequence
  Cyclic GFR-binding peptide
  MOD_RES (6)..(7): Xaa is C or S
STPPTXXVPTRLSPISILYIDSANNVVYKQYEDM

SEQ ID NO: 69710 - protein, 26 aa, Artificial Sequence
  Cyclic GFR-binding peptide
KTSPISMLYIDNGRVLLYKQYEMIVE

SEQ ID NO: 69711 - protein, 29 aa, Artificial Sequence
  Cyclic GFR-binding peptide
VPTRLSPISILYIDSANNVVYKQYEDMVV

SEQ ID NO: 69712 - protein, 29 aa, Artificial Sequence
  Cyclic GFR-binding peptide
  MOD_RES (1)..(2): Xaa is C or S
XXTPTKMSPISMLYINDKQQIIYKQYEGM

SEQ ID NO: 69713 - protein, 26 aa, Artificial Sequence
  Cyclic GFR-binding peptide
  MOD_RES (26)..(26): Xaa is C or S
SPISMLYIDNGRVLLYKQYEMIVEEX

SEQ ID NO: 69714 - protein, 26 aa, Artificial Sequence
  Cyclic GFR-binding peptide
RLSPISILYIDSANNVVYKQYEDMVV

SEQ ID NO: 69715 - protein, 31 aa, Artificial Sequence
  Cyclic GFR-binding peptide
  MOD_RES (30)..(30): Xaa is C or S
TRLSPISILYIDSANNVVYKQYEDMVVESXG

SEQ ID NO: 69716 - protein, 21 aa, Artificial Sequence
  Cyclic GFR-binding peptide
SPISMLYIDNGRVLLYKQYEM

SEQ ID NO: 69717 - protein, 35 aa, Artificial Sequence; identical to SEQ ID NO: 22674
  Cyclic GFR-binding peptide
  MOD_RES (2)..(3)..(34): Xaa is C or S

SEQ ID NO: 69718 - protein, 37 aa, Artificial Sequence; identical to SEQ ID NO: 22675
  Cyclic GFR-binding peptide
  MOD_RES (3)..(4)..(35)..(37): Xaa is C or S

SEQ ID NO: 69719 - protein, 33 aa, Artificial Sequence
  Cyclic GFR-binding peptide
  MOD_RES (31)..(33): Xaa is C or S
PTRLSPISILYIDSANNVVYKQYEDMVVESXGX

SEQ ID NO: 69720 - protein, 23 aa, Artificial Sequence
  Cyclic GFR-binding peptide
SPISMLYINDKQQIIYKQYEGMV

SEQ ID NO: 69721 - protein, 36 aa, Artificial Sequence; identical to SEQ ID NO: 22678
  Cyclic GFR-binding peptide
  MOD_RES (3)..(4)..(36): Xaa is C or S

SEQ ID NO: 69722 - protein, 39 aa, Artificial Sequence
  Cyclic GFR-binding peptide
  MOD_RES (6)..(7)..(39): Xaa is C or S
STPPTXXVPTRLSPISILYIDSANNVVYKQYEDMVVESX

SEQ ID NO: 69723 - protein, 34 aa, Artificial Sequence
  Cyclic GFR-binding peptide
  MOD_RES (1)..(2)..(34): Xaa is C or S
XXVPTRLSPISILYIDSANNVVYKQYEDMVVESX

SEQ ID NO: 69724 - protein, 24 aa, Artificial Sequence
  Cyclic GFR-binding peptide
KTSPISMLYIDNGRVLLYKQYEMI

SEQ ID NO: 69725 - protein, 31 aa, Artificial Sequence
  Cyclic GFR-binding peptide
  MOD_RES (30)..(30): Xaa is C or S
PVKTSPISMLYIDNGRVLLYKQYEMIVEEXG

SEQ ID NO: 69726 - protein, 23 aa, Artificial Sequence
  Cyclic GFR-binding peptide
KMSPISMLYINDKQQIIYKQYEG

SEQ ID NO: 69727 - protein, 39 aa, Artificial Sequence; identical to SEQ ID NO: 22683
  Cyclic GFR-binding peptide
  MOD_RES (5)..(6)..(38): Xaa is C or S

SEQ ID NO: 69728 - protein, 25 aa, Artificial Sequence
  Cyclic GFR-binding peptide
PTRLSPISILYIDSANNVVYKQYED

SEQ ID NO: 69729 - protein, 27 aa, Artificial Sequence
  Cyclic GFR-binding peptide
VKTSPISMLYIDNGRVLLYKQYEMIVE

SEQ ID NO: 69730 - protein, 37 aa, Artificial Sequence
  Cyclic GFR-binding peptide
  MOD_RES (1)..(2)..(34)..(36): Xaa is C or S
XXVPTRLSPISILYIDSANNVVYKQYEDMVVESXGXR

SEQ ID NO: 69731 - protein, 28 aa, Artificial Sequence
  Cyclic GFR-binding peptide
  MOD_RES (27)..(27): Xaa is C or S
SPISMLYINDKQQIIYKQYEGMVVDRXG

SEQ ID NO: 69732 - protein, 32 aa, Artificial Sequence
  Cyclic GFR-binding peptide
  MOD_RES (1)..(2): Xaa is C or S
XXVPTRLSPISILYIDSANNVVYKQYEDMVVE

SEQ ID NO: 69733 - protein, 31 aa, Artificial Sequence
  Cyclic GFR-binding peptide
  MOD_RES (1)..(2): Xaa is C or S
XXTPTKMSPISMLYINDKQQIIYKQYEGMVV

SEQ ID NO: 69734 - protein, 35 aa, Artificial Sequence
  Cyclic GFR-binding peptide
  MOD_RES (1)..(2)..(34): Xaa is C or S
XXVPTRLSPISILYIDSANNVVYKQYEDMVVESXG

SEQ ID NO: 69735 - protein, 30 aa, Artificial Sequence
  Cyclic GFR-binding peptide
  MOD_RES (4)..(5): Xaa is C or S
PSTXXAPVKTSPISMLYIDNGRVLLYKQYE

SEQ ID NO: 69736 - protein, 36 aa, Artificial Sequence
  Cyclic GFR-binding peptide
  MOD_RES (5)..(6): Xaa is C or S
TPPTXXVPTRLSPISILYIDSANNVVYKQYEDMVVE

SEQ ID NO: 69737 - protein, 33 aa, Artificial Sequence
  Cyclic GFR-binding peptide
  MOD_RES (4)..(5): Xaa is C or S
PPTXXVPTRLSPISILYIDSANNVVYKQYEDMV

SEQ ID NO: 69738 - protein, 29 aa, Artificial Sequence
  Cyclic GFR-binding peptide
PTKMSPISMLYINDKQQIIYKQYEGMVVD

SEQ ID NO: 69739 - protein, 28 aa, Artificial Sequence
  Cyclic GFR-binding peptide
  MOD_RES (1)..(2): Xaa is C or S
XXTPTKMSPISMLYINDKQQIIYKQYEG

SEQ ID NO: 69740 - protein, 27 aa, Artificial Sequence
  Cyclic GFR-binding peptide
TRLSPISILYIDSANNVVYKQYEDMVV

SEQ ID NO: 69741 - protein, 27 aa, Artificial Sequence
  Cyclic GFR-binding peptide
PTRLSPISILYIDSANNVVYKQYEDMV

SEQ ID NO: 69742 - protein, 32 aa, Artificial Sequence
  Cyclic GFR-binding peptide
  MOD_RES (2)..(3): Xaa is C or S
PXXTPTKMSPISMLYINDKQQIIYKQYEGMVV

SEQ ID NO: 69743 - protein, 35 aa, Artificial Sequence; identical to SEQ ID NO: 22691
  Cyclic GFR-binding peptide
  MOD_RES (1)..(33)..(35): Xaa is C or S

SEQ ID NO: 69744 - protein, 30 aa, Artificial Sequence
  Cyclic GFR-binding peptide
  MOD_RES (28)..(30): Xaa is C or S
MSPISMLYINDKQQIIYKQYEGMVVDRXGX

SEQ ID NO: 69745 - protein, 27 aa, Artificial Sequence
  Cyclic GFR-binding peptide
APVKTSPISMLYIDNGRVLLYKQYEMI

SEQ ID NO: 69746 - protein, 33 aa, Artificial Sequence
  Cyclic GFR-binding peptide
  MOD_RES (30)..(32): Xaa is C or S
TKMSPISMLYINDKQQIIYKQYEGMVVDRXGXS

SEQ ID NO: 69747 - protein, 25 aa, Artificial Sequence
  Cyclic GFR-binding peptide
MSPISMLYINDKQQIIYKQYEGMVV

SEQ ID NO: 69748 - protein, 27 aa, Artificial Sequence
  Cyclic GFR-binding peptide
PTKMSPISMLYINDKQQIIYKQYEGMV

SEQ ID NO: 69749 - protein, 32 aa, Artificial Sequence; identical to SEQ ID NO: 22695
  Cyclic GFR-binding peptide
  MOD_RES (32)..(32): Xaa is C or S

SEQ ID NO: 69750 - protein, 32 aa, Artificial Sequence
  Cyclic GFR-binding peptide
  MOD_RES (5)..(6): Xaa is C or S
VPSTXXAPVKTSPISMLYIDNGRVLLYKQYEM

SEQ ID NO: 69751 - protein, 20 aa, Artificial Sequence
  Cyclic GFR-binding peptide
SPISILYIDSANNVVYKQYE

SEQ ID NO: 69752 - protein, 37 aa, Artificial Sequence; identical to SEQ ID NO: 22696
  Cyclic GFR-binding peptide
  MOD_RES (5)..(6)..(37): Xaa is C or S

SEQ ID NO: 69753 - protein, 33 aa, Artificial Sequence
  Cyclic GFR-binding peptide
  MOD_RES (6)..(7): Xaa is C or S
STPPTXXVPTRLSPISILYIDSANNVVYKQYED

SEQ ID NO: 69754 - protein, 30 aa, Artificial Sequence
  Cyclic GFR-binding peptide
  MOD_RES (1)..(1): Xaa is C or S
XVPTRLSPISILYIDSANNVVYKQYEDMVV

SEQ ID NO: 69755 - protein, 31 aa, Artificial Sequence
  Cyclic GFR-binding peptide
  MOD_RES (4)..(5): Xaa is C or S
PPTXXVPTRLSPISILYIDSANNVVYKQYED

SEQ ID NO: 69756 - protein, 38 aa, Artificial Sequence
  Cyclic GFR-binding peptide
  MOD_RES (2)..(3)..(35)..(37): Xaa is C or S
TXXVPTRLSPISILYIDSANNVVYKQYEDMVVESXGXR

SEQ ID NO: 69757 - protein, 34 aa, Artificial Sequence
  Cyclic GFR-binding peptide
  MOD_RES (31)..(33): Xaa is C or S
PTRLSPISILYIDSANNVVYKQYEDMVVESXGXR

SEQ ID NO: 69758 - protein, 31 aa, Artificial Sequence
  Cyclic GFR-binding peptide
  MOD_RES (2)..(3): Xaa is C or S
TXXAPVKTSPISMLYIDNGRVLLYKQYEMIV

SEQ ID NO: 69759 - protein, 32 aa, Artificial Sequence; identical to SEQ ID NO: 22700
  Cyclic GFR-binding peptide
  MOD_RES (1)..(2): Xaa is C or S

SEQ ID NO: 69760 - protein, 24 aa, Artificial Sequence
  Cyclic GFR-binding peptide
PTKMSPISMLYINDKQQIIYKQYE

SEQ ID NO: 69761 - protein, 32 aa, Artificial Sequence
  Cyclic GFR-binding peptide
  MOD_RES (1)..(1): Xaa is C or S
XVPTRLSPISILYIDSANNVVYKQYEDMVVES

SEQ ID NO: 69762 - protein, 35 aa, Artificial Sequence; identical to SEQ ID NO: 22703
  Cyclic GFR-binding peptide
  MOD_RES (1)..(2)..(34): Xaa is C or S

SEQ ID NO: 69763 - protein, 35 aa, Artificial Sequence; identical to SEQ ID NO: 22704
  Cyclic GFR-binding peptide
  MOD_RES (4)..(5): Xaa is C or S

SEQ ID NO: 69764 - protein, 27 aa, Artificial Sequence
  Cyclic GFR-binding peptide
PVKTSPISMLYIDNGRVLLYKQYEMIV

SEQ ID NO: 69765 - protein, 32 aa, Artificial Sequence
  Cyclic GFR-binding peptide
  MOD_RES (6)..(7): Xaa is C or S
RVPSTXXAPVKTSPISMLYIDNGRVLLYKQYE

SEQ ID NO: 69766 - protein, 21 aa, Artificial Sequence
  Cyclic GFR-binding peptide
TSPISMLYIDNGRVLLYKQYE

SEQ ID NO: 69767 - protein, 23 aa, Artificial Sequence
  Cyclic GFR-binding peptide
RLSPISILYIDSANNVVYKQYED

SEQ ID NO: 69768 - protein, 24 aa, Artificial Sequence
  Cyclic GFR-binding peptide
LSPISILYIDSANNVVYKQYEDMV

SEQ ID NO: 69769 - protein, 28 aa, Artificial Sequence
  Cyclic GFR-binding peptide
TRLSPISILYIDSANNVVYKQYEDMVVE

SEQ ID NO: 69770 - protein, 35 aa, Artificial Sequence
  Cyclic GFR-binding peptide
  MOD_RES (32)..(34): Xaa is C or S
VPTRLSPISILYIDSANNVVYKQYEDMVVESXGXR

SEQ ID NO: 69771 - protein, 34 aa, Artificial Sequence
  Cyclic GFR-binding peptide
  MOD_RES (2)..(3): Xaa is C or S
PXXTPTKMSPISMLYINDKQQIIYKQYEGMVVDR

SEQ ID NO: 69772 - protein, 22 aa, Artificial Sequence
  Cyclic GFR-binding peptide
RLSPISILYIDSANNVVYKQYE

SEQ ID NO: 69773 - protein, 26 aa, Artificial Sequence
  Cyclic GFR-binding peptide
VPTRLSPISILYIDSANNVVYKQYED

SEQ ID NO: 69774 - protein, 20 aa, Artificial Sequence
  Cyclic GFR-binding peptide
SPISMLYINDKQQIIYKQYE

SEQ ID NO: 69775 - protein, 41 aa, Artificial Sequence; identical to SEQ ID NO: 22709
  Cyclic GFR-binding peptide
  MOD_RES (6)..(7)..(39)..(41): Xaa is C or S

SEQ ID NO: 69776 - protein, 36 aa, Artificial Sequence
  Cyclic GFR-binding peptide
  MOD_RES (1)..(2)..(34)..(36): Xaa is C or S
XXVPTRLSPISILYIDSANNVVYKQYEDMVVESXGX

SEQ ID NO: 69777 - protein, 33 aa, Artificial Sequence; identical to SEQ ID NO: 22710
  Cyclic GFR-binding peptide
  MOD_RES (2)..(3): Xaa is C or S

SEQ ID NO: 69778 - protein, 23 aa, Artificial Sequence
  Cyclic GFR-binding peptide
LSPISILYIDSANNVVYKQYEDM

SEQ ID NO: 69779 - protein, 26 aa, Artificial Sequence
  Cyclic GFR-binding peptide
  MOD_RES (1)..(1): Xaa is C or S
XAPVKTSPISMLYIDNGRVLLYKQYE

SEQ ID NO: 69780 - protein, 23 aa, Artificial Sequence
  Cyclic GFR-binding peptide
KTSPISMLYIDNGRVLLYKQYEM

SEQ ID NO: 69781 - protein, 29 aa, Artificial Sequence
  Cyclic GFR-binding peptide
PTRLSPISILYIDSANNVVYKQYEDMVVE

SEQ ID NO: 69782 - protein, 34 aa, Artificial Sequence
  Cyclic GFR-binding peptide
  MOD_RES (4)..(5): Xaa is C or S
PSTXXAPVKTSPISMLYIDNGRVLLYKQYEMIVE

SEQ ID NO: 69783 - protein, 34 aa, Artificial Sequence; identical to SEQ ID NO: 22716
  Cyclic GFR-binding peptide
  MOD_RES (31)..(33): Xaa is C or S

SEQ ID NO: 69784 - protein, 36 aa, Artificial Sequence
  Cyclic GFR-binding peptide
  MOD_RES (2)..(3)..(35): Xaa is C or S
TXXVPTRLSPISILYIDSANNVVYKQYEDMVVESXG

SEQ ID NO: 69785 - protein, 33 aa, Artificial Sequence
  Cyclic GFR-binding peptide
  MOD_RES (5)..(6): Xaa is C or S
SAGPXXTPTKMSPISMLYINDKQQIIYKQYEGM

SEQ ID NO: 69786 - protein, 25 aa, Artificial Sequence
  Cyclic GFR-binding peptide
KMSPISMLYINDKQQIIYKQYEGMV

SEQ ID NO: 69787 - protein, 30 aa, Artificial Sequence
  Cyclic GFR-binding peptide
  MOD_RES (28)..(30): Xaa is C or S
KTSPISMLYIDNGRVLLYKQYEMIVEEXGX

SEQ ID NO: 69788 - protein, 40 aa, Artificial Sequence; identical to SEQ ID NO: 22722
  Cyclic GFR-binding peptide
  MOD_RES (5)..(6)..(37)..(39): Xaa is C or S

SEQ ID NO: 69789 - protein, 28 aa, Artificial Sequence
  Cyclic GFR-binding peptide
  MOD_RES (1)..(1): Xaa is C or S
XTPTKMSPISMLYINDKQQIIYKQYEGM

SEQ ID NO: 69790 - protein, 25 aa, Artificial Sequence
  Cyclic GFR-binding peptide
VPTRLSPISILYIDSANNVVYKQYE

SEQ ID NO: 69791 - protein, 27 aa, Artificial Sequence
  Cyclic GFR-binding peptide
MSPISMLYINDKQQIIYKQYEGMVVDR

SEQ ID NO: 69792 - protein, 34 aa, Artificial Sequence
  Cyclic GFR-binding peptide
  MOD_RES (32)..(34): Xaa is C or S
VPTRLSPISILYIDSANNVVYKQYEDMVVESXGX

SEQ ID NO: 69793 - protein, 32 aa, Artificial Sequence
  Cyclic GFR-binding peptide
  MOD_RES (4)..(5): Xaa is C or S
PPTXXVPTRLSPISILYIDSANNVVYKQYEDM

SEQ ID NO: 69794 - protein, 38 aa, Artificial Sequence; identical to SEQ ID NO: 22725
  Cyclic GFR-binding peptide
  MOD_RES (3)..(4)..(36)..(38): Xaa is C or S

SEQ ID NO: 69795 - protein, 25 aa, Artificial Sequence
  Cyclic GFR-binding peptide
TRLSPISILYIDSANNVVYKQYEDM

SEQ ID NO: 69796 - protein, 36 aa, Artificial Sequence; identical to SEQ ID NO: 22730
  Cyclic GFR-binding peptide
  MOD_RES (1)..(2)..(33)..(35): Xaa is C or S

SEQ ID NO: 69797 - protein, 36 aa, Artificial Sequence; identical to SEQ ID NO: 22732
  Cyclic GFR-binding peptide
  MOD_RES (2)..(3)..(35): Xaa is C or S

SEQ ID NO: 69798 - protein, 29 aa, Artificial Sequence
  Cyclic GFR-binding peptide
  MOD_RES (1)..(1): Xaa is C or S
XAPVKTSPISMLYIDNGRVLLYKQYEMIV

SEQ ID NO: 69799 - protein, 28 aa, Artificial Sequence
  Cyclic GFR-binding peptide
VPTRLSPISILYIDSANNVVYKQYEDMV

SEQ ID NO: 69800 - protein, 22 aa, Artificial Sequence
  Cyclic GFR-binding peptide
SPISMLYINDKQQIIYKQYEGM

SEQ ID NO: 69801 - protein, 32 aa, Artificial Sequence
  Cyclic GFR-binding peptide
  MOD_RES (6)..(7): Xaa is C or S
GSAGPXXTPTKMSPISMLYINDKQQIIYKQYE

SEQ ID NO: 69802 - protein, 32 aa, Artificial Sequence
  Cyclic GFR-binding peptide
  MOD_RES (2)..(3): Xaa is C or S
TXXVPTRLSPISILYIDSANNVVYKQYEDMVV

SEQ ID NO: 69803 - protein, 35 aa, Artificial Sequence; identical to SEQ ID NO: 22737
  Cyclic GFR-binding peptide
  MOD_RES (1)..(2)..(33)..(35): Xaa is C or S

SEQ ID NO: 69804 - protein, 25 aa, Artificial Sequence
  Cyclic GFR-binding peptide
RLSPISILYIDSANNVVYKQYEDMV

SEQ ID NO: 69805 - protein, 30 aa, Artificial Sequence
  Cyclic GFR-binding peptide
  MOD_RES (2)..(3): Xaa is C or S
TXXVPTRLSPISILYIDSANNVVYKQYEDM

SEQ ID NO: 69806 - protein, 30 aa, Artificial Sequence
  Cyclic GFR-binding peptide
  MOD_RES (27)..(29): Xaa is C or S
TSPISMLYIDNGRVLLYKQYEMIVEEXGXL

SEQ ID NO: 69807 - protein, 26 aa, Artificial Sequence
  Cyclic GFR-binding peptide
KMSPISMLYINDKQQIIYKQYEGMVV

SEQ ID NO: 69808 - protein, 31 aa, Artificial Sequence
  Cyclic GFR-binding peptide
  MOD_RES (5)..(6): Xaa is C or S
SAGPXXTPTKMSPISMLYINDKQQIIYKQYE

SEQ ID NO: 69809 - protein, 29 aa, Artificial Sequence
  Cyclic GFR-binding peptide
  MOD_RES (2)..(3): Xaa is C or S
PXXTPTKMSPISMLYINDKQQIIYKQYEG

SEQ ID NO: 69810 - protein, 30 aa, Artificial Sequence
  Cyclic GFR-binding peptide
  MOD_RES (2)..(3): Xaa is C or S
TXXAPVKTSPISMLYIDNGRVLLYKQYEMI

SEQ ID NO: 69811 - protein, 27 aa, Artificial Sequence
  Cyclic GFR-binding peptide
VPTRLSPISILYIDSANNVVYKQYEDM

SEQ ID NO: 69812 - protein, 36 aa, Artificial Sequence
  Cyclic GFR-binding peptide
  MOD_RES (6)..(7): Xaa is C or S
RVPSTXXAPVKTSPISMLYIDNGRVLLYKQYEMIVE

SEQ ID NO: 69813 - protein, 31 aa, Artificial Sequence; identical to SEQ ID NO: 22743
  Cyclic GFR-binding peptide
  MOD_RES (1)..(1): Xaa is C or S

SEQ ID NO: 69814 - protein, 34 aa, Artificial Sequence; identical to SEQ ID NO: 22745
  Cyclic GFR-binding peptide
  MOD_RES (1)..(33): Xaa is C or S

SEQ ID NO: 69815 - protein, 36 aa, Artificial Sequence
  Cyclic GFR-binding peptide
  MOD_RES (6)..(7): Xaa is C or S
STPPTXXVPTRLSPISILYIDSANNVVYKQYEDMVV

SEQ ID NO: 69816 - protein, 23 aa, Artificial Sequence
  Cyclic GFR-binding peptide
TKMSPISMLYINDKQQIIYKQYE

SEQ ID NO: 69817 - protein, 42 aa, Artificial Sequence; identical to SEQ ID NO: 22748
  Cyclic GFR-binding peptide
  MOD_RES (6)..(7)..(39)..(41): Xaa is C or S

SEQ ID NO: 69818 - protein, 24 aa, Artificial Sequence
  Cyclic GFR-binding peptide
KMSPISMLYINDKQQIIYKQYEGM

SEQ ID NO: 69819 - protein, 28 aa, Artificial Sequence
  Cyclic GFR-binding peptide
  MOD_RES (1)..(2): Xaa is C or S
XXAPVKTSPISMLYIDNGRVLLYKQYEM

SEQ ID NO: 69820 - protein, 37 aa, Artificial Sequence; identical to SEQ ID NO: 22750
  Cyclic GFR-binding peptide
  MOD_RES (2)..(3)..(35)..(37): Xaa is C or S

SEQ ID NO: 69821 - protein, 30 aa, Artificial Sequence
  Cyclic GFR-binding peptide
  MOD_RES (1)..(2): Xaa is C or S
XXVPTRLSPISILYIDSANNVVYKQYEDMV

SEQ ID NO: 69822 - protein, 36 aa, Artificial Sequence
  Cyclic GFR-binding peptide
  MOD_RES (1)..(33)..(35): Xaa is C or S
XVPTRLSPISILYIDSANNVVYKQYEDMVVESXGXR

SEQ ID NO: 69823 - protein, 26 aa, Artificial Sequence
  Cyclic GFR-binding peptide
SPISMLYINDKQQIIYKQYEGMVVDR

SEQ ID NO: 69824 - protein, 26 aa, Artificial Sequence
  Cyclic GFR-binding peptide
VKTSPISMLYIDNGRVLLYKQYEMIV

SEQ ID NO: 69825 - protein, 34 aa, Artificial Sequence
  Cyclic GFR-binding peptide
  MOD_RES (5)..(6): Xaa is C or S
SAGPXXTPTKMSPISMLYINDKQQIIYKQYEGMV

SEQ ID NO: 69826 - protein, 39 aa, Artificial Sequence; identical to SEQ ID NO: 22754
  Cyclic GFR-binding peptide
  MOD_RES (6)..(7)..(39): Xaa is C or S

SEQ ID NO: 69827 - protein, 32 aa, Artificial Sequence
  Cyclic GFR-binding peptide
  MOD_RES (4)..(5): Xaa is C or S
PSTXXAPVKTSPISMLYIDNGRVLLYKQYEMI

SEQ ID NO: 69828 - protein, 31 aa, Artificial Sequence
  Cyclic GFR-binding peptide
  MOD_RES (29)..(31): Xaa is C or S
VKTSPISMLYIDNGRVLLYKQYEMIVEEXGX

SEQ ID NO: 69829 - protein, 28 aa, Artificial Sequence
  Cyclic GFR-binding peptide
PVKTSPISMLYIDNGRVLLYKQYEMIVE

SEQ ID NO: 69830 - protein, 32 aa, Artificial Sequence
  Cyclic GFR-binding peptide
  MOD_RES (32)..(32): Xaa is C or S
VPTRLSPISILYIDSANNVVYKQYEDMVVESX

SEQ ID NO: 69831 - protein, 33 aa, Artificial Sequence; identical to SEQ ID NO: 22757
  Cyclic GFR-binding peptide
  MOD_RES (32)..(32): Xaa is C or S

SEQ ID NO: 69832 - protein, 36 aa, Artificial Sequence; identical to SEQ ID NO: 22758
  Cyclic GFR-binding peptide
  MOD_RES (1)..(33)..(35): Xaa is C or S

SEQ ID NO: 69833 - protein, 39 aa, Artificial Sequence; identical to SEQ ID NO: 22759
  Cyclic GFR-binding peptide
  MOD_RES (4)..(5)..(36)..(38): Xaa is C or S

SEQ ID NO: 69834 - protein, 28 aa, Artificial Sequence
  Cyclic GFR-binding peptide
  MOD_RES (27)..(27): Xaa is C or S
TSPISMLYIDNGRVLLYKQYEMIVEEXG

SEQ ID NO: 69835 - protein, 27 aa, Artificial Sequence
  Cyclic GFR-binding peptide
  MOD_RES (1)..(2): Xaa is C or S
XXAPVKTSPISMLYIDNGRVLLYKQYE

SEQ ID NO: 69836 - protein, 26 aa, Artificial Sequence
  Cyclic GFR-binding peptide
TRLSPISILYIDSANNVVYKQYEDMV

SEQ ID NO: 69837 - protein, 31 aa, Artificial Sequence; identical to SEQ ID NO: 22763
  Cyclic GFR-binding peptide
  MOD_RES (1)..(1): Xaa is C or S

SEQ ID NO: 69838 - protein, 31 aa, Artificial Sequence
  Cyclic GFR-binding peptide
  MOD_RES (3)..(4): Xaa is C or S
STXXAPVKTSPISMLYIDNGRVLLYKQYEMI

SEQ ID NO: 69839 - protein, 38 aa, Artificial Sequence; identical to SEQ ID NO: 22765
  Cyclic GFR-binding peptide
  MOD_RES (3)..(4)..(35)..(37): Xaa is C or S

SEQ ID NO: 69840 - protein, 34 aa, Artificial Sequence
  Cyclic GFR-binding peptide
  MOD_RES (6)..(7): Xaa is C or S
RVPSTXXAPVKTSPISMLYIDNGRVLLYKQYEMI

SEQ ID NO: 69841 - protein, 39 aa, Artificial Sequence; identical to SEQ ID NO: 22766
  Cyclic GFR-binding peptide
  MOD_RES (4)..(5)..(37)..(39): Xaa is C or S

SEQ ID NO: 69842 - protein, 26 aa, Artificial Sequence
  Cyclic GFR-binding peptide
TSPISMLYIDNGRVLLYKQYEMIVEE

SEQ ID NO: 69843 - protein, 21 aa, Artificial Sequence
  Cyclic GFR-binding peptide
SPISILYIDSANNVVYKQYED

SEQ ID NO: 69844 - protein, 20 aa, Artificial Sequence
  Cyclic GFR-binding peptide
SPISMLYIDNGRVLLYKQYE

SEQ ID NO: 69845 - protein, 34 aa, Artificial Sequence; identical to SEQ ID NO: 22771
  Cyclic GFR-binding peptide
  MOD_RES (3)..(4): Xaa is C or S

SEQ ID NO: 69846 - protein, 36 aa, Artificial Sequence; identical to SEQ ID NO: 22773
  Cyclic GFR-binding peptide
  MOD_RES (5)..(6): Xaa is C or S

SEQ ID NO: 69847 - protein, 35 aa, Artificial Sequence
  Cyclic GFR-binding peptide
  MOD_RES (6)..(7): Xaa is C or S
HVPKPXXAPTKLSPISVLYIDDSSNVIYKQYENMV

SEQ ID NO: 69848 - protein, 22 aa, Artificial Sequence
  Cyclic GFR-binding peptide
LSPISILYIDSANNVVYKQYED

SEQ ID NO: 69849 - protein, 26 aa, Artificial Sequence
  Cyclic GFR-binding peptide
SPISILYIDSANNVVYKQYEDMVVES

SEQ ID NO: 69850 - protein, 29 aa, Artificial Sequence
  Cyclic GFR-binding peptide
  MOD_RES (29)..(29): Xaa is C or S
VKTSPISMLYIDNGRVLLYKQYEMIVEEX

SEQ ID NO: 69851 - protein, 35 aa, Artificial Sequence; identical to SEQ ID NO: 22781
  Cyclic GFR-binding peptide
  MOD_RES (32)..(34): Xaa is C or S

SEQ ID NO: 69852 - protein, 23 aa, Artificial Sequence
  Cyclic GFR-binding peptide
SPISILYIDSANNVVYKQYEDMV

SEQ ID NO: 69853 - protein, 40 aa, Artificial Sequence; identical to SEQ ID NO: 22782
  Cyclic GFR-binding peptide
  MOD_RES (6)..(7)..(38)..(40): Xaa is C or S

SEQ ID NO: 69854 - protein, 26 aa, Artificial Sequence
  Cyclic GFR-binding peptide
APVKTSPISMLYIDNGRVLLYKQYEM

SEQ ID NO: 69855 - protein, 31 aa, Artificial Sequence
  Cyclic GFR-binding peptide
  MOD_RES (29)..(31): Xaa is C or S
RLSPISILYIDSANNVVYKQYEDMVVESXGX

SEQ ID NO: 69856 - protein, 30 aa, Artificial Sequence
  Cyclic GFR-binding peptide
  MOD_RES (30)..(30): Xaa is C or S
TRLSPISILYIDSANNVVYKQYEDMVVESX

SEQ ID NO: 69857 - protein, 26 aa, Artificial Sequence
  Cyclic GFR-binding peptide
MSPISMLYINDKQQIIYKQYEGMVVD

SEQ ID NO: 69858 - protein, 30 aa, Artificial Sequence
  Cyclic GFR-binding peptide
  MOD_RES (30)..(30): Xaa is C or S
TKMSPISMLYINDKQQIIYKQYEGMVVDRX

SEQ ID NO: 69859 - protein, 40 aa, Artificial Sequence; identical to SEQ ID NO: 22789
  Cyclic GFR-binding peptide
  MOD_RES (5)..(6)..(38)..(40): Xaa is C or S

SEQ ID NO: 69860 - protein, 27 aa, Artificial Sequence
  Cyclic GFR-binding peptide
  MOD_RES (1)..(2): Xaa is C or S
XXTPTKMSPISMLYINDKQQIIYKQYE

SEQ ID NO: 69861 - protein, 28 aa, Artificial Sequence
  Cyclic GFR-binding peptide
  MOD_RES (2)..(3): Xaa is C or S
TXXVPTRLSPISILYIDSANNVVYKQYE

SEQ ID NO: 69862 - protein, 33 aa, Artificial Sequence
  Cyclic GFR-binding peptide
  MOD_RES (1)..(33): Xaa is C or S
XVPTRLSPISILYIDSANNVVYKQYEDMVVESX

SEQ ID NO: 69863 - protein, 37 aa, Artificial Sequence; identical to SEQ ID NO: 22792
  Cyclic GFR-binding peptide
  MOD_RES (6)..(7): Xaa is C or S

SEQ ID NO: 69864 - protein, 34 aa, Artificial Sequence
  Cyclic GFR-binding peptide
  MOD_RES (6)..(7): Xaa is C or S
HVPKPXXAPTKLSPISVLYIDDSSNVIYKQYENM

SEQ ID NO: 69865 - protein, 39 aa, Artificial Sequence; identical to SEQ ID NO: 22793
  Cyclic GFR-binding peptide
  MOD_RES (5)..(6)..(37)..(39): Xaa is C or S

SEQ ID NO: 69866 - protein, 40 aa, Artificial Sequence
  Cyclic GFR-binding peptide
  MOD_RES (4)..(5)..(37)..(39): Xaa is C or S
PPTXXVPTRLSPISILYIDSANNVVYKQYEDMVVESXGXR

SEQ ID NO: 69867 - protein, 23 aa, Artificial Sequence
  Cyclic GFR-binding peptide
TRLSPISILYIDSANNVVYKQYE

SEQ ID NO: 69868 - protein, 33 aa, Artificial Sequence
  Cyclic GFR-binding peptide
  MOD_RES (2)..(3): Xaa is C or S
TXXVPTRLSPISILYIDSANNVVYKQYEDMVVE

SEQ ID NO: 69869 - protein, 28 aa, Artificial Sequence
  Cyclic GFR-binding peptide
  MOD_RES (1)..(1): Xaa is C or S
XVPTRLSPISILYIDSANNVVYKQYEDM

SEQ ID NO: 69870 - protein, 41 aa, Artificial Sequence
  Cyclic GFR-binding peptide
  MOD_RES (5)..(6)..(38)..(40): Xaa is C or S
TPPTXXVPTRLSPISILYIDSANNVVYKQYEDMVVESXGXR

SEQ ID NO: 69871 - protein, 31 aa, Artificial Sequence
  Cyclic GFR-binding peptide
  MOD_RES (4)..(5): Xaa is C or S
PSTXXAPVKTSPISMLYIDNGRVLLYKQYEM

SEQ ID NO: 69872 - protein, 40 aa, Artificial Sequence; identical to SEQ ID NO: 22797
  Cyclic GFR-binding peptide
  MOD_RES (6)..(7)..(39): Xaa is C or S

SEQ ID NO: 69873 - protein, 34 aa, Artificial Sequence; identical to SEQ ID NO: 22798
  Cyclic GFR-binding peptide
  MOD_RES (1)..(32)..(34): Xaa is C or S

SEQ ID NO: 69874 - protein, 36 aa, Artificial Sequence; identical to SEQ ID NO: 22800
  Cyclic GFR-binding peptide
  MOD_RES (1)..(2)..(34)..(36): Xaa is C or S

SEQ ID NO: 69875 - protein, 30 aa, Artificial Sequence
  Cyclic GFR-binding peptide
  MOD_RES (3)..(4): Xaa is C or S
PTXXVPTRLSPISILYIDSANNVVYKQYED

SEQ ID NO: 69876 - protein, 31 aa, Artificial Sequence
  Cyclic GFR-binding peptide
  MOD_RES (31)..(31): Xaa is C or S
PTKMSPISMLYINDKQQIIYKQYEGMVVDRX

SEQ ID NO: 69877 - protein, 35 aa, Artificial Sequence; identical to SEQ ID NO: 22805
  Cyclic GFR-binding peptide
  MOD_RES (3)..(4)..(35): Xaa is C or S

SEQ ID NO: 69878 - protein, 29 aa, Artificial Sequence
  Cyclic GFR-binding peptide
  MOD_RES (1)..(2): Xaa is C or S
XXVPTRLSPISILYIDSANNVVYKQYEDM

SEQ ID NO: 69879 - protein, 29 aa, Artificial Sequence
  Cyclic GFR-binding peptide
  MOD_RES (1)..(1): Xaa is C or S
XVPTRLSPISILYIDSANNVVYKQYEDMV

SEQ ID NO: 69880 - protein, 31 aa, Artificial Sequence
  Cyclic GFR-binding peptide
  MOD_RES (31)..(31): Xaa is C or S
PTRLSPISILYIDSANNVVYKQYEDMVVESX

SEQ ID NO: 69881 - protein, 29 aa, Artificial Sequence
  Cyclic GFR-binding peptide
  MOD_RES (2)..(3): Xaa is C or S
TXXAPVKTSPISMLYIDNGRVLLYKQYEM

SEQ ID NO: 69882 - protein, 31 aa, Artificial Sequence
  Cyclic GFR-binding peptide
  MOD_RES (28)..(30): Xaa is C or S
KTSPISMLYIDNGRVLLYKQYEMIVEEXGXL

SEQ ID NO: 69883 - protein, 38 aa, Artificial Sequence; identical to SEQ ID NO: 22815
  Cyclic GFR-binding peptide
  MOD_RES (5)..(6)..(38): Xaa is C or S

SEQ ID NO: 69884 - protein, 35 aa, Artificial Sequence
  Cyclic GFR-binding peptide
  MOD_RES (6)..(7): Xaa is C or S
RVPSTXXAPVKTSPISMLYIDNGRVLLYKQYEMIV

SEQ ID NO: 69885 - protein, 38 aa, Artificial Sequence; identical to SEQ ID NO: 22817
  Cyclic GFR-binding peptide
  MOD_RES (4)..(5)..(37): Xaa is C or S

SEQ ID NO: 69886 - protein, 29 aa, Artificial Sequence
  Cyclic GFR-binding peptide
TPTKMSPISMLYINDKQQIIYKQYEGMVV

SEQ ID NO: 69887 - protein, 30 aa, Artificial Sequence
  Cyclic GFR-binding peptide
  MOD_RES (3)..(4): Xaa is C or S
GPXXTPTKMSPISMLYINDKQQIIYKQYEG

SEQ ID NO: 69888 - protein, 35 aa, Artificial Sequence
  Cyclic GFR-binding peptide
  MOD_RES (6)..(7): Xaa is C or S
STPPTXXVPTRLSPISILYIDSANNVVYKQYEDMV

SEQ ID NO: 69889 - protein, 29 aa, Artificial Sequence
  Cyclic GFR-binding peptide
TKMSPISMLYINDKQQIIYKQYEGMVVDR

SEQ ID NO: 69890 - protein, 30 aa, Artificial Sequence
  Cyclic GFR-binding peptide
PTRLSPISILYIDSANNVVYKQYEDMVVES

SEQ ID NO: 69891 - protein, 24 aa, Artificial Sequence
  Cyclic GFR-binding peptide
TSPISMLYIDNGRVLLYKQYEMIV

SEQ ID NO: 69892 - protein, 30 aa, Artificial Sequence
  Cyclic GFR-binding peptide
  MOD_RES (29)..(29): Xaa is C or S
KMSPISMLYINDKQQIIYKQYEGMVVDRXG

SEQ ID NO: 69893 - protein, 37 aa, Artificial Sequence; identical to SEQ ID NO: 22821
  Cyclic GFR-binding peptide
  MOD_RES (6)..(7): Xaa is C or S

SEQ ID NO: 69894 - protein, 29 aa, Artificial Sequence
  Cyclic GFR-binding peptide
  MOD_RES (27)..(29): Xaa is C or S
SPISMLYINDKQQIIYKQYEGMVVDRXGX

SEQ ID NO: 69895 - protein, 28 aa, Artificial Sequence
  Cyclic GFR-binding peptide
  MOD_RES (28)..(28): Xaa is C or S
KTSPISMLYIDNGRVLLYKQYEMIVEEX

SEQ ID NO: 69896 - protein, 35 aa, Artificial Sequence
  Cyclic GFR-binding peptide
  MOD_RES (6)..(7): Xaa is C or S
GSAGPXXTPTKMSPISMLYINDKQQIIYKQYEGMV

SEQ ID NO: 69897 - protein, 29 aa, Artificial Sequence
  Cyclic GFR-binding peptide
  MOD_RES (3)..(4): Xaa is C or S
GPXXTPTKMSPISMLYINDKQQIIYKQYE

SEQ ID NO: 69898 - protein, 26 aa, Artificial Sequence
  Cyclic GFR-binding peptide
LSPISILYIDSANNVVYKQYEDMVVE

SEQ ID NO: 69899 - protein, 34 aa, Artificial Sequence
  Cyclic GFR-binding peptide
  MOD_RES (5)..(6): Xaa is C or S
TPPTXXVPTRLSPISILYIDSANNVVYKQYEDMV

SEQ ID NO: 69900 - protein, 27 aa, Artificial Sequence
  Cyclic GFR-binding peptide
  MOD_RES (27)..(27): Xaa is C or S
SPISILYIDSANNVVYKQYEDMVVESX

SEQ ID NO: 69901 - protein, 35 aa, Artificial Sequence
  Cyclic GFR-binding peptide
  MOD_RES (1)..(33)..(35): Xaa is C or S
XVPTRLSPISILYIDSANNVVYKQYEDMVVESXGX

SEQ ID NO: 69902 - protein, 30 aa, Artificial Sequence
  Cyclic GFR-binding peptide
  MOD_RES (29)..(29): Xaa is C or S
RLSPISILYIDSANNVVYKQYEDMVVESXG

SEQ ID NO: 69903 - protein, 30 aa, Artificial Sequence
  Cyclic GFR-binding peptide
  MOD_RES (1)..(1): Xaa is C or S
XAPVKTSPISMLYIDNGRVLLYKQYEMIVE

SEQ ID NO: 69904 - protein, 21 aa, Artificial Sequence
  Cyclic GFR-binding peptide
LSPISILYIDSANNVVYKQYE

SEQ ID NO: 69905 - protein, 33 aa, Artificial Sequence; identical to SEQ ID NO: 22831
  Cyclic GFR-binding peptide
  MOD_RES (1)..(32): Xaa is C or S

SEQ ID NO: 69906 - protein, 38 aa, Artificial Sequence; identical to SEQ ID NO: 22834
  Cyclic GFR-binding peptide
  MOD_RES (6)..(7): Xaa is C or S

SEQ ID NO: 69907 - protein, 30 aa, Artificial Sequence
  Cyclic GFR-binding peptide
  MOD_RES (4)..(5): Xaa is C or S
PPTXXVPTRLSPISILYIDSANNVVYKQYE

SEQ ID NO: 69908 - protein, 20 aa, Artificial Sequence
  Cyclic GFR-binding peptide
SPISILYIDSANNVVYKQYE

SEQ ID NO: 69909 - protein, 26 aa, Artificial Sequence
  Cyclic GFR-binding peptide
  MOD_RES (1)..(1): Xaa is C or S
XTPTKMSPISMLYINDKQQIIYKQYE

SEQ ID NO: 69910 - protein, 27 aa, Artificial Sequence
  Cyclic GFR-binding peptide
KMSPISMLYINDKQQIIYKQYEGMVVD

SEQ ID NO: 69911 - protein, 41 aa, Artificial Sequence
  Cyclic GFR-binding peptide
  MOD_RES (6)..(7)..(39)..(41): Xaa is C or S
STPPTXXVPTRLSPISILYIDSANNVVYKQYEDMVVESXGX

SEQ ID NO: 69912 - protein, 38 aa, Artificial Sequence; identical to SEQ ID NO: 22838
  Cyclic GFR-binding peptide
  MOD_RES (2)..(3)..(35)..(37): Xaa is C or S

SEQ ID NO: 69913 - protein, 35 aa, Artificial Sequence
  Cyclic GFR-binding peptide
  MOD_RES (4)..(5): Xaa is C or S
PPTXXVPTRLSPISILYIDSANNVVYKQYEDMVVE

SEQ ID NO: 69914 - protein, 27 aa, Artificial Sequence
  Cyclic GFR-binding peptide
LSPISILYIDSANNVVYKQYEDMVVES

SEQ ID NO: 69915 - protein, 34 aa, Artificial Sequence; identical to SEQ ID NO: 22840
  Cyclic GFR-binding peptide
  MOD_RES (1)..(2)..(33): Xaa is C or S

SEQ ID NO: 69916 - protein, 23 aa, Artificial Sequence
  Cyclic GFR-binding peptide
VKTSPISMLYIDNGRVLLYKQYE

SEQ ID NO: 69917 - protein, 34 aa, Artificial Sequence
  Cyclic GFR-binding peptide
  MOD_RES (2)..(3): Xaa is C or S
TXXVPTRLSPISILYIDSANNVVYKQYEDMVVES

SEQ ID NO: 69918 - protein, 31 aa, Artificial Sequence
  Cyclic GFR-binding peptide
  MOD_RES (5)..(6): Xaa is C or S
VPSTXXAPVKTSPISMLYIDNGRVLLYKQYE

SEQ ID NO: 69919 - protein, 31 aa, Artificial Sequence
  Cyclic GFR-binding peptide
  MOD_RES (4)..(5): Xaa is C or S
AGPXXTPTKMSPISMLYINDKQQIIYKQYEG

SEQ ID NO: 69920 - protein, 20 aa, Artificial Sequence
  Cyclic GFR-binding peptide
SPISMLYIDNGRVLLYKQYE

SEQ ID NO: 69921 - protein, 42 aa, Artificial Sequence; identical to SEQ ID NO: 22846
  Cyclic GFR-binding peptide
  MOD_RES (6)..(7)..(39)..(41): Xaa is C or S

SEQ ID NO: 69922 - protein, 34 aa, Artificial Sequence; identical to SEQ ID NO: 22848
  Cyclic GFR-binding peptide
  MOD_RES (1)..(2)..(34): Xaa is C or S

SEQ ID NO: 69923 - protein, 31 aa, Artificial Sequence
  Cyclic GFR-binding peptide
  MOD_RES (29)..(31): Xaa is C or S
KMSPISMLYINDKQQIIYKQYEGMVVDRXGX

SEQ ID NO: 69924 - protein, 32 aa, Artificial Sequence
  Cyclic GFR-binding peptide
  MOD_RES (3)..(4): Xaa is C or S
GPXXTPTKMSPISMLYINDKQQIIYKQYEGMV

SEQ ID NO: 69925 - protein, 29 aa, Artificial Sequence
  Cyclic GFR-binding peptide
APVKTSPISMLYIDNGRVLLYKQYEMIVE

SEQ ID NO: 69926 - protein, 28 aa, Artificial Sequence
  Cyclic GFR-binding peptide
RLSPISILYIDSANNVVYKQYEDMVVES

SEQ ID NO: 69927 - protein, 24 aa, Artificial Sequence
  Cyclic GFR-binding peptide
TRLSPISILYIDSANNVVYKQYED

SEQ ID NO: 69928 - protein, 28 aa, Artificial Sequence
  Cyclic GFR-binding peptide
TKMSPISMLYINDKQQIIYKQYEGMVVD

SEQ ID NO: 69929 - protein, 27 aa, Artificial Sequence
  Cyclic GFR-binding peptide
EVVMDPYVKLVVNNAADFFLISLSSLR

SEQ ID NO: 69930 - protein, 28 aa, Artificial Sequence
  Cyclic GFR-binding peptide
  MOD_RES (27)..(28): Xaa is C or S
GPYVKLIIQQKDNFFLMSLSSMKTPTXX

SEQ ID NO: 69931 - protein, 40 aa, Artificial Sequence; identical to SEQ ID NO: 22855
  Cyclic GFR-binding peptide
  MOD_RES (1)..(3)..(36)..(37): Xaa is C or S

SEQ ID NO: 69932 - protein, 27 aa, Artificial Sequence
  Cyclic GFR-binding peptide
  MOD_RES (2)..(2): Xaa is C or S
KXSKVIMPYVKLIKPTKGIFFLISLSS

SEQ ID NO: 69933 - protein, 38 aa, Artificial Sequence; identical to SEQ ID NO: 22857
  Cyclic GFR-binding peptide
  MOD_RES (2)..(4)..(35)..(36): Xaa is C or S

SEQ ID NO: 69934 - protein, 41 aa, Artificial Sequence; identical to SEQ ID NO: 22858
  Cyclic GFR-binding peptide
  MOD_RES (1)..(3)..(35)..(36): Xaa is C or S

SEQ ID NO: 69935 - protein, 26 aa, Artificial Sequence
  Cyclic GFR-binding peptide
SKVVMPYVKLVKPTRGVFFLISLSSL

SEQ ID NO: 69936 - protein, 23 aa, Artificial Sequence
  Cyclic GFR-binding peptide
PYVKLIIQQKDNFFLMSLSSMKT

SEQ ID NO: 69937 - protein, 32 aa, Artificial Sequence; identical to SEQ ID NO: 22860
  Cyclic GFR-binding peptide
  MOD_RES (1)..(1): Xaa is C or S

SEQ ID NO: 69938 - protein, 31 aa, Artificial Sequence
  Cyclic GFR-binding peptide
  MOD_RES (26)..(27): Xaa is C or S
PYVKLIKPTKGIFFLISLSSLDQSVXXPSAS

SEQ ID NO: 69939 - protein, 37 aa, Artificial Sequence; identical to SEQ ID NO: 22861
  Cyclic GFR-binding peptide
  MOD_RES (1)..(3)..(34)..(35): Xaa is C or S

SEQ ID NO: 69940 - protein, 31 aa, Artificial Sequence; identical to SEQ ID NO: 22862
  Cyclic GFR-binding peptide
  MOD_RES (31)..(31): Xaa is C or S

SEQ ID NO: 69941 - protein, 28 aa, Artificial Sequence
  Cyclic GFR-binding peptide
VIMPYVKLVKPKRGVFFLISLSSLAQPV

SEQ ID NO: 69942 - protein, 25 aa, Artificial Sequence
  Cyclic GFR-binding peptide
VMGPYVKLIIQQKDNFFLMSLSSMK

SEQ ID NO: 69943 - protein, 29 aa, Artificial Sequence
  Cyclic GFR-binding peptide
SRVVMNPYVKLIVNSSDDFFLVSLSSLKT

SEQ ID NO: 69944 - protein, 32 aa, Artificial Sequence
  Cyclic GFR-binding peptide
  MOD_RES (26)..(26): Xaa is C or S
PYVKLIVNSSDDFFLVSLSSLKTPAXTPKTVH

SEQ ID NO: 69945 - protein, 31 aa, Artificial Sequence
  Cyclic GFR-binding peptide
  MOD_RES (29)..(29): Xaa is C or S
VMNPYVKLIVNSSDDFFLVSLSSLKTPAXTP

SEQ ID NO: 69946 - protein, 31 aa, Artificial Sequence
  Cyclic GFR-binding peptide
  MOD_RES (1)..(3): Xaa is C or S
XKXSKVVMPYVKLVKPTRGVFFLISLSSLDQ

SEQ ID NO: 69947 - protein, 32 aa, Artificial Sequence
  Cyclic GFR-binding peptide
  MOD_RES (1)..(3): Xaa is C or S
XKXSKVVMPYVKLVKPTRGVFFLISLSSLDQP

SEQ ID NO: 69948 - protein, 32 aa, Artificial Sequence
  Cyclic GFR-binding peptide
  MOD_RES (2)..(4): Xaa is C or S
RXGXGEVVMEPYVKLVVKDYEDFFLMSLSSLE

SEQ ID NO: 69949 - protein, 29 aa, Artificial Sequence
  Cyclic GFR-binding peptide
  MOD_RES (2)..(2): Xaa is C or S
GXGEVVMDPYVKLVVKENEDFFLMSLSSL

SEQ ID NO: 69950 - protein, 27 aa, Artificial Sequence
  Cyclic GFR-binding peptide
VVMNPYVKLIVNSSDDFFLVSLSSLQT

SEQ ID NO: 69951 - protein, 34 aa, Artificial Sequence
  Cyclic GFR-binding peptide
  MOD_RES (1)..(3): Xaa is C or S
XGXEAVSMGEPYVKLTPVGMDDFFLVSLSSLKTP

SEQ ID NO: 69952 - protein, 32 aa, Artificial Sequence; identical to SEQ ID NO: 22866
  Cyclic GFR-binding peptide
  MOD_RES (1)..(1): Xaa is C or S

SEQ ID NO: 69953 - protein, 34 aa, Artificial Sequence; identical to SEQ ID NO: 22867
  Cyclic GFR-binding peptide
  MOD_RES (1)..(33)..(34): Xaa is C or S

SEQ ID NO: 69954 - protein, 26 aa, Artificial Sequence
  Cyclic GFR-binding peptide
RDVVMGPYVKLIIQQKDNFFLMSLSS

SEQ ID NO: 69955 - protein, 36 aa, Artificial Sequence
  Cyclic GFR-binding peptide
  MOD_RES (2)..(4): Xaa is C or S
AXAXELHEELRPYVKLLKPKKRVYEFFLVSLSSHHV

SEQ ID NO: 69956 - protein, 26 aa, Artificial Sequence
  Cyclic GFR-binding peptide
QLFPYVKLHQGQHPKIRFFLMSLSSE

SEQ ID NO: 69957 - protein, 27 aa, Artificial Sequence
  Cyclic GFR-binding peptide
MGPYVKLYTVVGKDFFLISLSSLKTPV

SEQ ID NO: 69958 - protein, 30 aa, Artificial Sequence
  Cyclic GFR-binding peptide
  MOD_RES (27)..(27): Xaa is C or S
NPYVKLIVNSSDDFFLVSLSSLKTPAXTPK

SEQ ID NO: 69959 - protein, 27 aa, Artificial Sequence
  Cyclic GFR-binding peptide
  MOD_RES (26)..(27): Xaa is C or S
PYVKLIVNNSSDFFLVSLSSLKTPAXX

SEQ ID NO: 69960 - protein, 27 aa, Artificial Sequence
  Cyclic GFR-binding peptide
MGEPYVKLTPVGMDDFFLVSLSSLKTP

SEQ ID NO: 69961 - protein, 26 aa, Artificial Sequence
  Cyclic GFR-binding peptide
NPYVKLIVNSSDDFFLVSLSSLKTPA

SEQ ID NO: 69962 - protein, 34 aa, Artificial Sequence
  Cyclic GFR-binding peptide
  MOD_RES (2)..(4): Xaa is C or S
RXEXKNHQLFPYVKLHQGQHPKIRFFLMSLSSEE

SEQ ID NO: 69963 - protein, 33 aa, Artificial Sequence; identical to SEQ ID NO: 22869
  Cyclic GFR-binding peptide
  MOD_RES (2)..(33): Xaa is C or S

SEQ ID NO: 69964 - protein, 28 aa, Artificial Sequence
  Cyclic GFR-binding peptide
  MOD_RES (27)..(28): Xaa is C or S
MPYVKLLLVRGNDFFLMSLSSTKVPAXX

SEQ ID NO: 69965 - protein, 41 aa, Artificial Sequence; identical to SEQ ID NO: 22871
  Cyclic GFR-binding peptide
  MOD_RES (2)..(4)..(37)..(38): Xaa is C or S

SEQ ID NO: 69966 - protein, 36 aa, Artificial Sequence; identical to SEQ ID NO: 22872
  Cyclic GFR-binding peptide
  MOD_RES (1)..(34)..(35): Xaa is C or S

SEQ ID NO: 69967 - protein, 34 aa, Artificial Sequence
  Cyclic GFR-binding peptide
  MOD_RES (29)..(29): Xaa is C or S
VMNPYVKLIVNSSDDFFLVSLSSLKTPAXTPKTV

SEQ ID NO: 69968 - protein, 40 aa, Artificial Sequence; identical to SEQ ID NO: 22873
  Cyclic GFR-binding peptide
  MOD_RES (2)..(4): Xaa is C or S

SEQ ID NO: 69969 - protein, 36 aa, Artificial Sequence; identical to SEQ ID NO: 22875
  Cyclic GFR-binding peptide
  MOD_RES (2)..(36): Xaa is C or S

SEQ ID NO: 69970 - protein, 23 aa, Artificial Sequence
  Cyclic GFR-binding peptide
DPYVKLVVKENEDFFLMSLSSLE

SEQ ID NO: 69971 - protein, 38 aa, Artificial Sequence; identical to SEQ ID NO: 22876
  Cyclic GFR-binding peptide
  MOD_RES (1)..(33): Xaa is C or S

SEQ ID NO: 69972 - protein, 36 aa, Artificial Sequence; identical to SEQ ID NO: 22877
  Cyclic GFR-binding peptide
  MOD_RES (32)..(33): Xaa is C or S

SEQ ID NO: 69973 - protein, 31 aa, Artificial Sequence
  Cyclic GFR-binding peptide
  MOD_RES (2)..(2): Xaa is C or S
GXRDVVMGPYVKLIIQQKDNFFLMSLSSMKT

SEQ ID NO: 69974 - protein, 30 aa, Artificial Sequence
  Cyclic GFR-binding peptide
  MOD_RES (2)..(2): Xaa is C or S
KXSKVVMPYVKLVKPTRGVFFLISLSSLDQ

SEQ ID NO: 69975 - protein, 25 aa, Artificial Sequence
  Cyclic GFR-binding peptide
GPYVKLIIQQKDNFFLMSLSSMKTP

SEQ ID NO: 69976 - protein, 41 aa, Artificial Sequence; identical to SEQ ID NO: 22882
  Cyclic GFR-binding peptide
  MOD_RES (2)..(4)..(36)..(37): Xaa is C or S

SEQ ID NO: 69977 - protein, 39 aa, Artificial Sequence; identical to SEQ ID NO: 22885
  Cyclic GFR-binding peptide
  MOD_RES (1)..(3)..(34)..(35): Xaa is C or S

SEQ ID NO: 69978 - protein, 33 aa, Artificial Sequence; identical to SEQ ID NO: 22886
  Cyclic GFR-binding peptide
  MOD_RES (1)..(33): Xaa is C or S

SEQ ID NO: 69979 - protein, 28 aa, Artificial Sequence
  Cyclic GFR-binding peptide
  MOD_RES (2)..(2): Xaa is C or S
GXGEVVMDPYVKLVVKENEDFFLMSLSS

SEQ ID NO: 69980 - protein, 33 aa, Artificial Sequence; identical to SEQ ID NO: 22887
  Cyclic GFR-binding peptide
  MOD_RES (31)..(32): Xaa is C or S

SEQ ID NO: 69981 - protein, 29 aa, Artificial Sequence
  Cyclic GFR-binding peptide
  MOD_RES (2)..(2): Xaa is C or S
GXEAVSMGEPYVKLTPVGMDDFFLVSLSS

SEQ ID NO: 69982 - protein, 32 aa, Artificial Sequence
  Cyclic GFR-binding peptide
  MOD_RES (1)..(1): Xaa is C or S
XELHEELRPYVKLLKPKKRVYEFFLVSLSSHH

SEQ ID NO: 69983 - protein, 40 aa, Artificial Sequence; identical to SEQ ID NO: 22888
  Cyclic GFR-binding peptide
  MOD_RES (2)..(4)..(36)..(37): Xaa is C or S

SEQ ID NO: 69984 - protein, 32 aa, Artificial Sequence
  Cyclic GFR-binding peptide
  MOD_RES (2)..(4): Xaa is C or S
SXGXRDVVMGPYVKLIIQQKDNFFLMSLSSMK

SEQ ID NO: 69985 - protein, 31 aa, Artificial Sequence
  Cyclic GFR-binding peptide
  MOD_RES (27)..(28): Xaa is C or S
MPYVKLVKPKRGVFFLISLSSLAQPVXXPAA

SEQ ID NO: 69986 - protein, 40 aa, Artificial Sequence; identical to SEQ ID NO: 22890
  Cyclic GFR-binding peptide
  MOD_RES (1)..(3)..(34)..(35): Xaa is C or S

SEQ ID NO: 69987 - protein, 36 aa, Artificial Sequence; identical to SEQ ID NO: 22891
  Cyclic GFR-binding peptide
  MOD_RES (31)..(32): Xaa is C or S

SEQ ID NO: 69988 - protein, 27 aa, Artificial Sequence
  Cyclic GFR-binding peptide
  MOD_RES (26)..(27): Xaa is C or S
PYVKLYTVVGKDFFLISLSSLKTPVXX

SEQ ID NO: 69989 - protein, 34 aa, Artificial Sequence; identical to SEQ ID NO: 22892
  Cyclic GFR-binding peptide
  MOD_RES (32)..(33): Xaa is C or S

SEQ ID NO: 69990 - protein, 29 aa, Artificial Sequence
  Cyclic GFR-binding peptide
  MOD_RES (28)..(29): Xaa is C or S
MGPYVKLIIQQKDNFFLMSLSSMKTPTXX

SEQ ID NO: 69991 - protein, 29 aa, Artificial Sequence
  Cyclic GFR-binding peptide
SKVIMPYVKLIKPTKGIFFLISLSSLDQS

SEQ ID NO: 69992 - protein, 31 aa, Artificial Sequence
  Cyclic GFR-binding peptide
  MOD_RES (30)..(30): Xaa is C or S
VVMNPYVKLIVNSSDDFFLVSLSSLKTPAXT

SEQ ID NO: 69993 - protein, 20 aa, Artificial Sequence
  Cyclic GFR-binding peptide
PYVKLYTVVGKDFFLISLSS

SEQ ID NO: 69994 - protein, 28 aa, Artificial Sequence
  Cyclic GFR-binding peptide
SEVVMDPYVKLVVNNASDFFLISLSSLR

SEQ ID NO: 69995 - protein, 27 aa, Artificial Sequence
  Cyclic GFR-binding peptide
VMEPYVKLVVKDYEDFFLMSLSSLETP

SEQ ID NO: 69996 - protein, 34 aa, Artificial Sequence
  Cyclic GFR-binding peptide
  MOD_RES (30)..(31): Xaa is C or S
EVIMPYVKLLLVRGNDFFLMSLSSTKVPAXXTSP

SEQ ID NO: 69997 - protein, 30 aa, Artificial Sequence
  Cyclic GFR-binding peptide
  MOD_RES (30)..(30): Xaa is C or S
SMGEPYVKLTPVGMDDFFLVSLSSLKTPVX

SEQ ID NO: 69998 - protein, 34 aa, Artificial Sequence; identical to SEQ ID NO: 22897
  Cyclic GFR-binding peptide
  MOD_RES (2)..(34): Xaa is C or S

SEQ ID NO: 69999 - protein, 34 aa, Artificial Sequence; identical to SEQ ID NO: 22899
  Cyclic GFR-binding peptide
  MOD_RES (31)..(31): Xaa is C or S

SEQ ID NO: 70000 - protein, 33 aa, Artificial Sequence; identical to SEQ ID NO: 22901
  Cyclic GFR-binding peptide
  MOD_RES (32)..(33): Xaa is C or S

SEQ ID NO: 70001 - protein, 34 aa, Artificial Sequence; identical to SEQ ID NO: 22902
  Cyclic GFR-binding peptide
  MOD_RES (32)..(32): Xaa is C or S

SEQ ID NO: 70002 - protein, 34 aa, Artificial Sequence
  Cyclic GFR-binding peptide
  MOD_RES (29)..(30): Xaa is C or S
VMDPYVKLVVKENEDFFLMSLSSLETPVXXAKPI

SEQ ID NO: 70003 - protein, 23 aa, Artificial Sequence
  Cyclic GFR-binding peptide
GPYVKLYTVVGKDFFLISLSSLK

SEQ ID NO: 70004 - protein, 34 aa, Artificial Sequence; identical to SEQ ID NO: 22903
  Cyclic GFR-binding peptide
  MOD_RES (1)..(3): Xaa is C or S

SEQ ID NO: 70005 - protein, 26 aa, Artificial Sequence
  Cyclic GFR-binding peptide
DPYVKLVVNNAADFFLISLSSLRAPV

SEQ ID NO: 70006 - protein, 33 aa, Artificial Sequence; identical to SEQ ID NO: 22904
  Cyclic GFR-binding peptide
  MOD_RES (2)..(2): Xaa is C or S

SEQ ID NO: 70007 - protein, 28 aa, Artificial Sequence
  Cyclic GFR-binding peptide
AEVVMDPYVKLVVNNAADFFLISLSSLR

SEQ ID NO: 70008 - protein, 29 aa, Artificial Sequence
  Cyclic GFR-binding peptide
  MOD_RES (1)..(1): Xaa is C or S
XSKVVMPYVKLVKPTRGVFFLISLSSLDQ

SEQ ID NO: 70009 - protein, 27 aa, Artificial Sequence
  Cyclic GFR-binding peptide
  MOD_RES (26)..(27): Xaa is C or S
PYVKLIIQQKDNFFLMSLSSMKTPTXX

SEQ ID NO: 70010 - protein, 25 aa, Artificial Sequence
  Cyclic GFR-binding peptide
VVMGPYVKLIIQQKDNFFLMSLSSM

SEQ ID NO: 70011 - protein, 26 aa, Artificial Sequence
  Cyclic GFR-binding peptide
VMNPYVKLIVNSSDDFFLVSLSSLQT

SEQ ID NO: 70012 - protein, 26 aa, Artificial Sequence
  Cyclic GFR-binding peptide
VVMPYVKLVKPTRGVFFLISLSSLDQ

SEQ ID NO: 70013 - protein, 36 aa, Artificial Sequence
  Cyclic GFR-binding peptide
  MOD_RES (30)..(31): Xaa is C or S
SMGEPYVKLTPVGMDDFFLVSLSSLKTPVXXAKGVK

SEQ ID NO: 70014 - protein, 32 aa, Artificial Sequence; identical to SEQ ID NO: 22907
  Cyclic GFR-binding peptide
  MOD_RES (32)..(32): Xaa is C or S

SEQ ID NO: 70015 - protein, 38 aa, Artificial Sequence; identical to SEQ ID NO: 22908
  Cyclic GFR-binding peptide
  MOD_RES (32)..(33): Xaa is C or S

SEQ ID NO: 70016 - protein, 27 aa, Artificial Sequence
  Cyclic GFR-binding peptide
AMGPYVKLYTVVGKDFFLISLSSLKTP

SEQ ID NO: 70017 - protein, 39 aa, Artificial Sequence; identical to SEQ ID NO: 22909
  Cyclic GFR-binding peptide
  MOD_RES (1)..(3)..(34)..(35): Xaa is C or S

SEQ ID NO: 70018 - protein, 30 aa, Artificial Sequence
  Cyclic GFR-binding peptide
  MOD_RES (2)..(2): Xaa is C or S
GXESVAMGPYVKLYTVVGKDFFLISLSSLK

SEQ ID NO: 70019 - protein, 29 aa, Artificial Sequence
  Cyclic GFR-binding peptide
  MOD_RES (2)..(2): Xaa is C or S
GXRDVVMGPYVKLIIQQKDNFFLMSLSSM

SEQ ID NO: 70020 - protein, 29 aa, Artificial Sequence
  Cyclic GFR-binding peptide
  MOD_RES (1)..(1): Xaa is C or S
XEAVSMGEPYVKLTPVGMDDFFLVSLSSL

SEQ ID NO: 70021 - protein, 39 aa, Artificial Sequence; identical to SEQ ID NO: 22912
  Cyclic GFR-binding peptide
  MOD_RES (1)..(33)..(34): Xaa is C or S

SEQ ID NO: 70022 - protein, 29 aa, Artificial Sequence
  Cyclic GFR-binding peptide
  MOD_RES (28)..(29): Xaa is C or S
IMPYVKLVKPKRGVFFLISLSSLAQPVXX

SEQ ID NO: 70023 - protein, 34 aa, Artificial Sequence; identical to SEQ ID NO: 22915
  Cyclic GFR-binding peptide
  MOD_RES (31)..(32): Xaa is C or S

SEQ ID NO: 70024 - protein, 30 aa, Artificial Sequence; identical to SEQ ID NO: 1812
  Cyclic GFR-binding peptide

SEQ ID NO: 70025 - protein, 43 aa, Artificial Sequence; identical to SEQ ID NO: 22919
  Cyclic GFR-binding peptide
  MOD_RES (2)..(4)..(37)..(38): Xaa is C or S

SEQ ID NO: 70026 - protein, 24 aa, Artificial Sequence
  Cyclic GFR-binding peptide
PYVKLVVKDYEDFFLMSLSSLETP

SEQ ID NO: 70027 - protein, 27 aa, Artificial Sequence
  Cyclic GFR-binding peptide
VSMGEPYVKLTPVGMDDFFLVSLSSLK

SEQ ID NO: 70028 - protein, 39 aa, Artificial Sequence; identical to SEQ ID NO: 22920
  Cyclic GFR-binding peptide
  MOD_RES (1)..(3)..(35)..(36): Xaa is C or S

SEQ ID NO: 70029 - protein, 29 aa, Artificial Sequence
  Cyclic GFR-binding peptide
KVVMNPYVKLIVNNSSDFFLVSLSSLKTP

SEQ ID NO: 70030 - protein, 24 aa, Artificial Sequence
  Cyclic GFR-binding peptide
KVVMPYVKLVKPTRGVFFLISLSS

SEQ ID NO: 70031 - protein, 35 aa, Artificial Sequence
  Cyclic GFR-binding peptide
  MOD_RES (29)..(30): Xaa is C or S
VIMPYVKLLLVRGNDFFLMSLSSTKVPAXXTSPVR

SEQ ID NO: 70032 - protein, 37 aa, Artificial Sequence
  Cyclic GFR-binding peptide
  MOD_RES (2)..(4): Xaa is C or S
AXAXELHEELRPYVKLLKPKKRVYEFFLVSLSSHHVR

SEQ ID NO: 70033 - protein, 35 aa, Artificial Sequence; identical to SEQ ID NO: 22922
  Cyclic GFR-binding peptide
  MOD_RES (31)..(32): Xaa is C or S

SEQ ID NO: 70034 - protein, 31 aa, Artificial Sequence
  Cyclic GFR-binding peptide
HQLFPYVKLHQGQHPKIRFFLMSLSSEETPV

SEQ ID NO: 70035 - protein, 30 aa, Artificial Sequence
  Cyclic GFR-binding peptide
  MOD_RES (1)..(1): Xaa is C or S
XSEVVMDPYVKLVVNNASDFFLISLSSLRT

SEQ ID NO: 70036 - protein, 35 aa, Artificial Sequence; identical to SEQ ID NO: 22923
  Cyclic GFR-binding peptide
  MOD_RES (31)..(32): Xaa is C or S

SEQ ID NO: 70037 - protein, 29 aa, Artificial Sequence
  Cyclic GFR-binding peptide
  MOD_RES (29)..(29): Xaa is C or S
VMNPYVKLIVNSSDDFFLVSLSSLKTPAX

SEQ ID NO: 70038 - protein, 23 aa, Artificial Sequence
  Cyclic GFR-binding peptide
MGPYVKLYTVVGKDFFLISLSSL

SEQ ID NO: 70039 - protein, 31 aa, Artificial Sequence
  Cyclic GFR-binding peptide
  MOD_RES (1)..(1): Xaa is C or S
XEAVSMGEPYVKLTPVGMDDFFLVSLSSLKT

SEQ ID NO: 70040 - protein, 28 aa, Artificial Sequence
  Cyclic GFR-binding peptide
  MOD_RES (26)..(27): Xaa is C or S
PYVKLVKPKRGVFFLISLSSLAQPVXXP

SEQ ID NO: 70041 - protein, 27 aa, Artificial Sequence
  Cyclic GFR-binding peptide
VVMGPYVKLIIQQKDNFFLMSLSSMKT

SEQ ID NO: 70042 - protein, 37 aa, Artificial Sequence; identical to SEQ ID NO: 22926
  Cyclic GFR-binding peptide
  MOD_RES (2)..(4)..(35)..(36): Xaa is C or S

SEQ ID NO: 70043 - protein, 26 aa, Artificial Sequence
  Cyclic GFR-binding peptide
DPYVKLVVKENEDFFLMSLSSLETPV

SEQ ID NO: 70044 - protein, 40 aa, Artificial Sequence; identical to SEQ ID NO: 22927
  Cyclic GFR-binding peptide
  MOD_RES (2)..(4)..(35)..(36): Xaa is C or S

SEQ ID NO: 70045 - protein, 26 aa, Artificial Sequence
  Cyclic GFR-binding peptide
MGPYVKLYTVVGKDFFLISLSSLKTP

SEQ ID NO: 70046 - protein, 25 aa, Artificial Sequence
  Cyclic GFR-binding peptide
VMNPYVKLIVNSSDDFFLVSLSSLK

SEQ ID NO: 70047 - protein, 29 aa, Artificial Sequence
  Cyclic GFR-binding peptide
GEVVMEPYVKLVVKDYEDFFLMSLSSLET

SEQ ID NO: 70048 - protein, 31 aa, Artificial Sequence
  Cyclic GFR-binding peptide
  MOD_RES (29)..(30): Xaa is C or S
VIMPYVKLIKPTKGIFFLISLSSLDQSVXXP

SEQ ID NO: 70049 - protein, 33 aa, Artificial Sequence
  Cyclic GFR-binding peptide
  MOD_RES (2)..(4): Xaa is C or S
SXKXSKVIMPYVKLIKPTKGIFFLISLSSLDQS

SEQ ID NO: 70050 - protein, 35 aa, Artificial Sequence
  Cyclic GFR-binding peptide
  MOD_RES (29)..(30): Xaa is C or S
VMNPYVKLIVNSSDDFFLVSLSSLKTPAXXPKPVY

SEQ ID NO: 70051 - protein, 33 aa, Artificial Sequence
  Cyclic GFR-binding peptide
  MOD_RES (27)..(28): Xaa is C or S
NPYVKLIVNSSDDFFLVSLSSLKTPAXXPKPVY

SEQ ID NO: 70052 - protein, 35 aa, Artificial Sequence
  Cyclic GFR-binding peptide
  MOD_RES (29)..(30): Xaa is C or S
VMGPYVKLIIQQKDNFFLMSLSSMKTPTXXPGASG

SEQ ID NO: 70053 - protein, 30 aa, Artificial Sequence
  Cyclic GFR-binding peptide
  MOD_RES (29)..(30): Xaa is C or S
VIMPYVKLVKPKRGVFFLISLSSLAQPVXX

SEQ ID NO: 70054 - protein, 33 aa, Artificial Sequence; identical to SEQ ID NO: 22934
  Cyclic GFR-binding peptide
  MOD_RES (2)..(2): Xaa is C or S

SEQ ID NO: 70055 - protein, 34 aa, Artificial Sequence; identical to SEQ ID NO: 22935
  Cyclic GFR-binding peptide
  MOD_RES (31)..(32): Xaa is C or S

SEQ ID NO: 70056 - protein, 30 aa, Artificial Sequence
  Cyclic GFR-binding peptide
  MOD_RES (30)..(30): Xaa is C or S
EVIMPYVKLLLVRGNDFFLMSLSSTKVPAX

SEQ ID NO: 70057 - protein, 32 aa, Artificial Sequence
  Cyclic GFR-binding peptide
  MOD_RES (29)..(29): Xaa is C or S
FPYVKLHQGQHPKIRFFLMSLSSEETPVXELG

SEQ ID NO: 70058 - protein, 28 aa, Artificial Sequence
  Cyclic GFR-binding peptide
  MOD_RES (1)..(1): Xaa is C or S
XESVAMGPYVKLYTVVGKDFFLISLSSL

SEQ ID NO: 70059 - protein, 27 aa, Artificial Sequence
  Cyclic GFR-binding peptide
  MOD_RES (2)..(2): Xaa is C or S
KXSRVIMPYVKLVKPKRGVFFLISLSS

SEQ ID NO: 70060 - protein, 40 aa, Artificial Sequence; identical to SEQ ID NO: 22941
  Cyclic GFR-binding peptide
  MOD_RES (2)..(4)..(37)..(38): Xaa is C or S

SEQ ID NO: 70061 - protein, 28 aa, Artificial Sequence
  Cyclic GFR-binding peptide
RVIMPYVKLVKPKRGVFFLISLSSLAQP

SEQ ID NO: 70062 - protein, 30 aa, Artificial Sequence
  Cyclic GFR-binding peptide
  MOD_RES (1)..(3): Xaa is C or S
XGXGEVVMEPYVKLVVKDYEDFFLMSLSSL

SEQ ID NO: 70063 - protein, 28 aa, Artificial Sequence
  Cyclic GFR-binding peptide
  MOD_RES (27)..(28): Xaa is C or S
EPYVKLVVKDYEDFFLMSLSSLETPVXX

SEQ ID NO: 70064 - protein, 36 aa, Artificial Sequence; identical to SEQ ID NO: 22945
  Cyclic GFR-binding peptide
  MOD_RES (1)..(32)..(33): Xaa is C or S

SEQ ID NO: 70065 - protein, 27 aa, Artificial Sequence
  Cyclic GFR-binding peptide
EVVMEPYVKLVVKDYEDFFLMSLSSLE

SEQ ID NO: 70066 - protein, 26 aa, Artificial Sequence
  Cyclic GFR-binding peptide
  MOD_RES (26)..(26): Xaa is C or S
PYVKLVVKENEDFFLMSLSSLETPVX

SEQ ID NO: 70067 - protein, 41 aa, Artificial Sequence; identical to SEQ ID NO: 22948
  Cyclic GFR-binding peptide
  MOD_RES (2)..(4)..(36)..(37): Xaa is C or S

SEQ ID NO: 70068 - protein, 30 aa, Artificial Sequence
  Cyclic GFR-binding peptide
  MOD_RES (29)..(30): Xaa is C or S
VMDPYVKLVVNNASDFFLISLSSLRTPVXX

SEQ ID NO: 70069 - protein, 32 aa, Artificial Sequence
  Cyclic GFR-binding peptide
  MOD_RES (27)..(28): Xaa is C or S
MPYVKLVKPTRGVFFLISLSSLDQPVXXPSAS

SEQ ID NO: 70070 - protein, 27 aa, Artificial Sequence
  Cyclic GFR-binding peptide
KVVMPYVKLVKPTRGVFFLISLSSLDQ

SEQ ID NO: 70071 - protein, 20 aa, Artificial Sequence
  Cyclic GFR-binding peptide
PYVKLVVNNASDFFLISLSS

SEQ ID NO: 70072 - protein, 30 aa, Artificial Sequence
  Cyclic GFR-binding peptide
EELRPYVKLLKPKKRVYEFFLVSLSSHHVR

SEQ ID NO: 70073 - protein, 34 aa, Artificial Sequence; identical to SEQ ID NO: 22951
  Cyclic GFR-binding peptide
  MOD_RES (2)..(4): Xaa is C or S

SEQ ID NO: 70074 - protein, 34 aa, Artificial Sequence; identical to SEQ ID NO: 22953
  Cyclic GFR-binding peptide
  MOD_RES (1)..(32)..(33): Xaa is C or S

SEQ ID NO: 70075 - protein, 34 aa, Artificial Sequence; identical to SEQ ID NO: 22952
  Cyclic GFR-binding peptide
  MOD_RES (2)..(34): Xaa is C or S

SEQ ID NO: 70076 - protein, 30 aa, Artificial Sequence
  Cyclic GFR-binding peptide
  MOD_RES (28)..(29): Xaa is C or S
MDPYVKLVVNNASDFFLISLSSLRTPVXXT

SEQ ID NO: 70077 - protein, 37 aa, Artificial Sequence; identical to SEQ ID NO: 22954
  Cyclic GFR-binding peptide
  MOD_RES (31)..(32): Xaa is C or S

SEQ ID NO: 70078 - protein, 38 aa, Artificial Sequence; identical to SEQ ID NO: 22955
  Cyclic GFR-binding peptide
  MOD_RES (1)..(33)..(34): Xaa is C or S

SEQ ID NO: 70079 - protein, 25 aa, Artificial Sequence
  Cyclic GFR-binding peptide
KVIMPYVKLIKPTKGIFFLISLSSL

SEQ ID NO: 70080 - protein, 29 aa, Artificial Sequence
  Cyclic GFR-binding peptide
  MOD_RES (28)..(29): Xaa is C or S
MNPYVKLIVNSSDDFFLVSLSSLKTPAXX

SEQ ID NO: 70081 - protein, 30 aa, Artificial Sequence
  Cyclic GFR-binding peptide
  MOD_RES (26)..(27): Xaa is C or S
PYVKLYTVVGKDFFLISLSSLKTPVXXAKS

SEQ ID NO: 70082 - protein, 38 aa, Artificial Sequence; identical to SEQ ID NO: 22957
  Cyclic GFR-binding peptide
  MOD_RES (36)..(36): Xaa is C or S

SEQ ID NO: 70083 - protein, 38 aa, Artificial Sequence; identical to SEQ ID NO: 22958
  Cyclic GFR-binding peptide
  MOD_RES (37)..(37): Xaa is C or S

SEQ ID NO: 70084 - protein, 23 aa, Artificial Sequence
  Cyclic GFR-binding peptide
MPYVKLLLVRGNDFFLMSLSSTK

SEQ ID NO: 70085 - protein, 38 aa, Artificial Sequence
  Cyclic GFR-binding peptide
  MOD_RES (32)..(33): Xaa is C or S
GEVVMDPYVKLVVKENEDFFLMSLSSLETPVXXAKPIK

SEQ ID NO: 70086 - protein, 31 aa, Artificial Sequence
  Cyclic GFR-binding peptide
  MOD_RES (2)..(2): Xaa is C or S
KXSRVIMPYVKLVKPKRGVFFLISLSSLAQP

SEQ ID NO: 70087 - protein, 25 aa, Artificial Sequence
  Cyclic GFR-binding peptide
VVMEPYVKLVVKDYEDFFLMSLSSL

SEQ ID NO: 70088 - protein, 32 aa, Artificial Sequence
  Cyclic GFR-binding peptide
  MOD_RES (1)..(3): Xaa is C or S
XGXSEVVMDPYVKLVVNNASDFFLISLSSLRT

SEQ ID NO: 70089 - protein, 24 aa, Artificial Sequence
  Cyclic GFR-binding peptide
GPYVKLIIQQKDNFFLMSLSSMKT

SEQ ID NO: 70090 - protein, 25 aa, Artificial Sequence
  Cyclic GFR-binding peptide
PYVKLIVNSSDDFFLVSLSSLKTPA

SEQ ID NO: 70091 - protein, 33 aa, Artificial Sequence
  Cyclic GFR-binding peptide
  MOD_RES (29)..(30): Xaa is C or S
MGEPYVKLTPVGMDDFFLVSLSSLKTPVXXAKG

SEQ ID NO: 70092 - protein, 36 aa, Artificial Sequence; identical to SEQ ID NO: 22961
  Cyclic GFR-binding peptide
  MOD_RES (1)..(3)..(35)..(36): Xaa is C or S

SEQ ID NO: 70093 - protein, 28 aa, Artificial Sequence
  Cyclic GFR-binding peptide
VMDPYVKLVVNNASDFFLISLSSLRTPV

SEQ ID NO: 70094 - protein, 40 aa, Artificial Sequence; identical to SEQ ID NO: 22963
  Cyclic GFR-binding peptide
  MOD_RES (1)..(3)..(35)..(36): Xaa is C or S

SEQ ID NO: 70095 - protein, 32 aa, Artificial Sequence
  Cyclic GFR-binding peptide
  MOD_RES (2)..(2): Xaa is C or S
GXSEVVMDPYVKLVVNNASDFFLISLSSLRTP

SEQ ID NO: 70096 - protein, 34 aa, Artificial Sequence; identical to SEQ ID NO: 22964
  Cyclic GFR-binding peptide
  MOD_RES (2)..(34): Xaa is C or S

SEQ ID NO: 70097 - protein, 25 aa, Artificial Sequence
  Cyclic GFR-binding peptide
GEPYVKLTPVGMDDFFLVSLSSLKT

SEQ ID NO: 70098 - protein, 27 aa, Artificial Sequence
  Cyclic GFR-binding peptide
VVMDPYVKLVVNNASDFFLISLSSLRT

SEQ ID NO: 70099 - protein, 32 aa, Artificial Sequence; identical to SEQ ID NO: 22968
  Cyclic GFR-binding peptide
  MOD_RES (32)..(32): Xaa is C or S

SEQ ID NO: 70100 - protein, 24 aa, Artificial Sequence
  Cyclic GFR-binding peptide
VMDPYVKLVVNNAADFFLISLSSL

SEQ ID NO: 70101 - protein, 41 aa, Artificial Sequence
  Cyclic GFR-binding peptide
  MOD_RES (1)..(3)..(35)..(36): Xaa is C or S
XGXGEVVMDPYVKLVVKENEDFFLMSLSSLETPVXXAKPIK

SEQ ID NO: 70102 - protein, 35 aa, Artificial Sequence; identical to SEQ ID NO: 22971
  Cyclic GFR-binding peptide
  MOD_RES (1)..(3)..(35): Xaa is C or S

SEQ ID NO: 70103 - protein, 30 aa, Artificial Sequence
  Cyclic GFR-binding peptide
  MOD_RES (27)..(28): Xaa is C or S
NPYVKLIVNSSDDFFLVSLSSLKTPAXXPK

SEQ ID NO: 70104 - protein, 42 aa, Artificial Sequence; identical to SEQ ID NO: 22972
  Cyclic GFR-binding peptide
  MOD_RES (2)..(4)..(36)..(37): Xaa is C or S

SEQ ID NO: 70105 - protein, 29 aa, Artificial Sequence
  Cyclic GFR-binding peptide
SMGEPYVKLTPVGMDDFFLVSLSSLKTPV

SEQ ID NO: 70106 - protein, 35 aa, Artificial Sequence; identical to SEQ ID NO: 22973
  Cyclic GFR-binding peptide
  MOD_RES (1)..(32)..(33): Xaa is C or S

SEQ ID NO: 70107 - protein, 25 aa, Artificial Sequence
  Cyclic GFR-binding peptide
VVMDPYVKLVVNNAADFFLISLSSL

SEQ ID NO: 70108 - protein, 40 aa, Artificial Sequence; identical to SEQ ID NO: 22974
  Cyclic GFR-binding peptide
  MOD_RES (1)..(3)..(35)..(36): Xaa is C or S

SEQ ID NO: 70109 - protein, 29 aa, Artificial Sequence
  Cyclic GFR-binding peptide
RVVMNPYVKLIVNSSDDFFLVSLSSLKTP

SEQ ID NO: 70110 - protein, 31 aa, Artificial Sequence
  Cyclic GFR-binding peptide
  MOD_RES (30)..(31): Xaa is C or S
VVMDPYVKLVVNNAADFFLISLSSLRAPVXX

SEQ ID NO: 70111 - protein, 34 aa, Artificial Sequence
  Cyclic GFR-binding peptide
  MOD_RES (30)..(31): Xaa is C or S
VVMNPYVKLIVNSSDDFFLVSLSSLQTPAXXPKP

SEQ ID NO: 70112 - protein, 34 aa, Artificial Sequence; identical to SEQ ID NO: 22977
  Cyclic GFR-binding peptide

SEQ ID NO: 70113 - protein, 33 aa, Artificial Sequence; identical to SEQ ID NO: 22976
  Cyclic GFR-binding peptide
  MOD_RES (33)..(33): Xaa is C or S

SEQ ID NO: 70114 - protein, 30 aa, Artificial Sequence; identical to SEQ ID NO: 1815
  Cyclic GFR-binding peptide

SEQ ID NO: 70115 - protein, 32 aa, Artificial Sequence
  Cyclic GFR-binding peptide
  MOD_RES (30)..(31): Xaa is C or S
VAMGPYVKLYTVVGKDFFLISLSSLKTPVXXA

SEQ ID NO: 70116 - protein, 35 aa, Artificial Sequence
  Cyclic GFR-binding peptide
  MOD_RES (1)..(3)..(35): Xaa is C or S
XGXGEVVMDPYVKLVVKENEDFFLMSLSSLETPVX

SEQ ID NO: 70117 - protein, 37 aa, Artificial Sequence; identical to SEQ ID NO: 22981
  Cyclic GFR-binding peptide
  MOD_RES (1)..(33)..(34): Xaa is C or S

SEQ ID NO: 70118 - protein, 27 aa, Artificial Sequence
  Cyclic GFR-binding peptide
AVSMGEPYVKLTPVGMDDFFLVSLSSL

SEQ ID NO: 70119 - protein, 40 aa, Artificial Sequence; identical to SEQ ID NO: 22982
  Cyclic GFR-binding peptide
  MOD_RES (37)..(37): Xaa is C or S

SEQ ID NO: 70120 - protein, 31 aa, Artificial Sequence
  Cyclic GFR-binding peptide
EAVSMGEPYVKLTPVGMDDFFLVSLSSLKTP

SEQ ID NO: 70121 - protein, 31 aa, Artificial Sequence; identical to SEQ ID NO: 22983
  Cyclic GFR-binding peptide
  MOD_RES (1)..(1): Xaa is C or S

SEQ ID NO: 70122 - protein, 28 aa, Artificial Sequence
  Cyclic GFR-binding peptide
  MOD_RES (28)..(28): Xaa is C or S
IMPYVKLVKPKRGVFFLISLSSLAQPVX

SEQ ID NO: 70123 - protein, 30 aa, Artificial Sequence
  Cyclic GFR-binding peptide
  MOD_RES (2)..(2): Xaa is C or S
GXSRVVMNPYVKLIVNSSDDFFLVSLSSLK

SEQ ID NO: 70124 - protein, 32 aa, Artificial Sequence; identical to SEQ ID NO: 22987
  Cyclic GFR-binding peptide

SEQ ID NO: 70125 - protein, 41 aa, Artificial Sequence; identical to SEQ ID NO: 22991
  Cyclic GFR-binding peptide
  MOD_RES (1)..(3)..(35)..(36): Xaa is C or S

SEQ ID NO: 70126 - protein, 29 aa, Artificial Sequence
  Cyclic GFR-binding peptide
  MOD_RES (27)..(28): Xaa is C or S
NPYVKLIVNSSDDFFLVSLSSLKTPAXXP

SEQ ID NO: 70127 - protein, 39 aa, Artificial Sequence; identical to SEQ ID NO: 22992
  Cyclic GFR-binding peptide
  MOD_RES (2)..(4)..(35)..(36): Xaa is C or S

SEQ ID NO: 70128 - protein, 25 aa, Artificial Sequence
  Cyclic GFR-binding peptide
IMPYVKLVKPKRGVFFLISLSSLAQ

SEQ ID NO: 70129 - protein, 39 aa, Artificial Sequence; identical to SEQ ID NO: 22993
  Cyclic GFR-binding peptide
  MOD_RES (2)..(34)..(35): Xaa is C or S

SEQ ID NO: 70130 - protein, 29 aa, Artificial Sequence
  Cyclic GFR-binding peptide
  MOD_RES (26)..(27): Xaa is C or S
PYVKLTPVGMDDFFLVSLSSLKTPVXXAK

SEQ ID NO: 70131 - protein, 34 aa, Artificial Sequence; identical to SEQ ID NO: 22999
  Cyclic GFR-binding peptide
  MOD_RES (31)..(32): Xaa is C or S

SEQ ID NO: 70132 - protein, 26 aa, Artificial Sequence
  Cyclic GFR-binding peptide
  MOD_RES (1)..(1): Xaa is C or S
XSKVVMPYVKLVKPTRGVFFLISLSS

SEQ ID NO: 70133 - protein, 35 aa, Artificial Sequence
  Cyclic GFR-binding peptide
  MOD_RES (30)..(31): Xaa is C or S
VVMNPYVKLIVNNSSDFFLVSLSSLKTPAXXAKPV

SEQ ID NO: 70134 - protein, 30 aa, Artificial Sequence
  Cyclic GFR-binding peptide
  MOD_RES (30)..(30): Xaa is C or S
LFPYVKLHQGQHPKIRFFLMSLSSEETPVX

SEQ ID NO: 70135 - protein, 38 aa, Artificial Sequence
  Cyclic GFR-binding peptide
  MOD_RES (32)..(32): Xaa is C or S
HQLFPYVKLHQGQHPKIRFFLMSLSSEETPVXELGEDN

SEQ ID NO: 70136 - protein, 28 aa, Artificial Sequence
  Cyclic GFR-binding peptide
SMGEPYVKLTPVGMDDFFLVSLSSLKTP

SEQ ID NO: 70137 - protein, 41 aa, Artificial Sequence; identical to SEQ ID NO: 23000
  Cyclic GFR-binding peptide
  MOD_RES (2)..(4)..(36)..(37): Xaa is C or S

SEQ ID NO: 70138 - protein, 27 aa, Artificial Sequence
  Cyclic GFR-binding peptide
  MOD_RES (27)..(27): Xaa is C or S
MPYVKLIKPTKGIFFLISLSSLDQSVX

SEQ ID NO: 70139 - protein, 35 aa, Artificial Sequence; identical to SEQ ID NO: 23002
  Cyclic GFR-binding peptide
  MOD_RES (34)..(34): Xaa is C or S

SEQ ID NO: 70140 - protein, 25 aa, Artificial Sequence
  Cyclic GFR-binding peptide
VMDPYVKLVVNNASDFFLISLSSLR

SEQ ID NO: 70141 - protein, 24 aa, Artificial Sequence
  Cyclic GFR-binding peptide
IMPYVKLLLVRGNDFFLMSLSSTK

SEQ ID NO: 70142 - protein, 38 aa, Artificial Sequence; identical to SEQ ID NO: 23003
  Cyclic GFR-binding peptide
  MOD_RES (1)..(3)..(34)..(35): Xaa is C or S

SEQ ID NO: 70143 - protein, 38 aa, Artificial Sequence; identical to SEQ ID NO: 23004
  Cyclic GFR-binding peptide
  MOD_RES (1)..(32)..(33): Xaa is C or S

SEQ ID NO: 70144 - protein, 31 aa, Artificial Sequence
  Cyclic GFR-binding peptide
  MOD_RES (30)..(30): Xaa is C or S
LFPYVKLHQGQHPKIRFFLMSLSSEETPVXE

SEQ ID NO: 70145 - protein, 26 aa, Artificial Sequence
  Cyclic GFR-binding peptide
  MOD_RES (26)..(26): Xaa is C or S
PYVKLVVNNASDFFLISLSSLRTPVX

SEQ ID NO: 70146 - protein, 36 aa, Artificial Sequence; identical to SEQ ID NO: 23008
  Cyclic GFR-binding peptide
  MOD_RES (2)..(4)..(35)..(36): Xaa is C or S

SEQ ID NO: 70147 - protein, 39 aa, Artificial Sequence
  Cyclic GFR-binding peptide
  MOD_RES (2)..(34)..(35): Xaa is C or S
GXGEVVMDPYVKLVVKENEDFFLMSLSSLETPVXXAKPI

SEQ ID NO: 70148 - protein, 20 aa, Artificial Sequence
  Cyclic GFR-binding peptide
PYVKLIKPTKGIFFLISLSS

SEQ ID NO: 70149 - protein, 37 aa, Artificial Sequence; identical to SEQ ID NO: 23010
  Cyclic GFR-binding peptide
  MOD_RES (1)..(3)..(35)..(36): Xaa is C or S

SEQ ID NO: 70150 - protein, 22 aa, Artificial Sequence
  Cyclic GFR-binding peptide
NPYVKLIVNNSSDFFLVSLSSL

SEQ ID NO: 70151 - protein, 35 aa, Artificial Sequence
  Cyclic GFR-binding peptide
  MOD_RES (33)..(33): Xaa is C or S
ELRPYVKLLKPKKRVYEFFLVSLSSHHVRSPQXKV

SEQ ID NO: 70152 - protein, 31 aa, Artificial Sequence; identical to SEQ ID NO: 23012
  Cyclic GFR-binding peptide
  MOD_RES (31)..(31): Xaa is C or S

SEQ ID NO: 70153 - protein, 31 aa, Artificial Sequence
  Cyclic GFR-binding peptide
  MOD_RES (1)..(3): Xaa is C or S
XGXGEVVMEPYVKLVVKDYEDFFLMSLSSLE

SEQ ID NO: 70154 - protein, 41 aa, Artificial Sequence; identical to SEQ ID NO: 23013
  Cyclic GFR-binding peptide
  MOD_RES (2)..(4)..(35)..(36): Xaa is C or S

SEQ ID NO: 70155 - protein, 33 aa, Artificial Sequence
  Cyclic GFR-binding peptide
  MOD_RES (29)..(30): Xaa is C or S
VMDPYVKLVVNNASDFFLISLSSLRTPVXXTPP

SEQ ID NO: 70156 - protein, 29 aa, Artificial Sequence
  Cyclic GFR-binding peptide
  MOD_RES (1)..(1): Xaa is C or S
XSRVVMNPYVKLIVNSSDDFFLVSLSSLK

SEQ ID NO: 70157 - protein, 28 aa, Artificial Sequence
  Cyclic GFR-binding peptide
  MOD_RES (27)..(28): Xaa is C or S
EPYVKLTPVGMDDFFLVSLSSLKTPVXX

SEQ ID NO: 70158 - protein, 28 aa, Artificial Sequence
  Cyclic GFR-binding peptide
  MOD_RES (28)..(28): Xaa is C or S
MNPYVKLIVNSSDDFFLVSLSSLKTPAX

SEQ ID NO: 70159 - protein, 36 aa, Artificial Sequence; identical to SEQ ID NO: 23016
  Cyclic GFR-binding peptide
  MOD_RES (1)..(33)..(34): Xaa is C or S

SEQ ID NO: 70160 - protein, 36 aa, Artificial Sequence; identical to SEQ ID NO: 23017
  Cyclic GFR-binding peptide
  MOD_RES (31)..(32): Xaa is C or S

SEQ ID NO: 70161 - protein, 35 aa, Artificial Sequence; identical to SEQ ID NO: 23018
  Cyclic GFR-binding peptide
  MOD_RES (1)..(34)..(35): Xaa is C or S

SEQ ID NO: 70162 - protein, 29 aa, Artificial Sequence
  Cyclic GFR-binding peptide
  MOD_RES (2)..(4): Xaa is C or S
LXGXEEVIMPYVKLLLVRGNDFFLMSLSS

SEQ ID NO: 70163 - protein, 33 aa, Artificial Sequence
  Cyclic GFR-binding peptide
  MOD_RES (31)..(31): Xaa is C or S
QLFPYVKLHQGQHPKIRFFLMSLSSEETPVXEL

SEQ ID NO: 70164 - protein, 25 aa, Artificial Sequence
  Cyclic GFR-binding peptide
GPYVKLYTVVGKDFFLISLSSLKTP

SEQ ID NO: 70165 - protein, 28 aa, Artificial Sequence
  Cyclic GFR-binding peptide
  MOD_RES (27)..(28): Xaa is C or S
NPYVKLIVNSSDDFFLVSLSSLQTPAXX

SEQ ID NO: 70166 - protein, 40 aa, Artificial Sequence
  Cyclic GFR-binding peptide
  MOD_RES (1)..(3)..(35)..(36): Xaa is C or S
XGXGEVVMDPYVKLVVKENEDFFLMSLSSLETPVXXAKPI

SEQ ID NO: 70167 - protein, 38 aa, Artificial Sequence; identical to SEQ ID NO: 23021
  Cyclic GFR-binding peptide
  MOD_RES (2)..(4)..(36)..(37): Xaa is C or S

SEQ ID NO: 70168 - protein, 30 aa, Artificial Sequence
  Cyclic GFR-binding peptide
  MOD_RES (2)..(4): Xaa is C or S
SXKXSRVIMPYVKLVKPKRGVFFLISLSSL

SEQ ID NO: 70169 - protein, 30 aa, Artificial Sequence
  Cyclic GFR-binding peptide
  MOD_RES (30)..(30): Xaa is C or S
RVIMPYVKLVKPKRGVFFLISLSSLAQPVX

SEQ ID NO: 70170 - protein, 27 aa, Artificial Sequence
  Cyclic GFR-binding peptide
  MOD_RES (1)..(1): Xaa is C or S
XAKVVMNPYVKLIVNNSSDFFLVSLSS

SEQ ID NO: 70171 - protein, 34 aa, Artificial Sequence
  Cyclic GFR-binding peptide
  MOD_RES (1)..(3): Xaa is C or S
XEXKNHQLFPYVKLHQGQHPKIRFFLMSLSSEET

SEQ ID NO: 70172 - protein, 25 aa, Artificial Sequence
  Cyclic GFR-binding peptide
SRVIMPYVKLVKPKRGVFFLISLSS

SEQ ID NO: 70173 - protein, 43 aa, Artificial Sequence; identical to SEQ ID NO: 23024
  Cyclic GFR-binding peptide
  MOD_RES (2)..(39): Xaa is C or S

SEQ ID NO: 70174 - protein, 34 aa, Artificial Sequence; identical to SEQ ID NO: 23025
  Cyclic GFR-binding peptide
  MOD_RES (1)..(33)..(34): Xaa is C or S

SEQ ID NO: 70175 - protein, 25 aa, Artificial Sequence
  Cyclic GFR-binding peptide
SVAMGPYVKLYTVVGKDFFLISLSS

SEQ ID NO: 70176 - protein, 30 aa, Artificial Sequence
  Cyclic GFR-binding peptide
  MOD_RES (28)..(29): Xaa is C or S
MDPYVKLVVKENEDFFLMSLSSLETPVXXA

SEQ ID NO: 70177 - protein, 26 aa, Artificial Sequence
  Cyclic GFR-binding peptide
SEVVMDPYVKLVVNNASDFFLISLSS

SEQ ID NO: 70178 - protein, 36 aa, Artificial Sequence; identical to SEQ ID NO: 23026
  Cyclic GFR-binding peptide
  MOD_RES (1)..(33)..(34): Xaa is C or S

SEQ ID NO: 70179 - protein, 21 aa, Artificial Sequence
  Cyclic GFR-binding peptide
PYVKLVVKDYEDFFLMSLSSL

SEQ ID NO: 70180 - protein, 38 aa, Artificial Sequence; identical to SEQ ID NO: 23028
  Cyclic GFR-binding peptide
  MOD_RES (1)..(3)..(35)..(36): Xaa is C or S

SEQ ID NO: 70181 - protein, 33 aa, Artificial Sequence
  Cyclic GFR-binding peptide
  MOD_RES (29)..(30): Xaa is C or S
VMNPYVKLIVNSSDDFFLVSLSSLQTPAXXPKP

SEQ ID NO: 70182 - protein, 28 aa, Artificial Sequence
  Cyclic GFR-binding peptide
KVIMPYVKLIKPTKGIFFLISLSSLDQS

SEQ ID NO: 70183 - protein, 35 aa, Artificial Sequence; identical to SEQ ID NO: 23033
  Cyclic GFR-binding peptide
  MOD_RES (1)..(3)..(34)..(35): Xaa is C or S

SEQ ID NO: 70184 - protein, 39 aa, Artificial Sequence; identical to SEQ ID NO: 23034
  Cyclic GFR-binding peptide
  MOD_RES (1)..(3): Xaa is C or S

SEQ ID NO: 70185 - protein, 37 aa, Artificial Sequence; identical to SEQ ID NO: 23036
  Cyclic GFR-binding peptide
  MOD_RES (1)..(3)..(35): Xaa is C or S

SEQ ID NO: 70186 - protein, 33 aa, Artificial Sequence
  Cyclic GFR-binding peptide
  MOD_RES (28)..(29): Xaa is C or S
MDPYVKLVVKENEDFFLMSLSSLETPVXXAKPI

SEQ ID NO: 70187 - protein, 20 aa, Artificial Sequence
  Cyclic GFR-binding peptide
PYVKLVKPKRGVFFLISLSS

SEQ ID NO: 70188 - protein, 37 aa, Artificial Sequence; identical to SEQ ID NO: 23039
  Cyclic GFR-binding peptide
  MOD_RES (2)..(34): Xaa is C or S

SEQ ID NO: 70189 - protein, 34 aa, Artificial Sequence
  Cyclic GFR-binding peptide
  MOD_RES (28)..(29): Xaa is C or S
MGPYVKLYTVVGKDFFLISLSSLKTPVXXAKSAK

SEQ ID NO: 70190 - protein, 28 aa, Artificial Sequence
  Cyclic GFR-binding peptide
  MOD_RES (26)..(27): Xaa is C or S
PYVKLIKPTKGIFFLISLSSLDQSVXXP

SEQ ID NO: 70191 - protein, 25 aa, Artificial Sequence
  Cyclic GFR-binding peptide
MNPYVKLIVNSSDDFFLVSLSSLQT

SEQ ID NO: 70192 - protein, 28 aa, Artificial Sequence
  Cyclic GFR-binding peptide
  MOD_RES (28)..(28): Xaa is C or S
GEPYVKLTPVGMDDFFLVSLSSLKTPVX

SEQ ID NO: 70193 - protein, 38 aa, Artificial Sequence; identical to SEQ ID NO: 23042
  Cyclic GFR-binding peptide
  MOD_RES (1)..(3)..(34)..(35): Xaa is C or S

SEQ ID NO: 70194 - protein, 31 aa, Artificial Sequence
  Cyclic GFR-binding peptide
  MOD_RES (1)..(3): Xaa is C or S
XGXGEVVMDPYVKLVVKENEDFFLMSLSSLE

SEQ ID NO: 70195 - protein, 26 aa, Artificial Sequence
  Cyclic GFR-binding peptide
AEVVMDPYVKLVVNNAADFFLISLSS

SEQ ID NO: 70196 - protein, 25 aa, Artificial Sequence
  Cyclic GFR-binding peptide
SKVVMPYVKLVKPTRGVFFLISLSS

SEQ ID NO: 70197 - protein, 28 aa, Artificial Sequence
  Cyclic GFR-binding peptide
LHEELRPYVKLLKPKKRVYEFFLVSLSS

SEQ ID NO: 70198 - protein, 37 aa, Artificial Sequence; identical to SEQ ID NO: 23043
  Cyclic GFR-binding peptide
  MOD_RES (1)..(1): Xaa is C or S

SEQ ID NO: 70199 - protein, 36 aa, Artificial Sequence
  Cyclic GFR-binding peptide
  MOD_RES (1)..(33)..(34): Xaa is C or S
XGEVVMDPYVKLVVKENEDFFLMSLSSLETPVXXAK

SEQ ID NO: 70200 - protein, 29 aa, Artificial Sequence
  Cyclic GFR-binding peptide
  MOD_RES (29)..(29): Xaa is C or S
VMNPYVKLIVNNSSDFFLVSLSSLKTPAX

SEQ ID NO: 70201 - protein, 32 aa, Artificial Sequence
  Cyclic GFR-binding peptide
  MOD_RES (2)..(4): Xaa is C or S
RXGXGEVVMDPYVKLVVKENEDFFLMSLSSLE

SEQ ID NO: 70202 - protein, 35 aa, Artificial Sequence; identical to SEQ ID NO: 23045
  Cyclic GFR-binding peptide
  MOD_RES (2)..(4)..(35): Xaa is C or S

SEQ ID NO: 70203 - protein, 37 aa, Artificial Sequence
  Cyclic GFR-binding peptide
  MOD_RES (31)..(32): Xaa is C or S
VSMGEPYVKLTPVGMDDFFLVSLSSLKTPVXXAKGVK

SEQ ID NO: 70204 - protein, 26 aa, Artificial Sequence
  Cyclic GFR-binding peptide
VMDPYVKLVVKENEDFFLMSLSSLET

SEQ ID NO: 70205 - protein, 28 aa, Artificial Sequence
  Cyclic GFR-binding peptide
KVVMNPYVKLIVNNSSDFFLVSLSSLKT

SEQ ID NO: 70206 - protein, 32 aa, Artificial Sequence
  Cyclic GFR-binding peptide
  MOD_RES (27)..(28): Xaa is C or S
MPYVKLIKPTKGIFFLISLSSLDQSVXXPSAS

SEQ ID NO: 70207 - protein, 24 aa, Artificial Sequence
  Cyclic GFR-binding peptide
GPYVKLYTVVGKDFFLISLSSLKT

SEQ ID NO: 70208 - protein, 33 aa, Artificial Sequence
  Cyclic GFR-binding peptide
  MOD_RES (28)..(29): Xaa is C or S
MGPYVKLIIQQKDNFFLMSLSSMKTPTXXPGAS

SEQ ID NO: 70209 - protein, 35 aa, Artificial Sequence
  Cyclic GFR-binding peptide
  MOD_RES (29)..(29): Xaa is C or S
FPYVKLHQGQHPKIRFFLMSLSSEETPVXELGEDN

SEQ ID NO: 70210 - protein, 29 aa, Artificial Sequence
  Cyclic GFR-binding peptide
KVVMPYVKLVKPTRGVFFLISLSSLDQPV

SEQ ID NO: 70211 - protein, 30 aa, Artificial Sequence
  Cyclic GFR-binding peptide
EVVMDPYVKLVVKENEDFFLMSLSSLETPV

SEQ ID NO: 70212 - protein, 20 aa, Artificial Sequence
  Cyclic GFR-binding peptide
PYVKLIIQQKDNFFLMSLSS

SEQ ID NO: 70213 - protein, 33 aa, Artificial Sequence; identical to SEQ ID NO: 23052
  Cyclic GFR-binding peptide
  MOD_RES (31)..(32): Xaa is C or S

SEQ ID NO: 70214 - protein, 25 aa, Artificial Sequence
  Cyclic GFR-binding peptide
MNPYVKLIVNNSSDFFLVSLSSLKT

SEQ ID NO: 70215 - protein, 34 aa, Artificial Sequence
  Cyclic GFR-binding peptide
  MOD_RES (29)..(29): Xaa is C or S
FPYVKLHQGQHPKIRFFLMSLSSEETPVXELGED

SEQ ID NO: 70216 - protein, 28 aa, Artificial Sequence
  Cyclic GFR-binding peptide
VAMGPYVKLYTVVGKDFFLISLSSLKTP

SEQ ID NO: 70217 - protein, 33 aa, Artificial Sequence
  Cyclic GFR-binding peptide
  MOD_RES (30)..(31): Xaa is C or S
VVMDPYVKLVVKENEDFFLMSLSSLETPVXXAK

SEQ ID NO: 70218 - protein, 36 aa, Artificial Sequence; identical to SEQ ID NO: 23055
  Cyclic GFR-binding peptide
  MOD_RES (1)..(3): Xaa is C or S

SEQ ID NO: 70219 - protein, 38 aa, Artificial Sequence; identical to SEQ ID NO: 23057
  Cyclic GFR-binding peptide
  MOD_RES (2)..(34)..(35): Xaa is C or S

SEQ ID NO: 70220 - protein, 34 aa, Artificial Sequence; identical to SEQ ID NO: 23058
  Cyclic GFR-binding peptide
  MOD_RES (32)..(33): Xaa is C or S

SEQ ID NO: 70221 - protein, 31 aa, Artificial Sequence
  Cyclic GFR-binding peptide
  MOD_RES (29)..(30): Xaa is C or S
VMGPYVKLIIQQKDNFFLMSLSSMKTPTXXP

SEQ ID NO: 70222 - protein, 26 aa, Artificial Sequence
  Cyclic GFR-binding peptide
EVVMEPYVKLVVKDYEDFFLMSLSSL

SEQ ID NO: 70223 - protein, 38 aa, Artificial Sequence; identical to SEQ ID NO: 23060
  Cyclic GFR-binding peptide
  MOD_RES (1)..(32)..(33): Xaa is C or S

SEQ ID NO: 70224 - protein, 30 aa, Artificial Sequence
  Cyclic GFR-binding peptide
  MOD_RES (28)..(29): Xaa is C or S
MDPYVKLVVNNAADFFLISLSSLRAPVXXS

SEQ ID NO: 70225 - protein, 34 aa, Artificial Sequence; identical to SEQ ID NO: 23061
  Cyclic GFR-binding peptide
  MOD_RES (1)..(3): Xaa is C or S

SEQ ID NO: 70226 - protein, 26 aa, Artificial Sequence
  Cyclic GFR-binding peptide
DVVMGPYVKLIIQQKDNFFLMSLSSM

SEQ ID NO: 70227 - protein, 30 aa, Artificial Sequence
  Cyclic GFR-binding peptide
HEELRPYVKLLKPKKRVYEFFLVSLSSHHV

SEQ ID NO: 70228 - protein, 27 aa, Artificial Sequence
  Cyclic GFR-binding peptide
VIMPYVKLIKPTKGIFFLISLSSLDQS

SEQ ID NO: 70229 - protein, 34 aa, Artificial Sequence
  Cyclic GFR-binding peptide
  MOD_RES (33)..(33): Xaa is C or S
ELRPYVKLLKPKKRVYEFFLVSLSSHHVRSPQXK

SEQ ID NO: 70230 - protein, 41 aa, Artificial Sequence; identical to SEQ ID NO: 23065
  Cyclic GFR-binding peptide
  MOD_RES (2)..(4)..(36)..(37): Xaa is C or S

SEQ ID NO: 70231 - protein, 32 aa, Artificial Sequence
  Cyclic GFR-binding peptide
  MOD_RES (27)..(28): Xaa is C or S
DPYVKLVVNNAADFFLISLSSLRAPVXXSAPA

SEQ ID NO: 70232 - protein, 33 aa, Artificial Sequence
  Cyclic GFR-binding peptide
  MOD_RES (28)..(29): Xaa is C or S
IMPYVKLLLVRGNDFFLMSLSSTKVPAXXTSPV

SEQ ID NO: 70233 - protein, 23 aa, Artificial Sequence
  Cyclic GFR-binding peptide
PYVKLYTVVGKDFFLISLSSLKT

SEQ ID NO: 70234 - protein, 36 aa, Artificial Sequence; identical to SEQ ID NO: 23067
  Cyclic GFR-binding peptide
  MOD_RES (2)..(34)..(35): Xaa is C or S

SEQ ID NO: 70235 - protein, 36 aa, Artificial Sequence; identical to SEQ ID NO: 23068
  Cyclic GFR-binding peptide
  MOD_RES (2)..(4)..(36): Xaa is C or S

SEQ ID NO: 70236 - protein, 28 aa, Artificial Sequence
  Cyclic GFR-binding peptide
  MOD_RES (1)..(3): Xaa is C or S
XGXEEVIMPYVKLLLVRGNDFFLMSLSS

SEQ ID NO: 70237 - protein, 37 aa, Artificial Sequence; identical to SEQ ID NO: 23069
  Cyclic GFR-binding peptide
  MOD_RES (1)..(33)..(34): Xaa is C or S

SEQ ID NO: 70238 - protein, 34 aa, Artificial Sequence; identical to SEQ ID NO: 23070
  Cyclic GFR-binding peptide
  MOD_RES (2)..(2): Xaa is C or S

SEQ ID NO: 70239 - protein, 34 aa, Artificial Sequence
  Cyclic GFR-binding peptide
  MOD_RES (29)..(30): Xaa is C or S
VMEPYVKLVVKDYEDFFLMSLSSLETPVXXAKPI

SEQ ID NO: 70240 - protein, 33 aa, Artificial Sequence; identical to SEQ ID NO: 23071
  Cyclic GFR-binding peptide
  MOD_RES (1)..(3): Xaa is C or S

SEQ ID NO: 70241 - protein, 25 aa, Artificial Sequence
  Cyclic GFR-binding peptide
MGEPYVKLTPVGMDDFFLVSLSSLK

SEQ ID NO: 70242 - protein, 31 aa, Artificial Sequence
  Cyclic GFR-binding peptide
ELHEELRPYVKLLKPKKRVYEFFLVSLSSHH

SEQ ID NO: 70243 - protein, 34 aa, Artificial Sequence
  Cyclic GFR-binding peptide
  MOD_RES (29)..(30): Xaa is C or S
VMNPYVKLIVNSSDDFFLVSLSSLQTPAXXPKPV

SEQ ID NO: 70244 - protein, 23 aa, Artificial Sequence
  Cyclic GFR-binding peptide
VMNPYVKLIVNSSDDFFLVSLSS

SEQ ID NO: 70245 - protein, 32 aa, Artificial Sequence
  Cyclic GFR-binding peptide
  MOD_RES (27)..(28): Xaa is C or S
NPYVKLIVNSSDDFFLVSLSSLQTPAXXPKPV

SEQ ID NO: 70246 - protein, 25 aa, Artificial Sequence
  Cyclic GFR-binding peptide
SMGEPYVKLTPVGMDDFFLVSLSSL

SEQ ID NO: 70247 - protein, 25 aa, Artificial Sequence
  Cyclic GFR-binding peptide
EPYVKLTPVGMDDFFLVSLSSLKTP

SEQ ID NO: 70248 - protein, 22 aa, Artificial Sequence
  Cyclic GFR-binding peptide
PYVKLVKPKRGVFFLISLSSLA

SEQ ID NO: 70249 - protein, 34 aa, Artificial Sequence; identical to SEQ ID NO: 23075
  Cyclic GFR-binding peptide
  MOD_RES (31)..(32): Xaa is C or S

SEQ ID NO: 70250 - protein, 38 aa, Artificial Sequence; identical to SEQ ID NO: 23076
  Cyclic GFR-binding peptide
  MOD_RES (1)..(3): Xaa is C or S

SEQ ID NO: 70251 - protein, 30 aa, Artificial Sequence
  Cyclic GFR-binding peptide
  MOD_RES (27)..(28): Xaa is C or S
DPYVKLVVKENEDFFLMSLSSLETPVXXAK

SEQ ID NO: 70252 - protein, 42 aa, Artificial Sequence; identical to SEQ ID NO: 23077
  Cyclic GFR-binding peptide
  MOD_RES (1)..(3)..(37): Xaa is C or S

SEQ ID NO: 70253 - protein, 34 aa, Artificial Sequence
  Cyclic GFR-binding peptide
  MOD_RES (29)..(30): Xaa is C or S
VIMPYVKLIKPTKGIFFLISLSSLDQSVXXPSAS

SEQ ID NO: 70254 - protein, 27 aa, Artificial Sequence
  Cyclic GFR-binding peptide
VMGPYVKLIIQQKDNFFLMSLSSMKTP

SEQ ID NO: 70255 - protein, 26 aa, Artificial Sequence
  Cyclic GFR-binding peptide
LRPYVKLLKPKKRVYEFFLVSLSSHH

SEQ ID NO: 70256 - protein, 33 aa, Artificial Sequence; identical to SEQ ID NO: 23078
  Cyclic GFR-binding peptide
  MOD_RES (1)..(32)..(33): Xaa is C or S

SEQ ID NO: 70257 - protein, 36 aa, Artificial Sequence; identical to SEQ ID NO: 23079
  Cyclic GFR-binding peptide
  MOD_RES (1)..(1): Xaa is C or S

SEQ ID NO: 70258 - protein, 38 aa, Artificial Sequence; identical to SEQ ID NO: 23080
  Cyclic GFR-binding peptide
  MOD_RES (2)..(34)..(35): Xaa is C or S

SEQ ID NO: 70259 - protein, 33 aa, Artificial Sequence
  Cyclic GFR-binding peptide
  MOD_RES (27)..(28): Xaa is C or S
NPYVKLIVNSSDDFFLVSLSSLQTPAXXPKPVT

SEQ ID NO: 70260 - protein, 38 aa, Artificial Sequence; identical to SEQ ID NO: 23081
  Cyclic GFR-binding peptide
  MOD_RES (1)..(3)..(36)..(37): Xaa is C or S

SEQ ID NO: 70261 - protein, 30 aa, Artificial Sequence
  Cyclic GFR-binding peptide
  MOD_RES (26)..(27): Xaa is C or S
PYVKLVVNNAADFFLISLSSLRAPVXXSAP

SEQ ID NO: 70262 - protein, 36 aa, Artificial Sequence; identical to SEQ ID NO: 23084
  Cyclic GFR-binding peptide
  MOD_RES (31)..(32): Xaa is C or S

SEQ ID NO: 70263 - protein, 25 aa, Artificial Sequence
  Cyclic GFR-binding peptide
PYVKLVVNNASDFFLISLSSLRTPV

SEQ ID NO: 70264 - protein, 36 aa, Artificial Sequence
  Cyclic GFR-binding peptide
  MOD_RES (30)..(30): Xaa is C or S
VVMNPYVKLIVNSSDDFFLVSLSSLKTPAXTPKTVH

SEQ ID NO: 70265 - protein, 33 aa, Artificial Sequence
  Cyclic GFR-binding peptide
  MOD_RES (30)..(31): Xaa is C or S
VVMNPYVKLIVNNSSDFFLVSLSSLKTPAXXAK

SEQ ID NO: 70266 - protein, 36 aa, Artificial Sequence; identical to SEQ ID NO: 23090
  Cyclic GFR-binding peptide
  MOD_RES (31)..(32): Xaa is C or S

SEQ ID NO: 70267 - protein, 27 aa, Artificial Sequence
  Cyclic GFR-binding peptide
VIMPYVKLLLVRGNDFFLMSLSSTKVP

SEQ ID NO: 70268 - protein, 25 aa, Artificial Sequence
  Cyclic GFR-binding peptide
EVVMEPYVKLVVKDYEDFFLMSLSS

SEQ ID NO: 70269 - protein, 33 aa, Artificial Sequence; identical to SEQ ID NO: 23087
  Cyclic GFR-binding peptide
  MOD_RES (1)..(33): Xaa is C or S

SEQ ID NO: 70270 - protein, 33 aa, Artificial Sequence; identical to SEQ ID NO: 23088
  Cyclic GFR-binding peptide
  MOD_RES (1)..(33): Xaa is C or S

SEQ ID NO: 70271 - protein, 34 aa, Artificial Sequence; identical to SEQ ID NO: 23089
  Cyclic GFR-binding peptide
  MOD_RES (31)..(32): Xaa is C or S

SEQ ID NO: 70272 - protein, 32 aa, Artificial Sequence
  Cyclic GFR-binding peptide
  MOD_RES (29)..(30): Xaa is C or S
VIMPYVKLLLVRGNDFFLMSLSSTKVPAXXTS

SEQ ID NO: 70273 - protein, 28 aa, Artificial Sequence
  Cyclic GFR-binding peptide
  MOD_RES (1)..(1): Xaa is C or S
XSRVIMPYVKLVKPKRGVFFLISLSSLA

SEQ ID NO: 70274 - protein, 33 aa, Artificial Sequence
  Cyclic GFR-binding peptide
  MOD_RES (29)..(29): Xaa is C or S
VMNPYVKLIVNSSDDFFLVSLSSLKTPAXTPKT

SEQ ID NO: 70275 - protein, 37 aa, Artificial Sequence; identical to SEQ ID NO: 23091
  Cyclic GFR-binding peptide
  MOD_RES (31)..(32): Xaa is C or S

SEQ ID NO: 70276 - protein, 35 aa, Artificial Sequence; identical to SEQ ID NO: 23093
  Cyclic GFR-binding peptide
  MOD_RES (1)..(33)..(34): Xaa is C or S

SEQ ID NO: 70277 - protein, 29 aa, Artificial Sequence
  Cyclic GFR-binding peptide
RVIMPYVKLVKPKRGVFFLISLSSLAQPV

SEQ ID NO: 70278 - protein, 28 aa, Artificial Sequence
  Cyclic GFR-binding peptide
  MOD_RES (28)..(28): Xaa is C or S
MNPYVKLIVNSSDDFFLVSLSSLQTPAX

SEQ ID NO: 70279 - protein, 32 aa, Artificial Sequence
  Cyclic GFR-binding peptide
  MOD_RES (29)..(30): Xaa is C or S
VMGPYVKLIIQQKDNFFLMSLSSMKTPTXXPG

SEQ ID NO: 70280 - protein, 30 aa, Artificial Sequence
  Cyclic GFR-binding peptide
  MOD_RES (1)..(3): Xaa is C or S
XGXGEVVMDPYVKLVVKENEDFFLMSLSSL

SEQ ID NO: 70281 - protein, 30 aa, Artificial Sequence
  Cyclic GFR-binding peptide
  MOD_RES (2)..(4): Xaa is C or S
RXGXAEVVMDPYVKLVVNNAADFFLISLSS

SEQ ID NO: 70282 - protein, 32 aa, Artificial Sequence
  Cyclic GFR-binding peptide
  MOD_RES (2)..(2): Xaa is C or S
GXESVAMGPYVKLYTVVGKDFFLISLSSLKTP

SEQ ID NO: 70283 - protein, 22 aa, Artificial Sequence
  Cyclic GFR-binding peptide
MPYVKLIKPTKGIFFLISLSSL

SEQ ID NO: 70284 - protein, 27 aa, Artificial Sequence
  Cyclic GFR-binding peptide
  MOD_RES (27)..(27): Xaa is C or S
MPYVKLVKPTRGVFFLISLSSLDQPVX

SEQ ID NO: 70285 - protein, 23 aa, Artificial Sequence
  Cyclic GFR-binding peptide
PYVKLVKPKRGVFFLISLSSLAQ

SEQ ID NO: 70286 - protein, 32 aa, Artificial Sequence; identical to SEQ ID NO: 23095
  Cyclic GFR-binding peptide
  MOD_RES (32)..(32): Xaa is C or S

SEQ ID NO: 70287 - protein, 31 aa, Artificial Sequence
  Cyclic GFR-binding peptide
  MOD_RES (30)..(31): Xaa is C or S
VVMEPYVKLVVKDYEDFFLMSLSSLETPVXX

SEQ ID NO: 70288 - protein, 31 aa, Artificial Sequence; identical to SEQ ID NO: 23098
  Cyclic GFR-binding peptide
  MOD_RES (31)..(31): Xaa is C or S

SEQ ID NO: 70289 - protein, 28 aa, Artificial Sequence
  Cyclic GFR-binding peptide
LFPYVKLHQGQHPKIRFFLMSLSSEETP

SEQ ID NO: 70290 - protein, 29 aa, Artificial Sequence
  Cyclic GFR-binding peptide
EAVSMGEPYVKLTPVGMDDFFLVSLSSLK

SEQ ID NO: 70291 - protein, 27 aa, Artificial Sequence
  Cyclic GFR-binding peptide
LFPYVKLHQGQHPKIRFFLMSLSSEET

SEQ ID NO: 70292 - protein, 28 aa, Artificial Sequence
  Cyclic GFR-binding peptide
EVVMDPYVKLVVKENEDFFLMSLSSLET

SEQ ID NO: 70293 - protein, 38 aa, Artificial Sequence; identical to SEQ ID NO: 23101
  Cyclic GFR-binding peptide
  MOD_RES (2)..(4)..(36)..(37): Xaa is C or S

SEQ ID NO: 70294 - protein, 30 aa, Artificial Sequence
  Cyclic GFR-binding peptide
  MOD_RES (1)..(3): Xaa is C or S
XGXAKVVMNPYVKLIVNNSSDFFLVSLSSL

SEQ ID NO: 70295 - protein, 31 aa, Artificial Sequence
  Cyclic GFR-binding peptide
  MOD_RES (27)..(28): Xaa is C or S
DPYVKLVVNNASDFFLISLSSLRTPVXXTPP

SEQ ID NO: 70296 - protein, 42 aa, Artificial Sequence; identical to SEQ ID NO: 23102
  Cyclic GFR-binding peptide
  MOD_RES (2)..(4)..(38): Xaa is C or S

SEQ ID NO: 70297 - protein, 37 aa, Artificial Sequence; identical to SEQ ID NO: 23104
  Cyclic GFR-binding peptide
  MOD_RES (1)..(35): Xaa is C or S

SEQ ID NO: 70298 - protein, 29 aa, Artificial Sequence
  Cyclic GFR-binding peptide
  MOD_RES (1)..(3): Xaa is C or S
XGXSEVVMDPYVKLVVNNASDFFLISLSS

SEQ ID NO: 70299 - protein, 31 aa, Artificial Sequence; identical to SEQ ID NO: 23107
  Cyclic GFR-binding peptide

SEQ ID NO: 70300 - protein, 33 aa, Artificial Sequence
  Cyclic GFR-binding peptide
  MOD_RES (31)..(31): Xaa is C or S
RPYVKLLKPKKRVYEFFLVSLSSHHVRSPQXKV

SEQ ID NO: 70301 - protein, 30 aa, Artificial Sequence; identical to SEQ ID NO: 23109
  Cyclic GFR-binding peptide

SEQ ID NO: 70302 - protein, 20 aa, Artificial Sequence
  Cyclic GFR-binding peptide
PYVKLIIQQKDNFFLMSLSS

SEQ ID NO: 70303 - protein, 32 aa, Artificial Sequence; identical to SEQ ID NO: 23111
  Cyclic GFR-binding peptide
  MOD_RES (1)..(32): Xaa is C or S

SEQ ID NO: 70304 - protein, 37 aa, Artificial Sequence
  Cyclic GFR-binding peptide
  MOD_RES (32)..(33): Xaa is C or S
AVSMGEPYVKLTPVGMDDFFLVSLSSLKTPVXXAKGV

SEQ ID NO: 70305 - protein, 25 aa, Artificial Sequence
  Cyclic GFR-binding peptide
VIMPYVKLVKPKRGVFFLISLSSLA

SEQ ID NO: 70306 - protein, 31 aa, Artificial Sequence
  Cyclic GFR-binding peptide
  MOD_RES (27)..(28): Xaa is C or S
NPYVKLIVNSSDDFFLVSLSSLKTPAXXPKP

SEQ ID NO: 70307 - protein, 40 aa, Artificial Sequence; identical to SEQ ID NO: 23114
  Cyclic GFR-binding peptide
  MOD_RES (1)..(3)..(35)..(36): Xaa is C or S

SEQ ID NO: 70308 - protein, 25 aa, Artificial Sequence
  Cyclic GFR-binding peptide
NPYVKLIVNSSDDFFLVSLSSLKTP

SEQ ID NO: 70309 - protein, 36 aa, Artificial Sequence; identical to SEQ ID NO: 23116
  Cyclic GFR-binding peptide
  MOD_RES (1)..(3)..(35)..(36): Xaa is C or S

SEQ ID NO: 70310 - protein, 40 aa, Artificial Sequence; identical to SEQ ID NO: 23117
  Cyclic GFR-binding peptide
  MOD_RES (1)..(3)..(35)..(36): Xaa is C or S

SEQ ID NO: 70311 - protein, 38 aa, Artificial Sequence; identical to SEQ ID NO: 23118
  Cyclic GFR-binding peptide
  MOD_RES (34)..(34): Xaa is C or S

SEQ ID NO: 70312 - protein, 33 aa, Artificial Sequence; identical to SEQ ID NO: 23119
  Cyclic GFR-binding peptide
  MOD_RES (32)..(33): Xaa is C or S

SEQ ID NO: 70313 - protein, 28 aa, Artificial Sequence
  Cyclic GFR-binding peptide
VMNPYVKLIVNSSDDFFLVSLSSLQTPA

SEQ ID NO: 70314 - protein, 29 aa, Artificial Sequence
  Cyclic GFR-binding peptide
EVVMDPYVKLVVKENEDFFLMSLSSLETP

SEQ ID NO: 70315 - protein, 27 aa, Artificial Sequence
  Cyclic GFR-binding peptide
VMNPYVKLIVNNSSDFFLVSLSSLKTP

SEQ ID NO: 70316 - protein, 32 aa, Artificial Sequence
  Cyclic GFR-binding peptide
  MOD_RES (1)..(1): Xaa is C or S
XEAVSMGEPYVKLTPVGMDDFFLVSLSSLKTP

SEQ ID NO: 70317 - protein, 32 aa, Artificial Sequence
  Cyclic GFR-binding peptide
  MOD_RES (26)..(27): Xaa is C or S
PYVKLTPVGMDDFFLVSLSSLKTPVXXAKGVK

SEQ ID NO: 70318 - protein, 32 aa, Artificial Sequence
  Cyclic GFR-binding peptide
  MOD_RES (2)..(4): Xaa is C or S
SXKXSKVIMPYVKLIKPTKGIFFLISLSSLDQ

SEQ ID NO: 70319 - protein, 31 aa, Artificial Sequence
  Cyclic GFR-binding peptide
  MOD_RES (30)..(31): Xaa is C or S
VVMGPYVKLIIQQKDNFFLMSLSSMKTPTXX

SEQ ID NO: 70320 - protein, 28 aa, Artificial Sequence
  Cyclic GFR-binding peptide
  MOD_RES (26)..(27): Xaa is C or S
PYVKLVVKENEDFFLMSLSSLETPVXXA

SEQ ID NO: 70321 - protein, 39 aa, Artificial Sequence; identical to SEQ ID NO: 23122
  Cyclic GFR-binding peptide
  MOD_RES (2)..(34)..(35): Xaa is C or S

SEQ ID NO: 70322 - protein, 34 aa, Artificial Sequence
  Cyclic GFR-binding peptide
  MOD_RES (2)..(4): Xaa is C or S
HXGXAKVVMNPYVKLIVNNSSDFFLVSLSSLKTP

SEQ ID NO: 70323 - protein, 32 aa, Artificial Sequence
  Cyclic GFR-binding peptide
  MOD_RES (2)..(2): Xaa is C or S
AXELHEELRPYVKLLKPKKRVYEFFLVSLSSH

SEQ ID NO: 70324 - protein, 35 aa, Artificial Sequence; identical to SEQ ID NO: 23130
  Cyclic GFR-binding peptide
  MOD_RES (31)..(32): Xaa is C or S

SEQ ID NO: 70325 - protein, 29 aa, Artificial Sequence
  Cyclic GFR-binding peptide
  MOD_RES (26)..(27): Xaa is C or S
PYVKLIVNNSSDFFLVSLSSLKTPAXXAK

SEQ ID NO: 70326 - protein, 25 aa, Artificial Sequence
  Cyclic GFR-binding peptide
KVVMPYVKLVKPTRGVFFLISLSSL

SEQ ID NO: 70327 - protein, 29 aa, Artificial Sequence
  Cyclic GFR-binding peptide
EELRPYVKLLKPKKRVYEFFLVSLSSHHV

SEQ ID NO: 70328 - protein, 27 aa, Artificial Sequence
  Cyclic GFR-binding peptide
DVVMGPYVKLIIQQKDNFFLMSLSSMK

SEQ ID NO: 70329 - protein, 32 aa, Artificial Sequence
  Cyclic GFR-binding peptide
  MOD_RES (1)..(3): Xaa is C or S
XEXKNHQLFPYVKLHQGQHPKIRFFLMSLSSE

SEQ ID NO: 70330 - protein, 35 aa, Artificial Sequence; identical to SEQ ID NO: 23133
  Cyclic GFR-binding peptide
  MOD_RES (2)..(33)..(34): Xaa is C or S

SEQ ID NO: 70331 - protein, 20 aa, Artificial Sequence
  Cyclic GFR-binding peptide
PYVKLIVNNSSDFFLVSLSS

SEQ ID NO: 70332 - protein, 31 aa, Artificial Sequence
  Cyclic GFR-binding peptide
  MOD_RES (26)..(27): Xaa is C or S
PYVKLIVNSSDDFFLVSLSSLQTPAXXPKPV

SEQ ID NO: 70333 - protein, 38 aa, Artificial Sequence; identical to SEQ ID NO: 23134
  Cyclic GFR-binding peptide
  MOD_RES (2)..(34)..(35): Xaa is C or S

SEQ ID NO: 70334 - protein, 41 aa, Artificial Sequence; identical to SEQ ID NO: 23136
  Cyclic GFR-binding peptide
  MOD_RES (2)..(36): Xaa is C or S

SEQ ID NO: 70335 - protein, 31 aa, Artificial Sequence
  Cyclic GFR-binding peptide
  MOD_RES (28)..(29): Xaa is C or S
MDPYVKLVVNNASDFFLISLSSLRTPVXXTP

SEQ ID NO: 70336 - protein, 36 aa, Artificial Sequence
  Cyclic GFR-binding peptide
  MOD_RES (31)..(32): Xaa is C or S
VSMGEPYVKLTPVGMDDFFLVSLSSLKTPVXXAKGV

SEQ ID NO: 70337 - protein, 37 aa, Artificial Sequence; identical to SEQ ID NO: 23138
  Cyclic GFR-binding peptide
  MOD_RES (2)..(34)..(35): Xaa is C or S

SEQ ID NO: 70338 - protein, 27 aa, Artificial Sequence
  Cyclic GFR-binding peptide
EVIMPYVKLLLVRGNDFFLMSLSSTKV

SEQ ID NO: 70339 - protein, 25 aa, Artificial Sequence
  Cyclic GFR-binding peptide
MNPYVKLIVNSSDDFFLVSLSSLKT

SEQ ID NO: 70340 - protein, 39 aa, Artificial Sequence; identical to SEQ ID NO: 23139
  Cyclic GFR-binding peptide
  MOD_RES (1)..(3)..(34)..(35): Xaa is C or S

SEQ ID NO: 70341 - protein, 31 aa, Artificial Sequence
  Cyclic GFR-binding peptide
GEVVMDPYVKLVVKENEDFFLMSLSSLETPV

SEQ ID NO: 70342 - protein, 36 aa, Artificial Sequence; identical to SEQ ID NO: 23140
  Cyclic GFR-binding peptide
  MOD_RES (1)..(32)..(33): Xaa is C or S

SEQ ID NO: 70343 - protein, 33 aa, Artificial Sequence
  Cyclic GFR-binding peptide
  MOD_RES (27)..(28): Xaa is C or S
MPYVKLIKPTKGIFFLISLSSLDQSVXXPSASA

SEQ ID NO: 70344 - protein, 36 aa, Artificial Sequence; identical to SEQ ID NO: 23143
  Cyclic GFR-binding peptide
  MOD_RES (2)..(33)..(34): Xaa is C or S

SEQ ID NO: 70345 - protein, 39 aa, Artificial Sequence; identical to SEQ ID NO: 23144
  Cyclic GFR-binding peptide
  MOD_RES (2)..(4)..(37)..(38): Xaa is C or S

SEQ ID NO: 70346 - protein, 32 aa, Artificial Sequence
  Cyclic GFR-binding peptide
  MOD_RES (31)..(31): Xaa is C or S
QLFPYVKLHQGQHPKIRFFLMSLSSEETPVXE

SEQ ID NO: 70347 - protein, 35 aa, Artificial Sequence; identical to SEQ ID NO: 23145
  Cyclic GFR-binding peptide
  MOD_RES (31)..(32): Xaa is C or S

SEQ ID NO: 70348 - protein, 32 aa, Artificial Sequence
  Cyclic GFR-binding peptide
  MOD_RES (30)..(31): Xaa is C or S
EVIMPYVKLLLVRGNDFFLMSLSSTKVPAXXT

SEQ ID NO: 70349 - protein, 38 aa, Artificial Sequence; identical to SEQ ID NO: 23146
  Cyclic GFR-binding peptide
  MOD_RES (2)..(33)..(34): Xaa is C or S

SEQ ID NO: 70350 - protein, 34 aa, Artificial Sequence; identical to SEQ ID NO: 23147
  Cyclic GFR-binding peptide
  MOD_RES (31)..(32): Xaa is C or S

SEQ ID NO: 70351 - protein, 29 aa, Artificial Sequence
  Cyclic GFR-binding peptide
  MOD_RES (1)..(3): Xaa is C or S
XKXSKVIMPYVKLIKPTKGIFFLISLSSL

SEQ ID NO: 70352 - protein, 26 aa, Artificial Sequence
  Cyclic GFR-binding peptide
  MOD_RES (26)..(26): Xaa is C or S
PYVKLVVKDYEDFFLMSLSSLETPVX

SEQ ID NO: 70353 - protein, 36 aa, Artificial Sequence; identical to SEQ ID NO: 23148
  Cyclic GFR-binding peptide
  MOD_RES (2)..(35)..(36): Xaa is C or S

SEQ ID NO: 70354 - protein, 29 aa, Artificial Sequence
  Cyclic GFR-binding peptide
  MOD_RES (2)..(4): Xaa is C or S
SXKXSKVVMPYVKLVKPTRGVFFLISLSS

SEQ ID NO: 70355 - protein, 36 aa, Artificial Sequence; identical to SEQ ID NO: 23149
  Cyclic GFR-binding peptide
  MOD_RES (1)..(32)..(33): Xaa is C or S

SEQ ID NO: 70356 - protein, 35 aa, Artificial Sequence; identical to SEQ ID NO: 23153
  Cyclic GFR-binding peptide
  MOD_RES (2)..(35): Xaa is C or S

SEQ ID NO: 70357 - protein, 38 aa, Artificial Sequence; identical to SEQ ID NO: 23154
  Cyclic GFR-binding peptide
  MOD_RES (2)..(4)..(36)..(37): Xaa is C or S

SEQ ID NO: 70358 - protein, 30 aa, Artificial Sequence
  Cyclic GFR-binding peptide
  MOD_RES (28)..(29): Xaa is C or S
GEPYVKLTPVGMDDFFLVSLSSLKTPVXXA

SEQ ID NO: 70359 - protein, 33 aa, Artificial Sequence; identical to SEQ ID NO: 23156
  Cyclic GFR-binding peptide

SEQ ID NO: 70360 - protein, 41 aa, Artificial Sequence; identical to SEQ ID NO: 23157
  Cyclic GFR-binding peptide
  MOD_RES (1)..(35): Xaa is C or S

SEQ ID NO: 70361 - protein, 31 aa, Artificial Sequence
  Cyclic GFR-binding peptide
  MOD_RES (28)..(29): Xaa is C or S
IMPYVKLIKPTKGIFFLISLSSLDQSVXXPS

SEQ ID NO: 70362 - protein, 41 aa, Artificial Sequence
  Cyclic GFR-binding peptide
  MOD_RES (2)..(4)..(36)..(37): Xaa is C or S
RXGXGEVVMDPYVKLVVKENEDFFLMSLSSLETPVXXAKPI

SEQ ID NO: 70363 - protein, 31 aa, Artificial Sequence
  Cyclic GFR-binding peptide
  MOD_RES (28)..(29): Xaa is C or S
MGPYVKLYTVVGKDFFLISLSSLKTPVXXAK

SEQ ID NO: 70364 - protein, 37 aa, Artificial Sequence
  Cyclic GFR-binding peptide
  MOD_RES (1)..(33)..(34): Xaa is C or S
XGEVVMDPYVKLVVKENEDFFLMSLSSLETPVXXAKP

SEQ ID NO: 70365 - protein, 26 aa, Artificial Sequence
  Cyclic GFR-binding peptide
GPYVKLYTVVGKDFFLISLSSLKTPV

SEQ ID NO: 70366 - protein, 39 aa, Artificial Sequence; identical to SEQ ID NO: 23159
  Cyclic GFR-binding peptide
  MOD_RES (2)..(33)..(34): Xaa is C or S

SEQ ID NO: 70367 - protein, 24 aa, Artificial Sequence
  Cyclic GFR-binding peptide
VVMDPYVKLVVKENEDFFLMSLSS

SEQ ID NO: 70368 - protein, 22 aa, Artificial Sequence
  Cyclic GFR-binding peptide
GEPYVKLTPVGMDDFFLVSLSS

SEQ ID NO: 70369 - protein, 36 aa, Artificial Sequence; identical to SEQ ID NO: 23161
  Cyclic GFR-binding peptide
  MOD_RES (32)..(33): Xaa is C or S

SEQ ID NO: 70370 - protein, 37 aa, Artificial Sequence; identical to SEQ ID NO: 23162
  Cyclic GFR-binding peptide
  MOD_RES (31)..(32): Xaa is C or S

SEQ ID NO: 70371 - protein, 30 aa, Artificial Sequence
  Cyclic GFR-binding peptide
AKVVMNPYVKLIVNNSSDFFLVSLSSLKTP

SEQ ID NO: 70372 - protein, 23 aa, Artificial Sequence
  Cyclic GFR-binding peptide
PYVKLVVNNAADFFLISLSSLRA

SEQ ID NO: 70373 - protein, 26 aa, Artificial Sequence
  Cyclic GFR-binding peptide
DPYVKLVVNNASDFFLISLSSLRTPV

SEQ ID NO: 70374 - protein, 30 aa, Artificial Sequence; identical to SEQ ID NO: 23163
  Cyclic GFR-binding peptide

SEQ ID NO: 70375 - protein, 25 aa, Artificial Sequence
  Cyclic GFR-binding peptide
PYVKLIKPTKGIFFLISLSSLDQSV

SEQ ID NO: 70376 - protein, 32 aa, Artificial Sequence; identical to SEQ ID NO: 23164
  Cyclic GFR-binding peptide
  MOD_RES (31)..(32): Xaa is C or S

SEQ ID NO: 70377 - protein, 36 aa, Artificial Sequence; identical to SEQ ID NO: 23165
  Cyclic GFR-binding peptide
  MOD_RES (31)..(31): Xaa is C or S

SEQ ID NO: 70378 - protein, 33 aa, Artificial Sequence; identical to SEQ ID NO: 23166
  Cyclic GFR-binding peptide
  MOD_RES (2)..(2): Xaa is C or S

SEQ ID NO: 70379 - protein, 39 aa, Artificial Sequence; identical to SEQ ID NO: 23170
  Cyclic GFR-binding peptide
  MOD_RES (1)..(33)..(34): Xaa is C or S

SEQ ID NO: 70380 - protein, 35 aa, Artificial Sequence; identical to SEQ ID NO: 23172
  Cyclic GFR-binding peptide
  MOD_RES (1)..(33)..(34): Xaa is C or S

SEQ ID NO: 70381 - protein, 37 aa, Artificial Sequence
  Cyclic GFR-binding peptide
  MOD_RES (34)..(34): Xaa is C or S
EELRPYVKLLKPKKRVYEFFLVSLSSHHVRSPQXKVS

SEQ ID NO: 70382 - protein, 32 aa, Artificial Sequence
  Cyclic GFR-binding peptide
  MOD_RES (1)..(3): Xaa is C or S
XKXSKVIMPYVKLIKPTKGIFFLISLSSLDQS

SEQ ID NO: 70383 - protein, 38 aa, Artificial Sequence; identical to SEQ ID NO: 23171
  Cyclic GFR-binding peptide
  MOD_RES (2)..(34)..(35): Xaa is C or S

SEQ ID NO: 70384 - protein, 30 aa, Artificial Sequence
  Cyclic GFR-binding peptide
  MOD_RES (26)..(27): Xaa is C or S
PYVKLIIQQKDNFFLMSLSSMKTPTXXPGA

SEQ ID NO: 70385 - protein, 22 aa, Artificial Sequence
  Cyclic GFR-binding peptide
PYVKLIIQQKDNFFLMSLSSMK

SEQ ID NO: 70386 - protein, 38 aa, Artificial Sequence; identical to SEQ ID NO: 23174
  Cyclic GFR-binding peptide
  MOD_RES (32)..(33): Xaa is C or S

SEQ ID NO: 70387 - protein, 24 aa, Artificial Sequence
  Cyclic GFR-binding peptide
PYVKLVVKENEDFFLMSLSSLETP

SEQ ID NO: 70388 - protein, 33 aa, Artificial Sequence
  Cyclic GFR-binding peptide
  MOD_RES (1)..(3): Xaa is C or S
XGXESVAMGPYVKLYTVVGKDFFLISLSSLKTP

SEQ ID NO: 70389 - protein, 32 aa, Artificial Sequence; identical to SEQ ID NO: 23175
  Cyclic GFR-binding peptide
  MOD_RES (32)..(32): Xaa is C or S

SEQ ID NO: 70390 - protein, 37 aa, Artificial Sequence; identical to SEQ ID NO: 23176
  Cyclic GFR-binding peptide
  MOD_RES (2)..(4)..(35)..(36): Xaa is C or S

SEQ ID NO: 70391 - protein, 43 aa, Artificial Sequence; identical to SEQ ID NO: 23177
  Cyclic GFR-binding peptide
  MOD_RES (2)..(4)..(41): Xaa is C or S

SEQ ID NO: 70392 - protein, 32 aa, Artificial Sequence
  Cyclic GFR-binding peptide
  MOD_RES (30)..(30): Xaa is C or S
VVMNPYVKLIVNSSDDFFLVSLSSLKTPAXTP

SEQ ID NO: 70393 - protein, 20 aa, Artificial Sequence
  Cyclic GFR-binding peptide
PYVKLIVNSSDDFFLVSLSS

SEQ ID NO: 70394 - protein, 35 aa, Artificial Sequence
  Cyclic GFR-binding peptide
  MOD_RES (29)..(30): Xaa is C or S
VMNPYVKLIVNNSSDFFLVSLSSLKTPAXXAKPVA

SEQ ID NO: 70395 - protein, 28 aa, Artificial Sequence
  Cyclic GFR-binding peptide
  MOD_RES (1)..(1): Xaa is C or S
XAKVVMNPYVKLIVNNSSDFFLVSLSSL

SEQ ID NO: 70396 - protein, 30 aa, Artificial Sequence
  Cyclic GFR-binding peptide
  MOD_RES (29)..(30): Xaa is C or S
VIMPYVKLIKPTKGIFFLISLSSLDQSVXX

SEQ ID NO: 70397 - protein, 31 aa, Artificial Sequence
  Cyclic GFR-binding peptide
  MOD_RES (26)..(27): Xaa is C or S
PYVKLVVKDYEDFFLMSLSSLETPVXXAKPI

SEQ ID NO: 70398 - protein, 39 aa, Artificial Sequence
  Cyclic GFR-binding peptide
  MOD_RES (1)..(33)..(34): Xaa is C or S
XGEVVMDPYVKLVVKENEDFFLMSLSSLETPVXXAKPIK

SEQ ID NO: 70399 - protein, 33 aa, Artificial Sequence
  Cyclic GFR-binding peptide
  MOD_RES (29)..(30): Xaa is C or S
VMEPYVKLVVKDYEDFFLMSLSSLETPVXXAKP

SEQ ID NO: 70400 - protein, 25 aa, Artificial Sequence
  Cyclic GFR-binding peptide
PYVKLVVKENEDFFLMSLSSLETPV

SEQ ID NO: 70401 - protein, 28 aa, Artificial Sequence
  Cyclic GFR-binding peptide
  MOD_RES (2)..(2): Xaa is C or S
GXEEVIMPYVKLLLVRGNDFFLMSLSST

SEQ ID NO: 70402 - protein, 25 aa, Artificial Sequence
  Cyclic GFR-binding peptide
DVVMGPYVKLIIQQKDNFFLMSLSS

SEQ ID NO: 70403 - protein, 34 aa, Artificial Sequence
  Cyclic GFR-binding peptide
  MOD_RES (29)..(30): Xaa is C or S
VMNPYVKLIVNSSDDFFLVSLSSLKTPAXXPKPV

SEQ ID NO: 70404 - protein, 32 aa, Artificial Sequence
  Cyclic GFR-binding peptide
  MOD_RES (2)..(4): Xaa is C or S
SXKXSRVIMPYVKLVKPKRGVFFLISLSSLAQ

SEQ ID NO: 70405 - protein, 26 aa, Artificial Sequence
  Cyclic GFR-binding peptide
SKVIMPYVKLIKPTKGIFFLISLSSL

SEQ ID NO: 70406 - protein, 30 aa, Artificial Sequence
  Cyclic GFR-binding peptide
HQLFPYVKLHQGQHPKIRFFLMSLSSEETP

SEQ ID NO: 70407 - protein, 34 aa, Artificial Sequence
  Cyclic GFR-binding peptide
  MOD_RES (34)..(34): Xaa is C or S
EELRPYVKLLKPKKRVYEFFLVSLSSHHVRSPQX

SEQ ID NO: 70408 - protein, 21 aa, Artificial Sequence
  Cyclic GFR-binding peptide
MPYVKLLLVRGNDFFLMSLSS

SEQ ID NO: 70409 - protein, 33 aa, Artificial Sequence; identical to SEQ ID NO: 23183
  Cyclic GFR-binding peptide
  MOD_RES (2)..(33): Xaa is C or S

SEQ ID NO: 70410 - protein, 36 aa, Artificial Sequence
  Cyclic GFR-binding peptide
  MOD_RES (32)..(33): Xaa is C or S
GEVVMDPYVKLVVKENEDFFLMSLSSLETPVXXAKP

SEQ ID NO: 70411 - protein, 25 aa, Artificial Sequence
  Cyclic GFR-binding peptide
EVIMPYVKLLLVRGNDFFLMSLSST

SEQ ID NO: 70412 - protein, 34 aa, Artificial Sequence
  Cyclic GFR-binding peptide
  MOD_RES (30)..(30): Xaa is C or S
PYVKLLKPKKRVYEFFLVSLSSHHVRSPQXKVSS

SEQ ID NO: 70413 - protein, 30 aa, Artificial Sequence
  Cyclic GFR-binding peptide
  MOD_RES (30)..(30): Xaa is C or S
KVIMPYVKLIKPTKGIFFLISLSSLDQSVX

SEQ ID NO: 70414 - protein, 25 aa, Artificial Sequence
  Cyclic GFR-binding peptide
IMPYVKLIKPTKGIFFLISLSSLDQ

SEQ ID NO: 70415 - protein, 32 aa, Artificial Sequence
  Cyclic GFR-binding peptide
  MOD_RES (26)..(27): Xaa is C or S
PYVKLVVNNASDFFLISLSSLRTPVXXTPPTS

SEQ ID NO: 70416 - protein, 31 aa, Artificial Sequence
  Cyclic GFR-binding peptide
NHQLFPYVKLHQGQHPKIRFFLMSLSSEETP

SEQ ID NO: 70417 - protein, 26 aa, Artificial Sequence
  Cyclic GFR-binding peptide
SVAMGPYVKLYTVVGKDFFLISLSSL

SEQ ID NO: 70418 - protein, 25 aa, Artificial Sequence
  Cyclic GFR-binding peptide
VIMPYVKLIKPTKGIFFLISLSSLD

SEQ ID NO: 70419 - protein, 27 aa, Artificial Sequence
  Cyclic GFR-binding peptide
  MOD_RES (26)..(27): Xaa is C or S
PYVKLVVNNAADFFLISLSSLRAPVXX

SEQ ID NO: 70420 - protein, 31 aa, Artificial Sequence; identical to SEQ ID NO: 23189
  Cyclic GFR-binding peptide
  MOD_RES (31)..(31): Xaa is C or S

SEQ ID NO: 70421 - protein, 41 aa, Artificial Sequence; identical to SEQ ID NO: 23191
  Cyclic GFR-binding peptide
  MOD_RES (1)..(3)..(35)..(36): Xaa is C or S

SEQ ID NO: 70422 - protein, 25 aa, Artificial Sequence
  Cyclic GFR-binding peptide
VIMPYVKLLLVRGNDFFLMSLSSTK

SEQ ID NO: 70423 - protein, 39 aa, Artificial Sequence; identical to SEQ ID NO: 23192
  Cyclic GFR-binding peptide
  MOD_RES (2)..(4)..(36)..(37): Xaa is C or S

SEQ ID NO: 70424 - protein, 30 aa, Artificial Sequence
  Cyclic GFR-binding peptide
  MOD_RES (29)..(30): Xaa is C or S
MGEPYVKLTPVGMDDFFLVSLSSLKTPVXX

SEQ ID NO: 70425 - protein, 40 aa, Artificial Sequence; identical to SEQ ID NO: 23193
  Cyclic GFR-binding peptide
  MOD_RES (2)..(36): Xaa is C or S

SEQ ID NO: 70426 - protein, 30 aa, Artificial Sequence
  Cyclic GFR-binding peptide
  MOD_RES (2)..(4): Xaa is C or S
RXGXSEVVMDPYVKLVVNNASDFFLISLSS

SEQ ID NO: 70427 - protein, 34 aa, Artificial Sequence
  Cyclic GFR-binding peptide
  MOD_RES (2)..(4): Xaa is C or S
AXAXELHEELRPYVKLLKPKKRVYEFFLVSLSSH

SEQ ID NO: 70428 - protein, 37 aa, Artificial Sequence; identical to SEQ ID NO: 23196
  Cyclic GFR-binding peptide
  MOD_RES (32)..(33): Xaa is C or S

SEQ ID NO: 70429 - protein, 34 aa, Artificial Sequence
  Cyclic GFR-binding peptide
  MOD_RES (2)..(4): Xaa is C or S
RXGXAEVVMDPYVKLVVNNAADFFLISLSSLRAP

SEQ ID NO: 70430 - protein, 35 aa, Artificial Sequence
  Cyclic GFR-binding peptide
  MOD_RES (31)..(32): Xaa is C or S
EVVMDPYVKLVVKENEDFFLMSLSSLETPVXXAKP

SEQ ID NO: 70431 - protein, 40 aa, Artificial Sequence; identical to SEQ ID NO: 23199
  Cyclic GFR-binding peptide
  MOD_RES (1)..(3)..(40): Xaa is C or S

SEQ ID NO: 70432 - protein, 36 aa, Artificial Sequence; identical to SEQ ID NO: 23198
  Cyclic GFR-binding peptide
  MOD_RES (1)..(33)..(34): Xaa is C or S

SEQ ID NO: 70433 - protein, 31 aa, Artificial Sequence
  Cyclic GFR-binding peptide
  MOD_RES (28)..(29): Xaa is C or S
MNPYVKLIVNSSDDFFLVSLSSLQTPAXXPK

SEQ ID NO: 70434 - protein, 31 aa, Artificial Sequence
  Cyclic GFR-binding peptide
  MOD_RES (30)..(31): Xaa is C or S
VVMNPYVKLIVNNSSDFFLVSLSSLKTPAXX

SEQ ID NO: 70435 - protein, 40 aa, Artificial Sequence
  Cyclic GFR-binding peptide
  MOD_RES (2)..(4)..(36)..(37): Xaa is C or S
RXGXGEVVMDPYVKLVVKENEDFFLMSLSSLETPVXXAKP

SEQ ID NO: 70436 - protein, 39 aa, Artificial Sequence; identical to SEQ ID NO: 23204
  Cyclic GFR-binding peptide
  MOD_RES (1)..(3)..(35)..(36): Xaa is C or S

SEQ ID NO: 70437 - protein, 41 aa, Artificial Sequence; identical to SEQ ID NO: 23205
  Cyclic GFR-binding peptide
  MOD_RES (2)..(4)..(36)..(37): Xaa is C or S

SEQ ID NO: 70438 - protein, 43 aa, Artificial Sequence; identical to SEQ ID NO: 23206
  Cyclic GFR-binding peptide
  MOD_RES (2)..(4)..(38): Xaa is C or S

SEQ ID NO: 70439 - protein, 35 aa, Artificial Sequence; identical to SEQ ID NO: 23207
  Cyclic GFR-binding peptide
  MOD_RES (2)..(34): Xaa is C or S

SEQ ID NO: 70440 - protein, 23 aa, Artificial Sequence
  Cyclic GFR-binding peptide
PYVKLVKPTRGVFFLISLSSLDQ

SEQ ID NO: 70441 - protein, 25 aa, Artificial Sequence
  Cyclic GFR-binding peptide
MDPYVKLVVKENEDFFLMSLSSLET

SEQ ID NO: 70442 - protein, 32 aa, Artificial Sequence
  Cyclic GFR-binding peptide
  MOD_RES (30)..(31): Xaa is C or S
VVMNPYVKLIVNSSDDFFLVSLSSLKTPAXXP

SEQ ID NO: 70443 - protein, 30 aa, Artificial Sequence
  Cyclic GFR-binding peptide
  MOD_RES (29)..(30): Xaa is C or S
VMNPYVKLIVNSSDDFFLVSLSSLQTPAXX

SEQ ID NO: 70444 - protein, 21 aa, Artificial Sequence
  Cyclic GFR-binding peptide
PYVKLIVNNSSDFFLVSLSSL

SEQ ID NO: 70445 - protein, 24 aa, Artificial Sequence
  Cyclic GFR-binding peptide
VVMDPYVKLVVNNAADFFLISLSS

SEQ ID NO: 70446 - protein, 36 aa, Artificial Sequence; identical to SEQ ID NO: 23210
  Cyclic GFR-binding peptide
  MOD_RES (2)..(4)..(36): Xaa is C or S

SEQ ID NO: 70447 - protein, 31 aa, Artificial Sequence
  Cyclic GFR-binding peptide
  MOD_RES (28)..(29): Xaa is C or S
MEPYVKLVVKDYEDFFLMSLSSLETPVXXAK

SEQ ID NO: 70448 - protein, 34 aa, Artificial Sequence
  Cyclic GFR-binding peptide
  MOD_RES (30)..(31): Xaa is C or S
VVMDPYVKLVVNNAADFFLISLSSLRAPVXXSAP

SEQ ID NO: 70449 - protein, 38 aa, Artificial Sequence; identical to SEQ ID NO: 23211
  Cyclic GFR-binding peptide
  MOD_RES (2)..(4)..(36)..(37): Xaa is C or S

SEQ ID NO: 70450 - protein, 30 aa, Artificial Sequence
  Cyclic GFR-binding peptide
  MOD_RES (1)..(1): Xaa is C or S
XSRVIMPYVKLVKPKRGVFFLISLSSLAQP

SEQ ID NO: 70451 - protein, 34 aa, Artificial Sequence; identical to SEQ ID NO: 23213
  Cyclic GFR-binding peptide
  MOD_RES (1)..(3): Xaa is C or S

SEQ ID NO: 70452 - protein, 37 aa, Artificial Sequence; identical to SEQ ID NO: 23214
  Cyclic GFR-binding peptide
  MOD_RES (2)..(4)..(36)..(37): Xaa is C or S

SEQ ID NO: 70453 - protein, 37 aa, Artificial Sequence; identical to SEQ ID NO: 23215
  Cyclic GFR-binding peptide
  MOD_RES (2)..(34)..(35): Xaa is C or S

SEQ ID NO: 70454 - protein, 37 aa, Artificial Sequence
  Cyclic GFR-binding peptide
  MOD_RES (31)..(31): Xaa is C or S
QLFPYVKLHQGQHPKIRFFLMSLSSEETPVXELGEDN

SEQ ID NO: 70455 - protein, 33 aa, Artificial Sequence
  Cyclic GFR-binding peptide
  MOD_RES (2)..(4): Xaa is C or S
HXGXAKVVMNPYVKLIVNNSSDFFLVSLSSLKT

SEQ ID NO: 70456 - protein, 28 aa, Artificial Sequence
  Cyclic GFR-binding peptide
  MOD_RES (26)..(27): Xaa is C or S
PYVKLVKPTRGVFFLISLSSLDQPVXXP

SEQ ID NO: 70457 - protein, 29 aa, Artificial Sequence
  Cyclic GFR-binding peptide
  MOD_RES (26)..(27): Xaa is C or S
PYVKLYTVVGKDFFLISLSSLKTPVXXAK

SEQ ID NO: 70458 - protein, 39 aa, Artificial Sequence; identical to SEQ ID NO: 23219
  Cyclic GFR-binding peptide
  MOD_RES (2)..(33)..(34): Xaa is C or S

SEQ ID NO: 70459 - protein, 38 aa, Artificial Sequence; identical to SEQ ID NO: 23220
  Cyclic GFR-binding peptide
  MOD_RES (1)..(33)..(34): Xaa is C or S

SEQ ID NO: 70460 - protein, 27 aa, Artificial Sequence
  Cyclic GFR-binding peptide
GEVVMDPYVKLVVKENEDFFLMSLSSL

SEQ ID NO: 70461 - protein, 28 aa, Artificial Sequence
  Cyclic GFR-binding peptide
VVMNPYVKLIVNNSSDFFLVSLSSLKTP

SEQ ID NO: 70462 - protein, 33 aa, Artificial Sequence
  Cyclic GFR-binding peptide
  MOD_RES (2)..(4): Xaa is C or S
SXKXSKVVMPYVKLVKPTRGVFFLISLSSLDQP

SEQ ID NO: 70463 - protein, 33 aa, Artificial Sequence
  Cyclic GFR-binding peptide
  MOD_RES (30)..(31): Xaa is C or S
VVMEPYVKLVVKDYEDFFLMSLSSLETPVXXAK

SEQ ID NO: 70464 - protein, 33 aa, Artificial Sequence
  Cyclic GFR-binding peptide
  MOD_RES (32)..(33): Xaa is C or S
AVSMGEPYVKLTPVGMDDFFLVSLSSLKTPVXX

SEQ ID NO: 70465 - protein, 34 aa, Artificial Sequence
  Cyclic GFR-binding peptide
  MOD_RES (29)..(30): Xaa is C or S
MGEPYVKLTPVGMDDFFLVSLSSLKTPVXXAKGV

SEQ ID NO: 70466 - protein, 41 aa, Artificial Sequence; identical to SEQ ID NO: 23223
  Cyclic GFR-binding peptide
  MOD_RES (2)..(35)..(36): Xaa is C or S

SEQ ID NO: 70467 - protein, 31 aa, Artificial Sequence
  Cyclic GFR-binding peptide
  MOD_RES (2)..(2): Xaa is C or S
GXEAVSMGEPYVKLTPVGMDDFFLVSLSSLK

SEQ ID NO: 70468 - protein, 27 aa, Artificial Sequence
  Cyclic GFR-binding peptide
GEVVMEPYVKLVVKDYEDFFLMSLSSL

SEQ ID NO: 70469 - protein, 30 aa, Artificial Sequence
  Cyclic GFR-binding peptide
  MOD_RES (26)..(26): Xaa is C or S
PYVKLIVNSSDDFFLVSLSSLKTPAXTPKT

SEQ ID NO: 70470 - protein, 34 aa, Artificial Sequence; identical to SEQ ID NO: 23225
  Cyclic GFR-binding peptide
  MOD_RES (2)..(4): Xaa is C or S

SEQ ID NO: 70471 - protein, 33 aa, Artificial Sequence
  Cyclic GFR-binding peptide
  MOD_RES (27)..(28): Xaa is C or S
GPYVKLIIQQKDNFFLMSLSSMKTPTXXPGASG

SEQ ID NO: 70472 - protein, 30 aa, Artificial Sequence
  Cyclic GFR-binding peptide
  MOD_RES (27)..(28): Xaa is C or S
MPYVKLVKPTRGVFFLISLSSLDQPVXXPS

SEQ ID NO: 70473 - protein, 30 aa, Artificial Sequence
  Cyclic GFR-binding peptide
AEVVMDPYVKLVVNNAADFFLISLSSLRAP

SEQ ID NO: 70474 - protein, 41 aa, Artificial Sequence; identical to SEQ ID NO: 23229
  Cyclic GFR-binding peptide
  MOD_RES (2)..(39): Xaa is C or S

SEQ ID NO: 70475 - protein, 30 aa, Artificial Sequence
  Cyclic GFR-binding peptide
  MOD_RES (2)..(4): Xaa is C or S
SXGXRDVVMGPYVKLIIQQKDNFFLMSLSS

SEQ ID NO: 70476 - protein, 28 aa, Artificial Sequence
  Cyclic GFR-binding peptide
  MOD_RES (2)..(2): Xaa is C or S
KXSKVIMPYVKLIKPTKGIFFLISLSSL

SEQ ID NO: 70477 - protein, 34 aa, Artificial Sequence
  Cyclic GFR-binding peptide
  MOD_RES (30)..(31): Xaa is C or S
VAMGPYVKLYTVVGKDFFLISLSSLKTPVXXAKS

SEQ ID NO: 70478 - protein, 32 aa, Artificial Sequence
  Cyclic GFR-binding peptide
  MOD_RES (29)..(30): Xaa is C or S
VIMPYVKLVKPKRGVFFLISLSSLAQPVXXPA

SEQ ID NO: 70479 - protein, 29 aa, Artificial Sequence
  Cyclic GFR-binding peptide
  MOD_RES (28)..(29): Xaa is C or S
MNPYVKLIVNSSDDFFLVSLSSLQTPAXX

SEQ ID NO: 70480 - protein, 29 aa, Artificial Sequence
  Cyclic GFR-binding peptide
EVIMPYVKLLLVRGNDFFLMSLSSTKVPA

SEQ ID NO: 70481 - protein, 32 aa, Artificial Sequence; identical to SEQ ID NO: 23230
  Cyclic GFR-binding peptide
  MOD_RES (32)..(32): Xaa is C or S

SEQ ID NO: 70482 - protein, 33 aa, Artificial Sequence
  Cyclic GFR-binding peptide
  MOD_RES (1)..(3): Xaa is C or S
XAXELHEELRPYVKLLKPKKRVYEFFLVSLSSH

SEQ ID NO: 70483 - protein, 34 aa, Artificial Sequence; identical to SEQ ID NO: 23231
  Cyclic GFR-binding peptide
  MOD_RES (1)..(3): Xaa is C or S

SEQ ID NO: 70484 - protein, 31 aa, Artificial Sequence
  Cyclic GFR-binding peptide
  MOD_RES (31)..(31): Xaa is C or S
QLFPYVKLHQGQHPKIRFFLMSLSSEETPVX

SEQ ID NO: 70485 - protein, 34 aa, Artificial Sequence
  Cyclic GFR-binding peptide
  MOD_RES (28)..(29): Xaa is C or S
MDPYVKLVVKENEDFFLMSLSSLETPVXXAKPIK

SEQ ID NO: 70486 - protein, 30 aa, Artificial Sequence; identical to SEQ ID NO: 1818
  Cyclic GFR-binding peptide

SEQ ID NO: 70487 - protein, 26 aa, Artificial Sequence
  Cyclic GFR-binding peptide
SRVIMPYVKLVKPKRGVFFLISLSSL

SEQ ID NO: 70488 - protein, 23 aa, Artificial Sequence
  Cyclic GFR-binding peptide
AMGPYVKLYTVVGKDFFLISLSS

SEQ ID NO: 70489 - protein, 37 aa, Artificial Sequence; identical to SEQ ID NO: 23236
  Cyclic GFR-binding peptide
  MOD_RES (2)..(33)..(34): Xaa is C or S

SEQ ID NO: 70490 - protein, 27 aa, Artificial Sequence
  Cyclic GFR-binding peptide
  MOD_RES (26)..(27): Xaa is C or S
PYVKLVKPTRGVFFLISLSSLDQPVXX

SEQ ID NO: 70491 - protein, 25 aa, Artificial Sequence
  Cyclic GFR-binding peptide
VMNPYVKLIVNNSSDFFLVSLSSLK

SEQ ID NO: 70492 - protein, 30 aa, Artificial Sequence
  Cyclic GFR-binding peptide
  MOD_RES (1)..(1): Xaa is C or S
XEEVIMPYVKLLLVRGNDFFLMSLSSTKVP

SEQ ID NO: 70493 - protein, 29 aa, Artificial Sequence
  Cyclic GFR-binding peptide
  MOD_RES (2)..(2): Xaa is C or S
KXSKVVMPYVKLVKPTRGVFFLISLSSLD

SEQ ID NO: 70494 - protein, 32 aa, Artificial Sequence
  Cyclic GFR-binding peptide
  MOD_RES (2)..(4): Xaa is C or S
SXKXSKVVMPYVKLVKPTRGVFFLISLSSLDQ

SEQ ID NO: 70495 - protein, 22 aa, Artificial Sequence
  Cyclic GFR-binding peptide
MEPYVKLVVKDYEDFFLMSLSS

SEQ ID NO: 70496 - protein, 24 aa, Artificial Sequence
  Cyclic GFR-binding peptide
PYVKLHQGQHPKIRFFLMSLSSEE

SEQ ID NO: 70497 - protein, 27 aa, Artificial Sequence
  Cyclic GFR-binding peptide
  MOD_RES (1)..(1): Xaa is C or S
XSKVVMPYVKLVKPTRGVFFLISLSSL

SEQ ID NO: 70498 - protein, 35 aa, Artificial Sequence
  Cyclic GFR-binding peptide
  MOD_RES (29)..(30): Xaa is C or S
VMDPYVKLVVNNASDFFLISLSSLRTPVXXTPPTS

SEQ ID NO: 70499 - protein, 34 aa, Artificial Sequence; identical to SEQ ID NO: 23239
  Cyclic GFR-binding peptide
  MOD_RES (1)..(32)..(33): Xaa is C or S

SEQ ID NO: 70500 - protein, 27 aa, Artificial Sequence
  Cyclic GFR-binding peptide
MDPYVKLVVKENEDFFLMSLSSLETPV

SEQ ID NO: 70501 - protein, 25 aa, Artificial Sequence
  Cyclic GFR-binding peptide
MGPYVKLIIQQKDNFFLMSLSSMKT

SEQ ID NO: 70502 - protein, 36 aa, Artificial Sequence; identical to SEQ ID NO: 23240
  Cyclic GFR-binding peptide
  MOD_RES (32)..(33): Xaa is C or S

SEQ ID NO: 70503 - protein, 33 aa, Artificial Sequence
  Cyclic GFR-binding peptide
  MOD_RES (29)..(30): Xaa is C or S
VMDPYVKLVVNNAADFFLISLSSLRAPVXXSAP

SEQ ID NO: 70504 - protein, 32 aa, Artificial Sequence; identical to SEQ ID NO: 23242
  Cyclic GFR-binding peptide
  MOD_RES (2)..(2): Xaa is C or S

SEQ ID NO: 70505 - protein, 38 aa, Artificial Sequence; identical to SEQ ID NO: 23245
  Cyclic GFR-binding peptide
  MOD_RES (1)..(3)..(37): Xaa is C or S

SEQ ID NO: 70506 - protein, 29 aa, Artificial Sequence
  Cyclic GFR-binding peptide
  MOD_RES (29)..(29): Xaa is C or S
VMGPYVKLIIQQKDNFFLMSLSSMKTPTX

SEQ ID NO: 70507 - protein, 38 aa, Artificial Sequence; identical to SEQ ID NO: 23244
  Cyclic GFR-binding peptide
  MOD_RES (1)..(3)..(35)..(36): Xaa is C or S

SEQ ID NO: 70508 - protein, 36 aa, Artificial Sequence
  Cyclic GFR-binding peptide
  MOD_RES (31)..(31): Xaa is C or S
QLFPYVKLHQGQHPKIRFFLMSLSSEETPVXELGED

SEQ ID NO: 70509 - protein, 31 aa, Artificial Sequence
  Cyclic GFR-binding peptide
  MOD_RES (26)..(27): Xaa is C or S
PYVKLVVKENEDFFLMSLSSLETPVXXAKPI

SEQ ID NO: 70510 - protein, 40 aa, Artificial Sequence; identical to SEQ ID NO: 23249
  Cyclic GFR-binding peptide
  MOD_RES (2)..(4)..(36)..(37): Xaa is C or S

SEQ ID NO: 70511 - protein, 30 aa, Artificial Sequence
  Cyclic GFR-binding peptide
RDVVMGPYVKLIIQQKDNFFLMSLSSMKTP

SEQ ID NO: 70512 - protein, 31 aa, Artificial Sequence
  Cyclic GFR-binding peptide
  MOD_RES (28)..(29): Xaa is C or S
IMPYVKLVKPKRGVFFLISLSSLAQPVXXPA

SEQ ID NO: 70513 - protein, 24 aa, Artificial Sequence
  Cyclic GFR-binding peptide
VMEPYVKLVVKDYEDFFLMSLSSL

SEQ ID NO: 70514 - protein, 34 aa, Artificial Sequence
  Cyclic GFR-binding peptide
  MOD_RES (30)..(31): Xaa is C or S
KVVMPYVKLVKPTRGVFFLISLSSLDQPVXXPSA

SEQ ID NO: 70515 - protein, 32 aa, Artificial Sequence
  Cyclic GFR-binding peptide
  MOD_RES (30)..(31): Xaa is C or S
KVVMPYVKLVKPTRGVFFLISLSSLDQPVXXP

SEQ ID NO: 70516 - protein, 38 aa, Artificial Sequence; identical to SEQ ID NO: 23254
  Cyclic GFR-binding peptide
  MOD_RES (1)..(3)..(34)..(35): Xaa is C or S

SEQ ID NO: 70517 - protein, 20 aa, Artificial Sequence
  Cyclic GFR-binding peptide
PYVKLVKPKRGVFFLISLSS

SEQ ID NO: 70518 - protein, 33 aa, Artificial Sequence
  Cyclic GFR-binding peptide
ELHEELRPYVKLLKPKKRVYEFFLVSLSSHHVR

SEQ ID NO: 70519 - protein, 37 aa, Artificial Sequence; identical to SEQ ID NO: 23256
  Cyclic GFR-binding peptide
  MOD_RES (32)..(33): Xaa is C or S

SEQ ID NO: 70520 - protein, 34 aa, Artificial Sequence; identical to SEQ ID NO: 23257
  Cyclic GFR-binding peptide
  MOD_RES (2)..(4): Xaa is C or S

SEQ ID NO: 70521 - protein, 29 aa, Artificial Sequence
  Cyclic GFR-binding peptide
  MOD_RES (28)..(29): Xaa is C or S
MDPYVKLVVNNAADFFLISLSSLRAPVXX

SEQ ID NO: 70522 - protein, 28 aa, Artificial Sequence
  Cyclic GFR-binding peptide
VVMGPYVKLIIQQKDNFFLMSLSSMKTP

SEQ ID NO: 70523 - protein, 31 aa, Artificial Sequence
  Cyclic GFR-binding peptide
  MOD_RES (30)..(31): Xaa is C or S
VVMDPYVKLVVKENEDFFLMSLSSLETPVXX

SEQ ID NO: 70524 - protein, 20 aa, Artificial Sequence
  Cyclic GFR-binding peptide
PYVKLVKPTRGVFFLISLSS

SEQ ID NO: 70525 - protein, 38 aa, Artificial Sequence; identical to SEQ ID NO: 23258
  Cyclic GFR-binding peptide
  MOD_RES (2)..(4)..(38): Xaa is C or S

SEQ ID NO: 70526 - protein, 25 aa, Artificial Sequence
  Cyclic GFR-binding peptide
PYVKLLKPKKRVYEFFLVSLSSHHV

SEQ ID NO: 70527 - protein, 29 aa, Artificial Sequence
  Cyclic GFR-binding peptide
  MOD_RES (27)..(28): Xaa is C or S
MPYVKLIKPTKGIFFLISLSSLDQSVXXP

SEQ ID NO: 70528 - protein, 36 aa, Artificial Sequence; identical to SEQ ID NO: 23261
  Cyclic GFR-binding peptide
  MOD_RES (1)..(33): Xaa is C or S

SEQ ID NO: 70529 - protein, 37 aa, Artificial Sequence; identical to SEQ ID NO: 23263
  Cyclic GFR-binding peptide
  MOD_RES (35)..(35): Xaa is C or S

SEQ ID NO: 70530 - protein, 28 aa, Artificial Sequence
  Cyclic GFR-binding peptide
  MOD_RES (26)..(27): Xaa is C or S
PYVKLVVKDYEDFFLMSLSSLETPVXXA

SEQ ID NO: 70531 - protein, 28 aa, Artificial Sequence
  Cyclic GFR-binding peptide
RVVMNPYVKLIVNSSDDFFLVSLSSLQT

SEQ ID NO: 70532 - protein, 33 aa, Artificial Sequence
  Cyclic GFR-binding peptide
  MOD_RES (28)..(28): Xaa is C or S
PYVKLHQGQHPKIRFFLMSLSSEETPVXELGED

SEQ ID NO: 70533 - protein, 20 aa, Artificial Sequence
  Cyclic GFR-binding peptide
PYVKLTPVGMDDFFLVSLSS

SEQ ID NO: 70534 - protein, 31 aa, Artificial Sequence; identical to SEQ ID NO: 23265
  Cyclic GFR-binding peptide
  MOD_RES (31)..(31): Xaa is C or S

SEQ ID NO: 70535 - protein, 37 aa, Artificial Sequence; identical to SEQ ID NO: 23266
  Cyclic GFR-binding peptide
  MOD_RES (2)..(34)..(35): Xaa is C or S

SEQ ID NO: 70536 - protein, 29 aa, Artificial Sequence
  Cyclic GFR-binding peptide
  MOD_RES (26)..(27): Xaa is C or S
PYVKLVVNNASDFFLISLSSLRTPVXXTP

SEQ ID NO: 70537 - protein, 32 aa, Artificial Sequence
  Cyclic GFR-binding peptide
  MOD_RES (2)..(2): Xaa is C or S
GXEAVSMGEPYVKLTPVGMDDFFLVSLSSLKT

SEQ ID NO: 70538 - protein, 28 aa, Artificial Sequence
  Cyclic GFR-binding peptide
  MOD_RES (1)..(1): Xaa is C or S
XRDVVMGPYVKLIIQQKDNFFLMSLSSM

SEQ ID NO: 70539 - protein, 22 aa, Artificial Sequence
  Cyclic GFR-binding peptide
PYVKLHQGQHPKIRFFLMSLSS

SEQ ID NO: 70540 - protein, 21 aa, Artificial Sequence
  Cyclic GFR-binding peptide
PYVKLLLVRGNDFFLMSLSST

SEQ ID NO: 70541 - protein, 38 aa, Artificial Sequence; identical to SEQ ID NO: 23270
  Cyclic GFR-binding peptide
  MOD_RES (2)..(4)..(37)..(38): Xaa is C or S

SEQ ID NO: 70542 - protein, 20 aa, Artificial Sequence
  Cyclic GFR-binding peptide
PYVKLVVNKNEDFFLISLSS

SEQ ID NO: 70543 - protein, 25 aa, Artificial Sequence
  Cyclic GFR-binding peptide
KVVMNPYVKLIVNNSSDFFLVSLSS

SEQ ID NO: 70544 - protein, 33 aa, Artificial Sequence
  Cyclic GFR-binding peptide
  MOD_RES (2)..(4): Xaa is C or S
SXGXRDVVMGPYVKLIIQQKDNFFLMSLSSMKT

SEQ ID NO: 70545 - protein, 33 aa, Artificial Sequence; identical to SEQ ID NO: 23272
  Cyclic GFR-binding peptide
  MOD_RES (31)..(32): Xaa is C or S

SEQ ID NO: 70546 - protein, 26 aa, Artificial Sequence
  Cyclic GFR-binding peptide
MPYVKLVKPKRGVFFLISLSSLAQPV

SEQ ID NO: 70547 - protein, 42 aa, Artificial Sequence; identical to SEQ ID NO: 23276
  Cyclic GFR-binding peptide
  MOD_RES (2)..(4)..(36)..(37): Xaa is C or S

SEQ ID NO: 70548 - protein, 30 aa, Artificial Sequence
  Cyclic GFR-binding peptide
KNHQLFPYVKLHQGQHPKIRFFLMSLSSEE

SEQ ID NO: 70549 - protein, 29 aa, Artificial Sequence
  Cyclic GFR-binding peptide
SKVVMPYVKLVKPTRGVFFLISLSSLDQP

SEQ ID NO: 70550 - protein, 33 aa, Artificial Sequence
  Cyclic GFR-binding peptide
  MOD_RES (1)..(3): Xaa is C or S
XGXGEVVMDPYVKLVVKENEDFFLMSLSSLETP

SEQ ID NO: 70551 - protein, 30 aa, Artificial Sequence
  Cyclic GFR-binding peptide
VSMGEPYVKLTPVGMDDFFLVSLSSLKTPV

SEQ ID NO: 70552 - protein, 37 aa, Artificial Sequence; identical to SEQ ID NO: 23279
  Cyclic GFR-binding peptide
  MOD_RES (1)..(3)..(35)..(36): Xaa is C or S

SEQ ID NO: 70553 - protein, 28 aa, Artificial Sequence
  Cyclic GFR-binding peptide
VVMNPYVKLIVNSSDDFFLVSLSSLQTP

SEQ ID NO: 70554 - protein, 37 aa, Artificial Sequence; identical to SEQ ID NO: 23281
  Cyclic GFR-binding peptide
  MOD_RES (31)..(32): Xaa is C or S

SEQ ID NO: 70555 - protein, 31 aa, Artificial Sequence
  Cyclic GFR-binding peptide
  MOD_RES (29)..(30): Xaa is C or S
VVMPYVKLVKPTRGVFFLISLSSLDQPVXXP

SEQ ID NO: 70556 - protein, 31 aa, Artificial Sequence
  Cyclic GFR-binding peptide
  MOD_RES (29)..(30): Xaa is C or S
MGEPYVKLTPVGMDDFFLVSLSSLKTPVXXA

SEQ ID NO: 70557 - protein, 38 aa, Artificial Sequence; identical to SEQ ID NO: 23283
  Cyclic GFR-binding peptide
  MOD_RES (2)..(4)..(36)..(37): Xaa is C or S

SEQ ID NO: 70558 - protein, 31 aa, Artificial Sequence
  Cyclic GFR-binding peptide
  MOD_RES (26)..(27): Xaa is C or S
PYVKLVKPKRGVFFLISLSSLAQPVXXPAAS

SEQ ID NO: 70559 - protein, 22 aa, Artificial Sequence
  Cyclic GFR-binding peptide
IMPYVKLIKPTKGIFFLISLSS

SEQ ID NO: 70560 - protein, 28 aa, Artificial Sequence
  Cyclic GFR-binding peptide
  MOD_RES (1)..(1): Xaa is C or S
XEEVIMPYVKLLLVRGNDFFLMSLSSTK

SEQ ID NO: 70561 - protein, 29 aa, Artificial Sequence
  Cyclic GFR-binding peptide
  MOD_RES (26)..(27): Xaa is C or S
PYVKLVVKENEDFFLMSLSSLETPVXXAK

SEQ ID NO: 70562 - protein, 31 aa, Artificial Sequence
  Cyclic GFR-binding peptide
  MOD_RES (28)..(29): Xaa is C or S
IMPYVKLLLVRGNDFFLMSLSSTKVPAXXTS

SEQ ID NO: 70563 - protein, 33 aa, Artificial Sequence
  Cyclic GFR-binding peptide
  MOD_RES (1)..(3): Xaa is C or S
XGXAKVVMNPYVKLIVNNSSDFFLVSLSSLKTP

SEQ ID NO: 70564 - protein, 25 aa, Artificial Sequence
  Cyclic GFR-binding peptide
VMDPYVKLVVNNAADFFLISLSSLR

SEQ ID NO: 70565 - protein, 32 aa, Artificial Sequence
  Cyclic GFR-binding peptide
  MOD_RES (1)..(3): Xaa is C or S
XGXAKVVMNPYVKLIVNNSSDFFLVSLSSLKT

SEQ ID NO: 70566 - protein, 24 aa, Artificial Sequence
  Cyclic GFR-binding peptide
PYVKLVKPTRGVFFLISLSSLDQP

SEQ ID NO: 70567 - protein, 29 aa, Artificial Sequence
  Cyclic GFR-binding peptide
  MOD_RES (2)..(4): Xaa is C or S
SXKXSKVIMPYVKLIKPTKGIFFLISLSS

SEQ ID NO: 70568 - protein, 29 aa, Artificial Sequence
  Cyclic GFR-binding peptide
VVMNPYVKLIVNSSDDFFLVSLSSLQTPA

SEQ ID NO: 70569 - protein, 27 aa, Artificial Sequence
  Cyclic GFR-binding peptide
  MOD_RES (26)..(27): Xaa is C or S
PYVKLIKPTKGIFFLISLSSLDQSVXX

SEQ ID NO: 70570 - protein, 32 aa, Artificial Sequence; identical to SEQ ID NO: 23290
  Cyclic GFR-binding peptide
  MOD_RES (1)..(32): Xaa is C or S

SEQ ID NO: 70571 - protein, 28 aa, Artificial Sequence
  Cyclic GFR-binding peptide
RPYVKLLKPKKRVYEFFLVSLSSHHVRS

SEQ ID NO: 70572 - protein, 27 aa, Artificial Sequence
  Cyclic GFR-binding peptide
  MOD_RES (1)..(1): Xaa is C or S
XGEVVMDPYVKLVVKENEDFFLMSLSS

SEQ ID NO: 70573 - protein, 28 aa, Artificial Sequence
  Cyclic GFR-binding peptide
MGEPYVKLTPVGMDDFFLVSLSSLKTPV

SEQ ID NO: 70574 - protein, 32 aa, Artificial Sequence
  Cyclic GFR-binding peptide
  MOD_RES (26)..(27): Xaa is C or S
PYVKLVVKDYEDFFLMSLSSLETPVXXAKPIS

SEQ ID NO: 70575 - protein, 24 aa, Artificial Sequence
  Cyclic GFR-binding peptide
VMNPYVKLIVNSSDDFFLVSLSSL

SEQ ID NO: 70576 - protein, 23 aa, Artificial Sequence
  Cyclic GFR-binding peptide
EPYVKLVVKDYEDFFLMSLSSLE

SEQ ID NO: 70577 - protein, 32 aa, Artificial Sequence; identical to SEQ ID NO: 23295
  Cyclic GFR-binding peptide
  MOD_RES (31)..(32): Xaa is C or S

SEQ ID NO: 70578 - protein, 37 aa, Artificial Sequence; identical to SEQ ID NO: 23296
  Cyclic GFR-binding peptide
  MOD_RES (2)..(33)..(34): Xaa is C or S

SEQ ID NO: 70579 - protein, 35 aa, Artificial Sequence; identical to SEQ ID NO: 23298
  Cyclic GFR-binding peptide
  MOD_RES (2)..(4): Xaa is C or S

SEQ ID NO: 70580 - protein, 29 aa, Artificial Sequence
  Cyclic GFR-binding peptide
VVMNPYVKLIVNSSDDFFLVSLSSLKTPA

SEQ ID NO: 70581 - protein, 26 aa, Artificial Sequence
  Cyclic GFR-binding peptide
EVVMDPYVKLVVNNASDFFLISLSSL

SEQ ID NO: 70582 - protein, 25 aa, Artificial Sequence
  Cyclic GFR-binding peptide
VMDPYVKLVVKENEDFFLMSLSSLE

SEQ ID NO: 70583 - protein, 32 aa, Artificial Sequence; identical to SEQ ID NO: 23299
  Cyclic GFR-binding peptide
  MOD_RES (1)..(1): Xaa is C or S

SEQ ID NO: 70584 - protein, 31 aa, Artificial Sequence; identical to SEQ ID NO: 23301
  Cyclic GFR-binding peptide

SEQ ID NO: 70585 - protein, 33 aa, Artificial Sequence; identical to SEQ ID NO: 23302
  Cyclic GFR-binding peptide
  MOD_RES (31)..(32): Xaa is C or S

SEQ ID NO: 70586 - protein, 26 aa, Artificial Sequence
  Cyclic GFR-binding peptide
VAMGPYVKLYTVVGKDFFLISLSSLK

SEQ ID NO: 70587 - protein, 24 aa, Artificial Sequence
  Cyclic GFR-binding peptide
AMGPYVKLYTVVGKDFFLISLSSL

SEQ ID NO: 70588 - protein, 26 aa, Artificial Sequence
  Cyclic GFR-binding peptide
MPYVKLVKPTRGVFFLISLSSLDQPV

SEQ ID NO: 70589 - protein, 32 aa, Artificial Sequence
  Cyclic GFR-binding peptide
  MOD_RES (30)..(31): Xaa is C or S
VVMEPYVKLVVKDYEDFFLMSLSSLETPVXXA

SEQ ID NO: 70590 - protein, 31 aa, Artificial Sequence
  Cyclic GFR-binding peptide
  MOD_RES (29)..(30): Xaa is C or S
VMEPYVKLVVKDYEDFFLMSLSSLETPVXXA

SEQ ID NO: 70591 - protein, 27 aa, Artificial Sequence
  Cyclic GFR-binding peptide
ELRPYVKLLKPKKRVYEFFLVSLSSHH

SEQ ID NO: 70592 - protein, 30 aa, Artificial Sequence
  Cyclic GFR-binding peptide
  MOD_RES (28)..(29): Xaa is C or S
VMPYVKLVKPTRGVFFLISLSSLDQPVXXP

SEQ ID NO: 70593 - protein, 29 aa, Artificial Sequence
  Cyclic GFR-binding peptide
  MOD_RES (2)..(2): Xaa is C or S
GXAEVVMDPYVKLVVNNAADFFLISLSSL

SEQ ID NO: 70594 - protein, 27 aa, Artificial Sequence
  Cyclic GFR-binding peptide
SKVIMPYVKLIKPTKGIFFLISLSSLD

SEQ ID NO: 70595 - protein, 36 aa, Artificial Sequence
  Cyclic GFR-binding peptide
  MOD_RES (32)..(33): Xaa is C or S
AVSMGEPYVKLTPVGMDDFFLVSLSSLKTPVXXAKG

SEQ ID NO: 70596 - protein, 26 aa, Artificial Sequence
  Cyclic GFR-binding peptide
EPYVKLTPVGMDDFFLVSLSSLKTPV

SEQ ID NO: 70597 - protein, 27 aa, Artificial Sequence
  Cyclic GFR-binding peptide
  MOD_RES (1)..(1): Xaa is C or S
XSEVVMDPYVKLVVNNASDFFLISLSS

SEQ ID NO: 70598 - protein, 36 aa, Artificial Sequence; identical to SEQ ID NO: 23308
  Cyclic GFR-binding peptide
  MOD_RES (2)..(33)..(34): Xaa is C or S

SEQ ID NO: 70599 - protein, 24 aa, Artificial Sequence
  Cyclic GFR-binding peptide
GEPYVKLTPVGMDDFFLVSLSSLK

SEQ ID NO: 70600 - protein, 29 aa, Artificial Sequence
  Cyclic GFR-binding peptide
PYVKLLKPKKRVYEFFLVSLSSHHVRSPQ

SEQ ID NO: 70601 - protein, 24 aa, Artificial Sequence
  Cyclic GFR-binding peptide
VMDPYVKLVVNNASDFFLISLSSL

SEQ ID NO: 70602 - protein, 24 aa, Artificial Sequence
  Cyclic GFR-binding peptide
EPYVKLVVKDYEDFFLMSLSSLET

SEQ ID NO: 70603 - protein, 29 aa, Artificial Sequence
  Cyclic GFR-binding peptide
HEELRPYVKLLKPKKRVYEFFLVSLSSHH

SEQ ID NO: 70604 - protein, 28 aa, Artificial Sequence
  Cyclic GFR-binding peptide
VVMDPYVKLVVNNASDFFLISLSSLRTP

SEQ ID NO: 70605 - protein, 28 aa, Artificial Sequence
  Cyclic GFR-binding peptide
  MOD_RES (2)..(2): Xaa is C or S
GXSEVVMDPYVKLVVNNASDFFLISLSS

SEQ ID NO: 70606 - protein, 32 aa, Artificial Sequence
  Cyclic GFR-binding peptide
  MOD_RES (30)..(31): Xaa is C or S
VVMDPYVKLVVNNAADFFLISLSSLRAPVXXS

SEQ ID NO: 70607 - protein, 30 aa, Artificial Sequence
  Cyclic GFR-binding peptide
GEVVMEPYVKLVVKDYEDFFLMSLSSLETP

SEQ ID NO: 70608 - protein, 20 aa, Artificial Sequence
  Cyclic GFR-binding peptide
PYVKLTPVGMDDFFLVSLSS

SEQ ID NO: 70609 - protein, 33 aa, Artificial Sequence; identical to SEQ ID NO: 23311
  Cyclic GFR-binding peptide
  MOD_RES (2)..(33): Xaa is C or S

SEQ ID NO: 70610 - protein, 33 aa, Artificial Sequence
  Cyclic GFR-binding peptide
  MOD_RES (1)..(3): Xaa is C or S
XGXAEVVMDPYVKLVVNNAADFFLISLSSLRAP

SEQ ID NO: 70611 - protein, 36 aa, Artificial Sequence; identical to SEQ ID NO: 23312
  Cyclic GFR-binding peptide
  MOD_RES (1)..(3)..(34)..(35): Xaa is C or S

SEQ ID NO: 70612 - protein, 28 aa, Artificial Sequence
  Cyclic GFR-binding peptide
GEVVMEPYVKLVVKDYEDFFLMSLSSLE

SEQ ID NO: 70613 - protein, 39 aa, Artificial Sequence; identical to SEQ ID NO: 23313
  Cyclic GFR-binding peptide
  MOD_RES (1)..(33)..(34): Xaa is C or S

SEQ ID NO: 70614 - protein, 33 aa, Artificial Sequence; identical to SEQ ID NO: 23314
  Cyclic GFR-binding peptide
  MOD_RES (1)..(33): Xaa is C or S

SEQ ID NO: 70615 - protein, 23 aa, Artificial Sequence
  Cyclic GFR-binding peptide
RPYVKLLKPKKRVYEFFLVSLSS

SEQ ID NO: 70616 - protein, 35 aa, Artificial Sequence; identical to SEQ ID NO: 23315
  Cyclic GFR-binding peptide
  MOD_RES (2)..(4): Xaa is C or S

SEQ ID NO: 70617 - protein, 28 aa, Artificial Sequence
  Cyclic GFR-binding peptide
  MOD_RES (28)..(28): Xaa is C or S
MDPYVKLVVNNASDFFLISLSSLRTPVX

SEQ ID NO: 70618 - protein, 31 aa, Artificial Sequence
  Cyclic GFR-binding peptide
  MOD_RES (29)..(30): Xaa is C or S
VIMPYVKLVKPKRGVFFLISLSSLAQPVXXP

SEQ ID NO: 70619 - protein, 26 aa, Artificial Sequence
  Cyclic GFR-binding peptide
MDPYVKLVVNNAADFFLISLSSLRAP

SEQ ID NO: 70620 - protein, 32 aa, Artificial Sequence
  Cyclic GFR-binding peptide
  MOD_RES (26)..(27): Xaa is C or S
PYVKLIVNSSDDFFLVSLSSLKTPAXXPKPVY

SEQ ID NO: 70621 - protein, 32 aa, Artificial Sequence
  Cyclic GFR-binding peptide
  MOD_RES (1)..(3): Xaa is C or S
XGXESVAMGPYVKLYTVVGKDFFLISLSSLKT

SEQ ID NO: 70622 - protein, 39 aa, Artificial Sequence; identical to SEQ ID NO: 23318
  Cyclic GFR-binding peptide
  MOD_RES (2)..(4)..(35)..(36): Xaa is C or S

SEQ ID NO: 70623 - protein, 31 aa, Artificial Sequence
  Cyclic GFR-binding peptide
  MOD_RES (2)..(2): Xaa is C or S
GXEEVIMPYVKLLLVRGNDFFLMSLSSTKVP

SEQ ID NO: 70624 - protein, 22 aa, Artificial Sequence
  Cyclic GFR-binding peptide
PYVKLIVNSSDDFFLVSLSSLQ

SEQ ID NO: 70625 - protein, 35 aa, Artificial Sequence; identical to SEQ ID NO: 23319
  Cyclic GFR-binding peptide
  MOD_RES (32)..(33): Xaa is C or S

SEQ ID NO: 70626 - protein, 32 aa, Artificial Sequence
  Cyclic GFR-binding peptide
  MOD_RES (2)..(2): Xaa is C or S
GXSRVVMNPYVKLIVNSSDDFFLVSLSSLKTP

SEQ ID NO: 70627 - protein, 36 aa, Artificial Sequence; identical to SEQ ID NO: 23320
  Cyclic GFR-binding peptide
  MOD_RES (1)..(3)..(34)..(35): Xaa is C or S

SEQ ID NO: 70628 - protein, 26 aa, Artificial Sequence
  Cyclic GFR-binding peptide
HQLFPYVKLHQGQHPKIRFFLMSLSS

SEQ ID NO: 70629 - protein, 38 aa, Artificial Sequence; identical to SEQ ID NO: 23321
  Cyclic GFR-binding peptide
  MOD_RES (2)..(34)..(35): Xaa is C or S

SEQ ID NO: 70630 - protein, 33 aa, Artificial Sequence
  Cyclic GFR-binding peptide
  MOD_RES (2)..(4): Xaa is C or S
HXGXSRVVMNPYVKLIVNSSDDFFLVSLSSLKT

SEQ ID NO: 70631 - protein, 21 aa, Artificial Sequence
  Cyclic GFR-binding peptide
DPYVKLVVNNASDFFLISLSS

SEQ ID NO: 70632 - protein, 27 aa, Artificial Sequence
  Cyclic GFR-binding peptide
MDPYVKLVVNNAADFFLISLSSLRAPV

SEQ ID NO: 70633 - protein, 32 aa, Artificial Sequence
  Cyclic GFR-binding peptide
  MOD_RES (1)..(3): Xaa is C or S
XGXGEVVMEPYVKLVVKDYEDFFLMSLSSLET

SEQ ID NO: 70634 - protein, 37 aa, Artificial Sequence; identical to SEQ ID NO: 23325
  Cyclic GFR-binding peptide
  MOD_RES (1)..(32)..(33): Xaa is C or S

SEQ ID NO: 70635 - protein, 37 aa, Artificial Sequence; identical to SEQ ID NO: 23324
  Cyclic GFR-binding peptide
  MOD_RES (2)..(34)..(35): Xaa is C or S

SEQ ID NO: 70636 - protein, 34 aa, Artificial Sequence; identical to SEQ ID NO: 23326
  Cyclic GFR-binding peptide
  MOD_RES (32)..(33): Xaa is C or S

SEQ ID NO: 70637 - protein, 36 aa, Artificial Sequence; identical to SEQ ID NO: 23327
  Cyclic GFR-binding peptide
  MOD_RES (2)..(34): Xaa is C or S

SEQ ID NO: 70638 - protein, 32 aa, Artificial Sequence
  Cyclic GFR-binding peptide
  MOD_RES (1)..(3): Xaa is C or S
XGXAEVVMDPYVKLVVNNAADFFLISLSSLRA

SEQ ID NO: 70639 - protein, 30 aa, Artificial Sequence
  Cyclic GFR-binding peptide
  MOD_RES (2)..(4): Xaa is C or S
SXKXSKVIMPYVKLIKPTKGIFFLISLSSL

SEQ ID NO: 70640 - protein, 39 aa, Artificial Sequence; identical to SEQ ID NO: 23329
  Cyclic GFR-binding peptide
  MOD_RES (1)..(3)..(35)..(36): Xaa is C or S

SEQ ID NO: 70641 - protein, 40 aa, Artificial Sequence; identical to SEQ ID NO: 23330
  Cyclic GFR-binding peptide
  MOD_RES (2)..(39): Xaa is C or S

SEQ ID NO: 70642 - protein, 31 aa, Artificial Sequence
  Cyclic GFR-binding peptide
  MOD_RES (30)..(31): Xaa is C or S
VVMDPYVKLVVNNASDFFLISLSSLRTPVXX

SEQ ID NO: 70643 - protein, 33 aa, Artificial Sequence
  Cyclic GFR-binding peptide
  MOD_RES (1)..(3): Xaa is C or S
XGXGEVVMEPYVKLVVKDYEDFFLMSLSSLETP

SEQ ID NO: 70644 - protein, 28 aa, Artificial Sequence
  Cyclic GFR-binding peptide
  MOD_RES (28)..(28): Xaa is C or S
MDPYVKLVVKENEDFFLMSLSSLETPVX

SEQ ID NO: 70645 - protein, 31 aa, Artificial Sequence
  Cyclic GFR-binding peptide
  MOD_RES (27)..(28): Xaa is C or S
MPYVKLLLVRGNDFFLMSLSSTKVPAXXTSP

SEQ ID NO: 70646 - protein, 31 aa, Artificial Sequence
  Cyclic GFR-binding peptide
  MOD_RES (1)..(3): Xaa is C or S
XEXKNHQLFPYVKLHQGQHPKIRFFLMSLSS

SEQ ID NO: 70647 - protein, 28 aa, Artificial Sequence
  Cyclic GFR-binding peptide
VMGPYVKLIIQQKDNFFLMSLSSMKTPT

SEQ ID NO: 70648 - protein, 27 aa, Artificial Sequence
  Cyclic GFR-binding peptide
  MOD_RES (26)..(27): Xaa is C or S
PYVKLVKPKRGVFFLISLSSLAQPVXX

SEQ ID NO: 70649 - protein, 31 aa, Artificial Sequence; identical to SEQ ID NO: 23335
  Cyclic GFR-binding peptide

SEQ ID NO: 70650 - protein, 45 aa, Artificial Sequence; identical to SEQ ID NO: 23336
  Cyclic GFR-binding peptide
  MOD_RES (2)..(4)..(41): Xaa is C or S

SEQ ID NO: 70651 - protein, 20 aa, Artificial Sequence
  Cyclic GFR-binding peptide
PYVKLYTVVGKDFFLISLSS

SEQ ID NO: 70652 - protein, 33 aa, Artificial Sequence
  Cyclic GFR-binding peptide
  MOD_RES (2)..(2): Xaa is C or S
GXEAVSMGEPYVKLTPVGMDDFFLVSLSSLKTP

SEQ ID NO: 70653 - protein, 26 aa, Artificial Sequence
  Cyclic GFR-binding peptide
  MOD_RES (26)..(26): Xaa is C or S
PYVKLTPVGMDDFFLVSLSSLKTPVX

SEQ ID NO: 70654 - protein, 30 aa, Artificial Sequence
  Cyclic GFR-binding peptide
  MOD_RES (30)..(30): Xaa is C or S
KVVMPYVKLVKPTRGVFFLISLSSLDQPVX

SEQ ID NO: 70655 - protein, 27 aa, Artificial Sequence
  Cyclic GFR-binding peptide
  MOD_RES (27)..(27): Xaa is C or S
GPYVKLYTVVGKDFFLISLSSLKTPVX

SEQ ID NO: 70656 - protein, 35 aa, Artificial Sequence
  Cyclic GFR-binding peptide
  MOD_RES (2)..(4): Xaa is C or S
AXAXELHEELRPYVKLLKPKKRVYEFFLVSLSSHH

SEQ ID NO: 70657 - protein, 32 aa, Artificial Sequence
  Cyclic GFR-binding peptide
  MOD_RES (27)..(28): Xaa is C or S
MPYVKLVKPKRGVFFLISLSSLAQPVXXPAAS

SEQ ID NO: 70658 - protein, 31 aa, Artificial Sequence
  Cyclic GFR-binding peptide
  MOD_RES (29)..(30): Xaa is C or S
VMDPYVKLVVNNAADFFLISLSSLRAPVXXS

SEQ ID NO: 70659 - protein, 32 aa, Artificial Sequence
  Cyclic GFR-binding peptide
  MOD_RES (2)..(2): Xaa is C or S
GXGEVVMEPYVKLVVKDYEDFFLMSLSSLETP

SEQ ID NO: 70660 - protein, 29 aa, Artificial Sequence
  Cyclic GFR-binding peptide
  MOD_RES (28)..(29): Xaa is C or S
IMPYVKLIKPTKGIFFLISLSSLDQSVXX

SEQ ID NO: 70661 - protein, 32 aa, Artificial Sequence
  Cyclic GFR-binding peptide
  MOD_RES (1)..(3): Xaa is C or S
XAXELHEELRPYVKLLKPKKRVYEFFLVSLSS

SEQ ID NO: 70662 - protein, 32 aa, Artificial Sequence
  Cyclic GFR-binding peptide
  MOD_RES (2)..(4): Xaa is C or S
RXGXAEVVMDPYVKLVVNNAADFFLISLSSLR

SEQ ID NO: 70663 - protein, 28 aa, Artificial Sequence
  Cyclic GFR-binding peptide
  MOD_RES (28)..(28): Xaa is C or S
PYVKLHQGQHPKIRFFLMSLSSEETPVX

SEQ ID NO: 70664 - protein, 26 aa, Artificial Sequence
  Cyclic GFR-binding peptide
MDPYVKLVVNNASDFFLISLSSLRTP

SEQ ID NO: 70665 - protein, 29 aa, Artificial Sequence
  Cyclic GFR-binding peptide
  MOD_RES (26)..(27): Xaa is C or S
PYVKLIVNSSDDFFLVSLSSLQTPAXXPK

SEQ ID NO: 70666 - protein, 29 aa, Artificial Sequence
  Cyclic GFR-binding peptide
  MOD_RES (28)..(29): Xaa is C or S
MDPYVKLVVKENEDFFLMSLSSLETPVXX

SEQ ID NO: 70667 - protein, 26 aa, Artificial Sequence
  Cyclic GFR-binding peptide
ELRPYVKLLKPKKRVYEFFLVSLSSH

SEQ ID NO: 70668 - protein, 39 aa, Artificial Sequence; identical to SEQ ID NO: 23342
  Cyclic GFR-binding peptide
  MOD_RES (2)..(33)..(34): Xaa is C or S

SEQ ID NO: 70669 - protein, 31 aa, Artificial Sequence
  Cyclic GFR-binding peptide
  MOD_RES (2)..(4): Xaa is C or S
LXGXEEVIMPYVKLLLVRGNDFFLMSLSSTK

SEQ ID NO: 70670 - protein, 34 aa, Artificial Sequence
  Cyclic GFR-binding peptide
  MOD_RES (31)..(31): Xaa is C or S
RPYVKLLKPKKRVYEFFLVSLSSHHVRSPQXKVS

SEQ ID NO: 70671 - protein, 24 aa, Artificial Sequence
  Cyclic GFR-binding peptide
MGEPYVKLTPVGMDDFFLVSLSSL

SEQ ID NO: 70672 - protein, 28 aa, Artificial Sequence
  Cyclic GFR-binding peptide
  MOD_RES (2)..(2): Xaa is C or S
GXAKVVMNPYVKLIVNNSSDFFLVSLSS

SEQ ID NO: 70673 - protein, 30 aa, Artificial Sequence
  Cyclic GFR-binding peptide
  MOD_RES (29)..(30): Xaa is C or S
VMEPYVKLVVKDYEDFFLMSLSSLETPVXX

SEQ ID NO: 70674 - protein, 36 aa, Artificial Sequence; identical to SEQ ID NO: 23343
  Cyclic GFR-binding peptide
  MOD_RES (34)..(34): Xaa is C or S

SEQ ID NO: 70675 - protein, 26 aa, Artificial Sequence
  Cyclic GFR-binding peptide
MNPYVKLIVNSSDDFFLVSLSSLKTP

SEQ ID NO: 70676 - protein, 32 aa, Artificial Sequence
  Cyclic GFR-binding peptide
  MOD_RES (32)..(32): Xaa is C or S
AVSMGEPYVKLTPVGMDDFFLVSLSSLKTPVX

SEQ ID NO: 70677 - protein, 34 aa, Artificial Sequence; identical to SEQ ID NO: 23344
  Cyclic GFR-binding peptide
  MOD_RES (1)..(1): Xaa is C or S

SEQ ID NO: 70678 - protein, 27 aa, Artificial Sequence
  Cyclic GFR-binding peptide
  MOD_RES (1)..(1): Xaa is C or S
XEEVIMPYVKLLLVRGNDFFLMSLSST

SEQ ID NO: 70679 - protein, 39 aa, Artificial Sequence; identical to SEQ ID NO: 23345
  Cyclic GFR-binding peptide
  MOD_RES (2)..(34)..(35): Xaa is C or S

SEQ ID NO: 70680 - protein, 31 aa, Artificial Sequence
  Cyclic GFR-binding peptide
  MOD_RES (26)..(27): Xaa is C or S
PYVKLLLVRGNDFFLMSLSSTKVPAXXTSPV

SEQ ID NO: 70681 - protein, 42 aa, Artificial Sequence; identical to SEQ ID NO: 23347
  Cyclic GFR-binding peptide
  MOD_RES (2)..(4)..(36)..(37): Xaa is C or S

SEQ ID NO: 70682 - protein, 33 aa, Artificial Sequence; identical to SEQ ID NO: 23348
  Cyclic GFR-binding peptide
  MOD_RES (1)..(33): Xaa is C or S

SEQ ID NO: 70683 - protein, 26 aa, Artificial Sequence
  Cyclic GFR-binding peptide
MGEPYVKLTPVGMDDFFLVSLSSLKT

SEQ ID NO: 70684 - protein, 26 aa, Artificial Sequence
  Cyclic GFR-binding peptide
ARVVMNPYVKLIVNSSDDFFLVSLSS

SEQ ID NO: 70685 - protein, 32 aa, Artificial Sequence; identical to SEQ ID NO: 23349
  Cyclic GFR-binding peptide
  MOD_RES (31)..(32): Xaa is C or S

SEQ ID NO: 70686 - protein, 35 aa, Artificial Sequence
  Cyclic GFR-binding peptide
  MOD_RES (30)..(31): Xaa is C or S
VVMGPYVKLIIQQKDNFFLMSLSSMKTPTXXPGAS

SEQ ID NO: 70687 - protein, 31 aa, Artificial Sequence
  Cyclic GFR-binding peptide
  MOD_RES (26)..(27): Xaa is C or S
PYVKLIVNSSDDFFLVSLSSLKTPAXXPKPV

SEQ ID NO: 70688 - protein, 37 aa, Artificial Sequence; identical to SEQ ID NO: 23350
  Cyclic GFR-binding peptide
  MOD_RES (31)..(32): Xaa is C or S

SEQ ID NO: 70689 - protein, 33 aa, Artificial Sequence
  Cyclic GFR-binding peptide
  MOD_RES (28)..(29): Xaa is C or S
MDPYVKLVVNNAADFFLISLSSLRAPVXXSAPA

SEQ ID NO: 70690 - protein, 38 aa, Artificial Sequence; identical to SEQ ID NO: 23351
  Cyclic GFR-binding peptide
  MOD_RES (2)..(34): Xaa is C or S

SEQ ID NO: 70691 - protein, 31 aa, Artificial Sequence
  Cyclic GFR-binding peptide
  MOD_RES (2)..(4): Xaa is C or S
RXGXEAVSMGEPYVKLTPVGMDDFFLVSLSS

SEQ ID NO: 70692 - protein, 30 aa, Artificial Sequence
  Cyclic GFR-binding peptide
  MOD_RES (29)..(30): Xaa is C or S
VMDPYVKLVVNNAADFFLISLSSLRAPVXX

SEQ ID NO: 70693 - protein, 40 aa, Artificial Sequence; identical to SEQ ID NO: 23352
  Cyclic GFR-binding peptide
  MOD_RES (2)..(4)..(36)..(37): Xaa is C or S

SEQ ID NO: 70694 - protein, 29 aa, Artificial Sequence
  Cyclic GFR-binding peptide
VAMGPYVKLYTVVGKDFFLISLSSLKTPV

SEQ ID NO: 70695 - protein, 36 aa, Artificial Sequence; identical to SEQ ID NO: 23353
  Cyclic GFR-binding peptide
  MOD_RES (1)..(3)..(35)..(36): Xaa is C or S

SEQ ID NO: 70696 - protein, 34 aa, Artificial Sequence
  Cyclic GFR-binding peptide
  MOD_RES (30)..(30): Xaa is C or S
LFPYVKLHQGQHPKIRFFLMSLSSEETPVXELGE

SEQ ID NO: 70697 - protein, 31 aa, Artificial Sequence
  Cyclic GFR-binding peptide
LHEELRPYVKLLKPKKRVYEFFLVSLSSHHV

SEQ ID NO: 70698 - protein, 26 aa, Artificial Sequence
  Cyclic GFR-binding peptide
SRVVMNPYVKLIVNSSDDFFLVSLSS

SEQ ID NO: 70699 - protein, 26 aa, Artificial Sequence
  Cyclic GFR-binding peptide
NPYVKLIVNNSSDFFLVSLSSLKTPA

SEQ ID NO: 70700 - protein, 31 aa, Artificial Sequence
  Cyclic GFR-binding peptide
  MOD_RES (28)..(29): Xaa is C or S
VMPYVKLVKPTRGVFFLISLSSLDQPVXXPS

SEQ ID NO: 70701 - protein, 31 aa, Artificial Sequence
  Cyclic GFR-binding peptide
  MOD_RES (26)..(27): Xaa is C or S
PYVKLVKPTRGVFFLISLSSLDQPVXXPSAS

SEQ ID NO: 70702 - protein, 39 aa, Artificial Sequence; identical to SEQ ID NO: 23359
  Cyclic GFR-binding peptide
  MOD_RES (2)..(34)..(35): Xaa is C or S

SEQ ID NO: 70703 - protein, 38 aa, Artificial Sequence; identical to SEQ ID NO: 23360
  Cyclic GFR-binding peptide
  MOD_RES (35)..(35): Xaa is C or S

SEQ ID NO: 70704 - protein, 31 aa, Artificial Sequence; identical to SEQ ID NO: 23363
  Cyclic GFR-binding peptide

SEQ ID NO: 70705 - protein, 30 aa, Artificial Sequence
  Cyclic GFR-binding peptide
  MOD_RES (26)..(27): Xaa is C or S
PYVKLLLVRGNDFFLMSLSSTKVPAXXTSP

SEQ ID NO: 70706 - protein, 32 aa, Artificial Sequence
  Cyclic GFR-binding peptide
  MOD_RES (1)..(1): Xaa is C or S
XKNHQLFPYVKLHQGQHPKIRFFLMSLSSEET

SEQ ID NO: 70707 - protein, 35 aa, Artificial Sequence; identical to SEQ ID NO: 23364
  Cyclic GFR-binding peptide
  MOD_RES (1)..(3): Xaa is C or S

SEQ ID NO: 70708 - protein, 35 aa, Artificial Sequence; identical to SEQ ID NO: 23366
  Cyclic GFR-binding peptide
  MOD_RES (1)..(3)..(35): Xaa is C or S

SEQ ID NO: 70709 - protein, 35 aa, Artificial Sequence
  Cyclic GFR-binding peptide
  MOD_RES (30)..(31): Xaa is C or S
VVMDPYVKLVVNNASDFFLISLSSLRTPVXXTPPT

SEQ ID NO: 70710 - protein, 29 aa, Artificial Sequence
  Cyclic GFR-binding peptide
  MOD_RES (2)..(2): Xaa is C or S
GXESVAMGPYVKLYTVVGKDFFLISLSSL

SEQ ID NO: 70711 - protein, 41 aa, Artificial Sequence; identical to SEQ ID NO: 23367
  Cyclic GFR-binding peptide
  MOD_RES (2)..(4)..(35)..(36): Xaa is C or S

SEQ ID NO: 70712 - protein, 32 aa, Artificial Sequence
  Cyclic GFR-binding peptide
  MOD_RES (1)..(3): Xaa is C or S
XGXGEVVMDPYVKLVVKENEDFFLMSLSSLET

SEQ ID NO: 70713 - protein, 31 aa, Artificial Sequence; identical to SEQ ID NO: 23370
  Cyclic GFR-binding peptide
  MOD_RES (1)..(1): Xaa is C or S

SEQ ID NO: 70714 - protein, 30 aa, Artificial Sequence
  Cyclic GFR-binding peptide
  MOD_RES (30)..(30): Xaa is C or S
VVMNPYVKLIVNSSDDFFLVSLSSLKTPAX

SEQ ID NO: 70715 - protein, 29 aa, Artificial Sequence
  Cyclic GFR-binding peptide
  MOD_RES (29)..(29): Xaa is C or S
MGEPYVKLTPVGMDDFFLVSLSSLKTPVX

SEQ ID NO: 70716 - protein, 24 aa, Artificial Sequence
  Cyclic GFR-binding peptide
KVIMPYVKLIKPTKGIFFLISLSS

SEQ ID NO: 70717 - protein, 38 aa, Artificial Sequence; identical to SEQ ID NO: 23371
  Cyclic GFR-binding peptide
  MOD_RES (32)..(33): Xaa is C or S

SEQ ID NO: 70718 - protein, 32 aa, Artificial Sequence
  Cyclic GFR-binding peptide
  MOD_RES (28)..(29): Xaa is C or S
MDPYVKLVVNNASDFFLISLSSLRTPVXXTPP

SEQ ID NO: 70719 - protein, 31 aa, Artificial Sequence
  Cyclic GFR-binding peptide
  MOD_RES (1)..(3): Xaa is C or S
XGXSEVVMDPYVKLVVNNASDFFLISLSSLR

SEQ ID NO: 70720 - protein, 30 aa, Artificial Sequence
  Cyclic GFR-binding peptide
  MOD_RES (26)..(27): Xaa is C or S
PYVKLVVKDYEDFFLMSLSSLETPVXXAKP

SEQ ID NO: 70721 - protein, 31 aa, Artificial Sequence
  Cyclic GFR-binding peptide
  MOD_RES (27)..(28): Xaa is C or S
DPYVKLVVNNAADFFLISLSSLRAPVXXSAP

SEQ ID NO: 70722 - protein, 31 aa, Artificial Sequence
  Cyclic GFR-binding peptide
  MOD_RES (2)..(2): Xaa is C or S
GXESVAMGPYVKLYTVVGKDFFLISLSSLKT

SEQ ID NO: 70723 - protein, 29 aa, Artificial Sequence
  Cyclic GFR-binding peptide
  MOD_RES (29)..(29): Xaa is C or S
AMGPYVKLYTVVGKDFFLISLSSLKTPVX

SEQ ID NO: 70724 - protein, 33 aa, Artificial Sequence; identical to SEQ ID NO: 23374
  Cyclic GFR-binding peptide
  MOD_RES (1)..(33): Xaa is C or S

SEQ ID NO: 70725 - protein, 33 aa, Artificial Sequence
  Cyclic GFR-binding peptide
  MOD_RES (29)..(30): Xaa is C or S
VMDPYVKLVVKENEDFFLMSLSSLETPVXXAKP

SEQ ID NO: 70726 - protein, 31 aa, Artificial Sequence
  Cyclic GFR-binding peptide
  MOD_RES (1)..(3): Xaa is C or S
XGXEAVSMGEPYVKLTPVGMDDFFLVSLSSL

SEQ ID NO: 70727 - protein, 33 aa, Artificial Sequence; identical to SEQ ID NO: 23376
  Cyclic GFR-binding peptide
  MOD_RES (31)..(32): Xaa is C or S

SEQ ID NO: 70728 - protein, 37 aa, Artificial Sequence; identical to SEQ ID NO: 23377
  Cyclic GFR-binding peptide
  MOD_RES (1)..(34)..(35): Xaa is C or S

SEQ ID NO: 70729 - protein, 32 aa, Artificial Sequence; identical to SEQ ID NO: 23379
  Cyclic GFR-binding peptide
  MOD_RES (1)..(32): Xaa is C or S

SEQ ID NO: 70730 - protein, 28 aa, Artificial Sequence
  Cyclic GFR-binding peptide
  MOD_RES (27)..(28): Xaa is C or S
DPYVKLVVNNAADFFLISLSSLRAPVXX

SEQ ID NO: 70731 - protein, 31 aa, Artificial Sequence
  Cyclic GFR-binding peptide
KNHQLFPYVKLHQGQHPKIRFFLMSLSSEET

SEQ ID NO: 70732 - protein, 33 aa, Artificial Sequence
  Cyclic GFR-binding peptide
  MOD_RES (30)..(31): Xaa is C or S
VVMNPYVKLIVNSSDDFFLVSLSSLKTPAXXPK

SEQ ID NO: 70733 - protein, 34 aa, Artificial Sequence; identical to SEQ ID NO: 23381
  Cyclic GFR-binding peptide
  MOD_RES (33)..(34): Xaa is C or S

SEQ ID NO: 70734 - protein, 28 aa, Artificial Sequence
  Cyclic GFR-binding peptide
  MOD_RES (1)..(3): Xaa is C or S
XKXSKVIMPYVKLIKPTKGIFFLISLSS

SEQ ID NO: 70735 - protein, 25 aa, Artificial Sequence
  Cyclic GFR-binding peptide
NPYVKLIVNNSSDFFLVSLSSLKTP

SEQ ID NO: 70736 - protein, 29 aa, Artificial Sequence
  Cyclic GFR-binding peptide
EVVMEPYVKLVVKDYEDFFLMSLSSLETP

SEQ ID NO: 70737 - protein, 32 aa, Artificial Sequence
  Cyclic GFR-binding peptide
  MOD_RES (29)..(30): Xaa is C or S
VIMPYVKLIKPTKGIFFLISLSSLDQSVXXPS

SEQ ID NO: 70738 - protein, 32 aa, Artificial Sequence; identical to SEQ ID NO: 23385
  Cyclic GFR-binding peptide

SEQ ID NO: 70739 - protein, 31 aa, Artificial Sequence
  Cyclic GFR-binding peptide
  MOD_RES (26)..(27): Xaa is C or S
PYVKLIIQQKDNFFLMSLSSMKTPTXXPGAS

SEQ ID NO: 70740 - protein, 26 aa, Artificial Sequence
  Cyclic GFR-binding peptide
PYVKLHQGQHPKIRFFLMSLSSEETP

SEQ ID NO: 70741 - protein, 33 aa, Artificial Sequence
  Cyclic GFR-binding peptide
  MOD_RES (29)..(30): Xaa is C or S
VVMPYVKLVKPTRGVFFLISLSSLDQPVXXPSA

SEQ ID NO: 70742 - protein, 20 aa, Artificial Sequence
  Cyclic GFR-binding peptide
PYVKLIVNSSDDFFLVSLSS

SEQ ID NO: 70743 - protein, 34 aa, Artificial Sequence; identical to SEQ ID NO: 23387
  Cyclic GFR-binding peptide
  MOD_RES (32)..(33): Xaa is C or S

SEQ ID NO: 70744 - protein, 37 aa, Artificial Sequence; identical to SEQ ID NO: 23388
  Cyclic GFR-binding peptide
  MOD_RES (32)..(32): Xaa is C or S

SEQ ID NO: 70745 - protein, 25 aa, Artificial Sequence
  Cyclic GFR-binding peptide
EVVMDPYVKLVVNNAADFFLISLSS

SEQ ID NO: 70746 - protein, 35 aa, Artificial Sequence; identical to SEQ ID NO: 23389
  Cyclic GFR-binding peptide
  MOD_RES (1)..(32)..(33): Xaa is C or S

SEQ ID NO: 70747 - protein, 30 aa, Artificial Sequence
  Cyclic GFR-binding peptide
  MOD_RES (26)..(27): Xaa is C or S
PYVKLVVNNASDFFLISLSSLRTPVXXTPP

SEQ ID NO: 70748 - protein, 29 aa, Artificial Sequence
  Cyclic GFR-binding peptide
RVVMNPYVKLIVNSSDDFFLVSLSSLQTP

SEQ ID NO: 70749 - protein, 23 aa, Artificial Sequence
  Cyclic GFR-binding peptide
GEPYVKLTPVGMDDFFLVSLSSL

SEQ ID NO: 70750 - protein, 25 aa, Artificial Sequence
  Cyclic GFR-binding peptide
LRPYVKLLKPKKRVYEFFLVSLSSH

SEQ ID NO: 70751 - protein, 23 aa, Artificial Sequence
  Cyclic GFR-binding peptide
PYVKLHQGQHPKIRFFLMSLSSE

SEQ ID NO: 70752 - protein, 30 aa, Artificial Sequence
  Cyclic GFR-binding peptide
  MOD_RES (26)..(27): Xaa is C or S
PYVKLVKPKRGVFFLISLSSLAQPVXXPAA

SEQ ID NO: 70753 - protein, 27 aa, Artificial Sequence
  Cyclic GFR-binding peptide
EAVSMGEPYVKLTPVGMDDFFLVSLSS

SEQ ID NO: 70754 - protein, 26 aa, Artificial Sequence
  Cyclic GFR-binding peptide
  MOD_RES (26)..(26): Xaa is C or S
PYVKLIVNSSDDFFLVSLSSLQTPAX

SEQ ID NO: 70755 - protein, 27 aa, Artificial Sequence
  Cyclic GFR-binding peptide
  MOD_RES (26)..(27): Xaa is C or S
PYVKLVVKDYEDFFLMSLSSLETPVXX

SEQ ID NO: 70756 - protein, 29 aa, Artificial Sequence
  Cyclic GFR-binding peptide
  MOD_RES (26)..(27): Xaa is C or S
PYVKLLLVRGNDFFLMSLSSTKVPAXXTS

SEQ ID NO: 70757 - protein, 41 aa, Artificial Sequence; identical to SEQ ID NO: 23395
  Cyclic GFR-binding peptide
  MOD_RES (2)..(4)..(36): Xaa is C or S

SEQ ID NO: 70758 - protein, 24 aa, Artificial Sequence
  Cyclic GFR-binding peptide
VMDPYVKLVVKENEDFFLMSLSSL

SEQ ID NO: 70759 - protein, 30 aa, Artificial Sequence
  Cyclic GFR-binding peptide
  MOD_RES (30)..(30): Xaa is C or S
VVMDPYVKLVVNNASDFFLISLSSLRTPVX

SEQ ID NO: 70760 - protein, 32 aa, Artificial Sequence; identical to SEQ ID NO: 23396
  Cyclic GFR-binding peptide
  MOD_RES (31)..(32): Xaa is C or S

SEQ ID NO: 70761 - protein, 27 aa, Artificial Sequence
  Cyclic GFR-binding peptide
KVVMNPYVKLIVNNSSDFFLVSLSSLK

SEQ ID NO: 70762 - protein, 29 aa, Artificial Sequence
  Cyclic GFR-binding peptide
DVVMGPYVKLIIQQKDNFFLMSLSSMKTP

SEQ ID NO: 70763 - protein, 26 aa, Artificial Sequence
  Cyclic GFR-binding peptide
GEVVMDPYVKLVVKENEDFFLMSLSS

SEQ ID NO: 70764 - protein, 31 aa, Artificial Sequence
  Cyclic GFR-binding peptide
LRPYVKLLKPKKRVYEFFLVSLSSHHVRSPQ

SEQ ID NO: 70765 - protein, 26 aa, Artificial Sequence
  Cyclic GFR-binding peptide
MEPYVKLVVKDYEDFFLMSLSSLETP

SEQ ID NO: 70766 - protein, 30 aa, Artificial Sequence
  Cyclic GFR-binding peptide
  MOD_RES (27)..(28): Xaa is C or S
NPYVKLIVNNSSDFFLVSLSSLKTPAXXAK

SEQ ID NO: 70767 - protein, 39 aa, Artificial Sequence; identical to SEQ ID NO: 23405
  Cyclic GFR-binding peptide
  MOD_RES (1)..(38): Xaa is C or S

SEQ ID NO: 70768 - protein, 22 aa, Artificial Sequence
  Cyclic GFR-binding peptide
EPYVKLTPVGMDDFFLVSLSSL

SEQ ID NO: 70769 - protein, 39 aa, Artificial Sequence; identical to SEQ ID NO: 23406
  Cyclic GFR-binding peptide
  MOD_RES (1)..(33)..(34): Xaa is C or S

SEQ ID NO: 70770 - protein, 34 aa, Artificial Sequence; identical to SEQ ID NO: 23407
  Cyclic GFR-binding peptide
  MOD_RES (2)..(33)..(34): Xaa is C or S

SEQ ID NO: 70771 - protein, 29 aa, Artificial Sequence
  Cyclic GFR-binding peptide
RPYVKLLKPKKRVYEFFLVSLSSHHVRSP

SEQ ID NO: 70772 - protein, 36 aa, Artificial Sequence
  Cyclic GFR-binding peptide
  MOD_RES (34)..(34): Xaa is C or S
EELRPYVKLLKPKKRVYEFFLVSLSSHHVRSPQXKV

SEQ ID NO: 70773 - protein, 32 aa, Artificial Sequence
  Cyclic GFR-binding peptide
  MOD_RES (2)..(4): Xaa is C or S
RXGXSEVVMDPYVKLVVNNASDFFLISLSSLR

SEQ ID NO: 70774 - protein, 28 aa, Artificial Sequence
  Cyclic GFR-binding peptide
KVVMPYVKLVKPTRGVFFLISLSSLDQP

SEQ ID NO: 70775 - protein, 30 aa, Artificial Sequence
  Cyclic GFR-binding peptide
  MOD_RES (1)..(1): Xaa is C or S
XEAVSMGEPYVKLTPVGMDDFFLVSLSSLK

SEQ ID NO: 70776 - protein, 32 aa, Artificial Sequence
  Cyclic GFR-binding peptide
  MOD_RES (26)..(27): Xaa is C or S
PYVKLVKPTRGVFFLISLSSLDQPVXXPSASA

SEQ ID NO: 70777 - protein, 36 aa, Artificial Sequence
  Cyclic GFR-binding peptide
  MOD_RES (2)..(4): Xaa is C or S
RXEXKNHQLFPYVKLHQGQHPKIRFFLMSLSSEETP

SEQ ID NO: 70778 - protein, 32 aa, Artificial Sequence
  Cyclic GFR-binding peptide
  MOD_RES (28)..(29): Xaa is C or S
MNPYVKLIVNSSDDFFLVSLSSLKTPAXXPKP

SEQ ID NO: 70779 - protein, 32 aa, Artificial Sequence
  Cyclic GFR-binding peptide
  MOD_RES (1)..(1): Xaa is C or S
XGEVVMDPYVKLVVKENEDFFLMSLSSLETPV

SEQ ID NO: 70780 - protein, 33 aa, Artificial Sequence
  Cyclic GFR-binding peptide
  MOD_RES (27)..(28): Xaa is C or S
NPYVKLIVNNSSDFFLVSLSSLKTPAXXAKPVA

SEQ ID NO: 70781 - protein, 32 aa, Artificial Sequence
  Cyclic GFR-binding peptide
  MOD_RES (30)..(30): Xaa is C or S
LFPYVKLHQGQHPKIRFFLMSLSSEETPVXEL

SEQ ID NO: 70782 - protein, 27 aa, Artificial Sequence
  Cyclic GFR-binding peptide
RVIMPYVKLVKPKRGVFFLISLSSLAQ

SEQ ID NO: 70783 - protein, 31 aa, Artificial Sequence; identical to SEQ ID NO: 23411
  Cyclic GFR-binding peptide
  MOD_RES (31)..(31): Xaa is C or S

SEQ ID NO: 70784 - protein, 35 aa, Artificial Sequence; identical to SEQ ID NO: 23414
  Cyclic GFR-binding peptide
  MOD_RES (1)..(3)..(34)..(35): Xaa is C or S

SEQ ID NO: 70785 - protein, 29 aa, Artificial Sequence
  Cyclic GFR-binding peptide
  MOD_RES (28)..(29): Xaa is C or S
MDPYVKLVVNNASDFFLISLSSLRTPVXX

SEQ ID NO: 70786 - protein, 24 aa, Artificial Sequence
  Cyclic GFR-binding peptide
MPYVKLVKPTRGVFFLISLSSLDQ

SEQ ID NO: 70787 - protein, 36 aa, Artificial Sequence; identical to SEQ ID NO: 23416
  Cyclic GFR-binding peptide
  MOD_RES (2)..(4)..(36): Xaa is C or S

SEQ ID NO: 70788 - protein, 33 aa, Artificial Sequence; identical to SEQ ID NO: 23417
  Cyclic GFR-binding peptide
  MOD_RES (32)..(33): Xaa is C or S

SEQ ID NO: 70789 - protein, 34 aa, Artificial Sequence
  Cyclic GFR-binding peptide
  MOD_RES (28)..(29): Xaa is C or S
MNPYVKLIVNSSDDFFLVSLSSLKTPAXXPKPVH

SEQ ID NO: 70790 - protein, 31 aa, Artificial Sequence
  Cyclic GFR-binding peptide
  MOD_RES (28)..(29): Xaa is C or S
MDPYVKLVVNNAADFFLISLSSLRAPVXXSA

SEQ ID NO: 70791 - protein, 30 aa, Artificial Sequence
  Cyclic GFR-binding peptide
  MOD_RES (30)..(30): Xaa is C or S
PYVKLLKPKKRVYEFFLVSLSSHHVRSPQX

SEQ ID NO: 70792 - protein, 21 aa, Artificial Sequence
  Cyclic GFR-binding peptide
PYVKLVVKENEDFFLMSLSSL

SEQ ID NO: 70793 - protein, 23 aa, Artificial Sequence
  Cyclic GFR-binding peptide
MEPYVKLVVKDYEDFFLMSLSSL

SEQ ID NO: 70794 - protein, 28 aa, Artificial Sequence
  Cyclic GFR-binding peptide
  MOD_RES (27)..(28): Xaa is C or S
GPYVKLYTVVGKDFFLISLSSLKTPVXX

SEQ ID NO: 70795 - protein, 20 aa, Artificial Sequence
  Cyclic GFR-binding peptide
PYVKLVVNNASDFFLISLSS

SEQ ID NO: 70796 - protein, 21 aa, Artificial Sequence
  Cyclic GFR-binding peptide
DPYVKLVVNNAADFFLISLSS

SEQ ID NO: 70797 - protein, 23 aa, Artificial Sequence
  Cyclic GFR-binding peptide
IMPYVKLVKPKRGVFFLISLSSL

SEQ ID NO: 70798 - protein, 38 aa, Artificial Sequence; identical to SEQ ID NO: 23423
  Cyclic GFR-binding peptide
  MOD_RES (2)..(4)..(35)..(36): Xaa is C or S

SEQ ID NO: 70799 - protein, 23 aa, Artificial Sequence
  Cyclic GFR-binding peptide
VMDPYVKLVVNNASDFFLISLSS

SEQ ID NO: 70800 - protein, 35 aa, Artificial Sequence; identical to SEQ ID NO: 23424
  Cyclic GFR-binding peptide
  MOD_RES (1)..(3)..(35): Xaa is C or S

SEQ ID NO: 70801 - protein, 34 aa, Artificial Sequence
  Cyclic GFR-binding peptide
  MOD_RES (28)..(29): Xaa is C or S
MGPYVKLIIQQKDNFFLMSLSSMKTPTXXPGASG

SEQ ID NO: 70802 - protein, 24 aa, Artificial Sequence
  Cyclic GFR-binding peptide
PYVKLIVNNSSDFFLVSLSSLKTP

SEQ ID NO: 70803 - protein, 38 aa, Artificial Sequence; identical to SEQ ID NO: 23429
  Cyclic GFR-binding peptide
  MOD_RES (2)..(34)..(35): Xaa is C or S

SEQ ID NO: 70804 - protein, 24 aa, Artificial Sequence
  Cyclic GFR-binding peptide
PYVKLTPVGMDDFFLVSLSSLKTP

SEQ ID NO: 70805 - protein, 29 aa, Artificial Sequence
  Cyclic GFR-binding peptide
  MOD_RES (1)..(3): Xaa is C or S
XGXAKVVMNPYVKLIVNNSSDFFLVSLSS

SEQ ID NO: 70806 - protein, 33 aa, Artificial Sequence
  Cyclic GFR-binding peptide
  MOD_RES (30)..(31): Xaa is C or S
EVIMPYVKLLLVRGNDFFLMSLSSTKVPAXXTS

SEQ ID NO: 70807 - protein, 26 aa, Artificial Sequence
  Cyclic GFR-binding peptide
RPYVKLLKPKKRVYEFFLVSLSSHHV

SEQ ID NO: 70808 - protein, 33 aa, Artificial Sequence
  Cyclic GFR-binding peptide
  MOD_RES (28)..(29): Xaa is C or S
MGPYVKLYTVVGKDFFLISLSSLKTPVXXAKSA

SEQ ID NO: 70809 - protein, 33 aa, Artificial Sequence
  Cyclic GFR-binding peptide
  MOD_RES (1)..(3): Xaa is C or S
XGXARVVMNPYVKLIVNSSDDFFLVSLSSLQTP

SEQ ID NO: 70810 - protein, 38 aa, Artificial Sequence; identical to SEQ ID NO: 23435
  Cyclic GFR-binding peptide
  MOD_RES (2)..(4)..(36)..(37): Xaa is C or S

SEQ ID NO: 70811 - protein, 33 aa, Artificial Sequence
  Cyclic GFR-binding peptide
  MOD_RES (29)..(29): Xaa is C or S
FPYVKLHQGQHPKIRFFLMSLSSEETPVXELGE

SEQ ID NO: 70812 - protein, 29 aa, Artificial Sequence
  Cyclic GFR-binding peptide
VVMDPYVKLVVNNASDFFLISLSSLRTPV

SEQ ID NO: 70813 - protein, 33 aa, Artificial Sequence
  Cyclic GFR-binding peptide
  MOD_RES (30)..(30): Xaa is C or S
PYVKLLKPKKRVYEFFLVSLSSHHVRSPQXKVS

SEQ ID NO: 70814 - protein, 36 aa, Artificial Sequence; identical to SEQ ID NO: 23436
  Cyclic GFR-binding peptide
  MOD_RES (31)..(32): Xaa is C or S

SEQ ID NO: 70815 - protein, 26 aa, Artificial Sequence
  Cyclic GFR-binding peptide
  MOD_RES (26)..(26): Xaa is C or S
PYVKLYTVVGKDFFLISLSSLKTPVX

SEQ ID NO: 70816 - protein, 31 aa, Artificial Sequence
  Cyclic GFR-binding peptide
  MOD_RES (27)..(28): Xaa is C or S
MPYVKLIKPTKGIFFLISLSSLDQSVXXPSA

SEQ ID NO: 70817 - protein, 28 aa, Artificial Sequence
  Cyclic GFR-binding peptide
  MOD_RES (2)..(2): Xaa is C or S
KXSRVIMPYVKLVKPKRGVFFLISLSSL

SEQ ID NO: 70818 - protein, 25 aa, Artificial Sequence
  Cyclic GFR-binding peptide
VSMGEPYVKLTPVGMDDFFLVSLSS

SEQ ID NO: 70819 - protein, 34 aa, Artificial Sequence; identical to SEQ ID NO: 23443
  Cyclic GFR-binding peptide
  MOD_RES (2)..(34): Xaa is C or S

SEQ ID NO: 70820 - protein, 24 aa, Artificial Sequence
  Cyclic GFR-binding peptide
PYVKLIVNSSDDFFLVSLSSLKTP

SEQ ID NO: 70821 - protein, 31 aa, Artificial Sequence
  Cyclic GFR-binding peptide
  MOD_RES (2)..(4): Xaa is C or S
SXKXSRVIMPYVKLVKPKRGVFFLISLSSLA

SEQ ID NO: 70822 - protein, 38 aa, Artificial Sequence
  Cyclic GFR-binding peptide
  MOD_RES (1)..(3)..(35)..(36): Xaa is C or S
XGXGEVVMDPYVKLVVKENEDFFLMSLSSLETPVXXAK

SEQ ID NO: 70823 - protein, 29 aa, Artificial Sequence
  Cyclic GFR-binding peptide
  MOD_RES (27)..(28): Xaa is C or S
DPYVKLVVKENEDFFLMSLSSLETPVXXA

SEQ ID NO: 70824 - protein, 38 aa, Artificial Sequence; identical to SEQ ID NO: 23445
  Cyclic GFR-binding peptide
  MOD_RES (1)..(38): Xaa is C or S

SEQ ID NO: 70825 - protein, 22 aa, Artificial Sequence
  Cyclic GFR-binding peptide
MGPYVKLIIQQKDNFFLMSLSS

SEQ ID NO: 70826 - protein, 35 aa, Artificial Sequence
  Cyclic GFR-binding peptide
  MOD_RES (30)..(31): Xaa is C or S
KVVMPYVKLVKPTRGVFFLISLSSLDQPVXXPSAS

SEQ ID NO: 70827 - protein, 26 aa, Artificial Sequence
  Cyclic GFR-binding peptide
GEVVMEPYVKLVVKDYEDFFLMSLSS

SEQ ID NO: 70828 - protein, 31 aa, Artificial Sequence
  Cyclic GFR-binding peptide
  MOD_RES (2)..(2): Xaa is C or S
GXAEVVMDPYVKLVVNNAADFFLISLSSLRA

SEQ ID NO: 70829 - protein, 43 aa, Artificial Sequence; identical to SEQ ID NO: 23446
  Cyclic GFR-binding peptide
  MOD_RES (1)..(3)..(37): Xaa is C or S

SEQ ID NO: 70830 - protein, 29 aa, Artificial Sequence
  Cyclic GFR-binding peptide
ELRPYVKLLKPKKRVYEFFLVSLSSHHVR

SEQ ID NO: 70831 - protein, 32 aa, Artificial Sequence
  Cyclic GFR-binding peptide
  MOD_RES (28)..(29): Xaa is C or S
MDPYVKLVVNNAADFFLISLSSLRAPVXXSAP

SEQ ID NO: 70832 - protein, 25 aa, Artificial Sequence
  Cyclic GFR-binding peptide
DPYVKLVVKENEDFFLMSLSSLETP

SEQ ID NO: 70833 - protein, 28 aa, Artificial Sequence
  Cyclic GFR-binding peptide
  MOD_RES (27)..(28): Xaa is C or S
NPYVKLIVNNSSDFFLVSLSSLKTPAXX

SEQ ID NO: 70834 - protein, 40 aa, Artificial Sequence; identical to SEQ ID NO: 23447
  Cyclic GFR-binding peptide
  MOD_RES (2)..(35)..(36): Xaa is C or S

SEQ ID NO: 70835 - protein, 30 aa, Artificial Sequence
  Cyclic GFR-binding peptide
  MOD_RES (1)..(1): Xaa is C or S
XRDVVMGPYVKLIIQQKDNFFLMSLSSMKT

SEQ ID NO: 70836 - protein, 23 aa, Artificial Sequence
  Cyclic GFR-binding peptide
VMNPYVKLIVNNSSDFFLVSLSS

SEQ ID NO: 70837 - protein, 30 aa, Artificial Sequence
  Cyclic GFR-binding peptide
  MOD_RES (28)..(29): Xaa is C or S
IMPYVKLIKPTKGIFFLISLSSLDQSVXXP

SEQ ID NO: 70838 - protein, 41 aa, Artificial Sequence; identical to SEQ ID NO: 23452
  Cyclic GFR-binding peptide
  MOD_RES (2)..(4)..(36)..(37): Xaa is C or S

SEQ ID NO: 70839 - protein, 36 aa, Artificial Sequence
  Cyclic GFR-binding peptide
  MOD_RES (32)..(32): Xaa is C or S
LRPYVKLLKPKKRVYEFFLVSLSSHHVRSPQXKVSS

SEQ ID NO: 70840 - protein, 40 aa, Artificial Sequence; identical to SEQ ID NO: 23453
  Cyclic GFR-binding peptide
  MOD_RES (36)..(36): Xaa is C or S

SEQ ID NO: 70841 - protein, 37 aa, Artificial Sequence; identical to SEQ ID NO: 23455
  Cyclic GFR-binding peptide
  MOD_RES (37)..(37): Xaa is C or S

SEQ ID NO: 70842 - protein, 37 aa, Artificial Sequence; identical to SEQ ID NO: 23456
  Cyclic GFR-binding peptide
  MOD_RES (1)..(3)..(34)..(35): Xaa is C or S

SEQ ID NO: 70843 - protein, 34 aa, Artificial Sequence
  Cyclic GFR-binding peptide
  MOD_RES (2)..(34): Xaa is C or S
GXGEVVMDPYVKLVVKENEDFFLMSLSSLETPVX

SEQ ID NO: 70844 - protein, 39 aa, Artificial Sequence; identical to SEQ ID NO: 23457
  Cyclic GFR-binding peptide
  MOD_RES (2)..(4)..(36): Xaa is C or S

SEQ ID NO: 70845 - protein, 39 aa, Artificial Sequence
  Cyclic GFR-binding peptide
  MOD_RES (1)..(3)..(35)..(36): Xaa is C or S
XGXGEVVMDPYVKLVVKENEDFFLMSLSSLETPVXXAKP

SEQ ID NO: 70846 - protein, 34 aa, Artificial Sequence
  Cyclic GFR-binding peptide
  MOD_RES (2)..(4): Xaa is C or S
RXGXGEVVMEPYVKLVVKDYEDFFLMSLSSLETP

SEQ ID NO: 70847 - protein, 25 aa, Artificial Sequence
  Cyclic GFR-binding peptide
RVIMPYVKLVKPKRGVFFLISLSSL

SEQ ID NO: 70848 - protein, 35 aa, Artificial Sequence; identical to SEQ ID NO: 23459
  Cyclic GFR-binding peptide
  MOD_RES (2)..(4): Xaa is C or S

SEQ ID NO: 70849 - protein, 32 aa, Artificial Sequence; identical to SEQ ID NO: 23460
  Cyclic GFR-binding peptide
  MOD_RES (31)..(32): Xaa is C or S

SEQ ID NO: 70850 - protein, 39 aa, Artificial Sequence; identical to SEQ ID NO: 23461
  Cyclic GFR-binding peptide
  MOD_RES (1)..(3)..(36)..(37): Xaa is C or S

SEQ ID NO: 70851 - protein, 34 aa, Artificial Sequence
  Cyclic GFR-binding peptide
  MOD_RES (30)..(31): Xaa is C or S
VVMGPYVKLIIQQKDNFFLMSLSSMKTPTXXPGA

SEQ ID NO: 70852 - protein, 29 aa, Artificial Sequence
  Cyclic GFR-binding peptide
  MOD_RES (2)..(2): Xaa is C or S
GXEEVIMPYVKLLLVRGNDFFLMSLSSTK

SEQ ID NO: 70853 - protein, 23 aa, Artificial Sequence
  Cyclic GFR-binding peptide
MDPYVKLVVNNASDFFLISLSSL

SEQ ID NO: 70854 - protein, 25 aa, Artificial Sequence
  Cyclic GFR-binding peptide
VMEPYVKLVVKDYEDFFLMSLSSLE

SEQ ID NO: 70855 - protein, 41 aa, Artificial Sequence; identical to SEQ ID NO: 23463
  Cyclic GFR-binding peptide
  MOD_RES (1)..(3)..(35)..(36): Xaa is C or S

SEQ ID NO: 70856 - protein, 25 aa, Artificial Sequence
  Cyclic GFR-binding peptide
PYVKLVVNNAADFFLISLSSLRAPV

SEQ ID NO: 70857 - protein, 32 aa, Artificial Sequence; identical to SEQ ID NO: 23465
  Cyclic GFR-binding peptide
  MOD_RES (1)..(1): Xaa is C or S

SEQ ID NO: 70858 - protein, 33 aa, Artificial Sequence; identical to SEQ ID NO: 23466
  Cyclic GFR-binding peptide
  MOD_RES (1)..(32)..(33): Xaa is C or S

SEQ ID NO: 70859 - protein, 28 aa, Artificial Sequence
  Cyclic GFR-binding peptide
GEVVMDPYVKLVVKENEDFFLMSLSSLE

SEQ ID NO: 70860 - protein, 37 aa, Artificial Sequence; identical to SEQ ID NO: 23468
  Cyclic GFR-binding peptide
  MOD_RES (31)..(32): Xaa is C or S

SEQ ID NO: 70861 - protein, 39 aa, Artificial Sequence; identical to SEQ ID NO: 23473
  Cyclic GFR-binding peptide
  MOD_RES (2)..(4)..(35)..(36): Xaa is C or S

SEQ ID NO: 70862 - protein, 32 aa, Artificial Sequence
  Cyclic GFR-binding peptide
  MOD_RES (29)..(30): Xaa is C or S
VMDPYVKLVVKENEDFFLMSLSSLETPVXXAK

SEQ ID NO: 70863 - protein, 22 aa, Artificial Sequence
  Cyclic GFR-binding peptide
NPYVKLIVNSSDDFFLVSLSSL

SEQ ID NO: 70864 - protein, 20 aa, Artificial Sequence
  Cyclic GFR-binding peptide
PYVKLVVKENEDFFLMSLSS

SEQ ID NO: 70865 - protein, 24 aa, Artificial Sequence
  Cyclic GFR-binding peptide
DPYVKLVVNNASDFFLISLSSLRT

SEQ ID NO: 70866 - protein, 26 aa, Artificial Sequence
  Cyclic GFR-binding peptide
  MOD_RES (1)..(1): Xaa is C or S
XEEVIMPYVKLLLVRGNDFFLMSLSS

SEQ ID NO: 70867 - protein, 22 aa, Artificial Sequence
  Cyclic GFR-binding peptide
PYVKLVVNNASDFFLISLSSLR

SEQ ID NO: 70868 - protein, 30 aa, Artificial Sequence
  Cyclic GFR-binding peptide
  MOD_RES (2)..(4): Xaa is C or S
SXKXSKVVMPYVKLVKPTRGVFFLISLSSL

SEQ ID NO: 70869 - protein, 30 aa, Artificial Sequence; identical to SEQ ID NO: 23475
  Cyclic GFR-binding peptide

SEQ ID NO: 70870 - protein, 34 aa, Artificial Sequence
  Cyclic GFR-binding peptide
  MOD_RES (31)..(31): Xaa is C or S
QLFPYVKLHQGQHPKIRFFLMSLSSEETPVXELG

SEQ ID NO: 70871 - protein, 25 aa, Artificial Sequence
  Cyclic GFR-binding peptide
MDPYVKLVVNNAADFFLISLSSLRA

SEQ ID NO: 70872 - protein, 28 aa, Artificial Sequence
  Cyclic GFR-binding peptide
  MOD_RES (26)..(27): Xaa is C or S
PYVKLIVNSSDDFFLVSLSSLKTPAXXP

SEQ ID NO: 70873 - protein, 40 aa, Artificial Sequence; identical to SEQ ID NO: 23477
  Cyclic GFR-binding peptide
  MOD_RES (2)..(4)..(36)..(37): Xaa is C or S

SEQ ID NO: 70874 - protein, 33 aa, Artificial Sequence; identical to SEQ ID NO: 23478
  Cyclic GFR-binding peptide
  MOD_RES (31)..(32): Xaa is C or S

SEQ ID NO: 70875 - protein, 34 aa, Artificial Sequence
  Cyclic GFR-binding peptide
  MOD_RES (1)..(3): Xaa is C or S
XGXGEVVMDPYVKLVVKENEDFFLMSLSSLETPV

SEQ ID NO: 70876 - protein, 30 aa, Artificial Sequence
  Cyclic GFR-binding peptide
  MOD_RES (27)..(28): Xaa is C or S
MPYVKLIKPTKGIFFLISLSSLDQSVXXPS

SEQ ID NO: 70877 - protein, 34 aa, Artificial Sequence; identical to SEQ ID NO: 23481
  Cyclic GFR-binding peptide
  MOD_RES (31)..(32): Xaa is C or S

SEQ ID NO: 70878 - protein, 30 aa, Artificial Sequence
  Cyclic GFR-binding peptide
ESVAMGPYVKLYTVVGKDFFLISLSSLKTP

SEQ ID NO: 70879 - protein, 32 aa, Artificial Sequence
  Cyclic GFR-binding peptide
  MOD_RES (29)..(30): Xaa is C or S
VMNPYVKLIVNSSDDFFLVSLSSLKTPAXXPK

SEQ ID NO: 70880 - protein, 25 aa, Artificial Sequence
  Cyclic GFR-binding peptide
EPYVKLVVKDYEDFFLMSLSSLETP

SEQ ID NO: 70881 - protein, 27 aa, Artificial Sequence
  Cyclic GFR-binding peptide
  MOD_RES (27)..(27): Xaa is C or S
DPYVKLVVNNAADFFLISLSSLRAPVX

SEQ ID NO: 70882 - protein, 29 aa, Artificial Sequence
  Cyclic GFR-binding peptide
  MOD_RES (27)..(28): Xaa is C or S
EPYVKLVVKDYEDFFLMSLSSLETPVXXA

SEQ ID NO: 70883 - protein, 21 aa, Artificial Sequence
  Cyclic GFR-binding peptide
MPYVKLVKPTRGVFFLISLSS

SEQ ID NO: 70884 - protein, 36 aa, Artificial Sequence; identical to SEQ ID NO: 23483
  Cyclic GFR-binding peptide
  MOD_RES (2)..(34)..(35): Xaa is C or S

SEQ ID NO: 70885 - protein, 31 aa, Artificial Sequence
  Cyclic GFR-binding peptide
  MOD_RES (29)..(30): Xaa is C or S
VMDPYVKLVVKENEDFFLMSLSSLETPVXXA

SEQ ID NO: 70886 - protein, 21 aa, Artificial Sequence
  Cyclic GFR-binding peptide
PYVKLVVNNASDFFLISLSSL

SEQ ID NO: 70887 - protein, 37 aa, Artificial Sequence; identical to SEQ ID NO: 23485
  Cyclic GFR-binding peptide
  MOD_RES (2)..(4)..(36)..(37): Xaa is C or S

SEQ ID NO: 70888 - protein, 28 aa, Artificial Sequence
  Cyclic GFR-binding peptide
  MOD_RES (26)..(27): Xaa is C or S
PYVKLTPVGMDDFFLVSLSSLKTPVXXA

SEQ ID NO: 70889 - protein, 28 aa, Artificial Sequence
  Cyclic GFR-binding peptide
  MOD_RES (1)..(1): Xaa is C or S
XSKVIMPYVKLIKPTKGIFFLISLSSLD

SEQ ID NO: 70890 - protein, 21 aa, Artificial Sequence
  Cyclic GFR-binding peptide
PYVKLIKPTKGIFFLISLSSL

SEQ ID NO: 70891 - protein, 40 aa, Artificial Sequence; identical to SEQ ID NO: 23486
  Cyclic GFR-binding peptide
  MOD_RES (2)..(34)..(35): Xaa is C or S

SEQ ID NO: 70892 - protein, 30 aa, Artificial Sequence
  Cyclic GFR-binding peptide
  MOD_RES (27)..(28): Xaa is C or S
DPYVKLVVNNASDFFLISLSSLRTPVXXTP

SEQ ID NO: 70893 - protein, 28 aa, Artificial Sequence
  Cyclic GFR-binding peptide
  MOD_RES (27)..(27): Xaa is C or S
NPYVKLIVNSSDDFFLVSLSSLKTPAXT

SEQ ID NO: 70894 - protein, 33 aa, Artificial Sequence
  Cyclic GFR-binding peptide
  MOD_RES (29)..(30): Xaa is C or S
VMNPYVKLIVNSSDDFFLVSLSSLKTPAXXPKP

SEQ ID NO: 70895 - protein, 27 aa, Artificial Sequence
  Cyclic GFR-binding peptide
KVIMPYVKLIKPTKGIFFLISLSSLDQ

SEQ ID NO: 70896 - protein, 31 aa, Artificial Sequence
  Cyclic GFR-binding peptide
  MOD_RES (1)..(1): Xaa is C or S
XAEVVMDPYVKLVVNNAADFFLISLSSLRAP

SEQ ID NO: 70897 - protein, 28 aa, Artificial Sequence
  Cyclic GFR-binding peptide
ESVAMGPYVKLYTVVGKDFFLISLSSLK

SEQ ID NO: 70898 - protein, 26 aa, Artificial Sequence
  Cyclic GFR-binding peptide
  MOD_RES (26)..(26): Xaa is C or S
PYVKLLLVRGNDFFLMSLSSTKVPAX

SEQ ID NO: 70899 - protein, 25 aa, Artificial Sequence
  Cyclic GFR-binding peptide
EEVIMPYVKLLLVRGNDFFLMSLSS

SEQ ID NO: 70900 - protein, 27 aa, Artificial Sequence
  Cyclic GFR-binding peptide
MNPYVKLIVNSSDDFFLVSLSSLKTPA

SEQ ID NO: 70901 - protein, 32 aa, Artificial Sequence
  Cyclic GFR-binding peptide
  MOD_RES (26)..(27): Xaa is C or S
PYVKLVVKENEDFFLMSLSSLETPVXXAKPIK

SEQ ID NO: 70902 - protein, 32 aa, Artificial Sequence
  Cyclic GFR-binding peptide
  MOD_RES (1)..(3): Xaa is C or S
XGXARVVMNPYVKLIVNSSDDFFLVSLSSLQT

SEQ ID NO: 70903 - protein, 33 aa, Artificial Sequence
  Cyclic GFR-binding peptide
  MOD_RES (29)..(30): Xaa is C or S
VIMPYVKLVKPKRGVFFLISLSSLAQPVXXPAA

SEQ ID NO: 70904 - protein, 30 aa, Artificial Sequence
  Cyclic GFR-binding peptide
GEVVMDPYVKLVVKENEDFFLMSLSSLETP

SEQ ID NO: 70905 - protein, 31 aa, Artificial Sequence
  Cyclic GFR-binding peptide
  MOD_RES (27)..(28): Xaa is C or S
EPYVKLVVKDYEDFFLMSLSSLETPVXXAKP

SEQ ID NO: 70906 - protein, 38 aa, Artificial Sequence; identical to SEQ ID NO: 23492
  Cyclic GFR-binding peptide
  MOD_RES (1)..(33)..(34): Xaa is C or S

SEQ ID NO: 70907 - protein, 35 aa, Artificial Sequence
  Cyclic GFR-binding peptide
  MOD_RES (32)..(33): Xaa is C or S
AVSMGEPYVKLTPVGMDDFFLVSLSSLKTPVXXAK

SEQ ID NO: 70908 - protein, 31 aa, Artificial Sequence
  Cyclic GFR-binding peptide
  MOD_RES (1)..(1): Xaa is C or S
XGEVVMDPYVKLVVKENEDFFLMSLSSLETP

SEQ ID NO: 70909 - protein, 27 aa, Artificial Sequence
  Cyclic GFR-binding peptide
  MOD_RES (27)..(27): Xaa is C or S
NPYVKLIVNNSSDFFLVSLSSLKTPAX

SEQ ID NO: 70910 - protein, 35 aa, Artificial Sequence
  Cyclic GFR-binding peptide
  MOD_RES (29)..(30): Xaa is C or S
VMNPYVKLIVNSSDDFFLVSLSSLKTPAXXPKPVH

SEQ ID NO: 70911 - protein, 27 aa, Artificial Sequence
  Cyclic GFR-binding peptide
  MOD_RES (26)..(27): Xaa is C or S
PYVKLIVNSSDDFFLVSLSSLQTPAXX

SEQ ID NO: 70912 - protein, 34 aa, Artificial Sequence
  Cyclic GFR-binding peptide
  MOD_RES (28)..(29): Xaa is C or S
MEPYVKLVVKDYEDFFLMSLSSLETPVXXAKPIS

SEQ ID NO: 70913 - protein, 31 aa, Artificial Sequence; identical to SEQ ID NO: 23496
  Cyclic GFR-binding peptide
  MOD_RES (31)..(31): Xaa is C or S

SEQ ID NO: 70914 - protein, 24 aa, Artificial Sequence
  Cyclic GFR-binding peptide
NPYVKLIVNNSSDFFLVSLSSLKT

SEQ ID NO: 70915 - protein, 41 aa, Artificial Sequence; identical to SEQ ID NO: 23498
  Cyclic GFR-binding peptide
  MOD_RES (1)..(3)..(35)..(36): Xaa is C or S

SEQ ID NO: 70916 - protein, 32 aa, Artificial Sequence
  Cyclic GFR-binding peptide
  MOD_RES (2)..(2): Xaa is C or S
EXKNHQLFPYVKLHQGQHPKIRFFLMSLSSEE

SEQ ID NO: 70917 - protein, 35 aa, Artificial Sequence
  Cyclic GFR-binding peptide
  MOD_RES (2)..(2): Xaa is C or S
AXELHEELRPYVKLLKPKKRVYEFFLVSLSSHHVR

SEQ ID NO: 70918 - protein, 30 aa, Artificial Sequence
  Cyclic GFR-binding peptide
  MOD_RES (27)..(28): Xaa is C or S
DPYVKLVVNNAADFFLISLSSLRAPVXXSA

SEQ ID NO: 70919 - protein, 22 aa, Artificial Sequence
  Cyclic GFR-binding peptide
PYVKLIKPTKGIFFLISLSSLD

SEQ ID NO: 70920 - protein, 29 aa, Artificial Sequence
  Cyclic GFR-binding peptide
  MOD_RES (1)..(1): Xaa is C or S
XEEVIMPYVKLLLVRGNDFFLMSLSSTKV

SEQ ID NO: 70921 - protein, 21 aa, Artificial Sequence
  Cyclic GFR-binding peptide
MPYVKLVKPKRGVFFLISLSS

SEQ ID NO: 70922 - protein, 31 aa, Artificial Sequence; identical to SEQ ID NO: 23500
  Cyclic GFR-binding peptide
  MOD_RES (31)..(31): Xaa is C or S

SEQ ID NO: 70923 - protein, 29 aa, Artificial Sequence
  Cyclic GFR-binding peptide
  MOD_RES (1)..(1): Xaa is C or S
XKNHQLFPYVKLHQGQHPKIRFFLMSLSS

SEQ ID NO: 70924 - protein, 32 aa, Artificial Sequence
  Cyclic GFR-binding peptide
  MOD_RES (30)..(31): Xaa is C or S
VVMDPYVKLVVKENEDFFLMSLSSLETPVXXA

SEQ ID NO: 70925 - protein, 30 aa, Artificial Sequence
  Cyclic GFR-binding peptide
  MOD_RES (30)..(30): Xaa is C or S
VAMGPYVKLYTVVGKDFFLISLSSLKTPVX

SEQ ID NO: 70926 - protein, 31 aa, Artificial Sequence
  Cyclic GFR-binding peptide
  MOD_RES (29)..(30): Xaa is C or S
VMNPYVKLIVNSSDDFFLVSLSSLKTPAXXP

SEQ ID NO: 70927 - protein, 39 aa, Artificial Sequence; identical to SEQ ID NO: 23503
  Cyclic GFR-binding peptide
  MOD_RES (2)..(34)..(35): Xaa is C or S

SEQ ID NO: 70928 - protein, 22 aa, Artificial Sequence
  Cyclic GFR-binding peptide
VMPYVKLVKPTRGVFFLISLSS

SEQ ID NO: 70929 - protein, 23 aa, Artificial Sequence
  Cyclic GFR-binding peptide
DPYVKLVVNNASDFFLISLSSLR

SEQ ID NO: 70930 - protein, 23 aa, Artificial Sequence
  Cyclic GFR-binding peptide
MPYVKLVKPTRGVFFLISLSSLD

SEQ ID NO: 70931 - protein, 22 aa, Artificial Sequence
  Cyclic GFR-binding peptide
MGPYVKLYTVVGKDFFLISLSS

SEQ ID NO: 70932 - protein, 39 aa, Artificial Sequence; identical to SEQ ID NO: 23504
  Cyclic GFR-binding peptide
  MOD_RES (1)..(3)..(35)..(36): Xaa is C or S

SEQ ID NO: 70933 - protein, 26 aa, Artificial Sequence
  Cyclic GFR-binding peptide
EVIMPYVKLLLVRGNDFFLMSLSSTK

SEQ ID NO: 70934 - protein, 38 aa, Artificial Sequence; identical to SEQ ID NO: 23506
  Cyclic GFR-binding peptide
  MOD_RES (1)..(32)..(33): Xaa is C or S

SEQ ID NO: 70935 - protein, 30 aa, Artificial Sequence
  Cyclic GFR-binding peptide
ELHEELRPYVKLLKPKKRVYEFFLVSLSSH

SEQ ID NO: 70936 - protein, 31 aa, Artificial Sequence
  Cyclic GFR-binding peptide
  MOD_RES (2)..(4): Xaa is C or S
RXGXESVAMGPYVKLYTVVGKDFFLISLSSL

SEQ ID NO: 70937 - protein, 30 aa, Artificial Sequence
  Cyclic GFR-binding peptide
  MOD_RES (1)..(3): Xaa is C or S
XKXSKVIMPYVKLIKPTKGIFFLISLSSLD

SEQ ID NO: 70938 - protein, 39 aa, Artificial Sequence; identical to SEQ ID NO: 23509
  Cyclic GFR-binding peptide
  MOD_RES (37)..(37): Xaa is C or S

SEQ ID NO: 70939 - protein, 33 aa, Artificial Sequence
  Cyclic GFR-binding peptide
  MOD_RES (27)..(28): Xaa is C or S
DPYVKLVVNNASDFFLISLSSLRTPVXXTPPTS

SEQ ID NO: 70940 - protein, 38 aa, Artificial Sequence; identical to SEQ ID NO: 23511
  Cyclic GFR-binding peptide
  MOD_RES (32)..(32): Xaa is C or S

SEQ ID NO: 70941 - protein, 35 aa, Artificial Sequence; identical to SEQ ID NO: 23512
  Cyclic GFR-binding peptide
  MOD_RES (1)..(33)..(34): Xaa is C or S

SEQ ID NO: 70942 - protein, 32 aa, Artificial Sequence
  Cyclic GFR-binding peptide
  MOD_RES (27)..(28): Xaa is C or S
NPYVKLIVNNSSDFFLVSLSSLKTPAXXAKPV

SEQ ID NO: 70943 - protein, 36 aa, Artificial Sequence
  Cyclic GFR-binding peptide
  MOD_RES (30)..(31): Xaa is C or S
KVIMPYVKLIKPTKGIFFLISLSSLDQSVXXPSASA

SEQ ID NO: 70944 - protein, 33 aa, Artificial Sequence
  Cyclic GFR-binding peptide
  MOD_RES (2)..(4): Xaa is C or S
AXAXELHEELRPYVKLLKPKKRVYEFFLVSLSS

SEQ ID NO: 70945 - protein, 31 aa, Artificial Sequence
  Cyclic GFR-binding peptide
  MOD_RES (1)..(1): Xaa is C or S
XARVVMNPYVKLIVNSSDDFFLVSLSSLQTP

SEQ ID NO: 70946 - protein, 31 aa, Artificial Sequence
  Cyclic GFR-binding peptide
  MOD_RES (2)..(4): Xaa is C or S
SXKXSKVVMPYVKLVKPTRGVFFLISLSSLD

SEQ ID NO: 70947 - protein, 29 aa, Artificial Sequence
  Cyclic GFR-binding peptide
  MOD_RES (26)..(27): Xaa is C or S
PYVKLIIQQKDNFFLMSLSSMKTPTXXPG

SEQ ID NO: 70948 - protein, 37 aa, Artificial Sequence; identical to SEQ ID NO: 23514
  Cyclic GFR-binding peptide
  MOD_RES (1)..(33)..(34): Xaa is C or S

SEQ ID NO: 70949 - protein, 36 aa, Artificial Sequence; identical to SEQ ID NO: 23515
  Cyclic GFR-binding peptide
  MOD_RES (2)..(2): Xaa is C or S

SEQ ID NO: 70950 - protein, 31 aa, Artificial Sequence
  Cyclic GFR-binding peptide
  MOD_RES (1)..(1): Xaa is C or S
XGEVVMEPYVKLVVKDYEDFFLMSLSSLETP

SEQ ID NO: 70951 - protein, 27 aa, Artificial Sequence
  Cyclic GFR-binding peptide
PYVKLLKPKKRVYEFFLVSLSSHHVRS

SEQ ID NO: 70952 - protein, 32 aa, Artificial Sequence; identical to SEQ ID NO: 23516
  Cyclic GFR-binding peptide
  MOD_RES (1)..(1): Xaa is C or S

SEQ ID NO: 70953 - protein, 30 aa, Artificial Sequence
  Cyclic GFR-binding peptide
  MOD_RES (1)..(1): Xaa is C or S
XESVAMGPYVKLYTVVGKDFFLISLSSLKT

SEQ ID NO: 70954 - protein, 37 aa, Artificial Sequence; identical to SEQ ID NO: 23517
  Cyclic GFR-binding peptide
  MOD_RES (2)..(4)..(36)..(37): Xaa is C or S

SEQ ID NO: 70955 - protein, 29 aa, Artificial Sequence
  Cyclic GFR-binding peptide
  MOD_RES (1)..(3): Xaa is C or S
XKXSKVVMPYVKLVKPTRGVFFLISLSSL

SEQ ID NO: 70956 - protein, 23 aa, Artificial Sequence
  Cyclic GFR-binding peptide
MNPYVKLIVNSSDDFFLVSLSSL

SEQ ID NO: 70957 - protein, 21 aa, Artificial Sequence
  Cyclic GFR-binding peptide
GPYVKLYTVVGKDFFLISLSS

SEQ ID NO: 70958 - protein, 34 aa, Artificial Sequence
  Cyclic GFR-binding peptide
  MOD_RES (32)..(32): Xaa is C or S
HQLFPYVKLHQGQHPKIRFFLMSLSSEETPVXEL

SEQ ID NO: 70959 - protein, 35 aa, Artificial Sequence; identical to SEQ ID NO: 23519
  Cyclic GFR-binding peptide
  MOD_RES (2)..(34)..(35): Xaa is C or S

SEQ ID NO: 70960 - protein, 33 aa, Artificial Sequence; identical to SEQ ID NO: 23521
  Cyclic GFR-binding peptide
  MOD_RES (31)..(32): Xaa is C or S

SEQ ID NO: 70961 - protein, 31 aa, Artificial Sequence; identical to SEQ ID NO: 23522
  Cyclic GFR-binding peptide

SEQ ID NO: 70962 - protein, 31 aa, Artificial Sequence
  Cyclic GFR-binding peptide
  MOD_RES (1)..(3): Xaa is C or S
XGXAEVVMDPYVKLVVNNAADFFLISLSSLR

SEQ ID NO: 70963 - protein, 41 aa, Artificial Sequence; identical to SEQ ID NO: 23523
  Cyclic GFR-binding peptide
  MOD_RES (1)..(3)..(35)..(36): Xaa is C or S

SEQ ID NO: 70964 - protein, 41 aa, Artificial Sequence; identical to SEQ ID NO: 23524
  Cyclic GFR-binding peptide
  MOD_RES (1)..(38): Xaa is C or S

SEQ ID NO: 70965 - protein, 30 aa, Artificial Sequence
  Cyclic GFR-binding peptide
  MOD_RES (27)..(28): Xaa is C or S
GPYVKLIIQQKDNFFLMSLSSMKTPTXXPG

SEQ ID NO: 70966 - protein, 30 aa, Artificial Sequence
  Cyclic GFR-binding peptide
  MOD_RES (29)..(30): Xaa is C or S
VMDPYVKLVVKENEDFFLMSLSSLETPVXX

SEQ ID NO: 70967 - protein, 30 aa, Artificial Sequence
  Cyclic GFR-binding peptide
  MOD_RES (26)..(27): Xaa is C or S
PYVKLIVNSSDDFFLVSLSSLKTPAXXPKP

SEQ ID NO: 70968 - protein, 27 aa, Artificial Sequence
  Cyclic GFR-binding peptide
  MOD_RES (27)..(27): Xaa is C or S
MPYVKLVKPKRGVFFLISLSSLAQPVX

SEQ ID NO: 70969 - protein, 31 aa, Artificial Sequence
  Cyclic GFR-binding peptide
  MOD_RES (1)..(3): Xaa is C or S
XGXRDVVMGPYVKLIIQQKDNFFLMSLSSMK

SEQ ID NO: 70970 - protein, 27 aa, Artificial Sequence
  Cyclic GFR-binding peptide
  MOD_RES (26)..(27): Xaa is C or S
PYVKLTPVGMDDFFLVSLSSLKTPVXX

SEQ ID NO: 70971 - protein, 38 aa, Artificial Sequence; identical to SEQ ID NO: 23526
  Cyclic GFR-binding peptide
  MOD_RES (1)..(3)..(35)..(36): Xaa is C or S

SEQ ID NO: 70972 - protein, 24 aa, Artificial Sequence
  Cyclic GFR-binding peptide
DPYVKLVVKENEDFFLMSLSSLET

SEQ ID NO: 70973 - protein, 41 aa, Artificial Sequence; identical to SEQ ID NO: 23528
  Cyclic GFR-binding peptide
  MOD_RES (2)..(4)..(41): Xaa is C or S

SEQ ID NO: 70974 - protein, 33 aa, Artificial Sequence
  Cyclic GFR-binding peptide
  MOD_RES (27)..(28): Xaa is C or S
DPYVKLVVNNAADFFLISLSSLRAPVXXSAPAA

SEQ ID NO: 70975 - protein, 38 aa, Artificial Sequence; identical to SEQ ID NO: 23530
  Cyclic GFR-binding peptide
  MOD_RES (1)..(3)..(35)..(36): Xaa is C or S

SEQ ID NO: 70976 - protein, 26 aa, Artificial Sequence
  Cyclic GFR-binding peptide
VVMGPYVKLIIQQKDNFFLMSLSSMK

SEQ ID NO: 70977 - protein, 32 aa, Artificial Sequence
  Cyclic GFR-binding peptide
  MOD_RES (2)..(4): Xaa is C or S
RXEXKNHQLFPYVKLHQGQHPKIRFFLMSLSS

SEQ ID NO: 70978 - protein, 35 aa, Artificial Sequence; identical to SEQ ID NO: 23531
  Cyclic GFR-binding peptide
  MOD_RES (1)..(33)..(34): Xaa is C or S

SEQ ID NO: 70979 - protein, 30 aa, Artificial Sequence; identical to SEQ ID NO: 23532
  Cyclic GFR-binding peptide

SEQ ID NO: 70980 - protein, 40 aa, Artificial Sequence; identical to SEQ ID NO: 23533
  Cyclic GFR-binding peptide
  MOD_RES (1)..(34)..(35): Xaa is C or S

SEQ ID NO: 70981 - protein, 36 aa, Artificial Sequence; identical to SEQ ID NO: 23534
  Cyclic GFR-binding peptide
  MOD_RES (2)..(4): Xaa is C or S

SEQ ID NO: 70982 - protein, 32 aa, Artificial Sequence
  Cyclic GFR-binding peptide
  MOD_RES (28)..(29): Xaa is C or S
MNPYVKLIVNSSDDFFLVSLSSLQTPAXXPKP

SEQ ID NO: 70983 - protein, 39 aa, Artificial Sequence; identical to SEQ ID NO: 23535
  Cyclic GFR-binding peptide
  MOD_RES (2)..(4)..(36)..(37): Xaa is C or S

SEQ ID NO: 70984 - protein, 33 aa, Artificial Sequence
  Cyclic GFR-binding peptide
  MOD_RES (27)..(27): Xaa is C or S
NPYVKLIVNSSDDFFLVSLSSLKTPAXTPKTVH

SEQ ID NO: 70985 - protein, 36 aa, Artificial Sequence
  Cyclic GFR-binding peptide
  MOD_RES (30)..(31): Xaa is C or S
VVMDPYVKLVVKENEDFFLMSLSSLETPVXXAKPIK

SEQ ID NO: 70986 - protein, 33 aa, Artificial Sequence
  Cyclic GFR-binding peptide
  MOD_RES (30)..(31): Xaa is C or S
VVMNPYVKLIVNSSDDFFLVSLSSLQTPAXXPK

SEQ ID NO: 70987 - protein, 27 aa, Artificial Sequence
  Cyclic GFR-binding peptide
RVVMNPYVKLIVNSSDDFFLVSLSSLK

SEQ ID NO: 70988 - protein, 24 aa, Artificial Sequence
  Cyclic GFR-binding peptide
PYVKLYTVVGKDFFLISLSSLKTP

SEQ ID NO: 70989 - protein, 22 aa, Artificial Sequence
  Cyclic GFR-binding peptide
DPYVKLVVKENEDFFLMSLSSL

SEQ ID NO: 70990 - protein, 31 aa, Artificial Sequence
  Cyclic GFR-binding peptide
  MOD_RES (31)..(31): Xaa is C or S
EVVMDPYVKLVVKENEDFFLMSLSSLETPVX

SEQ ID NO: 70991 - protein, 29 aa, Artificial Sequence
  Cyclic GFR-binding peptide
  MOD_RES (1)..(3): Xaa is C or S
XGXSRVVMNPYVKLIVNSSDDFFLVSLSS

SEQ ID NO: 70992 - protein, 29 aa, Artificial Sequence
  Cyclic GFR-binding peptide
  MOD_RES (29)..(29): Xaa is C or S
FPYVKLHQGQHPKIRFFLMSLSSEETPVX

SEQ ID NO: 70993 - protein, 26 aa, Artificial Sequence
  Cyclic GFR-binding peptide
KVVMPYVKLVKPTRGVFFLISLSSLD

SEQ ID NO: 70994 - protein, 38 aa, Artificial Sequence; identical to SEQ ID NO: 23537
  Cyclic GFR-binding peptide
  MOD_RES (2)..(36): Xaa is C or S

SEQ ID NO: 70995 - protein, 29 aa, Artificial Sequence
  Cyclic GFR-binding peptide
  MOD_RES (1)..(1): Xaa is C or S
XSRVIMPYVKLVKPKRGVFFLISLSSLAQ

SEQ ID NO: 70996 - protein, 32 aa, Artificial Sequence; identical to SEQ ID NO: 23539
  Cyclic GFR-binding peptide
  MOD_RES (2)..(2): Xaa is C or S

SEQ ID NO: 70997 - protein, 30 aa, Artificial Sequence
  Cyclic GFR-binding peptide
  MOD_RES (1)..(1): Xaa is C or S
XAKVVMNPYVKLIVNNSSDFFLVSLSSLKT

SEQ ID NO: 70998 - protein, 22 aa, Artificial Sequence
  Cyclic GFR-binding peptide
EPYVKLVVKDYEDFFLMSLSSL

SEQ ID NO: 70999 - protein, 36 aa, Artificial Sequence; identical to SEQ ID NO: 23540
  Cyclic GFR-binding peptide
  MOD_RES (1)..(33)..(34): Xaa is C or S

SEQ ID NO: 71000 - protein, 30 aa, Artificial Sequence
  Cyclic GFR-binding peptide
NHQLFPYVKLHQGQHPKIRFFLMSLSSEET

SEQ ID NO: 71001 - protein, 28 aa, Artificial Sequence
  Cyclic GFR-binding peptide
EAVSMGEPYVKLTPVGMDDFFLVSLSSL

SEQ ID NO: 71002 - protein, 25 aa, Artificial Sequence
  Cyclic GFR-binding peptide
PYVKLHQGQHPKIRFFLMSLSSEET

SEQ ID NO: 71003 - protein, 30 aa, Artificial Sequence
  Cyclic GFR-binding peptide
  MOD_RES (2)..(2): Xaa is C or S
GXSEVVMDPYVKLVVNNASDFFLISLSSLR

SEQ ID NO: 71004 - protein, 35 aa, Artificial Sequence; identical to SEQ ID NO: 23543
  Cyclic GFR-binding peptide
  MOD_RES (1)..(32)..(33): Xaa is C or S

SEQ ID NO: 71005 - protein, 28 aa, Artificial Sequence
  Cyclic GFR-binding peptide
AMGPYVKLYTVVGKDFFLISLSSLKTPV

SEQ ID NO: 71006 - protein, 34 aa, Artificial Sequence
  Cyclic GFR-binding peptide
  MOD_RES (30)..(31): Xaa is C or S
VVMDPYVKLVVKENEDFFLMSLSSLETPVXXAKP

SEQ ID NO: 71007 - protein, 33 aa, Artificial Sequence; identical to SEQ ID NO: 23548
  Cyclic GFR-binding peptide
  MOD_RES (2)..(2): Xaa is C or S

SEQ ID NO: 71008 - protein, 32 aa, Artificial Sequence
  Cyclic GFR-binding peptide
  MOD_RES (28)..(28): Xaa is C or S
MNPYVKLIVNSSDDFFLVSLSSLKTPAXTPKT

SEQ ID NO: 71009 - protein, 32 aa, Artificial Sequence
  Cyclic GFR-binding peptide
  MOD_RES (2)..(2): Xaa is C or S
GXARVVMNPYVKLIVNSSDDFFLVSLSSLQTP

SEQ ID NO: 71010 - protein, 30 aa, Artificial Sequence
  Cyclic GFR-binding peptide
  MOD_RES (30)..(30): Xaa is C or S
VVMDPYVKLVVKENEDFFLMSLSSLETPVX

SEQ ID NO: 71011 - protein, 40 aa, Artificial Sequence; identical to SEQ ID NO: 23551
  Cyclic GFR-binding peptide
  MOD_RES (2)..(4)..(38): Xaa is C or S

SEQ ID NO: 71012 - protein, 42 aa, Artificial Sequence; identical to SEQ ID NO: 23552
  Cyclic GFR-binding peptide
  MOD_RES (2)..(4)..(36)..(37): Xaa is C or S

SEQ ID NO: 71013 - protein, 32 aa, Artificial Sequence
  Cyclic GFR-binding peptide
  MOD_RES (2)..(4): Xaa is C or S
RXGXEAVSMGEPYVKLTPVGMDDFFLVSLSSL

SEQ ID NO: 71014 - protein, 26 aa, Artificial Sequence
  Cyclic GFR-binding peptide
VVMNPYVKLIVNSSDDFFLVSLSSLQ

SEQ ID NO: 71015 - protein, 28 aa, Artificial Sequence
  Cyclic GFR-binding peptide
SKVVMPYVKLVKPTRGVFFLISLSSLDQ

SEQ ID NO: 71016 - protein, 39 aa, Artificial Sequence; identical to SEQ ID NO: 23554
  Cyclic GFR-binding peptide
  MOD_RES (2)..(4)..(36)..(37): Xaa is C or S

SEQ ID NO: 71017 - protein, 31 aa, Artificial Sequence
  Cyclic GFR-binding peptide
EELRPYVKLLKPKKRVYEFFLVSLSSHHVRS

SEQ ID NO: 71018 - protein, 28 aa, Artificial Sequence
  Cyclic GFR-binding peptide
VVMPYVKLVKPTRGVFFLISLSSLDQPV

SEQ ID NO: 71019 - protein, 24 aa, Artificial Sequence
  Cyclic GFR-binding peptide
MEPYVKLVVKDYEDFFLMSLSSLE

SEQ ID NO: 71020 - protein, 26 aa, Artificial Sequence
  Cyclic GFR-binding peptide
EEVIMPYVKLLLVRGNDFFLMSLSST

SEQ ID NO: 71021 - protein, 29 aa, Artificial Sequence
  Cyclic GFR-binding peptide
  MOD_RES (29)..(29): Xaa is C or S
VVMPYVKLVKPTRGVFFLISLSSLDQPVX

SEQ ID NO: 71022 - protein, 35 aa, Artificial Sequence
  Cyclic GFR-binding peptide
  MOD_RES (30)..(31): Xaa is C or S
SMGEPYVKLTPVGMDDFFLVSLSSLKTPVXXAKGV

SEQ ID NO: 71023 - protein, 32 aa, Artificial Sequence
  Cyclic GFR-binding peptide
  MOD_RES (1)..(3): Xaa is C or S
XGXSRVVMNPYVKLIVNSSDDFFLVSLSSLKT

SEQ ID NO: 71024 - protein, 33 aa, Artificial Sequence
  Cyclic GFR-binding peptide
  MOD_RES (29)..(30): Xaa is C or S
VMGPYVKLIIQQKDNFFLMSLSSMKTPTXXPGA

SEQ ID NO: 71025 - protein, 25 aa, Artificial Sequence
  Cyclic GFR-binding peptide
PYVKLIVNNSSDFFLVSLSSLKTPA

SEQ ID NO: 71026 - protein, 20 aa, Artificial Sequence
  Cyclic GFR-binding peptide
PYVKLIVNNSSDFFLVSLSS

SEQ ID NO: 71027 - protein, 40 aa, Artificial Sequence; identical to SEQ ID NO: 23560
  Cyclic GFR-binding peptide
  MOD_RES (1)..(3)..(34)..(35): Xaa is C or S

SEQ ID NO: 71028 - protein, 29 aa, Artificial Sequence
  Cyclic GFR-binding peptide
  MOD_RES (26)..(27): Xaa is C or S
PYVKLVVNNAADFFLISLSSLRAPVXXSA

SEQ ID NO: 71029 - protein, 33 aa, Artificial Sequence
  Cyclic GFR-binding peptide
  MOD_RES (2)..(4): Xaa is C or S
RXGXEAVSMGEPYVKLTPVGMDDFFLVSLSSLK

SEQ ID NO: 71030 - protein, 36 aa, Artificial Sequence
  Cyclic GFR-binding peptide
  MOD_RES (30)..(31): Xaa is C or S
EVIMPYVKLLLVRGNDFFLMSLSSTKVPAXXTSPVR

SEQ ID NO: 71031 - protein, 33 aa, Artificial Sequence; identical to SEQ ID NO: 23561
  Cyclic GFR-binding peptide
  MOD_RES (1)..(3): Xaa is C or S

SEQ ID NO: 71032 - protein, 33 aa, Artificial Sequence
  Cyclic GFR-binding peptide
  MOD_RES (1)..(3): Xaa is C or S
XGXSRVVMNPYVKLIVNSSDDFFLVSLSSLKTP

SEQ ID NO: 71033 - protein, 28 aa, Artificial Sequence
  Cyclic GFR-binding peptide
VVMNPYVKLIVNSSDDFFLVSLSSLKTP

SEQ ID NO: 71034 - protein, 25 aa, Artificial Sequence
  Cyclic GFR-binding peptide
LFPYVKLHQGQHPKIRFFLMSLSSE

SEQ ID NO: 71035 - protein, 28 aa, Artificial Sequence
  Cyclic GFR-binding peptide
  MOD_RES (1)..(1): Xaa is C or S
XEAVSMGEPYVKLTPVGMDDFFLVSLSS

SEQ ID NO: 71036 - protein, 25 aa, Artificial Sequence
  Cyclic GFR-binding peptide
MDPYVKLVVNNASDFFLISLSSLRT

SEQ ID NO: 71037 - protein, 35 aa, Artificial Sequence
  Cyclic GFR-binding peptide
  MOD_RES (29)..(30): Xaa is C or S
VMDPYVKLVVKENEDFFLMSLSSLETPVXXAKPIK

SEQ ID NO: 71038 - protein, 35 aa, Artificial Sequence; identical to SEQ ID NO: 23562
  Cyclic GFR-binding peptide
  MOD_RES (2)..(4): Xaa is C or S

SEQ ID NO: 71039 - protein, 34 aa, Artificial Sequence; identical to SEQ ID NO: 23563
  Cyclic GFR-binding peptide
  MOD_RES (32)..(33): Xaa is C or S

SEQ ID NO: 71040 - protein, 31 aa, Artificial Sequence
  Cyclic GFR-binding peptide
  MOD_RES (27)..(28): Xaa is C or S
GPYVKLIIQQKDNFFLMSLSSMKTPTXXPGA

SEQ ID NO: 71041 - protein, 39 aa, Artificial Sequence; identical to SEQ ID NO: 23564
  Cyclic GFR-binding peptide
  MOD_RES (2)..(34)..(35): Xaa is C or S

SEQ ID NO: 71042 - protein, 33 aa, Artificial Sequence; identical to SEQ ID NO: 23565
  Cyclic GFR-binding peptide
  MOD_RES (2)..(2): Xaa is C or S

SEQ ID NO: 71043 - protein, 29 aa, Artificial Sequence
  Cyclic GFR-binding peptide
  MOD_RES (29)..(29): Xaa is C or S
VIMPYVKLLLVRGNDFFLMSLSSTKVPAX

SEQ ID NO: 71044 - protein, 34 aa, Artificial Sequence; identical to SEQ ID NO: 23566
  Cyclic GFR-binding peptide
  MOD_RES (31)..(32): Xaa is C or S

SEQ ID NO: 71045 - protein, 27 aa, Artificial Sequence
  Cyclic GFR-binding peptide
  MOD_RES (26)..(27): Xaa is C or S
PYVKLLLVRGNDFFLMSLSSTKVPAXX

SEQ ID NO: 71046 - protein, 34 aa, Artificial Sequence; identical to SEQ ID NO: 23567
  Cyclic GFR-binding peptide
  MOD_RES (1)..(3): Xaa is C or S

SEQ ID NO: 71047 - protein, 37 aa, Artificial Sequence; identical to SEQ ID NO: 23568
  Cyclic GFR-binding peptide
  MOD_RES (31)..(31): Xaa is C or S

SEQ ID NO: 71048 - protein, 27 aa, Artificial Sequence
  Cyclic GFR-binding peptide
VVMPYVKLVKPTRGVFFLISLSSLDQP

SEQ ID NO: 71049 - protein, 37 aa, Artificial Sequence; identical to SEQ ID NO: 23573
  Cyclic GFR-binding peptide
  MOD_RES (2)..(36): Xaa is C or S

SEQ ID NO: 71050 - protein, 35 aa, Artificial Sequence; identical to SEQ ID NO: 23572
  Cyclic GFR-binding peptide
  MOD_RES (2)..(33)..(34): Xaa is C or S

SEQ ID NO: 71051 - protein, 28 aa, Artificial Sequence
  Cyclic GFR-binding peptide
RVVMNPYVKLIVNSSDDFFLVSLSSLKT

SEQ ID NO: 71052 - protein, 39 aa, Artificial Sequence; identical to SEQ ID NO: 23574
  Cyclic GFR-binding peptide
  MOD_RES (1)..(3)..(34)..(35): Xaa is C or S

SEQ ID NO: 71053 - protein, 31 aa, Artificial Sequence
  Cyclic GFR-binding peptide
  MOD_RES (30)..(31): Xaa is C or S
KVVMPYVKLVKPTRGVFFLISLSSLDQPVXX

SEQ ID NO: 71054 - protein, 33 aa, Artificial Sequence
  Cyclic GFR-binding peptide
  MOD_RES (30)..(31): Xaa is C or S
KVIMPYVKLIKPTKGIFFLISLSSLDQSVXXPS

SEQ ID NO: 71055 - protein, 37 aa, Artificial Sequence; identical to SEQ ID NO: 23575
  Cyclic GFR-binding peptide
  MOD_RES (2)..(34)..(35): Xaa is C or S

SEQ ID NO: 71056 - protein, 36 aa, Artificial Sequence; identical to SEQ ID NO: 23576
  Cyclic GFR-binding peptide
  MOD_RES (1)..(3)..(36): Xaa is C or S

SEQ ID NO: 71057 - protein, 32 aa, Artificial Sequence
  Cyclic GFR-binding peptide
  MOD_RES (31)..(32): Xaa is C or S
EVVMDPYVKLVVKENEDFFLMSLSSLETPVXX

SEQ ID NO: 71058 - protein, 32 aa, Artificial Sequence
  Cyclic GFR-binding peptide
  MOD_RES (26)..(27): Xaa is C or S
PYVKLVKPKRGVFFLISLSSLAQPVXXPAASA

SEQ ID NO: 71059 - protein, 35 aa, Artificial Sequence; identical to SEQ ID NO: 23580
  Cyclic GFR-binding peptide
  MOD_RES (32)..(33): Xaa is C or S

SEQ ID NO: 71060 - protein, 28 aa, Artificial Sequence
  Cyclic GFR-binding peptide
FPYVKLHQGQHPKIRFFLMSLSSEETPV

SEQ ID NO: 71061 - protein, 23 aa, Artificial Sequence
  Cyclic GFR-binding peptide
PYVKLIVNSSDDFFLVSLSSLQT

SEQ ID NO: 71062 - protein, 26 aa, Artificial Sequence
  Cyclic GFR-binding peptide
VVMDPYVKLVVNNASDFFLISLSSLR

SEQ ID NO: 71063 - protein, 28 aa, Artificial Sequence
  Cyclic GFR-binding peptide
  MOD_RES (26)..(27): Xaa is C or S
PYVKLVVNNASDFFLISLSSLRTPVXXT

SEQ ID NO: 71064 - protein, 38 aa, Artificial Sequence; identical to SEQ ID NO: 23583
  Cyclic GFR-binding peptide
  MOD_RES (32)..(33): Xaa is C or S

SEQ ID NO: 71065 - protein, 31 aa, Artificial Sequence
  Cyclic GFR-binding peptide
  MOD_RES (30)..(31): Xaa is C or S
VVMNPYVKLIVNSSDDFFLVSLSSLKTPAXX

SEQ ID NO: 71066 - protein, 32 aa, Artificial Sequence
  Cyclic GFR-binding peptide
  MOD_RES (32)..(32): Xaa is C or S
LRPYVKLLKPKKRVYEFFLVSLSSHHVRSPQX

SEQ ID NO: 71067 - protein, 33 aa, Artificial Sequence
  Cyclic GFR-binding peptide
  MOD_RES (2)..(4): Xaa is C or S
RXGXGEVVMEPYVKLVVKDYEDFFLMSLSSLET

SEQ ID NO: 71068 - protein, 27 aa, Artificial Sequence
  Cyclic GFR-binding peptide
MDPYVKLVVNNASDFFLISLSSLRTPV

SEQ ID NO: 71069 - protein, 33 aa, Artificial Sequence; identical to SEQ ID NO: 23584
  Cyclic GFR-binding peptide
  MOD_RES (1)..(33): Xaa is C or S

SEQ ID NO: 71070 - protein, 29 aa, Artificial Sequence
  Cyclic GFR-binding peptide
VVMDPYVKLVVKENEDFFLMSLSSLETPV

SEQ ID NO: 71071 - protein, 34 aa, Artificial Sequence; identical to SEQ ID NO: 23585
  Cyclic GFR-binding peptide
  MOD_RES (1)..(34): Xaa is C or S

SEQ ID NO: 71072 - protein, 34 aa, Artificial Sequence
  Cyclic GFR-binding peptide
  MOD_RES (1)..(33)..(34): Xaa is C or S
XGEVVMDPYVKLVVKENEDFFLMSLSSLETPVXX

SEQ ID NO: 71073 - protein, 34 aa, Artificial Sequence
  Cyclic GFR-binding peptide
  MOD_RES (2)..(4): Xaa is C or S
HXGXSRVVMNPYVKLIVNSSDDFFLVSLSSLKTP

SEQ ID NO: 71074 - protein, 38 aa, Artificial Sequence; identical to SEQ ID NO: 23586
  Cyclic GFR-binding peptide
  MOD_RES (2)..(35)..(36): Xaa is C or S

SEQ ID NO: 71075 - protein, 26 aa, Artificial Sequence
  Cyclic GFR-binding peptide
VMEPYVKLVVKDYEDFFLMSLSSLET

SEQ ID NO: 71076 - protein, 30 aa, Artificial Sequence
  Cyclic GFR-binding peptide
  MOD_RES (2)..(4): Xaa is C or S
HXGXAKVVMNPYVKLIVNNSSDFFLVSLSS

SEQ ID NO: 71077 - protein, 28 aa, Artificial Sequence
  Cyclic GFR-binding peptide
  MOD_RES (28)..(28): Xaa is C or S
MDPYVKLVVNNAADFFLISLSSLRAPVX

SEQ ID NO: 71078 - protein, 34 aa, Artificial Sequence
  Cyclic GFR-binding peptide
  MOD_RES (32)..(33): Xaa is C or S
GEVVMDPYVKLVVKENEDFFLMSLSSLETPVXXA

SEQ ID NO: 71079 - protein, 36 aa, Artificial Sequence; identical to SEQ ID NO: 23587
  Cyclic GFR-binding peptide
  MOD_RES (31)..(32): Xaa is C or S

SEQ ID NO: 71080 - protein, 26 aa, Artificial Sequence
  Cyclic GFR-binding peptide
MPYVKLLLVRGNDFFLMSLSSTKVPA

SEQ ID NO: 71081 - protein, 30 aa, Artificial Sequence
  Cyclic GFR-binding peptide
  MOD_RES (30)..(30): Xaa is C or S
VVMNPYVKLIVNSSDDFFLVSLSSLQTPAX

SEQ ID NO: 71082 - protein, 40 aa, Artificial Sequence; identical to SEQ ID NO: 23588
  Cyclic GFR-binding peptide
  MOD_RES (34)..(34): Xaa is C or S

SEQ ID NO: 71083 - protein, 22 aa, Artificial Sequence
  Cyclic GFR-binding peptide
PYVKLHQGQHPKIRFFLMSLSS

SEQ ID NO: 71084 - protein, 23 aa, Artificial Sequence
  Cyclic GFR-binding peptide
VIMPYVKLLLVRGNDFFLMSLSS

SEQ ID NO: 71085 - protein, 34 aa, Artificial Sequence
  Cyclic GFR-binding peptide
  MOD_RES (31)..(32): Xaa is C or S
EVVMDPYVKLVVKENEDFFLMSLSSLETPVXXAK

SEQ ID NO: 71086 - protein, 35 aa, Artificial Sequence; identical to SEQ ID NO: 23590
  Cyclic GFR-binding peptide
  MOD_RES (2)..(34)..(35): Xaa is C or S

SEQ ID NO: 71087 - protein, 33 aa, Artificial Sequence; identical to SEQ ID NO: 23591
  Cyclic GFR-binding peptide
  MOD_RES (2)..(2): Xaa is C or S

SEQ ID NO: 71088 - protein, 42 aa, Artificial Sequence; identical to SEQ ID NO: 23592
  Cyclic GFR-binding peptide
  MOD_RES (1)..(3)..(40): Xaa is C or S

SEQ ID NO: 71089 - protein, 26 aa, Artificial Sequence
  Cyclic GFR-binding peptide
VMDPYVKLVVNNASDFFLISLSSLRT

SEQ ID NO: 71090 - protein, 31 aa, Artificial Sequence
  Cyclic GFR-binding peptide
  MOD_RES (29)..(29): Xaa is C or S
FPYVKLHQGQHPKIRFFLMSLSSEETPVXEL

SEQ ID NO: 71091 - protein, 34 aa, Artificial Sequence; identical to SEQ ID NO: 23595
  Cyclic GFR-binding peptide
  MOD_RES (1)..(3)..(34): Xaa is C or S

SEQ ID NO: 71092 - protein, 32 aa, Artificial Sequence
  Cyclic GFR-binding peptide
  MOD_RES (28)..(29): Xaa is C or S
MDPYVKLVVKENEDFFLMSLSSLETPVXXAKP

SEQ ID NO: 71093 - protein, 36 aa, Artificial Sequence
  Cyclic GFR-binding peptide
  MOD_RES (30)..(31): Xaa is C or S
VVMGPYVKLIIQQKDNFFLMSLSSMKTPTXXPGASG

SEQ ID NO: 71094 - protein, 35 aa, Artificial Sequence
  Cyclic GFR-binding peptide
  MOD_RES (32)..(32): Xaa is C or S
HQLFPYVKLHQGQHPKIRFFLMSLSSEETPVXELG

SEQ ID NO: 71095 - protein, 37 aa, Artificial Sequence; identical to SEQ ID NO: 23597
  Cyclic GFR-binding peptide
  MOD_RES (32)..(33): Xaa is C or S

SEQ ID NO: 71096 - protein, 30 aa, Artificial Sequence
  Cyclic GFR-binding peptide
  MOD_RES (28)..(29): Xaa is C or S
IMPYVKLLLVRGNDFFLMSLSSTKVPAXXT

SEQ ID NO: 71097 - protein, 31 aa, Artificial Sequence
  Cyclic GFR-binding peptide
  MOD_RES (2)..(4): Xaa is C or S
RXGXGEVVMEPYVKLVVKDYEDFFLMSLSSL

SEQ ID NO: 71098 - protein, 35 aa, Artificial Sequence
  Cyclic GFR-binding peptide
  MOD_RES (2)..(4): Xaa is C or S
RXGXEAVSMGEPYVKLTPVGMDDFFLVSLSSLKTP

SEQ ID NO: 71099 - protein, 29 aa, Artificial Sequence
  Cyclic GFR-binding peptide
  MOD_RES (26)..(27): Xaa is C or S
PYVKLVKPTRGVFFLISLSSLDQPVXXPS

SEQ ID NO: 71100 - protein, 35 aa, Artificial Sequence
  Cyclic GFR-binding peptide
  MOD_RES (30)..(30): Xaa is C or S
VVMNPYVKLIVNSSDDFFLVSLSSLKTPAXTPKTV

SEQ ID NO: 71101 - protein, 29 aa, Artificial Sequence
  Cyclic GFR-binding peptide
  MOD_RES (1)..(3): Xaa is C or S
XGXRDVVMGPYVKLIIQQKDNFFLMSLSS

SEQ ID NO: 71102 - protein, 27 aa, Artificial Sequence
  Cyclic GFR-binding peptide
FPYVKLHQGQHPKIRFFLMSLSSEETP

SEQ ID NO: 71103 - protein, 37 aa, Artificial Sequence; identical to SEQ ID NO: 23605
  Cyclic GFR-binding peptide
  MOD_RES (31)..(32): Xaa is C or S

SEQ ID NO: 71104 - protein, 26 aa, Artificial Sequence
  Cyclic GFR-binding peptide
VIMPYVKLVKPKRGVFFLISLSSLAQ

SEQ ID NO: 71105 - protein, 34 aa, Artificial Sequence
  Cyclic GFR-binding peptide
  MOD_RES (28)..(29): Xaa is C or S
MDPYVKLVVNNASDFFLISLSSLRTPVXXTPPTS

SEQ ID NO: 71106 - protein, 33 aa, Artificial Sequence
  Cyclic GFR-binding peptide
  MOD_RES (1)..(33): Xaa is C or S
XGEVVMDPYVKLVVKENEDFFLMSLSSLETPVX

SEQ ID NO: 71107 - protein, 22 aa, Artificial Sequence
  Cyclic GFR-binding peptide
MDPYVKLVVNNAADFFLISLSS

SEQ ID NO: 71108 - protein, 25 aa, Artificial Sequence
  Cyclic GFR-binding peptide
DPYVKLVVNNASDFFLISLSSLRTP

SEQ ID NO: 71109 - protein, 40 aa, Artificial Sequence; identical to SEQ ID NO: 23607
  Cyclic GFR-binding peptide
  MOD_RES (1)..(3)..(34)..(35): Xaa is C or S

SEQ ID NO: 71110 - protein, 38 aa, Artificial Sequence; identical to SEQ ID NO: 23608
  Cyclic GFR-binding peptide
  MOD_RES (1)..(33)..(34): Xaa is C or S

SEQ ID NO: 71111 - protein, 34 aa, Artificial Sequence; identical to SEQ ID NO: 23610
  Cyclic GFR-binding peptide
  MOD_RES (1)..(33)..(34): Xaa is C or S

SEQ ID NO: 71112 - protein, 22 aa, Artificial Sequence
  Cyclic GFR-binding peptide
MNPYVKLIVNNSSDFFLVSLSS

SEQ ID NO: 71113 - protein, 34 aa, Artificial Sequence; identical to SEQ ID NO: 23611
  Cyclic GFR-binding peptide
  MOD_RES (2)..(33)..(34): Xaa is C or S

SEQ ID NO: 71114 - protein, 24 aa, Artificial Sequence
  Cyclic GFR-binding peptide
VIMPYVKLVKPKRGVFFLISLSSL

SEQ ID NO: 71115 - protein, 31 aa, Artificial Sequence
  Cyclic GFR-binding peptide
  MOD_RES (31)..(31): Xaa is C or S
RPYVKLLKPKKRVYEFFLVSLSSHHVRSPQX

SEQ ID NO: 71116 - protein, 35 aa, Artificial Sequence; identical to SEQ ID NO: 23613
  Cyclic GFR-binding peptide
  MOD_RES (1)..(1): Xaa is C or S

SEQ ID NO: 71117 - protein, 36 aa, Artificial Sequence; identical to SEQ ID NO: 23612
  Cyclic GFR-binding peptide
  MOD_RES (1)..(33)..(34): Xaa is C or S

SEQ ID NO: 71118 - protein, 27 aa, Artificial Sequence
  Cyclic GFR-binding peptide
VMNPYVKLIVNSSDDFFLVSLSSLKTP

SEQ ID NO: 71119 - protein, 31 aa, Artificial Sequence
  Cyclic GFR-binding peptide
  MOD_RES (27)..(28): Xaa is C or S
DPYVKLVVKENEDFFLMSLSSLETPVXXAKP

SEQ ID NO: 71120 - protein, 28 aa, Artificial Sequence
  Cyclic GFR-binding peptide
  MOD_RES (2)..(2): Xaa is C or S
KXSKVVMPYVKLVKPTRGVFFLISLSSL

SEQ ID NO: 71121 - protein, 23 aa, Artificial Sequence
  Cyclic GFR-binding peptide
PYVKLVVNNASDFFLISLSSLRT

SEQ ID NO: 71122 - protein, 36 aa, Artificial Sequence; identical to SEQ ID NO: 23615
  Cyclic GFR-binding peptide
  MOD_RES (31)..(32): Xaa is C or S

SEQ ID NO: 71123 - protein, 25 aa, Artificial Sequence
  Cyclic GFR-binding peptide
VMNPYVKLIVNSSDDFFLVSLSSLQ

SEQ ID NO: 71124 - protein, 36 aa, Artificial Sequence; identical to SEQ ID NO: 23616
  Cyclic GFR-binding peptide
  MOD_RES (1)..(35): Xaa is C or S

SEQ ID NO: 71125 - protein, 27 aa, Artificial Sequence
  Cyclic GFR-binding peptide
PYVKLHQGQHPKIRFFLMSLSSEETPV

SEQ ID NO: 71126 - protein, 29 aa, Artificial Sequence
  Cyclic GFR-binding peptide
  MOD_RES (1)..(1): Xaa is C or S
XAKVVMNPYVKLIVNNSSDFFLVSLSSLK

SEQ ID NO: 71127 - protein, 32 aa, Artificial Sequence
  Cyclic GFR-binding peptide
  MOD_RES (28)..(29): Xaa is C or S
IMPYVKLIKPTKGIFFLISLSSLDQSVXXPSA

SEQ ID NO: 71128 - protein, 35 aa, Artificial Sequence; identical to SEQ ID NO: 23619
  Cyclic GFR-binding peptide
  MOD_RES (1)..(3)..(34)..(35): Xaa is C or S

SEQ ID NO: 71129 - protein, 34 aa, Artificial Sequence; identical to SEQ ID NO: 23620
  Cyclic GFR-binding peptide

SEQ ID NO: 71130 - protein, 27 aa, Artificial Sequence
  Cyclic GFR-binding peptide
  MOD_RES (1)..(1): Xaa is C or S
XSRVVMNPYVKLIVNSSDDFFLVSLSS

SEQ ID NO: 71131 - protein, 38 aa, Artificial Sequence; identical to SEQ ID NO: 23621
  Cyclic GFR-binding peptide
  MOD_RES (1)..(3)..(35): Xaa is C or S

SEQ ID NO: 71132 - protein, 30 aa, Artificial Sequence; identical to SEQ ID NO: 23622
  Cyclic GFR-binding peptide

SEQ ID NO: 71133 - protein, 29 aa, Artificial Sequence
  Cyclic GFR-binding peptide
LRPYVKLLKPKKRVYEFFLVSLSSHHVRS

SEQ ID NO: 71134 - protein, 29 aa, Artificial Sequence
  Cyclic GFR-binding peptide
SRVIMPYVKLVKPKRGVFFLISLSSLAQP

SEQ ID NO: 71135 - protein, 37 aa, Artificial Sequence; identical to SEQ ID NO: 23625
  Cyclic GFR-binding peptide
  MOD_RES (2)..(4)..(36)..(37): Xaa is C or S

SEQ ID NO: 71136 - protein, 37 aa, Artificial Sequence; identical to SEQ ID NO: 23626
  Cyclic GFR-binding peptide
  MOD_RES (2)..(4)..(36)..(37): Xaa is C or S

SEQ ID NO: 71137 - protein, 40 aa, Artificial Sequence; identical to SEQ ID NO: 23627
  Cyclic GFR-binding peptide
  MOD_RES (2)..(4)..(36): Xaa is C or S

SEQ ID NO: 71138 - protein, 24 aa, Artificial Sequence
  Cyclic GFR-binding peptide
VVMNPYVKLIVNNSSDFFLVSLSS

SEQ ID NO: 71139 - protein, 29 aa, Artificial Sequence
  Cyclic GFR-binding peptide
VVMGPYVKLIIQQKDNFFLMSLSSMKTPT

SEQ ID NO: 71140 - protein, 31 aa, Artificial Sequence
  Cyclic GFR-binding peptide
  MOD_RES (2)..(4): Xaa is C or S
HXGXARVVMNPYVKLIVNSSDDFFLVSLSSL

SEQ ID NO: 71141 - protein, 28 aa, Artificial Sequence
  Cyclic GFR-binding peptide
QLFPYVKLHQGQHPKIRFFLMSLSSEET

SEQ ID NO: 71142 - protein, 25 aa, Artificial Sequence
  Cyclic GFR-binding peptide
VVMNPYVKLIVNSSDDFFLVSLSSL

SEQ ID NO: 71143 - protein, 28 aa, Artificial Sequence
  Cyclic GFR-binding peptide
RDVVMGPYVKLIIQQKDNFFLMSLSSMK

SEQ ID NO: 71144 - protein, 25 aa, Artificial Sequence
  Cyclic GFR-binding peptide
PYVKLTPVGMDDFFLVSLSSLKTPV

SEQ ID NO: 71145 - protein, 31 aa, Artificial Sequence
  Cyclic GFR-binding peptide
  MOD_RES (27)..(28): Xaa is C or S
NPYVKLIVNSSDDFFLVSLSSLQTPAXXPKP

SEQ ID NO: 71146 - protein, 31 aa, Artificial Sequence; identical to SEQ ID NO: 23632
  Cyclic GFR-binding peptide

SEQ ID NO: 71147 - protein, 31 aa, Artificial Sequence
  Cyclic GFR-binding peptide
  MOD_RES (26)..(27): Xaa is C or S
PYVKLVVNNASDFFLISLSSLRTPVXXTPPT

SEQ ID NO: 71148 - protein, 30 aa, Artificial Sequence
  Cyclic GFR-binding peptide
SEVVMDPYVKLVVNNASDFFLISLSSLRTP

SEQ ID NO: 71149 - protein, 36 aa, Artificial Sequence; identical to SEQ ID NO: 23636
  Cyclic GFR-binding peptide
  MOD_RES (1)..(3)..(35)..(36): Xaa is C or S

SEQ ID NO: 71150 - protein, 37 aa, Artificial Sequence; identical to SEQ ID NO: 23637
  Cyclic GFR-binding peptide
  MOD_RES (1)..(3)..(35)..(36): Xaa is C or S

SEQ ID NO: 71151 - protein, 36 aa, Artificial Sequence; identical to SEQ ID NO: 23639
  Cyclic GFR-binding peptide
  MOD_RES (1)..(33)..(34): Xaa is C or S

SEQ ID NO: 71152 - protein, 42 aa, Artificial Sequence; identical to SEQ ID NO: 23640
  Cyclic GFR-binding peptide
  MOD_RES (2)..(4)..(36)..(37): Xaa is C or S

SEQ ID NO: 71153 - protein, 38 aa, Artificial Sequence; identical to SEQ ID NO: 23642
  Cyclic GFR-binding peptide
  MOD_RES (1)..(34)..(35): Xaa is C or S

SEQ ID NO: 71154 - protein, 24 aa, Artificial Sequence
  Cyclic GFR-binding peptide
VIMPYVKLIKPTKGIFFLISLSSL

SEQ ID NO: 71155 - protein, 35 aa, Artificial Sequence
  Cyclic GFR-binding peptide
  MOD_RES (1)..(3): Xaa is C or S
XAXELHEELRPYVKLLKPKKRVYEFFLVSLSSHHV

SEQ ID NO: 71156 - protein, 23 aa, Artificial Sequence
  Cyclic GFR-binding peptide
VVMPYVKLVKPTRGVFFLISLSS

SEQ ID NO: 71157 - protein, 23 aa, Artificial Sequence
  Cyclic GFR-binding peptide
PYVKLVVKENEDFFLMSLSSLET

SEQ ID NO: 71158 - protein, 34 aa, Artificial Sequence; identical to SEQ ID NO: 23643
  Cyclic GFR-binding peptide
  MOD_RES (2)..(34): Xaa is C or S

SEQ ID NO: 71159 - protein, 30 aa, Artificial Sequence
  Cyclic GFR-binding peptide
  MOD_RES (2)..(2): Xaa is C or S
GXAKVVMNPYVKLIVNNSSDFFLVSLSSLK

SEQ ID NO: 71160 - protein, 33 aa, Artificial Sequence; identical to SEQ ID NO: 23644
  Cyclic GFR-binding peptide

SEQ ID NO: 71161 - protein, 24 aa, Artificial Sequence
  Cyclic GFR-binding peptide
RVIMPYVKLVKPKRGVFFLISLSS

SEQ ID NO: 71162 - protein, 30 aa, Artificial Sequence
  Cyclic GFR-binding peptide
  MOD_RES (30)..(30): Xaa is C or S
VVMDPYVKLVVNNAADFFLISLSSLRAPVX

SEQ ID NO: 71163 - protein, 29 aa, Artificial Sequence
  Cyclic GFR-binding peptide
  MOD_RES (1)..(1): Xaa is C or S
XSEVVMDPYVKLVVNNASDFFLISLSSLR

SEQ ID NO: 71164 - protein, 30 aa, Artificial Sequence
  Cyclic GFR-binding peptide
  MOD_RES (27)..(28): Xaa is C or S
MPYVKLVKPKRGVFFLISLSSLAQPVXXPA

SEQ ID NO: 71165 - protein, 30 aa, Artificial Sequence
  Cyclic GFR-binding peptide
  MOD_RES (29)..(30): Xaa is C or S
VMNPYVKLIVNSSDDFFLVSLSSLKTPAXX

SEQ ID NO: 71166 - protein, 36 aa, Artificial Sequence
  Cyclic GFR-binding peptide
  MOD_RES (30)..(31): Xaa is C or S
VVMNPYVKLIVNSSDDFFLVSLSSLKTPAXXPKPVY

SEQ ID NO: 71167 - protein, 28 aa, Artificial Sequence
  Cyclic GFR-binding peptide
VIMPYVKLLLVRGNDFFLMSLSSTKVPA

SEQ ID NO: 71168 - protein, 29 aa, Artificial Sequence
  Cyclic GFR-binding peptide
  MOD_RES (2)..(2): Xaa is C or S
GXARVVMNPYVKLIVNSSDDFFLVSLSSL

SEQ ID NO: 71169 - protein, 30 aa, Artificial Sequence
  Cyclic GFR-binding peptide
  MOD_RES (29)..(30): Xaa is C or S
VMNPYVKLIVNNSSDFFLVSLSSLKTPAXX

SEQ ID NO: 71170 - protein, 29 aa, Artificial Sequence
  Cyclic GFR-binding peptide
VVMEPYVKLVVKDYEDFFLMSLSSLETPV

SEQ ID NO: 71171 - protein, 23 aa, Artificial Sequence
  Cyclic GFR-binding peptide
VMEPYVKLVVKDYEDFFLMSLSS

SEQ ID NO: 71172 - protein, 27 aa, Artificial Sequence
  Cyclic GFR-binding peptide
SRVVMNPYVKLIVNSSDDFFLVSLSSL

SEQ ID NO: 71173 - protein, 29 aa, Artificial Sequence
  Cyclic GFR-binding peptide
AEVVMDPYVKLVVNNAADFFLISLSSLRA

SEQ ID NO: 71174 - protein, 33 aa, Artificial Sequence
  Cyclic GFR-binding peptide
  MOD_RES (27)..(28): Xaa is C or S
MPYVKLLLVRGNDFFLMSLSSTKVPAXXTSPVR

SEQ ID NO: 71175 - protein, 35 aa, Artificial Sequence; identical to SEQ ID NO: 23648
  Cyclic GFR-binding peptide
  MOD_RES (1)..(3)..(35): Xaa is C or S

SEQ ID NO: 71176 - protein, 35 aa, Artificial Sequence
  Cyclic GFR-binding peptide
  MOD_RES (29)..(30): Xaa is C or S
VVMPYVKLVKPTRGVFFLISLSSLDQPVXXPSASA

SEQ ID NO: 71177 - protein, 40 aa, Artificial Sequence; identical to SEQ ID NO: 23649
  Cyclic GFR-binding peptide
  MOD_RES (2)..(34)..(35): Xaa is C or S

SEQ ID NO: 71178 - protein, 28 aa, Artificial Sequence
  Cyclic GFR-binding peptide
  MOD_RES (27)..(28): Xaa is C or S
MPYVKLIKPTKGIFFLISLSSLDQSVXX

SEQ ID NO: 71179 - protein, 34 aa, Artificial Sequence; identical to SEQ ID NO: 23650
  Cyclic GFR-binding peptide
  MOD_RES (2)..(33)..(34): Xaa is C or S

SEQ ID NO: 71180 - protein, 27 aa, Artificial Sequence
  Cyclic GFR-binding peptide
MNPYVKLIVNSSDDFFLVSLSSLQTPA

SEQ ID NO: 71181 - protein, 33 aa, Artificial Sequence; identical to SEQ ID NO: 23651
  Cyclic GFR-binding peptide
  MOD_RES (32)..(32): Xaa is C or S

SEQ ID NO: 71182 - protein, 32 aa, Artificial Sequence
  Cyclic GFR-binding peptide
  MOD_RES (31)..(31): Xaa is C or S
RPYVKLLKPKKRVYEFFLVSLSSHHVRSPQXK

SEQ ID NO: 71183 - protein, 32 aa, Artificial Sequence
  Cyclic GFR-binding peptide
  MOD_RES (28)..(28): Xaa is C or S
PYVKLHQGQHPKIRFFLMSLSSEETPVXELGE

SEQ ID NO: 71184 - protein, 31 aa, Artificial Sequence
  Cyclic GFR-binding peptide
  MOD_RES (30)..(31): Xaa is C or S
VAMGPYVKLYTVVGKDFFLISLSSLKTPVXX

SEQ ID NO: 71185 - protein, 27 aa, Artificial Sequence
  Cyclic GFR-binding peptide
ARVVMNPYVKLIVNSSDDFFLVSLSSL

SEQ ID NO: 71186 - protein, 27 aa, Artificial Sequence
  Cyclic GFR-binding peptide
VVMDPYVKLVVKENEDFFLMSLSSLET

SEQ ID NO: 71187 - protein, 33 aa, Artificial Sequence; identical to SEQ ID NO: 23654
  Cyclic GFR-binding peptide
  MOD_RES (31)..(32): Xaa is C or S

SEQ ID NO: 71188 - protein, 24 aa, Artificial Sequence
  Cyclic GFR-binding peptide
VVMDPYVKLVVNNASDFFLISLSS

SEQ ID NO: 71189 - protein, 28 aa, Artificial Sequence
  Cyclic GFR-binding peptide
  MOD_RES (26)..(27): Xaa is C or S
PYVKLIVNNSSDFFLVSLSSLKTPAXXA

SEQ ID NO: 71190 - protein, 24 aa, Artificial Sequence
  Cyclic GFR-binding peptide
LRPYVKLLKPKKRVYEFFLVSLSS

SEQ ID NO: 71191 - protein, 39 aa, Artificial Sequence; identical to SEQ ID NO: 23655
  Cyclic GFR-binding peptide
  MOD_RES (1)..(33)..(34): Xaa is C or S

SEQ ID NO: 71192 - protein, 31 aa, Artificial Sequence
  Cyclic GFR-binding peptide
  MOD_RES (1)..(1): Xaa is C or S
XAKVVMNPYVKLIVNNSSDFFLVSLSSLKTP

SEQ ID NO: 71193 - protein, 31 aa, Artificial Sequence
  Cyclic GFR-binding peptide
  MOD_RES (1)..(3): Xaa is C or S
XKXSKVIMPYVKLIKPTKGIFFLISLSSLDQ

SEQ ID NO: 71194 - protein, 27 aa, Artificial Sequence
  Cyclic GFR-binding peptide
VVMNPYVKLIVNSSDDFFLVSLSSLKT

SEQ ID NO: 71195 - protein, 37 aa, Artificial Sequence; identical to SEQ ID NO: 23658
  Cyclic GFR-binding peptide
  MOD_RES (2)..(33)..(34): Xaa is C or S

SEQ ID NO: 71196 - protein, 36 aa, Artificial Sequence; identical to SEQ ID NO: 23660
  Cyclic GFR-binding peptide
  MOD_RES (33)..(34): Xaa is C or S

SEQ ID NO: 71197 - protein, 33 aa, Artificial Sequence
  Cyclic GFR-binding peptide
  MOD_RES (29)..(30): Xaa is C or S
VIMPYVKLIKPTKGIFFLISLSSLDQSVXXPSA

SEQ ID NO: 71198 - protein, 31 aa, Artificial Sequence
  Cyclic GFR-binding peptide
  MOD_RES (2)..(2): Xaa is C or S
KXSKVIMPYVKLIKPTKGIFFLISLSSLDQS

SEQ ID NO: 71199 - protein, 28 aa, Artificial Sequence
  Cyclic GFR-binding peptide
NHQLFPYVKLHQGQHPKIRFFLMSLSSE

SEQ ID NO: 71200 - protein, 26 aa, Artificial Sequence
  Cyclic GFR-binding peptide
VVMNPYVKLIVNSSDDFFLVSLSSLK

SEQ ID NO: 71201 - protein, 36 aa, Artificial Sequence; identical to SEQ ID NO: 23661
  Cyclic GFR-binding peptide
  MOD_RES (2)..(34)..(35): Xaa is C or S

SEQ ID NO: 71202 - protein, 31 aa, Artificial Sequence
  Cyclic GFR-binding peptide
  MOD_RES (27)..(28): Xaa is C or S
EPYVKLTPVGMDDFFLVSLSSLKTPVXXAKG

SEQ ID NO: 71203 - protein, 39 aa, Artificial Sequence; identical to SEQ ID NO: 23662
  Cyclic GFR-binding peptide
  MOD_RES (1)..(3)..(35)..(36): Xaa is C or S

SEQ ID NO: 71204 - protein, 39 aa, Artificial Sequence; identical to SEQ ID NO: 23664
  Cyclic GFR-binding peptide
  MOD_RES (2)..(4): Xaa is C or S

SEQ ID NO: 71205 - protein, 29 aa, Artificial Sequence
  Cyclic GFR-binding peptide
  MOD_RES (1)..(3): Xaa is C or S
XGXGEVVMEPYVKLVVKDYEDFFLMSLSS

SEQ ID NO: 71206 - protein, 22 aa, Artificial Sequence
  Cyclic GFR-binding peptide
MPYVKLLLVRGNDFFLMSLSST

SEQ ID NO: 71207 - protein, 32 aa, Artificial Sequence; identical to SEQ ID NO: 23666
  Cyclic GFR-binding peptide
  MOD_RES (31)..(32): Xaa is C or S

SEQ ID NO: 71208 - protein, 33 aa, Artificial Sequence
  Cyclic GFR-binding peptide
  MOD_RES (31)..(32): Xaa is C or S
EVVMDPYVKLVVKENEDFFLMSLSSLETPVXXA

SEQ ID NO: 71209 - protein, 29 aa, Artificial Sequence
  Cyclic GFR-binding peptide
  MOD_RES (28)..(29): Xaa is C or S
IMPYVKLLLVRGNDFFLMSLSSTKVPAXX

SEQ ID NO: 71210 - protein, 22 aa, Artificial Sequence
  Cyclic GFR-binding peptide
IMPYVKLLLVRGNDFFLMSLSS

SEQ ID NO: 71211 - protein, 28 aa, Artificial Sequence
  Cyclic GFR-binding peptide
VMNPYVKLIVNNSSDFFLVSLSSLKTPA

SEQ ID NO: 71212 - protein, 30 aa, Artificial Sequence
  Cyclic GFR-binding peptide
  MOD_RES (26)..(27): Xaa is C or S
PYVKLIKPTKGIFFLISLSSLDQSVXXPSA

SEQ ID NO: 71213 - protein, 29 aa, Artificial Sequence
  Cyclic GFR-binding peptide
  MOD_RES (28)..(28): Xaa is C or S
PYVKLHQGQHPKIRFFLMSLSSEETPVXE

SEQ ID NO: 71214 - protein, 32 aa, Artificial Sequence
  Cyclic GFR-binding peptide
  MOD_RES (29)..(30): Xaa is C or S
VVMPYVKLVKPTRGVFFLISLSSLDQPVXXPS

SEQ ID NO: 71215 - protein, 29 aa, Artificial Sequence
  Cyclic GFR-binding peptide
KNHQLFPYVKLHQGQHPKIRFFLMSLSSE

SEQ ID NO: 71216 - protein, 31 aa, Artificial Sequence; identical to SEQ ID NO: 23667
  Cyclic GFR-binding peptide
  MOD_RES (31)..(31): Xaa is C or S

SEQ ID NO: 71217 - protein, 36 aa, Artificial Sequence; identical to SEQ ID NO: 23668
  Cyclic GFR-binding peptide

SEQ ID NO: 71218 - protein, 25 aa, Artificial Sequence
  Cyclic GFR-binding peptide
QLFPYVKLHQGQHPKIRFFLMSLSS

SEQ ID NO: 71219 - protein, 25 aa, Artificial Sequence
  Cyclic GFR-binding peptide
MPYVKLLLVRGNDFFLMSLSSTKVP

SEQ ID NO: 71220 - protein, 29 aa, Artificial Sequence
  Cyclic GFR-binding peptide
  MOD_RES (29)..(29): Xaa is C or S
VMDPYVKLVVNNASDFFLISLSSLRTPVX

SEQ ID NO: 71221 - protein, 40 aa, Artificial Sequence; identical to SEQ ID NO: 23673
  Cyclic GFR-binding peptide
  MOD_RES (2)..(34)..(35): Xaa is C or S

SEQ ID NO: 71222 - protein, 24 aa, Artificial Sequence
  Cyclic GFR-binding peptide
MPYVKLLLVRGNDFFLMSLSSTKV

SEQ ID NO: 71223 - protein, 28 aa, Artificial Sequence
  Cyclic GFR-binding peptide
  MOD_RES (26)..(27): Xaa is C or S
PYVKLYTVVGKDFFLISLSSLKTPVXXA

SEQ ID NO: 71224 - protein, 32 aa, Artificial Sequence; identical to SEQ ID NO: 23675
  Cyclic GFR-binding peptide
  MOD_RES (1)..(1): Xaa is C or S

SEQ ID NO: 71225 - protein, 31 aa, Artificial Sequence
  Cyclic GFR-binding peptide
  MOD_RES (1)..(3): Xaa is C or S
XGXESVAMGPYVKLYTVVGKDFFLISLSSLK

SEQ ID NO: 71226 - protein, 29 aa, Artificial Sequence
  Cyclic GFR-binding peptide
ARVVMNPYVKLIVNSSDDFFLVSLSSLQT

SEQ ID NO: 71227 - protein, 33 aa, Artificial Sequence
  Cyclic GFR-binding peptide
  MOD_RES (28)..(29): Xaa is C or S
IMPYVKLVKPKRGVFFLISLSSLAQPVXXPAAS

SEQ ID NO: 71228 - protein, 33 aa, Artificial Sequence
  Cyclic GFR-binding peptide
  MOD_RES (27)..(28): Xaa is C or S
GPYVKLYTVVGKDFFLISLSSLKTPVXXAKSAK

SEQ ID NO: 71229 - protein, 26 aa, Artificial Sequence
  Cyclic GFR-binding peptide
AKVVMNPYVKLIVNNSSDFFLVSLSS

SEQ ID NO: 71230 - protein, 33 aa, Artificial Sequence; identical to SEQ ID NO: 23676
  Cyclic GFR-binding peptide
  MOD_RES (32)..(33): Xaa is C or S

SEQ ID NO: 71231 - protein, 23 aa, Artificial Sequence
  Cyclic GFR-binding peptide
IMPYVKLLLVRGNDFFLMSLSST

SEQ ID NO: 71232 - protein, 29 aa, Artificial Sequence
  Cyclic GFR-binding peptide
  MOD_RES (29)..(29): Xaa is C or S
VIMPYVKLVKPKRGVFFLISLSSLAQPVX

SEQ ID NO: 71233 - protein, 36 aa, Artificial Sequence; identical to SEQ ID NO: 23679
  Cyclic GFR-binding peptide
  MOD_RES (32)..(32): Xaa is C or S

SEQ ID NO: 71234 - protein, 34 aa, Artificial Sequence; identical to SEQ ID NO: 23680
  Cyclic GFR-binding peptide
  MOD_RES (33)..(33): Xaa is C or S

SEQ ID NO: 71235 - protein, 23 aa, Artificial Sequence
  Cyclic GFR-binding peptide
VMDPYVKLVVNNAADFFLISLSS

SEQ ID NO: 71236 - protein, 32 aa, Artificial Sequence; identical to SEQ ID NO: 23682
  Cyclic GFR-binding peptide
  MOD_RES (31)..(32): Xaa is C or S

SEQ ID NO: 71237 - protein, 27 aa, Artificial Sequence
  Cyclic GFR-binding peptide
  MOD_RES (27)..(27): Xaa is C or S
EPYVKLTPVGMDDFFLVSLSSLKTPVX

SEQ ID NO: 71238 - protein, 24 aa, Artificial Sequence
  Cyclic GFR-binding peptide
MNPYVKLIVNSSDDFFLVSLSSLK

SEQ ID NO: 71239 - protein, 35 aa, Artificial Sequence
  Cyclic GFR-binding peptide
  MOD_RES (29)..(30): Xaa is C or S
MGEPYVKLTPVGMDDFFLVSLSSLKTPVXXAKGVK

SEQ ID NO: 71240 - protein, 24 aa, Artificial Sequence
  Cyclic GFR-binding peptide
VVMGPYVKLIIQQKDNFFLMSLSS

SEQ ID NO: 71241 - protein, 22 aa, Artificial Sequence
  Cyclic GFR-binding peptide
PYVKLLKPKKRVYEFFLVSLSS

SEQ ID NO: 71242 - protein, 20 aa, Artificial Sequence
  Cyclic GFR-binding peptide
PYVKLLLVRGNDFFLMSLSS

SEQ ID NO: 71243 - protein, 24 aa, Artificial Sequence
  Cyclic GFR-binding peptide
IMPYVKLVKPKRGVFFLISLSSLA

SEQ ID NO: 71244 - protein, 27 aa, Artificial Sequence
  Cyclic GFR-binding peptide
  MOD_RES (27)..(27): Xaa is C or S
NPYVKLIVNSSDDFFLVSLSSLQTPAX

SEQ ID NO: 71245 - protein, 37 aa, Artificial Sequence; identical to SEQ ID NO: 23686
  Cyclic GFR-binding peptide
  MOD_RES (1)..(33)..(34): Xaa is C or S

SEQ ID NO: 71246 - protein, 35 aa, Artificial Sequence
  Cyclic GFR-binding peptide
  MOD_RES (29)..(29): Xaa is C or S
VMNPYVKLIVNSSDDFFLVSLSSLKTPAXTPKTVH

SEQ ID NO: 71247 - protein, 31 aa, Artificial Sequence
  Cyclic GFR-binding peptide
  MOD_RES (1)..(1): Xaa is C or S
XKNHQLFPYVKLHQGQHPKIRFFLMSLSSEE

SEQ ID NO: 71248 - protein, 42 aa, Artificial Sequence; identical to SEQ ID NO: 23688
  Cyclic GFR-binding peptide
  MOD_RES (2)..(4)..(36)..(37): Xaa is C or S

SEQ ID NO: 71249 - protein, 30 aa, Artificial Sequence
  Cyclic GFR-binding peptide
  MOD_RES (1)..(3): Xaa is C or S
XGXEAVSMGEPYVKLTPVGMDDFFLVSLSS

SEQ ID NO: 71250 - protein, 21 aa, Artificial Sequence
  Cyclic GFR-binding peptide
PYVKLTPVGMDDFFLVSLSSL

SEQ ID NO: 71251 - protein, 35 aa, Artificial Sequence
  Cyclic GFR-binding peptide
  MOD_RES (30)..(31): Xaa is C or S
VAMGPYVKLYTVVGKDFFLISLSSLKTPVXXAKSA

SEQ ID NO: 71252 - protein, 36 aa, Artificial Sequence
  Cyclic GFR-binding peptide
  MOD_RES (30)..(31): Xaa is C or S
VAMGPYVKLYTVVGKDFFLISLSSLKTPVXXAKSAK

SEQ ID NO: 71253 - protein, 34 aa, Artificial Sequence; identical to SEQ ID NO: 23693
  Cyclic GFR-binding peptide
  MOD_RES (1)..(32)..(33): Xaa is C or S

SEQ ID NO: 71254 - protein, 23 aa, Artificial Sequence
  Cyclic GFR-binding peptide
NPYVKLIVNNSSDFFLVSLSSLK

SEQ ID NO: 71255 - protein, 34 aa, Artificial Sequence; identical to SEQ ID NO: 23694
  Cyclic GFR-binding peptide
  MOD_RES (1)..(3)..(34): Xaa is C or S

SEQ ID NO: 71256 - protein, 26 aa, Artificial Sequence
  Cyclic GFR-binding peptide
KVIMPYVKLIKPTKGIFFLISLSSLD

SEQ ID NO: 71257 - protein, 35 aa, Artificial Sequence; identical to SEQ ID NO: 23696
  Cyclic GFR-binding peptide
  MOD_RES (31)..(32): Xaa is C or S

SEQ ID NO: 71258 - protein, 31 aa, Artificial Sequence
  Cyclic GFR-binding peptide
  MOD_RES (26)..(27): Xaa is C or S
PYVKLYTVVGKDFFLISLSSLKTPVXXAKSA

SEQ ID NO: 71259 - protein, 28 aa, Artificial Sequence
  Cyclic GFR-binding peptide
ELRPYVKLLKPKKRVYEFFLVSLSSHHV

SEQ ID NO: 71260 - protein, 34 aa, Artificial Sequence; identical to SEQ ID NO: 23698
  Cyclic GFR-binding peptide
  MOD_RES (32)..(33): Xaa is C or S

SEQ ID NO: 71261 - protein, 29 aa, Artificial Sequence
  Cyclic GFR-binding peptide
  MOD_RES (28)..(28): Xaa is C or S
MNPYVKLIVNSSDDFFLVSLSSLKTPAXT

SEQ ID NO: 71262 - protein, 36 aa, Artificial Sequence
  Cyclic GFR-binding peptide
  MOD_RES (30)..(31): Xaa is C or S
RVIMPYVKLVKPKRGVFFLISLSSLAQPVXXPAASA

SEQ ID NO: 71263 - protein, 31 aa, Artificial Sequence
  Cyclic GFR-binding peptide
  MOD_RES (1)..(3): Xaa is C or S
XGXAKVVMNPYVKLIVNNSSDFFLVSLSSLK

SEQ ID NO: 71264 - protein, 33 aa, Artificial Sequence
  Cyclic GFR-binding peptide
  MOD_RES (1)..(3): Xaa is C or S
XGXSEVVMDPYVKLVVNNASDFFLISLSSLRTP

SEQ ID NO: 71265 - protein, 30 aa, Artificial Sequence
  Cyclic GFR-binding peptide
  MOD_RES (30)..(30): Xaa is C or S
VVMNPYVKLIVNNSSDFFLVSLSSLKTPAX

SEQ ID NO: 71266 - protein, 34 aa, Artificial Sequence
  Cyclic GFR-binding peptide
  MOD_RES (29)..(30): Xaa is C or S
VMNPYVKLIVNNSSDFFLVSLSSLKTPAXXAKPV

SEQ ID NO: 71267 - protein, 29 aa, Artificial Sequence
  Cyclic GFR-binding peptide
LHEELRPYVKLLKPKKRVYEFFLVSLSSH

SEQ ID NO: 71268 - protein, 28 aa, Artificial Sequence
  Cyclic GFR-binding peptide
  MOD_RES (26)..(27): Xaa is C or S
PYVKLLLVRGNDFFLMSLSSTKVPAXXT

SEQ ID NO: 71269 - protein, 39 aa, Artificial Sequence; identical to SEQ ID NO: 23704
  Cyclic GFR-binding peptide
  MOD_RES (2)..(4)..(38): Xaa is C or S

SEQ ID NO: 71270 - protein, 37 aa, Artificial Sequence; identical to SEQ ID NO: 23705
  Cyclic GFR-binding peptide
  MOD_RES (1)..(32)..(33): Xaa is C or S

SEQ ID NO: 71271 - protein, 30 aa, Artificial Sequence
  Cyclic GFR-binding peptide
  MOD_RES (28)..(29): Xaa is C or S
MNPYVKLIVNSSDDFFLVSLSSLQTPAXXP

SEQ ID NO: 71272 - protein, 29 aa, Artificial Sequence
  Cyclic GFR-binding peptide
  MOD_RES (26)..(27): Xaa is C or S
PYVKLVKPKRGVFFLISLSSLAQPVXXPA

SEQ ID NO: 71273 - protein, 39 aa, Artificial Sequence; identical to SEQ ID NO: 23706
  Cyclic GFR-binding peptide
  MOD_RES (1)..(3)..(35): Xaa is C or S

SEQ ID NO: 71274 - protein, 38 aa, Artificial Sequence; identical to SEQ ID NO: 23707
  Cyclic GFR-binding peptide
  MOD_RES (32)..(33): Xaa is C or S

SEQ ID NO: 71275 - protein, 32 aa, Artificial Sequence; identical to SEQ ID NO: 23708
  Cyclic GFR-binding peptide
  MOD_RES (1)..(1): Xaa is C or S

SEQ ID NO: 71276 - protein, 34 aa, Artificial Sequence; identical to SEQ ID NO: 23709
  Cyclic GFR-binding peptide
  MOD_RES (1)..(33)..(34): Xaa is C or S

SEQ ID NO: 71277 - protein, 27 aa, Artificial Sequence
  Cyclic GFR-binding peptide
MNPYVKLIVNNSSDFFLVSLSSLKTPA

SEQ ID NO: 71278 - protein, 36 aa, Artificial Sequence; identical to SEQ ID NO: 23711
  Cyclic GFR-binding peptide
  MOD_RES (32)..(33): Xaa is C or S

SEQ ID NO: 71279 - protein, 31 aa, Artificial Sequence
  Cyclic GFR-binding peptide
  MOD_RES (30)..(31): Xaa is C or S
VVMNPYVKLIVNSSDDFFLVSLSSLQTPAXX

SEQ ID NO: 71280 - protein, 34 aa, Artificial Sequence
  Cyclic GFR-binding peptide
  MOD_RES (28)..(29): Xaa is C or S
MDPYVKLVVNNAADFFLISLSSLRAPVXXSAPAA

SEQ ID NO: 71281 - protein, 34 aa, Artificial Sequence
  Cyclic GFR-binding peptide
  MOD_RES (29)..(30): Xaa is C or S
VMDPYVKLVVNNASDFFLISLSSLRTPVXXTPPT

SEQ ID NO: 71282 - protein, 33 aa, Artificial Sequence
  Cyclic GFR-binding peptide
  MOD_RES (28)..(29): Xaa is C or S
MNPYVKLIVNNSSDFFLVSLSSLKTPAXXAKPV

SEQ ID NO: 71283 - protein, 35 aa, Artificial Sequence; identical to SEQ ID NO: 23713
  Cyclic GFR-binding peptide
  MOD_RES (33)..(34): Xaa is C or S

SEQ ID NO: 71284 - protein, 32 aa, Artificial Sequence
  Cyclic GFR-binding peptide
  MOD_RES (28)..(29): Xaa is C or S
MGPYVKLYTVVGKDFFLISLSSLKTPVXXAKS

SEQ ID NO: 71285 - protein, 28 aa, Artificial Sequence
  Cyclic GFR-binding peptide
VSMGEPYVKLTPVGMDDFFLVSLSSLKT

SEQ ID NO: 71286 - protein, 31 aa, Artificial Sequence; identical to SEQ ID NO: 23714
  Cyclic GFR-binding peptide

SEQ ID NO: 71287 - protein, 32 aa, Artificial Sequence
  Cyclic GFR-binding peptide
  MOD_RES (2)..(2): Xaa is C or S
GXGEVVMDPYVKLVVKENEDFFLMSLSSLETP

SEQ ID NO: 71288 - protein, 35 aa, Artificial Sequence; identical to SEQ ID NO: 23715
  Cyclic GFR-binding peptide
  MOD_RES (2)..(4)..(35): Xaa is C or S

SEQ ID NO: 71289 - protein, 24 aa, Artificial Sequence
  Cyclic GFR-binding peptide
PYVKLIKPTKGIFFLISLSSLDQS

SEQ ID NO: 71290 - protein, 29 aa, Artificial Sequence
  Cyclic GFR-binding peptide
ELHEELRPYVKLLKPKKRVYEFFLVSLSS

SEQ ID NO: 71291 - protein, 32 aa, Artificial Sequence; identical to SEQ ID NO: 23716
  Cyclic GFR-binding peptide
  MOD_RES (1)..(1): Xaa is C or S

SEQ ID NO: 71292 - protein, 28 aa, Artificial Sequence
  Cyclic GFR-binding peptide
LRPYVKLLKPKKRVYEFFLVSLSSHHVR

SEQ ID NO: 71293 - protein, 29 aa, Artificial Sequence
  Cyclic GFR-binding peptide
  MOD_RES (1)..(3): Xaa is C or S
XGXEEVIMPYVKLLLVRGNDFFLMSLSST

SEQ ID NO: 71294 - protein, 25 aa, Artificial Sequence
  Cyclic GFR-binding peptide
MPYVKLVKPTRGVFFLISLSSLDQP

SEQ ID NO: 71295 - protein, 32 aa, Artificial Sequence
  Cyclic GFR-binding peptide
  MOD_RES (29)..(30): Xaa is C or S
VMNPYVKLIVNSSDDFFLVSLSSLQTPAXXPK

SEQ ID NO: 71296 - protein, 38 aa, Artificial Sequence; identical to SEQ ID NO: 23721
  Cyclic GFR-binding peptide
  MOD_RES (2)..(34)..(35): Xaa is C or S

SEQ ID NO: 71297 - protein, 30 aa, Artificial Sequence
  Cyclic GFR-binding peptide
  MOD_RES (29)..(30): Xaa is C or S
VVMPYVKLVKPTRGVFFLISLSSLDQPVXX

SEQ ID NO: 71298 - protein, 35 aa, Artificial Sequence; identical to SEQ ID NO: 23722
  Cyclic GFR-binding peptide
  MOD_RES (32)..(33): Xaa is C or S

SEQ ID NO: 71299 - protein, 36 aa, Artificial Sequence; identical to SEQ ID NO: 23723
  Cyclic GFR-binding peptide
  MOD_RES (2)..(4)..(35)..(36): Xaa is C or S

SEQ ID NO: 71300 - protein, 30 aa, Artificial Sequence
  Cyclic GFR-binding peptide
  MOD_RES (30)..(30): Xaa is C or S
VVMEPYVKLVVKDYEDFFLMSLSSLETPVX

SEQ ID NO: 71301 - protein, 29 aa, Artificial Sequence
  Cyclic GFR-binding peptide
AVSMGEPYVKLTPVGMDDFFLVSLSSLKT

SEQ ID NO: 71302 - protein, 39 aa, Artificial Sequence; identical to SEQ ID NO: 23724
  Cyclic GFR-binding peptide
  MOD_RES (2)..(4)..(36)..(37): Xaa is C or S

SEQ ID NO: 71303 - protein, 30 aa, Artificial Sequence
  Cyclic GFR-binding peptide
  MOD_RES (30)..(30): Xaa is C or S
VVMGPYVKLIIQQKDNFFLMSLSSMKTPTX

SEQ ID NO: 71304 - protein, 24 aa, Artificial Sequence
  Cyclic GFR-binding peptide
PYVKLVKPKRGVFFLISLSSLAQP

SEQ ID NO: 71305 - protein, 24 aa, Artificial Sequence
  Cyclic GFR-binding peptide
LFPYVKLHQGQHPKIRFFLMSLSS

SEQ ID NO: 71306 - protein, 36 aa, Artificial Sequence; identical to SEQ ID NO: 23725
  Cyclic GFR-binding peptide
  MOD_RES (1)..(3)..(35)..(36): Xaa is C or S

SEQ ID NO: 71307 - protein, 27 aa, Artificial Sequence
  Cyclic GFR-binding peptide
  MOD_RES (1)..(1): Xaa is C or S
XSRVIMPYVKLVKPKRGVFFLISLSSL

SEQ ID NO: 71308 - protein, 32 aa, Artificial Sequence
  Cyclic GFR-binding peptide
  MOD_RES (30)..(31): Xaa is C or S
VVMNPYVKLIVNSSDDFFLVSLSSLQTPAXXP

SEQ ID NO: 71309 - protein, 37 aa, Artificial Sequence; identical to SEQ ID NO: 23726
  Cyclic GFR-binding peptide
  MOD_RES (1)..(33): Xaa is C or S

SEQ ID NO: 71310 - protein, 20 aa, Artificial Sequence
  Cyclic GFR-binding peptide
PYVKLVVKENEDFFLMSLSS

SEQ ID NO: 71311 - protein, 28 aa, Artificial Sequence
  Cyclic GFR-binding peptide
  MOD_RES (27)..(28): Xaa is C or S
MPYVKLVKPKRGVFFLISLSSLAQPVXX

SEQ ID NO: 71312 - protein, 28 aa, Artificial Sequence
  Cyclic GFR-binding peptide
  MOD_RES (28)..(28): Xaa is C or S
IMPYVKLLLVRGNDFFLMSLSSTKVPAX

SEQ ID NO: 71313 - protein, 22 aa, Artificial Sequence
  Cyclic GFR-binding peptide
PYVKLLLVRGNDFFLMSLSSTK

SEQ ID NO: 71314 - protein, 26 aa, Artificial Sequence
  Cyclic GFR-binding peptide
VVMDPYVKLVVNNAADFFLISLSSLR

SEQ ID NO: 71315 - protein, 36 aa, Artificial Sequence; identical to SEQ ID NO: 23730
  Cyclic GFR-binding peptide
  MOD_RES (2)..(4)..(36): Xaa is C or S

SEQ ID NO: 71316 - protein, 27 aa, Artificial Sequence
  Cyclic GFR-binding peptide
IMPYVKLVKPKRGVFFLISLSSLAQPV

SEQ ID NO: 71317 - protein, 33 aa, Artificial Sequence; identical to SEQ ID NO: 23731
  Cyclic GFR-binding peptide
  MOD_RES (1)..(33): Xaa is C or S

SEQ ID NO: 71318 - protein, 35 aa, Artificial Sequence; identical to SEQ ID NO: 23733
  Cyclic GFR-binding peptide
  MOD_RES (2)..(4): Xaa is C or S

SEQ ID NO: 71319 - protein, 38 aa, Artificial Sequence; identical to SEQ ID NO: 23734
  Cyclic GFR-binding peptide
  MOD_RES (2)..(2): Xaa is C or S

SEQ ID NO: 71320 - protein, 35 aa, Artificial Sequence
  Cyclic GFR-binding peptide
  MOD_RES (30)..(31): Xaa is C or S
RVIMPYVKLVKPKRGVFFLISLSSLAQPVXXPAAS

SEQ ID NO: 71321 - protein, 36 aa, Artificial Sequence; identical to SEQ ID NO: 23737
  Cyclic GFR-binding peptide
  MOD_RES (2)..(34)..(35): Xaa is C or S

SEQ ID NO: 71322 - protein, 38 aa, Artificial Sequence; identical to SEQ ID NO: 23738
  Cyclic GFR-binding peptide
  MOD_RES (2)..(33)..(34): Xaa is C or S

SEQ ID NO: 71323 - protein, 39 aa, Artificial Sequence; identical to SEQ ID NO: 23740
  Cyclic GFR-binding peptide
  MOD_RES (2)..(34): Xaa is C or S

SEQ ID NO: 71324 - protein, 37 aa, Artificial Sequence
  Cyclic GFR-binding peptide
  MOD_RES (2)..(34)..(35): Xaa is C or S
GXGEVVMDPYVKLVVKENEDFFLMSLSSLETPVXXAK

SEQ ID NO: 71325 - protein, 34 aa, Artificial Sequence; identical to SEQ ID NO: 23741
  Cyclic GFR-binding peptide
  MOD_RES (1)..(33): Xaa is C or S

SEQ ID NO: 71326 - protein, 36 aa, Artificial Sequence
  Cyclic GFR-binding peptide
  MOD_RES (31)..(32): Xaa is C or S
EVVMDPYVKLVVKENEDFFLMSLSSLETPVXXAKPI

SEQ ID NO: 71327 - protein, 26 aa, Artificial Sequence
  Cyclic GFR-binding peptide
VVMDPYVKLVVKENEDFFLMSLSSLE

SEQ ID NO: 71328 - protein, 40 aa, Artificial Sequence; identical to SEQ ID NO: 23742
  Cyclic GFR-binding peptide
  MOD_RES (1)..(38): Xaa is C or S

SEQ ID NO: 71329 - protein, 31 aa, Artificial Sequence
  Cyclic GFR-binding peptide
  MOD_RES (30)..(31): Xaa is C or S
EVIMPYVKLLLVRGNDFFLMSLSSTKVPAXX

SEQ ID NO: 71330 - protein, 37 aa, Artificial Sequence; identical to SEQ ID NO: 23743
  Cyclic GFR-binding peptide
  MOD_RES (2)..(4)..(36): Xaa is C or S

SEQ ID NO: 71331 - protein, 29 aa, Artificial Sequence
  Cyclic GFR-binding peptide
  MOD_RES (27)..(28): Xaa is C or S
MPYVKLLLVRGNDFFLMSLSSTKVPAXXT

SEQ ID NO: 71332 - protein, 33 aa, Artificial Sequence
  Cyclic GFR-binding peptide
  MOD_RES (27)..(28): Xaa is C or S
EPYVKLVVKDYEDFFLMSLSSLETPVXXAKPIS

SEQ ID NO: 71333 - protein, 40 aa, Artificial Sequence; identical to SEQ ID NO: 23744
  Cyclic GFR-binding peptide
  MOD_RES (2)..(4)..(36)..(37): Xaa is C or S

SEQ ID NO: 71334 - protein, 32 aa, Artificial Sequence
  Cyclic GFR-binding peptide
  MOD_RES (2)..(2): Xaa is C or S
GXAEVVMDPYVKLVVNNAADFFLISLSSLRAP

SEQ ID NO: 71335 - protein, 20 aa, Artificial Sequence
  Cyclic GFR-binding peptide
PYVKLVVKDYEDFFLMSLSS

SEQ ID NO: 71336 - protein, 30 aa, Artificial Sequence
  Cyclic GFR-binding peptide
  MOD_RES (26)..(27): Xaa is C or S
PYVKLIVNNSSDFFLVSLSSLKTPAXXAKP

SEQ ID NO: 71337 - protein, 31 aa, Artificial Sequence
  Cyclic GFR-binding peptide
  MOD_RES (2)..(4): Xaa is C or S
SXKXSKVIMPYVKLIKPTKGIFFLISLSSLD

SEQ ID NO: 71338 - protein, 33 aa, Artificial Sequence
  Cyclic GFR-binding peptide
  MOD_RES (28)..(29): Xaa is C or S
GEPYVKLTPVGMDDFFLVSLSSLKTPVXXAKGV

SEQ ID NO: 71339 - protein, 32 aa, Artificial Sequence
  Cyclic GFR-binding peptide
  MOD_RES (2)..(4): Xaa is C or S
HXGXAKVVMNPYVKLIVNNSSDFFLVSLSSLK

SEQ ID NO: 71340 - protein, 31 aa, Artificial Sequence
  Cyclic GFR-binding peptide
  MOD_RES (28)..(29): Xaa is C or S
GEPYVKLTPVGMDDFFLVSLSSLKTPVXXAK

SEQ ID NO: 71341 - protein, 23 aa, Artificial Sequence
  Cyclic GFR-binding peptide
PYVKLIKPTKGIFFLISLSSLDQ

SEQ ID NO: 71342 - protein, 24 aa, Artificial Sequence
  Cyclic GFR-binding peptide
NPYVKLIVNSSDDFFLVSLSSLQT

SEQ ID NO: 71343 - protein, 32 aa, Artificial Sequence
  Cyclic GFR-binding peptide
  MOD_RES (27)..(27): Xaa is C or S
NPYVKLIVNSSDDFFLVSLSSLKTPAXTPKTV

SEQ ID NO: 71344 - protein, 33 aa, Artificial Sequence
  Cyclic GFR-binding peptide
  MOD_RES (30)..(30): Xaa is C or S
LFPYVKLHQGQHPKIRFFLMSLSSEETPVXELG

SEQ ID NO: 71345 - protein, 27 aa, Artificial Sequence
  Cyclic GFR-binding peptide
VVMEPYVKLVVKDYEDFFLMSLSSLET

SEQ ID NO: 71346 - protein, 39 aa, Artificial Sequence; identical to SEQ ID NO: 23750
  Cyclic GFR-binding peptide
  MOD_RES (33)..(34): Xaa is C or S

SEQ ID NO: 71347 - protein, 32 aa, Artificial Sequence
  Cyclic GFR-binding peptide
  MOD_RES (27)..(28): Xaa is C or S
NPYVKLIVNSSDDFFLVSLSSLKTPAXXPKPV

SEQ ID NO: 71348 - protein, 32 aa, Artificial Sequence; identical to SEQ ID NO: 23753
  Cyclic GFR-binding peptide
  MOD_RES (31)..(32): Xaa is C or S

SEQ ID NO: 71349 - protein, 34 aa, Artificial Sequence; identical to SEQ ID NO: 23754
  Cyclic GFR-binding peptide
  MOD_RES (31)..(32): Xaa is C or S

SEQ ID NO: 71350 - protein, 40 aa, Artificial Sequence
  Cyclic GFR-binding peptide
  MOD_RES (2)..(34)..(35): Xaa is C or S
GXGEVVMDPYVKLVVKENEDFFLMSLSSLETPVXXAKPIK

SEQ ID NO: 71351 - protein, 26 aa, Artificial Sequence
  Cyclic GFR-binding peptide
  MOD_RES (26)..(26): Xaa is C or S
PYVKLIIQQKDNFFLMSLSSMKTPTX

SEQ ID NO: 71352 - protein, 32 aa, Artificial Sequence
  Cyclic GFR-binding peptide
  MOD_RES (29)..(30): Xaa is C or S
MGEPYVKLTPVGMDDFFLVSLSSLKTPVXXAK

SEQ ID NO: 71353 - protein, 28 aa, Artificial Sequence
  Cyclic GFR-binding peptide
  MOD_RES (1)..(3): Xaa is C or S
XKXSRVIMPYVKLVKPKRGVFFLISLSS

SEQ ID NO: 71354 - protein, 30 aa, Artificial Sequence
  Cyclic GFR-binding peptide
  MOD_RES (29)..(30): Xaa is C or S
VIMPYVKLLLVRGNDFFLMSLSSTKVPAXX

SEQ ID NO: 71355 - protein, 26 aa, Artificial Sequence
  Cyclic GFR-binding peptide
RVIMPYVKLVKPKRGVFFLISLSSLA

SEQ ID NO: 71356 - protein, 33 aa, Artificial Sequence
  Cyclic GFR-binding peptide
  MOD_RES (30)..(31): Xaa is C or S
VVMDPYVKLVVNNAADFFLISLSSLRAPVXXSA

SEQ ID NO: 71357 - protein, 34 aa, Artificial Sequence
  Cyclic GFR-binding peptide
  MOD_RES (29)..(30): Xaa is C or S
AMGPYVKLYTVVGKDFFLISLSSLKTPVXXAKSA

SEQ ID NO: 71358 - protein, 35 aa, Artificial Sequence; identical to SEQ ID NO: 23759
  Cyclic GFR-binding peptide
  MOD_RES (1)..(3)..(35): Xaa is C or S

SEQ ID NO: 71359 - protein, 27 aa, Artificial Sequence
  Cyclic GFR-binding peptide
  MOD_RES (1)..(1): Xaa is C or S
XGEVVMEPYVKLVVKDYEDFFLMSLSS

SEQ ID NO: 71360 - protein, 23 aa, Artificial Sequence
  Cyclic GFR-binding peptide
PYVKLLKPKKRVYEFFLVSLSSH

SEQ ID NO: 71361 - protein, 29 aa, Artificial Sequence
  Cyclic GFR-binding peptide
  MOD_RES (2)..(2): Xaa is C or S
KXSRVIMPYVKLVKPKRGVFFLISLSSLA

SEQ ID NO: 71362 - protein, 28 aa, Artificial Sequence
  Cyclic GFR-binding peptide
SRVIMPYVKLVKPKRGVFFLISLSSLAQ

SEQ ID NO: 71363 - protein, 31 aa, Artificial Sequence; identical to SEQ ID NO: 23760
  Cyclic GFR-binding peptide
  MOD_RES (1)..(1): Xaa is C or S

SEQ ID NO: 71364 - protein, 32 aa, Artificial Sequence; identical to SEQ ID NO: 23761
  Cyclic GFR-binding peptide
  MOD_RES (2)..(2): Xaa is C or S

SEQ ID NO: 71365 - protein, 26 aa, Artificial Sequence
  Cyclic GFR-binding peptide
MGPYVKLIIQQKDNFFLMSLSSMKTP

SEQ ID NO: 71366 - protein, 20 aa, Artificial Sequence
  Cyclic GFR-binding peptide
PYVKLIKPTKGIFFLISLSS

SEQ ID NO: 71367 - protein, 30 aa, Artificial Sequence; identical to SEQ ID NO: 1819
  Cyclic GFR-binding peptide

SEQ ID NO: 71368 - protein, 35 aa, Artificial Sequence
  Cyclic GFR-binding peptide
  MOD_RES (2)..(4): Xaa is C or S
RXGXGEVVMDPYVKLVVKENEDFFLMSLSSLETPV

SEQ ID NO: 71369 - protein, 32 aa, Artificial Sequence; identical to SEQ ID NO: 23763
  Cyclic GFR-binding peptide
  MOD_RES (32)..(32): Xaa is C or S

SEQ ID NO: 71370 - protein, 25 aa, Artificial Sequence
  Cyclic GFR-binding peptide
PYVKLLLVRGNDFFLMSLSSTKVPA

SEQ ID NO: 71371 - protein, 25 aa, Artificial Sequence
  Cyclic GFR-binding peptide
MPYVKLVKPKRGVFFLISLSSLAQP

SEQ ID NO: 71372 - protein, 29 aa, Artificial Sequence
  Cyclic GFR-binding peptide
  MOD_RES (1)..(3): Xaa is C or S
XGXGEVVMDPYVKLVVKENEDFFLMSLSS

SEQ ID NO: 71373 - protein, 37 aa, Artificial Sequence
  Cyclic GFR-binding peptide
  MOD_RES (32)..(32): Xaa is C or S
HQLFPYVKLHQGQHPKIRFFLMSLSSEETPVXELGED

SEQ ID NO: 71374 - protein, 30 aa, Artificial Sequence
  Cyclic GFR-binding peptide
  MOD_RES (1)..(1): Xaa is C or S
XARVVMNPYVKLIVNSSDDFFLVSLSSLQT

SEQ ID NO: 71375 - protein, 29 aa, Artificial Sequence
  Cyclic GFR-binding peptide
  MOD_RES (2)..(4): Xaa is C or S
SXKXSRVIMPYVKLVKPKRGVFFLISLSS

SEQ ID NO: 71376 - protein, 32 aa, Artificial Sequence
  Cyclic GFR-binding peptide
  MOD_RES (1)..(3): Xaa is C or S
XGXEEVIMPYVKLLLVRGNDFFLMSLSSTKVP

SEQ ID NO: 71377 - protein, 36 aa, Artificial Sequence; identical to SEQ ID NO: 23765
  Cyclic GFR-binding peptide
  MOD_RES (1)..(32)..(33): Xaa is C or S

SEQ ID NO: 71378 - protein, 28 aa, Artificial Sequence
  Cyclic GFR-binding peptide
  MOD_RES (27)..(28): Xaa is C or S
MPYVKLVKPTRGVFFLISLSSLDQPVXX

SEQ ID NO: 71379 - protein, 35 aa, Artificial Sequence; identical to SEQ ID NO: 23766
  Cyclic GFR-binding peptide
  MOD_RES (1)..(3)..(34)..(35): Xaa is C or S

SEQ ID NO: 71380 - protein, 36 aa, Artificial Sequence; identical to SEQ ID NO: 23767
  Cyclic GFR-binding peptide
  MOD_RES (35)..(35): Xaa is C or S

SEQ ID NO: 71381 - protein, 30 aa, Artificial Sequence
  Cyclic GFR-binding peptide
  MOD_RES (1)..(1): Xaa is C or S
XGEVVMEPYVKLVVKDYEDFFLMSLSSLET

SEQ ID NO: 71382 - protein, 33 aa, Artificial Sequence; identical to SEQ ID NO: 23771
  Cyclic GFR-binding peptide
  MOD_RES (2)..(33): Xaa is C or S

SEQ ID NO: 71383 - protein, 27 aa, Artificial Sequence
  Cyclic GFR-binding peptide
  MOD_RES (27)..(27): Xaa is C or S
MPYVKLLLVRGNDFFLMSLSSTKVPAX

SEQ ID NO: 71384 - protein, 38 aa, Artificial Sequence; identical to SEQ ID NO: 23770
  Cyclic GFR-binding peptide
  MOD_RES (2)..(34)..(35): Xaa is C or S

SEQ ID NO: 71385 - protein, 30 aa, Artificial Sequence
  Cyclic GFR-binding peptide
  MOD_RES (28)..(29): Xaa is C or S
MGPYVKLIIQQKDNFFLMSLSSMKTPTXXP

SEQ ID NO: 71386 - protein, 26 aa, Artificial Sequence
  Cyclic GFR-binding peptide
VIMPYVKLIKPTKGIFFLISLSSLDQ

SEQ ID NO: 71387 - protein, 30 aa, Artificial Sequence
  Cyclic GFR-binding peptide
  MOD_RES (2)..(2): Xaa is C or S
GXAEVVMDPYVKLVVNNAADFFLISLSSLR

SEQ ID NO: 71388 - protein, 32 aa, Artificial Sequence
  Cyclic GFR-binding peptide
  MOD_RES (26)..(27): Xaa is C or S
PYVKLIVNSSDDFFLVSLSSLQTPAXXPKPVT

SEQ ID NO: 71389 - protein, 36 aa, Artificial Sequence
  Cyclic GFR-binding peptide
  MOD_RES (30)..(30): Xaa is C or S
LFPYVKLHQGQHPKIRFFLMSLSSEETPVXELGEDN

SEQ ID NO: 71390 - protein, 37 aa, Artificial Sequence; identical to SEQ ID NO: 23774
  Cyclic GFR-binding peptide
  MOD_RES (32)..(33): Xaa is C or S

SEQ ID NO: 71391 - protein, 42 aa, Artificial Sequence; identical to SEQ ID NO: 23775
  Cyclic GFR-binding peptide
  MOD_RES (2)..(4)..(41): Xaa is C or S

SEQ ID NO: 71392 - protein, 24 aa, Artificial Sequence
  Cyclic GFR-binding peptide
VIMPYVKLLLVRGNDFFLMSLSST

SEQ ID NO: 71393 - protein, 32 aa, Artificial Sequence
  Cyclic GFR-binding peptide
  MOD_RES (28)..(29): Xaa is C or S
GEPYVKLTPVGMDDFFLVSLSSLKTPVXXAKG

SEQ ID NO: 71394 - protein, 21 aa, Artificial Sequence
  Cyclic GFR-binding peptide
PYVKLIVNSSDDFFLVSLSSL

SEQ ID NO: 71395 - protein, 33 aa, Artificial Sequence
  Cyclic GFR-binding peptide
EELRPYVKLLKPKKRVYEFFLVSLSSHHVRSPQ

SEQ ID NO: 71396 - protein, 22 aa, Artificial Sequence
  Cyclic GFR-binding peptide
GPYVKLYTVVGKDFFLISLSSL

SEQ ID NO: 71397 - protein, 32 aa, Artificial Sequence; identical to SEQ ID NO: 23776
  Cyclic GFR-binding peptide
  MOD_RES (2)..(2): Xaa is C or S

SEQ ID NO: 71398 - protein, 28 aa, Artificial Sequence
  Cyclic GFR-binding peptide
  MOD_RES (2)..(2): Xaa is C or S
GXARVVMNPYVKLIVNSSDDFFLVSLSS

SEQ ID NO: 71399 - protein, 29 aa, Artificial Sequence
  Cyclic GFR-binding peptide
  MOD_RES (26)..(26): Xaa is C or S
PYVKLIVNSSDDFFLVSLSSLKTPAXTPK

SEQ ID NO: 71400 - protein, 36 aa, Artificial Sequence
  Cyclic GFR-binding peptide
  MOD_RES (32)..(32): Xaa is C or S
HQLFPYVKLHQGQHPKIRFFLMSLSSEETPVXELGE

SEQ ID NO: 71401 - protein, 40 aa, Artificial Sequence; identical to SEQ ID NO: 23779
  Cyclic GFR-binding peptide
  MOD_RES (2)..(4)..(36)..(37): Xaa is C or S

SEQ ID NO: 71402 - protein, 35 aa, Artificial Sequence; identical to SEQ ID NO: 23781
  Cyclic GFR-binding peptide
  MOD_RES (1)..(35): Xaa is C or S

SEQ ID NO: 71403 - protein, 25 aa, Artificial Sequence
  Cyclic GFR-binding peptide
NPYVKLIVNSSDDFFLVSLSSLQTP

SEQ ID NO: 71404 - protein, 21 aa, Artificial Sequence
  Cyclic GFR-binding peptide
DPYVKLVVKENEDFFLMSLSS

SEQ ID NO: 71405 - protein, 34 aa, Artificial Sequence; identical to SEQ ID NO: 23782
  Cyclic GFR-binding peptide
  MOD_RES (2)..(34): Xaa is C or S

SEQ ID NO: 71406 - protein, 24 aa, Artificial Sequence
  Cyclic GFR-binding peptide
MDPYVKLVVNNAADFFLISLSSLR

SEQ ID NO: 71407 - protein, 30 aa, Artificial Sequence
  Cyclic GFR-binding peptide
  MOD_RES (2)..(2): Xaa is C or S
KXSKVIMPYVKLIKPTKGIFFLISLSSLDQ

SEQ ID NO: 71408 - protein, 33 aa, Artificial Sequence
  Cyclic GFR-binding peptide
  MOD_RES (28)..(29): Xaa is C or S
MEPYVKLVVKDYEDFFLMSLSSLETPVXXAKPI

SEQ ID NO: 71409 - protein, 32 aa, Artificial Sequence
  Cyclic GFR-binding peptide
  MOD_RES (29)..(30): Xaa is C or S
AMGPYVKLYTVVGKDFFLISLSSLKTPVXXAK

SEQ ID NO: 71410 - protein, 31 aa, Artificial Sequence
  Cyclic GFR-binding peptide
  MOD_RES (29)..(30): Xaa is C or S
VMDPYVKLVVNNASDFFLISLSSLRTPVXXT

SEQ ID NO: 71411 - protein, 26 aa, Artificial Sequence
  Cyclic GFR-binding peptide
  MOD_RES (26)..(26): Xaa is C or S
PYVKLVKPKRGVFFLISLSSLAQPVX

SEQ ID NO: 71412 - protein, 31 aa, Artificial Sequence
  Cyclic GFR-binding peptide
  MOD_RES (1)..(3): Xaa is C or S
XGXEEVIMPYVKLLLVRGNDFFLMSLSSTKV

SEQ ID NO: 71413 - protein, 27 aa, Artificial Sequence
  Cyclic GFR-binding peptide
  MOD_RES (1)..(1): Xaa is C or S
XAEVVMDPYVKLVVNNAADFFLISLSS

SEQ ID NO: 71414 - protein, 30 aa, Artificial Sequence
  Cyclic GFR-binding peptide
  MOD_RES (2)..(2): Xaa is C or S
GXGEVVMDPYVKLVVKENEDFFLMSLSSLE

SEQ ID NO: 71415 - protein, 37 aa, Artificial Sequence; identical to SEQ ID NO: 23785
  Cyclic GFR-binding peptide
  MOD_RES (32)..(33): Xaa is C or S

SEQ ID NO: 71416 - protein, 30 aa, Artificial Sequence
  Cyclic GFR-binding peptide
  MOD_RES (28)..(29): Xaa is C or S
MEPYVKLVVKDYEDFFLMSLSSLETPVXXA

SEQ ID NO: 71417 - protein, 40 aa, Artificial Sequence; identical to SEQ ID NO: 23786
  Cyclic GFR-binding peptide
  MOD_RES (1)..(3)..(35)..(36): Xaa is C or S

SEQ ID NO: 71418 - protein, 33 aa, Artificial Sequence
  Cyclic GFR-binding peptide
  MOD_RES (2)..(4): Xaa is C or S
RXGXAEVVMDPYVKLVVNNAADFFLISLSSLRA

SEQ ID NO: 71419 - protein, 38 aa, Artificial Sequence
  Cyclic GFR-binding peptide
  MOD_RES (1)..(33)..(34): Xaa is C or S
XGEVVMDPYVKLVVKENEDFFLMSLSSLETPVXXAKPI

SEQ ID NO: 71420 - protein, 31 aa, Artificial Sequence
  Cyclic GFR-binding peptide
  MOD_RES (28)..(28): Xaa is C or S
PYVKLHQGQHPKIRFFLMSLSSEETPVXELG

SEQ ID NO: 71421 - protein, 23 aa, Artificial Sequence
  Cyclic GFR-binding peptide
PYVKLLLVRGNDFFLMSLSSTKV

SEQ ID NO: 71422 - protein, 33 aa, Artificial Sequence; identical to SEQ ID NO: 23789
  Cyclic GFR-binding peptide
  MOD_RES (1)..(1): Xaa is C or S

SEQ ID NO: 71423 - protein, 29 aa, Artificial Sequence
  Cyclic GFR-binding peptide
  MOD_RES (1)..(1): Xaa is C or S
XRDVVMGPYVKLIIQQKDNFFLMSLSSMK

SEQ ID NO: 71424 - protein, 28 aa, Artificial Sequence
  Cyclic GFR-binding peptide
PYVKLLKPKKRVYEFFLVSLSSHHVRSP

SEQ ID NO: 71425 - protein, 31 aa, Artificial Sequence
  Cyclic GFR-binding peptide
  MOD_RES (27)..(28): Xaa is C or S
NPYVKLIVNNSSDFFLVSLSSLKTPAXXAKP

SEQ ID NO: 71426 - protein, 39 aa, Artificial Sequence; identical to SEQ ID NO: 23790
  Cyclic GFR-binding peptide
  MOD_RES (36)..(36): Xaa is C or S

SEQ ID NO: 71427 - protein, 32 aa, Artificial Sequence
  Cyclic GFR-binding peptide
  MOD_RES (2)..(2): Xaa is C or S
GXAKVVMNPYVKLIVNNSSDFFLVSLSSLKTP

SEQ ID NO: 71428 - protein, 36 aa, Artificial Sequence; identical to SEQ ID NO: 23792
  Cyclic GFR-binding peptide
  MOD_RES (31)..(32): Xaa is C or S

SEQ ID NO: 71429 - protein, 34 aa, Artificial Sequence
  Cyclic GFR-binding peptide
  MOD_RES (30)..(30): Xaa is C or S
VVMNPYVKLIVNSSDDFFLVSLSSLKTPAXTPKT

SEQ ID NO: 71430 - protein, 25 aa, Artificial Sequence
  Cyclic GFR-binding peptide
MPYVKLIKPTKGIFFLISLSSLDQS

SEQ ID NO: 71431 - protein, 32 aa, Artificial Sequence; identical to SEQ ID NO: 23795
  Cyclic GFR-binding peptide
  MOD_RES (31)..(32): Xaa is C or S

SEQ ID NO: 71432 - protein, 34 aa, Artificial Sequence; identical to SEQ ID NO: 23794
  Cyclic GFR-binding peptide
  MOD_RES (1)..(3): Xaa is C or S

SEQ ID NO: 71433 - protein, 28 aa, Artificial Sequence
  Cyclic GFR-binding peptide
EVVMDPYVKLVVNNAADFFLISLSSLRA

SEQ ID NO: 71434 - protein, 24 aa, Artificial Sequence
  Cyclic GFR-binding peptide
MNPYVKLIVNSSDDFFLVSLSSLQ

SEQ ID NO: 71435 - protein, 27 aa, Artificial Sequence
  Cyclic GFR-binding peptide
  MOD_RES (26)..(27): Xaa is C or S
PYVKLVVKENEDFFLMSLSSLETPVXX

SEQ ID NO: 71436 - protein, 39 aa, Artificial Sequence; identical to SEQ ID NO: 23797
  Cyclic GFR-binding peptide
  MOD_RES (1)..(33)..(34): Xaa is C or S

SEQ ID NO: 71437 - protein, 31 aa, Artificial Sequence
  Cyclic GFR-binding peptide
  MOD_RES (2)..(2): Xaa is C or S
AXELHEELRPYVKLLKPKKRVYEFFLVSLSS

SEQ ID NO: 71438 - protein, 33 aa, Artificial Sequence
  Cyclic GFR-binding peptide
  MOD_RES (29)..(30): Xaa is C or S
VMNPYVKLIVNNSSDFFLVSLSSLKTPAXXAKP

SEQ ID NO: 71439 - protein, 35 aa, Artificial Sequence; identical to SEQ ID NO: 23801
  Cyclic GFR-binding peptide
  MOD_RES (31)..(31): Xaa is C or S

SEQ ID NO: 71440 - protein, 25 aa, Artificial Sequence
  Cyclic GFR-binding peptide
VVMNPYVKLIVNNSSDFFLVSLSSL

SEQ ID NO: 71441 - protein, 32 aa, Artificial Sequence
  Cyclic GFR-binding peptide
  MOD_RES (29)..(30): Xaa is C or S
VMDPYVKLVVNNASDFFLISLSSLRTPVXXTP

SEQ ID NO: 71442 - protein, 35 aa, Artificial Sequence
  Cyclic GFR-binding peptide
  MOD_RES (30)..(31): Xaa is C or S
VVMNPYVKLIVNSSDDFFLVSLSSLKTPAXXPKPV

SEQ ID NO: 71443 - protein, 33 aa, Artificial Sequence
  Cyclic GFR-binding peptide
  MOD_RES (32)..(32): Xaa is C or S
HQLFPYVKLHQGQHPKIRFFLMSLSSEETPVXE

SEQ ID NO: 71444 - protein, 32 aa, Artificial Sequence
  Cyclic GFR-binding peptide
  MOD_RES (29)..(29): Xaa is C or S
VMNPYVKLIVNSSDDFFLVSLSSLKTPAXTPK

SEQ ID NO: 71445 - protein, 32 aa, Artificial Sequence
  Cyclic GFR-binding peptide
  MOD_RES (27)..(28): Xaa is C or S
DPYVKLVVNNASDFFLISLSSLRTPVXXTPPT

SEQ ID NO: 71446 - protein, 40 aa, Artificial Sequence; identical to SEQ ID NO: 23806
  Cyclic GFR-binding peptide
  MOD_RES (1)..(3)..(35): Xaa is C or S

SEQ ID NO: 71447 - protein, 24 aa, Artificial Sequence
  Cyclic GFR-binding peptide
RPYVKLLKPKKRVYEFFLVSLSSH

SEQ ID NO: 71448 - protein, 40 aa, Artificial Sequence; identical to SEQ ID NO: 23808
  Cyclic GFR-binding peptide
  MOD_RES (1)..(3)..(34)..(35): Xaa is C or S

SEQ ID NO: 71449 - protein, 28 aa, Artificial Sequence
  Cyclic GFR-binding peptide
EVIMPYVKLLLVRGNDFFLMSLSSTKVP

SEQ ID NO: 71450 - protein, 29 aa, Artificial Sequence
  Cyclic GFR-binding peptide
  MOD_RES (27)..(28): Xaa is C or S
EPYVKLTPVGMDDFFLVSLSSLKTPVXXA

SEQ ID NO: 71451 - protein, 24 aa, Artificial Sequence
  Cyclic GFR-binding peptide
VAMGPYVKLYTVVGKDFFLISLSS

SEQ ID NO: 71452 - protein, 28 aa, Artificial Sequence
  Cyclic GFR-binding peptide
  MOD_RES (28)..(28): Xaa is C or S
VMPYVKLVKPTRGVFFLISLSSLDQPVX

SEQ ID NO: 71453 - protein, 22 aa, Artificial Sequence
  Cyclic GFR-binding peptide
MDPYVKLVVKENEDFFLMSLSS

SEQ ID NO: 71454 - protein, 38 aa, Artificial Sequence; identical to SEQ ID NO: 23813
  Cyclic GFR-binding peptide
  MOD_RES (2)..(4)..(35)..(36): Xaa is C or S

SEQ ID NO: 71455 - protein, 35 aa, Artificial Sequence; identical to SEQ ID NO: 23814
  Cyclic GFR-binding peptide
  MOD_RES (2)..(34)..(35): Xaa is C or S

SEQ ID NO: 71456 - protein, 28 aa, Artificial Sequence
  Cyclic GFR-binding peptide
  MOD_RES (1)..(1): Xaa is C or S
XSEVVMDPYVKLVVNNASDFFLISLSSL

SEQ ID NO: 71457 - protein, 24 aa, Artificial Sequence
  Cyclic GFR-binding peptide
VVMNPYVKLIVNSSDDFFLVSLSS

SEQ ID NO: 71458 - protein, 28 aa, Artificial Sequence
  Cyclic GFR-binding peptide
  MOD_RES (28)..(28): Xaa is C or S
MGPYVKLYTVVGKDFFLISLSSLKTPVX

SEQ ID NO: 71459 - protein, 38 aa, Artificial Sequence; identical to SEQ ID NO: 23816
  Cyclic GFR-binding peptide
  MOD_RES (1)..(3)..(35)..(36): Xaa is C or S

SEQ ID NO: 71460 - protein, 30 aa, Artificial Sequence
  Cyclic GFR-binding peptide
  MOD_RES (27)..(28): Xaa is C or S
EPYVKLTPVGMDDFFLVSLSSLKTPVXXAK

SEQ ID NO: 71461 - protein, 29 aa, Artificial Sequence
  Cyclic GFR-binding peptide
EEVIMPYVKLLLVRGNDFFLMSLSSTKVP

SEQ ID NO: 71462 - protein, 33 aa, Artificial Sequence
  Cyclic GFR-binding peptide
  MOD_RES (30)..(31): Xaa is C or S
RVIMPYVKLVKPKRGVFFLISLSSLAQPVXXPA

SEQ ID NO: 71463 - protein, 22 aa, Artificial Sequence
  Cyclic GFR-binding peptide
PYVKLIVNNSSDFFLVSLSSLK

SEQ ID NO: 71464 - protein, 22 aa, Artificial Sequence
  Cyclic GFR-binding peptide
MPYVKLVKPKRGVFFLISLSSL

SEQ ID NO: 71465 - protein, 33 aa, Artificial Sequence
  Cyclic GFR-binding peptide
  MOD_RES (1)..(3): Xaa is C or S
XGXEAVSMGEPYVKLTPVGMDDFFLVSLSSLKT

SEQ ID NO: 71466 - protein, 34 aa, Artificial Sequence
  Cyclic GFR-binding peptide
  MOD_RES (2)..(4): Xaa is C or S
SXGXRDVVMGPYVKLIIQQKDNFFLMSLSSMKTP

SEQ ID NO: 71467 - protein, 33 aa, Artificial Sequence; identical to SEQ ID NO: 23819
  Cyclic GFR-binding peptide
  MOD_RES (32)..(33): Xaa is C or S

SEQ ID NO: 71468 - protein, 30 aa, Artificial Sequence
  Cyclic GFR-binding peptide
RPYVKLLKPKKRVYEFFLVSLSSHHVRSPQ

SEQ ID NO: 71469 - protein, 31 aa, Artificial Sequence
  Cyclic GFR-binding peptide
  MOD_RES (26)..(27): Xaa is C or S
PYVKLVVNNAADFFLISLSSLRAPVXXSAPA

SEQ ID NO: 71470 - protein, 39 aa, Artificial Sequence; identical to SEQ ID NO: 23821
  Cyclic GFR-binding peptide
  MOD_RES (34)..(34): Xaa is C or S

SEQ ID NO: 71471 - protein, 38 aa, Artificial Sequence; identical to SEQ ID NO: 23822
  Cyclic GFR-binding peptide
  MOD_RES (2)..(4): Xaa is C or S

SEQ ID NO: 71472 - protein, 27 aa, Artificial Sequence
  Cyclic GFR-binding peptide
HEELRPYVKLLKPKKRVYEFFLVSLSS

SEQ ID NO: 71473 - protein, 30 aa, Artificial Sequence
  Cyclic GFR-binding peptide
  MOD_RES (2)..(4): Xaa is C or S
HXGXSRVVMNPYVKLIVNSSDDFFLVSLSS

SEQ ID NO: 71474 - protein, 36 aa, Artificial Sequence; identical to SEQ ID NO: 23823
  Cyclic GFR-binding peptide
  MOD_RES (32)..(33): Xaa is C or S

SEQ ID NO: 71475 - protein, 37 aa, Artificial Sequence
  Cyclic GFR-binding peptide
  MOD_RES (2)..(4)..(36)..(37): Xaa is C or S
RXGXGEVVMDPYVKLVVKENEDFFLMSLSSLETPVXX

SEQ ID NO: 71476 - protein, 33 aa, Artificial Sequence
  Cyclic GFR-binding peptide
  MOD_RES (29)..(30): Xaa is C or S
VIMPYVKLLLVRGNDFFLMSLSSTKVPAXXTSP

SEQ ID NO: 71477 - protein, 28 aa, Artificial Sequence
  Cyclic GFR-binding peptide
EVVMEPYVKLVVKDYEDFFLMSLSSLET

SEQ ID NO: 71478 - protein, 26 aa, Artificial Sequence
  Cyclic GFR-binding peptide
  MOD_RES (26)..(26): Xaa is C or S
PYVKLIKPTKGIFFLISLSSLDQSVX

SEQ ID NO: 71479 - protein, 32 aa, Artificial Sequence
  Cyclic GFR-binding peptide
  MOD_RES (30)..(31): Xaa is C or S
VVMNPYVKLIVNNSSDFFLVSLSSLKTPAXXA

SEQ ID NO: 71480 - protein, 33 aa, Artificial Sequence
  Cyclic GFR-binding peptide
  MOD_RES (30)..(31): Xaa is C or S
VVMGPYVKLIIQQKDNFFLMSLSSMKTPTXXPG

SEQ ID NO: 71481 - protein, 41 aa, Artificial Sequence; identical to SEQ ID NO: 23826
  Cyclic GFR-binding peptide
  MOD_RES (1)..(3)..(35)..(36): Xaa is C or S

SEQ ID NO: 71482 - protein, 30 aa, Artificial Sequence
  Cyclic GFR-binding peptide
  MOD_RES (2)..(2): Xaa is C or S
GXRDVVMGPYVKLIIQQKDNFFLMSLSSMK

SEQ ID NO: 71483 - protein, 36 aa, Artificial Sequence; identical to SEQ ID NO: 23827
  Cyclic GFR-binding peptide
  MOD_RES (1)..(33)..(34): Xaa is C or S

SEQ ID NO: 71484 - protein, 32 aa, Artificial Sequence
  Cyclic GFR-binding peptide
  MOD_RES (2)..(4): Xaa is C or S
RXGXESVAMGPYVKLYTVVGKDFFLISLSSLK

SEQ ID NO: 71485 - protein, 38 aa, Artificial Sequence
  Cyclic GFR-binding peptide
  MOD_RES (32)..(33): Xaa is C or S
AVSMGEPYVKLTPVGMDDFFLVSLSSLKTPVXXAKGVK

SEQ ID NO: 71486 - protein, 41 aa, Artificial Sequence; identical to SEQ ID NO: 23829
  Cyclic GFR-binding peptide
  MOD_RES (2)..(4)..(35)..(36): Xaa is C or S

SEQ ID NO: 71487 - protein, 38 aa, Artificial Sequence; identical to SEQ ID NO: 23830
  Cyclic GFR-binding peptide
  MOD_RES (2)..(33)..(34): Xaa is C or S

SEQ ID NO: 71488 - protein, 30 aa, Artificial Sequence
  Cyclic GFR-binding peptide
EAVSMGEPYVKLTPVGMDDFFLVSLSSLKT

SEQ ID NO: 71489 - protein, 35 aa, Artificial Sequence; identical to SEQ ID NO: 23833
  Cyclic GFR-binding peptide
  MOD_RES (31)..(32): Xaa is C or S

SEQ ID NO: 71490 - protein, 30 aa, Artificial Sequence
  Cyclic GFR-binding peptide
  MOD_RES (2)..(2): Xaa is C or S
GXEEVIMPYVKLLLVRGNDFFLMSLSSTKV

SEQ ID NO: 71491 - protein, 28 aa, Artificial Sequence
  Cyclic GFR-binding peptide
  MOD_RES (2)..(2): Xaa is C or S
GXGEVVMEPYVKLVVKDYEDFFLMSLSS

SEQ ID NO: 71492 - protein, 33 aa, Artificial Sequence
  Cyclic GFR-binding peptide
  MOD_RES (28)..(29): Xaa is C or S
MNPYVKLIVNSSDDFFLVSLSSLKTPAXXPKPV

SEQ ID NO: 71493 - protein, 30 aa, Artificial Sequence
  Cyclic GFR-binding peptide
  MOD_RES (29)..(29): Xaa is C or S
FPYVKLHQGQHPKIRFFLMSLSSEETPVXE

SEQ ID NO: 71494 - protein, 23 aa, Artificial Sequence
  Cyclic GFR-binding peptide
VMDPYVKLVVKENEDFFLMSLSS

SEQ ID NO: 71495 - protein, 33 aa, Artificial Sequence
  Cyclic GFR-binding peptide
  MOD_RES (1)..(1): Xaa is C or S
XELHEELRPYVKLLKPKKRVYEFFLVSLSSHHV

SEQ ID NO: 71496 - protein, 36 aa, Artificial Sequence; identical to SEQ ID NO: 23835
  Cyclic GFR-binding peptide
  MOD_RES (33)..(33): Xaa is C or S

SEQ ID NO: 71497 - protein, 34 aa, Artificial Sequence; identical to SEQ ID NO: 23837
  Cyclic GFR-binding peptide
  MOD_RES (1)..(33)..(34): Xaa is C or S

SEQ ID NO: 71498 - protein, 25 aa, Artificial Sequence
  Cyclic GFR-binding peptide
IMPYVKLLLVRGNDFFLMSLSSTKV

SEQ ID NO: 71499 - protein, 35 aa, Artificial Sequence; identical to SEQ ID NO: 23838
  Cyclic GFR-binding peptide
  MOD_RES (1)..(33)..(34): Xaa is C or S

SEQ ID NO: 71500 - protein, 37 aa, Artificial Sequence; identical to SEQ ID NO: 23840
  Cyclic GFR-binding peptide
  MOD_RES (1)..(3): Xaa is C or S

SEQ ID NO: 71501 - protein, 25 aa, Artificial Sequence
  Cyclic GFR-binding peptide
PYVKLVVKDYEDFFLMSLSSLETPV

SEQ ID NO: 71502 - protein, 27 aa, Artificial Sequence
  Cyclic GFR-binding peptide
RVVMNPYVKLIVNSSDDFFLVSLSSLQ

SEQ ID NO: 71503 - protein, 35 aa, Artificial Sequence
  Cyclic GFR-binding peptide
  MOD_RES (31)..(31): Xaa is C or S
QLFPYVKLHQGQHPKIRFFLMSLSSEETPVXELGE

SEQ ID NO: 71504 - protein, 34 aa, Artificial Sequence
  Cyclic GFR-binding peptide
  MOD_RES (30)..(31): Xaa is C or S
VVMEPYVKLVVKDYEDFFLMSLSSLETPVXXAKP

SEQ ID NO: 71505 - protein, 26 aa, Artificial Sequence
  Cyclic GFR-binding peptide
VMDPYVKLVVNNAADFFLISLSSLRA

SEQ ID NO: 71506 - protein, 40 aa, Artificial Sequence; identical to SEQ ID NO: 23844
  Cyclic GFR-binding peptide
  MOD_RES (1)..(3)..(35)..(36): Xaa is C or S

SEQ ID NO: 71507 - protein, 25 aa, Artificial Sequence
  Cyclic GFR-binding peptide
MEPYVKLVVKDYEDFFLMSLSSLET

SEQ ID NO: 71508 - protein, 28 aa, Artificial Sequence
  Cyclic GFR-binding peptide
  MOD_RES (2)..(2): Xaa is C or S
GXSRVVMNPYVKLIVNSSDDFFLVSLSS

SEQ ID NO: 71509 - protein, 25 aa, Artificial Sequence
  Cyclic GFR-binding peptide
RVVMNPYVKLIVNSSDDFFLVSLSS

SEQ ID NO: 71510 - protein, 27 aa, Artificial Sequence
  Cyclic GFR-binding peptide
IMPYVKLIKPTKGIFFLISLSSLDQSV

SEQ ID NO: 71511 - protein, 29 aa, Artificial Sequence
  Cyclic GFR-binding peptide
  MOD_RES (2)..(2): Xaa is C or S
GXSRVVMNPYVKLIVNSSDDFFLVSLSSL

SEQ ID NO: 71512 - protein, 30 aa, Artificial Sequence
  Cyclic GFR-binding peptide
  MOD_RES (2)..(4): Xaa is C or S
RXGXESVAMGPYVKLYTVVGKDFFLISLSS

SEQ ID NO: 71513 - protein, 36 aa, Artificial Sequence; identical to SEQ ID NO: 23847
  Cyclic GFR-binding peptide
  MOD_RES (1)..(3)..(35): Xaa is C or S

SEQ ID NO: 71514 - protein, 21 aa, Artificial Sequence
  Cyclic GFR-binding peptide
NPYVKLIVNSSDDFFLVSLSS

SEQ ID NO: 71515 - protein, 34 aa, Artificial Sequence; identical to SEQ ID NO: 23848
  Cyclic GFR-binding peptide
  MOD_RES (2)..(4): Xaa is C or S

SEQ ID NO: 71516 - protein, 36 aa, Artificial Sequence; identical to SEQ ID NO: 23849
  Cyclic GFR-binding peptide
  MOD_RES (1)..(33)..(34): Xaa is C or S

SEQ ID NO: 71517 - protein, 33 aa, Artificial Sequence
  Cyclic GFR-binding peptide
  MOD_RES (2)..(4): Xaa is C or S
SXKXSRVIMPYVKLVKPKRGVFFLISLSSLAQP

SEQ ID NO: 71518 - protein, 35 aa, Artificial Sequence; identical to SEQ ID NO: 23851
  Cyclic GFR-binding peptide
  MOD_RES (32)..(33): Xaa is C or S

SEQ ID NO: 71519 - protein, 29 aa, Artificial Sequence
  Cyclic GFR-binding peptide
  MOD_RES (1)..(1): Xaa is C or S
XESVAMGPYVKLYTVVGKDFFLISLSSLK

SEQ ID NO: 71520 - protein, 36 aa, Artificial Sequence; identical to SEQ ID NO: 23853
  Cyclic GFR-binding peptide
  MOD_RES (1)..(3)..(34)..(35): Xaa is C or S

SEQ ID NO: 71521 - protein, 27 aa, Artificial Sequence
  Cyclic GFR-binding peptide
SRVIMPYVKLVKPKRGVFFLISLSSLA

SEQ ID NO: 71522 - protein, 42 aa, Artificial Sequence; identical to SEQ ID NO: 23854
  Cyclic GFR-binding peptide
  MOD_RES (2)..(4)..(36): Xaa is C or S

SEQ ID NO: 71523 - protein, 27 aa, Artificial Sequence
  Cyclic GFR-binding peptide
GEPYVKLTPVGMDDFFLVSLSSLKTPV

SEQ ID NO: 71524 - protein, 34 aa, Artificial Sequence
  Cyclic GFR-binding peptide
  MOD_RES (28)..(29): Xaa is C or S
MNPYVKLIVNSSDDFFLVSLSSLQTPAXXPKPVT

SEQ ID NO: 71525 - protein, 38 aa, Artificial Sequence; identical to SEQ ID NO: 23856
  Cyclic GFR-binding peptide
  MOD_RES (1)..(33)..(34): Xaa is C or S

SEQ ID NO: 71526 - protein, 35 aa, Artificial Sequence; identical to SEQ ID NO: 23857
  Cyclic GFR-binding peptide

SEQ ID NO: 71527 - protein, 35 aa, Artificial Sequence; identical to SEQ ID NO: 23858
  Cyclic GFR-binding peptide
  MOD_RES (31)..(32): Xaa is C or S

SEQ ID NO: 71528 - protein, 31 aa, Artificial Sequence
  Cyclic GFR-binding peptide
  MOD_RES (2)..(2): Xaa is C or S
GXGEVVMEPYVKLVVKDYEDFFLMSLSSLET

SEQ ID NO: 71529 - protein, 21 aa, Artificial Sequence
  Cyclic GFR-binding peptide
PYVKLYTVVGKDFFLISLSSL

SEQ ID NO: 71530 - protein, 26 aa, Artificial Sequence
  Cyclic GFR-binding peptide
EVVMDPYVKLVVKENEDFFLMSLSSL

SEQ ID NO: 71531 - protein, 32 aa, Artificial Sequence
  Cyclic GFR-binding peptide
  MOD_RES (27)..(28): Xaa is C or S
DPYVKLVVKENEDFFLMSLSSLETPVXXAKPI

SEQ ID NO: 71532 - protein, 29 aa, Artificial Sequence
  Cyclic GFR-binding peptide
  MOD_RES (1)..(3): Xaa is C or S
XKXSRVIMPYVKLVKPKRGVFFLISLSSL

SEQ ID NO: 71533 - protein, 36 aa, Artificial Sequence; identical to SEQ ID NO: 23861
  Cyclic GFR-binding peptide
  MOD_RES (36)..(36): Xaa is C or S

SEQ ID NO: 71534 - protein, 26 aa, Artificial Sequence
  Cyclic GFR-binding peptide
  MOD_RES (26)..(26): Xaa is C or S
PYVKLVKPTRGVFFLISLSSLDQPVX

SEQ ID NO: 71535 - protein, 27 aa, Artificial Sequence
  Cyclic GFR-binding peptide
VVMNPYVKLIVNNSSDFFLVSLSSLKT

SEQ ID NO: 71536 - protein, 25 aa, Artificial Sequence
  Cyclic GFR-binding peptide
VMPYVKLVKPTRGVFFLISLSSLDQ

SEQ ID NO: 71537 - protein, 38 aa, Artificial Sequence; identical to SEQ ID NO: 23863
  Cyclic GFR-binding peptide
  MOD_RES (2)..(4)..(36)..(37): Xaa is C or S

SEQ ID NO: 71538 - protein, 26 aa, Artificial Sequence
  Cyclic GFR-binding peptide
GEPYVKLTPVGMDDFFLVSLSSLKTP

SEQ ID NO: 71539 - protein, 22 aa, Artificial Sequence
  Cyclic GFR-binding peptide
PYVKLVKPTRGVFFLISLSSLD

SEQ ID NO: 71540 - protein, 32 aa, Artificial Sequence
  Cyclic GFR-binding peptide
  MOD_RES (1)..(3): Xaa is C or S
XGXEAVSMGEPYVKLTPVGMDDFFLVSLSSLK

SEQ ID NO: 71541 - protein, 42 aa, Artificial Sequence; identical to SEQ ID NO: 23866
  Cyclic GFR-binding peptide
  MOD_RES (2)..(4)..(37)..(38): Xaa is C or S

SEQ ID NO: 71542 - protein, 39 aa, Artificial Sequence
  Cyclic GFR-binding peptide
  MOD_RES (2)..(4)..(36)..(37): Xaa is C or S
RXGXGEVVMDPYVKLVVKENEDFFLMSLSSLETPVXXAK

SEQ ID NO: 71543 - protein, 25 aa, Artificial Sequence
  Cyclic GFR-binding peptide
MGPYVKLYTVVGKDFFLISLSSLKT

SEQ ID NO: 71544 - protein, 21 aa, Artificial Sequence
  Cyclic GFR-binding peptide
GPYVKLIIQQKDNFFLMSLSS

SEQ ID NO: 71545 - protein, 22 aa, Artificial Sequence
  Cyclic GFR-binding peptide
PYVKLVVKENEDFFLMSLSSLE

SEQ ID NO: 71546 - protein, 27 aa, Artificial Sequence
  Cyclic GFR-binding peptide
AEVVMDPYVKLVVNNAADFFLISLSSL

SEQ ID NO: 71547 - protein, 30 aa, Artificial Sequence
  Cyclic GFR-binding peptide
  MOD_RES (29)..(29): Xaa is C or S
VMNPYVKLIVNSSDDFFLVSLSSLKTPAXT

SEQ ID NO: 71548 - protein, 34 aa, Artificial Sequence; identical to SEQ ID NO: 23868
  Cyclic GFR-binding peptide
  MOD_RES (31)..(32): Xaa is C or S

SEQ ID NO: 71549 - protein, 34 aa, Artificial Sequence
  Cyclic GFR-binding peptide
  MOD_RES (28)..(28): Xaa is C or S
PYVKLHQGQHPKIRFFLMSLSSEETPVXELGEDN

SEQ ID NO: 71550 - protein, 36 aa, Artificial Sequence
  Cyclic GFR-binding peptide
  MOD_RES (1)..(3)..(35)..(36): Xaa is C or S
XGXGEVVMDPYVKLVVKENEDFFLMSLSSLETPVXX

SEQ ID NO: 71551 - protein, 33 aa, Artificial Sequence
  Cyclic GFR-binding peptide
  MOD_RES (32)..(32): Xaa is C or S
LRPYVKLLKPKKRVYEFFLVSLSSHHVRSPQXK

SEQ ID NO: 71552 - protein, 32 aa, Artificial Sequence
  Cyclic GFR-binding peptide
  MOD_RES (28)..(29): Xaa is C or S
IMPYVKLVKPKRGVFFLISLSSLAQPVXXPAA

SEQ ID NO: 71553 - protein, 29 aa, Artificial Sequence
  Cyclic GFR-binding peptide
  MOD_RES (27)..(28): Xaa is C or S
DPYVKLVVNNAADFFLISLSSLRAPVXXS

SEQ ID NO: 71554 - protein, 35 aa, Artificial Sequence; identical to SEQ ID NO: 23869
  Cyclic GFR-binding peptide
  MOD_RES (2)..(4)..(35): Xaa is C or S

SEQ ID NO: 71555 - protein, 22 aa, Artificial Sequence
  Cyclic GFR-binding peptide
PYVKLVVKDYEDFFLMSLSSLE

SEQ ID NO: 71556 - protein, 31 aa, Artificial Sequence
  Cyclic GFR-binding peptide
  MOD_RES (2)..(2): Xaa is C or S
KXSKVVMPYVKLVKPTRGVFFLISLSSLDQP

SEQ ID NO: 71557 - protein, 28 aa, Artificial Sequence
  Cyclic GFR-binding peptide
HQLFPYVKLHQGQHPKIRFFLMSLSSEE

SEQ ID NO: 71558 - protein, 35 aa, Artificial Sequence
  Cyclic GFR-binding peptide
  MOD_RES (30)..(31): Xaa is C or S
VVMDPYVKLVVNNAADFFLISLSSLRAPVXXSAPA

SEQ ID NO: 71559 - protein, 39 aa, Artificial Sequence; identical to SEQ ID NO: 23872
  Cyclic GFR-binding peptide
  MOD_RES (2)..(4)..(36)..(37): Xaa is C or S

SEQ ID NO: 71560 - protein, 30 aa, Artificial Sequence
  Cyclic GFR-binding peptide
  MOD_RES (1)..(1): Xaa is C or S
XKNHQLFPYVKLHQGQHPKIRFFLMSLSSE

SEQ ID NO: 71561 - protein, 36 aa, Artificial Sequence
  Cyclic GFR-binding peptide
  MOD_RES (30)..(31): Xaa is C or S
VVMEPYVKLVVKDYEDFFLMSLSSLETPVXXAKPIS

SEQ ID NO: 71562 - protein, 26 aa, Artificial Sequence
  Cyclic GFR-binding peptide
NPYVKLIVNSSDDFFLVSLSSLQTPA

SEQ ID NO: 71563 - protein, 30 aa, Artificial Sequence
  Cyclic GFR-binding peptide
  MOD_RES (1)..(3): Xaa is C or S
XKXSKVVMPYVKLVKPTRGVFFLISLSSLD

SEQ ID NO: 71564 - protein, 35 aa, Artificial Sequence; identical to SEQ ID NO: 23873
  Cyclic GFR-binding peptide
  MOD_RES (31)..(32): Xaa is C or S

SEQ ID NO: 71565 - protein, 39 aa, Artificial Sequence; identical to SEQ ID NO: 23874
  Cyclic GFR-binding peptide
  MOD_RES (2)..(36): Xaa is C or S

SEQ ID NO: 71566 - protein, 24 aa, Artificial Sequence
  Cyclic GFR-binding peptide
PYVKLLKPKKRVYEFFLVSLSSHH

SEQ ID NO: 71567 - protein, 30 aa, Artificial Sequence
  Cyclic GFR-binding peptide
  MOD_RES (27)..(28): Xaa is C or S
EPYVKLVVKDYEDFFLMSLSSLETPVXXAK

SEQ ID NO: 71568 - protein, 25 aa, Artificial Sequence
  Cyclic GFR-binding peptide
EVVMDPYVKLVVKENEDFFLMSLSS

SEQ ID NO: 71569 - protein, 28 aa, Artificial Sequence
  Cyclic GFR-binding peptide
DVVMGPYVKLIIQQKDNFFLMSLSSMKT

SEQ ID NO: 71570 - protein, 22 aa, Artificial Sequence
  Cyclic GFR-binding peptide
MNPYVKLIVNSSDDFFLVSLSS

SEQ ID NO: 71571 - protein, 33 aa, Artificial Sequence; identical to SEQ ID NO: 23877
  Cyclic GFR-binding peptide
  MOD_RES (32)..(33): Xaa is C or S

SEQ ID NO: 71572 - protein, 36 aa, Artificial Sequence
  Cyclic GFR-binding peptide
  MOD_RES (2)..(4)..(36): Xaa is C or S
RXGXGEVVMDPYVKLVVKENEDFFLMSLSSLETPVX

SEQ ID NO: 71573 - protein, 23 aa, Artificial Sequence
  Cyclic GFR-binding peptide
PYVKLIVNNSSDFFLVSLSSLKT

SEQ ID NO: 71574 - protein, 35 aa, Artificial Sequence; identical to SEQ ID NO: 23878
  Cyclic GFR-binding peptide
  MOD_RES (2)..(34)..(35): Xaa is C or S

SEQ ID NO: 71575 - protein, 39 aa, Artificial Sequence; identical to SEQ ID NO: 23879
  Cyclic GFR-binding peptide
  MOD_RES (1)..(3)..(37): Xaa is C or S

SEQ ID NO: 71576 - protein, 39 aa, Artificial Sequence; identical to SEQ ID NO: 23881
  Cyclic GFR-binding peptide
  MOD_RES (1)..(33): Xaa is C or S

SEQ ID NO: 71577 - protein, 32 aa, Artificial Sequence
  Cyclic GFR-binding peptide
  MOD_RES (29)..(30): Xaa is C or S
VMDPYVKLVVNNAADFFLISLSSLRAPVXXSA

SEQ ID NO: 71578 - protein, 31 aa, Artificial Sequence
  Cyclic GFR-binding peptide
  MOD_RES (30)..(31): Xaa is C or S
RVIMPYVKLVKPKRGVFFLISLSSLAQPVXX

SEQ ID NO: 71579 - protein, 34 aa, Artificial Sequence
  Cyclic GFR-binding peptide
  MOD_RES (28)..(29): Xaa is C or S
VMPYVKLVKPTRGVFFLISLSSLDQPVXXPSASA

SEQ ID NO: 71580 - protein, 28 aa, Artificial Sequence
  Cyclic GFR-binding peptide
VVMDPYVKLVVNNAADFFLISLSSLRAP

SEQ ID NO: 71581 - protein, 29 aa, Artificial Sequence
  Cyclic GFR-binding peptide
  MOD_RES (29)..(29): Xaa is C or S
VMEPYVKLVVKDYEDFFLMSLSSLETPVX

SEQ ID NO: 71582 - protein, 35 aa, Artificial Sequence; identical to SEQ ID NO: 23885
  Cyclic GFR-binding peptide
  MOD_RES (2)..(4): Xaa is C or S

SEQ ID NO: 71583 - protein, 34 aa, Artificial Sequence
  Cyclic GFR-binding peptide
  MOD_RES (2)..(4): Xaa is C or S
HXGXARVVMNPYVKLIVNSSDDFFLVSLSSLQTP

SEQ ID NO: 71584 - protein, 30 aa, Artificial Sequence
  Cyclic GFR-binding peptide
  MOD_RES (1)..(3): Xaa is C or S
XGXSRVVMNPYVKLIVNSSDDFFLVSLSSL

SEQ ID NO: 71585 - protein, 40 aa, Artificial Sequence; identical to SEQ ID NO: 23889
  Cyclic GFR-binding peptide
  MOD_RES (2)..(34)..(35): Xaa is C or S

SEQ ID NO: 71586 - protein, 26 aa, Artificial Sequence
  Cyclic GFR-binding peptide
RVVMNPYVKLIVNSSDDFFLVSLSSL

SEQ ID NO: 71587 - protein, 27 aa, Artificial Sequence
  Cyclic GFR-binding peptide
SEVVMDPYVKLVVNNASDFFLISLSSL

SEQ ID NO: 71588 - protein, 37 aa, Artificial Sequence; identical to SEQ ID NO: 23892
  Cyclic GFR-binding peptide
  MOD_RES (2)..(34)..(35): Xaa is C or S

SEQ ID NO: 71589 - protein, 27 aa, Artificial Sequence
  Cyclic GFR-binding peptide
EEVIMPYVKLLLVRGNDFFLMSLSSTK

SEQ ID NO: 71590 - protein, 25 aa, Artificial Sequence
  Cyclic GFR-binding peptide
EVVMDPYVKLVVNNASDFFLISLSS

SEQ ID NO: 71591 - protein, 29 aa, Artificial Sequence
  Cyclic GFR-binding peptide
  MOD_RES (28)..(29): Xaa is C or S
MGPYVKLYTVVGKDFFLISLSSLKTPVXX

SEQ ID NO: 71592 - protein, 26 aa, Artificial Sequence
  Cyclic GFR-binding peptide
  MOD_RES (26)..(26): Xaa is C or S
PYVKLVVNNAADFFLISLSSLRAPVX

SEQ ID NO: 71593 - protein, 31 aa, Artificial Sequence
  Cyclic GFR-binding peptide
  MOD_RES (27)..(28): Xaa is C or S
MPYVKLVKPTRGVFFLISLSSLDQPVXXPSA

SEQ ID NO: 71594 - protein, 36 aa, Artificial Sequence; identical to SEQ ID NO: 23894
  Cyclic GFR-binding peptide
  MOD_RES (2)..(4)..(36): Xaa is C or S

SEQ ID NO: 71595 - protein, 32 aa, Artificial Sequence
  Cyclic GFR-binding peptide
  MOD_RES (30)..(31): Xaa is C or S
KVIMPYVKLIKPTKGIFFLISLSSLDQSVXXP

SEQ ID NO: 71596 - protein, 38 aa, Artificial Sequence
  Cyclic GFR-binding peptide
  MOD_RES (2)..(34)..(35): Xaa is C or S
GXGEVVMDPYVKLVVKENEDFFLMSLSSLETPVXXAKP

SEQ ID NO: 71597 - protein, 30 aa, Artificial Sequence
  Cyclic GFR-binding peptide
  MOD_RES (1)..(3): Xaa is C or S
XGXRDVVMGPYVKLIIQQKDNFFLMSLSSM

SEQ ID NO: 71598 - protein, 29 aa, Artificial Sequence
  Cyclic GFR-binding peptide
  MOD_RES (28)..(29): Xaa is C or S
VMPYVKLVKPTRGVFFLISLSSLDQPVXX

SEQ ID NO: 71599 - protein, 24 aa, Artificial Sequence
  Cyclic GFR-binding peptide
VMGPYVKLIIQQKDNFFLMSLSSM

SEQ ID NO: 71600 - protein, 27 aa, Artificial Sequence
  Cyclic GFR-binding peptide
MEPYVKLVVKDYEDFFLMSLSSLETPV

SEQ ID NO: 71601 - protein, 30 aa, Artificial Sequence
  Cyclic GFR-binding peptide
  MOD_RES (1)..(3): Xaa is C or S
XGXEEVIMPYVKLLLVRGNDFFLMSLSSTK

SEQ ID NO: 71602 - protein, 39 aa, Artificial Sequence; identical to SEQ ID NO: 23898
  Cyclic GFR-binding peptide
  MOD_RES (1)..(33)..(34): Xaa is C or S

SEQ ID NO: 71603 - protein, 37 aa, Artificial Sequence; identical to SEQ ID NO: 23899
  Cyclic GFR-binding peptide
  MOD_RES (1)..(33)..(34): Xaa is C or S

SEQ ID NO: 71604 - protein, 27 aa, Artificial Sequence
  Cyclic GFR-binding peptide
  MOD_RES (2)..(2): Xaa is C or S
GXEEVIMPYVKLLLVRGNDFFLMSLSS

SEQ ID NO: 71605 - protein, 30 aa, Artificial Sequence
  Cyclic GFR-binding peptide
  MOD_RES (2)..(2): Xaa is C or S
EXKNHQLFPYVKLHQGQHPKIRFFLMSLSS

SEQ ID NO: 71606 - protein, 31 aa, Artificial Sequence
  Cyclic GFR-binding peptide
  MOD_RES (1)..(1): Xaa is C or S
XESVAMGPYVKLYTVVGKDFFLISLSSLKTP

SEQ ID NO: 71607 - protein, 31 aa, Artificial Sequence
  Cyclic GFR-binding peptide
  MOD_RES (1)..(3): Xaa is C or S
XKXSRVIMPYVKLVKPKRGVFFLISLSSLAQ

SEQ ID NO: 71608 - protein, 26 aa, Artificial Sequence
  Cyclic GFR-binding peptide
IMPYVKLVKPKRGVFFLISLSSLAQP

SEQ ID NO: 71609 - protein, 36 aa, Artificial Sequence
  Cyclic GFR-binding peptide
  MOD_RES (30)..(31): Xaa is C or S
VVMNPYVKLIVNSSDDFFLVSLSSLQTPAXXPKPVT

SEQ ID NO: 71610 - protein, 32 aa, Artificial Sequence
  Cyclic GFR-binding peptide
  MOD_RES (32)..(32): Xaa is C or S
HQLFPYVKLHQGQHPKIRFFLMSLSSEETPVX

SEQ ID NO: 71611 - protein, 30 aa, Artificial Sequence
  Cyclic GFR-binding peptide
  MOD_RES (27)..(28): Xaa is C or S
NPYVKLIVNSSDDFFLVSLSSLQTPAXXPK

SEQ ID NO: 71612 - protein, 24 aa, Artificial Sequence
  Cyclic GFR-binding peptide
MDPYVKLVVNNASDFFLISLSSLR

SEQ ID NO: 71613 - protein, 37 aa, Artificial Sequence; identical to SEQ ID NO: 23904
  Cyclic GFR-binding peptide
  MOD_RES (1)..(3)..(35)..(36): Xaa is C or S

SEQ ID NO: 71614 - protein, 29 aa, Artificial Sequence
  Cyclic GFR-binding peptide
HQLFPYVKLHQGQHPKIRFFLMSLSSEET

SEQ ID NO: 71615 - protein, 26 aa, Artificial Sequence
  Cyclic GFR-binding peptide
VVMEPYVKLVVKDYEDFFLMSLSSLE

SEQ ID NO: 71616 - protein, 29 aa, Artificial Sequence
  Cyclic GFR-binding peptide
AKVVMNPYVKLIVNNSSDFFLVSLSSLKT

SEQ ID NO: 71617 - protein, 32 aa, Artificial Sequence
  Cyclic GFR-binding peptide
  MOD_RES (2)..(4): Xaa is C or S
HXGXSRVVMNPYVKLIVNSSDDFFLVSLSSLK

SEQ ID NO: 71618 - protein, 37 aa, Artificial Sequence; identical to SEQ ID NO: 23906
  Cyclic GFR-binding peptide
  MOD_RES (34)..(34): Xaa is C or S

SEQ ID NO: 71619 - protein, 39 aa, Artificial Sequence; identical to SEQ ID NO: 23907
  Cyclic GFR-binding peptide
  MOD_RES (2)..(34)..(35): Xaa is C or S

SEQ ID NO: 71620 - protein, 32 aa, Artificial Sequence
  Cyclic GFR-binding peptide
EELRPYVKLLKPKKRVYEFFLVSLSSHHVRSP

SEQ ID NO: 71621 - protein, 38 aa, Artificial Sequence; identical to SEQ ID NO: 23910
  Cyclic GFR-binding peptide
  MOD_RES (1)..(3)..(34)..(35): Xaa is C or S

SEQ ID NO: 71622 - protein, 34 aa, Artificial Sequence
  Cyclic GFR-binding peptide
  MOD_RES (2)..(4): Xaa is C or S
RXGXEAVSMGEPYVKLTPVGMDDFFLVSLSSLKT

SEQ ID NO: 71623 - protein, 30 aa, Artificial Sequence
  Cyclic GFR-binding peptide
  MOD_RES (27)..(28): Xaa is C or S
MPYVKLLLVRGNDFFLMSLSSTKVPAXXTS

SEQ ID NO: 71624 - protein, 37 aa, Artificial Sequence; identical to SEQ ID NO: 23914
  Cyclic GFR-binding peptide
  MOD_RES (31)..(32): Xaa is C or S

SEQ ID NO: 71625 - protein, 33 aa, Artificial Sequence
  Cyclic GFR-binding peptide
  MOD_RES (2)..(4): Xaa is C or S
HXGXARVVMNPYVKLIVNSSDDFFLVSLSSLQT

SEQ ID NO: 71626 - protein, 35 aa, Artificial Sequence
  Cyclic GFR-binding peptide
  MOD_RES (31)..(32): Xaa is C or S
VSMGEPYVKLTPVGMDDFFLVSLSSLKTPVXXAKG

SEQ ID NO: 71627 - protein, 33 aa, Artificial Sequence
  Cyclic GFR-binding peptide
  MOD_RES (2)..(2): Xaa is C or S
AXELHEELRPYVKLLKPKKRVYEFFLVSLSSHH

SEQ ID NO: 71628 - protein, 30 aa, Artificial Sequence; identical to SEQ ID NO: 1817
  Cyclic GFR-binding peptide

SEQ ID NO: 71629 - protein, 28 aa, Artificial Sequence
  Cyclic GFR-binding peptide
  MOD_RES (2)..(2): Xaa is C or S
GXRDVVMGPYVKLIIQQKDNFFLMSLSS

SEQ ID NO: 71630 - protein, 37 aa, Artificial Sequence; identical to SEQ ID NO: 23917
  Cyclic GFR-binding peptide
  MOD_RES (1)..(3)..(35)..(36): Xaa is C or S

SEQ ID NO: 71631 - protein, 37 aa, Artificial Sequence; identical to SEQ ID NO: 23918
  Cyclic GFR-binding peptide
  MOD_RES (1)..(33)..(34): Xaa is C or S

SEQ ID NO: 71632 - protein, 33 aa, Artificial Sequence; identical to SEQ ID NO: 23919
  Cyclic GFR-binding peptide
  MOD_RES (1)..(3): Xaa is C or S

SEQ ID NO: 71633 - protein, 35 aa, Artificial Sequence; identical to SEQ ID NO: 23920
  Cyclic GFR-binding peptide
  MOD_RES (2)..(2): Xaa is C or S

SEQ ID NO: 71634 - protein, 35 aa, Artificial Sequence; identical to SEQ ID NO: 23921
  Cyclic GFR-binding peptide
  MOD_RES (2)..(33)..(34): Xaa is C or S

SEQ ID NO: 71635 - protein, 28 aa, Artificial Sequence
  Cyclic GFR-binding peptide
  MOD_RES (1)..(1): Xaa is C or S
XARVVMNPYVKLIVNSSDDFFLVSLSSL

SEQ ID NO: 71636 - protein, 33 aa, Artificial Sequence; identical to SEQ ID NO: 23923
  Cyclic GFR-binding peptide
  MOD_RES (2)..(2): Xaa is C or S

SEQ ID NO: 71637 - protein, 36 aa, Artificial Sequence; identical to SEQ ID NO: 23924
  Cyclic GFR-binding peptide
  MOD_RES (31)..(32): Xaa is C or S

SEQ ID NO: 71638 - protein, 33 aa, Artificial Sequence
  Cyclic GFR-binding peptide
  MOD_RES (30)..(31): Xaa is C or S
VAMGPYVKLYTVVGKDFFLISLSSLKTPVXXAK

SEQ ID NO: 71639 - protein, 41 aa, Artificial Sequence; identical to SEQ ID NO: 23925
  Cyclic GFR-binding peptide
  MOD_RES (2)..(4)..(36)..(37): Xaa is C or S

SEQ ID NO: 71640 - protein, 31 aa, Artificial Sequence
  Cyclic GFR-binding peptide
  MOD_RES (1)..(1): Xaa is C or S
XRDVVMGPYVKLIIQQKDNFFLMSLSSMKTP

SEQ ID NO: 71641 - protein, 37 aa, Artificial Sequence; identical to SEQ ID NO: 23926
  Cyclic GFR-binding peptide
  MOD_RES (2)..(2): Xaa is C or S

SEQ ID NO: 71642 - protein, 30 aa, Artificial Sequence
  Cyclic GFR-binding peptide
  MOD_RES (2)..(4): Xaa is C or S
RXGXGEVVMEPYVKLVVKDYEDFFLMSLSS

SEQ ID NO: 71643 - protein, 23 aa, Artificial Sequence
  Cyclic GFR-binding peptide
DPYVKLVVNNAADFFLISLSSLR

SEQ ID NO: 71644 - protein, 30 aa, Artificial Sequence
  Cyclic GFR-binding peptide
  MOD_RES (26)..(27): Xaa is C or S
PYVKLVKPTRGVFFLISLSSLDQPVXXPSA

SEQ ID NO: 71645 - protein, 22 aa, Artificial Sequence
  Cyclic GFR-binding peptide
IMPYVKLVKPKRGVFFLISLSS

SEQ ID NO: 71646 - protein, 28 aa, Artificial Sequence
  Cyclic GFR-binding peptide
  MOD_RES (28)..(28): Xaa is C or S
IMPYVKLIKPTKGIFFLISLSSLDQSVX

SEQ ID NO: 71647 - protein, 34 aa, Artificial Sequence
  Cyclic GFR-binding peptide
  MOD_RES (30)..(31): Xaa is C or S
KVIMPYVKLIKPTKGIFFLISLSSLDQSVXXPSA

SEQ ID NO: 71648 - protein, 35 aa, Artificial Sequence; identical to SEQ ID NO: 23928
  Cyclic GFR-binding peptide
  MOD_RES (2)..(34)..(35): Xaa is C or S

SEQ ID NO: 71649 - protein, 31 aa, Artificial Sequence
  Cyclic GFR-binding peptide
  MOD_RES (28)..(29): Xaa is C or S
MDPYVKLVVKENEDFFLMSLSSLETPVXXAK

SEQ ID NO: 71650 - protein, 38 aa, Artificial Sequence; identical to SEQ ID NO: 23931
  Cyclic GFR-binding peptide
  MOD_RES (1)..(3)..(35)..(36): Xaa is C or S

SEQ ID NO: 71651 - protein, 36 aa, Artificial Sequence; identical to SEQ ID NO: 23932
  Cyclic GFR-binding peptide
  MOD_RES (31)..(32): Xaa is C or S

SEQ ID NO: 71652 - protein, 29 aa, Artificial Sequence
  Cyclic GFR-binding peptide
  MOD_RES (1)..(1): Xaa is C or S
XAEVVMDPYVKLVVNNAADFFLISLSSLR

SEQ ID NO: 71653 - protein, 31 aa, Artificial Sequence
  Cyclic GFR-binding peptide
  MOD_RES (2)..(2): Xaa is C or S
GXSRVVMNPYVKLIVNSSDDFFLVSLSSLKT

SEQ ID NO: 71654 - protein, 29 aa, Artificial Sequence
  Cyclic GFR-binding peptide
  MOD_RES (27)..(28): Xaa is C or S
GPYVKLIIQQKDNFFLMSLSSMKTPTXXP

SEQ ID NO: 71655 - protein, 33 aa, Artificial Sequence; identical to SEQ ID NO: 23933
  Cyclic GFR-binding peptide
  MOD_RES (32)..(33): Xaa is C or S

SEQ ID NO: 71656 - protein, 34 aa, Artificial Sequence
  Cyclic GFR-binding peptide
  MOD_RES (2)..(2): Xaa is C or S
AXELHEELRPYVKLLKPKKRVYEFFLVSLSSHHV

SEQ ID NO: 71657 - protein, 31 aa, Artificial Sequence
  Cyclic GFR-binding peptide
  MOD_RES (2)..(4): Xaa is C or S
HXGXAKVVMNPYVKLIVNNSSDFFLVSLSSL

SEQ ID NO: 71658 - protein, 39 aa, Artificial Sequence; identical to SEQ ID NO: 23934
  Cyclic GFR-binding peptide
  MOD_RES (1)..(34)..(35): Xaa is C or S

SEQ ID NO: 71659 - protein, 43 aa, Artificial Sequence; identical to SEQ ID NO: 23935
  Cyclic GFR-binding peptide
  MOD_RES (1)..(3)..(40): Xaa is C or S

SEQ ID NO: 71660 - protein, 37 aa, Artificial Sequence; identical to SEQ ID NO: 23936
  Cyclic GFR-binding peptide
  MOD_RES (1)..(32)..(33): Xaa is C or S

SEQ ID NO: 71661 - protein, 30 aa, Artificial Sequence
  Cyclic GFR-binding peptide
ELRPYVKLLKPKKRVYEFFLVSLSSHHVRS

SEQ ID NO: 71662 - protein, 33 aa, Artificial Sequence
  Cyclic GFR-binding peptide
  MOD_RES (32)..(33): Xaa is C or S
GEVVMDPYVKLVVKENEDFFLMSLSSLETPVXX

SEQ ID NO: 71663 - protein, 21 aa, Artificial Sequence
  Cyclic GFR-binding peptide
NPYVKLIVNNSSDFFLVSLSS

SEQ ID NO: 71664 - protein, 20 aa, Artificial Sequence
  Cyclic GFR-binding peptide
PYVKLLLVRGNDFFLMSLSS

SEQ ID NO: 71665 - protein, 27 aa, Artificial Sequence
  Cyclic GFR-binding peptide
EVVMDPYVKLVVKENEDFFLMSLSSLE

SEQ ID NO: 71666 - protein, 36 aa, Artificial Sequence; identical to SEQ ID NO: 23940
  Cyclic GFR-binding peptide
  MOD_RES (32)..(33): Xaa is C or S

SEQ ID NO: 71667 - protein, 35 aa, Artificial Sequence
  Cyclic GFR-binding peptide
  MOD_RES (29)..(30): Xaa is C or S
VMNPYVKLIVNSSDDFFLVSLSSLQTPAXXPKPVT

SEQ ID NO: 71668 - protein, 23 aa, Artificial Sequence
  Cyclic GFR-binding peptide
NPYVKLIVNSSDDFFLVSLSSLK

SEQ ID NO: 71669 - protein, 34 aa, Artificial Sequence; identical to SEQ ID NO: 23941
  Cyclic GFR-binding peptide
  MOD_RES (1)..(3): Xaa is C or S

SEQ ID NO: 71670 - protein, 28 aa, Artificial Sequence
  Cyclic GFR-binding peptide
VMNPYVKLIVNSSDDFFLVSLSSLKTPA

SEQ ID NO: 71671 - protein, 34 aa, Artificial Sequence; identical to SEQ ID NO: 23943
  Cyclic GFR-binding peptide
  MOD_RES (1)..(3)..(34): Xaa is C or S

SEQ ID NO: 71672 - protein, 39 aa, Artificial Sequence; identical to SEQ ID NO: 23945
  Cyclic GFR-binding peptide
  MOD_RES (2)..(4)..(35)..(36): Xaa is C or S

SEQ ID NO: 71673 - protein, 40 aa, Artificial Sequence; identical to SEQ ID NO: 23946
  Cyclic GFR-binding peptide
  MOD_RES (1)..(35): Xaa is C or S

SEQ ID NO: 71674 - protein, 32 aa, Artificial Sequence
  Cyclic GFR-binding peptide
  MOD_RES (28)..(29): Xaa is C or S
VMPYVKLVKPTRGVFFLISLSSLDQPVXXPSA

SEQ ID NO: 71675 - protein, 36 aa, Artificial Sequence; identical to SEQ ID NO: 23947
  Cyclic GFR-binding peptide
  MOD_RES (2)..(34)..(35): Xaa is C or S

SEQ ID NO: 71676 - protein, 27 aa, Artificial Sequence
  Cyclic GFR-binding peptide
VVMDPYVKLVVNNAADFFLISLSSLRA

SEQ ID NO: 71677 - protein, 41 aa, Artificial Sequence; identical to SEQ ID NO: 23948
  Cyclic GFR-binding peptide
  MOD_RES (1)..(3)..(36)..(37): Xaa is C or S

SEQ ID NO: 71678 - protein, 34 aa, Artificial Sequence; identical to SEQ ID NO: 23949
  Cyclic GFR-binding peptide
  MOD_RES (1)..(3)..(34): Xaa is C or S

SEQ ID NO: 71679 - protein, 29 aa, Artificial Sequence
  Cyclic GFR-binding peptide
  MOD_RES (1)..(3): Xaa is C or S
XGXESVAMGPYVKLYTVVGKDFFLISLSS

SEQ ID NO: 71680 - protein, 42 aa, Artificial Sequence; identical to SEQ ID NO: 23950
  Cyclic GFR-binding peptide
  MOD_RES (2)..(36): Xaa is C or S

SEQ ID NO: 71681 - protein, 29 aa, Artificial Sequence
  Cyclic GFR-binding peptide
  MOD_RES (27)..(28): Xaa is C or S
MPYVKLVKPKRGVFFLISLSSLAQPVXXP

SEQ ID NO: 71682 - protein, 35 aa, Artificial Sequence
  Cyclic GFR-binding peptide
  MOD_RES (30)..(30): Xaa is C or S
LFPYVKLHQGQHPKIRFFLMSLSSEETPVXELGED

SEQ ID NO: 71683 - protein, 32 aa, Artificial Sequence
  Cyclic GFR-binding peptide
  MOD_RES (29)..(30): Xaa is C or S
VMEPYVKLVVKDYEDFFLMSLSSLETPVXXAK

SEQ ID NO: 71684 - protein, 25 aa, Artificial Sequence
  Cyclic GFR-binding peptide
RPYVKLLKPKKRVYEFFLVSLSSHH

SEQ ID NO: 71685 - protein, 31 aa, Artificial Sequence
  Cyclic GFR-binding peptide
  MOD_RES (1)..(1): Xaa is C or S
XSEVVMDPYVKLVVNNASDFFLISLSSLRTP

SEQ ID NO: 71686 - protein, 34 aa, Artificial Sequence; identical to SEQ ID NO: 23955
  Cyclic GFR-binding peptide
  MOD_RES (1)..(3): Xaa is C or S

SEQ ID NO: 71687 - protein, 39 aa, Artificial Sequence; identical to SEQ ID NO: 23957
  Cyclic GFR-binding peptide
  MOD_RES (1)..(33)..(34): Xaa is C or S

SEQ ID NO: 71688 - protein, 26 aa, Artificial Sequence
  Cyclic GFR-binding peptide
MNPYVKLIVNSSDDFFLVSLSSLQTP

SEQ ID NO: 71689 - protein, 35 aa, Artificial Sequence; identical to SEQ ID NO: 23958
  Cyclic GFR-binding peptide
  MOD_RES (2)..(34)..(35): Xaa is C or S

SEQ ID NO: 71690 - protein, 30 aa, Artificial Sequence
  Cyclic GFR-binding peptide
  MOD_RES (2)..(4): Xaa is C or S
RXGXGEVVMDPYVKLVVKENEDFFLMSLSS

SEQ ID NO: 71691 - protein, 40 aa, Artificial Sequence; identical to SEQ ID NO: 23965
  Cyclic GFR-binding peptide
  MOD_RES (2)..(4)..(35)..(36): Xaa is C or S

SEQ ID NO: 71692 - protein, 28 aa, Artificial Sequence
  Cyclic GFR-binding peptide
AKVVMNPYVKLIVNNSSDFFLVSLSSLK

SEQ ID NO: 71693 - protein, 24 aa, Artificial Sequence
  Cyclic GFR-binding peptide
PYVKLIIQQKDNFFLMSLSSMKTP

SEQ ID NO: 71694 - protein, 29 aa, Artificial Sequence
  Cyclic GFR-binding peptide
VSMGEPYVKLTPVGMDDFFLVSLSSLKTP

SEQ ID NO: 71695 - protein, 22 aa, Artificial Sequence
  Cyclic GFR-binding peptide
DPYVKLVVNNASDFFLISLSSL

SEQ ID NO: 71696 - protein, 30 aa, Artificial Sequence
  Cyclic GFR-binding peptide
  MOD_RES (28)..(29): Xaa is C or S
MNPYVKLIVNNSSDFFLVSLSSLKTPAXXA

SEQ ID NO: 71697 - protein, 40 aa, Artificial Sequence; identical to SEQ ID NO: 23971
  Cyclic GFR-binding peptide
  MOD_RES (2)..(4)..(35)..(36): Xaa is C or S

SEQ ID NO: 71698 - protein, 26 aa, Artificial Sequence
  Cyclic GFR-binding peptide
ESVAMGPYVKLYTVVGKDFFLISLSS

SEQ ID NO: 71699 - protein, 33 aa, Artificial Sequence
  Cyclic GFR-binding peptide
  MOD_RES (27)..(28): Xaa is C or S
MPYVKLVKPKRGVFFLISLSSLAQPVXXPAASA

SEQ ID NO: 71700 - protein, 33 aa, Artificial Sequence; identical to SEQ ID NO: 23973
  Cyclic GFR-binding peptide
  MOD_RES (2)..(2): Xaa is C or S

SEQ ID NO: 71701 - protein, 36 aa, Artificial Sequence; identical to SEQ ID NO: 23974
  Cyclic GFR-binding peptide
  MOD_RES (1)..(3)..(34)..(35): Xaa is C or S

SEQ ID NO: 71702 - protein, 28 aa, Artificial Sequence
  Cyclic GFR-binding peptide
  MOD_RES (1)..(1): Xaa is C or S
XAEVVMDPYVKLVVNNAADFFLISLSSL

SEQ ID NO: 71703 - protein, 31 aa, Artificial Sequence; identical to SEQ ID NO: 23975
  Cyclic GFR-binding peptide

SEQ ID NO: 71704 - protein, 34 aa, Artificial Sequence
  Cyclic GFR-binding peptide
  MOD_RES (30)..(31): Xaa is C or S
VVMNPYVKLIVNSSDDFFLVSLSSLKTPAXXPKP

SEQ ID NO: 71705 - protein, 34 aa, Artificial Sequence; identical to SEQ ID NO: 23976
  Cyclic GFR-binding peptide
  MOD_RES (2)..(33)..(34): Xaa is C or S

SEQ ID NO: 71706 - protein, 29 aa, Artificial Sequence
  Cyclic GFR-binding peptide
  MOD_RES (1)..(3): Xaa is C or S
XGXAEVVMDPYVKLVVNNAADFFLISLSS

SEQ ID NO: 71707 - protein, 32 aa, Artificial Sequence; identical to SEQ ID NO: 23977
  Cyclic GFR-binding peptide
  MOD_RES (31)..(32): Xaa is C or S

SEQ ID NO: 71708 - protein, 37 aa, Artificial Sequence; identical to SEQ ID NO: 23978
  Cyclic GFR-binding peptide
  MOD_RES (2)..(35)..(36): Xaa is C or S

SEQ ID NO: 71709 - protein, 25 aa, Artificial Sequence
  Cyclic GFR-binding peptide
PYVKLIVNSSDDFFLVSLSSLQTPA

SEQ ID NO: 71710 - protein, 24 aa, Artificial Sequence
  Cyclic GFR-binding peptide
IMPYVKLIKPTKGIFFLISLSSLD

SEQ ID NO: 71711 - protein, 30 aa, Artificial Sequence
  Cyclic GFR-binding peptide
  MOD_RES (28)..(29): Xaa is C or S
IMPYVKLVKPKRGVFFLISLSSLAQPVXXP

SEQ ID NO: 71712 - protein, 35 aa, Artificial Sequence
  Cyclic GFR-binding peptide
  MOD_RES (32)..(32): Xaa is C or S
LRPYVKLLKPKKRVYEFFLVSLSSHHVRSPQXKVS

SEQ ID NO: 71713 - protein, 34 aa, Artificial Sequence
  Cyclic GFR-binding peptide
  MOD_RES (28)..(29): Xaa is C or S
IMPYVKLIKPTKGIFFLISLSSLDQSVXXPSASA

SEQ ID NO: 71714 - protein, 29 aa, Artificial Sequence
  Cyclic GFR-binding peptide
  MOD_RES (2)..(2): Xaa is C or S
GXGEVVMEPYVKLVVKDYEDFFLMSLSSL

SEQ ID NO: 71715 - protein, 26 aa, Artificial Sequence
  Cyclic GFR-binding peptide
EELRPYVKLLKPKKRVYEFFLVSLSS

SEQ ID NO: 71716 - protein, 27 aa, Artificial Sequence
  Cyclic GFR-binding peptide
  MOD_RES (1)..(1): Xaa is C or S
XRDVVMGPYVKLIIQQKDNFFLMSLSS

SEQ ID NO: 71717 - protein, 30 aa, Artificial Sequence
  Cyclic GFR-binding peptide
  MOD_RES (1)..(1): Xaa is C or S
XSRVVMNPYVKLIVNSSDDFFLVSLSSLKT

SEQ ID NO: 71718 - protein, 31 aa, Artificial Sequence; identical to SEQ ID NO: 23983
  Cyclic GFR-binding peptide
  MOD_RES (31)..(31): Xaa is C or S

SEQ ID NO: 71719 - protein, 28 aa, Artificial Sequence
  Cyclic GFR-binding peptide
EEVIMPYVKLLLVRGNDFFLMSLSSTKV

SEQ ID NO: 71720 - protein, 35 aa, Artificial Sequence; identical to SEQ ID NO: 23985
  Cyclic GFR-binding peptide
  MOD_RES (31)..(32): Xaa is C or S

SEQ ID NO: 71721 - protein, 41 aa, Artificial Sequence; identical to SEQ ID NO: 23986
  Cyclic GFR-binding peptide
  MOD_RES (2)..(4)..(35)..(36): Xaa is C or S

SEQ ID NO: 71722 - protein, 26 aa, Artificial Sequence
  Cyclic GFR-binding peptide
AVSMGEPYVKLTPVGMDDFFLVSLSS

SEQ ID NO: 71723 - protein, 34 aa, Artificial Sequence; identical to SEQ ID NO: 23987
  Cyclic GFR-binding peptide
  MOD_RES (34)..(34): Xaa is C or S

SEQ ID NO: 71724 - protein, 36 aa, Artificial Sequence; identical to SEQ ID NO: 23988
  Cyclic GFR-binding peptide
  MOD_RES (2)..(34)..(35): Xaa is C or S

SEQ ID NO: 71725 - protein, 31 aa, Artificial Sequence
  Cyclic GFR-binding peptide
  MOD_RES (2)..(2): Xaa is C or S
GXARVVMNPYVKLIVNSSDDFFLVSLSSLQT

SEQ ID NO: 71726 - protein, 21 aa, Artificial Sequence
  Cyclic GFR-binding peptide
PYVKLVKPTRGVFFLISLSSL

SEQ ID NO: 71727 - protein, 29 aa, Artificial Sequence
  Cyclic GFR-binding peptide
KVIMPYVKLIKPTKGIFFLISLSSLDQSV

SEQ ID NO: 71728 - protein, 39 aa, Artificial Sequence; identical to SEQ ID NO: 23989
  Cyclic GFR-binding peptide
  MOD_RES (1)..(3)..(35)..(36): Xaa is C or S

SEQ ID NO: 71729 - protein, 28 aa, Artificial Sequence
  Cyclic GFR-binding peptide
EVVMDPYVKLVVNNASDFFLISLSSLRT

SEQ ID NO: 71730 - protein, 35 aa, Artificial Sequence
  Cyclic GFR-binding peptide
  MOD_RES (29)..(30): Xaa is C or S
VIMPYVKLIKPTKGIFFLISLSSLDQSVXXPSASA

SEQ ID NO: 71731 - protein, 37 aa, Artificial Sequence; identical to SEQ ID NO: 23991
  Cyclic GFR-binding peptide
  MOD_RES (1)..(33)..(34): Xaa is C or S

SEQ ID NO: 71732 - protein, 30 aa, Artificial Sequence
  Cyclic GFR-binding peptide
  MOD_RES (1)..(1): Xaa is C or S
XSKVVMPYVKLVKPTRGVFFLISLSSLDQP

SEQ ID NO: 71733 - protein, 35 aa, Artificial Sequence
  Cyclic GFR-binding peptide
  MOD_RES (30)..(31): Xaa is C or S
KVIMPYVKLIKPTKGIFFLISLSSLDQSVXXPSAS

SEQ ID NO: 71734 - protein, 30 aa, Artificial Sequence
  Cyclic GFR-binding peptide
  MOD_RES (1)..(1): Xaa is C or S
XAEVVMDPYVKLVVNNAADFFLISLSSLRA

SEQ ID NO: 71735 - protein, 27 aa, Artificial Sequence
  Cyclic GFR-binding peptide
VMPYVKLVKPTRGVFFLISLSSLDQPV

SEQ ID NO: 71736 - protein, 28 aa, Artificial Sequence
  Cyclic GFR-binding peptide
SRVVMNPYVKLIVNSSDDFFLVSLSSLK

SEQ ID NO: 71737 - protein, 25 aa, Artificial Sequence
  Cyclic GFR-binding peptide
VAMGPYVKLYTVVGKDFFLISLSSL

SEQ ID NO: 71738 - protein, 39 aa, Artificial Sequence; identical to SEQ ID NO: 23996
  Cyclic GFR-binding peptide
  MOD_RES (2)..(34)..(35): Xaa is C or S

SEQ ID NO: 71739 - protein, 32 aa, Artificial Sequence; identical to SEQ ID NO: 23998
  Cyclic GFR-binding peptide
  MOD_RES (31)..(31): Xaa is C or S

SEQ ID NO: 71740 - protein, 34 aa, Artificial Sequence
  Cyclic GFR-binding peptide
  MOD_RES (32)..(32): Xaa is C or S
LRPYVKLLKPKKRVYEFFLVSLSSHHVRSPQXKV

SEQ ID NO: 71741 - protein, 32 aa, Artificial Sequence; identical to SEQ ID NO: 23999
  Cyclic GFR-binding peptide
  MOD_RES (32)..(32): Xaa is C or S

SEQ ID NO: 71742 - protein, 39 aa, Artificial Sequence; identical to SEQ ID NO: 24000
  Cyclic GFR-binding peptide
  MOD_RES (33)..(33): Xaa is C or S

SEQ ID NO: 71743 - protein, 42 aa, Artificial Sequence; identical to SEQ ID NO: 24001
  Cyclic GFR-binding peptide
  MOD_RES (2)..(39): Xaa is C or S

SEQ ID NO: 71744 - protein, 38 aa, Artificial Sequence; identical to SEQ ID NO: 24002
  Cyclic GFR-binding peptide
  MOD_RES (2)..(4)..(36)..(37): Xaa is C or S

SEQ ID NO: 71745 - protein, 38 aa, Artificial Sequence; identical to SEQ ID NO: 24003
  Cyclic GFR-binding peptide
  MOD_RES (1)..(3)..(35)..(36): Xaa is C or S

SEQ ID NO: 71746 - protein, 42 aa, Artificial Sequence; identical to SEQ ID NO: 24004
  Cyclic GFR-binding peptide
  MOD_RES (1)..(38): Xaa is C or S

SEQ ID NO: 71747 - protein, 24 aa, Artificial Sequence
  Cyclic GFR-binding peptide
PYVKLVVNNASDFFLISLSSLRTP

SEQ ID NO: 71748 - protein, 23 aa, Artificial Sequence
  Cyclic GFR-binding peptide
FPYVKLHQGQHPKIRFFLMSLSS

SEQ ID NO: 71749 - protein, 30 aa, Artificial Sequence
  Cyclic GFR-binding peptide
  MOD_RES (2)..(4): Xaa is C or S
HXGXARVVMNPYVKLIVNSSDDFFLVSLSS

SEQ ID NO: 71750 - protein, 40 aa, Artificial Sequence; identical to SEQ ID NO: 24006
  Cyclic GFR-binding peptide
  MOD_RES (2)..(34)..(35): Xaa is C or S

SEQ ID NO: 71751 - protein, 30 aa, Artificial Sequence
  Cyclic GFR-binding peptide
SRVVMNPYVKLIVNSSDDFFLVSLSSLKTP

SEQ ID NO: 71752 - protein, 37 aa, Artificial Sequence; identical to SEQ ID NO: 24007
  Cyclic GFR-binding peptide
  MOD_RES (1)..(33)..(34): Xaa is C or S

SEQ ID NO: 71753 - protein, 35 aa, Artificial Sequence; identical to SEQ ID NO: 24008
  Cyclic GFR-binding peptide
  MOD_RES (2)..(4)..(35): Xaa is C or S

SEQ ID NO: 71754 - protein, 31 aa, Artificial Sequence
  Cyclic GFR-binding peptide
  MOD_RES (2)..(2): Xaa is C or S
GXSEVVMDPYVKLVVNNASDFFLISLSSLRT

SEQ ID NO: 71755 - protein, 29 aa, Artificial Sequence
  Cyclic GFR-binding peptide
  MOD_RES (1)..(1): Xaa is C or S
XSKVIMPYVKLIKPTKGIFFLISLSSLDQ

SEQ ID NO: 71756 - protein, 35 aa, Artificial Sequence; identical to SEQ ID NO: 24011
  Cyclic GFR-binding peptide
  MOD_RES (35)..(35): Xaa is C or S

SEQ ID NO: 71757 - protein, 31 aa, Artificial Sequence
  Cyclic GFR-binding peptide
  MOD_RES (28)..(29): Xaa is C or S
MNPYVKLIVNSSDDFFLVSLSSLKTPAXXPK

SEQ ID NO: 71758 - protein, 34 aa, Artificial Sequence
  Cyclic GFR-binding peptide
  MOD_RES (1)..(1): Xaa is C or S
XELHEELRPYVKLLKPKKRVYEFFLVSLSSHHVR

SEQ ID NO: 71759 - protein, 32 aa, Artificial Sequence; identical to SEQ ID NO: 24013
  Cyclic GFR-binding peptide
  MOD_RES (31)..(32): Xaa is C or S

SEQ ID NO: 71760 - protein, 30 aa, Artificial Sequence
  Cyclic GFR-binding peptide
  MOD_RES (29)..(30): Xaa is C or S
VMGPYVKLIIQQKDNFFLMSLSSMKTPTXX

SEQ ID NO: 71761 - protein, 24 aa, Artificial Sequence
  Cyclic GFR-binding peptide
SMGEPYVKLTPVGMDDFFLVSLSS

SEQ ID NO: 71762 - protein, 36 aa, Artificial Sequence
  Cyclic GFR-binding peptide
  MOD_RES (33)..(33): Xaa is C or S
ELRPYVKLLKPKKRVYEFFLVSLSSHHVRSPQXKVS

SEQ ID NO: 71763 - protein, 37 aa, Artificial Sequence; identical to SEQ ID NO: 24014
  Cyclic GFR-binding peptide
  MOD_RES (31)..(32): Xaa is C or S

SEQ ID NO: 71764 - protein, 38 aa, Artificial Sequence; identical to SEQ ID NO: 24016
  Cyclic GFR-binding peptide
  MOD_RES (32)..(33): Xaa is C or S

SEQ ID NO: 71765 - protein, 22 aa, Artificial Sequence
  Cyclic GFR-binding peptide
PYVKLVVNNAADFFLISLSSLR

SEQ ID NO: 71766 - protein, 32 aa, Artificial Sequence
  Cyclic GFR-binding peptide
  MOD_RES (32)..(32): Xaa is C or S
GEVVMDPYVKLVVKENEDFFLMSLSSLETPVX

SEQ ID NO: 71767 - protein, 34 aa, Artificial Sequence; identical to SEQ ID NO: 24018
  Cyclic GFR-binding peptide
  MOD_RES (31)..(32): Xaa is C or S

SEQ ID NO: 71768 - protein, 30 aa, Artificial Sequence
  Cyclic GFR-binding peptide
  MOD_RES (28)..(29): Xaa is C or S
MGPYVKLYTVVGKDFFLISLSSLKTPVXXA

SEQ ID NO: 71769 - protein, 23 aa, Artificial Sequence
  Cyclic GFR-binding peptide
EPYVKLTPVGMDDFFLVSLSSLK

SEQ ID NO: 71770 - protein, 28 aa, Artificial Sequence
  Cyclic GFR-binding peptide
  MOD_RES (26)..(27): Xaa is C or S
PYVKLIIQQKDNFFLMSLSSMKTPTXXP

SEQ ID NO: 71771 - protein, 29 aa, Artificial Sequence
  Cyclic GFR-binding peptide
NHQLFPYVKLHQGQHPKIRFFLMSLSSEE

SEQ ID NO: 71772 - protein, 39 aa, Artificial Sequence; identical to SEQ ID NO: 24021
  Cyclic GFR-binding peptide
  MOD_RES (1)..(3)..(35)..(36): Xaa is C or S

SEQ ID NO: 71773 - protein, 34 aa, Artificial Sequence; identical to SEQ ID NO: 24022
  Cyclic GFR-binding peptide
  MOD_RES (32)..(33): Xaa is C or S

SEQ ID NO: 71774 - protein, 31 aa, Artificial Sequence
  Cyclic GFR-binding peptide
  MOD_RES (28)..(29): Xaa is C or S
MGPYVKLIIQQKDNFFLMSLSSMKTPTXXPG

SEQ ID NO: 71775 - protein, 37 aa, Artificial Sequence; identical to SEQ ID NO: 24024
  Cyclic GFR-binding peptide
  MOD_RES (1)..(3)..(37): Xaa is C or S

SEQ ID NO: 71776 - protein, 39 aa, Artificial Sequence; identical to SEQ ID NO: 24025
  Cyclic GFR-binding peptide
  MOD_RES (2)..(4)..(36)..(37): Xaa is C or S

SEQ ID NO: 71777 - protein, 29 aa, Artificial Sequence
  Cyclic GFR-binding peptide
RDVVMGPYVKLIIQQKDNFFLMSLSSMKT

SEQ ID NO: 71778 - protein, 34 aa, Artificial Sequence
  Cyclic GFR-binding peptide
  MOD_RES (28)..(29): Xaa is C or S
IMPYVKLLLVRGNDFFLMSLSSTKVPAXXTSPVR

SEQ ID NO: 71779 - protein, 37 aa, Artificial Sequence; identical to SEQ ID NO: 24027
  Cyclic GFR-binding peptide
  MOD_RES (31)..(32): Xaa is C or S

SEQ ID NO: 71780 - protein, 27 aa, Artificial Sequence
  Cyclic GFR-binding peptide
  MOD_RES (1)..(1): Xaa is C or S
XARVVMNPYVKLIVNSSDDFFLVSLSS

SEQ ID NO: 71781 - protein, 35 aa, Artificial Sequence; identical to SEQ ID NO: 24029
  Cyclic GFR-binding peptide
  MOD_RES (2)..(33)..(34): Xaa is C or S

SEQ ID NO: 71782 - protein, 33 aa, Artificial Sequence; identical to SEQ ID NO: 24030
  Cyclic GFR-binding peptide
  MOD_RES (31)..(31): Xaa is C or S

SEQ ID NO: 71783 - protein, 30 aa, Artificial Sequence
  Cyclic GFR-binding peptide
  MOD_RES (26)..(27): Xaa is C or S
PYVKLIVNSSDDFFLVSLSSLQTPAXXPKP

SEQ ID NO: 71784 - protein, 31 aa, Artificial Sequence
  Cyclic GFR-binding peptide
  MOD_RES (1)..(1): Xaa is C or S
XELHEELRPYVKLLKPKKRVYEFFLVSLSSH

SEQ ID NO: 71785 - protein, 28 aa, Artificial Sequence
  Cyclic GFR-binding peptide
SVAMGPYVKLYTVVGKDFFLISLSSLKT

SEQ ID NO: 71786 - protein, 30 aa, Artificial Sequence
  Cyclic GFR-binding peptide
  MOD_RES (1)..(3): Xaa is C or S
XGXAEVVMDPYVKLVVNNAADFFLISLSSL

SEQ ID NO: 71787 - protein, 40 aa, Artificial Sequence; identical to SEQ ID NO: 24032
  Cyclic GFR-binding peptide
  MOD_RES (1)..(3)..(35)..(36): Xaa is C or S

SEQ ID NO: 71788 - protein, 31 aa, Artificial Sequence
  Cyclic GFR-binding peptide
  MOD_RES (28)..(28): Xaa is C or S
MNPYVKLIVNSSDDFFLVSLSSLKTPAXTPK

SEQ ID NO: 71789 - protein, 28 aa, Artificial Sequence
  Cyclic GFR-binding peptide
VVMDPYVKLVVKENEDFFLMSLSSLETP

SEQ ID NO: 71790 - protein, 37 aa, Artificial Sequence; identical to SEQ ID NO: 24034
  Cyclic GFR-binding peptide
  MOD_RES (2)..(4)..(37): Xaa is C or S

SEQ ID NO: 71791 - protein, 36 aa, Artificial Sequence
  Cyclic GFR-binding peptide
  MOD_RES (30)..(31): Xaa is C or S
KVVMPYVKLVKPTRGVFFLISLSSLDQPVXXPSASA

SEQ ID NO: 71792 - protein, 39 aa, Artificial Sequence; identical to SEQ ID NO: 24035
  Cyclic GFR-binding peptide
  MOD_RES (2)..(4)..(36)..(37): Xaa is C or S

SEQ ID NO: 71793 - protein, 33 aa, Artificial Sequence; identical to SEQ ID NO: 24036
  Cyclic GFR-binding peptide
  MOD_RES (31)..(32): Xaa is C or S

SEQ ID NO: 71794 - protein, 26 aa, Artificial Sequence
  Cyclic GFR-binding peptide
VMPYVKLVKPTRGVFFLISLSSLDQP

SEQ ID NO: 71795 - protein, 29 aa, Artificial Sequence
  Cyclic GFR-binding peptide
  MOD_RES (2)..(2): Xaa is C or S
GXSEVVMDPYVKLVVNNASDFFLISLSSL

SEQ ID NO: 71796 - protein, 26 aa, Artificial Sequence
  Cyclic GFR-binding peptide
VMNPYVKLIVNNSSDFFLVSLSSLKT

SEQ ID NO: 71797 - protein, 33 aa, Artificial Sequence
  Cyclic GFR-binding peptide
  MOD_RES (2)..(4): Xaa is C or S
RXEXKNHQLFPYVKLHQGQHPKIRFFLMSLSSE

SEQ ID NO: 71798 - protein, 35 aa, Artificial Sequence; identical to SEQ ID NO: 24038
  Cyclic GFR-binding peptide
  MOD_RES (1)..(33): Xaa is C or S

SEQ ID NO: 71799 - protein, 34 aa, Artificial Sequence; identical to SEQ ID NO: 24039
  Cyclic GFR-binding peptide

SEQ ID NO: 71800 - protein, 37 aa, Artificial Sequence
  Cyclic GFR-binding peptide
  MOD_RES (1)..(3)..(35)..(36): Xaa is C or S
XGXGEVVMDPYVKLVVKENEDFFLMSLSSLETPVXXA

SEQ ID NO: 71801 - protein, 35 aa, Artificial Sequence
  Cyclic GFR-binding peptide
  MOD_RES (1)..(3): Xaa is C or S
XEXKNHQLFPYVKLHQGQHPKIRFFLMSLSSEETP

SEQ ID NO: 71802 - protein, 28 aa, Artificial Sequence
  Cyclic GFR-binding peptide
  MOD_RES (1)..(3): Xaa is C or S
XKXSKVVMPYVKLVKPTRGVFFLISLSS

SEQ ID NO: 71803 - protein, 34 aa, Artificial Sequence; identical to SEQ ID NO: 24043
  Cyclic GFR-binding peptide
  MOD_RES (1)..(33)..(34): Xaa is C or S

SEQ ID NO: 71804 - protein, 27 aa, Artificial Sequence
  Cyclic GFR-binding peptide
VMNPYVKLIVNSSDDFFLVSLSSLQTP

SEQ ID NO: 71805 - protein, 29 aa, Artificial Sequence
  Cyclic GFR-binding peptide
SEVVMDPYVKLVVNNASDFFLISLSSLRT

SEQ ID NO: 71806 - protein, 35 aa, Artificial Sequence; identical to SEQ ID NO: 24045
  Cyclic GFR-binding peptide
  MOD_RES (2)..(4): Xaa is C or S

SEQ ID NO: 71807 - protein, 29 aa, Artificial Sequence
  Cyclic GFR-binding peptide
  MOD_RES (26)..(27): Xaa is C or S
PYVKLIVNSSDDFFLVSLSSLKTPAXXPK

SEQ ID NO: 71808 - protein, 23 aa, Artificial Sequence
  Cyclic GFR-binding peptide
VIMPYVKLVKPKRGVFFLISLSS

SEQ ID NO: 71809 - protein, 32 aa, Artificial Sequence
  Cyclic GFR-binding peptide
  MOD_RES (2)..(2): Xaa is C or S
GXRDVVMGPYVKLIIQQKDNFFLMSLSSMKTP

SEQ ID NO: 71810 - protein, 31 aa, Artificial Sequence
  Cyclic GFR-binding peptide
  MOD_RES (29)..(30): Xaa is C or S
AMGPYVKLYTVVGKDFFLISLSSLKTPVXXA

SEQ ID NO: 71811 - protein, 34 aa, Artificial Sequence; identical to SEQ ID NO: 24048
  Cyclic GFR-binding peptide
  MOD_RES (1)..(33)..(34): Xaa is C or S

SEQ ID NO: 71812 - protein, 27 aa, Artificial Sequence
  Cyclic GFR-binding peptide
  MOD_RES (1)..(1): Xaa is C or S
XSKVIMPYVKLIKPTKGIFFLISLSSL

SEQ ID NO: 71813 - protein, 33 aa, Artificial Sequence; identical to SEQ ID NO: 24050
  Cyclic GFR-binding peptide
  MOD_RES (31)..(32): Xaa is C or S

SEQ ID NO: 71814 - protein, 33 aa, Artificial Sequence; identical to SEQ ID NO: 24049
  Cyclic GFR-binding peptide
  MOD_RES (1)..(3): Xaa is C or S

SEQ ID NO: 71815 - protein, 35 aa, Artificial Sequence
  Cyclic GFR-binding peptide
  MOD_RES (32)..(33): Xaa is C or S
GEVVMDPYVKLVVKENEDFFLMSLSSLETPVXXAK

SEQ ID NO: 71816 - protein, 39 aa, Artificial Sequence; identical to SEQ ID NO: 24052
  Cyclic GFR-binding peptide
  MOD_RES (35)..(35): Xaa is C or S

SEQ ID NO: 71817 - protein, 33 aa, Artificial Sequence; identical to SEQ ID NO: 24053
  Cyclic GFR-binding peptide
  MOD_RES (31)..(32): Xaa is C or S

SEQ ID NO: 71818 - protein, 21 aa, Artificial Sequence
  Cyclic GFR-binding peptide
EPYVKLTPVGMDDFFLVSLSS

SEQ ID NO: 71819 - protein, 26 aa, Artificial Sequence
  Cyclic GFR-binding peptide
PYVKLLKPKKRVYEFFLVSLSSHHVR

SEQ ID NO: 71820 - protein, 28 aa, Artificial Sequence
  Cyclic GFR-binding peptide
  MOD_RES (2)..(2): Xaa is C or S
GXESVAMGPYVKLYTVVGKDFFLISLSS

SEQ ID NO: 71821 - protein, 37 aa, Artificial Sequence; identical to SEQ ID NO: 24054
  Cyclic GFR-binding peptide
  MOD_RES (33)..(34): Xaa is C or S

SEQ ID NO: 71822 - protein, 22 aa, Artificial Sequence
  Cyclic GFR-binding peptide
PYVKLTPVGMDDFFLVSLSSLK

SEQ ID NO: 71823 - protein, 33 aa, Artificial Sequence; identical to SEQ ID NO: 24055
  Cyclic GFR-binding peptide
  MOD_RES (32)..(33): Xaa is C or S

SEQ ID NO: 71824 - protein, 27 aa, Artificial Sequence
  Cyclic GFR-binding peptide
VAMGPYVKLYTVVGKDFFLISLSSLKT

SEQ ID NO: 71825 - protein, 37 aa, Artificial Sequence; identical to SEQ ID NO: 24058
  Cyclic GFR-binding peptide
  MOD_RES (1)..(3)..(34)..(35): Xaa is C or S

SEQ ID NO: 71826 - protein, 31 aa, Artificial Sequence
  Cyclic GFR-binding peptide
  MOD_RES (2)..(2): Xaa is C or S
GXGEVVMDPYVKLVVKENEDFFLMSLSSLET

SEQ ID NO: 71827 - protein, 34 aa, Artificial Sequence
  Cyclic GFR-binding peptide
  MOD_RES (28)..(29): Xaa is C or S
IMPYVKLVKPKRGVFFLISLSSLAQPVXXPAASA

SEQ ID NO: 71828 - protein, 37 aa, Artificial Sequence; identical to SEQ ID NO: 24060
  Cyclic GFR-binding peptide
  MOD_RES (31)..(32): Xaa is C or S

SEQ ID NO: 71829 - protein, 27 aa, Artificial Sequence
  Cyclic GFR-binding peptide
  MOD_RES (27)..(27): Xaa is C or S
DPYVKLVVKENEDFFLMSLSSLETPVX

SEQ ID NO: 71830 - protein, 31 aa, Artificial Sequence
  Cyclic GFR-binding peptide
AVSMGEPYVKLTPVGMDDFFLVSLSSLKTPV

SEQ ID NO: 71831 - protein, 22 aa, Artificial Sequence
  Cyclic GFR-binding peptide
GPYVKLIIQQKDNFFLMSLSSM

SEQ ID NO: 71832 - protein, 30 aa, Artificial Sequence
  Cyclic GFR-binding peptide
AVSMGEPYVKLTPVGMDDFFLVSLSSLKTP

SEQ ID NO: 71833 - protein, 38 aa, Artificial Sequence; identical to SEQ ID NO: 24063
  Cyclic GFR-binding peptide
  MOD_RES (2)..(4)..(36): Xaa is C or S

SEQ ID NO: 71834 - protein, 33 aa, Artificial Sequence
  Cyclic GFR-binding peptide
  MOD_RES (31)..(32): Xaa is C or S
VSMGEPYVKLTPVGMDDFFLVSLSSLKTPVXXA

SEQ ID NO: 71835 - protein, 26 aa, Artificial Sequence
  Cyclic GFR-binding peptide
  MOD_RES (26)..(26): Xaa is C or S
PYVKLIVNSSDDFFLVSLSSLKTPAX

SEQ ID NO: 71836 - protein, 37 aa, Artificial Sequence; identical to SEQ ID NO: 24064
  Cyclic GFR-binding peptide
  MOD_RES (2)..(4)..(35)..(36): Xaa is C or S

SEQ ID NO: 71837 - protein, 30 aa, Artificial Sequence; identical to SEQ ID NO: 24065
  Cyclic GFR-binding peptide

SEQ ID NO: 71838 - protein, 37 aa, Artificial Sequence; identical to SEQ ID NO: 24066
  Cyclic GFR-binding peptide
  MOD_RES (31)..(32): Xaa is C or S

SEQ ID NO: 71839 - protein, 36 aa, Artificial Sequence; identical to SEQ ID NO: 24067
  Cyclic GFR-binding peptide
  MOD_RES (2)..(4)..(36): Xaa is C or S

SEQ ID NO: 71840 - protein, 36 aa, Artificial Sequence; identical to SEQ ID NO: 24068
  Cyclic GFR-binding peptide
  MOD_RES (32)..(33): Xaa is C or S

SEQ ID NO: 71841 - protein, 26 aa, Artificial Sequence
  Cyclic GFR-binding peptide
  MOD_RES (1)..(1): Xaa is C or S
XSRVIMPYVKLVKPKRGVFFLISLSS

SEQ ID NO: 71842 - protein, 35 aa, Artificial Sequence
  Cyclic GFR-binding peptide
  MOD_RES (29)..(30): Xaa is C or S
AMGPYVKLYTVVGKDFFLISLSSLKTPVXXAKSAK

SEQ ID NO: 71843 - protein, 27 aa, Artificial Sequence
  Cyclic GFR-binding peptide
RPYVKLLKPKKRVYEFFLVSLSSHHVR

SEQ ID NO: 71844 - protein, 31 aa, Artificial Sequence
  Cyclic GFR-binding peptide
  MOD_RES (26)..(26): Xaa is C or S
PYVKLIVNSSDDFFLVSLSSLKTPAXTPKTV

SEQ ID NO: 71845 - protein, 30 aa, Artificial Sequence
  Cyclic GFR-binding peptide
  MOD_RES (2)..(4): Xaa is C or S
LXGXEEVIMPYVKLLLVRGNDFFLMSLSST

SEQ ID NO: 71846 - protein, 32 aa, Artificial Sequence
  Cyclic GFR-binding peptide
  MOD_RES (28)..(29): Xaa is C or S
IMPYVKLLLVRGNDFFLMSLSSTKVPAXXTSP

SEQ ID NO: 71847 - protein, 29 aa, Artificial Sequence
  Cyclic GFR-binding peptide
  MOD_RES (27)..(28): Xaa is C or S
NPYVKLIVNSSDDFFLVSLSSLQTPAXXP

SEQ ID NO: 71848 - protein, 22 aa, Artificial Sequence
  Cyclic GFR-binding peptide
DPYVKLVVNNAADFFLISLSSL

SEQ ID NO: 71849 - protein, 26 aa, Artificial Sequence
  Cyclic GFR-binding peptide
KVVMNPYVKLIVNNSSDFFLVSLSSL

SEQ ID NO: 71850 - protein, 32 aa, Artificial Sequence; identical to SEQ ID NO: 24071
  Cyclic GFR-binding peptide
  MOD_RES (32)..(32): Xaa is C or S

SEQ ID NO: 71851 - protein, 24 aa, Artificial Sequence
  Cyclic GFR-binding peptide
PYVKLVVNNAADFFLISLSSLRAP

SEQ ID NO: 71852 - protein, 38 aa, Artificial Sequence; identical to SEQ ID NO: 24072
  Cyclic GFR-binding peptide
  MOD_RES (2)..(4)..(35)..(36): Xaa is C or S

SEQ ID NO: 71853 - protein, 31 aa, Artificial Sequence
  Cyclic GFR-binding peptide
  MOD_RES (29)..(30): Xaa is C or S
VIMPYVKLLLVRGNDFFLMSLSSTKVPAXXT

SEQ ID NO: 71854 - protein, 21 aa, Artificial Sequence
  Cyclic GFR-binding peptide
PYVKLVVNNAADFFLISLSSL

SEQ ID NO: 71855 - protein, 35 aa, Artificial Sequence
  Cyclic GFR-binding peptide
  MOD_RES (1)..(33)..(34): Xaa is C or S
XGEVVMDPYVKLVVKENEDFFLMSLSSLETPVXXA

SEQ ID NO: 71856 - protein, 34 aa, Artificial Sequence
  Cyclic GFR-binding peptide
  MOD_RES (29)..(30): Xaa is C or S
VMGPYVKLIIQQKDNFFLMSLSSMKTPTXXPGAS

SEQ ID NO: 71857 - protein, 28 aa, Artificial Sequence
  Cyclic GFR-binding peptide
  MOD_RES (28)..(28): Xaa is C or S
MEPYVKLVVKDYEDFFLMSLSSLETPVX

SEQ ID NO: 71858 - protein, 34 aa, Artificial Sequence
  Cyclic GFR-binding peptide
  MOD_RES (29)..(30): Xaa is C or S
VIMPYVKLLLVRGNDFFLMSLSSTKVPAXXTSPV

SEQ ID NO: 71859 - protein, 33 aa, Artificial Sequence
  Cyclic GFR-binding peptide
  MOD_RES (1)..(1): Xaa is C or S
XKNHQLFPYVKLHQGQHPKIRFFLMSLSSEETP

SEQ ID NO: 71860 - protein, 24 aa, Artificial Sequence
  Cyclic GFR-binding peptide
VVMEPYVKLVVKDYEDFFLMSLSS

SEQ ID NO: 71861 - protein, 27 aa, Artificial Sequence
  Cyclic GFR-binding peptide
EELRPYVKLLKPKKRVYEFFLVSLSSH

SEQ ID NO: 71862 - protein, 36 aa, Artificial Sequence; identical to SEQ ID NO: 24079
  Cyclic GFR-binding peptide
  MOD_RES (1)..(3)..(35)..(36): Xaa is C or S

SEQ ID NO: 71863 - protein, 44 aa, Artificial Sequence; identical to SEQ ID NO: 24080
  Cyclic GFR-binding peptide
  MOD_RES (1)..(3)..(40): Xaa is C or S

SEQ ID NO: 71864 - protein, 38 aa, Artificial Sequence; identical to SEQ ID NO: 24081
  Cyclic GFR-binding peptide
  MOD_RES (2)..(33)..(34): Xaa is C or S

SEQ ID NO: 71865 - protein, 34 aa, Artificial Sequence; identical to SEQ ID NO: 24082
  Cyclic GFR-binding peptide
  MOD_RES (1)..(33)..(34): Xaa is C or S

SEQ ID NO: 71866 - protein, 32 aa, Artificial Sequence
  Cyclic GFR-binding peptide
  MOD_RES (28)..(29): Xaa is C or S
MGPYVKLIIQQKDNFFLMSLSSMKTPTXXPGA

SEQ ID NO: 71867 - protein, 39 aa, Artificial Sequence; identical to SEQ ID NO: 24084
  Cyclic GFR-binding peptide
  MOD_RES (1)..(35): Xaa is C or S

SEQ ID NO: 71868 - protein, 30 aa, Artificial Sequence
  Cyclic GFR-binding peptide
ARVVMNPYVKLIVNSSDDFFLVSLSSLQTP

SEQ ID NO: 71869 - protein, 25 aa, Artificial Sequence
  Cyclic GFR-binding peptide
DPYVKLVVNNAADFFLISLSSLRAP

SEQ ID NO: 71870 - protein, 28 aa, Artificial Sequence
  Cyclic GFR-binding peptide
EELRPYVKLLKPKKRVYEFFLVSLSSHH

SEQ ID NO: 71871 - protein, 30 aa, Artificial Sequence
  Cyclic GFR-binding peptide
  MOD_RES (26)..(27): Xaa is C or S
PYVKLVVKENEDFFLMSLSSLETPVXXAKP

SEQ ID NO: 71872 - protein, 29 aa, Artificial Sequence
  Cyclic GFR-binding peptide
  MOD_RES (29)..(29): Xaa is C or S
VIMPYVKLIKPTKGIFFLISLSSLDQSVX

SEQ ID NO: 71873 - protein, 31 aa, Artificial Sequence; identical to SEQ ID NO: 24085
  Cyclic GFR-binding peptide
  MOD_RES (31)..(31): Xaa is C or S

SEQ ID NO: 71874 - protein, 24 aa, Artificial Sequence
  Cyclic GFR-binding peptide
EPYVKLTPVGMDDFFLVSLSSLKT

SEQ ID NO: 71875 - protein, 23 aa, Artificial Sequence
  Cyclic GFR-binding peptide
MPYVKLVKPKRGVFFLISLSSLA

SEQ ID NO: 71876 - protein, 38 aa, Artificial Sequence; identical to SEQ ID NO: 24086
  Cyclic GFR-binding peptide
  MOD_RES (1)..(35): Xaa is C or S

SEQ ID NO: 71877 - protein, 34 aa, Artificial Sequence; identical to SEQ ID NO: 24087
  Cyclic GFR-binding peptide
  MOD_RES (2)..(34): Xaa is C or S

SEQ ID NO: 71878 - protein, 31 aa, Artificial Sequence
  Cyclic GFR-binding peptide
  MOD_RES (1)..(3): Xaa is C or S
XGXSRVVMNPYVKLIVNSSDDFFLVSLSSLK

SEQ ID NO: 71879 - protein, 33 aa, Artificial Sequence
  Cyclic GFR-binding peptide
  MOD_RES (28)..(29): Xaa is C or S
MNPYVKLIVNSSDDFFLVSLSSLQTPAXXPKPV

SEQ ID NO: 71880 - protein, 27 aa, Artificial Sequence
  Cyclic GFR-binding peptide
SVAMGPYVKLYTVVGKDFFLISLSSLK

SEQ ID NO: 71881 - protein, 34 aa, Artificial Sequence
  Cyclic GFR-binding peptide
  MOD_RES (28)..(29): Xaa is C or S
MNPYVKLIVNNSSDFFLVSLSSLKTPAXXAKPVA

SEQ ID NO: 71882 - protein, 32 aa, Artificial Sequence
  Cyclic GFR-binding peptide
  MOD_RES (26)..(27): Xaa is C or S
PYVKLVVNNAADFFLISLSSLRAPVXXSAPAA

SEQ ID NO: 71883 - protein, 33 aa, Artificial Sequence
  Cyclic GFR-binding peptide
  MOD_RES (28)..(28): Xaa is C or S
MNPYVKLIVNSSDDFFLVSLSSLKTPAXTPKTV

SEQ ID NO: 71884 - protein, 29 aa, Artificial Sequence
  Cyclic GFR-binding peptide
  MOD_RES (26)..(27): Xaa is C or S
PYVKLIKPTKGIFFLISLSSLDQSVXXPS

SEQ ID NO: 71885 - protein, 35 aa, Artificial Sequence; identical to SEQ ID NO: 24092
  Cyclic GFR-binding peptide
  MOD_RES (2)..(4): Xaa is C or S

SEQ ID NO: 71886 - protein, 29 aa, Artificial Sequence
  Cyclic GFR-binding peptide
  MOD_RES (29)..(29): Xaa is C or S
VMDPYVKLVVKENEDFFLMSLSSLETPVX

SEQ ID NO: 71887 - protein, 36 aa, Artificial Sequence; identical to SEQ ID NO: 24094
  Cyclic GFR-binding peptide
  MOD_RES (2)..(4)..(35)..(36): Xaa is C or S

SEQ ID NO: 71888 - protein, 33 aa, Artificial Sequence
  Cyclic GFR-binding peptide
  MOD_RES (1)..(3): Xaa is C or S
XEXKNHQLFPYVKLHQGQHPKIRFFLMSLSSEE

SEQ ID NO: 71889 - protein, 38 aa, Artificial Sequence; identical to SEQ ID NO: 24095
  Cyclic GFR-binding peptide
  MOD_RES (1)..(33)..(34): Xaa is C or S

SEQ ID NO: 71890 - protein, 29 aa, Artificial Sequence
  Cyclic GFR-binding peptide
  MOD_RES (27)..(28): Xaa is C or S
MPYVKLVKPTRGVFFLISLSSLDQPVXXP

SEQ ID NO: 71891 - protein, 20 aa, Artificial Sequence
  Cyclic GFR-binding peptide
PYVKLVVKDYEDFFLMSLSS

SEQ ID NO: 71892 - protein, 28 aa, Artificial Sequence
  Cyclic GFR-binding peptide
  MOD_RES (27)..(28): Xaa is C or S
NPYVKLIVNSSDDFFLVSLSSLKTPAXX

SEQ ID NO: 71893 - protein, 32 aa, Artificial Sequence
  Cyclic GFR-binding peptide
  MOD_RES (30)..(31): Xaa is C or S
VVMGPYVKLIIQQKDNFFLMSLSSMKTPTXXP

SEQ ID NO: 71894 - protein, 27 aa, Artificial Sequence
  Cyclic GFR-binding peptide
ESVAMGPYVKLYTVVGKDFFLISLSSL

SEQ ID NO: 71895 - protein, 32 aa, Artificial Sequence
  Cyclic GFR-binding peptide
  MOD_RES (26)..(27): Xaa is C or S
PYVKLIIQQKDNFFLMSLSSMKTPTXXPGASG

SEQ ID NO: 71896 - protein, 26 aa, Artificial Sequence
  Cyclic GFR-binding peptide
IMPYVKLLLVRGNDFFLMSLSSTKVP

SEQ ID NO: 71897 - protein, 23 aa, Artificial Sequence
  Cyclic GFR-binding peptide
PYVKLIVNSSDDFFLVSLSSLKT

SEQ ID NO: 71898 - protein, 28 aa, Artificial Sequence
  Cyclic GFR-binding peptide
ARVVMNPYVKLIVNSSDDFFLVSLSSLQ

SEQ ID NO: 71899 - protein, 30 aa, Artificial Sequence
  Cyclic GFR-binding peptide
  MOD_RES (1)..(1): Xaa is C or S
XGEVVMDPYVKLVVKENEDFFLMSLSSLET

SEQ ID NO: 71900 - protein, 27 aa, Artificial Sequence
  Cyclic GFR-binding peptide
VMDPYVKLVVNNASDFFLISLSSLRTP

SEQ ID NO: 71901 - protein, 29 aa, Artificial Sequence
  Cyclic GFR-binding peptide
  MOD_RES (27)..(27): Xaa is C or S
NPYVKLIVNSSDDFFLVSLSSLKTPAXTP

SEQ ID NO: 71902 - protein, 29 aa, Artificial Sequence
  Cyclic GFR-binding peptide
  MOD_RES (29)..(29): Xaa is C or S
VMNPYVKLIVNSSDDFFLVSLSSLQTPAX

SEQ ID NO: 71903 - protein, 29 aa, Artificial Sequence
  Cyclic GFR-binding peptide
  MOD_RES (27)..(28): Xaa is C or S
GPYVKLYTVVGKDFFLISLSSLKTPVXXA

SEQ ID NO: 71904 - protein, 30 aa, Artificial Sequence
  Cyclic GFR-binding peptide
  MOD_RES (26)..(27): Xaa is C or S
PYVKLTPVGMDDFFLVSLSSLKTPVXXAKG

SEQ ID NO: 71905 - protein, 31 aa, Artificial Sequence
  Cyclic GFR-binding peptide
  MOD_RES (26)..(27): Xaa is C or S
PYVKLTPVGMDDFFLVSLSSLKTPVXXAKGV

SEQ ID NO: 71906 - protein, 35 aa, Artificial Sequence
  Cyclic GFR-binding peptide
  MOD_RES (2)..(4): Xaa is C or S
RXEXKNHQLFPYVKLHQGQHPKIRFFLMSLSSEET

SEQ ID NO: 71907 - protein, 24 aa, Artificial Sequence
  Cyclic GFR-binding peptide
VMPYVKLVKPTRGVFFLISLSSLD

SEQ ID NO: 71908 - protein, 31 aa, Artificial Sequence
  Cyclic GFR-binding peptide
  MOD_RES (30)..(30): Xaa is C or S
PYVKLLKPKKRVYEFFLVSLSSHHVRSPQXK

SEQ ID NO: 71909 - protein, 22 aa, Artificial Sequence
  Cyclic GFR-binding peptide
PYVKLLKPKKRVYEFFLVSLSS

SEQ ID NO: 71910 - protein, 31 aa, Artificial Sequence
  Cyclic GFR-binding peptide
  MOD_RES (28)..(29): Xaa is C or S
MNPYVKLIVNNSSDFFLVSLSSLKTPAXXAK

SEQ ID NO: 71911 - protein, 37 aa, Artificial Sequence; identical to SEQ ID NO: 24099
  Cyclic GFR-binding peptide
  MOD_RES (31)..(32): Xaa is C or S

SEQ ID NO: 71912 - protein, 22 aa, Artificial Sequence
  Cyclic GFR-binding peptide
MDPYVKLVVNNASDFFLISLSS

SEQ ID NO: 71913 - protein, 32 aa, Artificial Sequence
  Cyclic GFR-binding peptide
  MOD_RES (27)..(28): Xaa is C or S
EPYVKLVVKDYEDFFLMSLSSLETPVXXAKPI

SEQ ID NO: 71914 - protein, 31 aa, Artificial Sequence
  Cyclic GFR-binding peptide
HEELRPYVKLLKPKKRVYEFFLVSLSSHHVR

SEQ ID NO: 71915 - protein, 28 aa, Artificial Sequence
  Cyclic GFR-binding peptide
VMEPYVKLVVKDYEDFFLMSLSSLETPV

SEQ ID NO: 71916 - protein, 35 aa, Artificial Sequence; identical to SEQ ID NO: 24101
  Cyclic GFR-binding peptide
  MOD_RES (1)..(33)..(34): Xaa is C or S

SEQ ID NO: 71917 - protein, 32 aa, Artificial Sequence
  Cyclic GFR-binding peptide
  MOD_RES (26)..(27): Xaa is C or S
PYVKLYTVVGKDFFLISLSSLKTPVXXAKSAK

SEQ ID NO: 71918 - protein, 30 aa, Artificial Sequence
  Cyclic GFR-binding peptide
  MOD_RES (1)..(3): Xaa is C or S
XGXARVVMNPYVKLIVNSSDDFFLVSLSSL

SEQ ID NO: 71919 - protein, 35 aa, Artificial Sequence; identical to SEQ ID NO: 24103
  Cyclic GFR-binding peptide
  MOD_RES (1)..(32)..(33): Xaa is C or S

SEQ ID NO: 71920 - protein, 35 aa, Artificial Sequence
  Cyclic GFR-binding peptide
  MOD_RES (2)..(34)..(35): Xaa is C or S
GXGEVVMDPYVKLVVKENEDFFLMSLSSLETPVXX

SEQ ID NO: 71921 - protein, 35 aa, Artificial Sequence
  Cyclic GFR-binding peptide
  MOD_RES (29)..(30): Xaa is C or S
VIMPYVKLVKPKRGVFFLISLSSLAQPVXXPAASA

SEQ ID NO: 71922 - protein, 26 aa, Artificial Sequence
  Cyclic GFR-binding peptide
FPYVKLHQGQHPKIRFFLMSLSSEET

SEQ ID NO: 71923 - protein, 30 aa, Artificial Sequence
  Cyclic GFR-binding peptide
QLFPYVKLHQGQHPKIRFFLMSLSSEETPV

SEQ ID NO: 71924 - protein, 37 aa, Artificial Sequence; identical to SEQ ID NO: 24105
  Cyclic GFR-binding peptide
  MOD_RES (32)..(33): Xaa is C or S

SEQ ID NO: 71925 - protein, 24 aa, Artificial Sequence
  Cyclic GFR-binding peptide
PYVKLIVNSSDDFFLVSLSSLQTP

SEQ ID NO: 71926 - protein, 27 aa, Artificial Sequence
  Cyclic GFR-binding peptide
RDVVMGPYVKLIIQQKDNFFLMSLSSM

SEQ ID NO: 71927 - protein, 29 aa, Artificial Sequence
  Cyclic GFR-binding peptide
  MOD_RES (27)..(28): Xaa is C or S
NPYVKLIVNNSSDFFLVSLSSLKTPAXXA

SEQ ID NO: 71928 - protein, 30 aa, Artificial Sequence
  Cyclic GFR-binding peptide
  MOD_RES (27)..(28): Xaa is C or S
GPYVKLYTVVGKDFFLISLSSLKTPVXXAK

SEQ ID NO: 71929 - protein, 35 aa, Artificial Sequence; identical to SEQ ID NO: 24109
  Cyclic GFR-binding peptide
  MOD_RES (32)..(32): Xaa is C or S

SEQ ID NO: 71930 - protein, 36 aa, Artificial Sequence; identical to SEQ ID NO: 24110
  Cyclic GFR-binding peptide
  MOD_RES (1)..(3)..(35)..(36): Xaa is C or S

SEQ ID NO: 71931 - protein, 21 aa, Artificial Sequence
  Cyclic GFR-binding peptide
PYVKLIIQQKDNFFLMSLSSM

SEQ ID NO: 71932 - protein, 32 aa, Artificial Sequence
  Cyclic GFR-binding peptide
  MOD_RES (27)..(28): Xaa is C or S
MPYVKLLLVRGNDFFLMSLSSTKVPAXXTSPV

SEQ ID NO: 71933 - protein, 32 aa, Artificial Sequence
  Cyclic GFR-binding peptide
  MOD_RES (29)..(30): Xaa is C or S
VMNPYVKLIVNNSSDFFLVSLSSLKTPAXXAK

SEQ ID NO: 71934 - protein, 37 aa, Artificial Sequence; identical to SEQ ID NO: 24113
  Cyclic GFR-binding peptide
  MOD_RES (1)..(3)..(35)..(36): Xaa is C or S

SEQ ID NO: 71935 - protein, 38 aa, Artificial Sequence; identical to SEQ ID NO: 24114
  Cyclic GFR-binding peptide
  MOD_RES (1)..(33)..(34): Xaa is C or S

SEQ ID NO: 71936 - protein, 27 aa, Artificial Sequence
  Cyclic GFR-binding peptide
AKVVMNPYVKLIVNNSSDFFLVSLSSL

SEQ ID NO: 71937 - protein, 34 aa, Artificial Sequence; identical to SEQ ID NO: 24115
  Cyclic GFR-binding peptide
  MOD_RES (2)..(34): Xaa is C or S

SEQ ID NO: 71938 - protein, 34 aa, Artificial Sequence
  Cyclic GFR-binding peptide
  MOD_RES (2)..(4): Xaa is C or S
RXGXGEVVMDPYVKLVVKENEDFFLMSLSSLETP

SEQ ID NO: 71939 - protein, 24 aa, Artificial Sequence
  Cyclic GFR-binding peptide
VMNPYVKLIVNNSSDFFLVSLSSL

SEQ ID NO: 71940 - protein, 26 aa, Artificial Sequence
  Cyclic GFR-binding peptide
AMGPYVKLYTVVGKDFFLISLSSLKT

SEQ ID NO: 71941 - protein, 36 aa, Artificial Sequence; identical to SEQ ID NO: 24116
  Cyclic GFR-binding peptide
  MOD_RES (2)..(4)..(35)..(36): Xaa is C or S

SEQ ID NO: 71942 - protein, 35 aa, Artificial Sequence; identical to SEQ ID NO: 24117
  Cyclic GFR-binding peptide
  MOD_RES (1)..(3)..(35): Xaa is C or S

SEQ ID NO: 71943 - protein, 37 aa, Artificial Sequence; identical to SEQ ID NO: 24118
  Cyclic GFR-binding peptide
  MOD_RES (1)..(3)..(35)..(36): Xaa is C or S

SEQ ID NO: 71944 - protein, 24 aa, Artificial Sequence
  Cyclic GFR-binding peptide
MNPYVKLIVNNSSDFFLVSLSSLK

SEQ ID NO: 71945 - protein, 26 aa, Artificial Sequence
  Cyclic GFR-binding peptide
VMNPYVKLIVNSSDDFFLVSLSSLKT

SEQ ID NO: 71946 - protein, 28 aa, Artificial Sequence
  Cyclic GFR-binding peptide
HEELRPYVKLLKPKKRVYEFFLVSLSSH

SEQ ID NO: 71947 - protein, 36 aa, Artificial Sequence; identical to SEQ ID NO: 24120
  Cyclic GFR-binding peptide
  MOD_RES (2)..(33)..(34): Xaa is C or S

SEQ ID NO: 71948 - protein, 36 aa, Artificial Sequence
  Cyclic GFR-binding peptide
  MOD_RES (2)..(34)..(35): Xaa is C or S
GXGEVVMDPYVKLVVKENEDFFLMSLSSLETPVXXA

SEQ ID NO: 71949 - protein, 34 aa, Artificial Sequence
  Cyclic GFR-binding peptide
  MOD_RES (2)..(4): Xaa is C or S
RXGXSEVVMDPYVKLVVNNASDFFLISLSSLRTP

SEQ ID NO: 71950 - protein, 35 aa, Artificial Sequence; identical to SEQ ID NO: 24121
  Cyclic GFR-binding peptide
  MOD_RES (1)..(3)..(35): Xaa is C or S

SEQ ID NO: 71951 - protein, 27 aa, Artificial Sequence
  Cyclic GFR-binding peptide
VIMPYVKLVKPKRGVFFLISLSSLAQP

SEQ ID NO: 71952 - protein, 35 aa, Artificial Sequence; identical to SEQ ID NO: 24123
  Cyclic GFR-binding peptide
  MOD_RES (31)..(32): Xaa is C or S

SEQ ID NO: 71953 - protein, 35 aa, Artificial Sequence; identical to SEQ ID NO: 24124
  Cyclic GFR-binding peptide
  MOD_RES (31)..(32): Xaa is C or S

SEQ ID NO: 71954 - protein, 23 aa, Artificial Sequence
  Cyclic GFR-binding peptide
MDPYVKLVVKENEDFFLMSLSSL

SEQ ID NO: 71955 - protein, 36 aa, Artificial Sequence; identical to SEQ ID NO: 24126
  Cyclic GFR-binding peptide
  MOD_RES (32)..(33): Xaa is C or S

SEQ ID NO: 71956 - protein, 37 aa, Artificial Sequence; identical to SEQ ID NO: 24128
  Cyclic GFR-binding peptide
  MOD_RES (2)..(4)..(36)..(37): Xaa is C or S

SEQ ID NO: 71957 - protein, 30 aa, Artificial Sequence
  Cyclic GFR-binding peptide
LHEELRPYVKLLKPKKRVYEFFLVSLSSHH

SEQ ID NO: 71958 - protein, 27 aa, Artificial Sequence
  Cyclic GFR-binding peptide
LRPYVKLLKPKKRVYEFFLVSLSSHHV

SEQ ID NO: 71959 - protein, 32 aa, Artificial Sequence
  Cyclic GFR-binding peptide
ELRPYVKLLKPKKRVYEFFLVSLSSHHVRSPQ

SEQ ID NO: 71960 - protein, 32 aa, Artificial Sequence
  Cyclic GFR-binding peptide
KNHQLFPYVKLHQGQHPKIRFFLMSLSSEETP

SEQ ID NO: 71961 - protein, 27 aa, Artificial Sequence
  Cyclic GFR-binding peptide
  MOD_RES (27)..(27): Xaa is C or S
NPYVKLIVNSSDDFFLVSLSSLKTPAX

SEQ ID NO: 71962 - protein, 30 aa, Artificial Sequence
  Cyclic GFR-binding peptide
  MOD_RES (28)..(28): Xaa is C or S
PYVKLHQGQHPKIRFFLMSLSSEETPVXEL

SEQ ID NO: 71963 - protein, 24 aa, Artificial Sequence
  Cyclic GFR-binding peptide
NPYVKLIVNSSDDFFLVSLSSLKT

SEQ ID NO: 71964 - protein, 33 aa, Artificial Sequence
  Cyclic GFR-binding peptide
  MOD_RES (27)..(28): Xaa is C or S
DPYVKLVVKENEDFFLMSLSSLETPVXXAKPIK

SEQ ID NO: 71965 - protein, 37 aa, Artificial Sequence; identical to SEQ ID NO: 24140
  Cyclic GFR-binding peptide
  MOD_RES (1)..(32)..(33): Xaa is C or S

SEQ ID NO: 71966 - protein, 34 aa, Artificial Sequence
  Cyclic GFR-binding peptide
  MOD_RES (30)..(31): Xaa is C or S
VVMNPYVKLIVNNSSDFFLVSLSSLKTPAXXAKP

SEQ ID NO: 71967 - protein, 29 aa, Artificial Sequence
  Cyclic GFR-binding peptide
  MOD_RES (1)..(3): Xaa is C or S
XGXARVVMNPYVKLIVNSSDDFFLVSLSS

SEQ ID NO: 71968 - protein, 37 aa, Artificial Sequence; identical to SEQ ID NO: 24143
  Cyclic GFR-binding peptide
  MOD_RES (2)..(4)..(36)..(37): Xaa is C or S

SEQ ID NO: 71969 - protein, 29 aa, Artificial Sequence
  Cyclic GFR-binding peptide
  MOD_RES (28)..(29): Xaa is C or S
MEPYVKLVVKDYEDFFLMSLSSLETPVXX

SEQ ID NO: 71970 - protein, 28 aa, Artificial Sequence
  Cyclic GFR-binding peptide
VIMPYVKLIKPTKGIFFLISLSSLDQSV

SEQ ID NO: 71971 - protein, 35 aa, Artificial Sequence
  Cyclic GFR-binding peptide
  MOD_RES (34)..(34): Xaa is C or S
EELRPYVKLLKPKKRVYEFFLVSLSSHHVRSPQXK

SEQ ID NO: 71972 - protein, 36 aa, Artificial Sequence; identical to SEQ ID NO: 24145
  Cyclic GFR-binding peptide
  MOD_RES (2)..(33)..(34): Xaa is C or S

SEQ ID NO: 71973 - protein, 35 aa, Artificial Sequence; identical to SEQ ID NO: 24146
  Cyclic GFR-binding peptide
  MOD_RES (31)..(32): Xaa is C or S

SEQ ID NO: 71974 - protein, 26 aa, Artificial Sequence
  Cyclic GFR-binding peptide
MDPYVKLVVKENEDFFLMSLSSLETP

SEQ ID NO: 71975 - protein, 41 aa, Artificial Sequence; identical to SEQ ID NO: 24147
  Cyclic GFR-binding peptide
  MOD_RES (2)..(4)..(36)..(37): Xaa is C or S

SEQ ID NO: 71976 - protein, 31 aa, Artificial Sequence
  Cyclic GFR-binding peptide
  MOD_RES (2)..(4): Xaa is C or S
SXGXRDVVMGPYVKLIIQQKDNFFLMSLSSM

SEQ ID NO: 71977 - protein, 27 aa, Artificial Sequence
  Cyclic GFR-binding peptide
HQLFPYVKLHQGQHPKIRFFLMSLSSE

SEQ ID NO: 71978 - protein, 27 aa, Artificial Sequence
  Cyclic GFR-binding peptide
  MOD_RES (2)..(2): Xaa is C or S
KXSKVVMPYVKLVKPTRGVFFLISLSS

SEQ ID NO: 71979 - protein, 33 aa, Artificial Sequence
  Cyclic GFR-binding peptide
  MOD_RES (2)..(2): Xaa is C or S
GXGEVVMDPYVKLVVKENEDFFLMSLSSLETPV

SEQ ID NO: 71980 - protein, 29 aa, Artificial Sequence
  Cyclic GFR-binding peptide
  MOD_RES (27)..(28): Xaa is C or S
DPYVKLVVNNASDFFLISLSSLRTPVXXT

SEQ ID NO: 71981 - protein, 25 aa, Artificial Sequence
  Cyclic GFR-binding peptide
SKVIMPYVKLIKPTKGIFFLISLSS

SEQ ID NO: 71982 - protein, 33 aa, Artificial Sequence
  Cyclic GFR-binding peptide
  MOD_RES (29)..(30): Xaa is C or S
AMGPYVKLYTVVGKDFFLISLSSLKTPVXXAKS

SEQ ID NO: 71983 - protein, 34 aa, Artificial Sequence
  Cyclic GFR-binding peptide
  MOD_RES (28)..(28): Xaa is C or S
MNPYVKLIVNSSDDFFLVSLSSLKTPAXTPKTVH

SEQ ID NO: 71984 - protein, 37 aa, Artificial Sequence
  Cyclic GFR-binding peptide
  MOD_RES (33)..(33): Xaa is C or S
ELRPYVKLLKPKKRVYEFFLVSLSSHHVRSPQXKVSS

SEQ ID NO: 71985 - protein, 38 aa, Artificial Sequence; identical to SEQ ID NO: 24152
  Cyclic GFR-binding peptide
  MOD_RES (33)..(34): Xaa is C or S

SEQ ID NO: 71986 - protein, 33 aa, Artificial Sequence; identical to SEQ ID NO: 24151
  Cyclic GFR-binding peptide

SEQ ID NO: 71987 - protein, 38 aa, Artificial Sequence; identical to SEQ ID NO: 24153
  Cyclic GFR-binding peptide
  MOD_RES (1)..(32)..(33): Xaa is C or S

SEQ ID NO: 71988 - protein, 28 aa, Artificial Sequence
  Cyclic GFR-binding peptide
KNHQLFPYVKLHQGQHPKIRFFLMSLSS

SEQ ID NO: 71989 - protein, 26 aa, Artificial Sequence
  Cyclic GFR-binding peptide
EPYVKLVVKDYEDFFLMSLSSLETPV

SEQ ID NO: 71990 - protein, 26 aa, Artificial Sequence
  Cyclic GFR-binding peptide
GPYVKLIIQQKDNFFLMSLSSMKTPT

SEQ ID NO: 71991 - protein, 35 aa, Artificial Sequence
  Cyclic GFR-binding peptide
  MOD_RES (30)..(31): Xaa is C or S
VVMDPYVKLVVKENEDFFLMSLSSLETPVXXAKPI

SEQ ID NO: 71992 - protein, 37 aa, Artificial Sequence; identical to SEQ ID NO: 24157
  Cyclic GFR-binding peptide
  MOD_RES (1)..(3)..(34)..(35): Xaa is C or S

SEQ ID NO: 71993 - protein, 32 aa, Artificial Sequence
  Cyclic GFR-binding peptide
  MOD_RES (28)..(29): Xaa is C or S
MNPYVKLIVNNSSDFFLVSLSSLKTPAXXAKP

SEQ ID NO: 71994 - protein, 21 aa, Artificial Sequence
  Cyclic GFR-binding peptide
PYVKLVKPKRGVFFLISLSSL

SEQ ID NO: 71995 - protein, 23 aa, Artificial Sequence
  Cyclic GFR-binding peptide
MNPYVKLIVNNSSDFFLVSLSSL

SEQ ID NO: 71996 - protein, 39 aa, Artificial Sequence; identical to SEQ ID NO: 24160
  Cyclic GFR-binding peptide
  MOD_RES (2)..(4)..(36)..(37): Xaa is C or S

SEQ ID NO: 71997 - protein, 26 aa, Artificial Sequence
  Cyclic GFR-binding peptide
  MOD_RES (26)..(26): Xaa is C or S
PYVKLIVNNSSDFFLVSLSSLKTPAX

SEQ ID NO: 71998 - protein, 23 aa, Artificial Sequence
  Cyclic GFR-binding peptide
NPYVKLIVNSSDDFFLVSLSSLQ

SEQ ID NO: 71999 - protein, 39 aa, Artificial Sequence; identical to SEQ ID NO: 24162
  Cyclic GFR-binding peptide
  MOD_RES (2)..(33)..(34): Xaa is C or S

SEQ ID NO: 72000 - protein, 31 aa, Artificial Sequence
  Cyclic GFR-binding peptide
  MOD_RES (2)..(4): Xaa is C or S
RXGXAEVVMDPYVKLVVNNAADFFLISLSSL

SEQ ID NO: 72001 - protein, 40 aa, Artificial Sequence; identical to SEQ ID NO: 24163
  Cyclic GFR-binding peptide
  MOD_RES (2)..(34)..(35): Xaa is C or S

SEQ ID NO: 72002 - protein, 30 aa, Artificial Sequence
  Cyclic GFR-binding peptide
  MOD_RES (1)..(3): Xaa is C or S
XGXSEVVMDPYVKLVVNNASDFFLISLSSL

SEQ ID NO: 72003 - protein, 25 aa, Artificial Sequence
  Cyclic GFR-binding peptide
VVMDPYVKLVVNNASDFFLISLSSL

SEQ ID NO: 72004 - protein, 31 aa, Artificial Sequence
  Cyclic GFR-binding peptide
ELRPYVKLLKPKKRVYEFFLVSLSSHHVRSP

SEQ ID NO: 72005 - protein, 33 aa, Artificial Sequence
  Cyclic GFR-binding peptide
  MOD_RES (33)..(33): Xaa is C or S
ELRPYVKLLKPKKRVYEFFLVSLSSHHVRSPQX

SEQ ID NO: 72006 - protein, 23 aa, Artificial Sequence
  Cyclic GFR-binding peptide
VIMPYVKLIKPTKGIFFLISLSS

SEQ ID NO: 72007 - protein, 25 aa, Artificial Sequence
  Cyclic GFR-binding peptide
PYVKLVKPTRGVFFLISLSSLDQPV

SEQ ID NO: 72008 - protein, 29 aa, Artificial Sequence
  Cyclic GFR-binding peptide
VVMNPYVKLIVNNSSDFFLVSLSSLKTPA

SEQ ID NO: 72009 - protein, 35 aa, Artificial Sequence; identical to SEQ ID NO: 24167
  Cyclic GFR-binding peptide
  MOD_RES (1)..(3)..(35): Xaa is C or S

SEQ ID NO: 72010 - protein, 32 aa, Artificial Sequence; identical to SEQ ID NO: 24168
  Cyclic GFR-binding peptide

SEQ ID NO: 72011 - protein, 29 aa, Artificial Sequence
  Cyclic GFR-binding peptide
GEVVMDPYVKLVVKENEDFFLMSLSSLET

SEQ ID NO: 72012 - protein, 23 aa, Artificial Sequence
  Cyclic GFR-binding peptide
MDPYVKLVVNNAADFFLISLSSL

SEQ ID NO: 72013 - protein, 27 aa, Artificial Sequence
  Cyclic GFR-binding peptide
  MOD_RES (1)..(1): Xaa is C or S
XESVAMGPYVKLYTVVGKDFFLISLSS

SEQ ID NO: 72014 - protein, 24 aa, Artificial Sequence
  Cyclic GFR-binding peptide
VVMPYVKLVKPTRGVFFLISLSSL

SEQ ID NO: 72015 - protein, 37 aa, Artificial Sequence; identical to SEQ ID NO: 24169
  Cyclic GFR-binding peptide
  MOD_RES (33)..(33): Xaa is C or S

SEQ ID NO: 72016 - protein, 30 aa, Artificial Sequence
  Cyclic GFR-binding peptide
  MOD_RES (1)..(3): Xaa is C or S
XKXSRVIMPYVKLVKPKRGVFFLISLSSLA

SEQ ID NO: 72017 - protein, 41 aa, Artificial Sequence; identical to SEQ ID NO: 24170
  Cyclic GFR-binding peptide
  MOD_RES (1)..(3)..(35): Xaa is C or S

SEQ ID NO: 72018 - protein, 34 aa, Artificial Sequence
  Cyclic GFR-binding peptide
  MOD_RES (30)..(31): Xaa is C or S
SMGEPYVKLTPVGMDDFFLVSLSSLKTPVXXAKG

SEQ ID NO: 72019 - protein, 28 aa, Artificial Sequence
  Cyclic GFR-binding peptide
VVMEPYVKLVVKDYEDFFLMSLSSLETP

SEQ ID NO: 72020 - protein, 41 aa, Artificial Sequence; identical to SEQ ID NO: 24171
  Cyclic GFR-binding peptide
  MOD_RES (1)..(3)..(35)..(36): Xaa is C or S

SEQ ID NO: 72021 - protein, 28 aa, Artificial Sequence
  Cyclic GFR-binding peptide
  MOD_RES (27)..(28): Xaa is C or S
DPYVKLVVNNASDFFLISLSSLRTPVXX

SEQ ID NO: 72022 - protein, 36 aa, Artificial Sequence; identical to SEQ ID NO: 24173
  Cyclic GFR-binding peptide
  MOD_RES (2)..(34)..(35): Xaa is C or S

SEQ ID NO: 72023 - protein, 34 aa, Artificial Sequence; identical to SEQ ID NO: 24177
  Cyclic GFR-binding peptide
  MOD_RES (31)..(32): Xaa is C or S

SEQ ID NO: 72024 - protein, 31 aa, Artificial Sequence
  Cyclic GFR-binding peptide
  MOD_RES (29)..(30): Xaa is C or S
VMNPYVKLIVNSSDDFFLVSLSSLQTPAXXP

SEQ ID NO: 72025 - protein, 30 aa, Artificial Sequence
  Cyclic GFR-binding peptide
  MOD_RES (1)..(1): Xaa is C or S
XSKVIMPYVKLIKPTKGIFFLISLSSLDQS

SEQ ID NO: 72026 - protein, 37 aa, Artificial Sequence
  Cyclic GFR-binding peptide
  MOD_RES (31)..(32): Xaa is C or S
EVVMDPYVKLVVKENEDFFLMSLSSLETPVXXAKPIK

SEQ ID NO: 72027 - protein, 30 aa, Artificial Sequence
  Cyclic GFR-binding peptide
  MOD_RES (28)..(29): Xaa is C or S
MNPYVKLIVNSSDDFFLVSLSSLKTPAXXP

SEQ ID NO: 72028 - protein, 36 aa, Artificial Sequence; identical to SEQ ID NO: 24181
  Cyclic GFR-binding peptide
  MOD_RES (2)..(34)..(35): Xaa is C or S

SEQ ID NO: 72029 - protein, 32 aa, Artificial Sequence
  Cyclic GFR-binding peptide
  MOD_RES (27)..(28): Xaa is C or S
GPYVKLIIQQKDNFFLMSLSSMKTPTXXPGAS

SEQ ID NO: 72030 - protein, 41 aa, Artificial Sequence; identical to SEQ ID NO: 24182
  Cyclic GFR-binding peptide
  MOD_RES (1)..(3)..(37): Xaa is C or S

SEQ ID NO: 72031 - protein, 35 aa, Artificial Sequence
  Cyclic GFR-binding peptide
  MOD_RES (30)..(31): Xaa is C or S
VVMNPYVKLIVNSSDDFFLVSLSSLQTPAXXPKPV

SEQ ID NO: 72032 - protein, 22 aa, Artificial Sequence
  Cyclic GFR-binding peptide
MPYVKLVKPTRGVFFLISLSSL

SEQ ID NO: 72033 - protein, 27 aa, Artificial Sequence
  Cyclic GFR-binding peptide
SMGEPYVKLTPVGMDDFFLVSLSSLKT

SEQ ID NO: 72034 - protein, 23 aa, Artificial Sequence
  Cyclic GFR-binding peptide
PYVKLVVKDYEDFFLMSLSSLET

SEQ ID NO: 72035 - protein, 27 aa, Artificial Sequence
  Cyclic GFR-binding peptide
  MOD_RES (27)..(27): Xaa is C or S
DPYVKLVVNNASDFFLISLSSLRTPVX

SEQ ID NO: 72036 - protein, 24 aa, Artificial Sequence
  Cyclic GFR-binding peptide
DPYVKLVVNNAADFFLISLSSLRA

SEQ ID NO: 72037 - protein, 27 aa, Artificial Sequence
  Cyclic GFR-binding peptide
VMDPYVKLVVKENEDFFLMSLSSLETP

SEQ ID NO: 72038 - protein, 28 aa, Artificial Sequence
  Cyclic GFR-binding peptide
  MOD_RES (1)..(1): Xaa is C or S
XSKVVMPYVKLVKPTRGVFFLISLSSLD

SEQ ID NO: 72039 - protein, 33 aa, Artificial Sequence; identical to SEQ ID NO: 24187
  Cyclic GFR-binding peptide
  MOD_RES (1)..(32)..(33): Xaa is C or S

SEQ ID NO: 72040 - protein, 33 aa, Artificial Sequence
  Cyclic GFR-binding peptide
  MOD_RES (2)..(2): Xaa is C or S
EXKNHQLFPYVKLHQGQHPKIRFFLMSLSSEET

SEQ ID NO: 72041 - protein, 42 aa, Artificial Sequence; identical to SEQ ID NO: 24188
  Cyclic GFR-binding peptide
  MOD_RES (2)..(4)..(36)..(37): Xaa is C or S

SEQ ID NO: 72042 - protein, 40 aa, Artificial Sequence; identical to SEQ ID NO: 24189
  Cyclic GFR-binding peptide
  MOD_RES (2)..(34): Xaa is C or S

SEQ ID NO: 72043 - protein, 34 aa, Artificial Sequence
  Cyclic GFR-binding peptide
  MOD_RES (32)..(33): Xaa is C or S
AVSMGEPYVKLTPVGMDDFFLVSLSSLKTPVXXA

SEQ ID NO: 72044 - protein, 34 aa, Artificial Sequence
  Cyclic GFR-binding peptide
  MOD_RES (30)..(31): Xaa is C or S
RVIMPYVKLVKPKRGVFFLISLSSLAQPVXXPAA

SEQ ID NO: 72045 - protein, 36 aa, Artificial Sequence; identical to SEQ ID NO: 24191
  Cyclic GFR-binding peptide
  MOD_RES (1)..(3)..(35)..(36): Xaa is C or S

SEQ ID NO: 72046 - protein, 38 aa, Artificial Sequence; identical to SEQ ID NO: 24192
  Cyclic GFR-binding peptide
  MOD_RES (1)..(33)..(34): Xaa is C or S

SEQ ID NO: 72047 - protein, 29 aa, Artificial Sequence
  Cyclic GFR-binding peptide
  MOD_RES (1)..(1): Xaa is C or S
XARVVMNPYVKLIVNSSDDFFLVSLSSLQ

SEQ ID NO: 72048 - protein, 26 aa, Artificial Sequence
  Cyclic GFR-binding peptide
MNPYVKLIVNNSSDFFLVSLSSLKTP

SEQ ID NO: 72049 - protein, 28 aa, Artificial Sequence
  Cyclic GFR-binding peptide
  MOD_RES (26)..(27): Xaa is C or S
PYVKLIVNSSDDFFLVSLSSLQTPAXXP

SEQ ID NO: 72050 - protein, 26 aa, Artificial Sequence
  Cyclic GFR-binding peptide
EVVMDPYVKLVVNNAADFFLISLSSL

SEQ ID NO: 72051 - protein, 40 aa, Artificial Sequence; identical to SEQ ID NO: 24194
  Cyclic GFR-binding peptide
  MOD_RES (2)..(34)..(35): Xaa is C or S

SEQ ID NO: 72052 - protein, 38 aa, Artificial Sequence
  Cyclic GFR-binding peptide
  MOD_RES (34)..(34): Xaa is C or S
EELRPYVKLLKPKKRVYEFFLVSLSSHHVRSPQXKVSS

SEQ ID NO: 72053 - protein, 41 aa, Artificial Sequence; identical to SEQ ID NO: 24196
  Cyclic GFR-binding peptide
  MOD_RES (1)..(3)..(40): Xaa is C or S

SEQ ID NO: 72054 - protein, 23 aa, Artificial Sequence
  Cyclic GFR-binding peptide
GPYVKLIIQQKDNFFLMSLSSMK

SEQ ID NO: 72055 - protein, 40 aa, Artificial Sequence; identical to SEQ ID NO: 24197
  Cyclic GFR-binding peptide
  MOD_RES (2)..(34)..(35): Xaa is C or S

SEQ ID NO: 72056 - protein, 33 aa, Artificial Sequence
  Cyclic GFR-binding peptide
  MOD_RES (30)..(30): Xaa is C or S
VVMNPYVKLIVNSSDDFFLVSLSSLKTPAXTPK

SEQ ID NO: 72057 - protein, 35 aa, Artificial Sequence
  Cyclic GFR-binding peptide
  MOD_RES (29)..(30): Xaa is C or S
VMDPYVKLVVNNAADFFLISLSSLRAPVXXSAPAA

SEQ ID NO: 72058 - protein, 29 aa, Artificial Sequence
  Cyclic GFR-binding peptide
  MOD_RES (1)..(1): Xaa is C or S
XGEVVMEPYVKLVVKDYEDFFLMSLSSLE

SEQ ID NO: 72059 - protein, 26 aa, Artificial Sequence
  Cyclic GFR-binding peptide
VVMNPYVKLIVNNSSDFFLVSLSSLK

SEQ ID NO: 72060 - protein, 29 aa, Artificial Sequence
  Cyclic GFR-binding peptide
VVMDPYVKLVVNNAADFFLISLSSLRAPV

SEQ ID NO: 72061 - protein, 33 aa, Artificial Sequence
  Cyclic GFR-binding peptide
  MOD_RES (2)..(4): Xaa is C or S
RXGXGEVVMDPYVKLVVKENEDFFLMSLSSLET

SEQ ID NO: 72062 - protein, 31 aa, Artificial Sequence
  Cyclic GFR-binding peptide
  MOD_RES (2)..(4): Xaa is C or S
HXGXSRVVMNPYVKLIVNSSDDFFLVSLSSL

SEQ ID NO: 72063 - protein, 41 aa, Artificial Sequence; identical to SEQ ID NO: 24200
  Cyclic GFR-binding peptide
  MOD_RES (37)..(37): Xaa is C or S

SEQ ID NO: 72064 - protein, 31 aa, Artificial Sequence
  Cyclic GFR-binding peptide
  MOD_RES (27)..(27): Xaa is C or S
NPYVKLIVNSSDDFFLVSLSSLKTPAXTPKT

SEQ ID NO: 72065 - protein, 44 aa, Artificial Sequence; identical to SEQ ID NO: 24203
  Cyclic GFR-binding peptide
  MOD_RES (2)..(4)..(41): Xaa is C or S

SEQ ID NO: 72066 - protein, 42 aa, Artificial Sequence; identical to SEQ ID NO: 24205
  Cyclic GFR-binding peptide
  MOD_RES (2)..(4)..(36)..(37): Xaa is C or S

SEQ ID NO: 72067 - protein, 34 aa, Artificial Sequence
  Cyclic GFR-binding peptide
  MOD_RES (30)..(31): Xaa is C or S
VVMDPYVKLVVNNASDFFLISLSSLRTPVXXTPP

SEQ ID NO: 72068 - protein, 26 aa, Artificial Sequence
  Cyclic GFR-binding peptide
SMGEPYVKLTPVGMDDFFLVSLSSLK

SEQ ID NO: 72069 - protein, 40 aa, Artificial Sequence; identical to SEQ ID NO: 24207
  Cyclic GFR-binding peptide
  MOD_RES (2)..(34)..(35): Xaa is C or S

SEQ ID NO: 72070 - protein, 28 aa, Artificial Sequence
  Cyclic GFR-binding peptide
  MOD_RES (28)..(28): Xaa is C or S
MGPYVKLIIQQKDNFFLMSLSSMKTPTX

SEQ ID NO: 72071 - protein, 40 aa, Artificial Sequence; identical to SEQ ID NO: 24208
  Cyclic GFR-binding peptide
  MOD_RES (2)..(4)..(35)..(36): Xaa is C or S

SEQ ID NO: 72072 - protein, 37 aa, Artificial Sequence; identical to SEQ ID NO: 24209
  Cyclic GFR-binding peptide
  MOD_RES (2)..(4)..(36)..(37): Xaa is C or S

SEQ ID NO: 72073 - protein, 34 aa, Artificial Sequence
  Cyclic GFR-binding peptide
  MOD_RES (31)..(32): Xaa is C or S
VSMGEPYVKLTPVGMDDFFLVSLSSLKTPVXXAK

SEQ ID NO: 72074 - protein, 31 aa, Artificial Sequence
  Cyclic GFR-binding peptide
  MOD_RES (30)..(31): Xaa is C or S
KVIMPYVKLIKPTKGIFFLISLSSLDQSVXX

SEQ ID NO: 72075 - protein, 29 aa, Artificial Sequence
  Cyclic GFR-binding peptide
EVVMDPYVKLVVNNAADFFLISLSSLRAP

SEQ ID NO: 72076 - protein, 27 aa, Artificial Sequence
  Cyclic GFR-binding peptide
  MOD_RES (26)..(26): Xaa is C or S
PYVKLIVNSSDDFFLVSLSSLKTPAXT

SEQ ID NO: 72077 - protein, 37 aa, Artificial Sequence; identical to SEQ ID NO: 24210
  Cyclic GFR-binding peptide
  MOD_RES (36)..(36): Xaa is C or S

SEQ ID NO: 72078 - protein, 24 aa, Artificial Sequence
  Cyclic GFR-binding peptide
MPYVKLIKPTKGIFFLISLSSLDQ

SEQ ID NO: 72079 - protein, 34 aa, Artificial Sequence; identical to SEQ ID NO: 24215
  Cyclic GFR-binding peptide
  MOD_RES (32)..(33): Xaa is C or S

SEQ ID NO: 72080 - protein, 30 aa, Artificial Sequence
  Cyclic GFR-binding peptide
  MOD_RES (2)..(2): Xaa is C or S
GXARVVMNPYVKLIVNSSDDFFLVSLSSLQ

SEQ ID NO: 72081 - protein, 27 aa, Artificial Sequence
  Cyclic GFR-binding peptide
EVVMDPYVKLVVNNASDFFLISLSSLR

SEQ ID NO: 72082 - protein, 33 aa, Artificial Sequence
  Cyclic GFR-binding peptide
  MOD_RES (28)..(29): Xaa is C or S
MDPYVKLVVNNASDFFLISLSSLRTPVXXTPPT

SEQ ID NO: 72083 - protein, 37 aa, Artificial Sequence; identical to SEQ ID NO: 24217
  Cyclic GFR-binding peptide
  MOD_RES (1)..(3)..(35)..(36): Xaa is C or S

SEQ ID NO: 72084 - protein, 35 aa, Artificial Sequence; identical to SEQ ID NO: 24218
  Cyclic GFR-binding peptide

SEQ ID NO: 72085 - protein, 42 aa, Artificial Sequence; identical to SEQ ID NO: 24219
  Cyclic GFR-binding peptide
  MOD_RES (2)..(4)..(36)..(37): Xaa is C or S

SEQ ID NO: 72086 - protein, 27 aa, Artificial Sequence
  Cyclic GFR-binding peptide
IMPYVKLLLVRGNDFFLMSLSSTKVPA

SEQ ID NO: 72087 - protein, 32 aa, Artificial Sequence
  Cyclic GFR-binding peptide
  MOD_RES (26)..(27): Xaa is C or S
PYVKLIVNNSSDFFLVSLSSLKTPAXXAKPVA

SEQ ID NO: 72088 - protein, 21 aa, Artificial Sequence
  Cyclic GFR-binding peptide
MPYVKLIKPTKGIFFLISLSS

SEQ ID NO: 72089 - protein, 24 aa, Artificial Sequence
  Cyclic GFR-binding peptide
FPYVKLHQGQHPKIRFFLMSLSSE

SEQ ID NO: 72090 - protein, 37 aa, Artificial Sequence; identical to SEQ ID NO: 24224
  Cyclic GFR-binding peptide
  MOD_RES (32)..(33): Xaa is C or S

SEQ ID NO: 72091 - protein, 34 aa, Artificial Sequence
  Cyclic GFR-binding peptide
  MOD_RES (1)..(3): Xaa is C or S
XAXELHEELRPYVKLLKPKKRVYEFFLVSLSSHH

SEQ ID NO: 72092 - protein, 25 aa, Artificial Sequence
  Cyclic GFR-binding peptide
PYVKLYTVVGKDFFLISLSSLKTPV

SEQ ID NO: 72093 - protein, 32 aa, Artificial Sequence
  Cyclic GFR-binding peptide
  MOD_RES (26)..(27): Xaa is C or S
PYVKLIKPTKGIFFLISLSSLDQSVXXPSASA

SEQ ID NO: 72094 - protein, 29 aa, Artificial Sequence
  Cyclic GFR-binding peptide
  MOD_RES (1)..(1): Xaa is C or S
XGEVVMDPYVKLVVKENEDFFLMSLSSLE

SEQ ID NO: 72095 - protein, 34 aa, Artificial Sequence
  Cyclic GFR-binding peptide
  MOD_RES (29)..(30): Xaa is C or S
VVMPYVKLVKPTRGVFFLISLSSLDQPVXXPSAS

SEQ ID NO: 72096 - protein, 24 aa, Artificial Sequence
  Cyclic GFR-binding peptide
MGPYVKLYTVVGKDFFLISLSSLK

SEQ ID NO: 72097 - protein, 32 aa, Artificial Sequence
  Cyclic GFR-binding peptide
  MOD_RES (30)..(31): Xaa is C or S
SMGEPYVKLTPVGMDDFFLVSLSSLKTPVXXA

SEQ ID NO: 72098 - protein, 32 aa, Artificial Sequence
  Cyclic GFR-binding peptide
  MOD_RES (30)..(30): Xaa is C or S
PYVKLLKPKKRVYEFFLVSLSSHHVRSPQXKV

SEQ ID NO: 72099 - protein, 23 aa, Artificial Sequence
  Cyclic GFR-binding peptide
VMGPYVKLIIQQKDNFFLMSLSS

SEQ ID NO: 72100 - protein, 39 aa, Artificial Sequence; identical to SEQ ID NO: 24227
  Cyclic GFR-binding peptide
  MOD_RES (2)..(35)..(36): Xaa is C or S

SEQ ID NO: 72101 - protein, 26 aa, Artificial Sequence
  Cyclic GFR-binding peptide
VIMPYVKLLLVRGNDFFLMSLSSTKV

SEQ ID NO: 72102 - protein, 32 aa, Artificial Sequence
  Cyclic GFR-binding peptide
  MOD_RES (30)..(31): Xaa is C or S
RVIMPYVKLVKPKRGVFFLISLSSLAQPVXXP

SEQ ID NO: 72103 - protein, 26 aa, Artificial Sequence
  Cyclic GFR-binding peptide
IMPYVKLIKPTKGIFFLISLSSLDQS

SEQ ID NO: 72104 - protein, 24 aa, Artificial Sequence
  Cyclic GFR-binding peptide
MPYVKLVKPKRGVFFLISLSSLAQ

SEQ ID NO: 72105 - protein, 37 aa, Artificial Sequence; identical to SEQ ID NO: 24230
  Cyclic GFR-binding peptide
  MOD_RES (1)..(3)..(36)..(37): Xaa is C or S

SEQ ID NO: 72106 - protein, 28 aa, Artificial Sequence
  Cyclic GFR-binding peptide
  MOD_RES (26)..(27): Xaa is C or S
PYVKLVVNNAADFFLISLSSLRAPVXXS

SEQ ID NO: 72107 - protein, 32 aa, Artificial Sequence; identical to SEQ ID NO: 24233
  Cyclic GFR-binding peptide
  MOD_RES (31)..(32): Xaa is C or S

SEQ ID NO: 72108 - protein, 33 aa, Artificial Sequence
  Cyclic GFR-binding peptide
  MOD_RES (2)..(4): Xaa is C or S
RXGXESVAMGPYVKLYTVVGKDFFLISLSSLKT

SEQ ID NO: 72109 - protein, 36 aa, Artificial Sequence; identical to SEQ ID NO: 24235
  Cyclic GFR-binding peptide
  MOD_RES (31)..(32): Xaa is C or S

SEQ ID NO: 72110 - protein, 38 aa, Artificial Sequence; identical to SEQ ID NO: 24238
  Cyclic GFR-binding peptide
  MOD_RES (32)..(33): Xaa is C or S

SEQ ID NO: 72111 - protein, 23 aa, Artificial Sequence
  Cyclic GFR-binding peptide
VMPYVKLVKPTRGVFFLISLSSL

SEQ ID NO: 72112 - protein, 27 aa, Artificial Sequence
  Cyclic GFR-binding peptide
QLFPYVKLHQGQHPKIRFFLMSLSSEE

SEQ ID NO: 72113 - protein, 26 aa, Artificial Sequence
  Cyclic GFR-binding peptide
  MOD_RES (1)..(1): Xaa is C or S
XSKVIMPYVKLIKPTKGIFFLISLSS

SEQ ID NO: 72114 - protein, 40 aa, Artificial Sequence; identical to SEQ ID NO: 24242
  Cyclic GFR-binding peptide
  MOD_RES (2)..(4)..(36)..(37): Xaa is C or S

SEQ ID NO: 72115 - protein, 32 aa, Artificial Sequence
  Cyclic GFR-binding peptide
  MOD_RES (2)..(4): Xaa is C or S
HXGXARVVMNPYVKLIVNSSDDFFLVSLSSLQ

SEQ ID NO: 72116 - protein, 35 aa, Artificial Sequence; identical to SEQ ID NO: 24244
  Cyclic GFR-binding peptide
  MOD_RES (1)..(33)..(34): Xaa is C or S

SEQ ID NO: 72117 - protein, 25 aa, Artificial Sequence
  Cyclic GFR-binding peptide
FPYVKLHQGQHPKIRFFLMSLSSEE

SEQ ID NO: 72118 - protein, 38 aa, Artificial Sequence; identical to SEQ ID NO: 24246
  Cyclic GFR-binding peptide
  MOD_RES (33)..(33): Xaa is C or S

SEQ ID NO: 72119 - protein, 40 aa, Artificial Sequence; identical to SEQ ID NO: 24248
  Cyclic GFR-binding peptide
  MOD_RES (1)..(3)..(35)..(36): Xaa is C or S

SEQ ID NO: 72120 - protein, 36 aa, Artificial Sequence; identical to SEQ ID NO: 24249
  Cyclic GFR-binding peptide
  MOD_RES (31)..(32): Xaa is C or S

SEQ ID NO: 72121 - protein, 36 aa, Artificial Sequence
  Cyclic GFR-binding peptide
  MOD_RES (30)..(31): Xaa is C or S
VVMDPYVKLVVNNAADFFLISLSSLRAPVXXSAPAA

SEQ ID NO: 72122 - protein, 25 aa, Artificial Sequence
  Cyclic GFR-binding peptide
PYVKLVKPKRGVFFLISLSSLAQPV

SEQ ID NO: 72123 - protein, 32 aa, Artificial Sequence
  Cyclic GFR-binding peptide
  MOD_RES (30)..(31): Xaa is C or S
VVMDPYVKLVVNNASDFFLISLSSLRTPVXXT

SEQ ID NO: 72124 - protein, 32 aa, Artificial Sequence
  Cyclic GFR-binding peptide
  MOD_RES (1)..(3): Xaa is C or S
XKXSRVIMPYVKLVKPKRGVFFLISLSSLAQP

SEQ ID NO: 72125 - protein, 31 aa, Artificial Sequence; identical to SEQ ID NO: 24250
  Cyclic GFR-binding peptide
  MOD_RES (31)..(31): Xaa is C or S

SEQ ID NO: 72126 - protein, 37 aa, Artificial Sequence; identical to SEQ ID NO: 24251
  Cyclic GFR-binding peptide
  MOD_RES (2)..(34)..(35): Xaa is C or S

SEQ ID NO: 72127 - protein, 29 aa, Artificial Sequence
  Cyclic GFR-binding peptide
  MOD_RES (2)..(2): Xaa is C or S
KXSKVIMPYVKLIKPTKGIFFLISLSSLD

SEQ ID NO: 72128 - protein, 29 aa, Artificial Sequence
  Cyclic GFR-binding peptide
  MOD_RES (28)..(29): Xaa is C or S
GEPYVKLTPVGMDDFFLVSLSSLKTPVXX

SEQ ID NO: 72129 - protein, 30 aa, Artificial Sequence
  Cyclic GFR-binding peptide
  MOD_RES (1)..(1): Xaa is C or S
XELHEELRPYVKLLKPKKRVYEFFLVSLSS

SEQ ID NO: 72130 - protein, 35 aa, Artificial Sequence; identical to SEQ ID NO: 24253
  Cyclic GFR-binding peptide
  MOD_RES (32)..(33): Xaa is C or S

SEQ ID NO: 72131 - protein, 39 aa, Artificial Sequence; identical to SEQ ID NO: 24252
  Cyclic GFR-binding peptide
  MOD_RES (1)..(3)..(35)..(36): Xaa is C or S

SEQ ID NO: 72132 - protein, 32 aa, Artificial Sequence
  Cyclic GFR-binding peptide
  MOD_RES (28)..(29): Xaa is C or S
MEPYVKLVVKDYEDFFLMSLSSLETPVXXAKP

SEQ ID NO: 72133 - protein, 35 aa, Artificial Sequence
  Cyclic GFR-binding peptide
  MOD_RES (30)..(31): Xaa is C or S
EVIMPYVKLLLVRGNDFFLMSLSSTKVPAXXTSPV

SEQ ID NO: 72134 - protein, 20 aa, Artificial Sequence
  Cyclic GFR-binding peptide
PYVKLVVNNAADFFLISLSS

SEQ ID NO: 72135 - protein, 42 aa, Artificial Sequence; identical to SEQ ID NO: 24254
  Cyclic GFR-binding peptide
  MOD_RES (1)..(3)..(36)..(37): Xaa is C or S

SEQ ID NO: 72136 - protein, 31 aa, Artificial Sequence
  Cyclic GFR-binding peptide
  MOD_RES (27)..(28): Xaa is C or S
GPYVKLYTVVGKDFFLISLSSLKTPVXXAKS

SEQ ID NO: 72137 - protein, 28 aa, Artificial Sequence
  Cyclic GFR-binding peptide
  MOD_RES (28)..(28): Xaa is C or S
MNPYVKLIVNNSSDFFLVSLSSLKTPAX

SEQ ID NO: 72138 - protein, 31 aa, Artificial Sequence
  Cyclic GFR-binding peptide
  MOD_RES (26)..(27): Xaa is C or S
PYVKLIVNNSSDFFLVSLSSLKTPAXXAKPV

SEQ ID NO: 72139 - protein, 33 aa, Artificial Sequence
  Cyclic GFR-binding peptide
  MOD_RES (27)..(28): Xaa is C or S
NPYVKLIVNSSDDFFLVSLSSLKTPAXXPKPVH

SEQ ID NO: 72140 - protein, 35 aa, Artificial Sequence; identical to SEQ ID NO: 24256
  Cyclic GFR-binding peptide
  MOD_RES (2)..(34)..(35): Xaa is C or S

SEQ ID NO: 72141 - protein, 32 aa, Artificial Sequence
  Cyclic GFR-binding peptide
LHEELRPYVKLLKPKKRVYEFFLVSLSSHHVR

SEQ ID NO: 72142 - protein, 38 aa, Artificial Sequence; identical to SEQ ID NO: 24258
  Cyclic GFR-binding peptide
  MOD_RES (32)..(33): Xaa is C or S

SEQ ID NO: 72143 - protein, 33 aa, Artificial Sequence; identical to SEQ ID NO: 24260
  Cyclic GFR-binding peptide
  MOD_RES (31)..(32): Xaa is C or S

SEQ ID NO: 72144 - protein, 36 aa, Artificial Sequence; identical to SEQ ID NO: 24262
  Cyclic GFR-binding peptide
  MOD_RES (2)..(4)..(36): Xaa is C or S

SEQ ID NO: 72145 - protein, 30 aa, Artificial Sequence
  Cyclic GFR-binding peptide
  MOD_RES (2)..(2): Xaa is C or S
GXGEVVMEPYVKLVVKDYEDFFLMSLSSLE

SEQ ID NO: 72146 - protein, 39 aa, Artificial Sequence; identical to SEQ ID NO: 24264
  Cyclic GFR-binding peptide
  MOD_RES (1)..(33)..(34): Xaa is C or S

SEQ ID NO: 72147 - protein, 37 aa, Artificial Sequence; identical to SEQ ID NO: 24265
  Cyclic GFR-binding peptide
  MOD_RES (2)..(34)..(35): Xaa is C or S

SEQ ID NO: 72148 - protein, 29 aa, Artificial Sequence
  Cyclic GFR-binding peptide
  MOD_RES (2)..(2): Xaa is C or S
GXAKVVMNPYVKLIVNNSSDFFLVSLSSL

SEQ ID NO: 72149 - protein, 29 aa, Artificial Sequence
  Cyclic GFR-binding peptide
SVAMGPYVKLYTVVGKDFFLISLSSLKTP

SEQ ID NO: 72150 - protein, 20 aa, Artificial Sequence
  Cyclic GFR-binding peptide
PYVKLVKPTRGVFFLISLSS

SEQ ID NO: 72151 - protein, 30 aa, Artificial Sequence; identical to SEQ ID NO: 1814
  Cyclic GFR-binding peptide

SEQ ID NO: 72152 - protein, 31 aa, Artificial Sequence
  Cyclic GFR-binding peptide
  MOD_RES (1)..(1): Xaa is C or S
XSRVVMNPYVKLIVNSSDDFFLVSLSSLKTP

SEQ ID NO: 72153 - protein, 21 aa, Artificial Sequence
  Cyclic GFR-binding peptide
EPYVKLVVKDYEDFFLMSLSS

SEQ ID NO: 72154 - protein, 36 aa, Artificial Sequence; identical to SEQ ID NO: 24268
  Cyclic GFR-binding peptide
  MOD_RES (2)..(4)..(36): Xaa is C or S

SEQ ID NO: 72155 - protein, 34 aa, Artificial Sequence
  Cyclic GFR-binding peptide
  MOD_RES (2)..(2): Xaa is C or S
EXKNHQLFPYVKLHQGQHPKIRFFLMSLSSEETP

SEQ ID NO: 72156 - protein, 29 aa, Artificial Sequence
  Cyclic GFR-binding peptide
  MOD_RES (26)..(27): Xaa is C or S
PYVKLVVKDYEDFFLMSLSSLETPVXXAK

SEQ ID NO: 72157 - protein, 34 aa, Artificial Sequence
  Cyclic GFR-binding peptide
  MOD_RES (28)..(29): Xaa is C or S
MNPYVKLIVNSSDDFFLVSLSSLKTPAXXPKPVY

SEQ ID NO: 72158 - protein, 35 aa, Artificial Sequence
  Cyclic GFR-binding peptide
  MOD_RES (31)..(31): Xaa is C or S
RPYVKLLKPKKRVYEFFLVSLSSHHVRSPQXKVSS

SEQ ID NO: 72159 - protein, 31 aa, Artificial Sequence
  Cyclic GFR-binding peptide
  MOD_RES (29)..(30): Xaa is C or S
VMNPYVKLIVNNSSDFFLVSLSSLKTPAXXA

SEQ ID NO: 72160 - protein, 32 aa, Artificial Sequence
  Cyclic GFR-binding peptide
  MOD_RES (27)..(28): Xaa is C or S
EPYVKLTPVGMDDFFLVSLSSLKTPVXXAKGV

SEQ ID NO: 72161 - protein, 27 aa, Artificial Sequence
  Cyclic GFR-binding peptide
NHQLFPYVKLHQGQHPKIRFFLMSLSS

SEQ ID NO: 72162 - protein, 33 aa, Artificial Sequence
  Cyclic GFR-binding peptide
  MOD_RES (2)..(4): Xaa is C or S
LXGXEEVIMPYVKLLLVRGNDFFLMSLSSTKVP

SEQ ID NO: 72163 - protein, 31 aa, Artificial Sequence
  Cyclic GFR-binding peptide
  MOD_RES (2)..(2): Xaa is C or S
EXKNHQLFPYVKLHQGQHPKIRFFLMSLSSE

SEQ ID NO: 72164 - protein, 35 aa, Artificial Sequence
  Cyclic GFR-binding peptide
  MOD_RES (29)..(30): Xaa is C or S
VMEPYVKLVVKDYEDFFLMSLSSLETPVXXAKPIS

SEQ ID NO: 72165 - protein, 26 aa, Artificial Sequence
  Cyclic GFR-binding peptide
VMGPYVKLIIQQKDNFFLMSLSSMKT

SEQ ID NO: 72166 - protein, 28 aa, Artificial Sequence
  Cyclic GFR-binding peptide
AVSMGEPYVKLTPVGMDDFFLVSLSSLK

SEQ ID NO: 72167 - protein, 30 aa, Artificial Sequence
  Cyclic GFR-binding peptide
  MOD_RES (29)..(30): Xaa is C or S
AMGPYVKLYTVVGKDFFLISLSSLKTPVXX

SEQ ID NO: 72168 - protein, 41 aa, Artificial Sequence; identical to SEQ ID NO: 24272
  Cyclic GFR-binding peptide
  MOD_RES (2)..(4)..(38): Xaa is C or S

SEQ ID NO: 72169 - protein, 32 aa, Artificial Sequence
  Cyclic GFR-binding peptide
  MOD_RES (2)..(4): Xaa is C or S
LXGXEEVIMPYVKLLLVRGNDFFLMSLSSTKV

SEQ ID NO: 72170 - protein, 25 aa, Artificial Sequence
  Cyclic GFR-binding peptide
VVMDPYVKLVVKENEDFFLMSLSSL

SEQ ID NO: 72171 - protein, 27 aa, Artificial Sequence
  Cyclic GFR-binding peptide
MGPYVKLIIQQKDNFFLMSLSSMKTPT

SEQ ID NO: 72172 - protein, 38 aa, Artificial Sequence; identical to SEQ ID NO: 24273
  Cyclic GFR-binding peptide
  MOD_RES (1)..(3)..(35)..(36): Xaa is C or S

SEQ ID NO: 72173 - protein, 37 aa, Artificial Sequence; identical to SEQ ID NO: 24274
  Cyclic GFR-binding peptide
  MOD_RES (32)..(33): Xaa is C or S

SEQ ID NO: 72174 - protein, 22 aa, Artificial Sequence
  Cyclic GFR-binding peptide
PYVKLYTVVGKDFFLISLSSLK

SEQ ID NO: 72175 - protein, 31 aa, Artificial Sequence
  Cyclic GFR-binding peptide
  MOD_RES (2)..(2): Xaa is C or S
GXAKVVMNPYVKLIVNNSSDFFLVSLSSLKT

SEQ ID NO: 72176 - protein, 29 aa, Artificial Sequence
  Cyclic GFR-binding peptide
LFPYVKLHQGQHPKIRFFLMSLSSEETPV

SEQ ID NO: 72177 - protein, 41 aa, Artificial Sequence; identical to SEQ ID NO: 24275
  Cyclic GFR-binding peptide
  MOD_RES (1)..(3)..(35)..(36): Xaa is C or S

SEQ ID NO: 72178 - protein, 37 aa, Artificial Sequence
  Cyclic GFR-binding peptide
  MOD_RES (32)..(33): Xaa is C or S
GEVVMDPYVKLVVKENEDFFLMSLSSLETPVXXAKPI

SEQ ID NO: 72179 - protein, 26 aa, Artificial Sequence
  Cyclic GFR-binding peptide
LFPYVKLHQGQHPKIRFFLMSLSSEE

SEQ ID NO: 72180 - protein, 33 aa, Artificial Sequence
  Cyclic GFR-binding peptide
  MOD_RES (28)..(29): Xaa is C or S
VMPYVKLVKPTRGVFFLISLSSLDQPVXXPSAS

SEQ ID NO: 72181 - protein, 44 aa, Artificial Sequence; identical to SEQ ID NO: 24277
  Cyclic GFR-binding peptide
  MOD_RES (2)..(4)..(38): Xaa is C or S

SEQ ID NO: 72182 - protein, 32 aa, Artificial Sequence
  Cyclic GFR-binding peptide
  MOD_RES (26)..(27): Xaa is C or S
PYVKLLLVRGNDFFLMSLSSTKVPAXXTSPVR

SEQ ID NO: 72183 - protein, 23 aa, Artificial Sequence
  Cyclic GFR-binding peptide
PYVKLTPVGMDDFFLVSLSSLKT

SEQ ID NO: 72184 - protein, 33 aa, Artificial Sequence
  Cyclic GFR-binding peptide
  MOD_RES (27)..(28): Xaa is C or S
EPYVKLTPVGMDDFFLVSLSSLKTPVXXAKGVK

SEQ ID NO: 72185 - protein, 29 aa, Artificial Sequence
  Cyclic GFR-binding peptide
  MOD_RES (29)..(29): Xaa is C or S
VMDPYVKLVVNNAADFFLISLSSLRAPVX

SEQ ID NO: 72186 - protein, 27 aa, Artificial Sequence
  Cyclic GFR-binding peptide
  MOD_RES (26)..(27): Xaa is C or S
PYVKLVVNNASDFFLISLSSLRTPVXX

SEQ ID NO: 72187 - protein, 28 aa, Artificial Sequence
  Cyclic GFR-binding peptide
VMDPYVKLVVNNAADFFLISLSSLRAPV

SEQ ID NO: 72188 - protein, 23 aa, Artificial Sequence
  Cyclic GFR-binding peptide
MGPYVKLIIQQKDNFFLMSLSSM

SEQ ID NO: 72189 - protein, 27 aa, Artificial Sequence
  Cyclic GFR-binding peptide
VMDPYVKLVVNNAADFFLISLSSLRAP

SEQ ID NO: 72190 - protein, 28 aa, Artificial Sequence
  Cyclic GFR-binding peptide
  MOD_RES (1)..(1): Xaa is C or S
XSRVVMNPYVKLIVNSSDDFFLVSLSSL

SEQ ID NO: 72191 - protein, 30 aa, Artificial Sequence
  Cyclic GFR-binding peptide
  MOD_RES (1)..(3): Xaa is C or S
XGXESVAMGPYVKLYTVVGKDFFLISLSSL

SEQ ID NO: 72192 - protein, 20 aa, Artificial Sequence
  Cyclic GFR-binding peptide
PYVKLVVNNAADFFLISLSS

SEQ ID NO: 72193 - protein, 31 aa, Artificial Sequence
  Cyclic GFR-binding peptide
  MOD_RES (2)..(4): Xaa is C or S
RXGXGEVVMDPYVKLVVKENEDFFLMSLSSL

SEQ ID NO: 72194 - protein, 28 aa, Artificial Sequence
  Cyclic GFR-binding peptide
  MOD_RES (27)..(28): Xaa is C or S
DPYVKLVVKENEDFFLMSLSSLETPVXX

SEQ ID NO: 72195 - protein, 28 aa, Artificial Sequence
  Cyclic GFR-binding peptide
  MOD_RES (1)..(1): Xaa is C or S
XGEVVMDPYVKLVVKENEDFFLMSLSSL

SEQ ID NO: 72196 - protein, 35 aa, Artificial Sequence; identical to SEQ ID NO: 24282
  Cyclic GFR-binding peptide
  MOD_RES (2)..(34)..(35): Xaa is C or S

SEQ ID NO: 72197 - protein, 29 aa, Artificial Sequence
  Cyclic GFR-binding peptide
ESVAMGPYVKLYTVVGKDFFLISLSSLKT

SEQ ID NO: 72198 - protein, 26 aa, Artificial Sequence
  Cyclic GFR-binding peptide
MPYVKLIKPTKGIFFLISLSSLDQSV

SEQ ID NO: 72199 - protein, 36 aa, Artificial Sequence
  Cyclic GFR-binding peptide
  MOD_RES (30)..(31): Xaa is C or S
VVMDPYVKLVVNNASDFFLISLSSLRTPVXXTPPTS

SEQ ID NO: 72200 - protein, 37 aa, Artificial Sequence; identical to SEQ ID NO: 24283
  Cyclic GFR-binding peptide
  MOD_RES (2)..(33)..(34): Xaa is C or S

SEQ ID NO: 72201 - protein, 34 aa, Artificial Sequence
  Cyclic GFR-binding peptide
  MOD_RES (2)..(4): Xaa is C or S
RXGXESVAMGPYVKLYTVVGKDFFLISLSSLKTP

SEQ ID NO: 72202 - protein, 28 aa, Artificial Sequence
  Cyclic GFR-binding peptide
  MOD_RES (2)..(2): Xaa is C or S
GXAEVVMDPYVKLVVNNAADFFLISLSS

SEQ ID NO: 72203 - protein, 36 aa, Artificial Sequence
  Cyclic GFR-binding peptide
  MOD_RES (30)..(31): Xaa is C or S
VVMNPYVKLIVNSSDDFFLVSLSSLKTPAXXPKPVH

SEQ ID NO: 72204 - protein, 27 aa, Artificial Sequence
  Cyclic GFR-binding peptide
  MOD_RES (27)..(27): Xaa is C or S
EPYVKLVVKDYEDFFLMSLSSLETPVX

SEQ ID NO: 72205 - protein, 36 aa, Artificial Sequence
  Cyclic GFR-binding peptide
  MOD_RES (30)..(31): Xaa is C or S
VVMNPYVKLIVNNSSDFFLVSLSSLKTPAXXAKPVA

SEQ ID NO: 72206 - protein, 25 aa, Artificial Sequence
  Cyclic GFR-binding peptide
ELRPYVKLLKPKKRVYEFFLVSLSS

SEQ ID NO: 72207 - protein, 38 aa, Artificial Sequence
  Cyclic GFR-binding peptide
  MOD_RES (2)..(4)..(36)..(37): Xaa is C or S
RXGXGEVVMDPYVKLVVKENEDFFLMSLSSLETPVXXA

SEQ ID NO: 72208 - protein, 24 aa, Artificial Sequence
  Cyclic GFR-binding peptide
PYVKLLLVRGNDFFLMSLSSTKVP

SEQ ID NO: 72209 - protein, 30 aa, Artificial Sequence
  Cyclic GFR-binding peptide
  MOD_RES (2)..(2): Xaa is C or S
KXSRVIMPYVKLVKPKRGVFFLISLSSLAQ

SEQ ID NO: 72210 - protein, 33 aa, Artificial Sequence
  Cyclic GFR-binding peptide
  MOD_RES (30)..(31): Xaa is C or S
KVVMPYVKLVKPTRGVFFLISLSSLDQPVXXPS

SEQ ID NO: 72211 - protein, 23 aa, Artificial Sequence
  Cyclic GFR-binding peptide
IMPYVKLIKPTKGIFFLISLSSL

SEQ ID NO: 72212 - protein, 33 aa, Artificial Sequence
  Cyclic GFR-binding peptide
  MOD_RES (30)..(31): Xaa is C or S
VVMDPYVKLVVNNASDFFLISLSSLRTPVXXTP

SEQ ID NO: 72213 - protein, 24 aa, Artificial Sequence
  Cyclic GFR-binding peptide
MDPYVKLVVKENEDFFLMSLSSLE

SEQ ID NO: 72214 - protein, 35 aa, Artificial Sequence
  Cyclic GFR-binding peptide
  MOD_RES (30)..(31): Xaa is C or S
VVMEPYVKLVVKDYEDFFLMSLSSLETPVXXAKPI

SEQ ID NO: 72215 - protein, 29 aa, Artificial Sequence
  Cyclic GFR-binding peptide
EVVMDPYVKLVVNNASDFFLISLSSLRTP

SEQ ID NO: 72216 - protein, 28 aa, Artificial Sequence
  Cyclic GFR-binding peptide
VMDPYVKLVVKENEDFFLMSLSSLETPV

SEQ ID NO: 72217 - protein, 25 aa, Artificial Sequence
  Cyclic GFR-binding peptide
AMGPYVKLYTVVGKDFFLISLSSLK

SEQ ID NO: 72218 - protein, 33 aa, Artificial Sequence; identical to SEQ ID NO: 24285
  Cyclic GFR-binding peptide
  MOD_RES (33)..(33): Xaa is C or S

SEQ ID NO: 72219 - protein, 39 aa, Artificial Sequence; identical to SEQ ID NO: 24287
  Cyclic GFR-binding peptide
  MOD_RES (2)..(39): Xaa is C or S

SEQ ID NO: 72220 - protein, 35 aa, Artificial Sequence; identical to SEQ ID NO: 24288
  Cyclic GFR-binding peptide
  MOD_RES (32)..(33): Xaa is C or S

SEQ ID NO: 72221 - protein, 26 aa, Artificial Sequence
  Cyclic GFR-binding peptide
VSMGEPYVKLTPVGMDDFFLVSLSSL

SEQ ID NO: 72222 - protein, 35 aa, Artificial Sequence; identical to SEQ ID NO: 24290
  Cyclic GFR-binding peptide
  MOD_RES (1)..(33)..(34): Xaa is C or S

SEQ ID NO: 72223 - protein, 28 aa, Artificial Sequence
  Cyclic GFR-binding peptide
SKVIMPYVKLIKPTKGIFFLISLSSLDQ

SEQ ID NO: 72224 - protein, 25 aa, Artificial Sequence
  Cyclic GFR-binding peptide
VVMPYVKLVKPTRGVFFLISLSSLD

SEQ ID NO: 72225 - protein, 32 aa, Artificial Sequence; identical to SEQ ID NO: 24292
  Cyclic GFR-binding peptide
  MOD_RES (1)..(32): Xaa is C or S

SEQ ID NO: 72226 - protein, 32 aa, Artificial Sequence
  Cyclic GFR-binding peptide
  MOD_RES (1)..(3): Xaa is C or S
XGXRDVVMGPYVKLIIQQKDNFFLMSLSSMKT

SEQ ID NO: 72227 - protein, 32 aa, Artificial Sequence
  Cyclic GFR-binding peptide
  MOD_RES (27)..(28): Xaa is C or S
GPYVKLYTVVGKDFFLISLSSLKTPVXXAKSA

SEQ ID NO: 72228 - protein, 37 aa, Artificial Sequence; identical to SEQ ID NO: 24293
  Cyclic GFR-binding peptide
  MOD_RES (2)..(4): Xaa is C or S

SEQ ID NO: 72229 - protein, 31 aa, Artificial Sequence
  Cyclic GFR-binding peptide
  MOD_RES (2)..(4): Xaa is C or S
RXGXSEVVMDPYVKLVVNNASDFFLISLSSL

SEQ ID NO: 72230 - protein, 31 aa, Artificial Sequence; identical to SEQ ID NO: 24294
  Cyclic GFR-binding peptide
  MOD_RES (1)..(1): Xaa is C or S

SEQ ID NO: 72231 - protein, 27 aa, Artificial Sequence
  Cyclic GFR-binding peptide
SKVVMPYVKLVKPTRGVFFLISLSSLD

SEQ ID NO: 72232 - protein, 30 aa, Artificial Sequence
  Cyclic GFR-binding peptide
  MOD_RES (2)..(2): Xaa is C or S
GXEAVSMGEPYVKLTPVGMDDFFLVSLSSL

SEQ ID NO: 72233 - protein, 33 aa, Artificial Sequence
  Cyclic GFR-binding peptide
  MOD_RES (2)..(4): Xaa is C or S
RXGXSEVVMDPYVKLVVNNASDFFLISLSSLRT

SEQ ID NO: 72234 - protein, 33 aa, Artificial Sequence; identical to SEQ ID NO: 24296
  Cyclic GFR-binding peptide
  MOD_RES (1)..(32)..(33): Xaa is C or S

SEQ ID NO: 72235 - protein, 29 aa, Artificial Sequence
  Cyclic GFR-binding peptide
QLFPYVKLHQGQHPKIRFFLMSLSSEETP

SEQ ID NO: 72236 - protein, 37 aa, Artificial Sequence; identical to SEQ ID NO: 24297
  Cyclic GFR-binding peptide
  MOD_RES (2)..(4)..(35)..(36): Xaa is C or S

SEQ ID NO: 72237 - protein, 35 aa, Artificial Sequence; identical to SEQ ID NO: 24299
  Cyclic GFR-binding peptide
  MOD_RES (32)..(33): Xaa is C or S

SEQ ID NO: 72238 - protein, 24 aa, Artificial Sequence
  Cyclic GFR-binding peptide
EVIMPYVKLLLVRGNDFFLMSLSS

SEQ ID NO: 72239 - protein, 38 aa, Artificial Sequence; identical to SEQ ID NO: 24300
  Cyclic GFR-binding peptide
  MOD_RES (32)..(33): Xaa is C or S

SEQ ID NO: 72240 - protein, 33 aa, Artificial Sequence
  Cyclic GFR-binding peptide
  MOD_RES (1)..(3): Xaa is C or S
XGXRDVVMGPYVKLIIQQKDNFFLMSLSSMKTP

SEQ ID NO: 72241 - protein, 36 aa, Artificial Sequence
  Cyclic GFR-binding peptide
  MOD_RES (1)..(3): Xaa is C or S
XAXELHEELRPYVKLLKPKKRVYEFFLVSLSSHHVR

SEQ ID NO: 72242 - protein, 23 aa, Artificial Sequence
  Cyclic GFR-binding peptide
MGEPYVKLTPVGMDDFFLVSLSS

SEQ ID NO: 72243 - protein, 33 aa, Artificial Sequence
  Cyclic GFR-binding peptide
  MOD_RES (28)..(29): Xaa is C or S
IMPYVKLIKPTKGIFFLISLSSLDQSVXXPSAS

SEQ ID NO: 72244 - protein, 42 aa, Artificial Sequence; identical to SEQ ID NO: 24302
  Cyclic GFR-binding peptide
  MOD_RES (2)..(4)..(36)..(37): Xaa is C or S

SEQ ID NO: 72245 - protein, 31 aa, Artificial Sequence
  Cyclic GFR-binding peptide
  MOD_RES (31)..(31): Xaa is C or S
VSMGEPYVKLTPVGMDDFFLVSLSSLKTPVX

SEQ ID NO: 72246 - protein, 28 aa, Artificial Sequence
  Cyclic GFR-binding peptide
  MOD_RES (26)..(26): Xaa is C or S
PYVKLIVNSSDDFFLVSLSSLKTPAXTP

SEQ ID NO: 72247 - protein, 35 aa, Artificial Sequence; identical to SEQ ID NO: 24303
  Cyclic GFR-binding peptide
  MOD_RES (33)..(33): Xaa is C or S

SEQ ID NO: 72248 - protein, 34 aa, Artificial Sequence
  Cyclic GFR-binding peptide
  MOD_RES (29)..(30): Xaa is C or S
VMDPYVKLVVNNAADFFLISLSSLRAPVXXSAPA

SEQ ID NO: 72249 - protein, 40 aa, Artificial Sequence; identical to SEQ ID NO: 24304
  Cyclic GFR-binding peptide
  MOD_RES (2)..(4)..(36)..(37): Xaa is C or S

SEQ ID NO: 72250 - protein, 34 aa, Artificial Sequence
  Cyclic GFR-binding peptide
  MOD_RES (29)..(30): Xaa is C or S
VIMPYVKLVKPKRGVFFLISLSSLAQPVXXPAAS

SEQ ID NO: 72251 - protein, 27 aa, Artificial Sequence
  Cyclic GFR-binding peptide
  MOD_RES (26)..(27): Xaa is C or S
PYVKLIVNSSDDFFLVSLSSLKTPAXX

SEQ ID NO: 72252 - protein, 22 aa, Artificial Sequence
  Cyclic GFR-binding peptide
PYVKLIVNSSDDFFLVSLSSLK

SEQ ID NO: 72253 - protein, 34 aa, Artificial Sequence
  Cyclic GFR-binding peptide
  MOD_RES (28)..(29): Xaa is C or S
GEPYVKLTPVGMDDFFLVSLSSLKTPVXXAKGVK

SEQ ID NO: 72254 - protein, 32 aa, Artificial Sequence
  Cyclic GFR-binding peptide
  MOD_RES (31)..(32): Xaa is C or S
VSMGEPYVKLTPVGMDDFFLVSLSSLKTPVXX

SEQ ID NO: 72255 - protein, 28 aa, Artificial Sequence
  Cyclic GFR-binding peptide
  MOD_RES (1)..(1): Xaa is C or S
XGEVVMEPYVKLVVKDYEDFFLMSLSSL

SEQ ID NO: 72256 - protein, 23 aa, Artificial Sequence
  Cyclic GFR-binding peptide
MPYVKLIKPTKGIFFLISLSSLD

SEQ ID NO: 72257 - protein, 24 aa, Artificial Sequence
  Cyclic GFR-binding peptide
MGPYVKLIIQQKDNFFLMSLSSMK

SEQ ID NO: 72258 - protein, 33 aa, Artificial Sequence
  Cyclic GFR-binding peptide
  MOD_RES (27)..(28): Xaa is C or S
MPYVKLVKPTRGVFFLISLSSLDQPVXXPSASA

SEQ ID NO: 72259 - protein, 31 aa, Artificial Sequence
  Cyclic GFR-binding peptide
  MOD_RES (1)..(3): Xaa is C or S
XGXARVVMNPYVKLIVNSSDDFFLVSLSSLQ

SEQ ID NO: 72260 - protein, 30 aa, Artificial Sequence
  Cyclic GFR-binding peptide
  MOD_RES (28)..(28): Xaa is C or S
MNPYVKLIVNSSDDFFLVSLSSLKTPAXTP

SEQ ID NO: 72261 - protein, 25 aa, Artificial Sequence
  Cyclic GFR-binding peptide
PYVKLIIQQKDNFFLMSLSSMKTPT

SEQ ID NO: 72262 - protein, 34 aa, Artificial Sequence; identical to SEQ ID NO: 24308
  Cyclic GFR-binding peptide
  MOD_RES (1)..(32)..(33): Xaa is C or S

SEQ ID NO: 72263 - protein, 32 aa, Artificial Sequence
  Cyclic GFR-binding peptide
ELHEELRPYVKLLKPKKRVYEFFLVSLSSHHV

SEQ ID NO: 72264 - protein, 30 aa, Artificial Sequence
  Cyclic GFR-binding peptide
LRPYVKLLKPKKRVYEFFLVSLSSHHVRSP

SEQ ID NO: 72265 - protein, 35 aa, Artificial Sequence; identical to SEQ ID NO: 24310
  Cyclic GFR-binding peptide
  MOD_RES (32)..(33): Xaa is C or S

SEQ ID NO: 72266 - protein, 33 aa, Artificial Sequence
  Cyclic GFR-binding peptide
  MOD_RES (30)..(31): Xaa is C or S
SMGEPYVKLTPVGMDDFFLVSLSSLKTPVXXAK

SEQ ID NO: 72267 - protein, 32 aa, Artificial Sequence
  Cyclic GFR-binding peptide
  MOD_RES (26)..(27): Xaa is C or S
PYVKLIVNSSDDFFLVSLSSLKTPAXXPKPVH

SEQ ID NO: 72268 - protein, 31 aa, Artificial Sequence
  Cyclic GFR-binding peptide
  MOD_RES (30)..(31): Xaa is C or S
SMGEPYVKLTPVGMDDFFLVSLSSLKTPVXX

SEQ ID NO: 72269 - protein, 27 aa, Artificial Sequence
  Cyclic GFR-binding peptide
  MOD_RES (27)..(27): Xaa is C or S
GPYVKLIIQQKDNFFLMSLSSMKTPTX

SEQ ID NO: 72270 - protein, 29 aa, Artificial Sequence
  Cyclic GFR-binding peptide
  MOD_RES (28)..(29): Xaa is C or S
MNPYVKLIVNNSSDFFLVSLSSLKTPAXX

SEQ ID NO: 72271 - protein, 40 aa, Artificial Sequence; identical to SEQ ID NO: 24313
  Cyclic GFR-binding peptide
  MOD_RES (1)..(3)..(37): Xaa is C or S

SEQ ID NO: 72272 - protein, 27 aa, Artificial Sequence
  Cyclic GFR-binding peptide
RLSSLSILFFDAANNVVLKVYPDMVVE

SEQ ID NO: 72273 - protein, 28 aa, Artificial Sequence
  Cyclic GFR-binding peptide
  MOD_RES (1)..(2): Xaa is C or S
XXTPTKMSSLSMLFFNDKQQIILKVYPG

SEQ ID NO: 72274 - protein, 40 aa, Artificial Sequence; identical to SEQ ID NO: 24314
  Cyclic GFR-binding peptide
  MOD_RES (4)..(5)..(38)..(40): Xaa is C or S

SEQ ID NO: 72275 - protein, 27 aa, Artificial Sequence
  Cyclic GFR-binding peptide
  MOD_RES (26)..(26): Xaa is C or S
SSLSILFFIGKTPKILKVYPMIVKSXK

SEQ ID NO: 72276 - protein, 38 aa, Artificial Sequence; identical to SEQ ID NO: 24316
  Cyclic GFR-binding peptide
  MOD_RES (3)..(4)..(35)..(37): Xaa is C or S

SEQ ID NO: 72277 - protein, 41 aa, Artificial Sequence; identical to SEQ ID NO: 24317
  Cyclic GFR-binding peptide
  MOD_RES (6)..(7)..(39)..(41): Xaa is C or S

SEQ ID NO: 72278 - protein, 26 aa, Artificial Sequence
  Cyclic GFR-binding peptide
LSSLSILFFVGRTPKVLKVYPMVVKS

SEQ ID NO: 72279 - protein, 23 aa, Artificial Sequence
  Cyclic GFR-binding peptide
TKMSSLSMLFFNDKQQIILKVYP

SEQ ID NO: 72280 - protein, 32 aa, Artificial Sequence; identical to SEQ ID NO: 24319
  Cyclic GFR-binding peptide
  MOD_RES (32)..(32): Xaa is C or S

SEQ ID NO: 72281 - protein, 31 aa, Artificial Sequence
  Cyclic GFR-binding peptide
  MOD_RES (5)..(6): Xaa is C or S
SASPXXVSQDLSSLSILFFIGKTPKILKVYP

SEQ ID NO: 72282 - protein, 37 aa, Artificial Sequence; identical to SEQ ID NO: 24320
  Cyclic GFR-binding peptide
  MOD_RES (3)..(4)..(35)..(37): Xaa is C or S

SEQ ID NO: 72283 - protein, 31 aa, Artificial Sequence; identical to SEQ ID NO: 24321
  Cyclic GFR-binding peptide
  MOD_RES (1)..(1): Xaa is C or S

SEQ ID NO: 72284 - protein, 28 aa, Artificial Sequence
  Cyclic GFR-binding peptide
VPQALSSLSILFFVGRKPKVLKVYPMIV

SEQ ID NO: 72285 - protein, 25 aa, Artificial Sequence
  Cyclic GFR-binding peptide
KMSSLSMLFFNDKQQIILKVYPGMV

SEQ ID NO: 72286 - protein, 29 aa, Artificial Sequence
  Cyclic GFR-binding peptide
TKLSSLSVLFFDDSSNVILKVYPNMVVRS

SEQ ID NO: 72287 - protein, 32 aa, Artificial Sequence
  Cyclic GFR-binding peptide
  MOD_RES (7)..(7): Xaa is C or S
HVTKPTXAPTKLSSLSVLFFDDSSNVILKVYP

SEQ ID NO: 72288 - protein, 31 aa, Artificial Sequence
  Cyclic GFR-binding peptide
  MOD_RES (3)..(3): Xaa is C or S
PTXAPTKLSSLSVLFFDDSSNVILKVYPNMV

SEQ ID NO: 72289 - protein, 31 aa, Artificial Sequence
  Cyclic GFR-binding peptide
  MOD_RES (29)..(31): Xaa is C or S
QDLSSLSILFFVGRTPKVLKVYPMVVKSXKX

SEQ ID NO: 72290 - protein, 32 aa, Artificial Sequence
  Cyclic GFR-binding peptide
  MOD_RES (30)..(32): Xaa is C or S
PQDLSSLSILFFVGRTPKVLKVYPMVVKSXKX

SEQ ID NO: 72291 - protein, 32 aa, Artificial Sequence
  Cyclic GFR-binding peptide
  MOD_RES (29)..(31): Xaa is C or S
ELSSLSMLFFDEYDKVVLKVYPEMVVEGXGXR

SEQ ID NO: 72292 - protein, 29 aa, Artificial Sequence
  Cyclic GFR-binding peptide
  MOD_RES (28)..(28): Xaa is C or S
LSSLSMLFFDENEKVVLKVYPDMVVEGXG

SEQ ID NO: 72293 - protein, 27 aa, Artificial Sequence
  Cyclic GFR-binding peptide
TQLSSLSVLFFDDSSNVILKVYPNMVV

SEQ ID NO: 72294 - protein, 34 aa, Artificial Sequence
  Cyclic GFR-binding peptide
  MOD_RES (32)..(34): Xaa is C or S
PTKLSSLSVLFFDDMGVPTLKVYPEGMSVAEXGX

SEQ ID NO: 72295 - protein, 32 aa, Artificial Sequence; identical to SEQ ID NO: 24325
  Cyclic GFR-binding peptide
  MOD_RES (32)..(32): Xaa is C or S

SEQ ID NO: 72296 - protein, 34 aa, Artificial Sequence; identical to SEQ ID NO: 24326
  Cyclic GFR-binding peptide
  MOD_RES (1)..(2)..(34): Xaa is C or S

SEQ ID NO: 72297 - protein, 26 aa, Artificial Sequence
  Cyclic GFR-binding peptide
SSLSMLFFNDKQQIILKVYPGMVVDR

SEQ ID NO: 72298 - protein, 36 aa, Artificial Sequence
  Cyclic GFR-binding peptide
  MOD_RES (33)..(35): Xaa is C or S
VHHSSLSVLFFEYVRKKPKLLKVYPRLEEHLEXAXA

SEQ ID NO: 72299 - protein, 26 aa, Artificial Sequence
  Cyclic GFR-binding peptide
ESSLSMLFFRIKPHQGQHLKVYPFLQ

SEQ ID NO: 72300 - protein, 27 aa, Artificial Sequence
  Cyclic GFR-binding peptide
VPTKLSSLSILFFDKGVVTYLKVYPGM

SEQ ID NO: 72301 - protein, 30 aa, Artificial Sequence
  Cyclic GFR-binding peptide
  MOD_RES (4)..(4): Xaa is C or S
KPTXAPTKLSSLSVLFFDDSSNVILKVYPN

SEQ ID NO: 72302 - protein, 27 aa, Artificial Sequence
  Cyclic GFR-binding peptide
  MOD_RES (1)..(2): Xaa is C or S
XXAPTKLSSLSVLFFDSSNNVILKVYP

SEQ ID NO: 72303 - protein, 27 aa, Artificial Sequence
  Cyclic GFR-binding peptide
PTKLSSLSVLFFDDMGVPTLKVYPEGM

SEQ ID NO: 72304 - protein, 26 aa, Artificial Sequence
  Cyclic GFR-binding peptide
APTKLSSLSVLFFDDSSNVILKVYPN

SEQ ID NO: 72305 - protein, 34 aa, Artificial Sequence
  Cyclic GFR-binding peptide
  MOD_RES (31)..(33): Xaa is C or S
EESSLSMLFFRIKPHQGQHLKVYPFLQHNKXEXR

SEQ ID NO: 72306 - protein, 33 aa, Artificial Sequence; identical to SEQ ID NO: 24328
  Cyclic GFR-binding peptide
  MOD_RES (1)..(32): Xaa is C or S

SEQ ID NO: 72307 - protein, 28 aa, Artificial Sequence
  Cyclic GFR-binding peptide
  MOD_RES (1)..(2): Xaa is C or S
XXAPVKTSSLSMLFFDNGRVLLLKVYPM

SEQ ID NO: 72308 - protein, 41 aa, Artificial Sequence; identical to SEQ ID NO: 24330
  Cyclic GFR-binding peptide
  MOD_RES (4)..(5)..(38)..(40): Xaa is C or S

SEQ ID NO: 72309 - protein, 36 aa, Artificial Sequence; identical to SEQ ID NO: 24331
  Cyclic GFR-binding peptide
  MOD_RES (2)..(3)..(36): Xaa is C or S

SEQ ID NO: 72310 - protein, 34 aa, Artificial Sequence
  Cyclic GFR-binding peptide
  MOD_RES (6)..(6): Xaa is C or S
VTKPTXAPTKLSSLSVLFFDDSSNVILKVYPNMV

SEQ ID NO: 72311 - protein, 40 aa, Artificial Sequence; identical to SEQ ID NO: 24332
  Cyclic GFR-binding peptide
  MOD_RES (37)..(39): Xaa is C or S

SEQ ID NO: 72312 - protein, 36 aa, Artificial Sequence; identical to SEQ ID NO: 24334
  Cyclic GFR-binding peptide
  MOD_RES (1)..(35): Xaa is C or S

SEQ ID NO: 72313 - protein, 23 aa, Artificial Sequence
  Cyclic GFR-binding peptide
ELSSLSMLFFDENEKVVLKVYPD

SEQ ID NO: 72314 - protein, 38 aa, Artificial Sequence; identical to SEQ ID NO: 24335
  Cyclic GFR-binding peptide
  MOD_RES (6)..(38): Xaa is C or S

SEQ ID NO: 72315 - protein, 36 aa, Artificial Sequence; identical to SEQ ID NO: 24336
  Cyclic GFR-binding peptide
  MOD_RES (4)..(5): Xaa is C or S

SEQ ID NO: 72316 - protein, 31 aa, Artificial Sequence
  Cyclic GFR-binding peptide
  MOD_RES (30)..(30): Xaa is C or S
TKMSSLSMLFFNDKQQIILKVYPGMVVDRXG

SEQ ID NO: 72317 - protein, 30 aa, Artificial Sequence
  Cyclic GFR-binding peptide
  MOD_RES (29)..(29): Xaa is C or S
QDLSSLSILFFVGRTPKVLKVYPMVVKSXK

SEQ ID NO: 72318 - protein, 25 aa, Artificial Sequence
  Cyclic GFR-binding peptide
PTKMSSLSMLFFNDKQQIILKVYPG

SEQ ID NO: 72319 - protein, 41 aa, Artificial Sequence; identical to SEQ ID NO: 24341
  Cyclic GFR-binding peptide
  MOD_RES (5)..(6)..(38)..(40): Xaa is C or S

SEQ ID NO: 72320 - protein, 39 aa, Artificial Sequence; identical to SEQ ID NO: 24344
  Cyclic GFR-binding peptide
  MOD_RES (5)..(6)..(37)..(39): Xaa is C or S

SEQ ID NO: 72321 - protein, 33 aa, Artificial Sequence; identical to SEQ ID NO: 24345
  Cyclic GFR-binding peptide
  MOD_RES (1)..(33): Xaa is C or S

SEQ ID NO: 72322 - protein, 28 aa, Artificial Sequence
  Cyclic GFR-binding peptide
  MOD_RES (27)..(27): Xaa is C or S
SSLSMLFFDENEKVVLKVYPDMVVEGXG

SEQ ID NO: 72323 - protein, 33 aa, Artificial Sequence; identical to SEQ ID NO: 24346
  Cyclic GFR-binding peptide
  MOD_RES (2)..(3): Xaa is C or S

SEQ ID NO: 72324 - protein, 29 aa, Artificial Sequence
  Cyclic GFR-binding peptide
  MOD_RES (28)..(28): Xaa is C or S
SSLSVLFFDDMGVPTLKVYPEGMSVAEXG

SEQ ID NO: 72325 - protein, 32 aa, Artificial Sequence
  Cyclic GFR-binding peptide
  MOD_RES (32)..(32): Xaa is C or S
HHSSLSVLFFEYVRKKPKLLKVYPRLEEHLEX

SEQ ID NO: 72326 - protein, 40 aa, Artificial Sequence; identical to SEQ ID NO: 24347
  Cyclic GFR-binding peptide
  MOD_RES (4)..(5)..(37)..(39): Xaa is C or S

SEQ ID NO: 72327 - protein, 32 aa, Artificial Sequence
  Cyclic GFR-binding peptide
  MOD_RES (29)..(31): Xaa is C or S
KMSSLSMLFFNDKQQIILKVYPGMVVDRXGXS

SEQ ID NO: 72328 - protein, 31 aa, Artificial Sequence
  Cyclic GFR-binding peptide
  MOD_RES (4)..(5): Xaa is C or S
AAPXXVPQALSSLSILFFVGRKPKVLKVYPM

SEQ ID NO: 72329 - protein, 40 aa, Artificial Sequence; identical to SEQ ID NO: 24349
  Cyclic GFR-binding peptide
  MOD_RES (6)..(7)..(38)..(40): Xaa is C or S

SEQ ID NO: 72330 - protein, 36 aa, Artificial Sequence; identical to SEQ ID NO: 24350
  Cyclic GFR-binding peptide
  MOD_RES (5)..(6): Xaa is C or S

SEQ ID NO: 72331 - protein, 27 aa, Artificial Sequence
  Cyclic GFR-binding peptide
  MOD_RES (1)..(2): Xaa is C or S
XXVPTKLSSLSILFFDKGVVTYLKVYP

SEQ ID NO: 72332 - protein, 34 aa, Artificial Sequence; identical to SEQ ID NO: 24351
  Cyclic GFR-binding peptide
  MOD_RES (2)..(3): Xaa is C or S

SEQ ID NO: 72333 - protein, 29 aa, Artificial Sequence
  Cyclic GFR-binding peptide
  MOD_RES (1)..(2): Xaa is C or S
XXTPTKMSSLSMLFFNDKQQIILKVYPGM

SEQ ID NO: 72334 - protein, 29 aa, Artificial Sequence
  Cyclic GFR-binding peptide
SQDLSSLSILFFIGKTPKILKVYPMIVKS

SEQ ID NO: 72335 - protein, 31 aa, Artificial Sequence
  Cyclic GFR-binding peptide
  MOD_RES (2)..(2): Xaa is C or S
TXAPTKLSSLSVLFFDDSSNVILKVYPNMVV

SEQ ID NO: 72336 - protein, 20 aa, Artificial Sequence
  Cyclic GFR-binding peptide
SSLSILFFDKGVVTYLKVYP

SEQ ID NO: 72337 - protein, 28 aa, Artificial Sequence
  Cyclic GFR-binding peptide
RLSSLSILFFDSANNVVLKVYPDMVVES

SEQ ID NO: 72338 - protein, 27 aa, Artificial Sequence
  Cyclic GFR-binding peptide
PTELSSLSMLFFDEYDKVVLKVYPEMV

SEQ ID NO: 72339 - protein, 34 aa, Artificial Sequence
  Cyclic GFR-binding peptide
  MOD_RES (4)..(5): Xaa is C or S
PSTXXAPVKTSSLSMLFFDNGRVLLLKVYPMIVE

SEQ ID NO: 72340 - protein, 30 aa, Artificial Sequence
  Cyclic GFR-binding peptide
  MOD_RES (1)..(1): Xaa is C or S
XVPTKLSSLSVLFFDDMGVPTLKVYPEGMS

SEQ ID NO: 72341 - protein, 34 aa, Artificial Sequence; identical to SEQ ID NO: 24356
  Cyclic GFR-binding peptide
  MOD_RES (1)..(33): Xaa is C or S

SEQ ID NO: 72342 - protein, 34 aa, Artificial Sequence; identical to SEQ ID NO: 24358
  Cyclic GFR-binding peptide
  MOD_RES (4)..(4): Xaa is C or S

SEQ ID NO: 72343 - protein, 33 aa, Artificial Sequence; identical to SEQ ID NO: 24360
  Cyclic GFR-binding peptide
  MOD_RES (1)..(2): Xaa is C or S

SEQ ID NO: 72344 - protein, 34 aa, Artificial Sequence; identical to SEQ ID NO: 24361
  Cyclic GFR-binding peptide
  MOD_RES (3)..(3): Xaa is C or S

SEQ ID NO: 72345 - protein, 34 aa, Artificial Sequence
  Cyclic GFR-binding peptide
  MOD_RES (5)..(6): Xaa is C or S
IPKAXXVPTELSSLSMLFFDENEKVVLKVYPDMV

SEQ ID NO: 72346 - protein, 23 aa, Artificial Sequence
  Cyclic GFR-binding peptide
KLSSLSILFFDKGVVTYLKVYPG

SEQ ID NO: 72347 - protein, 34 aa, Artificial Sequence; identical to SEQ ID NO: 24362
  Cyclic GFR-binding peptide
  MOD_RES (32)..(34): Xaa is C or S

SEQ ID NO: 72348 - protein, 26 aa, Artificial Sequence
  Cyclic GFR-binding peptide
VPARLSSLSILFFDAANNVVLKVYPD

SEQ ID NO: 72349 - protein, 33 aa, Artificial Sequence; identical to SEQ ID NO: 24363
  Cyclic GFR-binding peptide
  MOD_RES (32)..(32): Xaa is C or S

SEQ ID NO: 72350 - protein, 28 aa, Artificial Sequence
  Cyclic GFR-binding peptide
RLSSLSILFFDAANNVVLKVYPDMVVEA

SEQ ID NO: 72351 - protein, 29 aa, Artificial Sequence
  Cyclic GFR-binding peptide
  MOD_RES (29)..(29): Xaa is C or S
QDLSSLSILFFVGRTPKVLKVYPMVVKSX

SEQ ID NO: 72352 - protein, 27 aa, Artificial Sequence
  Cyclic GFR-binding peptide
  MOD_RES (1)..(2): Xaa is C or S
XXTPTKMSSLSMLFFNDKQQIILKVYP

SEQ ID NO: 72353 - protein, 25 aa, Artificial Sequence
  Cyclic GFR-binding peptide
MSSLSMLFFNDKQQIILKVYPGMVV

SEQ ID NO: 72354 - protein, 26 aa, Artificial Sequence
  Cyclic GFR-binding peptide
TQLSSLSVLFFDDSSNVILKVYPNMV

SEQ ID NO: 72355 - protein, 26 aa, Artificial Sequence
  Cyclic GFR-binding peptide
QDLSSLSILFFVGRTPKVLKVYPMVV

SEQ ID NO: 72356 - protein, 36 aa, Artificial Sequence
  Cyclic GFR-binding peptide
  MOD_RES (6)..(7): Xaa is C or S
KVGKAXXVPTKLSSLSVLFFDDMGVPTLKVYPEGMS

SEQ ID NO: 72357 - protein, 32 aa, Artificial Sequence; identical to SEQ ID NO: 24366
  Cyclic GFR-binding peptide
  MOD_RES (1)..(1): Xaa is C or S

SEQ ID NO: 72358 - protein, 38 aa, Artificial Sequence; identical to SEQ ID NO: 24367
  Cyclic GFR-binding peptide
  MOD_RES (6)..(7): Xaa is C or S

SEQ ID NO: 72359 - protein, 27 aa, Artificial Sequence
  Cyclic GFR-binding peptide
PTKLSSLSILFFDKGVVTYLKVYPGMA

SEQ ID NO: 72360 - protein, 39 aa, Artificial Sequence; identical to SEQ ID NO: 24368
  Cyclic GFR-binding peptide
  MOD_RES (5)..(6)..(37)..(39): Xaa is C or S

SEQ ID NO: 72361 - protein, 30 aa, Artificial Sequence
  Cyclic GFR-binding peptide
  MOD_RES (29)..(29): Xaa is C or S
KLSSLSILFFDKGVVTYLKVYPGMAVSEXG

SEQ ID NO: 72362 - protein, 29 aa, Artificial Sequence
  Cyclic GFR-binding peptide
  MOD_RES (28)..(28): Xaa is C or S
MSSLSMLFFNDKQQIILKVYPGMVVDRXG

SEQ ID NO: 72363 - protein, 29 aa, Artificial Sequence
  Cyclic GFR-binding peptide
  MOD_RES (29)..(29): Xaa is C or S
LSSLSVLFFDDMGVPTLKVYPEGMSVAEX

SEQ ID NO: 72364 - protein, 39 aa, Artificial Sequence; identical to SEQ ID NO: 24371
  Cyclic GFR-binding peptide
  MOD_RES (6)..(7)..(39): Xaa is C or S

SEQ ID NO: 72365 - protein, 29 aa, Artificial Sequence
  Cyclic GFR-binding peptide
  MOD_RES (1)..(2): Xaa is C or S
XXVPQALSSLSILFFVGRKPKVLKVYPMI

SEQ ID NO: 72366 - protein, 34 aa, Artificial Sequence; identical to SEQ ID NO: 24374
  Cyclic GFR-binding peptide
  MOD_RES (3)..(4): Xaa is C or S

SEQ ID NO: 72367 - protein, 30 aa, Artificial Sequence; identical to SEQ ID NO: 757
  Cyclic GFR-binding peptide

SEQ ID NO: 72368 - protein, 43 aa, Artificial Sequence; identical to SEQ ID NO: 24378
  Cyclic GFR-binding peptide
  MOD_RES (6)..(7)..(40)..(42): Xaa is C or S

SEQ ID NO: 72369 - protein, 24 aa, Artificial Sequence
  Cyclic GFR-binding peptide
PTELSSLSMLFFDEYDKVVLKVYP

SEQ ID NO: 72370 - protein, 27 aa, Artificial Sequence
  Cyclic GFR-binding peptide
KLSSLSVLFFDDMGVPTLKVYPEGMSV

SEQ ID NO: 72371 - protein, 39 aa, Artificial Sequence; identical to SEQ ID NO: 24379
  Cyclic GFR-binding peptide
  MOD_RES (4)..(5)..(37)..(39): Xaa is C or S

SEQ ID NO: 72372 - protein, 29 aa, Artificial Sequence
  Cyclic GFR-binding peptide
PTKLSSLSVLFFDSSNNVILKVYPNMVVK

SEQ ID NO: 72373 - protein, 24 aa, Artificial Sequence
  Cyclic GFR-binding peptide
SSLSILFFVGRTPKVLKVYPMVVK

SEQ ID NO: 72374 - protein, 35 aa, Artificial Sequence
  Cyclic GFR-binding peptide
  MOD_RES (6)..(7): Xaa is C or S
RVPSTXXAPVKTSSLSMLFFDNGRVLLLKVYPMIV

SEQ ID NO: 72375 - protein, 37 aa, Artificial Sequence
  Cyclic GFR-binding peptide
  MOD_RES (34)..(36): Xaa is C or S
RVHHSSLSVLFFEYVRKKPKLLKVYPRLEEHLEXAXA

SEQ ID NO: 72376 - protein, 35 aa, Artificial Sequence; identical to SEQ ID NO: 24381
  Cyclic GFR-binding peptide
  MOD_RES (4)..(5): Xaa is C or S

SEQ ID NO: 72377 - protein, 31 aa, Artificial Sequence
  Cyclic GFR-binding peptide
VPTEESSLSMLFFRIKPHQGQHLKVYPFLQH

SEQ ID NO: 72378 - protein, 30 aa, Artificial Sequence
  Cyclic GFR-binding peptide
  MOD_RES (30)..(30): Xaa is C or S
TRLSSLSILFFDSANNVVLKVYPDMVVESX

SEQ ID NO: 72379 - protein, 35 aa, Artificial Sequence; identical to SEQ ID NO: 24382
  Cyclic GFR-binding peptide
  MOD_RES (4)..(5): Xaa is C or S

SEQ ID NO: 72380 - protein, 29 aa, Artificial Sequence
  Cyclic GFR-binding peptide
  MOD_RES (1)..(1): Xaa is C or S
XAPTKLSSLSVLFFDDSSNVILKVYPNMV

SEQ ID NO: 72381 - protein, 23 aa, Artificial Sequence
  Cyclic GFR-binding peptide
LSSLSILFFDKGVVTYLKVYPGM

SEQ ID NO: 72382 - protein, 31 aa, Artificial Sequence
  Cyclic GFR-binding peptide
  MOD_RES (31)..(31): Xaa is C or S
TKLSSLSVLFFDDMGVPTLKVYPEGMSVAEX

SEQ ID NO: 72383 - protein, 28 aa, Artificial Sequence
  Cyclic GFR-binding peptide
  MOD_RES (2)..(3): Xaa is C or S
PXXVPQALSSLSILFFVGRKPKVLKVYP

SEQ ID NO: 72384 - protein, 27 aa, Artificial Sequence
  Cyclic GFR-binding peptide
TKMSSLSMLFFNDKQQIILKVYPGMVV

SEQ ID NO: 72385 - protein, 37 aa, Artificial Sequence; identical to SEQ ID NO: 24385
  Cyclic GFR-binding peptide
  MOD_RES (2)..(3)..(34)..(36): Xaa is C or S

SEQ ID NO: 72386 - protein, 26 aa, Artificial Sequence
  Cyclic GFR-binding peptide
VPTELSSLSMLFFDENEKVVLKVYPD

SEQ ID NO: 72387 - protein, 40 aa, Artificial Sequence; identical to SEQ ID NO: 24386
  Cyclic GFR-binding peptide
  MOD_RES (5)..(6)..(37)..(39): Xaa is C or S

SEQ ID NO: 72388 - protein, 26 aa, Artificial Sequence
  Cyclic GFR-binding peptide
PTKLSSLSILFFDKGVVTYLKVYPGM

SEQ ID NO: 72389 - protein, 25 aa, Artificial Sequence
  Cyclic GFR-binding peptide
KLSSLSVLFFDDSSNVILKVYPNMV

SEQ ID NO: 72390 - protein, 29 aa, Artificial Sequence
  Cyclic GFR-binding peptide
TELSSLSMLFFDEYDKVVLKVYPEMVVEG

SEQ ID NO: 72391 - protein, 31 aa, Artificial Sequence
  Cyclic GFR-binding peptide
  MOD_RES (2)..(3): Xaa is C or S
PXXVSQDLSSLSILFFIGKTPKILKVYPMIV

SEQ ID NO: 72392 - protein, 33 aa, Artificial Sequence
  Cyclic GFR-binding peptide
  MOD_RES (30)..(32): Xaa is C or S
SQDLSSLSILFFIGKTPKILKVYPMIVKSXKXS

SEQ ID NO: 72393 - protein, 35 aa, Artificial Sequence
  Cyclic GFR-binding peptide
  MOD_RES (6)..(7): Xaa is C or S
YVPKPXXAPTKLSSLSVLFFDDSSNVILKVYPNMV

SEQ ID NO: 72394 - protein, 33 aa, Artificial Sequence
  Cyclic GFR-binding peptide
  MOD_RES (6)..(7): Xaa is C or S
YVPKPXXAPTKLSSLSVLFFDDSSNVILKVYPN

SEQ ID NO: 72395 - protein, 35 aa, Artificial Sequence
  Cyclic GFR-binding peptide
  MOD_RES (6)..(7): Xaa is C or S
GSAGPXXTPTKMSSLSMLFFNDKQQIILKVYPGMV

SEQ ID NO: 72396 - protein, 30 aa, Artificial Sequence
  Cyclic GFR-binding peptide
  MOD_RES (1)..(2): Xaa is C or S
XXVPQALSSLSILFFVGRKPKVLKVYPMIV

SEQ ID NO: 72397 - protein, 33 aa, Artificial Sequence; identical to SEQ ID NO: 24393
  Cyclic GFR-binding peptide
  MOD_RES (32)..(32): Xaa is C or S

SEQ ID NO: 72398 - protein, 34 aa, Artificial Sequence; identical to SEQ ID NO: 24394
  Cyclic GFR-binding peptide
  MOD_RES (3)..(4): Xaa is C or S

SEQ ID NO: 72399 - protein, 30 aa, Artificial Sequence
  Cyclic GFR-binding peptide
  MOD_RES (1)..(1): Xaa is C or S
XAPVKTSSLSMLFFDNGRVLLLKVYPMIVE

SEQ ID NO: 72400 - protein, 32 aa, Artificial Sequence
  Cyclic GFR-binding peptide
  MOD_RES (4)..(4): Xaa is C or S
GLEXVPTEESSLSMLFFRIKPHQGQHLKVYPF

SEQ ID NO: 72401 - protein, 28 aa, Artificial Sequence
  Cyclic GFR-binding peptide
  MOD_RES (28)..(28): Xaa is C or S
LSSLSILFFDKGVVTYLKVYPGMAVSEX

SEQ ID NO: 72402 - protein, 27 aa, Artificial Sequence
  Cyclic GFR-binding peptide
  MOD_RES (26)..(26): Xaa is C or S
SSLSILFFVGRKPKVLKVYPMIVRSXK

SEQ ID NO: 72403 - protein, 40 aa, Artificial Sequence; identical to SEQ ID NO: 24400
  Cyclic GFR-binding peptide
  MOD_RES (3)..(4)..(37)..(39): Xaa is C or S

SEQ ID NO: 72404 - protein, 28 aa, Artificial Sequence
  Cyclic GFR-binding peptide
PQALSSLSILFFVGRKPKVLKVYPMIVR

SEQ ID NO: 72405 - protein, 30 aa, Artificial Sequence
  Cyclic GFR-binding peptide
  MOD_RES (28)..(30): Xaa is C or S
LSSLSMLFFDEYDKVVLKVYPEMVVEGXGX

SEQ ID NO: 72406 - protein, 28 aa, Artificial Sequence
  Cyclic GFR-binding peptide
  MOD_RES (1)..(2): Xaa is C or S
XXVPTELSSLSMLFFDEYDKVVLKVYPE

SEQ ID NO: 72407 - protein, 36 aa, Artificial Sequence; identical to SEQ ID NO: 24404
  Cyclic GFR-binding peptide
  MOD_RES (4)..(5)..(36): Xaa is C or S

SEQ ID NO: 72408 - protein, 27 aa, Artificial Sequence
  Cyclic GFR-binding peptide
ELSSLSMLFFDEYDKVVLKVYPEMVVE

SEQ ID NO: 72409 - protein, 26 aa, Artificial Sequence
  Cyclic GFR-binding peptide
  MOD_RES (1)..(1): Xaa is C or S
XVPTELSSLSMLFFDENEKVVLKVYP

SEQ ID NO: 72410 - protein, 41 aa, Artificial Sequence; identical to SEQ ID NO: 24407
  Cyclic GFR-binding peptide
  MOD_RES (5)..(6)..(38)..(40): Xaa is C or S

SEQ ID NO: 72411 - protein, 30 aa, Artificial Sequence
  Cyclic GFR-binding peptide
  MOD_RES (1)..(2): Xaa is C or S
XXVPTRLSSLSILFFDSANNVVLKVYPDMV

SEQ ID NO: 72412 - protein, 32 aa, Artificial Sequence
  Cyclic GFR-binding peptide
  MOD_RES (5)..(6): Xaa is C or S
SASPXXVPQDLSSLSILFFVGRTPKVLKVYPM

SEQ ID NO: 72413 - protein, 27 aa, Artificial Sequence
  Cyclic GFR-binding peptide
QDLSSLSILFFVGRTPKVLKVYPMVVK

SEQ ID NO: 72414 - protein, 20 aa, Artificial Sequence
  Cyclic GFR-binding peptide
SSLSILFFDSANNVVLKVYP

SEQ ID NO: 72415 - protein, 30 aa, Artificial Sequence
  Cyclic GFR-binding peptide
RVHHSSLSVLFFEYVRKKPKLLKVYPRLEE

SEQ ID NO: 72416 - protein, 34 aa, Artificial Sequence; identical to SEQ ID NO: 24410
  Cyclic GFR-binding peptide
  MOD_RES (31)..(33): Xaa is C or S

SEQ ID NO: 72417 - protein, 34 aa, Artificial Sequence; identical to SEQ ID NO: 24412
  Cyclic GFR-binding peptide
  MOD_RES (2)..(3)..(34): Xaa is C or S

SEQ ID NO: 72418 - protein, 34 aa, Artificial Sequence; identical to SEQ ID NO: 24411
  Cyclic GFR-binding peptide
  MOD_RES (1)..(33): Xaa is C or S

SEQ ID NO: 72419 - protein, 30 aa, Artificial Sequence
  Cyclic GFR-binding peptide
  MOD_RES (2)..(3): Xaa is C or S
TXXVPTRLSSLSILFFDSANNVVLKVYPDM

SEQ ID NO: 72420 - protein, 37 aa, Artificial Sequence; identical to SEQ ID NO: 24413
  Cyclic GFR-binding peptide
  MOD_RES (6)..(7): Xaa is C or S

SEQ ID NO: 72421 - protein, 38 aa, Artificial Sequence; identical to SEQ ID NO: 24414
  Cyclic GFR-binding peptide
  MOD_RES (5)..(6)..(38): Xaa is C or S

SEQ ID NO: 72422 - protein, 25 aa, Artificial Sequence
  Cyclic GFR-binding peptide
LSSLSILFFIGKTPKILKVYPMIVK

SEQ ID NO: 72423 - protein, 29 aa, Artificial Sequence
  Cyclic GFR-binding peptide
  MOD_RES (1)..(2): Xaa is C or S
XXAPTKLSSLSVLFFDDSSNVILKVYPNM

SEQ ID NO: 72424 - protein, 30 aa, Artificial Sequence
  Cyclic GFR-binding peptide
  MOD_RES (4)..(5): Xaa is C or S
SKAXXVPTKLSSLSILFFDKGVVTYLKVYP

SEQ ID NO: 72425 - protein, 38 aa, Artificial Sequence; identical to SEQ ID NO: 24416
  Cyclic GFR-binding peptide
  MOD_RES (3)..(3): Xaa is C or S

SEQ ID NO: 72426 - protein, 38 aa, Artificial Sequence; identical to SEQ ID NO: 24417
  Cyclic GFR-binding peptide
  MOD_RES (2)..(2): Xaa is C or S

SEQ ID NO: 72427 - protein, 23 aa, Artificial Sequence
  Cyclic GFR-binding peptide
KTSSLSMLFFDNGRVLLLKVYPM

SEQ ID NO: 72428 - protein, 38 aa, Artificial Sequence
  Cyclic GFR-binding peptide
  MOD_RES (6)..(7): Xaa is C or S
KIPKAXXVPTELSSLSMLFFDENEKVVLKVYPDMVVEG

SEQ ID NO: 72429 - protein, 31 aa, Artificial Sequence
  Cyclic GFR-binding peptide
  MOD_RES (30)..(30): Xaa is C or S
PQALSSLSILFFVGRKPKVLKVYPMIVRSXK

SEQ ID NO: 72430 - protein, 25 aa, Artificial Sequence
  Cyclic GFR-binding peptide
LSSLSMLFFDEYDKVVLKVYPEMVV

SEQ ID NO: 72431 - protein, 32 aa, Artificial Sequence
  Cyclic GFR-binding peptide
  MOD_RES (30)..(32): Xaa is C or S
TRLSSLSILFFDSANNVVLKVYPDMVVESXGX

SEQ ID NO: 72432 - protein, 24 aa, Artificial Sequence
  Cyclic GFR-binding peptide
TKMSSLSMLFFNDKQQIILKVYPG

SEQ ID NO: 72433 - protein, 25 aa, Artificial Sequence
  Cyclic GFR-binding peptide
APTKLSSLSVLFFDDSSNVILKVYP

SEQ ID NO: 72434 - protein, 33 aa, Artificial Sequence
  Cyclic GFR-binding peptide
  MOD_RES (4)..(5): Xaa is C or S
GKAXXVPTKLSSLSVLFFDDMGVPTLKVYPEGM

SEQ ID NO: 72435 - protein, 36 aa, Artificial Sequence; identical to SEQ ID NO: 24420
  Cyclic GFR-binding peptide
  MOD_RES (1)..(2)..(34)..(36): Xaa is C or S

SEQ ID NO: 72436 - protein, 28 aa, Artificial Sequence
  Cyclic GFR-binding peptide
VPTRLSSLSILFFDSANNVVLKVYPDMV

SEQ ID NO: 72437 - protein, 40 aa, Artificial Sequence; identical to SEQ ID NO: 24422
  Cyclic GFR-binding peptide
  MOD_RES (5)..(6)..(38)..(40): Xaa is C or S

SEQ ID NO: 72438 - protein, 32 aa, Artificial Sequence
  Cyclic GFR-binding peptide
  MOD_RES (31)..(31): Xaa is C or S
PTRLSSLSILFFDSANNVVLKVYPDMVVESXG

SEQ ID NO: 72439 - protein, 34 aa, Artificial Sequence; identical to SEQ ID NO: 24423
  Cyclic GFR-binding peptide
  MOD_RES (1)..(33): Xaa is C or S

SEQ ID NO: 72440 - protein, 25 aa, Artificial Sequence
  Cyclic GFR-binding peptide
TKLSSLSVLFFDDMGVPTLKVYPEG

SEQ ID NO: 72441 - protein, 27 aa, Artificial Sequence
  Cyclic GFR-binding peptide
TRLSSLSILFFDSANNVVLKVYPDMVV

SEQ ID NO: 72442 - protein, 32 aa, Artificial Sequence; identical to SEQ ID NO: 24427
  Cyclic GFR-binding peptide
  MOD_RES (1)..(1): Xaa is C or S

SEQ ID NO: 72443 - protein, 24 aa, Artificial Sequence
  Cyclic GFR-binding peptide
LSSLSILFFDAANNVVLKVYPDMV

SEQ ID NO: 72444 - protein, 41 aa, Artificial Sequence
  Cyclic GFR-binding peptide
  MOD_RES (6)..(7)..(39)..(41): Xaa is C or S
KIPKAXXVPTELSSLSMLFFDENEKVVLKVYPDMVVEGXGX

SEQ ID NO: 72445 - protein, 35 aa, Artificial Sequence; identical to SEQ ID NO: 24430
  Cyclic GFR-binding peptide
  MOD_RES (1)..(33)..(35): Xaa is C or S

SEQ ID NO: 72446 - protein, 30 aa, Artificial Sequence
  Cyclic GFR-binding peptide
  MOD_RES (3)..(4): Xaa is C or S
KPXXAPTKLSSLSVLFFDDSSNVILKVYPN

SEQ ID NO: 72447 - protein, 42 aa, Artificial Sequence; identical to SEQ ID NO: 24431
  Cyclic GFR-binding peptide
  MOD_RES (6)..(7)..(39)..(41): Xaa is C or S

SEQ ID NO: 72448 - protein, 29 aa, Artificial Sequence
  Cyclic GFR-binding peptide
VPTKLSSLSVLFFDDMGVPTLKVYPEGMS

SEQ ID NO: 72449 - protein, 35 aa, Artificial Sequence; identical to SEQ ID NO: 24432
  Cyclic GFR-binding peptide
  MOD_RES (3)..(4)..(35): Xaa is C or S

SEQ ID NO: 72450 - protein, 25 aa, Artificial Sequence
  Cyclic GFR-binding peptide
LSSLSILFFDAANNVVLKVYPDMVV

SEQ ID NO: 72451 - protein, 40 aa, Artificial Sequence; identical to SEQ ID NO: 24433
  Cyclic GFR-binding peptide
  MOD_RES (5)..(6)..(38)..(40): Xaa is C or S

SEQ ID NO: 72452 - protein, 29 aa, Artificial Sequence
  Cyclic GFR-binding peptide
PTKLSSLSVLFFDDSSNVILKVYPNMVVR

SEQ ID NO: 72453 - protein, 31 aa, Artificial Sequence
  Cyclic GFR-binding peptide
  MOD_RES (1)..(2): Xaa is C or S
XXVPARLSSLSILFFDAANNVVLKVYPDMVV

SEQ ID NO: 72454 - protein, 34 aa, Artificial Sequence
  Cyclic GFR-binding peptide
  MOD_RES (4)..(5): Xaa is C or S
PKPXXAPTQLSSLSVLFFDDSSNVILKVYPNMVV

SEQ ID NO: 72455 - protein, 34 aa, Artificial Sequence; identical to SEQ ID NO: 24436
  Cyclic GFR-binding peptide

SEQ ID NO: 72456 - protein, 33 aa, Artificial Sequence; identical to SEQ ID NO: 24435
  Cyclic GFR-binding peptide
  MOD_RES (1)..(1): Xaa is C or S

SEQ ID NO: 72457 - protein, 30 aa, Artificial Sequence; identical to SEQ ID NO: 760
  Cyclic GFR-binding peptide

SEQ ID NO: 72458 - protein, 32 aa, Artificial Sequence
  Cyclic GFR-binding peptide
  MOD_RES (2)..(3): Xaa is C or S
AXXVPTKLSSLSILFFDKGVVTYLKVYPGMAV

SEQ ID NO: 72459 - protein, 35 aa, Artificial Sequence
  Cyclic GFR-binding peptide
  MOD_RES (1)..(33)..(35): Xaa is C or S
XVPTELSSLSMLFFDENEKVVLKVYPDMVVEGXGX

SEQ ID NO: 72460 - protein, 37 aa, Artificial Sequence; identical to SEQ ID NO: 24440
  Cyclic GFR-binding peptide
  MOD_RES (4)..(5)..(37): Xaa is C or S

SEQ ID NO: 72461 - protein, 27 aa, Artificial Sequence
  Cyclic GFR-binding peptide
LSSLSVLFFDDMGVPTLKVYPEGMSVA

SEQ ID NO: 72462 - protein, 40 aa, Artificial Sequence; identical to SEQ ID NO: 24441
  Cyclic GFR-binding peptide
  MOD_RES (4)..(4): Xaa is C or S

SEQ ID NO: 72463 - protein, 31 aa, Artificial Sequence
  Cyclic GFR-binding peptide
PTKLSSLSVLFFDDMGVPTLKVYPEGMSVAE

SEQ ID NO: 72464 - protein, 31 aa, Artificial Sequence; identical to SEQ ID NO: 24442
  Cyclic GFR-binding peptide
  MOD_RES (31)..(31): Xaa is C or S

SEQ ID NO: 72465 - protein, 28 aa, Artificial Sequence
  Cyclic GFR-binding peptide
  MOD_RES (1)..(1): Xaa is C or S
XVPQALSSLSILFFVGRKPKVLKVYPMI

SEQ ID NO: 72466 - protein, 30 aa, Artificial Sequence
  Cyclic GFR-binding peptide
  MOD_RES (29)..(29): Xaa is C or S
KLSSLSVLFFDDSSNVILKVYPNMVVRSXG

SEQ ID NO: 72467 - protein, 32 aa, Artificial Sequence; identical to SEQ ID NO: 24446
  Cyclic GFR-binding peptide

SEQ ID NO: 72468 - protein, 41 aa, Artificial Sequence; identical to SEQ ID NO: 24450
  Cyclic GFR-binding peptide
  MOD_RES (6)..(7)..(39)..(41): Xaa is C or S

SEQ ID NO: 72469 - protein, 29 aa, Artificial Sequence
  Cyclic GFR-binding peptide
  MOD_RES (2)..(3): Xaa is C or S
PXXAPTKLSSLSVLFFDDSSNVILKVYPN

SEQ ID NO: 72470 - protein, 39 aa, Artificial Sequence; identical to SEQ ID NO: 24451
  Cyclic GFR-binding peptide
  MOD_RES (4)..(5)..(36)..(38): Xaa is C or S

SEQ ID NO: 72471 - protein, 25 aa, Artificial Sequence
  Cyclic GFR-binding peptide
QALSSLSILFFVGRKPKVLKVYPMI

SEQ ID NO: 72472 - protein, 39 aa, Artificial Sequence; identical to SEQ ID NO: 24452
  Cyclic GFR-binding peptide
  MOD_RES (5)..(6)..(38): Xaa is C or S

SEQ ID NO: 72473 - protein, 29 aa, Artificial Sequence
  Cyclic GFR-binding peptide
  MOD_RES (3)..(4): Xaa is C or S
KAXXVPTKLSSLSVLFFDDMGVPTLKVYP

SEQ ID NO: 72474 - protein, 34 aa, Artificial Sequence; identical to SEQ ID NO: 24458
  Cyclic GFR-binding peptide
  MOD_RES (3)..(4): Xaa is C or S

SEQ ID NO: 72475 - protein, 26 aa, Artificial Sequence
  Cyclic GFR-binding peptide
  MOD_RES (26)..(26): Xaa is C or S
SSLSILFFVGRTPKVLKVYPMVVKSX

SEQ ID NO: 72476 - protein, 35 aa, Artificial Sequence
  Cyclic GFR-binding peptide
  MOD_RES (5)..(6): Xaa is C or S
VPKAXXAPTKLSSLSVLFFDSSNNVILKVYPNMVV

SEQ ID NO: 72477 - protein, 30 aa, Artificial Sequence
  Cyclic GFR-binding peptide
  MOD_RES (1)..(1): Xaa is C or S
XVPTEESSLSMLFFRIKPHQGQHLKVYPFL

SEQ ID NO: 72478 - protein, 38 aa, Artificial Sequence
  Cyclic GFR-binding peptide
  MOD_RES (7)..(7): Xaa is C or S
NDEGLEXVPTEESSLSMLFFRIKPHQGQHLKVYPFLQH

SEQ ID NO: 72479 - protein, 28 aa, Artificial Sequence
  Cyclic GFR-binding peptide
PTKLSSLSVLFFDDMGVPTLKVYPEGMS

SEQ ID NO: 72480 - protein, 41 aa, Artificial Sequence; identical to SEQ ID NO: 24459
  Cyclic GFR-binding peptide
  MOD_RES (5)..(6)..(38)..(40): Xaa is C or S

SEQ ID NO: 72481 - protein, 27 aa, Artificial Sequence
  Cyclic GFR-binding peptide
  MOD_RES (1)..(1): Xaa is C or S
XVSQDLSSLSILFFIGKTPKILKVYPM

SEQ ID NO: 72482 - protein, 35 aa, Artificial Sequence; identical to SEQ ID NO: 24461
  Cyclic GFR-binding peptide
  MOD_RES (2)..(2): Xaa is C or S

SEQ ID NO: 72483 - protein, 25 aa, Artificial Sequence
  Cyclic GFR-binding peptide
RLSSLSILFFDSANNVVLKVYPDMV

SEQ ID NO: 72484 - protein, 24 aa, Artificial Sequence
  Cyclic GFR-binding peptide
KTSSLSMLFFDNGRVLLLKVYPMI

SEQ ID NO: 72485 - protein, 38 aa, Artificial Sequence; identical to SEQ ID NO: 24462
  Cyclic GFR-binding peptide
  MOD_RES (4)..(5)..(36)..(38): Xaa is C or S

SEQ ID NO: 72486 - protein, 38 aa, Artificial Sequence; identical to SEQ ID NO: 24463
  Cyclic GFR-binding peptide
  MOD_RES (6)..(7)..(38): Xaa is C or S

SEQ ID NO: 72487 - protein, 31 aa, Artificial Sequence
  Cyclic GFR-binding peptide
  MOD_RES (2)..(2): Xaa is C or S
EXVPTEESSLSMLFFRIKPHQGQHLKVYPFL

SEQ ID NO: 72488 - protein, 26 aa, Artificial Sequence
  Cyclic GFR-binding peptide
  MOD_RES (1)..(1): Xaa is C or S
XVPTRLSSLSILFFDSANNVVLKVYP

SEQ ID NO: 72489 - protein, 36 aa, Artificial Sequence; identical to SEQ ID NO: 24467
  Cyclic GFR-binding peptide
  MOD_RES (1)..(2)..(33)..(35): Xaa is C or S

SEQ ID NO: 72490 - protein, 39 aa, Artificial Sequence
  Cyclic GFR-binding peptide
  MOD_RES (5)..(6)..(38): Xaa is C or S
IPKAXXVPTELSSLSMLFFDENEKVVLKVYPDMVVEGXG

SEQ ID NO: 72491 - protein, 20 aa, Artificial Sequence
  Cyclic GFR-binding peptide
SSLSILFFIGKTPKILKVYP

SEQ ID NO: 72492 - protein, 37 aa, Artificial Sequence; identical to SEQ ID NO: 24469
  Cyclic GFR-binding peptide
  MOD_RES (2)..(3)..(35)..(37): Xaa is C or S

SEQ ID NO: 72493 - protein, 22 aa, Artificial Sequence
  Cyclic GFR-binding peptide
LSSLSVLFFDSSNNVILKVYPN

SEQ ID NO: 72494 - protein, 35 aa, Artificial Sequence
  Cyclic GFR-binding peptide
  MOD_RES (3)..(3): Xaa is C or S
VKXQPSRVHHSSLSVLFFEYVRKKPKLLKVYPRLE

SEQ ID NO: 72495 - protein, 31 aa, Artificial Sequence; identical to SEQ ID NO: 24471
  Cyclic GFR-binding peptide
  MOD_RES (1)..(1): Xaa is C or S

SEQ ID NO: 72496 - protein, 31 aa, Artificial Sequence
  Cyclic GFR-binding peptide
  MOD_RES (29)..(31): Xaa is C or S
ELSSLSMLFFDEYDKVVLKVYPEMVVEGXGX

SEQ ID NO: 72497 - protein, 41 aa, Artificial Sequence; identical to SEQ ID NO: 24472
  Cyclic GFR-binding peptide
  MOD_RES (6)..(7)..(38)..(40): Xaa is C or S

SEQ ID NO: 72498 - protein, 33 aa, Artificial Sequence
  Cyclic GFR-binding peptide
  MOD_RES (4)..(5): Xaa is C or S
PPTXXVPTRLSSLSILFFDSANNVVLKVYPDMV

SEQ ID NO: 72499 - protein, 29 aa, Artificial Sequence
  Cyclic GFR-binding peptide
  MOD_RES (29)..(29): Xaa is C or S
KLSSLSVLFFDDSSNVILKVYPNMVVRSX

SEQ ID NO: 72500 - protein, 28 aa, Artificial Sequence
  Cyclic GFR-binding peptide
  MOD_RES (1)..(2): Xaa is C or S
XXVPTKLSSLSVLFFDDMGVPTLKVYPE

SEQ ID NO: 72501 - protein, 28 aa, Artificial Sequence
  Cyclic GFR-binding peptide
  MOD_RES (1)..(1): Xaa is C or S
XAPTKLSSLSVLFFDDSSNVILKVYPNM

SEQ ID NO: 72502 - protein, 36 aa, Artificial Sequence; identical to SEQ ID NO: 24475
  Cyclic GFR-binding peptide
  MOD_RES (3)..(4)..(36): Xaa is C or S

SEQ ID NO: 72503 - protein, 36 aa, Artificial Sequence; identical to SEQ ID NO: 24476
  Cyclic GFR-binding peptide
  MOD_RES (5)..(6): Xaa is C or S

SEQ ID NO: 72504 - protein, 35 aa, Artificial Sequence; identical to SEQ ID NO: 24477
  Cyclic GFR-binding peptide
  MOD_RES (1)..(2)..(35): Xaa is C or S

SEQ ID NO: 72505 - protein, 29 aa, Artificial Sequence
  Cyclic GFR-binding peptide
  MOD_RES (26)..(28): Xaa is C or S
SSLSMLFFDNGRVLLLKVYPMIVEEXGXL

SEQ ID NO: 72506 - protein, 33 aa, Artificial Sequence
  Cyclic GFR-binding peptide
  MOD_RES (3)..(3): Xaa is C or S
LEXVPTEESSLSMLFFRIKPHQGQHLKVYPFLQ

SEQ ID NO: 72507 - protein, 25 aa, Artificial Sequence
  Cyclic GFR-binding peptide
PTKLSSLSILFFDKGVVTYLKVYPG

SEQ ID NO: 72508 - protein, 28 aa, Artificial Sequence
  Cyclic GFR-binding peptide
  MOD_RES (1)..(2): Xaa is C or S
XXAPTQLSSLSVLFFDDSSNVILKVYPN

SEQ ID NO: 72509 - protein, 40 aa, Artificial Sequence
  Cyclic GFR-binding peptide
  MOD_RES (5)..(6)..(38)..(40): Xaa is C or S
IPKAXXVPTELSSLSMLFFDENEKVVLKVYPDMVVEGXGX

SEQ ID NO: 72510 - protein, 38 aa, Artificial Sequence; identical to SEQ ID NO: 24480
  Cyclic GFR-binding peptide
  MOD_RES (2)..(3)..(35)..(37): Xaa is C or S

SEQ ID NO: 72511 - protein, 30 aa, Artificial Sequence
  Cyclic GFR-binding peptide
  MOD_RES (27)..(29): Xaa is C or S
LSSLSILFFVGRKPKVLKVYPMIVRSXKXS

SEQ ID NO: 72512 - protein, 30 aa, Artificial Sequence
  Cyclic GFR-binding peptide
  MOD_RES (1)..(1): Xaa is C or S
XVPQALSSLSILFFVGRKPKVLKVYPMIVR

SEQ ID NO: 72513 - protein, 27 aa, Artificial Sequence
  Cyclic GFR-binding peptide
  MOD_RES (27)..(27): Xaa is C or S
SSLSVLFFDSSNNVILKVYPNMVVKAX

SEQ ID NO: 72514 - protein, 34 aa, Artificial Sequence
  Cyclic GFR-binding peptide
  MOD_RES (32)..(34): Xaa is C or S
TEESSLSMLFFRIKPHQGQHLKVYPFLQHNKXEX

SEQ ID NO: 72515 - protein, 25 aa, Artificial Sequence
  Cyclic GFR-binding peptide
SSLSILFFVGRKPKVLKVYPMIVRS

SEQ ID NO: 72516 - protein, 43 aa, Artificial Sequence; identical to SEQ ID NO: 24483
  Cyclic GFR-binding peptide
  MOD_RES (5)..(42): Xaa is C or S

SEQ ID NO: 72517 - protein, 34 aa, Artificial Sequence; identical to SEQ ID NO: 24484
  Cyclic GFR-binding peptide
  MOD_RES (1)..(2)..(34): Xaa is C or S

SEQ ID NO: 72518 - protein, 25 aa, Artificial Sequence
  Cyclic GFR-binding peptide
SSLSILFFDKGVVTYLKVYPGMAVS

SEQ ID NO: 72519 - protein, 30 aa, Artificial Sequence
  Cyclic GFR-binding peptide
  MOD_RES (2)..(3): Xaa is C or S
AXXVPTELSSLSMLFFDENEKVVLKVYPDM

SEQ ID NO: 72520 - protein, 26 aa, Artificial Sequence
  Cyclic GFR-binding peptide
SSLSILFFDSANNVVLKVYPDMVVES

SEQ ID NO: 72521 - protein, 36 aa, Artificial Sequence; identical to SEQ ID NO: 24485
  Cyclic GFR-binding peptide
  MOD_RES (3)..(4)..(36): Xaa is C or S

SEQ ID NO: 72522 - protein, 21 aa, Artificial Sequence
  Cyclic GFR-binding peptide
LSSLSMLFFDEYDKVVLKVYP

SEQ ID NO: 72523 - protein, 38 aa, Artificial Sequence; identical to SEQ ID NO: 24487
  Cyclic GFR-binding peptide
  MOD_RES (3)..(4)..(36)..(38): Xaa is C or S

SEQ ID NO: 72524 - protein, 33 aa, Artificial Sequence
  Cyclic GFR-binding peptide
  MOD_RES (4)..(5): Xaa is C or S
PKPXXAPTQLSSLSVLFFDDSSNVILKVYPNMV

SEQ ID NO: 72525 - protein, 28 aa, Artificial Sequence
  Cyclic GFR-binding peptide
SQDLSSLSILFFIGKTPKILKVYPMIVK

SEQ ID NO: 72526 - protein, 35 aa, Artificial Sequence; identical to SEQ ID NO: 24492
  Cyclic GFR-binding peptide
  MOD_RES (1)..(2)..(33)..(35): Xaa is C or S

SEQ ID NO: 72527 - protein, 39 aa, Artificial Sequence; identical to SEQ ID NO: 24493
  Cyclic GFR-binding peptide
  MOD_RES (37)..(39): Xaa is C or S

SEQ ID NO: 72528 - protein, 37 aa, Artificial Sequence; identical to SEQ ID NO: 24495
  Cyclic GFR-binding peptide
  MOD_RES (3)..(35)..(37): Xaa is C or S

SEQ ID NO: 72529 - protein, 33 aa, Artificial Sequence
  Cyclic GFR-binding peptide
  MOD_RES (5)..(6): Xaa is C or S
IPKAXXVPTELSSLSMLFFDENEKVVLKVYPDM

SEQ ID NO: 72530 - protein, 20 aa, Artificial Sequence
  Cyclic GFR-binding peptide
SSLSILFFVGRKPKVLKVYP

SEQ ID NO: 72531 - protein, 37 aa, Artificial Sequence; identical to SEQ ID NO: 24498
  Cyclic GFR-binding peptide
  MOD_RES (4)..(36): Xaa is C or S

SEQ ID NO: 72532 - protein, 34 aa, Artificial Sequence
  Cyclic GFR-binding peptide
  MOD_RES (6)..(7): Xaa is C or S
KASKAXXVPTKLSSLSILFFDKGVVTYLKVYPGM

SEQ ID NO: 72533 - protein, 28 aa, Artificial Sequence
  Cyclic GFR-binding peptide
  MOD_RES (2)..(3): Xaa is C or S
PXXVSQDLSSLSILFFIGKTPKILKVYP

SEQ ID NO: 72534 - protein, 25 aa, Artificial Sequence
  Cyclic GFR-binding peptide
TQLSSLSVLFFDDSSNVILKVYPNM

SEQ ID NO: 72535 - protein, 28 aa, Artificial Sequence
  Cyclic GFR-binding peptide
  MOD_RES (1)..(1): Xaa is C or S
XVPTKLSSLSVLFFDDMGVPTLKVYPEG

SEQ ID NO: 72536 - protein, 38 aa, Artificial Sequence; identical to SEQ ID NO: 24501
  Cyclic GFR-binding peptide
  MOD_RES (4)..(5)..(36)..(38): Xaa is C or S

SEQ ID NO: 72537 - protein, 31 aa, Artificial Sequence
  Cyclic GFR-binding peptide
  MOD_RES (29)..(31): Xaa is C or S
ELSSLSMLFFDENEKVVLKVYPDMVVEGXGX

SEQ ID NO: 72538 - protein, 26 aa, Artificial Sequence
  Cyclic GFR-binding peptide
SSLSILFFDAANNVVLKVYPDMVVEA

SEQ ID NO: 72539 - protein, 25 aa, Artificial Sequence
  Cyclic GFR-binding peptide
SSLSILFFVGRTPKVLKVYPMVVKS

SEQ ID NO: 72540 - protein, 28 aa, Artificial Sequence
  Cyclic GFR-binding peptide
SSLSVLFFEYVRKKPKLLKVYPRLEEHL

SEQ ID NO: 72541 - protein, 37 aa, Artificial Sequence; identical to SEQ ID NO: 24502
  Cyclic GFR-binding peptide
  MOD_RES (37)..(37): Xaa is C or S

SEQ ID NO: 72542 - protein, 36 aa, Artificial Sequence
  Cyclic GFR-binding peptide
  MOD_RES (3)..(4)..(36): Xaa is C or S
KAXXVPTELSSLSMLFFDENEKVVLKVYPDMVVEGX

SEQ ID NO: 72543 - protein, 29 aa, Artificial Sequence
  Cyclic GFR-binding peptide
  MOD_RES (1)..(1): Xaa is C or S
XAPTKLSSLSVLFFDSSNNVILKVYPNMV

SEQ ID NO: 72544 - protein, 32 aa, Artificial Sequence
  Cyclic GFR-binding peptide
  MOD_RES (29)..(31): Xaa is C or S
ELSSLSMLFFDENEKVVLKVYPDMVVEGXGXR

SEQ ID NO: 72545 - protein, 35 aa, Artificial Sequence; identical to SEQ ID NO: 24504
  Cyclic GFR-binding peptide
  MOD_RES (1)..(32)..(34): Xaa is C or S

SEQ ID NO: 72546 - protein, 37 aa, Artificial Sequence
  Cyclic GFR-binding peptide
  MOD_RES (6)..(7): Xaa is C or S
KVGKAXXVPTKLSSLSVLFFDDMGVPTLKVYPEGMSV

SEQ ID NO: 72547 - protein, 26 aa, Artificial Sequence
  Cyclic GFR-binding peptide
TELSSLSMLFFDENEKVVLKVYPDMV

SEQ ID NO: 72548 - protein, 28 aa, Artificial Sequence
  Cyclic GFR-binding peptide
TKLSSLSVLFFDSSNNVILKVYPNMVVK

SEQ ID NO: 72549 - protein, 32 aa, Artificial Sequence
  Cyclic GFR-binding peptide
  MOD_RES (5)..(6): Xaa is C or S
SASPXXVSQDLSSLSILFFIGKTPKILKVYPM

SEQ ID NO: 72550 - protein, 24 aa, Artificial Sequence
  Cyclic GFR-binding peptide
TKLSSLSILFFDKGVVTYLKVYPG

SEQ ID NO: 72551 - protein, 33 aa, Artificial Sequence
  Cyclic GFR-binding peptide
  MOD_RES (5)..(6): Xaa is C or S
SAGPXXTPTKMSSLSMLFFNDKQQIILKVYPGM

SEQ ID NO: 72552 - protein, 35 aa, Artificial Sequence
  Cyclic GFR-binding peptide
  MOD_RES (7)..(7): Xaa is C or S
NDEGLEXVPTEESSLSMLFFRIKPHQGQHLKVYPF

SEQ ID NO: 72553 - protein, 29 aa, Artificial Sequence
  Cyclic GFR-binding peptide
VPQDLSSLSILFFVGRTPKVLKVYPMVVK

SEQ ID NO: 72554 - protein, 30 aa, Artificial Sequence
  Cyclic GFR-binding peptide
VPTELSSLSMLFFDENEKVVLKVYPDMVVE

SEQ ID NO: 72555 - protein, 20 aa, Artificial Sequence
  Cyclic GFR-binding peptide
SSLSMLFFNDKQQIILKVYP

SEQ ID NO: 72556 - protein, 33 aa, Artificial Sequence; identical to SEQ ID NO: 24511
  Cyclic GFR-binding peptide
  MOD_RES (2)..(3): Xaa is C or S

SEQ ID NO: 72557 - protein, 25 aa, Artificial Sequence
  Cyclic GFR-binding peptide
TKLSSLSVLFFDSSNNVILKVYPNM

SEQ ID NO: 72558 - protein, 34 aa, Artificial Sequence
  Cyclic GFR-binding peptide
  MOD_RES (6)..(6): Xaa is C or S
DEGLEXVPTEESSLSMLFFRIKPHQGQHLKVYPF

SEQ ID NO: 72559 - protein, 28 aa, Artificial Sequence
  Cyclic GFR-binding peptide
PTKLSSLSILFFDKGVVTYLKVYPGMAV

SEQ ID NO: 72560 - protein, 33 aa, Artificial Sequence
  Cyclic GFR-binding peptide
  MOD_RES (3)..(4): Xaa is C or S
KAXXVPTELSSLSMLFFDENEKVVLKVYPDMVV

SEQ ID NO: 72561 - protein, 36 aa, Artificial Sequence; identical to SEQ ID NO: 24514
  Cyclic GFR-binding peptide
  MOD_RES (34)..(36): Xaa is C or S

SEQ ID NO: 72562 - protein, 38 aa, Artificial Sequence; identical to SEQ ID NO: 24516
  Cyclic GFR-binding peptide
  MOD_RES (4)..(5)..(37): Xaa is C or S

SEQ ID NO: 72563 - protein, 34 aa, Artificial Sequence; identical to SEQ ID NO: 24517
  Cyclic GFR-binding peptide
  MOD_RES (2)..(3): Xaa is C or S

SEQ ID NO: 72564 - protein, 31 aa, Artificial Sequence
  Cyclic GFR-binding peptide
  MOD_RES (2)..(3): Xaa is C or S
PXXTPTKMSSLSMLFFNDKQQIILKVYPGMV

SEQ ID NO: 72565 - protein, 26 aa, Artificial Sequence
  Cyclic GFR-binding peptide
LSSLSMLFFDEYDKVVLKVYPEMVVE

SEQ ID NO: 72566 - protein, 38 aa, Artificial Sequence; identical to SEQ ID NO: 24519
  Cyclic GFR-binding peptide
  MOD_RES (6)..(7)..(38): Xaa is C or S

SEQ ID NO: 72567 - protein, 30 aa, Artificial Sequence
  Cyclic GFR-binding peptide
  MOD_RES (2)..(3): Xaa is C or S
SXXVPARLSSLSILFFDAANNVVLKVYPDM

SEQ ID NO: 72568 - protein, 34 aa, Artificial Sequence; identical to SEQ ID NO: 24520
  Cyclic GFR-binding peptide
  MOD_RES (32)..(34): Xaa is C or S

SEQ ID NO: 72569 - protein, 26 aa, Artificial Sequence
  Cyclic GFR-binding peptide
MSSLSMLFFNDKQQIILKVYPGMVVD

SEQ ID NO: 72570 - protein, 30 aa, Artificial Sequence
  Cyclic GFR-binding peptide
VHHSSLSVLFFEYVRKKPKLLKVYPRLEEH

SEQ ID NO: 72571 - protein, 27 aa, Artificial Sequence
  Cyclic GFR-binding peptide
SQDLSSLSILFFIGKTPKILKVYPMIV

SEQ ID NO: 72572 - protein, 34 aa, Artificial Sequence
  Cyclic GFR-binding peptide
  MOD_RES (2)..(2): Xaa is C or S
KXQPSRVHHSSLSVLFFEYVRKKPKLLKVYPRLE

SEQ ID NO: 72573 - protein, 41 aa, Artificial Sequence; identical to SEQ ID NO: 24524
  Cyclic GFR-binding peptide
  MOD_RES (5)..(6)..(38)..(40): Xaa is C or S

SEQ ID NO: 72574 - protein, 32 aa, Artificial Sequence
  Cyclic GFR-binding peptide
  MOD_RES (5)..(6): Xaa is C or S
APASXXVPARLSSLSILFFDAANNVVLKVYPD

SEQ ID NO: 72575 - protein, 33 aa, Artificial Sequence
  Cyclic GFR-binding peptide
  MOD_RES (5)..(6): Xaa is C or S
VPSTXXAPVKTSSLSMLFFDNGRVLLLKVYPMI

SEQ ID NO: 72576 - protein, 23 aa, Artificial Sequence
  Cyclic GFR-binding peptide
TKLSSLSILFFDKGVVTYLKVYP

SEQ ID NO: 72577 - protein, 36 aa, Artificial Sequence; identical to SEQ ID NO: 24526
  Cyclic GFR-binding peptide
  MOD_RES (2)..(3)..(35): Xaa is C or S

SEQ ID NO: 72578 - protein, 36 aa, Artificial Sequence; identical to SEQ ID NO: 24527
  Cyclic GFR-binding peptide
  MOD_RES (1)..(33)..(35): Xaa is C or S

SEQ ID NO: 72579 - protein, 28 aa, Artificial Sequence
  Cyclic GFR-binding peptide
  MOD_RES (26)..(28): Xaa is C or S
SSLSMLFFDNGRVLLLKVYPMIVEEXGX

SEQ ID NO: 72580 - protein, 37 aa, Artificial Sequence; identical to SEQ ID NO: 24528
  Cyclic GFR-binding peptide
  MOD_RES (4)..(5)..(37): Xaa is C or S

SEQ ID NO: 72581 - protein, 34 aa, Artificial Sequence; identical to SEQ ID NO: 24529
  Cyclic GFR-binding peptide
  MOD_RES (33)..(33): Xaa is C or S

SEQ ID NO: 72582 - protein, 34 aa, Artificial Sequence
  Cyclic GFR-binding peptide
  MOD_RES (5)..(6): Xaa is C or S
IPKAXXVPTELSSLSMLFFDEYDKVVLKVYPEMV

SEQ ID NO: 72583 - protein, 33 aa, Artificial Sequence; identical to SEQ ID NO: 24530
  Cyclic GFR-binding peptide
  MOD_RES (31)..(33): Xaa is C or S

SEQ ID NO: 72584 - protein, 25 aa, Artificial Sequence
  Cyclic GFR-binding peptide
KLSSLSVLFFDDMGVPTLKVYPEGM

SEQ ID NO: 72585 - protein, 31 aa, Artificial Sequence
  Cyclic GFR-binding peptide
HHSSLSVLFFEYVRKKPKLLKVYPRLEEHLE

SEQ ID NO: 72586 - protein, 34 aa, Artificial Sequence
  Cyclic GFR-binding peptide
  MOD_RES (5)..(6): Xaa is C or S
VPKPXXAPTQLSSLSVLFFDDSSNVILKVYPNMV

SEQ ID NO: 72587 - protein, 23 aa, Artificial Sequence
  Cyclic GFR-binding peptide
SSLSVLFFDDSSNVILKVYPNMV

SEQ ID NO: 72588 - protein, 32 aa, Artificial Sequence
  Cyclic GFR-binding peptide
  MOD_RES (5)..(6): Xaa is C or S
VPKPXXAPTQLSSLSVLFFDDSSNVILKVYPN

SEQ ID NO: 72589 - protein, 25 aa, Artificial Sequence
  Cyclic GFR-binding peptide
LSSLSVLFFDDMGVPTLKVYPEGMS

SEQ ID NO: 72590 - protein, 25 aa, Artificial Sequence
  Cyclic GFR-binding peptide
PTKLSSLSVLFFDDMGVPTLKVYPE

SEQ ID NO: 72591 - protein, 22 aa, Artificial Sequence
  Cyclic GFR-binding peptide
ALSSLSILFFVGRKPKVLKVYP

SEQ ID NO: 72592 - protein, 34 aa, Artificial Sequence; identical to SEQ ID NO: 24534
  Cyclic GFR-binding peptide
  MOD_RES (3)..(4): Xaa is C or S

SEQ ID NO: 72593 - protein, 38 aa, Artificial Sequence; identical to SEQ ID NO: 24535
  Cyclic GFR-binding peptide
  MOD_RES (36)..(38): Xaa is C or S

SEQ ID NO: 72594 - protein, 30 aa, Artificial Sequence
  Cyclic GFR-binding peptide
  MOD_RES (3)..(4): Xaa is C or S
KAXXVPTELSSLSMLFFDENEKVVLKVYPD

SEQ ID NO: 72595 - protein, 42 aa, Artificial Sequence; identical to SEQ ID NO: 24536
  Cyclic GFR-binding peptide
  MOD_RES (6)..(40)..(42): Xaa is C or S

SEQ ID NO: 72596 - protein, 34 aa, Artificial Sequence
  Cyclic GFR-binding peptide
  MOD_RES (5)..(6): Xaa is C or S
SASPXXVSQDLSSLSILFFIGKTPKILKVYPMIV

SEQ ID NO: 72597 - protein, 27 aa, Artificial Sequence
  Cyclic GFR-binding peptide
PTKMSSLSMLFFNDKQQIILKVYPGMV

SEQ ID NO: 72598 - protein, 26 aa, Artificial Sequence
  Cyclic GFR-binding peptide
HHSSLSVLFFEYVRKKPKLLKVYPRL

SEQ ID NO: 72599 - protein, 33 aa, Artificial Sequence; identical to SEQ ID NO: 24537
  Cyclic GFR-binding peptide
  MOD_RES (1)..(2)..(33): Xaa is C or S

SEQ ID NO: 72600 - protein, 36 aa, Artificial Sequence; identical to SEQ ID NO: 24538
  Cyclic GFR-binding peptide
  MOD_RES (36)..(36): Xaa is C or S

SEQ ID NO: 72601 - protein, 38 aa, Artificial Sequence; identical to SEQ ID NO: 24539
  Cyclic GFR-binding peptide
  MOD_RES (4)..(5)..(37): Xaa is C or S

SEQ ID NO: 72602 - protein, 33 aa, Artificial Sequence
  Cyclic GFR-binding peptide
  MOD_RES (6)..(7): Xaa is C or S
TVPKPXXAPTQLSSLSVLFFDDSSNVILKVYPN

SEQ ID NO: 72603 - protein, 38 aa, Artificial Sequence; identical to SEQ ID NO: 24540
  Cyclic GFR-binding peptide
  MOD_RES (2)..(3)..(36)..(38): Xaa is C or S

SEQ ID NO: 72604 - protein, 30 aa, Artificial Sequence
  Cyclic GFR-binding peptide
  MOD_RES (4)..(5): Xaa is C or S
PASXXVPARLSSLSILFFDAANNVVLKVYP

SEQ ID NO: 72605 - protein, 36 aa, Artificial Sequence; identical to SEQ ID NO: 24543
  Cyclic GFR-binding peptide
  MOD_RES (5)..(6): Xaa is C or S

SEQ ID NO: 72606 - protein, 25 aa, Artificial Sequence
  Cyclic GFR-binding peptide
VPTRLSSLSILFFDSANNVVLKVYP

SEQ ID NO: 72607 - protein, 36 aa, Artificial Sequence
  Cyclic GFR-binding peptide
  MOD_RES (7)..(7): Xaa is C or S
HVTKPTXAPTKLSSLSVLFFDDSSNVILKVYPNMVV

SEQ ID NO: 72608 - protein, 33 aa, Artificial Sequence
  Cyclic GFR-binding peptide
  MOD_RES (3)..(4): Xaa is C or S
KAXXAPTKLSSLSVLFFDSSNNVILKVYPNMVV

SEQ ID NO: 72609 - protein, 36 aa, Artificial Sequence; identical to SEQ ID NO: 24549
  Cyclic GFR-binding peptide
  MOD_RES (5)..(6): Xaa is C or S

SEQ ID NO: 72610 - protein, 27 aa, Artificial Sequence
  Cyclic GFR-binding peptide
PVKTSSLSMLFFDNGRVLLLKVYPMIV

SEQ ID NO: 72611 - protein, 25 aa, Artificial Sequence
  Cyclic GFR-binding peptide
SSLSMLFFDEYDKVVLKVYPEMVVE

SEQ ID NO: 72612 - protein, 33 aa, Artificial Sequence; identical to SEQ ID NO: 24546
  Cyclic GFR-binding peptide
  MOD_RES (1)..(33): Xaa is C or S

SEQ ID NO: 72613 - protein, 33 aa, Artificial Sequence; identical to SEQ ID NO: 24547
  Cyclic GFR-binding peptide
  MOD_RES (1)..(33): Xaa is C or S

SEQ ID NO: 72614 - protein, 34 aa, Artificial Sequence; identical to SEQ ID NO: 24548
  Cyclic GFR-binding peptide
  MOD_RES (3)..(4): Xaa is C or S

SEQ ID NO: 72615 - protein, 32 aa, Artificial Sequence
  Cyclic GFR-binding peptide
  MOD_RES (3)..(4): Xaa is C or S
STXXAPVKTSSLSMLFFDNGRVLLLKVYPMIV

SEQ ID NO: 72616 - protein, 28 aa, Artificial Sequence
  Cyclic GFR-binding peptide
  MOD_RES (28)..(28): Xaa is C or S
ALSSLSILFFVGRKPKVLKVYPMIVRSX

SEQ ID NO: 72617 - protein, 33 aa, Artificial Sequence
  Cyclic GFR-binding peptide
  MOD_RES (5)..(5): Xaa is C or S
TKPTXAPTKLSSLSVLFFDDSSNVILKVYPNMV

SEQ ID NO: 72618 - protein, 37 aa, Artificial Sequence; identical to SEQ ID NO: 24550
  Cyclic GFR-binding peptide
  MOD_RES (6)..(7): Xaa is C or S

SEQ ID NO: 72619 - protein, 35 aa, Artificial Sequence; identical to SEQ ID NO: 24552
  Cyclic GFR-binding peptide
  MOD_RES (2)..(3)..(35): Xaa is C or S

SEQ ID NO: 72620 - protein, 29 aa, Artificial Sequence
  Cyclic GFR-binding peptide
VPQALSSLSILFFVGRKPKVLKVYPMIVR

SEQ ID NO: 72621 - protein, 28 aa, Artificial Sequence
  Cyclic GFR-binding peptide
  MOD_RES (1)..(1): Xaa is C or S
XAPTQLSSLSVLFFDDSSNVILKVYPNM

SEQ ID NO: 72622 - protein, 32 aa, Artificial Sequence
  Cyclic GFR-binding peptide
  MOD_RES (3)..(4): Xaa is C or S
GPXXTPTKMSSLSMLFFNDKQQIILKVYPGMV

SEQ ID NO: 72623 - protein, 30 aa, Artificial Sequence
  Cyclic GFR-binding peptide
  MOD_RES (28)..(30): Xaa is C or S
LSSLSMLFFDENEKVVLKVYPDMVVEGXGX

SEQ ID NO: 72624 - protein, 30 aa, Artificial Sequence
  Cyclic GFR-binding peptide
  MOD_RES (27)..(29): Xaa is C or S
SSLSILFFDAANNVVLKVYPDMVVEAXGXR

SEQ ID NO: 72625 - protein, 32 aa, Artificial Sequence
  Cyclic GFR-binding peptide
  MOD_RES (31)..(31): Xaa is C or S
PTKLSSLSILFFDKGVVTYLKVYPGMAVSEXG

SEQ ID NO: 72626 - protein, 22 aa, Artificial Sequence
  Cyclic GFR-binding peptide
LSSLSILFFIGKTPKILKVYPM

SEQ ID NO: 72627 - protein, 27 aa, Artificial Sequence
  Cyclic GFR-binding peptide
  MOD_RES (1)..(1): Xaa is C or S
XVPQDLSSLSILFFVGRTPKVLKVYPM

SEQ ID NO: 72628 - protein, 23 aa, Artificial Sequence
  Cyclic GFR-binding peptide
QALSSLSILFFVGRKPKVLKVYP

SEQ ID NO: 72629 - protein, 32 aa, Artificial Sequence; identical to SEQ ID NO: 24554
  Cyclic GFR-binding peptide
  MOD_RES (1)..(1): Xaa is C or S

SEQ ID NO: 72630 - protein, 31 aa, Artificial Sequence
  Cyclic GFR-binding peptide
  MOD_RES (1)..(2): Xaa is C or S
XXVPTELSSLSMLFFDEYDKVVLKVYPEMVV

SEQ ID NO: 72631 - protein, 31 aa, Artificial Sequence; identical to SEQ ID NO: 24557
  Cyclic GFR-binding peptide
  MOD_RES (1)..(1): Xaa is C or S

SEQ ID NO: 72632 - protein, 28 aa, Artificial Sequence
  Cyclic GFR-binding peptide
PTEESSLSMLFFRIKPHQGQHLKVYPFL

SEQ ID NO: 72633 - protein, 29 aa, Artificial Sequence
  Cyclic GFR-binding peptide
KLSSLSVLFFDDMGVPTLKVYPEGMSVAE

SEQ ID NO: 72634 - protein, 27 aa, Artificial Sequence
  Cyclic GFR-binding peptide
TEESSLSMLFFRIKPHQGQHLKVYPFL

SEQ ID NO: 72635 - protein, 28 aa, Artificial Sequence
  Cyclic GFR-binding peptide
TELSSLSMLFFDENEKVVLKVYPDMVVE

SEQ ID NO: 72636 - protein, 38 aa, Artificial Sequence; identical to SEQ ID NO: 24560
  Cyclic GFR-binding peptide
  MOD_RES (2)..(3)..(35)..(37): Xaa is C or S

SEQ ID NO: 72637 - protein, 30 aa, Artificial Sequence
  Cyclic GFR-binding peptide
  MOD_RES (28)..(30): Xaa is C or S
LSSLSVLFFDSSNNVILKVYPNMVVKAXGX

SEQ ID NO: 72638 - protein, 31 aa, Artificial Sequence
  Cyclic GFR-binding peptide
  MOD_RES (4)..(5): Xaa is C or S
PPTXXVPTRLSSLSILFFDSANNVVLKVYPD

SEQ ID NO: 72639 - protein, 42 aa, Artificial Sequence; identical to SEQ ID NO: 24561
  Cyclic GFR-binding peptide
  MOD_RES (5)..(39)..(41): Xaa is C or S

SEQ ID NO: 72640 - protein, 37 aa, Artificial Sequence; identical to SEQ ID NO: 24563
  Cyclic GFR-binding peptide
  MOD_RES (3)..(37): Xaa is C or S

SEQ ID NO: 72641 - protein, 29 aa, Artificial Sequence
  Cyclic GFR-binding peptide
  MOD_RES (27)..(29): Xaa is C or S
SSLSILFFDSANNVVLKVYPDMVVESXGX

SEQ ID NO: 72642 - protein, 31 aa, Artificial Sequence; identical to SEQ ID NO: 24566
  Cyclic GFR-binding peptide

SEQ ID NO: 72643 - protein, 33 aa, Artificial Sequence
  Cyclic GFR-binding peptide
  MOD_RES (3)..(3): Xaa is C or S
VKXQPSRVHHSSLSVLFFEYVRKKPKLLKVYPR

SEQ ID NO: 72644 - protein, 30 aa, Artificial Sequence; identical to SEQ ID NO: 24568
  Cyclic GFR-binding peptide

SEQ ID NO: 72645 - protein, 20 aa, Artificial Sequence
  Cyclic GFR-binding peptide
SSLSMLFFNDKQQIILKVYP

SEQ ID NO: 72646 - protein, 32 aa, Artificial Sequence; identical to SEQ ID NO: 24570
  Cyclic GFR-binding peptide
  MOD_RES (1)..(32): Xaa is C or S

SEQ ID NO: 72647 - protein, 37 aa, Artificial Sequence
  Cyclic GFR-binding peptide
  MOD_RES (5)..(6): Xaa is C or S
VGKAXXVPTKLSSLSVLFFDDMGVPTLKVYPEGMSVA

SEQ ID NO: 72648 - protein, 25 aa, Artificial Sequence
  Cyclic GFR-binding peptide
ALSSLSILFFVGRKPKVLKVYPMIV

SEQ ID NO: 72649 - protein, 31 aa, Artificial Sequence
  Cyclic GFR-binding peptide
  MOD_RES (4)..(5): Xaa is C or S
PKPXXAPTKLSSLSVLFFDDSSNVILKVYPN

SEQ ID NO: 72650 - protein, 40 aa, Artificial Sequence; identical to SEQ ID NO: 24573
  Cyclic GFR-binding peptide
  MOD_RES (5)..(6)..(38)..(40): Xaa is C or S

SEQ ID NO: 72651 - protein, 25 aa, Artificial Sequence
  Cyclic GFR-binding peptide
PTKLSSLSVLFFDDSSNVILKVYPN

SEQ ID NO: 72652 - protein, 36 aa, Artificial Sequence; identical to SEQ ID NO: 24575
  Cyclic GFR-binding peptide
  MOD_RES (1)..(2)..(34)..(36): Xaa is C or S

SEQ ID NO: 72653 - protein, 40 aa, Artificial Sequence; identical to SEQ ID NO: 24576
  Cyclic GFR-binding peptide
  MOD_RES (5)..(6)..(38)..(40): Xaa is C or S

SEQ ID NO: 72654 - protein, 38 aa, Artificial Sequence; identical to SEQ ID NO: 24577
  Cyclic GFR-binding peptide
  MOD_RES (5)..(5): Xaa is C or S

SEQ ID NO: 72655 - protein, 33 aa, Artificial Sequence; identical to SEQ ID NO: 24578
  Cyclic GFR-binding peptide
  MOD_RES (1)..(2): Xaa is C or S

SEQ ID NO: 72656 - protein, 28 aa, Artificial Sequence
  Cyclic GFR-binding peptide
APTQLSSLSVLFFDDSSNVILKVYPNMV

SEQ ID NO: 72657 - protein, 29 aa, Artificial Sequence
  Cyclic GFR-binding peptide
PTELSSLSMLFFDENEKVVLKVYPDMVVE

SEQ ID NO: 72658 - protein, 27 aa, Artificial Sequence
  Cyclic GFR-binding peptide
PTKLSSLSVLFFDSSNNVILKVYPNMV

SEQ ID NO: 72659 - protein, 32 aa, Artificial Sequence
  Cyclic GFR-binding peptide
  MOD_RES (32)..(32): Xaa is C or S
PTKLSSLSVLFFDDMGVPTLKVYPEGMSVAEX

SEQ ID NO: 72660 - protein, 32 aa, Artificial Sequence
  Cyclic GFR-binding peptide
  MOD_RES (6)..(7): Xaa is C or S
KVGKAXXVPTKLSSLSVLFFDDMGVPTLKVYP

SEQ ID NO: 72661 - protein, 32 aa, Artificial Sequence
  Cyclic GFR-binding peptide
  MOD_RES (29)..(31): Xaa is C or S
QDLSSLSILFFIGKTPKILKVYPMIVKSXKXS

SEQ ID NO: 72662 - protein, 31 aa, Artificial Sequence
  Cyclic GFR-binding peptide
  MOD_RES (1)..(2): Xaa is C or S
XXTPTKMSSLSMLFFNDKQQIILKVYPGMVV

SEQ ID NO: 72663 - protein, 28 aa, Artificial Sequence
  Cyclic GFR-binding peptide
  MOD_RES (2)..(3): Xaa is C or S
AXXVPTELSSLSMLFFDENEKVVLKVYP

SEQ ID NO: 72664 - protein, 39 aa, Artificial Sequence; identical to SEQ ID NO: 24581
  Cyclic GFR-binding peptide
  MOD_RES (5)..(6)..(38): Xaa is C or S

SEQ ID NO: 72665 - protein, 34 aa, Artificial Sequence
  Cyclic GFR-binding peptide
  MOD_RES (31)..(33): Xaa is C or S
PTKLSSLSVLFFDSSNNVILKVYPNMVVKAXGXH

SEQ ID NO: 72666 - protein, 32 aa, Artificial Sequence
  Cyclic GFR-binding peptide
  MOD_RES (31)..(31): Xaa is C or S
HSSLSVLFFEYVRKKPKLLKVYPRLEEHLEXA

SEQ ID NO: 72667 - protein, 35 aa, Artificial Sequence; identical to SEQ ID NO: 24588
  Cyclic GFR-binding peptide
  MOD_RES (4)..(5): Xaa is C or S

SEQ ID NO: 72668 - protein, 29 aa, Artificial Sequence
  Cyclic GFR-binding peptide
  MOD_RES (3)..(4): Xaa is C or S
KAXXAPTKLSSLSVLFFDSSNNVILKVYP

SEQ ID NO: 72669 - protein, 25 aa, Artificial Sequence
  Cyclic GFR-binding peptide
LSSLSILFFVGRTPKVLKVYPMVVK

SEQ ID NO: 72670 - protein, 29 aa, Artificial Sequence
  Cyclic GFR-binding peptide
VHHSSLSVLFFEYVRKKPKLLKVYPRLEE

SEQ ID NO: 72671 - protein, 27 aa, Artificial Sequence
  Cyclic GFR-binding peptide
KMSSLSMLFFNDKQQIILKVYPGMVVD

SEQ ID NO: 72672 - protein, 32 aa, Artificial Sequence
  Cyclic GFR-binding peptide
  MOD_RES (30)..(32): Xaa is C or S
ESSLSMLFFRIKPHQGQHLKVYPFLQHNKXEX

SEQ ID NO: 72673 - protein, 35 aa, Artificial Sequence; identical to SEQ ID NO: 24591
  Cyclic GFR-binding peptide
  MOD_RES (2)..(3)..(34): Xaa is C or S

SEQ ID NO: 72674 - protein, 20 aa, Artificial Sequence
  Cyclic GFR-binding peptide
SSLSVLFFDSSNNVILKVYP

SEQ ID NO: 72675 - protein, 31 aa, Artificial Sequence
  Cyclic GFR-binding peptide
  MOD_RES (5)..(6): Xaa is C or S
VPKPXXAPTQLSSLSVLFFDDSSNVILKVYP

SEQ ID NO: 72676 - protein, 38 aa, Artificial Sequence; identical to SEQ ID NO: 24592
  Cyclic GFR-binding peptide
  MOD_RES (4)..(5)..(37): Xaa is C or S

SEQ ID NO: 72677 - protein, 41 aa, Artificial Sequence; identical to SEQ ID NO: 24594
  Cyclic GFR-binding peptide
  MOD_RES (6)..(40): Xaa is C or S

SEQ ID NO: 72678 - protein, 31 aa, Artificial Sequence
  Cyclic GFR-binding peptide
  MOD_RES (3)..(4): Xaa is C or S
PTXXVPTRLSSLSILFFDSANNVVLKVYPDM

SEQ ID NO: 72679 - protein, 36 aa, Artificial Sequence
  Cyclic GFR-binding peptide
  MOD_RES (5)..(6): Xaa is C or S
VGKAXXVPTKLSSLSVLFFDDMGVPTLKVYPEGMSV

SEQ ID NO: 72680 - protein, 37 aa, Artificial Sequence; identical to SEQ ID NO: 24596
  Cyclic GFR-binding peptide
  MOD_RES (3)..(4)..(36): Xaa is C or S

SEQ ID NO: 72681 - protein, 27 aa, Artificial Sequence
  Cyclic GFR-binding peptide
VKTSSLSMLFFDNGRVLLLKVYPMIVE

SEQ ID NO: 72682 - protein, 25 aa, Artificial Sequence
  Cyclic GFR-binding peptide
TKLSSLSVLFFDDSSNVILKVYPNM

SEQ ID NO: 72683 - protein, 39 aa, Artificial Sequence; identical to SEQ ID NO: 24597
  Cyclic GFR-binding peptide
  MOD_RES (5)..(6)..(37)..(39): Xaa is C or S

SEQ ID NO: 72684 - protein, 31 aa, Artificial Sequence
  Cyclic GFR-binding peptide
VPTELSSLSMLFFDENEKVVLKVYPDMVVEG

SEQ ID NO: 72685 - protein, 36 aa, Artificial Sequence; identical to SEQ ID NO: 24598
  Cyclic GFR-binding peptide
  MOD_RES (4)..(5)..(36): Xaa is C or S

SEQ ID NO: 72686 - protein, 33 aa, Artificial Sequence
  Cyclic GFR-binding peptide
  MOD_RES (6)..(7): Xaa is C or S
ASASPXXVSQDLSSLSILFFIGKTPKILKVYPM

SEQ ID NO: 72687 - protein, 36 aa, Artificial Sequence; identical to SEQ ID NO: 24601
  Cyclic GFR-binding peptide
  MOD_RES (3)..(4)..(35): Xaa is C or S

SEQ ID NO: 72688 - protein, 39 aa, Artificial Sequence; identical to SEQ ID NO: 24602
  Cyclic GFR-binding peptide
  MOD_RES (2)..(3)..(36)..(38): Xaa is C or S

SEQ ID NO: 72689 - protein, 32 aa, Artificial Sequence
  Cyclic GFR-binding peptide
  MOD_RES (2)..(2): Xaa is C or S
EXVPTEESSLSMLFFRIKPHQGQHLKVYPFLQ

SEQ ID NO: 72690 - protein, 35 aa, Artificial Sequence; identical to SEQ ID NO: 24603
  Cyclic GFR-binding peptide
  MOD_RES (4)..(5): Xaa is C or S

SEQ ID NO: 72691 - protein, 32 aa, Artificial Sequence
  Cyclic GFR-binding peptide
  MOD_RES (2)..(3): Xaa is C or S
TXXAPVKTSSLSMLFFDNGRVLLLKVYPMIVE

SEQ ID NO: 72692 - protein, 38 aa, Artificial Sequence; identical to SEQ ID NO: 24604
  Cyclic GFR-binding peptide
  MOD_RES (5)..(6)..(37): Xaa is C or S

SEQ ID NO: 72693 - protein, 34 aa, Artificial Sequence; identical to SEQ ID NO: 24605
  Cyclic GFR-binding peptide
  MOD_RES (3)..(4): Xaa is C or S

SEQ ID NO: 72694 - protein, 29 aa, Artificial Sequence
  Cyclic GFR-binding peptide
  MOD_RES (27)..(29): Xaa is C or S
LSSLSILFFIGKTPKILKVYPMIVKSXKX

SEQ ID NO: 72695 - protein, 26 aa, Artificial Sequence
  Cyclic GFR-binding peptide
  MOD_RES (1)..(1): Xaa is C or S
XVPTELSSLSMLFFDEYDKVVLKVYP

SEQ ID NO: 72696 - protein, 36 aa, Artificial Sequence; identical to SEQ ID NO: 24606
  Cyclic GFR-binding peptide
  MOD_RES (1)..(2)..(35): Xaa is C or S

SEQ ID NO: 72697 - protein, 29 aa, Artificial Sequence
  Cyclic GFR-binding peptide
  MOD_RES (26)..(28): Xaa is C or S
SSLSILFFVGRTPKVLKVYPMVVKSXKXS

SEQ ID NO: 72698 - protein, 36 aa, Artificial Sequence; identical to SEQ ID NO: 24607
  Cyclic GFR-binding peptide
  MOD_RES (4)..(5)..(36): Xaa is C or S

SEQ ID NO: 72699 - protein, 35 aa, Artificial Sequence; identical to SEQ ID NO: 24611
  Cyclic GFR-binding peptide
  MOD_RES (1)..(34): Xaa is C or S

SEQ ID NO: 72700 - protein, 38 aa, Artificial Sequence; identical to SEQ ID NO: 24612
  Cyclic GFR-binding peptide
  MOD_RES (2)..(3)..(35)..(37): Xaa is C or S

SEQ ID NO: 72701 - protein, 30 aa, Artificial Sequence
  Cyclic GFR-binding peptide
  MOD_RES (2)..(3): Xaa is C or S
AXXVPTKLSSLSVLFFDDMGVPTLKVYPEG

SEQ ID NO: 72702 - protein, 33 aa, Artificial Sequence; identical to SEQ ID NO: 24614
  Cyclic GFR-binding peptide

SEQ ID NO: 72703 - protein, 41 aa, Artificial Sequence; identical to SEQ ID NO: 24615
  Cyclic GFR-binding peptide
  MOD_RES (7)..(41): Xaa is C or S

SEQ ID NO: 72704 - protein, 31 aa, Artificial Sequence
  Cyclic GFR-binding peptide
  MOD_RES (3)..(4): Xaa is C or S
SPXXVSQDLSSLSILFFIGKTPKILKVYPMI

SEQ ID NO: 72705 - protein, 41 aa, Artificial Sequence
  Cyclic GFR-binding peptide
  MOD_RES (5)..(6)..(38)..(40): Xaa is C or S
IPKAXXVPTELSSLSMLFFDENEKVVLKVYPDMVVEGXGXR

SEQ ID NO: 72706 - protein, 31 aa, Artificial Sequence
  Cyclic GFR-binding peptide
  MOD_RES (3)..(4): Xaa is C or S
KAXXVPTKLSSLSILFFDKGVVTYLKVYPGM

SEQ ID NO: 72707 - protein, 37 aa, Artificial Sequence
  Cyclic GFR-binding peptide
  MOD_RES (4)..(5)..(37): Xaa is C or S
PKAXXVPTELSSLSMLFFDENEKVVLKVYPDMVVEGX

SEQ ID NO: 72708 - protein, 26 aa, Artificial Sequence
  Cyclic GFR-binding peptide
VPTKLSSLSILFFDKGVVTYLKVYPG

SEQ ID NO: 72709 - protein, 39 aa, Artificial Sequence; identical to SEQ ID NO: 24617
  Cyclic GFR-binding peptide
  MOD_RES (6)..(7)..(38): Xaa is C or S

SEQ ID NO: 72710 - protein, 24 aa, Artificial Sequence
  Cyclic GFR-binding peptide
SSLSMLFFDENEKVVLKVYPDMVV

SEQ ID NO: 72711 - protein, 22 aa, Artificial Sequence
  Cyclic GFR-binding peptide
SSLSVLFFDDMGVPTLKVYPEG

SEQ ID NO: 72712 - protein, 36 aa, Artificial Sequence; identical to SEQ ID NO: 24619
  Cyclic GFR-binding peptide
  MOD_RES (4)..(5): Xaa is C or S

SEQ ID NO: 72713 - protein, 37 aa, Artificial Sequence; identical to SEQ ID NO: 24620
  Cyclic GFR-binding peptide
  MOD_RES (6)..(7): Xaa is C or S

SEQ ID NO: 72714 - protein, 30 aa, Artificial Sequence
  Cyclic GFR-binding peptide
PTKLSSLSVLFFDSSNNVILKVYPNMVVKA

SEQ ID NO: 72715 - protein, 23 aa, Artificial Sequence
  Cyclic GFR-binding peptide
ARLSSLSILFFDAANNVVLKVYP

SEQ ID NO: 72716 - protein, 26 aa, Artificial Sequence
  Cyclic GFR-binding peptide
VPTRLSSLSILFFDSANNVVLKVYPD

SEQ ID NO: 72717 - protein, 30 aa, Artificial Sequence; identical to SEQ ID NO: 24621
  Cyclic GFR-binding peptide

SEQ ID NO: 72718 - protein, 25 aa, Artificial Sequence
  Cyclic GFR-binding peptide
VSQDLSSLSILFFIGKTPKILKVYP

SEQ ID NO: 72719 - protein, 32 aa, Artificial Sequence; identical to SEQ ID NO: 24622
  Cyclic GFR-binding peptide
  MOD_RES (1)..(2): Xaa is C or S

SEQ ID NO: 72720 - protein, 36 aa, Artificial Sequence; identical to SEQ ID NO: 24623
  Cyclic GFR-binding peptide
  MOD_RES (6)..(6): Xaa is C or S

SEQ ID NO: 72721 - protein, 33 aa, Artificial Sequence; identical to SEQ ID NO: 24624
  Cyclic GFR-binding peptide
  MOD_RES (32)..(32): Xaa is C or S

SEQ ID NO: 72722 - protein, 39 aa, Artificial Sequence; identical to SEQ ID NO: 24628
  Cyclic GFR-binding peptide
  MOD_RES (6)..(7)..(39): Xaa is C or S

SEQ ID NO: 72723 - protein, 35 aa, Artificial Sequence; identical to SEQ ID NO: 24630
  Cyclic GFR-binding peptide
  MOD_RES (2)..(3)..(35): Xaa is C or S

SEQ ID NO: 72724 - protein, 37 aa, Artificial Sequence
  Cyclic GFR-binding peptide
  MOD_RES (4)..(4): Xaa is C or S
SVKXQPSRVHHSSLSVLFFEYVRKKPKLLKVYPRLEE

SEQ ID NO: 72725 - protein, 32 aa, Artificial Sequence
  Cyclic GFR-binding peptide
  MOD_RES (30)..(32): Xaa is C or S
SQDLSSLSILFFIGKTPKILKVYPMIVKSXKX

SEQ ID NO: 72726 - protein, 38 aa, Artificial Sequence; identical to SEQ ID NO: 24629
  Cyclic GFR-binding peptide
  MOD_RES (4)..(5)..(37): Xaa is C or S

SEQ ID NO: 72727 - protein, 30 aa, Artificial Sequence
  Cyclic GFR-binding peptide
  MOD_RES (4)..(5): Xaa is C or S
AGPXXTPTKMSSLSMLFFNDKQQIILKVYP

SEQ ID NO: 72728 - protein, 22 aa, Artificial Sequence
  Cyclic GFR-binding peptide
KMSSLSMLFFNDKQQIILKVYP

SEQ ID NO: 72729 - protein, 38 aa, Artificial Sequence; identical to SEQ ID NO: 24632
  Cyclic GFR-binding peptide
  MOD_RES (6)..(7): Xaa is C or S

SEQ ID NO: 72730 - protein, 24 aa, Artificial Sequence
  Cyclic GFR-binding peptide
PTELSSLSMLFFDENEKVVLKVYP

SEQ ID NO: 72731 - protein, 33 aa, Artificial Sequence
  Cyclic GFR-binding peptide
  MOD_RES (31)..(33): Xaa is C or S
PTKLSSLSILFFDKGVVTYLKVYPGMAVSEXGX

SEQ ID NO: 72732 - protein, 32 aa, Artificial Sequence; identical to SEQ ID NO: 24633
  Cyclic GFR-binding peptide
  MOD_RES (1)..(1): Xaa is C or S

SEQ ID NO: 72733 - protein, 37 aa, Artificial Sequence; identical to SEQ ID NO: 24634
  Cyclic GFR-binding peptide
  MOD_RES (2)..(3)..(34)..(36): Xaa is C or S

SEQ ID NO: 72734 - protein, 43 aa, Artificial Sequence; identical to SEQ ID NO: 24635
  Cyclic GFR-binding peptide
  MOD_RES (3)..(40)..(42): Xaa is C or S

SEQ ID NO: 72735 - protein, 32 aa, Artificial Sequence
  Cyclic GFR-binding peptide
  MOD_RES (3)..(3): Xaa is C or S
PTXAPTKLSSLSVLFFDDSSNVILKVYPNMVV

SEQ ID NO: 72736 - protein, 20 aa, Artificial Sequence
  Cyclic GFR-binding peptide
SSLSVLFFDDSSNVILKVYP

SEQ ID NO: 72737 - protein, 35 aa, Artificial Sequence
  Cyclic GFR-binding peptide
  MOD_RES (6)..(7): Xaa is C or S
AVPKAXXAPTKLSSLSVLFFDSSNNVILKVYPNMV

SEQ ID NO: 72738 - protein, 28 aa, Artificial Sequence
  Cyclic GFR-binding peptide
  MOD_RES (28)..(28): Xaa is C or S
LSSLSVLFFDSSNNVILKVYPNMVVKAX

SEQ ID NO: 72739 - protein, 30 aa, Artificial Sequence
  Cyclic GFR-binding peptide
  MOD_RES (1)..(2): Xaa is C or S
XXVSQDLSSLSILFFIGKTPKILKVYPMIV

SEQ ID NO: 72740 - protein, 31 aa, Artificial Sequence
  Cyclic GFR-binding peptide
  MOD_RES (5)..(6): Xaa is C or S
IPKAXXVPTELSSLSMLFFDEYDKVVLKVYP

SEQ ID NO: 72741 - protein, 39 aa, Artificial Sequence
  Cyclic GFR-binding peptide
  MOD_RES (6)..(7)..(39): Xaa is C or S
KIPKAXXVPTELSSLSMLFFDENEKVVLKVYPDMVVEGX

SEQ ID NO: 72742 - protein, 33 aa, Artificial Sequence
  Cyclic GFR-binding peptide
  MOD_RES (4)..(5): Xaa is C or S
PKAXXVPTELSSLSMLFFDEYDKVVLKVYPEMV

SEQ ID NO: 72743 - protein, 25 aa, Artificial Sequence
  Cyclic GFR-binding peptide
VPTELSSLSMLFFDENEKVVLKVYP

SEQ ID NO: 72744 - protein, 28 aa, Artificial Sequence
  Cyclic GFR-binding peptide
  MOD_RES (27)..(27): Xaa is C or S
TSSLSMLFFDNGRVLLLKVYPMIVEEXG

SEQ ID NO: 72745 - protein, 25 aa, Artificial Sequence
  Cyclic GFR-binding peptide
SSLSMLFFNDKQQIILKVYPGMVVD

SEQ ID NO: 72746 - protein, 34 aa, Artificial Sequence
  Cyclic GFR-binding peptide
  MOD_RES (5)..(6): Xaa is C or S
VPKPXXAPTKLSSLSVLFFDDSSNVILKVYPNMV

SEQ ID NO: 72747 - protein, 32 aa, Artificial Sequence
  Cyclic GFR-binding peptide
  MOD_RES (29)..(31): Xaa is C or S
QALSSLSILFFVGRKPKVLKVYPMIVRSXKXS

SEQ ID NO: 72748 - protein, 26 aa, Artificial Sequence
  Cyclic GFR-binding peptide
LSSLSILFFIGKTPKILKVYPMIVKS

SEQ ID NO: 72749 - protein, 30 aa, Artificial Sequence
  Cyclic GFR-binding peptide
PTEESSLSMLFFRIKPHQGQHLKVYPFLQH

SEQ ID NO: 72750 - protein, 34 aa, Artificial Sequence
  Cyclic GFR-binding peptide
  MOD_RES (1)..(1): Xaa is C or S
XQPSRVHHSSLSVLFFEYVRKKPKLLKVYPRLEE

SEQ ID NO: 72751 - protein, 21 aa, Artificial Sequence
  Cyclic GFR-binding peptide
SSLSMLFFDNGRVLLLKVYPM

SEQ ID NO: 72752 - protein, 33 aa, Artificial Sequence; identical to SEQ ID NO: 24641
  Cyclic GFR-binding peptide
  MOD_RES (1)..(32): Xaa is C or S

SEQ ID NO: 72753 - protein, 36 aa, Artificial Sequence
  Cyclic GFR-binding peptide
  MOD_RES (4)..(5): Xaa is C or S
PKAXXVPTELSSLSMLFFDENEKVVLKVYPDMVVEG

SEQ ID NO: 72754 - protein, 25 aa, Artificial Sequence
  Cyclic GFR-binding peptide
TSSLSMLFFDNGRVLLLKVYPMIVE

SEQ ID NO: 72755 - protein, 34 aa, Artificial Sequence
  Cyclic GFR-binding peptide
  MOD_RES (5)..(5): Xaa is C or S
SSVKXQPSRVHHSSLSVLFFEYVRKKPKLLKVYP

SEQ ID NO: 72756 - protein, 30 aa, Artificial Sequence
  Cyclic GFR-binding peptide
  MOD_RES (1)..(1): Xaa is C or S
XVSQDLSSLSILFFIGKTPKILKVYPMIVK

SEQ ID NO: 72757 - protein, 25 aa, Artificial Sequence
  Cyclic GFR-binding peptide
QDLSSLSILFFIGKTPKILKVYPMI

SEQ ID NO: 72758 - protein, 32 aa, Artificial Sequence
  Cyclic GFR-binding peptide
  MOD_RES (6)..(7): Xaa is C or S
STPPTXXVPTRLSSLSILFFDSANNVVLKVYP

SEQ ID NO: 72759 - protein, 31 aa, Artificial Sequence
  Cyclic GFR-binding peptide
PTEESSLSMLFFRIKPHQGQHLKVYPFLQHN

SEQ ID NO: 72760 - protein, 26 aa, Artificial Sequence
  Cyclic GFR-binding peptide
LSSLSILFFDKGVVTYLKVYPGMAVS

SEQ ID NO: 72761 - protein, 25 aa, Artificial Sequence
  Cyclic GFR-binding peptide
DLSSLSILFFIGKTPKILKVYPMIV

SEQ ID NO: 72762 - protein, 27 aa, Artificial Sequence
  Cyclic GFR-binding peptide
  MOD_RES (1)..(2): Xaa is C or S
XXVPARLSSLSILFFDAANNVVLKVYP

SEQ ID NO: 72763 - protein, 31 aa, Artificial Sequence; identical to SEQ ID NO: 24647
  Cyclic GFR-binding peptide
  MOD_RES (1)..(1): Xaa is C or S

SEQ ID NO: 72764 - protein, 41 aa, Artificial Sequence; identical to SEQ ID NO: 24649
  Cyclic GFR-binding peptide
  MOD_RES (6)..(7)..(39)..(41): Xaa is C or S

SEQ ID NO: 72765 - protein, 25 aa, Artificial Sequence
  Cyclic GFR-binding peptide
KTSSLSMLFFDNGRVLLLKVYPMIV

SEQ ID NO: 72766 - protein, 39 aa, Artificial Sequence; identical to SEQ ID NO: 24650
  Cyclic GFR-binding peptide
  MOD_RES (3)..(4)..(36)..(38): Xaa is C or S

SEQ ID NO: 72767 - protein, 30 aa, Artificial Sequence
  Cyclic GFR-binding peptide
  MOD_RES (1)..(2): Xaa is C or S
XXVPTKLSSLSVLFFDDMGVPTLKVYPEGM

SEQ ID NO: 72768 - protein, 40 aa, Artificial Sequence
  Cyclic GFR-binding peptide
  MOD_RES (5)..(39): Xaa is C or S
EGLEXVPTEESSLSMLFFRIKPHQGQHLKVYPFLQHNKXE

SEQ ID NO: 72769 - protein, 30 aa, Artificial Sequence
  Cyclic GFR-binding peptide
  MOD_RES (27)..(29): Xaa is C or S
SSLSILFFDSANNVVLKVYPDMVVESXGXR

SEQ ID NO: 72770 - protein, 34 aa, Artificial Sequence
  Cyclic GFR-binding peptide
  MOD_RES (31)..(33): Xaa is C or S
HSSLSVLFFEYVRKKPKLLKVYPRLEEHLEXAXA

SEQ ID NO: 72771 - protein, 37 aa, Artificial Sequence; identical to SEQ ID NO: 24653
  Cyclic GFR-binding peptide
  MOD_RES (5)..(6): Xaa is C or S

SEQ ID NO: 72772 - protein, 34 aa, Artificial Sequence
  Cyclic GFR-binding peptide
  MOD_RES (31)..(33): Xaa is C or S
PARLSSLSILFFDAANNVVLKVYPDMVVEAXGXR

SEQ ID NO: 72773 - protein, 35 aa, Artificial Sequence
  Cyclic GFR-binding peptide
  MOD_RES (4)..(5): Xaa is C or S
PKAXXVPTELSSLSMLFFDENEKVVLKVYPDMVVE

SEQ ID NO: 72774 - protein, 40 aa, Artificial Sequence; identical to SEQ ID NO: 24656
  Cyclic GFR-binding peptide
  MOD_RES (1)..(38)..(40): Xaa is C or S

SEQ ID NO: 72775 - protein, 36 aa, Artificial Sequence; identical to SEQ ID NO: 24655
  Cyclic GFR-binding peptide
  MOD_RES (3)..(4)..(36): Xaa is C or S

SEQ ID NO: 72776 - protein, 31 aa, Artificial Sequence
  Cyclic GFR-binding peptide
  MOD_RES (3)..(4): Xaa is C or S
KPXXAPTQLSSLSVLFFDDSSNVILKVYPNM

SEQ ID NO: 72777 - protein, 31 aa, Artificial Sequence
  Cyclic GFR-binding peptide
  MOD_RES (1)..(2): Xaa is C or S
XXAPTKLSSLSVLFFDSSNNVILKVYPNMVV

SEQ ID NO: 72778 - protein, 40 aa, Artificial Sequence
  Cyclic GFR-binding peptide
  MOD_RES (4)..(5)..(37)..(39): Xaa is C or S
PKAXXVPTELSSLSMLFFDENEKVVLKVYPDMVVEGXGXR

SEQ ID NO: 72779 - protein, 39 aa, Artificial Sequence; identical to SEQ ID NO: 24661
  Cyclic GFR-binding peptide
  MOD_RES (4)..(5)..(37)..(39): Xaa is C or S

SEQ ID NO: 72780 - protein, 41 aa, Artificial Sequence; identical to SEQ ID NO: 24662
  Cyclic GFR-binding peptide
  MOD_RES (5)..(6)..(38)..(40): Xaa is C or S

SEQ ID NO: 72781 - protein, 43 aa, Artificial Sequence; identical to SEQ ID NO: 24663
  Cyclic GFR-binding peptide
  MOD_RES (6)..(40)..(42): Xaa is C or S

SEQ ID NO: 72782 - protein, 35 aa, Artificial Sequence; identical to SEQ ID NO: 24664
  Cyclic GFR-binding peptide
  MOD_RES (2)..(34): Xaa is C or S

SEQ ID NO: 72783 - protein, 23 aa, Artificial Sequence
  Cyclic GFR-binding peptide
QDLSSLSILFFVGRTPKVLKVYP

SEQ ID NO: 72784 - protein, 25 aa, Artificial Sequence
  Cyclic GFR-binding peptide
TELSSLSMLFFDENEKVVLKVYPDM

SEQ ID NO: 72785 - protein, 32 aa, Artificial Sequence
  Cyclic GFR-binding peptide
  MOD_RES (2)..(3): Xaa is C or S
PXXAPTKLSSLSVLFFDDSSNVILKVYPNMVV

SEQ ID NO: 72786 - protein, 30 aa, Artificial Sequence
  Cyclic GFR-binding peptide
  MOD_RES (1)..(2): Xaa is C or S
XXAPTQLSSLSVLFFDDSSNVILKVYPNMV

SEQ ID NO: 72787 - protein, 21 aa, Artificial Sequence
  Cyclic GFR-binding peptide
LSSLSVLFFDSSNNVILKVYP

SEQ ID NO: 72788 - protein, 24 aa, Artificial Sequence
  Cyclic GFR-binding peptide
SSLSILFFDAANNVVLKVYPDMVV

SEQ ID NO: 72789 - protein, 36 aa, Artificial Sequence; identical to SEQ ID NO: 24667
  Cyclic GFR-binding peptide
  MOD_RES (1)..(33)..(35): Xaa is C or S

SEQ ID NO: 72790 - protein, 31 aa, Artificial Sequence
  Cyclic GFR-binding peptide
  MOD_RES (3)..(4): Xaa is C or S
KAXXVPTELSSLSMLFFDEYDKVVLKVYPEM

SEQ ID NO: 72791 - protein, 34 aa, Artificial Sequence
  Cyclic GFR-binding peptide
  MOD_RES (4)..(5): Xaa is C or S
PASXXVPARLSSLSILFFDAANNVVLKVYPDMVV

SEQ ID NO: 72792 - protein, 38 aa, Artificial Sequence; identical to SEQ ID NO: 24668
  Cyclic GFR-binding peptide
  MOD_RES (2)..(3)..(35)..(37): Xaa is C or S

SEQ ID NO: 72793 - protein, 30 aa, Artificial Sequence
  Cyclic GFR-binding peptide
  MOD_RES (30)..(30): Xaa is C or S
PQALSSLSILFFVGRKPKVLKVYPMIVRSX

SEQ ID NO: 72794 - protein, 34 aa, Artificial Sequence; identical to SEQ ID NO: 24670
  Cyclic GFR-binding peptide
  MOD_RES (32)..(34): Xaa is C or S

SEQ ID NO: 72795 - protein, 37 aa, Artificial Sequence; identical to SEQ ID NO: 24671
  Cyclic GFR-binding peptide
  MOD_RES (1)..(2)..(34)..(36): Xaa is C or S

SEQ ID NO: 72796 - protein, 37 aa, Artificial Sequence; identical to SEQ ID NO: 24672
  Cyclic GFR-binding peptide
  MOD_RES (3)..(4)..(36): Xaa is C or S

SEQ ID NO: 72797 - protein, 37 aa, Artificial Sequence
  Cyclic GFR-binding peptide
  MOD_RES (7)..(7): Xaa is C or S
NDEGLEXVPTEESSLSMLFFRIKPHQGQHLKVYPFLQ

SEQ ID NO: 72798 - protein, 33 aa, Artificial Sequence
  Cyclic GFR-binding peptide
  MOD_RES (30)..(32): Xaa is C or S
TKLSSLSVLFFDSSNNVILKVYPNMVVKAXGXH

SEQ ID NO: 72799 - protein, 28 aa, Artificial Sequence
  Cyclic GFR-binding peptide
  MOD_RES (2)..(3): Xaa is C or S
PXXVPQDLSSLSILFFVGRTPKVLKVYP

SEQ ID NO: 72800 - protein, 29 aa, Artificial Sequence
  Cyclic GFR-binding peptide
  MOD_RES (3)..(4): Xaa is C or S
KAXXVPTKLSSLSILFFDKGVVTYLKVYP

SEQ ID NO: 72801 - protein, 39 aa, Artificial Sequence; identical to SEQ ID NO: 24676
  Cyclic GFR-binding peptide
  MOD_RES (6)..(7)..(38): Xaa is C or S

SEQ ID NO: 72802 - protein, 38 aa, Artificial Sequence; identical to SEQ ID NO: 24677
  Cyclic GFR-binding peptide
  MOD_RES (5)..(6)..(38): Xaa is C or S

SEQ ID NO: 72803 - protein, 27 aa, Artificial Sequence
  Cyclic GFR-binding peptide
LSSLSMLFFDENEKVVLKVYPDMVVEG

SEQ ID NO: 72804 - protein, 28 aa, Artificial Sequence
  Cyclic GFR-binding peptide
PTKLSSLSVLFFDSSNNVILKVYPNMVV

SEQ ID NO: 72805 - protein, 33 aa, Artificial Sequence
  Cyclic GFR-binding peptide
  MOD_RES (30)..(32): Xaa is C or S
PQDLSSLSILFFVGRTPKVLKVYPMVVKSXKXS

SEQ ID NO: 72806 - protein, 33 aa, Artificial Sequence
  Cyclic GFR-binding peptide
  MOD_RES (3)..(4): Xaa is C or S
KAXXVPTELSSLSMLFFDEYDKVVLKVYPEMVV

SEQ ID NO: 72807 - protein, 33 aa, Artificial Sequence
  Cyclic GFR-binding peptide
  MOD_RES (1)..(2): Xaa is C or S
XXVPTKLSSLSVLFFDDMGVPTLKVYPEGMSVA

SEQ ID NO: 72808 - protein, 34 aa, Artificial Sequence
  Cyclic GFR-binding peptide
  MOD_RES (5)..(6): Xaa is C or S
VGKAXXVPTKLSSLSVLFFDDMGVPTLKVYPEGM

SEQ ID NO: 72809 - protein, 41 aa, Artificial Sequence; identical to SEQ ID NO: 24680
  Cyclic GFR-binding peptide
  MOD_RES (6)..(7)..(40): Xaa is C or S

SEQ ID NO: 72810 - protein, 31 aa, Artificial Sequence
  Cyclic GFR-binding peptide
  MOD_RES (30)..(30): Xaa is C or S
KLSSLSVLFFDDMGVPTLKVYPEGMSVAEXG

SEQ ID NO: 72811 - protein, 27 aa, Artificial Sequence
  Cyclic GFR-binding peptide
LSSLSMLFFDEYDKVVLKVYPEMVVEG

SEQ ID NO: 72812 - protein, 30 aa, Artificial Sequence
  Cyclic GFR-binding peptide
  MOD_RES (5)..(5): Xaa is C or S
TKPTXAPTKLSSLSVLFFDDSSNVILKVYP

SEQ ID NO: 72813 - protein, 34 aa, Artificial Sequence; identical to SEQ ID NO: 24682
  Cyclic GFR-binding peptide
  MOD_RES (31)..(33): Xaa is C or S

SEQ ID NO: 72814 - protein, 33 aa, Artificial Sequence
  Cyclic GFR-binding peptide
  MOD_RES (6)..(7): Xaa is C or S
GSAGPXXTPTKMSSLSMLFFNDKQQIILKVYPG

SEQ ID NO: 72815 - protein, 30 aa, Artificial Sequence
  Cyclic GFR-binding peptide
  MOD_RES (3)..(4): Xaa is C or S
SPXXVPQDLSSLSILFFVGRTPKVLKVYPM

SEQ ID NO: 72816 - protein, 30 aa, Artificial Sequence
  Cyclic GFR-binding peptide
PARLSSLSILFFDAANNVVLKVYPDMVVEA

SEQ ID NO: 72817 - protein, 41 aa, Artificial Sequence; identical to SEQ ID NO: 24686
  Cyclic GFR-binding peptide
  MOD_RES (3)..(40): Xaa is C or S

SEQ ID NO: 72818 - protein, 30 aa, Artificial Sequence
  Cyclic GFR-binding peptide
  MOD_RES (27)..(29): Xaa is C or S
SSLSMLFFNDKQQIILKVYPGMVVDRXGXS

SEQ ID NO: 72819 - protein, 28 aa, Artificial Sequence
  Cyclic GFR-binding peptide
  MOD_RES (27)..(27): Xaa is C or S
LSSLSILFFIGKTPKILKVYPMIVKSXK

SEQ ID NO: 72820 - protein, 34 aa, Artificial Sequence
  Cyclic GFR-binding peptide
  MOD_RES (4)..(5): Xaa is C or S
SKAXXVPTKLSSLSILFFDKGVVTYLKVYPGMAV

SEQ ID NO: 72821 - protein, 32 aa, Artificial Sequence
  Cyclic GFR-binding peptide
  MOD_RES (3)..(4): Xaa is C or S
APXXVPQALSSLSILFFVGRKPKVLKVYPMIV

SEQ ID NO: 72822 - protein, 29 aa, Artificial Sequence
  Cyclic GFR-binding peptide
  MOD_RES (1)..(2): Xaa is C or S
XXAPTQLSSLSVLFFDDSSNVILKVYPNM

SEQ ID NO: 72823 - protein, 29 aa, Artificial Sequence
  Cyclic GFR-binding peptide
APVKTSSLSMLFFDNGRVLLLKVYPMIVE

SEQ ID NO: 72824 - protein, 32 aa, Artificial Sequence; identical to SEQ ID NO: 24687
  Cyclic GFR-binding peptide
  MOD_RES (1)..(1): Xaa is C or S

SEQ ID NO: 72825 - protein, 33 aa, Artificial Sequence
  Cyclic GFR-binding peptide
  MOD_RES (31)..(33): Xaa is C or S
HSSLSVLFFEYVRKKPKLLKVYPRLEEHLEXAX

SEQ ID NO: 72826 - protein, 34 aa, Artificial Sequence; identical to SEQ ID NO: 24688
  Cyclic GFR-binding peptide
  MOD_RES (32)..(34): Xaa is C or S

SEQ ID NO: 72827 - protein, 31 aa, Artificial Sequence
  Cyclic GFR-binding peptide
  MOD_RES (1)..(1): Xaa is C or S
XVPTEESSLSMLFFRIKPHQGQHLKVYPFLQ

SEQ ID NO: 72828 - protein, 34 aa, Artificial Sequence
  Cyclic GFR-binding peptide
  MOD_RES (6)..(7): Xaa is C or S
KIPKAXXVPTELSSLSMLFFDENEKVVLKVYPDM

SEQ ID NO: 72829 - protein, 30 aa, Artificial Sequence; identical to SEQ ID NO: 763
  Cyclic GFR-binding peptide

SEQ ID NO: 72830 - protein, 26 aa, Artificial Sequence
  Cyclic GFR-binding peptide
LSSLSILFFVGRKPKVLKVYPMIVRS

SEQ ID NO: 72831 - protein, 23 aa, Artificial Sequence
  Cyclic GFR-binding peptide
SSLSILFFDKGVVTYLKVYPGMA

SEQ ID NO: 72832 - protein, 37 aa, Artificial Sequence; identical to SEQ ID NO: 24693
  Cyclic GFR-binding peptide
  MOD_RES (4)..(5)..(36): Xaa is C or S

SEQ ID NO: 72833 - protein, 27 aa, Artificial Sequence
  Cyclic GFR-binding peptide
  MOD_RES (1)..(2): Xaa is C or S
XXVPQDLSSLSILFFVGRTPKVLKVYP

SEQ ID NO: 72834 - protein, 25 aa, Artificial Sequence
  Cyclic GFR-binding peptide
KLSSLSVLFFDSSNNVILKVYPNMV

SEQ ID NO: 72835 - protein, 30 aa, Artificial Sequence
  Cyclic GFR-binding peptide
  MOD_RES (30)..(30): Xaa is C or S
PVKTSSLSMLFFDNGRVLLLKVYPMIVEEX

SEQ ID NO: 72836 - protein, 29 aa, Artificial Sequence
  Cyclic GFR-binding peptide
  MOD_RES (28)..(28): Xaa is C or S
DLSSLSILFFVGRTPKVLKVYPMVVKSXK

SEQ ID NO: 72837 - protein, 32 aa, Artificial Sequence
  Cyclic GFR-binding peptide
  MOD_RES (29)..(31): Xaa is C or S
QDLSSLSILFFVGRTPKVLKVYPMVVKSXKXS

SEQ ID NO: 72838 - protein, 22 aa, Artificial Sequence
  Cyclic GFR-binding peptide
SSLSMLFFDEYDKVVLKVYPEM

SEQ ID NO: 72839 - protein, 24 aa, Artificial Sequence
  Cyclic GFR-binding peptide
EESSLSMLFFRIKPHQGQHLKVYP

SEQ ID NO: 72840 - protein, 27 aa, Artificial Sequence
  Cyclic GFR-binding peptide
  MOD_RES (27)..(27): Xaa is C or S
LSSLSILFFVGRTPKVLKVYPMVVKSX

SEQ ID NO: 72841 - protein, 35 aa, Artificial Sequence
  Cyclic GFR-binding peptide
  MOD_RES (6)..(7): Xaa is C or S
STPPTXXVPTRLSSLSILFFDSANNVVLKVYPDMV

SEQ ID NO: 72842 - protein, 34 aa, Artificial Sequence; identical to SEQ ID NO: 24696
  Cyclic GFR-binding peptide
  MOD_RES (2)..(3)..(34): Xaa is C or S

SEQ ID NO: 72843 - protein, 27 aa, Artificial Sequence
  Cyclic GFR-binding peptide
VPTELSSLSMLFFDENEKVVLKVYPDM

SEQ ID NO: 72844 - protein, 25 aa, Artificial Sequence
  Cyclic GFR-binding peptide
TKMSSLSMLFFNDKQQIILKVYPGM

SEQ ID NO: 72845 - protein, 36 aa, Artificial Sequence; identical to SEQ ID NO: 24697
  Cyclic GFR-binding peptide
  MOD_RES (4)..(5): Xaa is C or S

SEQ ID NO: 72846 - protein, 33 aa, Artificial Sequence
  Cyclic GFR-binding peptide
  MOD_RES (4)..(5): Xaa is C or S
PASXXVPARLSSLSILFFDAANNVVLKVYPDMV

SEQ ID NO: 72847 - protein, 32 aa, Artificial Sequence; identical to SEQ ID NO: 24699
  Cyclic GFR-binding peptide
  MOD_RES (31)..(31): Xaa is C or S

SEQ ID NO: 72848 - protein, 38 aa, Artificial Sequence; identical to SEQ ID NO: 24702
  Cyclic GFR-binding peptide
  MOD_RES (2)..(36)..(38): Xaa is C or S

SEQ ID NO: 72849 - protein, 29 aa, Artificial Sequence
  Cyclic GFR-binding peptide
  MOD_RES (1)..(1): Xaa is C or S
XTPTKMSSLSMLFFNDKQQIILKVYPGMV

SEQ ID NO: 72850 - protein, 38 aa, Artificial Sequence; identical to SEQ ID NO: 24701
  Cyclic GFR-binding peptide
  MOD_RES (3)..(4)..(36)..(38): Xaa is C or S

SEQ ID NO: 72851 - protein, 36 aa, Artificial Sequence
  Cyclic GFR-binding peptide
  MOD_RES (6)..(6): Xaa is C or S
DEGLEXVPTEESSLSMLFFRIKPHQGQHLKVYPFLQ

SEQ ID NO: 72852 - protein, 31 aa, Artificial Sequence
  Cyclic GFR-binding peptide
  MOD_RES (5)..(6): Xaa is C or S
IPKAXXVPTELSSLSMLFFDENEKVVLKVYP

SEQ ID NO: 72853 - protein, 40 aa, Artificial Sequence; identical to SEQ ID NO: 24706
  Cyclic GFR-binding peptide
  MOD_RES (4)..(5)..(37)..(39): Xaa is C or S

SEQ ID NO: 72854 - protein, 30 aa, Artificial Sequence
  Cyclic GFR-binding peptide
PTKMSSLSMLFFNDKQQIILKVYPGMVVDR

SEQ ID NO: 72855 - protein, 31 aa, Artificial Sequence
  Cyclic GFR-binding peptide
  MOD_RES (3)..(4): Xaa is C or S
APXXVPQALSSLSILFFVGRKPKVLKVYPMI

SEQ ID NO: 72856 - protein, 24 aa, Artificial Sequence
  Cyclic GFR-binding peptide
LSSLSMLFFDEYDKVVLKVYPEMV

SEQ ID NO: 72857 - protein, 34 aa, Artificial Sequence
  Cyclic GFR-binding peptide
  MOD_RES (4)..(5): Xaa is C or S
ASPXXVPQDLSSLSILFFVGRTPKVLKVYPMVVK

SEQ ID NO: 72858 - protein, 32 aa, Artificial Sequence
  Cyclic GFR-binding peptide
  MOD_RES (2)..(3): Xaa is C or S
PXXVPQDLSSLSILFFVGRTPKVLKVYPMVVK

SEQ ID NO: 72859 - protein, 38 aa, Artificial Sequence; identical to SEQ ID NO: 24711
  Cyclic GFR-binding peptide
  MOD_RES (4)..(5)..(36)..(38): Xaa is C or S

SEQ ID NO: 72860 - protein, 20 aa, Artificial Sequence
  Cyclic GFR-binding peptide
SSLSILFFVGRKPKVLKVYP

SEQ ID NO: 72861 - protein, 33 aa, Artificial Sequence
  Cyclic GFR-binding peptide
RVHHSSLSVLFFEYVRKKPKLLKVYPRLEEHLE

SEQ ID NO: 72862 - protein, 37 aa, Artificial Sequence; identical to SEQ ID NO: 24713
  Cyclic GFR-binding peptide
  MOD_RES (5)..(6): Xaa is C or S

SEQ ID NO: 72863 - protein, 34 aa, Artificial Sequence; identical to SEQ ID NO: 24714
  Cyclic GFR-binding peptide
  MOD_RES (31)..(33): Xaa is C or S

SEQ ID NO: 72864 - protein, 29 aa, Artificial Sequence
  Cyclic GFR-binding peptide
  MOD_RES (1)..(2): Xaa is C or S
XXVPARLSSLSILFFDAANNVVLKVYPDM

SEQ ID NO: 72865 - protein, 28 aa, Artificial Sequence
  Cyclic GFR-binding peptide
PTKMSSLSMLFFNDKQQIILKVYPGMVV

SEQ ID NO: 72866 - protein, 31 aa, Artificial Sequence
  Cyclic GFR-binding peptide
  MOD_RES (1)..(2): Xaa is C or S
XXVPTELSSLSMLFFDENEKVVLKVYPDMVV

SEQ ID NO: 72867 - protein, 20 aa, Artificial Sequence
  Cyclic GFR-binding peptide
SSLSILFFVGRTPKVLKVYP

SEQ ID NO: 72868 - protein, 38 aa, Artificial Sequence; identical to SEQ ID NO: 24715
  Cyclic GFR-binding peptide
  MOD_RES (1)..(35)..(37): Xaa is C or S

SEQ ID NO: 72869 - protein, 25 aa, Artificial Sequence
  Cyclic GFR-binding peptide
VHHSSLSVLFFEYVRKKPKLLKVYP

SEQ ID NO: 72870 - protein, 29 aa, Artificial Sequence
  Cyclic GFR-binding peptide
  MOD_RES (2)..(3): Xaa is C or S
PXXVSQDLSSLSILFFIGKTPKILKVYPM

SEQ ID NO: 72871 - protein, 36 aa, Artificial Sequence; identical to SEQ ID NO: 24718
  Cyclic GFR-binding peptide
  MOD_RES (4)..(36): Xaa is C or S

SEQ ID NO: 72872 - protein, 37 aa, Artificial Sequence; identical to SEQ ID NO: 24720
  Cyclic GFR-binding peptide
  MOD_RES (3)..(3): Xaa is C or S

SEQ ID NO: 72873 - protein, 28 aa, Artificial Sequence
  Cyclic GFR-binding peptide
  MOD_RES (2)..(3): Xaa is C or S
AXXVPTELSSLSMLFFDEYDKVVLKVYP

SEQ ID NO: 72874 - protein, 28 aa, Artificial Sequence
  Cyclic GFR-binding peptide
TQLSSLSVLFFDDSSNVILKVYPNMVVR

SEQ ID NO: 72875 - protein, 33 aa, Artificial Sequence
  Cyclic GFR-binding peptide
  MOD_RES (6)..(6): Xaa is C or S
DEGLEXVPTEESSLSMLFFRIKPHQGQHLKVYP

SEQ ID NO: 72876 - protein, 20 aa, Artificial Sequence
  Cyclic GFR-binding peptide
SSLSVLFFDDMGVPTLKVYP

SEQ ID NO: 72877 - protein, 31 aa, Artificial Sequence; identical to SEQ ID NO: 24722
  Cyclic GFR-binding peptide
  MOD_RES (1)..(1): Xaa is C or S

SEQ ID NO: 72878 - protein, 37 aa, Artificial Sequence; identical to SEQ ID NO: 24723
  Cyclic GFR-binding peptide
  MOD_RES (3)..(4)..(36): Xaa is C or S

SEQ ID NO: 72879 - protein, 29 aa, Artificial Sequence
  Cyclic GFR-binding peptide
  MOD_RES (3)..(4): Xaa is C or S
PTXXVPTRLSSLSILFFDSANNVVLKVYP

SEQ ID NO: 72880 - protein, 32 aa, Artificial Sequence
  Cyclic GFR-binding peptide
  MOD_RES (31)..(31): Xaa is C or S
TKLSSLSVLFFDDMGVPTLKVYPEGMSVAEXG

SEQ ID NO: 72881 - protein, 28 aa, Artificial Sequence
  Cyclic GFR-binding peptide
  MOD_RES (28)..(28): Xaa is C or S
MSSLSMLFFNDKQQIILKVYPGMVVDRX

SEQ ID NO: 72882 - protein, 22 aa, Artificial Sequence
  Cyclic GFR-binding peptide
SSLSMLFFRIKPHQGQHLKVYP

SEQ ID NO: 72883 - protein, 21 aa, Artificial Sequence
  Cyclic GFR-binding peptide
TSSLSMLFFDNGRVLLLKVYP

SEQ ID NO: 72884 - protein, 38 aa, Artificial Sequence; identical to SEQ ID NO: 24727
  Cyclic GFR-binding peptide
  MOD_RES (1)..(2)..(35)..(37): Xaa is C or S

SEQ ID NO: 72885 - protein, 20 aa, Artificial Sequence
  Cyclic GFR-binding peptide
SSLSILFFDENKNVVLKVYP

SEQ ID NO: 72886 - protein, 25 aa, Artificial Sequence
  Cyclic GFR-binding peptide
SSLSVLFFDSSNNVILKVYPNMVVK

SEQ ID NO: 72887 - protein, 33 aa, Artificial Sequence
  Cyclic GFR-binding peptide
  MOD_RES (30)..(32): Xaa is C or S
TKMSSLSMLFFNDKQQIILKVYPGMVVDRXGXS

SEQ ID NO: 72888 - protein, 33 aa, Artificial Sequence; identical to SEQ ID NO: 24729
  Cyclic GFR-binding peptide
  MOD_RES (2)..(3): Xaa is C or S

SEQ ID NO: 72889 - protein, 26 aa, Artificial Sequence
  Cyclic GFR-binding peptide
VPQALSSLSILFFVGRKPKVLKVYPM

SEQ ID NO: 72890 - protein, 42 aa, Artificial Sequence; identical to SEQ ID NO: 24733
  Cyclic GFR-binding peptide
  MOD_RES (6)..(7)..(39)..(41): Xaa is C or S

SEQ ID NO: 72891 - protein, 30 aa, Artificial Sequence
  Cyclic GFR-binding peptide
EESSLSMLFFRIKPHQGQHLKVYPFLQHNK

SEQ ID NO: 72892 - protein, 29 aa, Artificial Sequence
  Cyclic GFR-binding peptide
PQDLSSLSILFFVGRTPKVLKVYPMVVKS

SEQ ID NO: 72893 - protein, 33 aa, Artificial Sequence
  Cyclic GFR-binding peptide
  MOD_RES (31)..(33): Xaa is C or S
PTELSSLSMLFFDENEKVVLKVYPDMVVEGXGX

SEQ ID NO: 72894 - protein, 30 aa, Artificial Sequence
  Cyclic GFR-binding peptide
VPTKLSSLSVLFFDDMGVPTLKVYPEGMSV

SEQ ID NO: 72895 - protein, 37 aa, Artificial Sequence; identical to SEQ ID NO: 24736
  Cyclic GFR-binding peptide
  MOD_RES (2)..(3)..(35)..(37): Xaa is C or S

SEQ ID NO: 72896 - protein, 28 aa, Artificial Sequence
  Cyclic GFR-binding peptide
PTQLSSLSVLFFDDSSNVILKVYPNMVV

SEQ ID NO: 72897 - protein, 37 aa, Artificial Sequence; identical to SEQ ID NO: 24738
  Cyclic GFR-binding peptide
  MOD_RES (6)..(7): Xaa is C or S

SEQ ID NO: 72898 - protein, 31 aa, Artificial Sequence
  Cyclic GFR-binding peptide
  MOD_RES (2)..(3): Xaa is C or S
PXXVPQDLSSLSILFFVGRTPKVLKVYPMVV

SEQ ID NO: 72899 - protein, 31 aa, Artificial Sequence
  Cyclic GFR-binding peptide
  MOD_RES (2)..(3): Xaa is C or S
AXXVPTKLSSLSVLFFDDMGVPTLKVYPEGM

SEQ ID NO: 72900 - protein, 38 aa, Artificial Sequence; identical to SEQ ID NO: 24740
  Cyclic GFR-binding peptide
  MOD_RES (2)..(3)..(35)..(37): Xaa is C or S

SEQ ID NO: 72901 - protein, 31 aa, Artificial Sequence
  Cyclic GFR-binding peptide
  MOD_RES (5)..(6): Xaa is C or S
SAAPXXVPQALSSLSILFFVGRKPKVLKVYP

SEQ ID NO: 72902 - protein, 22 aa, Artificial Sequence
  Cyclic GFR-binding peptide
SSLSILFFIGKTPKILKVYPMI

SEQ ID NO: 72903 - protein, 28 aa, Artificial Sequence
  Cyclic GFR-binding peptide
  MOD_RES (28)..(28): Xaa is C or S
KTSSLSMLFFDNGRVLLLKVYPMIVEEX

SEQ ID NO: 72904 - protein, 29 aa, Artificial Sequence
  Cyclic GFR-binding peptide
  MOD_RES (3)..(4): Xaa is C or S
KAXXVPTELSSLSMLFFDENEKVVLKVYP

SEQ ID NO: 72905 - protein, 31 aa, Artificial Sequence
  Cyclic GFR-binding peptide
  MOD_RES (3)..(4): Xaa is C or S
STXXAPVKTSSLSMLFFDNGRVLLLKVYPMI

SEQ ID NO: 72906 - protein, 33 aa, Artificial Sequence
  Cyclic GFR-binding peptide
  MOD_RES (31)..(33): Xaa is C or S
PTKLSSLSVLFFDSSNNVILKVYPNMVVKAXGX

SEQ ID NO: 72907 - protein, 25 aa, Artificial Sequence
  Cyclic GFR-binding peptide
RLSSLSILFFDAANNVVLKVYPDMV

SEQ ID NO: 72908 - protein, 32 aa, Artificial Sequence
  Cyclic GFR-binding peptide
  MOD_RES (30)..(32): Xaa is C or S
TKLSSLSVLFFDSSNNVILKVYPNMVVKAXGX

SEQ ID NO: 72909 - protein, 24 aa, Artificial Sequence
  Cyclic GFR-binding peptide
PQDLSSLSILFFVGRTPKVLKVYP

SEQ ID NO: 72910 - protein, 29 aa, Artificial Sequence
  Cyclic GFR-binding peptide
  MOD_RES (26)..(28): Xaa is C or S
SSLSILFFIGKTPKILKVYPMIVKSXKXS

SEQ ID NO: 72911 - protein, 29 aa, Artificial Sequence
  Cyclic GFR-binding peptide
APTQLSSLSVLFFDDSSNVILKVYPNMVV

SEQ ID NO: 72912 - protein, 27 aa, Artificial Sequence
  Cyclic GFR-binding peptide
  MOD_RES (1)..(2): Xaa is C or S
XXVSQDLSSLSILFFIGKTPKILKVYP

SEQ ID NO: 72913 - protein, 32 aa, Artificial Sequence; identical to SEQ ID NO: 24747
  Cyclic GFR-binding peptide
  MOD_RES (1)..(32): Xaa is C or S

SEQ ID NO: 72914 - protein, 28 aa, Artificial Sequence
  Cyclic GFR-binding peptide
SRVHHSSLSVLFFEYVRKKPKLLKVYPR

SEQ ID NO: 72915 - protein, 27 aa, Artificial Sequence
  Cyclic GFR-binding peptide
  MOD_RES (27)..(27): Xaa is C or S
SSLSMLFFDENEKVVLKVYPDMVVEGX

SEQ ID NO: 72916 - protein, 28 aa, Artificial Sequence
  Cyclic GFR-binding peptide
VPTKLSSLSVLFFDDMGVPTLKVYPEGM

SEQ ID NO: 72917 - protein, 32 aa, Artificial Sequence
  Cyclic GFR-binding peptide
  MOD_RES (6)..(7): Xaa is C or S
SIPKAXXVPTELSSLSMLFFDEYDKVVLKVYP

SEQ ID NO: 72918 - protein, 24 aa, Artificial Sequence
  Cyclic GFR-binding peptide
LSSLSVLFFDDSSNVILKVYPNMV

SEQ ID NO: 72919 - protein, 23 aa, Artificial Sequence
  Cyclic GFR-binding peptide
ELSSLSMLFFDEYDKVVLKVYPE

SEQ ID NO: 72920 - protein, 32 aa, Artificial Sequence; identical to SEQ ID NO: 24752
  Cyclic GFR-binding peptide
  MOD_RES (1)..(2): Xaa is C or S

SEQ ID NO: 72921 - protein, 37 aa, Artificial Sequence; identical to SEQ ID NO: 24753
  Cyclic GFR-binding peptide
  MOD_RES (4)..(5)..(36): Xaa is C or S

SEQ ID NO: 72922 - protein, 35 aa, Artificial Sequence; identical to SEQ ID NO: 24755
  Cyclic GFR-binding peptide
  MOD_RES (32)..(34): Xaa is C or S

SEQ ID NO: 72923 - protein, 29 aa, Artificial Sequence
  Cyclic GFR-binding peptide
APTKLSSLSVLFFDDSSNVILKVYPNMVV

SEQ ID NO: 72924 - protein, 26 aa, Artificial Sequence
  Cyclic GFR-binding peptide
LSSLSILFFDSANNVVLKVYPDMVVE

SEQ ID NO: 72925 - protein, 25 aa, Artificial Sequence
  Cyclic GFR-binding peptide
ELSSLSMLFFDENEKVVLKVYPDMV

SEQ ID NO: 72926 - protein, 32 aa, Artificial Sequence; identical to SEQ ID NO: 24756
  Cyclic GFR-binding peptide
  MOD_RES (32)..(32): Xaa is C or S

SEQ ID NO: 72927 - protein, 31 aa, Artificial Sequence; identical to SEQ ID NO: 24758
  Cyclic GFR-binding peptide

SEQ ID NO: 72928 - protein, 33 aa, Artificial Sequence; identical to SEQ ID NO: 24759
  Cyclic GFR-binding peptide
  MOD_RES (2)..(3): Xaa is C or S

SEQ ID NO: 72929 - protein, 26 aa, Artificial Sequence
  Cyclic GFR-binding peptide
KLSSLSILFFDKGVVTYLKVYPGMAV

SEQ ID NO: 72930 - protein, 24 aa, Artificial Sequence
  Cyclic GFR-binding peptide
LSSLSILFFDKGVVTYLKVYPGMA

SEQ ID NO: 72931 - protein, 26 aa, Artificial Sequence
  Cyclic GFR-binding peptide
VPQDLSSLSILFFVGRTPKVLKVYPM

SEQ ID NO: 72932 - protein, 32 aa, Artificial Sequence
  Cyclic GFR-binding peptide
  MOD_RES (2)..(3): Xaa is C or S
AXXVPTELSSLSMLFFDEYDKVVLKVYPEMVV

SEQ ID NO: 72933 - protein, 31 aa, Artificial Sequence
  Cyclic GFR-binding peptide
  MOD_RES (2)..(3): Xaa is C or S
AXXVPTELSSLSMLFFDEYDKVVLKVYPEMV

SEQ ID NO: 72934 - protein, 27 aa, Artificial Sequence
  Cyclic GFR-binding peptide
HHSSLSVLFFEYVRKKPKLLKVYPRLE

SEQ ID NO: 72935 - protein, 30 aa, Artificial Sequence
  Cyclic GFR-binding peptide
  MOD_RES (2)..(3): Xaa is C or S
PXXVPQDLSSLSILFFVGRTPKVLKVYPMV

SEQ ID NO: 72936 - protein, 29 aa, Artificial Sequence
  Cyclic GFR-binding peptide
  MOD_RES (28)..(28): Xaa is C or S
LSSLSILFFDAANNVVLKVYPDMVVEAXG

SEQ ID NO: 72937 - protein, 27 aa, Artificial Sequence
  Cyclic GFR-binding peptide
DLSSLSILFFIGKTPKILKVYPMIVKS

SEQ ID NO: 72938 - protein, 36 aa, Artificial Sequence
  Cyclic GFR-binding peptide
  MOD_RES (4)..(5): Xaa is C or S
GKAXXVPTKLSSLSVLFFDDMGVPTLKVYPEGMSVA

SEQ ID NO: 72939 - protein, 26 aa, Artificial Sequence
  Cyclic GFR-binding peptide
VPTKLSSLSVLFFDDMGVPTLKVYPE

SEQ ID NO: 72940 - protein, 27 aa, Artificial Sequence
  Cyclic GFR-binding peptide
  MOD_RES (27)..(27): Xaa is C or S
SSLSILFFDSANNVVLKVYPDMVVESX

SEQ ID NO: 72941 - protein, 36 aa, Artificial Sequence; identical to SEQ ID NO: 24765
  Cyclic GFR-binding peptide
  MOD_RES (3)..(4)..(35): Xaa is C or S

SEQ ID NO: 72942 - protein, 24 aa, Artificial Sequence
  Cyclic GFR-binding peptide
KLSSLSVLFFDDMGVPTLKVYPEG

SEQ ID NO: 72943 - protein, 29 aa, Artificial Sequence
  Cyclic GFR-binding peptide
QPSRVHHSSLSVLFFEYVRKKPKLLKVYP

SEQ ID NO: 72944 - protein, 24 aa, Artificial Sequence
  Cyclic GFR-binding peptide
LSSLSILFFDSANNVVLKVYPDMV

SEQ ID NO: 72945 - protein, 24 aa, Artificial Sequence
  Cyclic GFR-binding peptide
TELSSLSMLFFDEYDKVVLKVYPE

SEQ ID NO: 72946 - protein, 29 aa, Artificial Sequence
  Cyclic GFR-binding peptide
HHSSLSVLFFEYVRKKPKLLKVYPRLEEH

SEQ ID NO: 72947 - protein, 28 aa, Artificial Sequence
  Cyclic GFR-binding peptide
PTRLSSLSILFFDSANNVVLKVYPDMVV

SEQ ID NO: 72948 - protein, 28 aa, Artificial Sequence
  Cyclic GFR-binding peptide
  MOD_RES (27)..(27): Xaa is C or S
SSLSILFFDSANNVVLKVYPDMVVESXG

SEQ ID NO: 72949 - protein, 32 aa, Artificial Sequence
  Cyclic GFR-binding peptide
  MOD_RES (2)..(3): Xaa is C or S
SXXVPARLSSLSILFFDAANNVVLKVYPDMVV

SEQ ID NO: 72950 - protein, 30 aa, Artificial Sequence
  Cyclic GFR-binding peptide
PTELSSLSMLFFDEYDKVVLKVYPEMVVEG

SEQ ID NO: 72951 - protein, 20 aa, Artificial Sequence
  Cyclic GFR-binding peptide
SSLSVLFFDDMGVPTLKVYP

SEQ ID NO: 72952 - protein, 33 aa, Artificial Sequence; identical to SEQ ID NO: 24768
  Cyclic GFR-binding peptide
  MOD_RES (1)..(32): Xaa is C or S

SEQ ID NO: 72953 - protein, 33 aa, Artificial Sequence
  Cyclic GFR-binding peptide
  MOD_RES (31)..(33): Xaa is C or S
PARLSSLSILFFDAANNVVLKVYPDMVVEAXGX

SEQ ID NO: 72954 - protein, 36 aa, Artificial Sequence; identical to SEQ ID NO: 24769
  Cyclic GFR-binding peptide
  MOD_RES (2)..(3)..(34)..(36): Xaa is C or S

SEQ ID NO: 72955 - protein, 28 aa, Artificial Sequence
  Cyclic GFR-binding peptide
ELSSLSMLFFDEYDKVVLKVYPEMVVEG

SEQ ID NO: 72956 - protein, 39 aa, Artificial Sequence; identical to SEQ ID NO: 24770
  Cyclic GFR-binding peptide
  MOD_RES (6)..(7)..(39): Xaa is C or S

SEQ ID NO: 72957 - protein, 33 aa, Artificial Sequence; identical to SEQ ID NO: 24771
  Cyclic GFR-binding peptide
  MOD_RES (1)..(33): Xaa is C or S

SEQ ID NO: 72958 - protein, 23 aa, Artificial Sequence
  Cyclic GFR-binding peptide
SSLSVLFFEYVRKKPKLLKVYPR

SEQ ID NO: 72959 - protein, 35 aa, Artificial Sequence; identical to SEQ ID NO: 24772
  Cyclic GFR-binding peptide
  MOD_RES (32)..(34): Xaa is C or S

SEQ ID NO: 72960 - protein, 28 aa, Artificial Sequence
  Cyclic GFR-binding peptide
  MOD_RES (1)..(1): Xaa is C or S
XVPTRLSSLSILFFDSANNVVLKVYPDM

SEQ ID NO: 72961 - protein, 31 aa, Artificial Sequence
  Cyclic GFR-binding peptide
  MOD_RES (2)..(3): Xaa is C or S
PXXVPQALSSLSILFFVGRKPKVLKVYPMIV

SEQ ID NO: 72962 - protein, 26 aa, Artificial Sequence
  Cyclic GFR-binding peptide
PARLSSLSILFFDAANNVVLKVYPDM

SEQ ID NO: 72963 - protein, 32 aa, Artificial Sequence
  Cyclic GFR-binding peptide
  MOD_RES (6)..(7): Xaa is C or S
YVPKPXXAPTKLSSLSVLFFDDSSNVILKVYP

SEQ ID NO: 72964 - protein, 32 aa, Artificial Sequence
  Cyclic GFR-binding peptide
  MOD_RES (30)..(32): Xaa is C or S
TKLSSLSILFFDKGVVTYLKVYPGMAVSEXGX

SEQ ID NO: 72965 - protein, 39 aa, Artificial Sequence; identical to SEQ ID NO: 24775
  Cyclic GFR-binding peptide
  MOD_RES (4)..(5)..(36)..(38): Xaa is C or S

SEQ ID NO: 72966 - protein, 31 aa, Artificial Sequence
  Cyclic GFR-binding peptide
  MOD_RES (30)..(30): Xaa is C or S
PVKTSSLSMLFFDNGRVLLLKVYPMIVEEXG

SEQ ID NO: 72967 - protein, 22 aa, Artificial Sequence
  Cyclic GFR-binding peptide
QLSSLSVLFFDDSSNVILKVYP

SEQ ID NO: 72968 - protein, 35 aa, Artificial Sequence; identical to SEQ ID NO: 24776
  Cyclic GFR-binding peptide
  MOD_RES (3)..(4): Xaa is C or S

SEQ ID NO: 72969 - protein, 32 aa, Artificial Sequence
  Cyclic GFR-binding peptide
  MOD_RES (31)..(31): Xaa is C or S
PTKLSSLSVLFFDDSSNVILKVYPNMVVRSXG

SEQ ID NO: 72970 - protein, 36 aa, Artificial Sequence; identical to SEQ ID NO: 24777
  Cyclic GFR-binding peptide
  MOD_RES (2)..(3)..(34)..(36): Xaa is C or S

SEQ ID NO: 72971 - protein, 26 aa, Artificial Sequence
  Cyclic GFR-binding peptide
SSLSMLFFRIKPHQGQHLKVYPFLQH

SEQ ID NO: 72972 - protein, 38 aa, Artificial Sequence; identical to SEQ ID NO: 24778
  Cyclic GFR-binding peptide
  MOD_RES (4)..(5)..(37): Xaa is C or S

SEQ ID NO: 72973 - protein, 33 aa, Artificial Sequence
  Cyclic GFR-binding peptide
  MOD_RES (30)..(32): Xaa is C or S
TKLSSLSVLFFDDSSNVILKVYPNMVVRSXGXH

SEQ ID NO: 72974 - protein, 21 aa, Artificial Sequence
  Cyclic GFR-binding peptide
SSLSILFFDSANNVVLKVYPD

SEQ ID NO: 72975 - protein, 27 aa, Artificial Sequence
  Cyclic GFR-binding peptide
VPARLSSLSILFFDAANNVVLKVYPDM

SEQ ID NO: 72976 - protein, 32 aa, Artificial Sequence
  Cyclic GFR-binding peptide
  MOD_RES (30)..(32): Xaa is C or S
TELSSLSMLFFDEYDKVVLKVYPEMVVEGXGX

SEQ ID NO: 72977 - protein, 37 aa, Artificial Sequence; identical to SEQ ID NO: 24782
  Cyclic GFR-binding peptide
  MOD_RES (5)..(6)..(37): Xaa is C or S

SEQ ID NO: 72978 - protein, 37 aa, Artificial Sequence; identical to SEQ ID NO: 24781
  Cyclic GFR-binding peptide
  MOD_RES (3)..(4)..(36): Xaa is C or S

SEQ ID NO: 72979 - protein, 34 aa, Artificial Sequence; identical to SEQ ID NO: 24783
  Cyclic GFR-binding peptide
  MOD_RES (2)..(3): Xaa is C or S

SEQ ID NO: 72980 - protein, 36 aa, Artificial Sequence; identical to SEQ ID NO: 24784
  Cyclic GFR-binding peptide
  MOD_RES (3)..(35): Xaa is C or S

SEQ ID NO: 72981 - protein, 32 aa, Artificial Sequence
  Cyclic GFR-binding peptide
  MOD_RES (30)..(32): Xaa is C or S
ARLSSLSILFFDAANNVVLKVYPDMVVEAXGX

SEQ ID NO: 72982 - protein, 30 aa, Artificial Sequence
  Cyclic GFR-binding peptide
  MOD_RES (27)..(29): Xaa is C or S
LSSLSILFFIGKTPKILKVYPMIVKSXKXS

SEQ ID NO: 72983 - protein, 39 aa, Artificial Sequence; identical to SEQ ID NO: 24786
  Cyclic GFR-binding peptide
  MOD_RES (4)..(5)..(37)..(39): Xaa is C or S

SEQ ID NO: 72984 - protein, 40 aa, Artificial Sequence; identical to SEQ ID NO: 24787
  Cyclic GFR-binding peptide
  MOD_RES (2)..(39): Xaa is C or S

SEQ ID NO: 72985 - protein, 31 aa, Artificial Sequence
  Cyclic GFR-binding peptide
  MOD_RES (1)..(2): Xaa is C or S
XXVPTRLSSLSILFFDSANNVVLKVYPDMVV

SEQ ID NO: 72986 - protein, 33 aa, Artificial Sequence
  Cyclic GFR-binding peptide
  MOD_RES (31)..(33): Xaa is C or S
PTELSSLSMLFFDEYDKVVLKVYPEMVVEGXGX

SEQ ID NO: 72987 - protein, 28 aa, Artificial Sequence
  Cyclic GFR-binding peptide
  MOD_RES (1)..(1): Xaa is C or S
XVPTELSSLSMLFFDENEKVVLKVYPDM

SEQ ID NO: 72988 - protein, 31 aa, Artificial Sequence
  Cyclic GFR-binding peptide
  MOD_RES (4)..(5): Xaa is C or S
PSTXXAPVKTSSLSMLFFDNGRVLLLKVYPM

SEQ ID NO: 72989 - protein, 31 aa, Artificial Sequence
  Cyclic GFR-binding peptide
  MOD_RES (29)..(31): Xaa is C or S
SSLSMLFFRIKPHQGQHLKVYPFLQHNKXEX

SEQ ID NO: 72990 - protein, 28 aa, Artificial Sequence
  Cyclic GFR-binding peptide
TPTKMSSLSMLFFNDKQQIILKVYPGMV

SEQ ID NO: 72991 - protein, 27 aa, Artificial Sequence
  Cyclic GFR-binding peptide
  MOD_RES (1)..(2): Xaa is C or S
XXVPQALSSLSILFFVGRKPKVLKVYP

SEQ ID NO: 72992 - protein, 31 aa, Artificial Sequence; identical to SEQ ID NO: 24792
  Cyclic GFR-binding peptide

SEQ ID NO: 72993 - protein, 45 aa, Artificial Sequence; identical to SEQ ID NO: 24793
  Cyclic GFR-binding peptide
  MOD_RES (5)..(42)..(44): Xaa is C or S

SEQ ID NO: 72994 - protein, 20 aa, Artificial Sequence
  Cyclic GFR-binding peptide
SSLSILFFDKGVVTYLKVYP

SEQ ID NO: 72995 - protein, 33 aa, Artificial Sequence
  Cyclic GFR-binding peptide
  MOD_RES (32)..(32): Xaa is C or S
PTKLSSLSVLFFDDMGVPTLKVYPEGMSVAEXG

SEQ ID NO: 72996 - protein, 26 aa, Artificial Sequence
  Cyclic GFR-binding peptide
  MOD_RES (1)..(1): Xaa is C or S
XVPTKLSSLSVLFFDDMGVPTLKVYP

SEQ ID NO: 72997 - protein, 30 aa, Artificial Sequence
  Cyclic GFR-binding peptide
  MOD_RES (1)..(1): Xaa is C or S
XVPQDLSSLSILFFVGRTPKVLKVYPMVVK

SEQ ID NO: 72998 - protein, 27 aa, Artificial Sequence
  Cyclic GFR-binding peptide
  MOD_RES (1)..(1): Xaa is C or S
XVPTKLSSLSILFFDKGVVTYLKVYPG

SEQ ID NO: 72999 - protein, 35 aa, Artificial Sequence
  Cyclic GFR-binding peptide
  MOD_RES (32)..(34): Xaa is C or S
HHSSLSVLFFEYVRKKPKLLKVYPRLEEHLEXAXA

SEQ ID NO: 73000 - protein, 32 aa, Artificial Sequence
  Cyclic GFR-binding peptide
  MOD_RES (5)..(6): Xaa is C or S
SAAPXXVPQALSSLSILFFVGRKPKVLKVYPM

SEQ ID NO: 73001 - protein, 31 aa, Artificial Sequence
  Cyclic GFR-binding peptide
  MOD_RES (2)..(3): Xaa is C or S
SXXVPARLSSLSILFFDAANNVVLKVYPDMV

SEQ ID NO: 73002 - protein, 32 aa, Artificial Sequence
  Cyclic GFR-binding peptide
  MOD_RES (31)..(31): Xaa is C or S
PTELSSLSMLFFDEYDKVVLKVYPEMVVEGXG

SEQ ID NO: 73003 - protein, 29 aa, Artificial Sequence
  Cyclic GFR-binding peptide
  MOD_RES (1)..(2): Xaa is C or S
XXVSQDLSSLSILFFIGKTPKILKVYPMI

SEQ ID NO: 73004 - protein, 32 aa, Artificial Sequence
  Cyclic GFR-binding peptide
  MOD_RES (30)..(32): Xaa is C or S
SSLSVLFFEYVRKKPKLLKVYPRLEEHLEXAX

SEQ ID NO: 73005 - protein, 32 aa, Artificial Sequence
  Cyclic GFR-binding peptide
  MOD_RES (29)..(31): Xaa is C or S
RLSSLSILFFDAANNVVLKVYPDMVVEAXGXR

SEQ ID NO: 73006 - protein, 28 aa, Artificial Sequence
  Cyclic GFR-binding peptide
  MOD_RES (1)..(1): Xaa is C or S
XVPTEESSLSMLFFRIKPHQGQHLKVYP

SEQ ID NO: 73007 - protein, 26 aa, Artificial Sequence
  Cyclic GFR-binding peptide
PTRLSSLSILFFDSANNVVLKVYPDM

SEQ ID NO: 73008 - protein, 29 aa, Artificial Sequence
  Cyclic GFR-binding peptide
  MOD_RES (3)..(4): Xaa is C or S
KPXXAPTQLSSLSVLFFDDSSNVILKVYP

SEQ ID NO: 73009 - protein, 29 aa, Artificial Sequence
  Cyclic GFR-binding peptide
  MOD_RES (1)..(2): Xaa is C or S
XXVPTELSSLSMLFFDENEKVVLKVYPDM

SEQ ID NO: 73010 - protein, 26 aa, Artificial Sequence
  Cyclic GFR-binding peptide
HSSLSVLFFEYVRKKPKLLKVYPRLE

SEQ ID NO: 73011 - protein, 39 aa, Artificial Sequence; identical to SEQ ID NO: 24799
  Cyclic GFR-binding peptide
  MOD_RES (6)..(7)..(38): Xaa is C or S

SEQ ID NO: 73012 - protein, 31 aa, Artificial Sequence
  Cyclic GFR-binding peptide
  MOD_RES (28)..(30): Xaa is C or S
KTSSLSMLFFDNGRVLLLKVYPMIVEEXGXL

SEQ ID NO: 73013 - protein, 34 aa, Artificial Sequence
  Cyclic GFR-binding peptide
  MOD_RES (4)..(4): Xaa is C or S
SVKXQPSRVHHSSLSVLFFEYVRKKPKLLKVYPR

SEQ ID NO: 73014 - protein, 24 aa, Artificial Sequence
  Cyclic GFR-binding peptide
LSSLSVLFFDDMGVPTLKVYPEGM

SEQ ID NO: 73015 - protein, 28 aa, Artificial Sequence
  Cyclic GFR-binding peptide
  MOD_RES (27)..(27): Xaa is C or S
SSLSVLFFDSSNNVILKVYPNMVVKAXG

SEQ ID NO: 73016 - protein, 30 aa, Artificial Sequence
  Cyclic GFR-binding peptide
  MOD_RES (1)..(2): Xaa is C or S
XXVPTELSSLSMLFFDEYDKVVLKVYPEMV

SEQ ID NO: 73017 - protein, 36 aa, Artificial Sequence; identical to SEQ ID NO: 24800
  Cyclic GFR-binding peptide
  MOD_RES (3)..(3): Xaa is C or S

SEQ ID NO: 73018 - protein, 26 aa, Artificial Sequence
  Cyclic GFR-binding peptide
PTKLSSLSVLFFDDSSNVILKVYPNM

SEQ ID NO: 73019 - protein, 32 aa, Artificial Sequence
  Cyclic GFR-binding peptide
  MOD_RES (1)..(1): Xaa is C or S
XVPTKLSSLSVLFFDDMGVPTLKVYPEGMSVA

SEQ ID NO: 73020 - protein, 34 aa, Artificial Sequence; identical to SEQ ID NO: 24801
  Cyclic GFR-binding peptide
  MOD_RES (34)..(34): Xaa is C or S

SEQ ID NO: 73021 - protein, 27 aa, Artificial Sequence
  Cyclic GFR-binding peptide
  MOD_RES (27)..(27): Xaa is C or S
TSSLSMLFFDNGRVLLLKVYPMIVEEX

SEQ ID NO: 73022 - protein, 39 aa, Artificial Sequence; identical to SEQ ID NO: 24802
  Cyclic GFR-binding peptide
  MOD_RES (5)..(6)..(38): Xaa is C or S

SEQ ID NO: 73023 - protein, 31 aa, Artificial Sequence
  Cyclic GFR-binding peptide
  MOD_RES (5)..(6): Xaa is C or S
VPSTXXAPVKTSSLSMLFFDNGRVLLLKVYP

SEQ ID NO: 73024 - protein, 42 aa, Artificial Sequence; identical to SEQ ID NO: 24804
  Cyclic GFR-binding peptide
  MOD_RES (6)..(7)..(39)..(41): Xaa is C or S

SEQ ID NO: 73025 - protein, 33 aa, Artificial Sequence; identical to SEQ ID NO: 24805
  Cyclic GFR-binding peptide
  MOD_RES (1)..(33): Xaa is C or S

SEQ ID NO: 73026 - protein, 26 aa, Artificial Sequence
  Cyclic GFR-binding peptide
TKLSSLSVLFFDDMGVPTLKVYPEGM

SEQ ID NO: 73027 - protein, 26 aa, Artificial Sequence
  Cyclic GFR-binding peptide
SSLSVLFFDDSSNVILKVYPNMVVRA

SEQ ID NO: 73028 - protein, 32 aa, Artificial Sequence; identical to SEQ ID NO: 24806
  Cyclic GFR-binding peptide
  MOD_RES (1)..(2): Xaa is C or S

SEQ ID NO: 73029 - protein, 35 aa, Artificial Sequence
  Cyclic GFR-binding peptide
  MOD_RES (5)..(6): Xaa is C or S
SAGPXXTPTKMSSLSMLFFNDKQQIILKVYPGMVV

SEQ ID NO: 73030 - protein, 31 aa, Artificial Sequence
  Cyclic GFR-binding peptide
  MOD_RES (5)..(6): Xaa is C or S
VPKPXXAPTKLSSLSVLFFDDSSNVILKVYP

SEQ ID NO: 73031 - protein, 37 aa, Artificial Sequence; identical to SEQ ID NO: 24807
  Cyclic GFR-binding peptide
  MOD_RES (6)..(7): Xaa is C or S

SEQ ID NO: 73032 - protein, 33 aa, Artificial Sequence
  Cyclic GFR-binding peptide
  MOD_RES (5)..(6): Xaa is C or S
APASXXVPARLSSLSILFFDAANNVVLKVYPDM

SEQ ID NO: 73033 - protein, 38 aa, Artificial Sequence; identical to SEQ ID NO: 24808
  Cyclic GFR-binding peptide
  MOD_RES (5)..(37): Xaa is C or S

SEQ ID NO: 73034 - protein, 31 aa, Artificial Sequence
  Cyclic GFR-binding peptide
  MOD_RES (28)..(30): Xaa is C or S
SSLSVLFFDDMGVPTLKVYPEGMSVAEXGXR

SEQ ID NO: 73035 - protein, 30 aa, Artificial Sequence
  Cyclic GFR-binding peptide
  MOD_RES (1)..(2): Xaa is C or S
XXVPARLSSLSILFFDAANNVVLKVYPDMV

SEQ ID NO: 73036 - protein, 40 aa, Artificial Sequence; identical to SEQ ID NO: 24809
  Cyclic GFR-binding peptide
  MOD_RES (4)..(5)..(37)..(39): Xaa is C or S

SEQ ID NO: 73037 - protein, 29 aa, Artificial Sequence
  Cyclic GFR-binding peptide
VPTKLSSLSILFFDKGVVTYLKVYPGMAV

SEQ ID NO: 73038 - protein, 36 aa, Artificial Sequence; identical to SEQ ID NO: 24810
  Cyclic GFR-binding peptide
  MOD_RES (1)..(2)..(34)..(36): Xaa is C or S

SEQ ID NO: 73039 - protein, 34 aa, Artificial Sequence
  Cyclic GFR-binding peptide
  MOD_RES (5)..(5): Xaa is C or S
EGLEXVPTEESSLSMLFFRIKPHQGQHLKVYPFL

SEQ ID NO: 73040 - protein, 31 aa, Artificial Sequence
  Cyclic GFR-binding peptide
VHHSSLSVLFFEYVRKKPKLLKVYPRLEEHL

SEQ ID NO: 73041 - protein, 26 aa, Artificial Sequence
  Cyclic GFR-binding peptide
SSLSVLFFDDSSNVILKVYPNMVVRS

SEQ ID NO: 73042 - protein, 26 aa, Artificial Sequence
  Cyclic GFR-binding peptide
APTKLSSLSVLFFDSSNNVILKVYPN

SEQ ID NO: 73043 - protein, 31 aa, Artificial Sequence
  Cyclic GFR-binding peptide
  MOD_RES (3)..(4): Xaa is C or S
SPXXVPQDLSSLSILFFVGRTPKVLKVYPMV

SEQ ID NO: 73044 - protein, 31 aa, Artificial Sequence
  Cyclic GFR-binding peptide
  MOD_RES (5)..(6): Xaa is C or S
SASPXXVPQDLSSLSILFFVGRTPKVLKVYP

SEQ ID NO: 73045 - protein, 39 aa, Artificial Sequence; identical to SEQ ID NO: 24816
  Cyclic GFR-binding peptide
  MOD_RES (5)..(6)..(38): Xaa is C or S

SEQ ID NO: 73046 - protein, 38 aa, Artificial Sequence; identical to SEQ ID NO: 24817
  Cyclic GFR-binding peptide
  MOD_RES (4)..(4): Xaa is C or S

SEQ ID NO: 73047 - protein, 31 aa, Artificial Sequence; identical to SEQ ID NO: 24820
  Cyclic GFR-binding peptide

SEQ ID NO: 73048 - protein, 30 aa, Artificial Sequence
  Cyclic GFR-binding peptide
  MOD_RES (4)..(5): Xaa is C or S
PSTXXAPVKTSSLSMLFFDNGRVLLLKVYP

SEQ ID NO: 73049 - protein, 32 aa, Artificial Sequence
  Cyclic GFR-binding peptide
  MOD_RES (32)..(32): Xaa is C or S
TEESSLSMLFFRIKPHQGQHLKVYPFLQHNKX

SEQ ID NO: 73050 - protein, 35 aa, Artificial Sequence; identical to SEQ ID NO: 24821
  Cyclic GFR-binding peptide
  MOD_RES (33)..(35): Xaa is C or S

SEQ ID NO: 73051 - protein, 35 aa, Artificial Sequence; identical to SEQ ID NO: 24823
  Cyclic GFR-binding peptide
  MOD_RES (1)..(33)..(35): Xaa is C or S

SEQ ID NO: 73052 - protein, 35 aa, Artificial Sequence
  Cyclic GFR-binding peptide
  MOD_RES (5)..(6): Xaa is C or S
TPPTXXVPTRLSSLSILFFDSANNVVLKVYPDMVV

SEQ ID NO: 73053 - protein, 29 aa, Artificial Sequence
  Cyclic GFR-binding peptide
  MOD_RES (28)..(28): Xaa is C or S
LSSLSILFFDKGVVTYLKVYPGMAVSEXG

SEQ ID NO: 73054 - protein, 41 aa, Artificial Sequence; identical to SEQ ID NO: 24824
  Cyclic GFR-binding peptide
  MOD_RES (6)..(7)..(38)..(40): Xaa is C or S

SEQ ID NO: 73055 - protein, 32 aa, Artificial Sequence
  Cyclic GFR-binding peptide
  MOD_RES (30)..(32): Xaa is C or S
TELSSLSMLFFDENEKVVLKVYPDMVVEGXGX

SEQ ID NO: 73056 - protein, 31 aa, Artificial Sequence; identical to SEQ ID NO: 24827
  Cyclic GFR-binding peptide
  MOD_RES (31)..(31): Xaa is C or S

SEQ ID NO: 73057 - protein, 30 aa, Artificial Sequence
  Cyclic GFR-binding peptide
  MOD_RES (1)..(1): Xaa is C or S
XAPTKLSSLSVLFFDDSSNVILKVYPNMVV

SEQ ID NO: 73058 - protein, 29 aa, Artificial Sequence
  Cyclic GFR-binding peptide
  MOD_RES (1)..(1): Xaa is C or S
XVPTKLSSLSVLFFDDMGVPTLKVYPEGM

SEQ ID NO: 73059 - protein, 24 aa, Artificial Sequence
  Cyclic GFR-binding peptide
SSLSILFFIGKTPKILKVYPMIVK

SEQ ID NO: 73060 - protein, 38 aa, Artificial Sequence; identical to SEQ ID NO: 24828
  Cyclic GFR-binding peptide
  MOD_RES (6)..(7): Xaa is C or S

SEQ ID NO: 73061 - protein, 32 aa, Artificial Sequence
  Cyclic GFR-binding peptide
  MOD_RES (4)..(5): Xaa is C or S
PPTXXVPTRLSSLSILFFDSANNVVLKVYPDM

SEQ ID NO: 73062 - protein, 31 aa, Artificial Sequence
  Cyclic GFR-binding peptide
  MOD_RES (29)..(31): Xaa is C or S
RLSSLSILFFDSANNVVLKVYPDMVVESXGX

SEQ ID NO: 73063 - protein, 30 aa, Artificial Sequence
  Cyclic GFR-binding peptide
  MOD_RES (4)..(5): Xaa is C or S
PKAXXVPTELSSLSMLFFDEYDKVVLKVYP

SEQ ID NO: 73064 - protein, 31 aa, Artificial Sequence
  Cyclic GFR-binding peptide
  MOD_RES (4)..(5): Xaa is C or S
PASXXVPARLSSLSILFFDAANNVVLKVYPD

SEQ ID NO: 73065 - protein, 31 aa, Artificial Sequence
  Cyclic GFR-binding peptide
  MOD_RES (30)..(30): Xaa is C or S
TKLSSLSILFFDKGVVTYLKVYPGMAVSEXG

SEQ ID NO: 73066 - protein, 29 aa, Artificial Sequence
  Cyclic GFR-binding peptide
  MOD_RES (1)..(1): Xaa is C or S
XVPTKLSSLSILFFDKGVVTYLKVYPGMA

SEQ ID NO: 73067 - protein, 33 aa, Artificial Sequence; identical to SEQ ID NO: 24831
  Cyclic GFR-binding peptide
  MOD_RES (1)..(33): Xaa is C or S

SEQ ID NO: 73068 - protein, 33 aa, Artificial Sequence
  Cyclic GFR-binding peptide
  MOD_RES (4)..(5): Xaa is C or S
PKAXXVPTELSSLSMLFFDENEKVVLKVYPDMV

SEQ ID NO: 73069 - protein, 31 aa, Artificial Sequence
  Cyclic GFR-binding peptide
  MOD_RES (29)..(31): Xaa is C or S
LSSLSVLFFDDMGVPTLKVYPEGMSVAEXGX

SEQ ID NO: 73070 - protein, 33 aa, Artificial Sequence; identical to SEQ ID NO: 24834
  Cyclic GFR-binding peptide
  MOD_RES (2)..(3): Xaa is C or S

SEQ ID NO: 73071 - protein, 37 aa, Artificial Sequence; identical to SEQ ID NO: 24835
  Cyclic GFR-binding peptide
  MOD_RES (3)..(4)..(37): Xaa is C or S

SEQ ID NO: 73072 - protein, 32 aa, Artificial Sequence; identical to SEQ ID NO: 24837
  Cyclic GFR-binding peptide
  MOD_RES (1)..(32): Xaa is C or S

SEQ ID NO: 73073 - protein, 28 aa, Artificial Sequence
  Cyclic GFR-binding peptide
  MOD_RES (1)..(2): Xaa is C or S
XXVPARLSSLSILFFDAANNVVLKVYPD

SEQ ID NO: 73074 - protein, 31 aa, Artificial Sequence
  Cyclic GFR-binding peptide
TEESSLSMLFFRIKPHQGQHLKVYPFLQHNK

SEQ ID NO: 73075 - protein, 33 aa, Artificial Sequence
  Cyclic GFR-binding peptide
  MOD_RES (3)..(4): Xaa is C or S
KPXXAPTKLSSLSVLFFDDSSNVILKVYPNMVV

SEQ ID NO: 73076 - protein, 34 aa, Artificial Sequence; identical to SEQ ID NO: 24839
  Cyclic GFR-binding peptide
  MOD_RES (1)..(2): Xaa is C or S

SEQ ID NO: 73077 - protein, 28 aa, Artificial Sequence
  Cyclic GFR-binding peptide
  MOD_RES (26)..(28): Xaa is C or S
SSLSILFFIGKTPKILKVYPMIVKSXKX

SEQ ID NO: 73078 - protein, 25 aa, Artificial Sequence
  Cyclic GFR-binding peptide
PTKLSSLSVLFFDSSNNVILKVYPN

SEQ ID NO: 73079 - protein, 29 aa, Artificial Sequence
  Cyclic GFR-binding peptide
PTELSSLSMLFFDEYDKVVLKVYPEMVVE

SEQ ID NO: 73080 - protein, 32 aa, Artificial Sequence
  Cyclic GFR-binding peptide
  MOD_RES (3)..(4): Xaa is C or S
SPXXVSQDLSSLSILFFIGKTPKILKVYPMIV

SEQ ID NO: 73081 - protein, 32 aa, Artificial Sequence; identical to SEQ ID NO: 24843
  Cyclic GFR-binding peptide

SEQ ID NO: 73082 - protein, 31 aa, Artificial Sequence
  Cyclic GFR-binding peptide
  MOD_RES (5)..(6): Xaa is C or S
SAGPXXTPTKMSSLSMLFFNDKQQIILKVYP

SEQ ID NO: 73083 - protein, 26 aa, Artificial Sequence
  Cyclic GFR-binding peptide
PTEESSLSMLFFRIKPHQGQHLKVYP

SEQ ID NO: 73084 - protein, 33 aa, Artificial Sequence
  Cyclic GFR-binding peptide
  MOD_RES (4)..(5): Xaa is C or S
ASPXXVPQDLSSLSILFFVGRTPKVLKVYPMVV

SEQ ID NO: 73085 - protein, 20 aa, Artificial Sequence
  Cyclic GFR-binding peptide
SSLSVLFFDDSSNVILKVYP

SEQ ID NO: 73086 - protein, 34 aa, Artificial Sequence; identical to SEQ ID NO: 24845
  Cyclic GFR-binding peptide
  MOD_RES (2)..(3): Xaa is C or S

SEQ ID NO: 73087 - protein, 37 aa, Artificial Sequence; identical to SEQ ID NO: 24846
  Cyclic GFR-binding peptide
  MOD_RES (6)..(6): Xaa is C or S

SEQ ID NO: 73088 - protein, 25 aa, Artificial Sequence
  Cyclic GFR-binding peptide
SSLSILFFDAANNVVLKVYPDMVVE

SEQ ID NO: 73089 - protein, 35 aa, Artificial Sequence; identical to SEQ ID NO: 24847
  Cyclic GFR-binding peptide
  MOD_RES (3)..(4)..(35): Xaa is C or S

SEQ ID NO: 73090 - protein, 30 aa, Artificial Sequence
  Cyclic GFR-binding peptide
  MOD_RES (4)..(5): Xaa is C or S
PPTXXVPTRLSSLSILFFDSANNVVLKVYP

SEQ ID NO: 73091 - protein, 29 aa, Artificial Sequence
  Cyclic GFR-binding peptide
PTQLSSLSVLFFDDSSNVILKVYPNMVVR

SEQ ID NO: 73092 - protein, 23 aa, Artificial Sequence
  Cyclic GFR-binding peptide
LSSLSVLFFDDMGVPTLKVYPEG

SEQ ID NO: 73093 - protein, 25 aa, Artificial Sequence
  Cyclic GFR-binding peptide
HSSLSVLFFEYVRKKPKLLKVYPRL

SEQ ID NO: 73094 - protein, 23 aa, Artificial Sequence
  Cyclic GFR-binding peptide
ESSLSMLFFRIKPHQGQHLKVYP

SEQ ID NO: 73095 - protein, 30 aa, Artificial Sequence
  Cyclic GFR-binding peptide
  MOD_RES (4)..(5): Xaa is C or S
AAPXXVPQALSSLSILFFVGRKPKVLKVYP

SEQ ID NO: 73096 - protein, 27 aa, Artificial Sequence
  Cyclic GFR-binding peptide
SSLSVLFFDDMGVPTLKVYPEGMSVAE

SEQ ID NO: 73097 - protein, 26 aa, Artificial Sequence
  Cyclic GFR-binding peptide
  MOD_RES (1)..(1): Xaa is C or S
XAPTQLSSLSVLFFDDSSNVILKVYP

SEQ ID NO: 73098 - protein, 27 aa, Artificial Sequence
  Cyclic GFR-binding peptide
  MOD_RES (1)..(2): Xaa is C or S
XXVPTELSSLSMLFFDEYDKVVLKVYP

SEQ ID NO: 73099 - protein, 29 aa, Artificial Sequence
  Cyclic GFR-binding peptide
  MOD_RES (3)..(4): Xaa is C or S
STXXAPVKTSSLSMLFFDNGRVLLLKVYP

SEQ ID NO: 73100 - protein, 41 aa, Artificial Sequence; identical to SEQ ID NO: 24853
  Cyclic GFR-binding peptide
  MOD_RES (6)..(38)..(40): Xaa is C or S

SEQ ID NO: 73101 - protein, 24 aa, Artificial Sequence
  Cyclic GFR-binding peptide
LSSLSMLFFDENEKVVLKVYPDMV

SEQ ID NO: 73102 - protein, 30 aa, Artificial Sequence
  Cyclic GFR-binding peptide
  MOD_RES (1)..(1): Xaa is C or S
XVPTRLSSLSILFFDSANNVVLKVYPDMVV

SEQ ID NO: 73103 - protein, 32 aa, Artificial Sequence; identical to SEQ ID NO: 24854
  Cyclic GFR-binding peptide
  MOD_RES (1)..(2): Xaa is C or S

SEQ ID NO: 73104 - protein, 27 aa, Artificial Sequence
  Cyclic GFR-binding peptide
KLSSLSVLFFDSSNNVILKVYPNMVVK

SEQ ID NO: 73105 - protein, 29 aa, Artificial Sequence
  Cyclic GFR-binding peptide
PTKMSSLSMLFFNDKQQIILKVYPGMVVD

SEQ ID NO: 73106 - protein, 26 aa, Artificial Sequence
  Cyclic GFR-binding peptide
SSLSMLFFDENEKVVLKVYPDMVVEG

SEQ ID NO: 73107 - protein, 31 aa, Artificial Sequence
  Cyclic GFR-binding peptide
QPSRVHHSSLSVLFFEYVRKKPKLLKVYPRL

SEQ ID NO: 73108 - protein, 26 aa, Artificial Sequence
  Cyclic GFR-binding peptide
PTELSSLSMLFFDEYDKVVLKVYPEM

SEQ ID NO: 73109 - protein, 30 aa, Artificial Sequence
  Cyclic GFR-binding peptide
  MOD_RES (3)..(4): Xaa is C or S
KAXXAPTKLSSLSVLFFDSSNNVILKVYPN

SEQ ID NO: 73110 - protein, 39 aa, Artificial Sequence; identical to SEQ ID NO: 24863
  Cyclic GFR-binding peptide
  MOD_RES (2)..(39): Xaa is C or S

SEQ ID NO: 73111 - protein, 22 aa, Artificial Sequence
  Cyclic GFR-binding peptide
LSSLSVLFFDDMGVPTLKVYPE

SEQ ID NO: 73112 - protein, 39 aa, Artificial Sequence; identical to SEQ ID NO: 24864
  Cyclic GFR-binding peptide
  MOD_RES (6)..(7)..(39): Xaa is C or S

SEQ ID NO: 73113 - protein, 34 aa, Artificial Sequence; identical to SEQ ID NO: 24865
  Cyclic GFR-binding peptide
  MOD_RES (1)..(2)..(33): Xaa is C or S

SEQ ID NO: 73114 - protein, 29 aa, Artificial Sequence
  Cyclic GFR-binding peptide
PSRVHHSSLSVLFFEYVRKKPKLLKVYPR

SEQ ID NO: 73115 - protein, 36 aa, Artificial Sequence
  Cyclic GFR-binding peptide
  MOD_RES (3)..(3): Xaa is C or S
VKXQPSRVHHSSLSVLFFEYVRKKPKLLKVYPRLEE

SEQ ID NO: 73116 - protein, 32 aa, Artificial Sequence
  Cyclic GFR-binding peptide
  MOD_RES (29)..(31): Xaa is C or S
RLSSLSILFFDSANNVVLKVYPDMVVESXGXR

SEQ ID NO: 73117 - protein, 28 aa, Artificial Sequence
  Cyclic GFR-binding peptide
PQDLSSLSILFFVGRTPKVLKVYPMVVK

SEQ ID NO: 73118 - protein, 30 aa, Artificial Sequence
  Cyclic GFR-binding peptide
  MOD_RES (30)..(30): Xaa is C or S
KLSSLSVLFFDDMGVPTLKVYPEGMSVAEX

SEQ ID NO: 73119 - protein, 32 aa, Artificial Sequence
  Cyclic GFR-binding peptide
  MOD_RES (6)..(7): Xaa is C or S
ASASPXXVPQDLSSLSILFFVGRTPKVLKVYP

SEQ ID NO: 73120 - protein, 36 aa, Artificial Sequence
  Cyclic GFR-binding peptide
  MOD_RES (33)..(35): Xaa is C or S
PTEESSLSMLFFRIKPHQGQHLKVYPFLQHNKXEXR

SEQ ID NO: 73121 - protein, 32 aa, Artificial Sequence
  Cyclic GFR-binding peptide
  MOD_RES (4)..(5): Xaa is C or S
PKPXXAPTKLSSLSVLFFDDSSNVILKVYPNM

SEQ ID NO: 73122 - protein, 32 aa, Artificial Sequence
  Cyclic GFR-binding peptide
  MOD_RES (32)..(32): Xaa is C or S
VPTELSSLSMLFFDENEKVVLKVYPDMVVEGX

SEQ ID NO: 73123 - protein, 33 aa, Artificial Sequence
  Cyclic GFR-binding peptide
  MOD_RES (6)..(7): Xaa is C or S
AVPKAXXAPTKLSSLSVLFFDSSNNVILKVYPN

SEQ ID NO: 73124 - protein, 32 aa, Artificial Sequence
  Cyclic GFR-binding peptide
  MOD_RES (3)..(3): Xaa is C or S
LEXVPTEESSLSMLFFRIKPHQGQHLKVYPFL

SEQ ID NO: 73125 - protein, 27 aa, Artificial Sequence
  Cyclic GFR-binding peptide
QALSSLSILFFVGRKPKVLKVYPMIVR

SEQ ID NO: 73126 - protein, 31 aa, Artificial Sequence; identical to SEQ ID NO: 24869
  Cyclic GFR-binding peptide
  MOD_RES (1)..(1): Xaa is C or S

SEQ ID NO: 73127 - protein, 35 aa, Artificial Sequence; identical to SEQ ID NO: 24872
  Cyclic GFR-binding peptide
  MOD_RES (1)..(2)..(33)..(35): Xaa is C or S

SEQ ID NO: 73128 - protein, 29 aa, Artificial Sequence
  Cyclic GFR-binding peptide
  MOD_RES (1)..(2): Xaa is C or S
XXVPTRLSSLSILFFDSANNVVLKVYPDM

SEQ ID NO: 73129 - protein, 24 aa, Artificial Sequence
  Cyclic GFR-binding peptide
QDLSSLSILFFVGRTPKVLKVYPM

SEQ ID NO: 73130 - protein, 36 aa, Artificial Sequence; identical to SEQ ID NO: 24874
  Cyclic GFR-binding peptide
  MOD_RES (1)..(33)..(35): Xaa is C or S

SEQ ID NO: 73131 - protein, 33 aa, Artificial Sequence; identical to SEQ ID NO: 24875
  Cyclic GFR-binding peptide
  MOD_RES (1)..(2): Xaa is C or S

SEQ ID NO: 73132 - protein, 34 aa, Artificial Sequence
  Cyclic GFR-binding peptide
  MOD_RES (6)..(7): Xaa is C or S
HVPKPXXAPTKLSSLSVLFFDDSSNVILKVYPNM

SEQ ID NO: 73133 - protein, 31 aa, Artificial Sequence
  Cyclic GFR-binding peptide
  MOD_RES (3)..(4): Xaa is C or S
ASXXVPARLSSLSILFFDAANNVVLKVYPDM

SEQ ID NO: 73134 - protein, 30 aa, Artificial Sequence
  Cyclic GFR-binding peptide
  MOD_RES (1)..(1): Xaa is C or S
XQPSRVHHSSLSVLFFEYVRKKPKLLKVYP

SEQ ID NO: 73135 - protein, 21 aa, Artificial Sequence
  Cyclic GFR-binding peptide
LSSLSMLFFDENEKVVLKVYP

SEQ ID NO: 73136 - protein, 23 aa, Artificial Sequence
  Cyclic GFR-binding peptide
LSSLSMLFFDEYDKVVLKVYPEM

SEQ ID NO: 73137 - protein, 28 aa, Artificial Sequence
  Cyclic GFR-binding peptide
  MOD_RES (1)..(2): Xaa is C or S
XXVPTKLSSLSILFFDKGVVTYLKVYPG

SEQ ID NO: 73138 - protein, 20 aa, Artificial Sequence
  Cyclic GFR-binding peptide
SSLSILFFDSANNVVLKVYP

SEQ ID NO: 73139 - protein, 21 aa, Artificial Sequence
  Cyclic GFR-binding peptide
SSLSILFFDAANNVVLKVYPD

SEQ ID NO: 73140 - protein, 23 aa, Artificial Sequence
  Cyclic GFR-binding peptide
LSSLSILFFVGRKPKVLKVYPMI

SEQ ID NO: 73141 - protein, 38 aa, Artificial Sequence; identical to SEQ ID NO: 24881
  Cyclic GFR-binding peptide
  MOD_RES (3)..(4)..(35)..(37): Xaa is C or S

SEQ ID NO: 73142 - protein, 23 aa, Artificial Sequence
  Cyclic GFR-binding peptide
SSLSILFFDSANNVVLKVYPDMV

SEQ ID NO: 73143 - protein, 35 aa, Artificial Sequence; identical to SEQ ID NO: 24882
  Cyclic GFR-binding peptide
  MOD_RES (1)..(33)..(35): Xaa is C or S

SEQ ID NO: 73144 - protein, 34 aa, Artificial Sequence
  Cyclic GFR-binding peptide
  MOD_RES (6)..(7): Xaa is C or S
GSAGPXXTPTKMSSLSMLFFNDKQQIILKVYPGM

SEQ ID NO: 73145 - protein, 24 aa, Artificial Sequence
  Cyclic GFR-binding peptide
PTKLSSLSVLFFDSSNNVILKVYP

SEQ ID NO: 73146 - protein, 38 aa, Artificial Sequence; identical to SEQ ID NO: 24887
  Cyclic GFR-binding peptide
  MOD_RES (4)..(5)..(37): Xaa is C or S

SEQ ID NO: 73147 - protein, 24 aa, Artificial Sequence
  Cyclic GFR-binding peptide
PTKLSSLSVLFFDDMGVPTLKVYP

SEQ ID NO: 73148 - protein, 29 aa, Artificial Sequence
  Cyclic GFR-binding peptide
  MOD_RES (27)..(29): Xaa is C or S
SSLSVLFFDSSNNVILKVYPNMVVKAXGX

SEQ ID NO: 73149 - protein, 33 aa, Artificial Sequence
  Cyclic GFR-binding peptide
  MOD_RES (3)..(4): Xaa is C or S
STXXAPVKTSSLSMLFFDNGRVLLLKVYPMIVE

SEQ ID NO: 73150 - protein, 26 aa, Artificial Sequence
  Cyclic GFR-binding peptide
VHHSSLSVLFFEYVRKKPKLLKVYPR

SEQ ID NO: 73151 - protein, 33 aa, Artificial Sequence
  Cyclic GFR-binding peptide
  MOD_RES (5)..(6): Xaa is C or S
ASKAXXVPTKLSSLSILFFDKGVVTYLKVYPGM

SEQ ID NO: 73152 - protein, 33 aa, Artificial Sequence
  Cyclic GFR-binding peptide
  MOD_RES (31)..(33): Xaa is C or S
PTQLSSLSVLFFDDSSNVILKVYPNMVVRAXGX

SEQ ID NO: 73153 - protein, 38 aa, Artificial Sequence; identical to SEQ ID NO: 24893
  Cyclic GFR-binding peptide
  MOD_RES (2)..(3)..(35)..(37): Xaa is C or S

SEQ ID NO: 73154 - protein, 33 aa, Artificial Sequence
  Cyclic GFR-binding peptide
  MOD_RES (5)..(5): Xaa is C or S
EGLEXVPTEESSLSMLFFRIKPHQGQHLKVYPF

SEQ ID NO: 73155 - protein, 29 aa, Artificial Sequence
  Cyclic GFR-binding peptide
VPTRLSSLSILFFDSANNVVLKVYPDMVV

SEQ ID NO: 73156 - protein, 33 aa, Artificial Sequence
  Cyclic GFR-binding peptide
  MOD_RES (4)..(4): Xaa is C or S
SVKXQPSRVHHSSLSVLFFEYVRKKPKLLKVYP

SEQ ID NO: 73157 - protein, 36 aa, Artificial Sequence; identical to SEQ ID NO: 24894
  Cyclic GFR-binding peptide
  MOD_RES (5)..(6): Xaa is C or S

SEQ ID NO: 73158 - protein, 26 aa, Artificial Sequence
  Cyclic GFR-binding peptide
  MOD_RES (1)..(1): Xaa is C or S
XVPTKLSSLSILFFDKGVVTYLKVYP

SEQ ID NO: 73159 - protein, 31 aa, Artificial Sequence
  Cyclic GFR-binding peptide
  MOD_RES (4)..(5): Xaa is C or S
ASPXXVSQDLSSLSILFFIGKTPKILKVYPM

SEQ ID NO: 73160 - protein, 28 aa, Artificial Sequence
  Cyclic GFR-binding peptide
  MOD_RES (27)..(27): Xaa is C or S
LSSLSILFFVGRKPKVLKVYPMIVRSXK

SEQ ID NO: 73161 - protein, 25 aa, Artificial Sequence
  Cyclic GFR-binding peptide
SSLSVLFFDDMGVPTLKVYPEGMSV

SEQ ID NO: 73162 - protein, 34 aa, Artificial Sequence; identical to SEQ ID NO: 24901
  Cyclic GFR-binding peptide
  MOD_RES (1)..(33): Xaa is C or S

SEQ ID NO: 73163 - protein, 24 aa, Artificial Sequence
  Cyclic GFR-binding peptide
PTKLSSLSVLFFDDSSNVILKVYP

SEQ ID NO: 73164 - protein, 31 aa, Artificial Sequence
  Cyclic GFR-binding peptide
  MOD_RES (28)..(30): Xaa is C or S
ALSSLSILFFVGRKPKVLKVYPMIVRSXKXS

SEQ ID NO: 73165 - protein, 38 aa, Artificial Sequence
  Cyclic GFR-binding peptide
  MOD_RES (3)..(4)..(36)..(38): Xaa is C or S
KAXXVPTELSSLSMLFFDENEKVVLKVYPDMVVEGXGX

SEQ ID NO: 73166 - protein, 29 aa, Artificial Sequence
  Cyclic GFR-binding peptide
  MOD_RES (2)..(3): Xaa is C or S
AXXVPTELSSLSMLFFDENEKVVLKVYPD

SEQ ID NO: 73167 - protein, 38 aa, Artificial Sequence; identical to SEQ ID NO: 24903
  Cyclic GFR-binding peptide
  MOD_RES (1)..(38): Xaa is C or S

SEQ ID NO: 73168 - protein, 22 aa, Artificial Sequence
  Cyclic GFR-binding peptide
SSLSMLFFNDKQQIILKVYPGM

SEQ ID NO: 73169 - protein, 35 aa, Artificial Sequence
  Cyclic GFR-binding peptide
  MOD_RES (5)..(6): Xaa is C or S
SASPXXVPQDLSSLSILFFVGRTPKVLKVYPMVVK

SEQ ID NO: 73170 - protein, 26 aa, Artificial Sequence
  Cyclic GFR-binding peptide
SSLSMLFFDEYDKVVLKVYPEMVVEG

SEQ ID NO: 73171 - protein, 31 aa, Artificial Sequence
  Cyclic GFR-binding peptide
  MOD_RES (30)..(30): Xaa is C or S
ARLSSLSILFFDAANNVVLKVYPDMVVEAXG

SEQ ID NO: 73172 - protein, 43 aa, Artificial Sequence; identical to SEQ ID NO: 24904
  Cyclic GFR-binding peptide
  MOD_RES (7)..(41)..(43): Xaa is C or S

SEQ ID NO: 73173 - protein, 29 aa, Artificial Sequence
  Cyclic GFR-binding peptide
RVHHSSLSVLFFEYVRKKPKLLKVYPRLE

SEQ ID NO: 73174 - protein, 32 aa, Artificial Sequence
  Cyclic GFR-binding peptide
  MOD_RES (4)..(5): Xaa is C or S
PASXXVPARLSSLSILFFDAANNVVLKVYPDM

SEQ ID NO: 73175 - protein, 25 aa, Artificial Sequence
  Cyclic GFR-binding peptide
PTELSSLSMLFFDENEKVVLKVYPD

SEQ ID NO: 73176 - protein, 28 aa, Artificial Sequence
  Cyclic GFR-binding peptide
  MOD_RES (1)..(2): Xaa is C or S
XXAPTKLSSLSVLFFDSSNNVILKVYPN

SEQ ID NO: 73177 - protein, 40 aa, Artificial Sequence; identical to SEQ ID NO: 24905
  Cyclic GFR-binding peptide
  MOD_RES (5)..(6)..(39): Xaa is C or S

SEQ ID NO: 73178 - protein, 30 aa, Artificial Sequence
  Cyclic GFR-binding peptide
  MOD_RES (30)..(30): Xaa is C or S
TKMSSLSMLFFNDKQQIILKVYPGMVVDRX

SEQ ID NO: 73179 - protein, 23 aa, Artificial Sequence
  Cyclic GFR-binding peptide
SSLSVLFFDSSNNVILKVYPNMV

SEQ ID NO: 73180 - protein, 30 aa, Artificial Sequence
  Cyclic GFR-binding peptide
  MOD_RES (2)..(3): Xaa is C or S
PXXVSQDLSSLSILFFIGKTPKILKVYPMI

SEQ ID NO: 73181 - protein, 41 aa, Artificial Sequence
  Cyclic GFR-binding peptide
  MOD_RES (5)..(6)..(38)..(40): Xaa is C or S
VPKPXXAPTKLSSLSVLFFDDSSNVILKVYPNMVVRSXGXH

SEQ ID NO: 73182 - protein, 36 aa, Artificial Sequence
  Cyclic GFR-binding peptide
  MOD_RES (5)..(5): Xaa is C or S
SSVKXQPSRVHHSSLSVLFFEYVRKKPKLLKVYPRL

SEQ ID NO: 73183 - protein, 40 aa, Artificial Sequence; identical to SEQ ID NO: 24910
  Cyclic GFR-binding peptide
  MOD_RES (5)..(5): Xaa is C or S

SEQ ID NO: 73184 - protein, 37 aa, Artificial Sequence; identical to SEQ ID NO: 24912
  Cyclic GFR-binding peptide
  MOD_RES (1)..(1): Xaa is C or S

SEQ ID NO: 73185 - protein, 37 aa, Artificial Sequence; identical to SEQ ID NO: 24913
  Cyclic GFR-binding peptide
  MOD_RES (3)..(4)..(35)..(37): Xaa is C or S

SEQ ID NO: 73186 - protein, 34 aa, Artificial Sequence
  Cyclic GFR-binding peptide
  MOD_RES (1)..(33): Xaa is C or S
XVPTELSSLSMLFFDENEKVVLKVYPDMVVEGXG

SEQ ID NO: 73187 - protein, 39 aa, Artificial Sequence; identical to SEQ ID NO: 24914
  Cyclic GFR-binding peptide
  MOD_RES (4)..(36)..(38): Xaa is C or S

SEQ ID NO: 73188 - protein, 39 aa, Artificial Sequence
  Cyclic GFR-binding peptide
  MOD_RES (4)..(5)..(37)..(39): Xaa is C or S
PKAXXVPTELSSLSMLFFDENEKVVLKVYPDMVVEGXGX

SEQ ID NO: 73189 - protein, 34 aa, Artificial Sequence
  Cyclic GFR-binding peptide
  MOD_RES (31)..(33): Xaa is C or S
PTELSSLSMLFFDEYDKVVLKVYPEMVVEGXGXR

SEQ ID NO: 73190 - protein, 25 aa, Artificial Sequence
  Cyclic GFR-binding peptide
LSSLSILFFVGRKPKVLKVYPMIVR

SEQ ID NO: 73191 - protein, 35 aa, Artificial Sequence; identical to SEQ ID NO: 24916
  Cyclic GFR-binding peptide
  MOD_RES (32)..(34): Xaa is C or S

SEQ ID NO: 73192 - protein, 32 aa, Artificial Sequence; identical to SEQ ID NO: 24917
  Cyclic GFR-binding peptide
  MOD_RES (1)..(2): Xaa is C or S

SEQ ID NO: 73193 - protein, 39 aa, Artificial Sequence; identical to SEQ ID NO: 24918
  Cyclic GFR-binding peptide
  MOD_RES (3)..(4)..(37)..(39): Xaa is C or S

SEQ ID NO: 73194 - protein, 34 aa, Artificial Sequence
  Cyclic GFR-binding peptide
  MOD_RES (4)..(5): Xaa is C or S
AGPXXTPTKMSSLSMLFFNDKQQIILKVYPGMVV

SEQ ID NO: 73195 - protein, 29 aa, Artificial Sequence
  Cyclic GFR-binding peptide
  MOD_RES (28)..(28): Xaa is C or S
KTSSLSMLFFDNGRVLLLKVYPMIVEEXG

SEQ ID NO: 73196 - protein, 23 aa, Artificial Sequence
  Cyclic GFR-binding peptide
LSSLSILFFDSANNVVLKVYPDM

SEQ ID NO: 73197 - protein, 25 aa, Artificial Sequence
  Cyclic GFR-binding peptide
ELSSLSMLFFDEYDKVVLKVYPEMV

SEQ ID NO: 73198 - protein, 41 aa, Artificial Sequence; identical to SEQ ID NO: 24920
  Cyclic GFR-binding peptide
  MOD_RES (6)..(7)..(39)..(41): Xaa is C or S

SEQ ID NO: 73199 - protein, 25 aa, Artificial Sequence
  Cyclic GFR-binding peptide
VPARLSSLSILFFDAANNVVLKVYP

SEQ ID NO: 73200 - protein, 32 aa, Artificial Sequence; identical to SEQ ID NO: 24922
  Cyclic GFR-binding peptide
  MOD_RES (32)..(32): Xaa is C or S

SEQ ID NO: 73201 - protein, 33 aa, Artificial Sequence; identical to SEQ ID NO: 24923
  Cyclic GFR-binding peptide
  MOD_RES (1)..(2)..(33): Xaa is C or S

SEQ ID NO: 73202 - protein, 28 aa, Artificial Sequence
  Cyclic GFR-binding peptide
ELSSLSMLFFDENEKVVLKVYPDMVVEG

SEQ ID NO: 73203 - protein, 37 aa, Artificial Sequence; identical to SEQ ID NO: 24925
  Cyclic GFR-binding peptide
  MOD_RES (6)..(7): Xaa is C or S

SEQ ID NO: 73204 - protein, 39 aa, Artificial Sequence; identical to SEQ ID NO: 24930
  Cyclic GFR-binding peptide
  MOD_RES (4)..(5)..(36)..(38): Xaa is C or S

SEQ ID NO: 73205 - protein, 32 aa, Artificial Sequence
  Cyclic GFR-binding peptide
  MOD_RES (3)..(4): Xaa is C or S
KAXXVPTELSSLSMLFFDENEKVVLKVYPDMV

SEQ ID NO: 73206 - protein, 22 aa, Artificial Sequence
  Cyclic GFR-binding peptide
LSSLSVLFFDDSSNVILKVYPN

SEQ ID NO: 73207 - protein, 20 aa, Artificial Sequence
  Cyclic GFR-binding peptide
SSLSMLFFDENEKVVLKVYP

SEQ ID NO: 73208 - protein, 24 aa, Artificial Sequence
  Cyclic GFR-binding peptide
TRLSSLSILFFDSANNVVLKVYPD

SEQ ID NO: 73209 - protein, 26 aa, Artificial Sequence
  Cyclic GFR-binding peptide
  MOD_RES (26)..(26): Xaa is C or S
SSLSMLFFDNGRVLLLKVYPMIVEEX

SEQ ID NO: 73210 - protein, 22 aa, Artificial Sequence
  Cyclic GFR-binding peptide
RLSSLSILFFDSANNVVLKVYP

SEQ ID NO: 73211 - protein, 30 aa, Artificial Sequence
  Cyclic GFR-binding peptide
  MOD_RES (27)..(29): Xaa is C or S
LSSLSILFFVGRTPKVLKVYPMVVKSXKXS

SEQ ID NO: 73212 - protein, 30 aa, Artificial Sequence; identical to SEQ ID NO: 24932
  Cyclic GFR-binding peptide

SEQ ID NO: 73213 - protein, 34 aa, Artificial Sequence
  Cyclic GFR-binding peptide
  MOD_RES (4)..(4): Xaa is C or S
GLEXVPTEESSLSMLFFRIKPHQGQHLKVYPFLQ

SEQ ID NO: 73214 - protein, 25 aa, Artificial Sequence
  Cyclic GFR-binding peptide
ARLSSLSILFFDAANNVVLKVYPDM

SEQ ID NO: 73215 - protein, 28 aa, Artificial Sequence
  Cyclic GFR-binding peptide
  MOD_RES (2)..(3): Xaa is C or S
PXXAPTKLSSLSVLFFDDSSNVILKVYP

SEQ ID NO: 73216 - protein, 40 aa, Artificial Sequence; identical to SEQ ID NO: 24934
  Cyclic GFR-binding peptide
  MOD_RES (4)..(5)..(37)..(39): Xaa is C or S

SEQ ID NO: 73217 - protein, 33 aa, Artificial Sequence; identical to SEQ ID NO: 24935
  Cyclic GFR-binding peptide
  MOD_RES (2)..(3): Xaa is C or S

SEQ ID NO: 73218 - protein, 34 aa, Artificial Sequence
  Cyclic GFR-binding peptide
  MOD_RES (32)..(34): Xaa is C or S
VPTELSSLSMLFFDENEKVVLKVYPDMVVEGXGX

SEQ ID NO: 73219 - protein, 30 aa, Artificial Sequence
  Cyclic GFR-binding peptide
  MOD_RES (3)..(4): Xaa is C or S
SPXXVSQDLSSLSILFFIGKTPKILKVYPM

SEQ ID NO: 73220 - protein, 34 aa, Artificial Sequence; identical to SEQ ID NO: 24938
  Cyclic GFR-binding peptide
  MOD_RES (3)..(4): Xaa is C or S

SEQ ID NO: 73221 - protein, 30 aa, Artificial Sequence
  Cyclic GFR-binding peptide
PTKLSSLSILFFDKGVVTYLKVYPGMAVSE

SEQ ID NO: 73222 - protein, 32 aa, Artificial Sequence
  Cyclic GFR-binding peptide
  MOD_RES (3)..(4): Xaa is C or S
KPXXAPTKLSSLSVLFFDDSSNVILKVYPNMV

SEQ ID NO: 73223 - protein, 25 aa, Artificial Sequence
  Cyclic GFR-binding peptide
PTELSSLSMLFFDEYDKVVLKVYPE

SEQ ID NO: 73224 - protein, 27 aa, Artificial Sequence
  Cyclic GFR-binding peptide
  MOD_RES (1)..(1): Xaa is C or S
XVPARLSSLSILFFDAANNVVLKVYPD

SEQ ID NO: 73225 - protein, 29 aa, Artificial Sequence
  Cyclic GFR-binding peptide
  MOD_RES (2)..(3): Xaa is C or S
AXXVPTELSSLSMLFFDEYDKVVLKVYPE

SEQ ID NO: 73226 - protein, 21 aa, Artificial Sequence
  Cyclic GFR-binding peptide
SSLSILFFVGRTPKVLKVYPM

SEQ ID NO: 73227 - protein, 36 aa, Artificial Sequence; identical to SEQ ID NO: 24940
  Cyclic GFR-binding peptide
  MOD_RES (2)..(3)..(35): Xaa is C or S

SEQ ID NO: 73228 - protein, 31 aa, Artificial Sequence
  Cyclic GFR-binding peptide
  MOD_RES (2)..(3): Xaa is C or S
AXXVPTELSSLSMLFFDENEKVVLKVYPDMV

SEQ ID NO: 73229 - protein, 21 aa, Artificial Sequence
  Cyclic GFR-binding peptide
LSSLSILFFDSANNVVLKVYP

SEQ ID NO: 73230 - protein, 37 aa, Artificial Sequence; identical to SEQ ID NO: 24942
  Cyclic GFR-binding peptide
  MOD_RES (1)..(2)..(34)..(36): Xaa is C or S

SEQ ID NO: 73231 - protein, 28 aa, Artificial Sequence
  Cyclic GFR-binding peptide
  MOD_RES (2)..(3): Xaa is C or S
AXXVPTKLSSLSVLFFDDMGVPTLKVYP

SEQ ID NO: 73232 - protein, 28 aa, Artificial Sequence
  Cyclic GFR-binding peptide
  MOD_RES (28)..(28): Xaa is C or S
DLSSLSILFFIGKTPKILKVYPMIVKSX

SEQ ID NO: 73233 - protein, 21 aa, Artificial Sequence
  Cyclic GFR-binding peptide
LSSLSILFFIGKTPKILKVYP

SEQ ID NO: 73234 - protein, 40 aa, Artificial Sequence; identical to SEQ ID NO: 24943
  Cyclic GFR-binding peptide
  MOD_RES (6)..(7)..(39): Xaa is C or S

SEQ ID NO: 73235 - protein, 30 aa, Artificial Sequence
  Cyclic GFR-binding peptide
  MOD_RES (3)..(4): Xaa is C or S
PTXXVPTRLSSLSILFFDSANNVVLKVYPD

SEQ ID NO: 73236 - protein, 28 aa, Artificial Sequence
  Cyclic GFR-binding peptide
  MOD_RES (2)..(2): Xaa is C or S
TXAPTKLSSLSVLFFDDSSNVILKVYPN

SEQ ID NO: 73237 - protein, 33 aa, Artificial Sequence
  Cyclic GFR-binding peptide
  MOD_RES (4)..(5): Xaa is C or S
PKPXXAPTKLSSLSVLFFDDSSNVILKVYPNMV

SEQ ID NO: 73238 - protein, 27 aa, Artificial Sequence
  Cyclic GFR-binding peptide
QDLSSLSILFFIGKTPKILKVYPMIVK

SEQ ID NO: 73239 - protein, 31 aa, Artificial Sequence
  Cyclic GFR-binding peptide
  MOD_RES (31)..(31): Xaa is C or S
PARLSSLSILFFDAANNVVLKVYPDMVVEAX

SEQ ID NO: 73240 - protein, 28 aa, Artificial Sequence
  Cyclic GFR-binding peptide
KLSSLSILFFDKGVVTYLKVYPGMAVSE

SEQ ID NO: 73241 - protein, 26 aa, Artificial Sequence
  Cyclic GFR-binding peptide
  MOD_RES (1)..(1): Xaa is C or S
XAPVKTSSLSMLFFDNGRVLLLKVYP

SEQ ID NO: 73242 - protein, 25 aa, Artificial Sequence
  Cyclic GFR-binding peptide
SSLSMLFFDNGRVLLLKVYPMIVEE

SEQ ID NO: 73243 - protein, 27 aa, Artificial Sequence
  Cyclic GFR-binding peptide
APTKLSSLSVLFFDDSSNVILKVYPNM

SEQ ID NO: 73244 - protein, 32 aa, Artificial Sequence
  Cyclic GFR-binding peptide
  MOD_RES (6)..(7): Xaa is C or S
KIPKAXXVPTELSSLSMLFFDENEKVVLKVYP

SEQ ID NO: 73245 - protein, 32 aa, Artificial Sequence
  Cyclic GFR-binding peptide
  MOD_RES (30)..(32): Xaa is C or S
TQLSSLSVLFFDDSSNVILKVYPNMVVRAXGX

SEQ ID NO: 73246 - protein, 33 aa, Artificial Sequence
  Cyclic GFR-binding peptide
  MOD_RES (4)..(5): Xaa is C or S
AAPXXVPQALSSLSILFFVGRKPKVLKVYPMIV

SEQ ID NO: 73247 - protein, 30 aa, Artificial Sequence
  Cyclic GFR-binding peptide
PTELSSLSMLFFDENEKVVLKVYPDMVVEG

SEQ ID NO: 73248 - protein, 31 aa, Artificial Sequence
  Cyclic GFR-binding peptide
  MOD_RES (4)..(5): Xaa is C or S
PKAXXVPTELSSLSMLFFDEYDKVVLKVYPE

SEQ ID NO: 73249 - protein, 38 aa, Artificial Sequence; identical to SEQ ID NO: 24949
  Cyclic GFR-binding peptide
  MOD_RES (5)..(6)..(38): Xaa is C or S

SEQ ID NO: 73250 - protein, 35 aa, Artificial Sequence
  Cyclic GFR-binding peptide
  MOD_RES (3)..(4): Xaa is C or S
KAXXVPTKLSSLSVLFFDDMGVPTLKVYPEGMSVA

SEQ ID NO: 73251 - protein, 31 aa, Artificial Sequence
  Cyclic GFR-binding peptide
  MOD_RES (31)..(31): Xaa is C or S
PTELSSLSMLFFDENEKVVLKVYPDMVVEGX

SEQ ID NO: 73252 - protein, 27 aa, Artificial Sequence
  Cyclic GFR-binding peptide
  MOD_RES (1)..(1): Xaa is C or S
XAPTKLSSLSVLFFDSSNNVILKVYPN

SEQ ID NO: 73253 - protein, 35 aa, Artificial Sequence
  Cyclic GFR-binding peptide
  MOD_RES (6)..(7): Xaa is C or S
HVPKPXXAPTKLSSLSVLFFDDSSNVILKVYPNMV

SEQ ID NO: 73254 - protein, 27 aa, Artificial Sequence
  Cyclic GFR-binding peptide
  MOD_RES (1)..(2): Xaa is C or S
XXAPTQLSSLSVLFFDDSSNVILKVYP

SEQ ID NO: 73255 - protein, 34 aa, Artificial Sequence
  Cyclic GFR-binding peptide
  MOD_RES (6)..(7): Xaa is C or S
SIPKAXXVPTELSSLSMLFFDEYDKVVLKVYPEM

SEQ ID NO: 73256 - protein, 31 aa, Artificial Sequence; identical to SEQ ID NO: 24953
  Cyclic GFR-binding peptide
  MOD_RES (1)..(1): Xaa is C or S

SEQ ID NO: 73257 - protein, 24 aa, Artificial Sequence
  Cyclic GFR-binding peptide
TKLSSLSVLFFDSSNNVILKVYPN

SEQ ID NO: 73258 - protein, 41 aa, Artificial Sequence; identical to SEQ ID NO: 24955
  Cyclic GFR-binding peptide
  MOD_RES (6)..(7)..(39)..(41): Xaa is C or S

SEQ ID NO: 73259 - protein, 32 aa, Artificial Sequence
  Cyclic GFR-binding peptide
  MOD_RES (31)..(31): Xaa is C or S
EESSLSMLFFRIKPHQGQHLKVYPFLQHNKXE

SEQ ID NO: 73260 - protein, 35 aa, Artificial Sequence
  Cyclic GFR-binding peptide
  MOD_RES (34)..(34): Xaa is C or S
RVHHSSLSVLFFEYVRKKPKLLKVYPRLEEHLEXA

SEQ ID NO: 73261 - protein, 30 aa, Artificial Sequence
  Cyclic GFR-binding peptide
  MOD_RES (3)..(4): Xaa is C or S
ASXXVPARLSSLSILFFDAANNVVLKVYPD

SEQ ID NO: 73262 - protein, 22 aa, Artificial Sequence
  Cyclic GFR-binding peptide
DLSSLSILFFIGKTPKILKVYP

SEQ ID NO: 73263 - protein, 29 aa, Artificial Sequence
  Cyclic GFR-binding peptide
  MOD_RES (29)..(29): Xaa is C or S
VKTSSLSMLFFDNGRVLLLKVYPMIVEEX

SEQ ID NO: 73264 - protein, 21 aa, Artificial Sequence
  Cyclic GFR-binding peptide
SSLSILFFVGRKPKVLKVYPM

SEQ ID NO: 73265 - protein, 31 aa, Artificial Sequence; identical to SEQ ID NO: 24957
  Cyclic GFR-binding peptide
  MOD_RES (1)..(1): Xaa is C or S

SEQ ID NO: 73266 - protein, 29 aa, Artificial Sequence
  Cyclic GFR-binding peptide
  MOD_RES (29)..(29): Xaa is C or S
SSLSMLFFRIKPHQGQHLKVYPFLQHNKX

SEQ ID NO: 73267 - protein, 32 aa, Artificial Sequence
  Cyclic GFR-binding peptide
  MOD_RES (2)..(3): Xaa is C or S
AXXVPTELSSLSMLFFDENEKVVLKVYPDMVV

SEQ ID NO: 73268 - protein, 30 aa, Artificial Sequence
  Cyclic GFR-binding peptide
  MOD_RES (1)..(1): Xaa is C or S
XVPTKLSSLSILFFDKGVVTYLKVYPGMAV

SEQ ID NO: 73269 - protein, 31 aa, Artificial Sequence
  Cyclic GFR-binding peptide
  MOD_RES (2)..(3): Xaa is C or S
PXXAPTKLSSLSVLFFDDSSNVILKVYPNMV

SEQ ID NO: 73270 - protein, 39 aa, Artificial Sequence; identical to SEQ ID NO: 24960
  Cyclic GFR-binding peptide
  MOD_RES (5)..(6)..(38): Xaa is C or S

SEQ ID NO: 73271 - protein, 22 aa, Artificial Sequence
  Cyclic GFR-binding peptide
SSLSILFFVGRTPKVLKVYPMV

SEQ ID NO: 73272 - protein, 23 aa, Artificial Sequence
  Cyclic GFR-binding peptide
RLSSLSILFFDSANNVVLKVYPD

SEQ ID NO: 73273 - protein, 23 aa, Artificial Sequence
  Cyclic GFR-binding peptide
DLSSLSILFFVGRTPKVLKVYPM

SEQ ID NO: 73274 - protein, 22 aa, Artificial Sequence
  Cyclic GFR-binding peptide
SSLSILFFDKGVVTYLKVYPGM

SEQ ID NO: 73275 - protein, 39 aa, Artificial Sequence; identical to SEQ ID NO: 24961
  Cyclic GFR-binding peptide
  MOD_RES (4)..(5)..(37)..(39): Xaa is C or S

SEQ ID NO: 73276 - protein, 26 aa, Artificial Sequence
  Cyclic GFR-binding peptide
KTSSLSMLFFDNGRVLLLKVYPMIVE

SEQ ID NO: 73277 - protein, 38 aa, Artificial Sequence; identical to SEQ ID NO: 24963
  Cyclic GFR-binding peptide
  MOD_RES (6)..(7)..(38): Xaa is C or S

SEQ ID NO: 73278 - protein, 30 aa, Artificial Sequence
  Cyclic GFR-binding peptide
HSSLSVLFFEYVRKKPKLLKVYPRLEEHLE

SEQ ID NO: 73279 - protein, 31 aa, Artificial Sequence
  Cyclic GFR-binding peptide
  MOD_RES (28)..(30): Xaa is C or S
LSSLSILFFDKGVVTYLKVYPGMAVSEXGXR

SEQ ID NO: 73280 - protein, 30 aa, Artificial Sequence
  Cyclic GFR-binding peptide
  MOD_RES (28)..(30): Xaa is C or S
DLSSLSILFFIGKTPKILKVYPMIVKSXKX

SEQ ID NO: 73281 - protein, 39 aa, Artificial Sequence; identical to SEQ ID NO: 24966
  Cyclic GFR-binding peptide
  MOD_RES (3)..(3): Xaa is C or S

SEQ ID NO: 73282 - protein, 33 aa, Artificial Sequence
  Cyclic GFR-binding peptide
  MOD_RES (6)..(7): Xaa is C or S
STPPTXXVPTRLSSLSILFFDSANNVVLKVYPD

SEQ ID NO: 73283 - protein, 38 aa, Artificial Sequence; identical to SEQ ID NO: 24968
  Cyclic GFR-binding peptide
  MOD_RES (7)..(7): Xaa is C or S

SEQ ID NO: 73284 - protein, 35 aa, Artificial Sequence; identical to SEQ ID NO: 24969
  Cyclic GFR-binding peptide
  MOD_RES (2)..(3)..(35): Xaa is C or S

SEQ ID NO: 73285 - protein, 32 aa, Artificial Sequence
  Cyclic GFR-binding peptide
  MOD_RES (5)..(6): Xaa is C or S
VPKAXXAPTKLSSLSVLFFDSSNNVILKVYPN

SEQ ID NO: 73286 - protein, 36 aa, Artificial Sequence
  Cyclic GFR-binding peptide
  MOD_RES (6)..(7): Xaa is C or S
ASASPXXVSQDLSSLSILFFIGKTPKILKVYPMIVK

SEQ ID NO: 73287 - protein, 33 aa, Artificial Sequence
  Cyclic GFR-binding peptide
  MOD_RES (30)..(32): Xaa is C or S
SSLSVLFFEYVRKKPKLLKVYPRLEEHLEXAXA

SEQ ID NO: 73288 - protein, 31 aa, Artificial Sequence
  Cyclic GFR-binding peptide
  MOD_RES (31)..(31): Xaa is C or S
PTQLSSLSVLFFDDSSNVILKVYPNMVVRAX

SEQ ID NO: 73289 - protein, 31 aa, Artificial Sequence
  Cyclic GFR-binding peptide
  MOD_RES (28)..(30): Xaa is C or S
DLSSLSILFFVGRTPKVLKVYPMVVKSXKXS

SEQ ID NO: 73290 - protein, 29 aa, Artificial Sequence
  Cyclic GFR-binding peptide
  MOD_RES (3)..(4): Xaa is C or S
GPXXTPTKMSSLSMLFFNDKQQIILKVYP

SEQ ID NO: 73291 - protein, 37 aa, Artificial Sequence; identical to SEQ ID NO: 24971
  Cyclic GFR-binding peptide
  MOD_RES (4)..(5)..(37): Xaa is C or S

SEQ ID NO: 73292 - protein, 36 aa, Artificial Sequence; identical to SEQ ID NO: 24972
  Cyclic GFR-binding peptide
  MOD_RES (35)..(35): Xaa is C or S

SEQ ID NO: 73293 - protein, 31 aa, Artificial Sequence
  Cyclic GFR-binding peptide
  MOD_RES (31)..(31): Xaa is C or S
PTELSSLSMLFFDEYDKVVLKVYPEMVVEGX

SEQ ID NO: 73294 - protein, 27 aa, Artificial Sequence
  Cyclic GFR-binding peptide
SRVHHSSLSVLFFEYVRKKPKLLKVYP

SEQ ID NO: 73295 - protein, 32 aa, Artificial Sequence; identical to SEQ ID NO: 24973
  Cyclic GFR-binding peptide
  MOD_RES (32)..(32): Xaa is C or S

SEQ ID NO: 73296 - protein, 30 aa, Artificial Sequence
  Cyclic GFR-binding peptide
  MOD_RES (30)..(30): Xaa is C or S
TKLSSLSILFFDKGVVTYLKVYPGMAVSEX

SEQ ID NO: 73297 - protein, 37 aa, Artificial Sequence; identical to SEQ ID NO: 24974
  Cyclic GFR-binding peptide
  MOD_RES (1)..(2)..(34)..(36): Xaa is C or S

SEQ ID NO: 73298 - protein, 29 aa, Artificial Sequence
  Cyclic GFR-binding peptide
  MOD_RES (27)..(29): Xaa is C or S
LSSLSILFFVGRTPKVLKVYPMVVKSXKX

SEQ ID NO: 73299 - protein, 23 aa, Artificial Sequence
  Cyclic GFR-binding peptide
LSSLSVLFFDDSSNVILKVYPNM

SEQ ID NO: 73300 - protein, 21 aa, Artificial Sequence
  Cyclic GFR-binding peptide
SSLSILFFDKGVVTYLKVYPG

SEQ ID NO: 73301 - protein, 34 aa, Artificial Sequence
  Cyclic GFR-binding peptide
  MOD_RES (3)..(3): Xaa is C or S
LEXVPTEESSLSMLFFRIKPHQGQHLKVYPFLQH

SEQ ID NO: 73302 - protein, 35 aa, Artificial Sequence; identical to SEQ ID NO: 24976
  Cyclic GFR-binding peptide
  MOD_RES (1)..(2)..(34): Xaa is C or S

SEQ ID NO: 73303 - protein, 33 aa, Artificial Sequence; identical to SEQ ID NO: 24978
  Cyclic GFR-binding peptide
  MOD_RES (2)..(3): Xaa is C or S

SEQ ID NO: 73304 - protein, 31 aa, Artificial Sequence; identical to SEQ ID NO: 24979
  Cyclic GFR-binding peptide

SEQ ID NO: 73305 - protein, 31 aa, Artificial Sequence
  Cyclic GFR-binding peptide
  MOD_RES (29)..(31): Xaa is C or S
RLSSLSILFFDAANNVVLKVYPDMVVEAXGX

SEQ ID NO: 73306 - protein, 41 aa, Artificial Sequence; identical to SEQ ID NO: 24980
  Cyclic GFR-binding peptide
  MOD_RES (6)..(7)..(39)..(41): Xaa is C or S

SEQ ID NO: 73307 - protein, 41 aa, Artificial Sequence; identical to SEQ ID NO: 24981
  Cyclic GFR-binding peptide
  MOD_RES (4)..(41): Xaa is C or S

SEQ ID NO: 73308 - protein, 30 aa, Artificial Sequence
  Cyclic GFR-binding peptide
  MOD_RES (3)..(4): Xaa is C or S
GPXXTPTKMSSLSMLFFNDKQQIILKVYPG

SEQ ID NO: 73309 - protein, 30 aa, Artificial Sequence
  Cyclic GFR-binding peptide
  MOD_RES (1)..(2): Xaa is C or S
XXVPTELSSLSMLFFDENEKVVLKVYPDMV

SEQ ID NO: 73310 - protein, 30 aa, Artificial Sequence
  Cyclic GFR-binding peptide
  MOD_RES (4)..(5): Xaa is C or S
PKPXXAPTKLSSLSVLFFDDSSNVILKVYP

SEQ ID NO: 73311 - protein, 27 aa, Artificial Sequence
  Cyclic GFR-binding peptide
  MOD_RES (1)..(1): Xaa is C or S
XVPQALSSLSILFFVGRKPKVLKVYPM

SEQ ID NO: 73312 - protein, 31 aa, Artificial Sequence
  Cyclic GFR-binding peptide
  MOD_RES (29)..(31): Xaa is C or S
KMSSLSMLFFNDKQQIILKVYPGMVVDRXGX

SEQ ID NO: 73313 - protein, 27 aa, Artificial Sequence
  Cyclic GFR-binding peptide
  MOD_RES (1)..(2): Xaa is C or S
XXVPTKLSSLSVLFFDDMGVPTLKVYP

SEQ ID NO: 73314 - protein, 38 aa, Artificial Sequence; identical to SEQ ID NO: 24983
  Cyclic GFR-binding peptide
  MOD_RES (3)..(4)..(36)..(38): Xaa is C or S

SEQ ID NO: 73315 - protein, 24 aa, Artificial Sequence
  Cyclic GFR-binding peptide
TELSSLSMLFFDENEKVVLKVYPD

SEQ ID NO: 73316 - protein, 41 aa, Artificial Sequence; identical to SEQ ID NO: 24985
  Cyclic GFR-binding peptide
  MOD_RES (1)..(38)..(40): Xaa is C or S

SEQ ID NO: 73317 - protein, 33 aa, Artificial Sequence
  Cyclic GFR-binding peptide
  MOD_RES (6)..(7): Xaa is C or S
AAPASXXVPARLSSLSILFFDAANNVVLKVYPD

SEQ ID NO: 73318 - protein, 38 aa, Artificial Sequence; identical to SEQ ID NO: 24987
  Cyclic GFR-binding peptide
  MOD_RES (3)..(4)..(36)..(38): Xaa is C or S

SEQ ID NO: 73319 - protein, 26 aa, Artificial Sequence
  Cyclic GFR-binding peptide
KMSSLSMLFFNDKQQIILKVYPGMVV

SEQ ID NO: 73320 - protein, 32 aa, Artificial Sequence
  Cyclic GFR-binding peptide
  MOD_RES (29)..(31): Xaa is C or S
SSLSMLFFRIKPHQGQHLKVYPFLQHNKXEXR

SEQ ID NO: 73321 - protein, 35 aa, Artificial Sequence; identical to SEQ ID NO: 24988
  Cyclic GFR-binding peptide
  MOD_RES (2)..(3)..(35): Xaa is C or S

SEQ ID NO: 73322 - protein, 30 aa, Artificial Sequence; identical to SEQ ID NO: 24989
  Cyclic GFR-binding peptide

SEQ ID NO: 73323 - protein, 40 aa, Artificial Sequence; identical to SEQ ID NO: 24990
  Cyclic GFR-binding peptide
  MOD_RES (6)..(7)..(40): Xaa is C or S

SEQ ID NO: 73324 - protein, 36 aa, Artificial Sequence; identical to SEQ ID NO: 24991
  Cyclic GFR-binding peptide
  MOD_RES (33)..(35): Xaa is C or S

SEQ ID NO: 73325 - protein, 32 aa, Artificial Sequence
  Cyclic GFR-binding peptide
  MOD_RES (4)..(5): Xaa is C or S
PKPXXAPTQLSSLSVLFFDDSSNVILKVYPNM

SEQ ID NO: 73326 - protein, 39 aa, Artificial Sequence; identical to SEQ ID NO: 24992
  Cyclic GFR-binding peptide
  MOD_RES (3)..(4)..(36)..(38): Xaa is C or S

SEQ ID NO: 73327 - protein, 33 aa, Artificial Sequence
  Cyclic GFR-binding peptide
  MOD_RES (7)..(7): Xaa is C or S
HVTKPTXAPTKLSSLSVLFFDDSSNVILKVYPN

SEQ ID NO: 73328 - protein, 36 aa, Artificial Sequence
  Cyclic GFR-binding peptide
  MOD_RES (6)..(7): Xaa is C or S
KIPKAXXVPTELSSLSMLFFDENEKVVLKVYPDMVV

SEQ ID NO: 73329 - protein, 33 aa, Artificial Sequence
  Cyclic GFR-binding peptide
  MOD_RES (3)..(4): Xaa is C or S
KPXXAPTQLSSLSVLFFDDSSNVILKVYPNMVV

SEQ ID NO: 73330 - protein, 27 aa, Artificial Sequence
  Cyclic GFR-binding peptide
KLSSLSVLFFDDSSNVILKVYPNMVVR

SEQ ID NO: 73331 - protein, 24 aa, Artificial Sequence
  Cyclic GFR-binding peptide
PTKLSSLSILFFDKGVVTYLKVYP

SEQ ID NO: 73332 - protein, 22 aa, Artificial Sequence
  Cyclic GFR-binding peptide
LSSLSMLFFDENEKVVLKVYPD

SEQ ID NO: 73333 - protein, 31 aa, Artificial Sequence
  Cyclic GFR-binding peptide
  MOD_RES (1)..(1): Xaa is C or S
XVPTELSSLSMLFFDENEKVVLKVYPDMVVE

SEQ ID NO: 73334 - protein, 29 aa, Artificial Sequence
  Cyclic GFR-binding peptide
  MOD_RES (27)..(29): Xaa is C or S
SSLSVLFFDDSSNVILKVYPNMVVRSXGX

SEQ ID NO: 73335 - protein, 29 aa, Artificial Sequence
  Cyclic GFR-binding peptide
  MOD_RES (1)..(1): Xaa is C or S
XVPTEESSLSMLFFRIKPHQGQHLKVYPF

SEQ ID NO: 73336 - protein, 26 aa, Artificial Sequence
  Cyclic GFR-binding peptide
DLSSLSILFFVGRTPKVLKVYPMVVK

SEQ ID NO: 73337 - protein, 38 aa, Artificial Sequence; identical to SEQ ID NO: 24994
  Cyclic GFR-binding peptide
  MOD_RES (3)..(37): Xaa is C or S

SEQ ID NO: 73338 - protein, 29 aa, Artificial Sequence
  Cyclic GFR-binding peptide
  MOD_RES (29)..(29): Xaa is C or S
QALSSLSILFFVGRKPKVLKVYPMIVRSX

SEQ ID NO: 73339 - protein, 32 aa, Artificial Sequence; identical to SEQ ID NO: 24996
  Cyclic GFR-binding peptide
  MOD_RES (31)..(31): Xaa is C or S

SEQ ID NO: 73340 - protein, 30 aa, Artificial Sequence
  Cyclic GFR-binding peptide
  MOD_RES (30)..(30): Xaa is C or S
TKLSSLSVLFFDSSNNVILKVYPNMVVKAX

SEQ ID NO: 73341 - protein, 22 aa, Artificial Sequence
  Cyclic GFR-binding peptide
LSSLSMLFFDEYDKVVLKVYPE

SEQ ID NO: 73342 - protein, 36 aa, Artificial Sequence; identical to SEQ ID NO: 24997
  Cyclic GFR-binding peptide
  MOD_RES (3)..(4)..(36): Xaa is C or S

SEQ ID NO: 73343 - protein, 30 aa, Artificial Sequence
  Cyclic GFR-binding peptide
TEESSLSMLFFRIKPHQGQHLKVYPFLQHN

SEQ ID NO: 73344 - protein, 28 aa, Artificial Sequence
  Cyclic GFR-binding peptide
LSSLSVLFFDDMGVPTLKVYPEGMSVAE

SEQ ID NO: 73345 - protein, 25 aa, Artificial Sequence
  Cyclic GFR-binding peptide
TEESSLSMLFFRIKPHQGQHLKVYP

SEQ ID NO: 73346 - protein, 30 aa, Artificial Sequence
  Cyclic GFR-binding peptide
  MOD_RES (29)..(29): Xaa is C or S
RLSSLSILFFDSANNVVLKVYPDMVVESXG

SEQ ID NO: 73347 - protein, 35 aa, Artificial Sequence; identical to SEQ ID NO: 25000
  Cyclic GFR-binding peptide
  MOD_RES (3)..(4)..(35): Xaa is C or S

SEQ ID NO: 73348 - protein, 28 aa, Artificial Sequence
  Cyclic GFR-binding peptide
VPTKLSSLSILFFDKGVVTYLKVYPGMA

SEQ ID NO: 73349 - protein, 34 aa, Artificial Sequence
  Cyclic GFR-binding peptide
  MOD_RES (4)..(5): Xaa is C or S
PKAXXVPTELSSLSMLFFDENEKVVLKVYPDMVV

SEQ ID NO: 73350 - protein, 33 aa, Artificial Sequence; identical to SEQ ID NO: 25005
  Cyclic GFR-binding peptide
  MOD_RES (32)..(32): Xaa is C or S

SEQ ID NO: 73351 - protein, 32 aa, Artificial Sequence
  Cyclic GFR-binding peptide
  MOD_RES (5)..(5): Xaa is C or S
TKPTXAPTKLSSLSVLFFDDSSNVILKVYPNM

SEQ ID NO: 73352 - protein, 32 aa, Artificial Sequence
  Cyclic GFR-binding peptide
  MOD_RES (31)..(31): Xaa is C or S
PTQLSSLSVLFFDDSSNVILKVYPNMVVRAXG

SEQ ID NO: 73353 - protein, 30 aa, Artificial Sequence
  Cyclic GFR-binding peptide
  MOD_RES (1)..(1): Xaa is C or S
XVPTELSSLSMLFFDENEKVVLKVYPDMVV

SEQ ID NO: 73354 - protein, 40 aa, Artificial Sequence; identical to SEQ ID NO: 25008
  Cyclic GFR-binding peptide
  MOD_RES (3)..(37)..(39): Xaa is C or S

SEQ ID NO: 73355 - protein, 42 aa, Artificial Sequence; identical to SEQ ID NO: 25009
  Cyclic GFR-binding peptide
  MOD_RES (6)..(7)..(39)..(41): Xaa is C or S

SEQ ID NO: 73356 - protein, 32 aa, Artificial Sequence
  Cyclic GFR-binding peptide
  MOD_RES (29)..(31): Xaa is C or S
LSSLSVLFFDDMGVPTLKVYPEGMSVAEXGXR

SEQ ID NO: 73357 - protein, 26 aa, Artificial Sequence
  Cyclic GFR-binding peptide
QLSSLSVLFFDDSSNVILKVYPNMVV

SEQ ID NO: 73358 - protein, 28 aa, Artificial Sequence
  Cyclic GFR-binding peptide
QDLSSLSILFFVGRTPKVLKVYPMVVKS

SEQ ID NO: 73359 - protein, 39 aa, Artificial Sequence; identical to SEQ ID NO: 25011
  Cyclic GFR-binding peptide
  MOD_RES (3)..(4)..(36)..(38): Xaa is C or S

SEQ ID NO: 73360 - protein, 31 aa, Artificial Sequence
  Cyclic GFR-binding peptide
SRVHHSSLSVLFFEYVRKKPKLLKVYPRLEE

SEQ ID NO: 73361 - protein, 28 aa, Artificial Sequence
  Cyclic GFR-binding peptide
VPQDLSSLSILFFVGRTPKVLKVYPMVV

SEQ ID NO: 73362 - protein, 24 aa, Artificial Sequence
  Cyclic GFR-binding peptide
ELSSLSMLFFDEYDKVVLKVYPEM

SEQ ID NO: 73363 - protein, 26 aa, Artificial Sequence
  Cyclic GFR-binding peptide
TSSLSMLFFDNGRVLLLKVYPMIVEE

SEQ ID NO: 73364 - protein, 29 aa, Artificial Sequence
  Cyclic GFR-binding peptide
  MOD_RES (1)..(1): Xaa is C or S
XVPQDLSSLSILFFVGRTPKVLKVYPMVV

SEQ ID NO: 73365 - protein, 35 aa, Artificial Sequence
  Cyclic GFR-binding peptide
  MOD_RES (5)..(6): Xaa is C or S
VGKAXXVPTKLSSLSVLFFDDMGVPTLKVYPEGMS

SEQ ID NO: 73366 - protein, 32 aa, Artificial Sequence
  Cyclic GFR-binding peptide
  MOD_RES (30)..(32): Xaa is C or S
TKLSSLSVLFFDDSSNVILKVYPNMVVRSXGX

SEQ ID NO: 73367 - protein, 33 aa, Artificial Sequence
  Cyclic GFR-binding peptide
  MOD_RES (4)..(5): Xaa is C or S
AGPXXTPTKMSSLSMLFFNDKQQIILKVYPGMV

SEQ ID NO: 73368 - protein, 25 aa, Artificial Sequence
  Cyclic GFR-binding peptide
APTKLSSLSVLFFDSSNNVILKVYP

SEQ ID NO: 73369 - protein, 20 aa, Artificial Sequence
  Cyclic GFR-binding peptide
SSLSVLFFDSSNNVILKVYP

SEQ ID NO: 73370 - protein, 40 aa, Artificial Sequence; identical to SEQ ID NO: 25017
  Cyclic GFR-binding peptide
  MOD_RES (6)..(7)..(38)..(40): Xaa is C or S

SEQ ID NO: 73371 - protein, 29 aa, Artificial Sequence
  Cyclic GFR-binding peptide
  MOD_RES (3)..(4): Xaa is C or S
ASXXVPARLSSLSILFFDAANNVVLKVYP

SEQ ID NO: 73372 - protein, 33 aa, Artificial Sequence
  Cyclic GFR-binding peptide
  MOD_RES (30)..(32): Xaa is C or S
KLSSLSVLFFDDMGVPTLKVYPEGMSVAEXGXR

SEQ ID NO: 73373 - protein, 36 aa, Artificial Sequence
  Cyclic GFR-binding peptide
  MOD_RES (6)..(7): Xaa is C or S
RVPSTXXAPVKTSSLSMLFFDNGRVLLLKVYPMIVE

SEQ ID NO: 73374 - protein, 33 aa, Artificial Sequence; identical to SEQ ID NO: 25018
  Cyclic GFR-binding peptide
  MOD_RES (31)..(33): Xaa is C or S

SEQ ID NO: 73375 - protein, 33 aa, Artificial Sequence
  Cyclic GFR-binding peptide
  MOD_RES (31)..(33): Xaa is C or S
PTKLSSLSVLFFDDSSNVILKVYPNMVVRSXGX

SEQ ID NO: 73376 - protein, 28 aa, Artificial Sequence
  Cyclic GFR-binding peptide
PTKLSSLSVLFFDDSSNVILKVYPNMVV

SEQ ID NO: 73377 - protein, 25 aa, Artificial Sequence
  Cyclic GFR-binding peptide
ESSLSMLFFRIKPHQGQHLKVYPFL

SEQ ID NO: 73378 - protein, 28 aa, Artificial Sequence
  Cyclic GFR-binding peptide
  MOD_RES (28)..(28): Xaa is C or S
SSLSVLFFDDMGVPTLKVYPEGMSVAEX

SEQ ID NO: 73379 - protein, 25 aa, Artificial Sequence
  Cyclic GFR-binding peptide
TRLSSLSILFFDSANNVVLKVYPDM

SEQ ID NO: 73380 - protein, 35 aa, Artificial Sequence
  Cyclic GFR-binding peptide
  MOD_RES (6)..(7): Xaa is C or S
KIPKAXXVPTELSSLSMLFFDENEKVVLKVYPDMV

SEQ ID NO: 73381 - protein, 35 aa, Artificial Sequence; identical to SEQ ID NO: 25019
  Cyclic GFR-binding peptide
  MOD_RES (32)..(34): Xaa is C or S

SEQ ID NO: 73382 - protein, 34 aa, Artificial Sequence; identical to SEQ ID NO: 25020
  Cyclic GFR-binding peptide
  MOD_RES (2)..(3): Xaa is C or S

SEQ ID NO: 73383 - protein, 31 aa, Artificial Sequence
  Cyclic GFR-binding peptide
  MOD_RES (4)..(5): Xaa is C or S
AGPXXTPTKMSSLSMLFFNDKQQIILKVYPG

SEQ ID NO: 73384 - protein, 39 aa, Artificial Sequence; identical to SEQ ID NO: 25021
  Cyclic GFR-binding peptide
  MOD_RES (5)..(6)..(38): Xaa is C or S

SEQ ID NO: 73385 - protein, 33 aa, Artificial Sequence; identical to SEQ ID NO: 25022
  Cyclic GFR-binding peptide
  MOD_RES (32)..(32): Xaa is C or S

SEQ ID NO: 73386 - protein, 29 aa, Artificial Sequence
  Cyclic GFR-binding peptide
  MOD_RES (1)..(1): Xaa is C or S
XAPVKTSSLSMLFFDNGRVLLLKVYPMIV

SEQ ID NO: 73387 - protein, 34 aa, Artificial Sequence; identical to SEQ ID NO: 25023
  Cyclic GFR-binding peptide
  MOD_RES (3)..(4): Xaa is C or S

SEQ ID NO: 73388 - protein, 27 aa, Artificial Sequence
  Cyclic GFR-binding peptide
  MOD_RES (1)..(2): Xaa is C or S
XXAPVKTSSLSMLFFDNGRVLLLKVYP

SEQ ID NO: 73389 - protein, 34 aa, Artificial Sequence; identical to SEQ ID NO: 25024
  Cyclic GFR-binding peptide
  MOD_RES (32)..(34): Xaa is C or S

SEQ ID NO: 73390 - protein, 37 aa, Artificial Sequence; identical to SEQ ID NO: 25025
  Cyclic GFR-binding peptide
  MOD_RES (7)..(7): Xaa is C or S

SEQ ID NO: 73391 - protein, 27 aa, Artificial Sequence
  Cyclic GFR-binding peptide
PQDLSSLSILFFVGRTPKVLKVYPMVV

SEQ ID NO: 73392 - protein, 37 aa, Artificial Sequence; identical to SEQ ID NO: 25030
  Cyclic GFR-binding peptide
  MOD_RES (2)..(36): Xaa is C or S

SEQ ID NO: 73393 - protein, 35 aa, Artificial Sequence; identical to SEQ ID NO: 25029
  Cyclic GFR-binding peptide
  MOD_RES (2)..(3)..(34): Xaa is C or S

SEQ ID NO: 73394 - protein, 28 aa, Artificial Sequence
  Cyclic GFR-binding peptide
TKLSSLSVLFFDDSSNVILKVYPNMVVR

SEQ ID NO: 73395 - protein, 39 aa, Artificial Sequence; identical to SEQ ID NO: 25031
  Cyclic GFR-binding peptide
  MOD_RES (5)..(6)..(37)..(39): Xaa is C or S

SEQ ID NO: 73396 - protein, 31 aa, Artificial Sequence
  Cyclic GFR-binding peptide
  MOD_RES (1)..(2): Xaa is C or S
XXVPQDLSSLSILFFVGRTPKVLKVYPMVVK

SEQ ID NO: 73397 - protein, 33 aa, Artificial Sequence
  Cyclic GFR-binding peptide
  MOD_RES (3)..(4): Xaa is C or S
SPXXVSQDLSSLSILFFIGKTPKILKVYPMIVK

SEQ ID NO: 73398 - protein, 37 aa, Artificial Sequence; identical to SEQ ID NO: 25032
  Cyclic GFR-binding peptide
  MOD_RES (3)..(4)..(36): Xaa is C or S

SEQ ID NO: 73399 - protein, 36 aa, Artificial Sequence; identical to SEQ ID NO: 25033
  Cyclic GFR-binding peptide
  MOD_RES (1)..(34)..(36): Xaa is C or S

SEQ ID NO: 73400 - protein, 32 aa, Artificial Sequence
  Cyclic GFR-binding peptide
  MOD_RES (1)..(2): Xaa is C or S
XXVPTELSSLSMLFFDENEKVVLKVYPDMVVE

SEQ ID NO: 73401 - protein, 32 aa, Artificial Sequence
  Cyclic GFR-binding peptide
  MOD_RES (6)..(7): Xaa is C or S
ASAAPXXVPQALSSLSILFFVGRKPKVLKVYP

SEQ ID NO: 73402 - protein, 35 aa, Artificial Sequence; identical to SEQ ID NO: 25037
  Cyclic GFR-binding peptide
  MOD_RES (3)..(4): Xaa is C or S

SEQ ID NO: 73403 - protein, 28 aa, Artificial Sequence
  Cyclic GFR-binding peptide
VPTEESSLSMLFFRIKPHQGQHLKVYPF

SEQ ID NO: 73404 - protein, 23 aa, Artificial Sequence
  Cyclic GFR-binding peptide
TQLSSLSVLFFDDSSNVILKVYP

SEQ ID NO: 73405 - protein, 26 aa, Artificial Sequence
  Cyclic GFR-binding peptide
RLSSLSILFFDSANNVVLKVYPDMVV

SEQ ID NO: 73406 - protein, 28 aa, Artificial Sequence
  Cyclic GFR-binding peptide
  MOD_RES (2)..(3): Xaa is C or S
TXXVPTRLSSLSILFFDSANNVVLKVYP

SEQ ID NO: 73407 - protein, 38 aa, Artificial Sequence; identical to SEQ ID NO: 25040
  Cyclic GFR-binding peptide
  MOD_RES (6)..(7): Xaa is C or S

SEQ ID NO: 73408 - protein, 31 aa, Artificial Sequence
  Cyclic GFR-binding peptide
  MOD_RES (1)..(2): Xaa is C or S
XXAPTKLSSLSVLFFDDSSNVILKVYPNMVV

SEQ ID NO: 73409 - protein, 32 aa, Artificial Sequence
  Cyclic GFR-binding peptide
  MOD_RES (1)..(1): Xaa is C or S
XQPSRVHHSSLSVLFFEYVRKKPKLLKVYPRL

SEQ ID NO: 73410 - protein, 33 aa, Artificial Sequence
  Cyclic GFR-binding peptide
  MOD_RES (30)..(32): Xaa is C or S
TELSSLSMLFFDEYDKVVLKVYPEMVVEGXGXR

SEQ ID NO: 73411 - protein, 27 aa, Artificial Sequence
  Cyclic GFR-binding peptide
VPTRLSSLSILFFDSANNVVLKVYPDM

SEQ ID NO: 73412 - protein, 33 aa, Artificial Sequence; identical to SEQ ID NO: 25041
  Cyclic GFR-binding peptide
  MOD_RES (1)..(33): Xaa is C or S

SEQ ID NO: 73413 - protein, 29 aa, Artificial Sequence
  Cyclic GFR-binding peptide
VPTELSSLSMLFFDENEKVVLKVYPDMVV

SEQ ID NO: 73414 - protein, 34 aa, Artificial Sequence; identical to SEQ ID NO: 25042
  Cyclic GFR-binding peptide
  MOD_RES (1)..(34): Xaa is C or S

SEQ ID NO: 73415 - protein, 34 aa, Artificial Sequence
  Cyclic GFR-binding peptide
  MOD_RES (1)..(2)..(34): Xaa is C or S
XXVPTELSSLSMLFFDENEKVVLKVYPDMVVEGX

SEQ ID NO: 73416 - protein, 34 aa, Artificial Sequence
  Cyclic GFR-binding peptide
  MOD_RES (31)..(33): Xaa is C or S
PTKLSSLSVLFFDDSSNVILKVYPNMVVRSXGXH

SEQ ID NO: 73417 - protein, 38 aa, Artificial Sequence; identical to SEQ ID NO: 25043
  Cyclic GFR-binding peptide
  MOD_RES (3)..(4)..(37): Xaa is C or S

SEQ ID NO: 73418 - protein, 26 aa, Artificial Sequence
  Cyclic GFR-binding peptide
TELSSLSMLFFDEYDKVVLKVYPEMV

SEQ ID NO: 73419 - protein, 30 aa, Artificial Sequence
  Cyclic GFR-binding peptide
  MOD_RES (27)..(29): Xaa is C or S
SSLSVLFFDSSNNVILKVYPNMVVKAXGXH

SEQ ID NO: 73420 - protein, 28 aa, Artificial Sequence
  Cyclic GFR-binding peptide
  MOD_RES (1)..(1): Xaa is C or S
XVPARLSSLSILFFDAANNVVLKVYPDM

SEQ ID NO: 73421 - protein, 34 aa, Artificial Sequence
  Cyclic GFR-binding peptide
  MOD_RES (2)..(3): Xaa is C or S
AXXVPTELSSLSMLFFDENEKVVLKVYPDMVVEG

SEQ ID NO: 73422 - protein, 36 aa, Artificial Sequence; identical to SEQ ID NO: 25044
  Cyclic GFR-binding peptide
  MOD_RES (5)..(6): Xaa is C or S

SEQ ID NO: 73423 - protein, 26 aa, Artificial Sequence
  Cyclic GFR-binding peptide
APVKTSSLSMLFFDNGRVLLLKVYPM

SEQ ID NO: 73424 - protein, 30 aa, Artificial Sequence
  Cyclic GFR-binding peptide
  MOD_RES (1)..(1): Xaa is C or S
XAPTQLSSLSVLFFDDSSNVILKVYPNMVV

SEQ ID NO: 73425 - protein, 40 aa, Artificial Sequence; identical to SEQ ID NO: 25045
  Cyclic GFR-binding peptide
  MOD_RES (7)..(7): Xaa is C or S

SEQ ID NO: 73426 - protein, 22 aa, Artificial Sequence
  Cyclic GFR-binding peptide
SSLSMLFFRIKPHQGQHLKVYP

SEQ ID NO: 73427 - protein, 23 aa, Artificial Sequence
  Cyclic GFR-binding peptide
SSLSMLFFDNGRVLLLKVYPMIV

SEQ ID NO: 73428 - protein, 34 aa, Artificial Sequence
  Cyclic GFR-binding peptide
  MOD_RES (3)..(4): Xaa is C or S
KAXXVPTELSSLSMLFFDENEKVVLKVYPDMVVE

SEQ ID NO: 73429 - protein, 35 aa, Artificial Sequence; identical to SEQ ID NO: 25047
  Cyclic GFR-binding peptide
  MOD_RES (1)..(2)..(34): Xaa is C or S

SEQ ID NO: 73430 - protein, 33 aa, Artificial Sequence; identical to SEQ ID NO: 25048
  Cyclic GFR-binding peptide
  MOD_RES (32)..(32): Xaa is C or S

SEQ ID NO: 73431 - protein, 42 aa, Artificial Sequence; identical to SEQ ID NO: 25049
  Cyclic GFR-binding peptide
  MOD_RES (3)..(40)..(42): Xaa is C or S

SEQ ID NO: 73432 - protein, 26 aa, Artificial Sequence
  Cyclic GFR-binding peptide
TRLSSLSILFFDSANNVVLKVYPDMV

SEQ ID NO: 73433 - protein, 31 aa, Artificial Sequence
  Cyclic GFR-binding peptide
  MOD_RES (3)..(3): Xaa is C or S
LEXVPTEESSLSMLFFRIKPHQGQHLKVYPF

SEQ ID NO: 73434 - protein, 34 aa, Artificial Sequence; identical to SEQ ID NO: 25052
  Cyclic GFR-binding peptide
  MOD_RES (1)..(32)..(34): Xaa is C or S

SEQ ID NO: 73435 - protein, 32 aa, Artificial Sequence
  Cyclic GFR-binding peptide
  MOD_RES (4)..(5): Xaa is C or S
PKAXXVPTELSSLSMLFFDENEKVVLKVYPDM

SEQ ID NO: 73436 - protein, 36 aa, Artificial Sequence
  Cyclic GFR-binding peptide
  MOD_RES (6)..(7): Xaa is C or S
GSAGPXXTPTKMSSLSMLFFNDKQQIILKVYPGMVV

SEQ ID NO: 73437 - protein, 35 aa, Artificial Sequence
  Cyclic GFR-binding peptide
  MOD_RES (4)..(4): Xaa is C or S
GLEXVPTEESSLSMLFFRIKPHQGQHLKVYPFLQH

SEQ ID NO: 73438 - protein, 37 aa, Artificial Sequence; identical to SEQ ID NO: 25054
  Cyclic GFR-binding peptide
  MOD_RES (5)..(6): Xaa is C or S

SEQ ID NO: 73439 - protein, 30 aa, Artificial Sequence
  Cyclic GFR-binding peptide
  MOD_RES (2)..(3): Xaa is C or S
TXXAPVKTSSLSMLFFDNGRVLLLKVYPMI

SEQ ID NO: 73440 - protein, 31 aa, Artificial Sequence
  Cyclic GFR-binding peptide
  MOD_RES (28)..(30): Xaa is C or S
LSSLSMLFFDEYDKVVLKVYPEMVVEGXGXR

SEQ ID NO: 73441 - protein, 35 aa, Artificial Sequence
  Cyclic GFR-binding peptide
  MOD_RES (32)..(34): Xaa is C or S
PTKLSSLSVLFFDDMGVPTLKVYPEGMSVAEXGXR

SEQ ID NO: 73442 - protein, 29 aa, Artificial Sequence
  Cyclic GFR-binding peptide
  MOD_RES (3)..(4): Xaa is C or S
SPXXVPQDLSSLSILFFVGRTPKVLKVYP

SEQ ID NO: 73443 - protein, 35 aa, Artificial Sequence
  Cyclic GFR-binding peptide
  MOD_RES (6)..(6): Xaa is C or S
VTKPTXAPTKLSSLSVLFFDDSSNVILKVYPNMVV

SEQ ID NO: 73444 - protein, 29 aa, Artificial Sequence
  Cyclic GFR-binding peptide
  MOD_RES (27)..(29): Xaa is C or S
SSLSMLFFNDKQQIILKVYPGMVVDRXGX

SEQ ID NO: 73445 - protein, 27 aa, Artificial Sequence
  Cyclic GFR-binding peptide
PTEESSLSMLFFRIKPHQGQHLKVYPF

SEQ ID NO: 73446 - protein, 37 aa, Artificial Sequence; identical to SEQ ID NO: 25062
  Cyclic GFR-binding peptide
  MOD_RES (6)..(7): Xaa is C or S

SEQ ID NO: 73447 - protein, 26 aa, Artificial Sequence
  Cyclic GFR-binding peptide
QALSSLSILFFVGRKPKVLKVYPMIV

SEQ ID NO: 73448 - protein, 34 aa, Artificial Sequence
  Cyclic GFR-binding peptide
  MOD_RES (6)..(7): Xaa is C or S
STPPTXXVPTRLSSLSILFFDSANNVVLKVYPDM

SEQ ID NO: 73449 - protein, 33 aa, Artificial Sequence
  Cyclic GFR-binding peptide
  MOD_RES (1)..(33): Xaa is C or S
XVPTELSSLSMLFFDENEKVVLKVYPDMVVEGX

SEQ ID NO: 73450 - protein, 22 aa, Artificial Sequence
  Cyclic GFR-binding peptide
SSLSILFFDAANNVVLKVYPDM

SEQ ID NO: 73451 - protein, 25 aa, Artificial Sequence
  Cyclic GFR-binding peptide
PTRLSSLSILFFDSANNVVLKVYPD

SEQ ID NO: 73452 - protein, 40 aa, Artificial Sequence; identical to SEQ ID NO: 25064
  Cyclic GFR-binding peptide
  MOD_RES (6)..(7)..(38)..(40): Xaa is C or S

SEQ ID NO: 73453 - protein, 38 aa, Artificial Sequence; identical to SEQ ID NO: 25065
  Cyclic GFR-binding peptide
  MOD_RES (5)..(6)..(38): Xaa is C or S

SEQ ID NO: 73454 - protein, 34 aa, Artificial Sequence; identical to SEQ ID NO: 25067
  Cyclic GFR-binding peptide
  MOD_RES (1)..(2)..(34): Xaa is C or S

SEQ ID NO: 73455 - protein, 22 aa, Artificial Sequence
  Cyclic GFR-binding peptide
SSLSVLFFDSSNNVILKVYPNM

SEQ ID NO: 73456 - protein, 34 aa, Artificial Sequence; identical to SEQ ID NO: 25068
  Cyclic GFR-binding peptide
  MOD_RES (1)..(2)..(33): Xaa is C or S

SEQ ID NO: 73457 - protein, 24 aa, Artificial Sequence
  Cyclic GFR-binding peptide
LSSLSILFFVGRKPKVLKVYPMIV

SEQ ID NO: 73458 - protein, 31 aa, Artificial Sequence
  Cyclic GFR-binding peptide
  MOD_RES (1)..(1): Xaa is C or S
XQPSRVHHSSLSVLFFEYVRKKPKLLKVYPR

SEQ ID NO: 73459 - protein, 35 aa, Artificial Sequence; identical to SEQ ID NO: 25070
  Cyclic GFR-binding peptide
  MOD_RES (35)..(35): Xaa is C or S

SEQ ID NO: 73460 - protein, 36 aa, Artificial Sequence; identical to SEQ ID NO: 25069
  Cyclic GFR-binding peptide
  MOD_RES (3)..(4)..(36): Xaa is C or S

SEQ ID NO: 73461 - protein, 27 aa, Artificial Sequence
  Cyclic GFR-binding peptide
PTKLSSLSVLFFDDSSNVILKVYPNMV

SEQ ID NO: 73462 - protein, 31 aa, Artificial Sequence
  Cyclic GFR-binding peptide
  MOD_RES (4)..(5): Xaa is C or S
PKAXXVPTELSSLSMLFFDENEKVVLKVYPD

SEQ ID NO: 73463 - protein, 28 aa, Artificial Sequence
  Cyclic GFR-binding peptide
  MOD_RES (27)..(27): Xaa is C or S
LSSLSILFFVGRTPKVLKVYPMVVKSXK

SEQ ID NO: 73464 - protein, 23 aa, Artificial Sequence
  Cyclic GFR-binding peptide
TRLSSLSILFFDSANNVVLKVYP

SEQ ID NO: 73465 - protein, 36 aa, Artificial Sequence; identical to SEQ ID NO: 25072
  Cyclic GFR-binding peptide
  MOD_RES (5)..(6): Xaa is C or S

SEQ ID NO: 73466 - protein, 25 aa, Artificial Sequence
  Cyclic GFR-binding peptide
QLSSLSVLFFDDSSNVILKVYPNMV

SEQ ID NO: 73467 - protein, 36 aa, Artificial Sequence; identical to SEQ ID NO: 25073
  Cyclic GFR-binding peptide
  MOD_RES (2)..(36): Xaa is C or S

SEQ ID NO: 73468 - protein, 27 aa, Artificial Sequence
  Cyclic GFR-binding peptide
VPTEESSLSMLFFRIKPHQGQHLKVYP

SEQ ID NO: 73469 - protein, 29 aa, Artificial Sequence
  Cyclic GFR-binding peptide
  MOD_RES (29)..(29): Xaa is C or S
KLSSLSVLFFDSSNNVILKVYPNMVVKAX

SEQ ID NO: 73470 - protein, 32 aa, Artificial Sequence
  Cyclic GFR-binding peptide
  MOD_RES (4)..(5): Xaa is C or S
ASPXXVSQDLSSLSILFFIGKTPKILKVYPMI

SEQ ID NO: 73471 - protein, 35 aa, Artificial Sequence; identical to SEQ ID NO: 25076
  Cyclic GFR-binding peptide
  MOD_RES (1)..(2)..(33)..(35): Xaa is C or S

SEQ ID NO: 73472 - protein, 34 aa, Artificial Sequence; identical to SEQ ID NO: 25077
  Cyclic GFR-binding peptide

SEQ ID NO: 73473 - protein, 27 aa, Artificial Sequence
  Cyclic GFR-binding peptide
  MOD_RES (27)..(27): Xaa is C or S
SSLSVLFFDDSSNVILKVYPNMVVRSX

SEQ ID NO: 73474 - protein, 38 aa, Artificial Sequence; identical to SEQ ID NO: 25078
  Cyclic GFR-binding peptide
  MOD_RES (4)..(36)..(38): Xaa is C or S

SEQ ID NO: 73475 - protein, 30 aa, Artificial Sequence; identical to SEQ ID NO: 25079
  Cyclic GFR-binding peptide

SEQ ID NO: 73476 - protein, 29 aa, Artificial Sequence
  Cyclic GFR-binding peptide
SRVHHSSLSVLFFEYVRKKPKLLKVYPRL

SEQ ID NO: 73477 - protein, 29 aa, Artificial Sequence
  Cyclic GFR-binding peptide
PQALSSLSILFFVGRKPKVLKVYPMIVRS

SEQ ID NO: 73478 - protein, 37 aa, Artificial Sequence; identical to SEQ ID NO: 25082
  Cyclic GFR-binding peptide
  MOD_RES (1)..(2)..(34)..(36): Xaa is C or S

SEQ ID NO: 73479 - protein, 37 aa, Artificial Sequence; identical to SEQ ID NO: 25083
  Cyclic GFR-binding peptide
  MOD_RES (1)..(2)..(34)..(36): Xaa is C or S

SEQ ID NO: 73480 - protein, 40 aa, Artificial Sequence; identical to SEQ ID NO: 25084
  Cyclic GFR-binding peptide
  MOD_RES (5)..(37)..(39): Xaa is C or S

SEQ ID NO: 73481 - protein, 24 aa, Artificial Sequence
  Cyclic GFR-binding peptide
SSLSVLFFDSSNNVILKVYPNMVV

SEQ ID NO: 73482 - protein, 29 aa, Artificial Sequence
  Cyclic GFR-binding peptide
TPTKMSSLSMLFFNDKQQIILKVYPGMVV

SEQ ID NO: 73483 - protein, 31 aa, Artificial Sequence
  Cyclic GFR-binding peptide
  MOD_RES (28)..(30): Xaa is C or S
LSSLSVLFFDDSSNVILKVYPNMVVRAXGXH

SEQ ID NO: 73484 - protein, 28 aa, Artificial Sequence
  Cyclic GFR-binding peptide
TEESSLSMLFFRIKPHQGQHLKVYPFLQ

SEQ ID NO: 73485 - protein, 25 aa, Artificial Sequence
  Cyclic GFR-binding peptide
LSSLSVLFFDDSSNVILKVYPNMVV

SEQ ID NO: 73486 - protein, 28 aa, Artificial Sequence
  Cyclic GFR-binding peptide
KMSSLSMLFFNDKQQIILKVYPGMVVDR

SEQ ID NO: 73487 - protein, 25 aa, Artificial Sequence
  Cyclic GFR-binding peptide
VPTKLSSLSVLFFDDMGVPTLKVYP

SEQ ID NO: 73488 - protein, 31 aa, Artificial Sequence
  Cyclic GFR-binding peptide
  MOD_RES (4)..(5): Xaa is C or S
PKPXXAPTQLSSLSVLFFDDSSNVILKVYPN

SEQ ID NO: 73489 - protein, 31 aa, Artificial Sequence; identical to SEQ ID NO: 25089
  Cyclic GFR-binding peptide

SEQ ID NO: 73490 - protein, 31 aa, Artificial Sequence
  Cyclic GFR-binding peptide
  MOD_RES (5)..(6): Xaa is C or S
TPPTXXVPTRLSSLSILFFDSANNVVLKVYP

SEQ ID NO: 73491 - protein, 30 aa, Artificial Sequence
  Cyclic GFR-binding peptide
PTRLSSLSILFFDSANNVVLKVYPDMVVES

SEQ ID NO: 73492 - protein, 36 aa, Artificial Sequence; identical to SEQ ID NO: 25093
  Cyclic GFR-binding peptide
  MOD_RES (1)..(2)..(34)..(36): Xaa is C or S

SEQ ID NO: 73493 - protein, 37 aa, Artificial Sequence; identical to SEQ ID NO: 25094
  Cyclic GFR-binding peptide
  MOD_RES (2)..(3)..(35)..(37): Xaa is C or S

SEQ ID NO: 73494 - protein, 36 aa, Artificial Sequence; identical to SEQ ID NO: 25096
  Cyclic GFR-binding peptide
  MOD_RES (3)..(4)..(36): Xaa is C or S

SEQ ID NO: 73495 - protein, 42 aa, Artificial Sequence; identical to SEQ ID NO: 25097
  Cyclic GFR-binding peptide
  MOD_RES (6)..(7)..(39)..(41): Xaa is C or S

SEQ ID NO: 73496 - protein, 38 aa, Artificial Sequence; identical to SEQ ID NO: 25099
  Cyclic GFR-binding peptide
  MOD_RES (4)..(5)..(38): Xaa is C or S

SEQ ID NO: 73497 - protein, 24 aa, Artificial Sequence
  Cyclic GFR-binding peptide
LSSLSILFFIGKTPKILKVYPMIV

SEQ ID NO: 73498 - protein, 35 aa, Artificial Sequence
  Cyclic GFR-binding peptide
  MOD_RES (33)..(35): Xaa is C or S
VHHSSLSVLFFEYVRKKPKLLKVYPRLEEHLEXAX

SEQ ID NO: 73499 - protein, 23 aa, Artificial Sequence
  Cyclic GFR-binding peptide
SSLSILFFVGRTPKVLKVYPMVV

SEQ ID NO: 73500 - protein, 23 aa, Artificial Sequence
  Cyclic GFR-binding peptide
TELSSLSMLFFDENEKVVLKVYP

SEQ ID NO: 73501 - protein, 34 aa, Artificial Sequence; identical to SEQ ID NO: 25100
  Cyclic GFR-binding peptide
  MOD_RES (1)..(33): Xaa is C or S

SEQ ID NO: 73502 - protein, 30 aa, Artificial Sequence
  Cyclic GFR-binding peptide
  MOD_RES (29)..(29): Xaa is C or S
KLSSLSVLFFDSSNNVILKVYPNMVVKAXG

SEQ ID NO: 73503 - protein, 33 aa, Artificial Sequence; identical to SEQ ID NO: 25101
  Cyclic GFR-binding peptide

SEQ ID NO: 73504 - protein, 24 aa, Artificial Sequence
  Cyclic GFR-binding peptide
SSLSILFFVGRKPKVLKVYPMIVR

SEQ ID NO: 73505 - protein, 30 aa, Artificial Sequence
  Cyclic GFR-binding peptide
  MOD_RES (1)..(1): Xaa is C or S
XVPARLSSLSILFFDAANNVVLKVYPDMVV

SEQ ID NO: 73506 - protein, 29 aa, Artificial Sequence
  Cyclic GFR-binding peptide
  MOD_RES (29)..(29): Xaa is C or S
RLSSLSILFFDSANNVVLKVYPDMVVESX

SEQ ID NO: 73507 - protein, 30 aa, Artificial Sequence
  Cyclic GFR-binding peptide
  MOD_RES (3)..(4): Xaa is C or S
APXXVPQALSSLSILFFVGRKPKVLKVYPM

SEQ ID NO: 73508 - protein, 30 aa, Artificial Sequence
  Cyclic GFR-binding peptide
  MOD_RES (1)..(2): Xaa is C or S
XXAPTKLSSLSVLFFDDSSNVILKVYPNMV

SEQ ID NO: 73509 - protein, 36 aa, Artificial Sequence
  Cyclic GFR-binding peptide
  MOD_RES (6)..(7): Xaa is C or S
YVPKPXXAPTKLSSLSVLFFDDSSNVILKVYPNMVV

SEQ ID NO: 73510 - protein, 28 aa, Artificial Sequence
  Cyclic GFR-binding peptide
APVKTSSLSMLFFDNGRVLLLKVYPMIV

SEQ ID NO: 73511 - protein, 29 aa, Artificial Sequence
  Cyclic GFR-binding peptide
  MOD_RES (28)..(28): Xaa is C or S
LSSLSVLFFDDSSNVILKVYPNMVVRAXG

SEQ ID NO: 73512 - protein, 30 aa, Artificial Sequence
  Cyclic GFR-binding peptide
  MOD_RES (1)..(2): Xaa is C or S
XXAPTKLSSLSVLFFDSSNNVILKVYPNMV

SEQ ID NO: 73513 - protein, 29 aa, Artificial Sequence
  Cyclic GFR-binding peptide
VPTELSSLSMLFFDEYDKVVLKVYPEMVV

SEQ ID NO: 73514 - protein, 23 aa, Artificial Sequence
  Cyclic GFR-binding peptide
SSLSMLFFDEYDKVVLKVYPEMV

SEQ ID NO: 73515 - protein, 27 aa, Artificial Sequence
  Cyclic GFR-binding peptide
LSSLSVLFFDDSSNVILKVYPNMVVRS

SEQ ID NO: 73516 - protein, 29 aa, Artificial Sequence
  Cyclic GFR-binding peptide
ARLSSLSILFFDAANNVVLKVYPDMVVEA

SEQ ID NO: 73517 - protein, 33 aa, Artificial Sequence
  Cyclic GFR-binding peptide
  MOD_RES (6)..(7): Xaa is C or S
RVPSTXXAPVKTSSLSMLFFDNGRVLLLKVYPM

SEQ ID NO: 73518 - protein, 35 aa, Artificial Sequence; identical to SEQ ID NO: 25106
  Cyclic GFR-binding peptide
  MOD_RES (1)..(33)..(35): Xaa is C or S

SEQ ID NO: 73519 - protein, 35 aa, Artificial Sequence
  Cyclic GFR-binding peptide
  MOD_RES (6)..(7): Xaa is C or S
ASASPXXVPQDLSSLSILFFVGRTPKVLKVYPMVV

SEQ ID NO: 73520 - protein, 40 aa, Artificial Sequence; identical to SEQ ID NO: 25107
  Cyclic GFR-binding peptide
  MOD_RES (6)..(7)..(39): Xaa is C or S

SEQ ID NO: 73521 - protein, 28 aa, Artificial Sequence
  Cyclic GFR-binding peptide
  MOD_RES (1)..(2): Xaa is C or S
XXVSQDLSSLSILFFIGKTPKILKVYPM

SEQ ID NO: 73522 - protein, 34 aa, Artificial Sequence; identical to SEQ ID NO: 25108
  Cyclic GFR-binding peptide
  MOD_RES (1)..(2)..(33): Xaa is C or S

SEQ ID NO: 73523 - protein, 27 aa, Artificial Sequence
  Cyclic GFR-binding peptide
APTQLSSLSVLFFDDSSNVILKVYPNM

SEQ ID NO: 73524 - protein, 33 aa, Artificial Sequence; identical to SEQ ID NO: 25109
  Cyclic GFR-binding peptide
  MOD_RES (2)..(2): Xaa is C or S

SEQ ID NO: 73525 - protein, 32 aa, Artificial Sequence
  Cyclic GFR-binding peptide
  MOD_RES (2)..(2): Xaa is C or S
KXQPSRVHHSSLSVLFFEYVRKKPKLLKVYPR

SEQ ID NO: 73526 - protein, 32 aa, Artificial Sequence
  Cyclic GFR-binding peptide
  MOD_RES (5)..(5): Xaa is C or S
EGLEXVPTEESSLSMLFFRIKPHQGQHLKVYP

SEQ ID NO: 73527 - protein, 31 aa, Artificial Sequence
  Cyclic GFR-binding peptide
  MOD_RES (1)..(2): Xaa is C or S
XXVPTKLSSLSILFFDKGVVTYLKVYPGMAV

SEQ ID NO: 73528 - protein, 27 aa, Artificial Sequence
  Cyclic GFR-binding peptide
LSSLSVLFFDDSSNVILKVYPNMVVRA

SEQ ID NO: 73529 - protein, 27 aa, Artificial Sequence
  Cyclic GFR-binding peptide
TELSSLSMLFFDENEKVVLKVYPDMVV

SEQ ID NO: 73530 - protein, 33 aa, Artificial Sequence; identical to SEQ ID NO: 25112
  Cyclic GFR-binding peptide
  MOD_RES (2)..(3): Xaa is C or S

SEQ ID NO: 73531 - protein, 24 aa, Artificial Sequence
  Cyclic GFR-binding peptide
SSLSILFFDSANNVVLKVYPDMVV

SEQ ID NO: 73532 - protein, 28 aa, Artificial Sequence
  Cyclic GFR-binding peptide
  MOD_RES (2)..(3): Xaa is C or S
AXXAPTKLSSLSVLFFDSSNNVILKVYP

SEQ ID NO: 73533 - protein, 24 aa, Artificial Sequence
  Cyclic GFR-binding peptide
SSLSVLFFEYVRKKPKLLKVYPRL

SEQ ID NO: 73534 - protein, 39 aa, Artificial Sequence; identical to SEQ ID NO: 25113
  Cyclic GFR-binding peptide
  MOD_RES (6)..(7)..(39): Xaa is C or S

SEQ ID NO: 73535 - protein, 31 aa, Artificial Sequence
  Cyclic GFR-binding peptide
  MOD_RES (31)..(31): Xaa is C or S
PTKLSSLSVLFFDSSNNVILKVYPNMVVKAX

SEQ ID NO: 73536 - protein, 31 aa, Artificial Sequence
  Cyclic GFR-binding peptide
  MOD_RES (29)..(31): Xaa is C or S
QDLSSLSILFFIGKTPKILKVYPMIVKSXKX

SEQ ID NO: 73537 - protein, 27 aa, Artificial Sequence
  Cyclic GFR-binding peptide
TKLSSLSVLFFDDSSNVILKVYPNMVV

SEQ ID NO: 73538 - protein, 37 aa, Artificial Sequence; identical to SEQ ID NO: 25116
  Cyclic GFR-binding peptide
  MOD_RES (4)..(5)..(36): Xaa is C or S

SEQ ID NO: 73539 - protein, 36 aa, Artificial Sequence; identical to SEQ ID NO: 25118
  Cyclic GFR-binding peptide
  MOD_RES (3)..(4): Xaa is C or S

SEQ ID NO: 73540 - protein, 33 aa, Artificial Sequence
  Cyclic GFR-binding peptide
  MOD_RES (4)..(5): Xaa is C or S
ASPXXVSQDLSSLSILFFIGKTPKILKVYPMIV

SEQ ID NO: 73541 - protein, 31 aa, Artificial Sequence
  Cyclic GFR-binding peptide
  MOD_RES (30)..(30): Xaa is C or S
SQDLSSLSILFFIGKTPKILKVYPMIVKSXK

SEQ ID NO: 73542 - protein, 28 aa, Artificial Sequence
  Cyclic GFR-binding peptide
ESSLSMLFFRIKPHQGQHLKVYPFLQHN

SEQ ID NO: 73543 - protein, 26 aa, Artificial Sequence
  Cyclic GFR-binding peptide
KLSSLSVLFFDDSSNVILKVYPNMVV

SEQ ID NO: 73544 - protein, 36 aa, Artificial Sequence; identical to SEQ ID NO: 25119
  Cyclic GFR-binding peptide
  MOD_RES (2)..(3)..(35): Xaa is C or S

SEQ ID NO: 73545 - protein, 31 aa, Artificial Sequence
  Cyclic GFR-binding peptide
  MOD_RES (4)..(5): Xaa is C or S
GKAXXVPTKLSSLSVLFFDDMGVPTLKVYPE

SEQ ID NO: 73546 - protein, 39 aa, Artificial Sequence; identical to SEQ ID NO: 25120
  Cyclic GFR-binding peptide
  MOD_RES (4)..(5)..(37)..(39): Xaa is C or S

SEQ ID NO: 73547 - protein, 39 aa, Artificial Sequence; identical to SEQ ID NO: 25122
  Cyclic GFR-binding peptide
  MOD_RES (36)..(38): Xaa is C or S

SEQ ID NO: 73548 - protein, 29 aa, Artificial Sequence
  Cyclic GFR-binding peptide
  MOD_RES (27)..(29): Xaa is C or S
SSLSMLFFDEYDKVVLKVYPEMVVEGXGX

SEQ ID NO: 73549 - protein, 22 aa, Artificial Sequence
  Cyclic GFR-binding peptide
TSSLSMLFFDNGRVLLLKVYPM

SEQ ID NO: 73550 - protein, 32 aa, Artificial Sequence; identical to SEQ ID NO: 25124
  Cyclic GFR-binding peptide
  MOD_RES (1)..(2): Xaa is C or S

SEQ ID NO: 73551 - protein, 33 aa, Artificial Sequence
  Cyclic GFR-binding peptide
  MOD_RES (2)..(3): Xaa is C or S
AXXVPTELSSLSMLFFDENEKVVLKVYPDMVVE

SEQ ID NO: 73552 - protein, 29 aa, Artificial Sequence
  Cyclic GFR-binding peptide
  MOD_RES (1)..(2): Xaa is C or S
XXAPVKTSSLSMLFFDNGRVLLLKVYPMI

SEQ ID NO: 73553 - protein, 22 aa, Artificial Sequence
  Cyclic GFR-binding peptide
SSLSMLFFDNGRVLLLKVYPMI

SEQ ID NO: 73554 - protein, 28 aa, Artificial Sequence
  Cyclic GFR-binding peptide
APTKLSSLSVLFFDSSNNVILKVYPNMV

SEQ ID NO: 73555 - protein, 30 aa, Artificial Sequence
  Cyclic GFR-binding peptide
  MOD_RES (4)..(5): Xaa is C or S
ASPXXVSQDLSSLSILFFIGKTPKILKVYP

SEQ ID NO: 73556 - protein, 29 aa, Artificial Sequence
  Cyclic GFR-binding peptide
  MOD_RES (2)..(2): Xaa is C or S
EXVPTEESSLSMLFFRIKPHQGQHLKVYP

SEQ ID NO: 73557 - protein, 32 aa, Artificial Sequence
  Cyclic GFR-binding peptide
  MOD_RES (3)..(4): Xaa is C or S
SPXXVPQDLSSLSILFFVGRTPKVLKVYPMVV

SEQ ID NO: 73558 - protein, 29 aa, Artificial Sequence
  Cyclic GFR-binding peptide
ESSLSMLFFRIKPHQGQHLKVYPFLQHNK

SEQ ID NO: 73559 - protein, 31 aa, Artificial Sequence; identical to SEQ ID NO: 25125
  Cyclic GFR-binding peptide
  MOD_RES (1)..(1): Xaa is C or S

SEQ ID NO: 73560 - protein, 36 aa, Artificial Sequence; identical to SEQ ID NO: 25126
  Cyclic GFR-binding peptide

SEQ ID NO: 73561 - protein, 25 aa, Artificial Sequence
  Cyclic GFR-binding peptide
SSLSMLFFRIKPHQGQHLKVYPFLQ

SEQ ID NO: 73562 - protein, 25 aa, Artificial Sequence
  Cyclic GFR-binding peptide
PVKTSSLSMLFFDNGRVLLLKVYPM

SEQ ID NO: 73563 - protein, 29 aa, Artificial Sequence
  Cyclic GFR-binding peptide
  MOD_RES (1)..(1): Xaa is C or S
XVPTRLSSLSILFFDSANNVVLKVYPDMV

SEQ ID NO: 73564 - protein, 40 aa, Artificial Sequence; identical to SEQ ID NO: 25131
  Cyclic GFR-binding peptide
  MOD_RES (6)..(7)..(39): Xaa is C or S

SEQ ID NO: 73565 - protein, 24 aa, Artificial Sequence
  Cyclic GFR-binding peptide
VKTSSLSMLFFDNGRVLLLKVYPM

SEQ ID NO: 73566 - protein, 28 aa, Artificial Sequence
  Cyclic GFR-binding peptide
  MOD_RES (2)..(3): Xaa is C or S
AXXVPTKLSSLSILFFDKGVVTYLKVYP

SEQ ID NO: 73567 - protein, 32 aa, Artificial Sequence; identical to SEQ ID NO: 25133
  Cyclic GFR-binding peptide
  MOD_RES (32)..(32): Xaa is C or S

SEQ ID NO: 73568 - protein, 31 aa, Artificial Sequence
  Cyclic GFR-binding peptide
  MOD_RES (29)..(31): Xaa is C or S
KLSSLSILFFDKGVVTYLKVYPGMAVSEXGX

SEQ ID NO: 73569 - protein, 29 aa, Artificial Sequence
  Cyclic GFR-binding peptide
TQLSSLSVLFFDDSSNVILKVYPNMVVRA

SEQ ID NO: 73570 - protein, 33 aa, Artificial Sequence
  Cyclic GFR-binding peptide
  MOD_RES (5)..(6): Xaa is C or S
SAAPXXVPQALSSLSILFFVGRKPKVLKVYPMI

SEQ ID NO: 73571 - protein, 33 aa, Artificial Sequence
  Cyclic GFR-binding peptide
  MOD_RES (6)..(7): Xaa is C or S
KASKAXXVPTKLSSLSILFFDKGVVTYLKVYPG

SEQ ID NO: 73572 - protein, 26 aa, Artificial Sequence
  Cyclic GFR-binding peptide
SSLSVLFFDSSNNVILKVYPNMVVKA

SEQ ID NO: 73573 - protein, 33 aa, Artificial Sequence; identical to SEQ ID NO: 25134
  Cyclic GFR-binding peptide
  MOD_RES (1)..(2): Xaa is C or S

SEQ ID NO: 73574 - protein, 23 aa, Artificial Sequence
  Cyclic GFR-binding peptide
TSSLSMLFFDNGRVLLLKVYPMI

SEQ ID NO: 73575 - protein, 29 aa, Artificial Sequence
  Cyclic GFR-binding peptide
  MOD_RES (1)..(1): Xaa is C or S
XVPQALSSLSILFFVGRKPKVLKVYPMIV

SEQ ID NO: 73576 - protein, 36 aa, Artificial Sequence; identical to SEQ ID NO: 25137
  Cyclic GFR-binding peptide
  MOD_RES (5)..(5): Xaa is C or S

SEQ ID NO: 73577 - protein, 34 aa, Artificial Sequence; identical to SEQ ID NO: 25138
  Cyclic GFR-binding peptide
  MOD_RES (2)..(2): Xaa is C or S

SEQ ID NO: 73578 - protein, 23 aa, Artificial Sequence
  Cyclic GFR-binding peptide
SSLSILFFDAANNVVLKVYPDMV

SEQ ID NO: 73579 - protein, 32 aa, Artificial Sequence; identical to SEQ ID NO: 25140
  Cyclic GFR-binding peptide
  MOD_RES (1)..(2): Xaa is C or S

SEQ ID NO: 73580 - protein, 27 aa, Artificial Sequence
  Cyclic GFR-binding peptide
  MOD_RES (1)..(1): Xaa is C or S
XVPTKLSSLSVLFFDDMGVPTLKVYPE

SEQ ID NO: 73581 - protein, 24 aa, Artificial Sequence
  Cyclic GFR-binding peptide
KLSSLSVLFFDDSSNVILKVYPNM

SEQ ID NO: 73582 - protein, 35 aa, Artificial Sequence
  Cyclic GFR-binding peptide
  MOD_RES (6)..(7): Xaa is C or S
KVGKAXXVPTKLSSLSVLFFDDMGVPTLKVYPEGM

SEQ ID NO: 73583 - protein, 24 aa, Artificial Sequence
  Cyclic GFR-binding peptide
SSLSMLFFNDKQQIILKVYPGMVV

SEQ ID NO: 73584 - protein, 22 aa, Artificial Sequence
  Cyclic GFR-binding peptide
SSLSVLFFEYVRKKPKLLKVYP

SEQ ID NO: 73585 - protein, 20 aa, Artificial Sequence
  Cyclic GFR-binding peptide
SSLSMLFFDNGRVLLLKVYP

SEQ ID NO: 73586 - protein, 24 aa, Artificial Sequence
  Cyclic GFR-binding peptide
ALSSLSILFFVGRKPKVLKVYPMI

SEQ ID NO: 73587 - protein, 27 aa, Artificial Sequence
  Cyclic GFR-binding peptide
  MOD_RES (1)..(1): Xaa is C or S
XAPTQLSSLSVLFFDDSSNVILKVYPN

SEQ ID NO: 73588 - protein, 37 aa, Artificial Sequence; identical to SEQ ID NO: 25144
  Cyclic GFR-binding peptide
  MOD_RES (4)..(5)..(37): Xaa is C or S

SEQ ID NO: 73589 - protein, 35 aa, Artificial Sequence
  Cyclic GFR-binding peptide
  MOD_RES (7)..(7): Xaa is C or S
HVTKPTXAPTKLSSLSVLFFDDSSNVILKVYPNMV

SEQ ID NO: 73590 - protein, 31 aa, Artificial Sequence
  Cyclic GFR-binding peptide
  MOD_RES (31)..(31): Xaa is C or S
EESSLSMLFFRIKPHQGQHLKVYPFLQHNKX

SEQ ID NO: 73591 - protein, 42 aa, Artificial Sequence; identical to SEQ ID NO: 25146
  Cyclic GFR-binding peptide
  MOD_RES (6)..(7)..(39)..(41): Xaa is C or S

SEQ ID NO: 73592 - protein, 30 aa, Artificial Sequence
  Cyclic GFR-binding peptide
  MOD_RES (28)..(30): Xaa is C or S
SSLSVLFFDDMGVPTLKVYPEGMSVAEXGX

SEQ ID NO: 73593 - protein, 21 aa, Artificial Sequence
  Cyclic GFR-binding peptide
LSSLSVLFFDDMGVPTLKVYP

SEQ ID NO: 73594 - protein, 35 aa, Artificial Sequence
  Cyclic GFR-binding peptide
  MOD_RES (5)..(6): Xaa is C or S
ASKAXXVPTKLSSLSILFFDKGVVTYLKVYPGMAV

SEQ ID NO: 73595 - protein, 36 aa, Artificial Sequence
  Cyclic GFR-binding peptide
  MOD_RES (6)..(7): Xaa is C or S
KASKAXXVPTKLSSLSILFFDKGVVTYLKVYPGMAV

SEQ ID NO: 73596 - protein, 34 aa, Artificial Sequence; identical to SEQ ID NO: 25151
  Cyclic GFR-binding peptide
  MOD_RES (2)..(3)..(34): Xaa is C or S

SEQ ID NO: 73597 - protein, 23 aa, Artificial Sequence
  Cyclic GFR-binding peptide
KLSSLSVLFFDSSNNVILKVYPN

SEQ ID NO: 73598 - protein, 34 aa, Artificial Sequence; identical to SEQ ID NO: 25152
  Cyclic GFR-binding peptide
  MOD_RES (1)..(32)..(34): Xaa is C or S

SEQ ID NO: 73599 - protein, 26 aa, Artificial Sequence
  Cyclic GFR-binding peptide
DLSSLSILFFIGKTPKILKVYPMIVK

SEQ ID NO: 73600 - protein, 35 aa, Artificial Sequence; identical to SEQ ID NO: 25154
  Cyclic GFR-binding peptide
  MOD_RES (4)..(5): Xaa is C or S

SEQ ID NO: 73601 - protein, 31 aa, Artificial Sequence
  Cyclic GFR-binding peptide
  MOD_RES (5)..(6): Xaa is C or S
ASKAXXVPTKLSSLSILFFDKGVVTYLKVYP

SEQ ID NO: 73602 - protein, 28 aa, Artificial Sequence
  Cyclic GFR-binding peptide
VHHSSLSVLFFEYVRKKPKLLKVYPRLE

SEQ ID NO: 73603 - protein, 34 aa, Artificial Sequence; identical to SEQ ID NO: 25156
  Cyclic GFR-binding peptide
  MOD_RES (2)..(3): Xaa is C or S

SEQ ID NO: 73604 - protein, 29 aa, Artificial Sequence
  Cyclic GFR-binding peptide
  MOD_RES (2)..(2): Xaa is C or S
TXAPTKLSSLSVLFFDDSSNVILKVYPNM

SEQ ID NO: 73605 - protein, 36 aa, Artificial Sequence
  Cyclic GFR-binding peptide
  MOD_RES (6)..(7): Xaa is C or S
ASAAPXXVPQALSSLSILFFVGRKPKVLKVYPMIVR

SEQ ID NO: 73606 - protein, 31 aa, Artificial Sequence
  Cyclic GFR-binding peptide
  MOD_RES (29)..(31): Xaa is C or S
KLSSLSVLFFDSSNNVILKVYPNMVVKAXGX

SEQ ID NO: 73607 - protein, 33 aa, Artificial Sequence
  Cyclic GFR-binding peptide
  MOD_RES (31)..(33): Xaa is C or S
PTRLSSLSILFFDSANNVVLKVYPDMVVESXGX

SEQ ID NO: 73608 - protein, 30 aa, Artificial Sequence
  Cyclic GFR-binding peptide
  MOD_RES (1)..(1): Xaa is C or S
XAPTKLSSLSVLFFDSSNNVILKVYPNMVV

SEQ ID NO: 73609 - protein, 34 aa, Artificial Sequence
  Cyclic GFR-binding peptide
  MOD_RES (5)..(6): Xaa is C or S
VPKAXXAPTKLSSLSVLFFDSSNNVILKVYPNMV

SEQ ID NO: 73610 - protein, 29 aa, Artificial Sequence
  Cyclic GFR-binding peptide
HSSLSVLFFEYVRKKPKLLKVYPRLEEHL

SEQ ID NO: 73611 - protein, 28 aa, Artificial Sequence
  Cyclic GFR-binding peptide
  MOD_RES (2)..(3): Xaa is C or S
TXXAPVKTSSLSMLFFDNGRVLLLKVYP

SEQ ID NO: 73612 - protein, 39 aa, Artificial Sequence; identical to SEQ ID NO: 25162
  Cyclic GFR-binding peptide
  MOD_RES (2)..(36)..(38): Xaa is C or S

SEQ ID NO: 73613 - protein, 37 aa, Artificial Sequence; identical to SEQ ID NO: 25163
  Cyclic GFR-binding peptide
  MOD_RES (5)..(6)..(37): Xaa is C or S

SEQ ID NO: 73614 - protein, 30 aa, Artificial Sequence
  Cyclic GFR-binding peptide
  MOD_RES (2)..(3): Xaa is C or S
PXXAPTQLSSLSVLFFDDSSNVILKVYPNM

SEQ ID NO: 73615 - protein, 29 aa, Artificial Sequence
  Cyclic GFR-binding peptide
  MOD_RES (3)..(4): Xaa is C or S
APXXVPQALSSLSILFFVGRKPKVLKVYP

SEQ ID NO: 73616 - protein, 39 aa, Artificial Sequence; identical to SEQ ID NO: 25164
  Cyclic GFR-binding peptide
  MOD_RES (5)..(37)..(39): Xaa is C or S

SEQ ID NO: 73617 - protein, 38 aa, Artificial Sequence; identical to SEQ ID NO: 25165
  Cyclic GFR-binding peptide
  MOD_RES (6)..(7): Xaa is C or S

SEQ ID NO: 73618 - protein, 32 aa, Artificial Sequence; identical to SEQ ID NO: 25166
  Cyclic GFR-binding peptide
  MOD_RES (32)..(32): Xaa is C or S

SEQ ID NO: 73619 - protein, 34 aa, Artificial Sequence; identical to SEQ ID NO: 25167
  Cyclic GFR-binding peptide
  MOD_RES (1)..(2)..(34): Xaa is C or S

SEQ ID NO: 73620 - protein, 27 aa, Artificial Sequence
  Cyclic GFR-binding peptide
APTKLSSLSVLFFDSSNNVILKVYPNM

SEQ ID NO: 73621 - protein, 36 aa, Artificial Sequence; identical to SEQ ID NO: 25169
  Cyclic GFR-binding peptide
  MOD_RES (4)..(5): Xaa is C or S

SEQ ID NO: 73622 - protein, 31 aa, Artificial Sequence
  Cyclic GFR-binding peptide
  MOD_RES (1)..(2): Xaa is C or S
XXAPTQLSSLSVLFFDDSSNVILKVYPNMVV

SEQ ID NO: 73623 - protein, 34 aa, Artificial Sequence
  Cyclic GFR-binding peptide
  MOD_RES (6)..(7): Xaa is C or S
AAPASXXVPARLSSLSILFFDAANNVVLKVYPDM

SEQ ID NO: 73624 - protein, 34 aa, Artificial Sequence
  Cyclic GFR-binding peptide
  MOD_RES (5)..(6): Xaa is C or S
TPPTXXVPTRLSSLSILFFDSANNVVLKVYPDMV

SEQ ID NO: 73625 - protein, 33 aa, Artificial Sequence
  Cyclic GFR-binding peptide
  MOD_RES (5)..(6): Xaa is C or S
VPKAXXAPTKLSSLSVLFFDSSNNVILKVYPNM

SEQ ID NO: 73626 - protein, 35 aa, Artificial Sequence; identical to SEQ ID NO: 25171
  Cyclic GFR-binding peptide
  MOD_RES (2)..(3): Xaa is C or S

SEQ ID NO: 73627 - protein, 32 aa, Artificial Sequence
  Cyclic GFR-binding peptide
  MOD_RES (4)..(5): Xaa is C or S
SKAXXVPTKLSSLSILFFDKGVVTYLKVYPGM

SEQ ID NO: 73628 - protein, 28 aa, Artificial Sequence
  Cyclic GFR-binding peptide
TKLSSLSVLFFDDMGVPTLKVYPEGMSV

SEQ ID NO: 73629 - protein, 31 aa, Artificial Sequence; identical to SEQ ID NO: 25172
  Cyclic GFR-binding peptide

SEQ ID NO: 73630 - protein, 32 aa, Artificial Sequence
  Cyclic GFR-binding peptide
  MOD_RES (31)..(31): Xaa is C or S
PTELSSLSMLFFDENEKVVLKVYPDMVVEGXG

SEQ ID NO: 73631 - protein, 35 aa, Artificial Sequence; identical to SEQ ID NO: 25173
  Cyclic GFR-binding peptide
  MOD_RES (1)..(32)..(34): Xaa is C or S

SEQ ID NO: 73632 - protein, 24 aa, Artificial Sequence
  Cyclic GFR-binding peptide
SQDLSSLSILFFIGKTPKILKVYP

SEQ ID NO: 73633 - protein, 29 aa, Artificial Sequence
  Cyclic GFR-binding peptide
SSLSVLFFEYVRKKPKLLKVYPRLEEHLE

SEQ ID NO: 73634 - protein, 32 aa, Artificial Sequence; identical to SEQ ID NO: 25174
  Cyclic GFR-binding peptide
  MOD_RES (32)..(32): Xaa is C or S

SEQ ID NO: 73635 - protein, 28 aa, Artificial Sequence
  Cyclic GFR-binding peptide
RVHHSSLSVLFFEYVRKKPKLLKVYPRL

SEQ ID NO: 73636 - protein, 29 aa, Artificial Sequence
  Cyclic GFR-binding peptide
  MOD_RES (27)..(29): Xaa is C or S
TSSLSMLFFDNGRVLLLKVYPMIVEEXGX

SEQ ID NO: 73637 - protein, 25 aa, Artificial Sequence
  Cyclic GFR-binding peptide
PQDLSSLSILFFVGRTPKVLKVYPM

SEQ ID NO: 73638 - protein, 32 aa, Artificial Sequence
  Cyclic GFR-binding peptide
  MOD_RES (3)..(4): Xaa is C or S
KPXXAPTQLSSLSVLFFDDSSNVILKVYPNMV

SEQ ID NO: 73639 - protein, 38 aa, Artificial Sequence; identical to SEQ ID NO: 25179
  Cyclic GFR-binding peptide
  MOD_RES (4)..(5)..(37): Xaa is C or S

SEQ ID NO: 73640 - protein, 30 aa, Artificial Sequence
  Cyclic GFR-binding peptide
  MOD_RES (1)..(2): Xaa is C or S
XXVPQDLSSLSILFFVGRTPKVLKVYPMVV

SEQ ID NO: 73641 - protein, 35 aa, Artificial Sequence; identical to SEQ ID NO: 25180
  Cyclic GFR-binding peptide
  MOD_RES (3)..(4): Xaa is C or S

SEQ ID NO: 73642 - protein, 36 aa, Artificial Sequence; identical to SEQ ID NO: 25181
  Cyclic GFR-binding peptide
  MOD_RES (1)..(2)..(33)..(35): Xaa is C or S

SEQ ID NO: 73643 - protein, 30 aa, Artificial Sequence
  Cyclic GFR-binding peptide
  MOD_RES (1)..(1): Xaa is C or S
XVPTELSSLSMLFFDEYDKVVLKVYPEMVV

SEQ ID NO: 73644 - protein, 29 aa, Artificial Sequence
  Cyclic GFR-binding peptide
TKLSSLSVLFFDDMGVPTLKVYPEGMSVA

SEQ ID NO: 73645 - protein, 39 aa, Artificial Sequence; identical to SEQ ID NO: 25182
  Cyclic GFR-binding peptide
  MOD_RES (3)..(4)..(36)..(38): Xaa is C or S

SEQ ID NO: 73646 - protein, 30 aa, Artificial Sequence
  Cyclic GFR-binding peptide
  MOD_RES (1)..(1): Xaa is C or S
XTPTKMSSLSMLFFNDKQQIILKVYPGMVV

SEQ ID NO: 73647 - protein, 24 aa, Artificial Sequence
  Cyclic GFR-binding peptide
PQALSSLSILFFVGRKPKVLKVYP

SEQ ID NO: 73648 - protein, 24 aa, Artificial Sequence
  Cyclic GFR-binding peptide
SSLSMLFFRIKPHQGQHLKVYPFL

SEQ ID NO: 73649 - protein, 36 aa, Artificial Sequence; identical to SEQ ID NO: 25183
  Cyclic GFR-binding peptide
  MOD_RES (1)..(2)..(34)..(36): Xaa is C or S

SEQ ID NO: 73650 - protein, 27 aa, Artificial Sequence
  Cyclic GFR-binding peptide
  MOD_RES (27)..(27): Xaa is C or S
LSSLSILFFVGRKPKVLKVYPMIVRSX

SEQ ID NO: 73651 - protein, 32 aa, Artificial Sequence
  Cyclic GFR-binding peptide
  MOD_RES (2)..(3): Xaa is C or S
PXXAPTQLSSLSVLFFDDSSNVILKVYPNMVV

SEQ ID NO: 73652 - protein, 37 aa, Artificial Sequence; identical to SEQ ID NO: 25184
  Cyclic GFR-binding peptide
  MOD_RES (5)..(37): Xaa is C or S

SEQ ID NO: 73653 - protein, 20 aa, Artificial Sequence
  Cyclic GFR-binding peptide
SSLSMLFFDENEKVVLKVYP

SEQ ID NO: 73654 - protein, 28 aa, Artificial Sequence
  Cyclic GFR-binding peptide
  MOD_RES (1)..(2): Xaa is C or S
XXVPQALSSLSILFFVGRKPKVLKVYPM

SEQ ID NO: 73655 - protein, 28 aa, Artificial Sequence
  Cyclic GFR-binding peptide
  MOD_RES (1)..(1): Xaa is C or S
XAPVKTSSLSMLFFDNGRVLLLKVYPMI

SEQ ID NO: 73656 - protein, 22 aa, Artificial Sequence
  Cyclic GFR-binding peptide
KTSSLSMLFFDNGRVLLLKVYP

SEQ ID NO: 73657 - protein, 26 aa, Artificial Sequence
  Cyclic GFR-binding peptide
RLSSLSILFFDAANNVVLKVYPDMVV

SEQ ID NO: 73658 - protein, 36 aa, Artificial Sequence; identical to SEQ ID NO: 25188
  Cyclic GFR-binding peptide
  MOD_RES (1)..(33)..(35): Xaa is C or S

SEQ ID NO: 73659 - protein, 27 aa, Artificial Sequence
  Cyclic GFR-binding peptide
VPQALSSLSILFFVGRKPKVLKVYPMI

SEQ ID NO: 73660 - protein, 33 aa, Artificial Sequence; identical to SEQ ID NO: 25189
  Cyclic GFR-binding peptide
  MOD_RES (1)..(33): Xaa is C or S

SEQ ID NO: 73661 - protein, 35 aa, Artificial Sequence; identical to SEQ ID NO: 25191
  Cyclic GFR-binding peptide
  MOD_RES (32)..(34): Xaa is C or S

SEQ ID NO: 73662 - protein, 38 aa, Artificial Sequence; identical to SEQ ID NO: 25192
  Cyclic GFR-binding peptide
  MOD_RES (37)..(37): Xaa is C or S

SEQ ID NO: 73663 - protein, 35 aa, Artificial Sequence
  Cyclic GFR-binding peptide
  MOD_RES (5)..(6): Xaa is C or S
SAAPXXVPQALSSLSILFFVGRKPKVLKVYPMIVR

SEQ ID NO: 73664 - protein, 36 aa, Artificial Sequence; identical to SEQ ID NO: 25195
  Cyclic GFR-binding peptide
  MOD_RES (2)..(3)..(35): Xaa is C or S

SEQ ID NO: 73665 - protein, 38 aa, Artificial Sequence; identical to SEQ ID NO: 25196
  Cyclic GFR-binding peptide
  MOD_RES (5)..(6)..(37): Xaa is C or S

SEQ ID NO: 73666 - protein, 39 aa, Artificial Sequence; identical to SEQ ID NO: 25198
  Cyclic GFR-binding peptide
  MOD_RES (6)..(38): Xaa is C or S

SEQ ID NO: 73667 - protein, 37 aa, Artificial Sequence
  Cyclic GFR-binding peptide
  MOD_RES (3)..(4)..(36): Xaa is C or S
KAXXVPTELSSLSMLFFDENEKVVLKVYPDMVVEGXG

SEQ ID NO: 73668 - protein, 34 aa, Artificial Sequence; identical to SEQ ID NO: 25199
  Cyclic GFR-binding peptide
  MOD_RES (2)..(34): Xaa is C or S

SEQ ID NO: 73669 - protein, 36 aa, Artificial Sequence
  Cyclic GFR-binding peptide
  MOD_RES (5)..(6): Xaa is C or S
IPKAXXVPTELSSLSMLFFDENEKVVLKVYPDMVVE

SEQ ID NO: 73670 - protein, 26 aa, Artificial Sequence
  Cyclic GFR-binding peptide
ELSSLSMLFFDENEKVVLKVYPDMVV

SEQ ID NO: 73671 - protein, 40 aa, Artificial Sequence; identical to SEQ ID NO: 25200
  Cyclic GFR-binding peptide
  MOD_RES (3)..(40): Xaa is C or S

SEQ ID NO: 73672 - protein, 31 aa, Artificial Sequence
  Cyclic GFR-binding peptide
  MOD_RES (1)..(2): Xaa is C or S
XXAPVKTSSLSMLFFDNGRVLLLKVYPMIVE

SEQ ID NO: 73673 - protein, 37 aa, Artificial Sequence; identical to SEQ ID NO: 25201
  Cyclic GFR-binding peptide
  MOD_RES (2)..(34)..(36): Xaa is C or S

SEQ ID NO: 73674 - protein, 29 aa, Artificial Sequence
  Cyclic GFR-binding peptide
  MOD_RES (2)..(3): Xaa is C or S
TXXAPVKTSSLSMLFFDNGRVLLLKVYPM

SEQ ID NO: 73675 - protein, 33 aa, Artificial Sequence
  Cyclic GFR-binding peptide
  MOD_RES (6)..(7): Xaa is C or S
SIPKAXXVPTELSSLSMLFFDEYDKVVLKVYPE

SEQ ID NO: 73676 - protein, 40 aa, Artificial Sequence; identical to SEQ ID NO: 25202
  Cyclic GFR-binding peptide
  MOD_RES (4)..(5)..(37)..(39): Xaa is C or S

SEQ ID NO: 73677 - protein, 32 aa, Artificial Sequence
  Cyclic GFR-binding peptide
  MOD_RES (31)..(31): Xaa is C or S
PARLSSLSILFFDAANNVVLKVYPDMVVEAXG

SEQ ID NO: 73678 - protein, 20 aa, Artificial Sequence
  Cyclic GFR-binding peptide
SSLSMLFFDEYDKVVLKVYP

SEQ ID NO: 73679 - protein, 30 aa, Artificial Sequence
  Cyclic GFR-binding peptide
  MOD_RES (4)..(5): Xaa is C or S
PKAXXAPTKLSSLSVLFFDSSNNVILKVYP

SEQ ID NO: 73680 - protein, 31 aa, Artificial Sequence
  Cyclic GFR-binding peptide
  MOD_RES (28)..(30): Xaa is C or S
DLSSLSILFFIGKTPKILKVYPMIVKSXKXS

SEQ ID NO: 73681 - protein, 33 aa, Artificial Sequence
  Cyclic GFR-binding peptide
  MOD_RES (5)..(6): Xaa is C or S
VGKAXXVPTKLSSLSVLFFDDMGVPTLKVYPEG

SEQ ID NO: 73682 - protein, 32 aa, Artificial Sequence
  Cyclic GFR-binding peptide
  MOD_RES (29)..(31): Xaa is C or S
KLSSLSVLFFDSSNNVILKVYPNMVVKAXGXH

SEQ ID NO: 73683 - protein, 31 aa, Artificial Sequence
  Cyclic GFR-binding peptide
  MOD_RES (3)..(4): Xaa is C or S
KAXXVPTKLSSLSVLFFDDMGVPTLKVYPEG

SEQ ID NO: 73684 - protein, 23 aa, Artificial Sequence
  Cyclic GFR-binding peptide
QDLSSLSILFFIGKTPKILKVYP

SEQ ID NO: 73685 - protein, 24 aa, Artificial Sequence
  Cyclic GFR-binding peptide
TQLSSLSVLFFDDSSNVILKVYPN

SEQ ID NO: 73686 - protein, 32 aa, Artificial Sequence
  Cyclic GFR-binding peptide
  MOD_RES (6)..(6): Xaa is C or S
VTKPTXAPTKLSSLSVLFFDDSSNVILKVYPN

SEQ ID NO: 73687 - protein, 33 aa, Artificial Sequence
  Cyclic GFR-binding peptide
  MOD_RES (4)..(4): Xaa is C or S
GLEXVPTEESSLSMLFFRIKPHQGQHLKVYPFL

SEQ ID NO: 73688 - protein, 27 aa, Artificial Sequence
  Cyclic GFR-binding peptide
TELSSLSMLFFDEYDKVVLKVYPEMVV

SEQ ID NO: 73689 - protein, 39 aa, Artificial Sequence; identical to SEQ ID NO: 25208
  Cyclic GFR-binding peptide
  MOD_RES (6)..(7): Xaa is C or S

SEQ ID NO: 73690 - protein, 32 aa, Artificial Sequence
  Cyclic GFR-binding peptide
  MOD_RES (5)..(6): Xaa is C or S
VPKPXXAPTKLSSLSVLFFDDSSNVILKVYPN

SEQ ID NO: 73691 - protein, 32 aa, Artificial Sequence; identical to SEQ ID NO: 25211
  Cyclic GFR-binding peptide
  MOD_RES (1)..(2): Xaa is C or S

SEQ ID NO: 73692 - protein, 34 aa, Artificial Sequence; identical to SEQ ID NO: 25212
  Cyclic GFR-binding peptide
  MOD_RES (3)..(4): Xaa is C or S

SEQ ID NO: 73693 - protein, 40 aa, Artificial Sequence
  Cyclic GFR-binding peptide
  MOD_RES (6)..(7)..(39): Xaa is C or S
KIPKAXXVPTELSSLSMLFFDENEKVVLKVYPDMVVEGXG

SEQ ID NO: 73694 - protein, 26 aa, Artificial Sequence
  Cyclic GFR-binding peptide
  MOD_RES (1)..(1): Xaa is C or S
XTPTKMSSLSMLFFNDKQQIILKVYP

SEQ ID NO: 73695 - protein, 32 aa, Artificial Sequence
  Cyclic GFR-binding peptide
  MOD_RES (3)..(4): Xaa is C or S
KAXXVPTKLSSLSVLFFDDMGVPTLKVYPEGM

SEQ ID NO: 73696 - protein, 28 aa, Artificial Sequence
  Cyclic GFR-binding peptide
  MOD_RES (26)..(28): Xaa is C or S
SSLSILFFVGRKPKVLKVYPMIVRSXKX

SEQ ID NO: 73697 - protein, 30 aa, Artificial Sequence
  Cyclic GFR-binding peptide
  MOD_RES (1)..(2): Xaa is C or S
XXAPVKTSSLSMLFFDNGRVLLLKVYPMIV

SEQ ID NO: 73698 - protein, 26 aa, Artificial Sequence
  Cyclic GFR-binding peptide
ALSSLSILFFVGRKPKVLKVYPMIVR

SEQ ID NO: 73699 - protein, 33 aa, Artificial Sequence
  Cyclic GFR-binding peptide
  MOD_RES (3)..(4): Xaa is C or S
ASXXVPARLSSLSILFFDAANNVVLKVYPDMVV

SEQ ID NO: 73700 - protein, 34 aa, Artificial Sequence
  Cyclic GFR-binding peptide
  MOD_RES (5)..(6): Xaa is C or S
ASKAXXVPTKLSSLSILFFDKGVVTYLKVYPGMA

SEQ ID NO: 73701 - protein, 35 aa, Artificial Sequence; identical to SEQ ID NO: 25217
  Cyclic GFR-binding peptide
  MOD_RES (1)..(33)..(35): Xaa is C or S

SEQ ID NO: 73702 - protein, 27 aa, Artificial Sequence
  Cyclic GFR-binding peptide
  MOD_RES (27)..(27): Xaa is C or S
SSLSMLFFDEYDKVVLKVYPEMVVEGX

SEQ ID NO: 73703 - protein, 23 aa, Artificial Sequence
  Cyclic GFR-binding peptide
HSSLSVLFFEYVRKKPKLLKVYP

SEQ ID NO: 73704 - protein, 29 aa, Artificial Sequence
  Cyclic GFR-binding peptide
  MOD_RES (28)..(28): Xaa is C or S
ALSSLSILFFVGRKPKVLKVYPMIVRSXK

SEQ ID NO: 73705 - protein, 28 aa, Artificial Sequence
  Cyclic GFR-binding peptide
QALSSLSILFFVGRKPKVLKVYPMIVRS

SEQ ID NO: 73706 - protein, 31 aa, Artificial Sequence; identical to SEQ ID NO: 25218
  Cyclic GFR-binding peptide
  MOD_RES (31)..(31): Xaa is C or S

SEQ ID NO: 73707 - protein, 32 aa, Artificial Sequence; identical to SEQ ID NO: 25219
  Cyclic GFR-binding peptide
  MOD_RES (31)..(31): Xaa is C or S

SEQ ID NO: 73708 - protein, 26 aa, Artificial Sequence
  Cyclic GFR-binding peptide
PTKMSSLSMLFFNDKQQIILKVYPGM

SEQ ID NO: 73709 - protein, 20 aa, Artificial Sequence
  Cyclic GFR-binding peptide
SSLSILFFIGKTPKILKVYP

SEQ ID NO: 73710 - protein, 30 aa, Artificial Sequence; identical to SEQ ID NO: 764
  Cyclic GFR-binding peptide

SEQ ID NO: 73711 - protein, 35 aa, Artificial Sequence
  Cyclic GFR-binding peptide
  MOD_RES (32)..(34): Xaa is C or S
VPTELSSLSMLFFDENEKVVLKVYPDMVVEGXGXR

SEQ ID NO: 73712 - protein, 32 aa, Artificial Sequence; identical to SEQ ID NO: 25221
  Cyclic GFR-binding peptide
  MOD_RES (1)..(1): Xaa is C or S

SEQ ID NO: 73713 - protein, 25 aa, Artificial Sequence
  Cyclic GFR-binding peptide
APVKTSSLSMLFFDNGRVLLLKVYP

SEQ ID NO: 73714 - protein, 25 aa, Artificial Sequence
  Cyclic GFR-binding peptide
PQALSSLSILFFVGRKPKVLKVYPM

SEQ ID NO: 73715 - protein, 29 aa, Artificial Sequence
  Cyclic GFR-binding peptide
  MOD_RES (27)..(29): Xaa is C or S
SSLSMLFFDENEKVVLKVYPDMVVEGXGX

SEQ ID NO: 73716 - protein, 37 aa, Artificial Sequence
  Cyclic GFR-binding peptide
  MOD_RES (6)..(6): Xaa is C or S
DEGLEXVPTEESSLSMLFFRIKPHQGQHLKVYPFLQH

SEQ ID NO: 73717 - protein, 30 aa, Artificial Sequence
  Cyclic GFR-binding peptide
  MOD_RES (30)..(30): Xaa is C or S
TQLSSLSVLFFDDSSNVILKVYPNMVVRAX

SEQ ID NO: 73718 - protein, 29 aa, Artificial Sequence
  Cyclic GFR-binding peptide
  MOD_RES (26)..(28): Xaa is C or S
SSLSILFFVGRKPKVLKVYPMIVRSXKXS

SEQ ID NO: 73719 - protein, 32 aa, Artificial Sequence
  Cyclic GFR-binding peptide
  MOD_RES (30)..(32): Xaa is C or S
PVKTSSLSMLFFDNGRVLLLKVYPMIVEEXGX

SEQ ID NO: 73720 - protein, 36 aa, Artificial Sequence; identical to SEQ ID NO: 25224
  Cyclic GFR-binding peptide
  MOD_RES (4)..(5)..(36): Xaa is C or S

SEQ ID NO: 73721 - protein, 28 aa, Artificial Sequence
  Cyclic GFR-binding peptide
  MOD_RES (1)..(2): Xaa is C or S
XXVPQDLSSLSILFFVGRTPKVLKVYPM

SEQ ID NO: 73722 - protein, 35 aa, Artificial Sequence; identical to SEQ ID NO: 25225
  Cyclic GFR-binding peptide
  MOD_RES (1)..(2)..(33)..(35): Xaa is C or S

SEQ ID NO: 73723 - protein, 36 aa, Artificial Sequence; identical to SEQ ID NO: 25226
  Cyclic GFR-binding peptide
  MOD_RES (2)..(2): Xaa is C or S

SEQ ID NO: 73724 - protein, 30 aa, Artificial Sequence
  Cyclic GFR-binding peptide
  MOD_RES (30)..(30): Xaa is C or S
TELSSLSMLFFDEYDKVVLKVYPEMVVEGX

SEQ ID NO: 73725 - protein, 33 aa, Artificial Sequence; identical to SEQ ID NO: 25230
  Cyclic GFR-binding peptide
  MOD_RES (1)..(32): Xaa is C or S

SEQ ID NO: 73726 - protein, 27 aa, Artificial Sequence
  Cyclic GFR-binding peptide
  MOD_RES (1)..(1): Xaa is C or S
XAPVKTSSLSMLFFDNGRVLLLKVYPM

SEQ ID NO: 73727 - protein, 38 aa, Artificial Sequence; identical to SEQ ID NO: 25229
  Cyclic GFR-binding peptide
  MOD_RES (4)..(5)..(37): Xaa is C or S

SEQ ID NO: 73728 - protein, 30 aa, Artificial Sequence
  Cyclic GFR-binding peptide
  MOD_RES (2)..(3): Xaa is C or S
PXXTPTKMSSLSMLFFNDKQQIILKVYPGM

SEQ ID NO: 73729 - protein, 26 aa, Artificial Sequence
  Cyclic GFR-binding peptide
QDLSSLSILFFIGKTPKILKVYPMIV

SEQ ID NO: 73730 - protein, 30 aa, Artificial Sequence
  Cyclic GFR-binding peptide
  MOD_RES (29)..(29): Xaa is C or S
RLSSLSILFFDAANNVVLKVYPDMVVEAXG

SEQ ID NO: 73731 - protein, 32 aa, Artificial Sequence
  Cyclic GFR-binding peptide
  MOD_RES (6)..(7): Xaa is C or S
TVPKPXXAPTQLSSLSVLFFDDSSNVILKVYP

SEQ ID NO: 73732 - protein, 36 aa, Artificial Sequence
  Cyclic GFR-binding peptide
  MOD_RES (7)..(7): Xaa is C or S
NDEGLEXVPTEESSLSMLFFRIKPHQGQHLKVYPFL

SEQ ID NO: 73733 - protein, 37 aa, Artificial Sequence; identical to SEQ ID NO: 25233
  Cyclic GFR-binding peptide
  MOD_RES (5)..(6): Xaa is C or S

SEQ ID NO: 73734 - protein, 42 aa, Artificial Sequence; identical to SEQ ID NO: 25234
  Cyclic GFR-binding peptide
  MOD_RES (2)..(39)..(41): Xaa is C or S

SEQ ID NO: 73735 - protein, 24 aa, Artificial Sequence
  Cyclic GFR-binding peptide
TSSLSMLFFDNGRVLLLKVYPMIV

SEQ ID NO: 73736 - protein, 32 aa, Artificial Sequence
  Cyclic GFR-binding peptide
  MOD_RES (4)..(5): Xaa is C or S
GKAXXVPTKLSSLSVLFFDDMGVPTLKVYPEG

SEQ ID NO: 73737 - protein, 21 aa, Artificial Sequence
  Cyclic GFR-binding peptide
LSSLSVLFFDDSSNVILKVYP

SEQ ID NO: 73738 - protein, 33 aa, Artificial Sequence
  Cyclic GFR-binding peptide
QPSRVHHSSLSVLFFEYVRKKPKLLKVYPRLEE

SEQ ID NO: 73739 - protein, 22 aa, Artificial Sequence
  Cyclic GFR-binding peptide
LSSLSILFFDKGVVTYLKVYPG

SEQ ID NO: 73740 - protein, 32 aa, Artificial Sequence; identical to SEQ ID NO: 25235
  Cyclic GFR-binding peptide
  MOD_RES (31)..(31): Xaa is C or S

SEQ ID NO: 73741 - protein, 28 aa, Artificial Sequence
  Cyclic GFR-binding peptide
  MOD_RES (27)..(27): Xaa is C or S
SSLSVLFFDDSSNVILKVYPNMVVRAXG

SEQ ID NO: 73742 - protein, 29 aa, Artificial Sequence
  Cyclic GFR-binding peptide
  MOD_RES (4)..(4): Xaa is C or S
KPTXAPTKLSSLSVLFFDDSSNVILKVYP

SEQ ID NO: 73743 - protein, 36 aa, Artificial Sequence
  Cyclic GFR-binding peptide
  MOD_RES (5)..(5): Xaa is C or S
EGLEXVPTEESSLSMLFFRIKPHQGQHLKVYPFLQH

SEQ ID NO: 73744 - protein, 40 aa, Artificial Sequence; identical to SEQ ID NO: 25238
  Cyclic GFR-binding peptide
  MOD_RES (4)..(5)..(37)..(39): Xaa is C or S

SEQ ID NO: 73745 - protein, 35 aa, Artificial Sequence; identical to SEQ ID NO: 25240
  Cyclic GFR-binding peptide
  MOD_RES (1)..(35): Xaa is C or S

SEQ ID NO: 73746 - protein, 25 aa, Artificial Sequence
  Cyclic GFR-binding peptide
PTQLSSLSVLFFDDSSNVILKVYPN

SEQ ID NO: 73747 - protein, 21 aa, Artificial Sequence
  Cyclic GFR-binding peptide
SSLSMLFFDENEKVVLKVYPD

SEQ ID NO: 73748 - protein, 34 aa, Artificial Sequence; identical to SEQ ID NO: 25241
  Cyclic GFR-binding peptide
  MOD_RES (1)..(33): Xaa is C or S

SEQ ID NO: 73749 - protein, 24 aa, Artificial Sequence
  Cyclic GFR-binding peptide
RLSSLSILFFDAANNVVLKVYPDM

SEQ ID NO: 73750 - protein, 30 aa, Artificial Sequence
  Cyclic GFR-binding peptide
  MOD_RES (29)..(29): Xaa is C or S
QDLSSLSILFFIGKTPKILKVYPMIVKSXK

SEQ ID NO: 73751 - protein, 33 aa, Artificial Sequence
  Cyclic GFR-binding peptide
  MOD_RES (5)..(6): Xaa is C or S
IPKAXXVPTELSSLSMLFFDEYDKVVLKVYPEM

SEQ ID NO: 73752 - protein, 32 aa, Artificial Sequence
  Cyclic GFR-binding peptide
  MOD_RES (3)..(4): Xaa is C or S
KAXXVPTKLSSLSILFFDKGVVTYLKVYPGMA

SEQ ID NO: 73753 - protein, 31 aa, Artificial Sequence
  Cyclic GFR-binding peptide
  MOD_RES (2)..(3): Xaa is C or S
TXXVPTRLSSLSILFFDSANNVVLKVYPDMV

SEQ ID NO: 73754 - protein, 26 aa, Artificial Sequence
  Cyclic GFR-binding peptide
  MOD_RES (1)..(1): Xaa is C or S
XVPQALSSLSILFFVGRKPKVLKVYP

SEQ ID NO: 73755 - protein, 31 aa, Artificial Sequence
  Cyclic GFR-binding peptide
  MOD_RES (29)..(31): Xaa is C or S
VKTSSLSMLFFDNGRVLLLKVYPMIVEEXGX

SEQ ID NO: 73756 - protein, 27 aa, Artificial Sequence
  Cyclic GFR-binding peptide
  MOD_RES (27)..(27): Xaa is C or S
SSLSILFFDAANNVVLKVYPDMVVEAX

SEQ ID NO: 73757 - protein, 30 aa, Artificial Sequence
  Cyclic GFR-binding peptide
  MOD_RES (29)..(29): Xaa is C or S
ELSSLSMLFFDENEKVVLKVYPDMVVEGXG

SEQ ID NO: 73758 - protein, 37 aa, Artificial Sequence; identical to SEQ ID NO: 25244
  Cyclic GFR-binding peptide
  MOD_RES (5)..(6): Xaa is C or S

SEQ ID NO: 73759 - protein, 30 aa, Artificial Sequence
  Cyclic GFR-binding peptide
  MOD_RES (2)..(3): Xaa is C or S
AXXVPTELSSLSMLFFDEYDKVVLKVYPEM

SEQ ID NO: 73760 - protein, 40 aa, Artificial Sequence; identical to SEQ ID NO: 25245
  Cyclic GFR-binding peptide
  MOD_RES (5)..(6)..(38)..(40): Xaa is C or S

SEQ ID NO: 73761 - protein, 33 aa, Artificial Sequence
  Cyclic GFR-binding peptide
  MOD_RES (30)..(32): Xaa is C or S
ARLSSLSILFFDAANNVVLKVYPDMVVEAXGXR

SEQ ID NO: 73762 - protein, 38 aa, Artificial Sequence
  Cyclic GFR-binding peptide
  MOD_RES (5)..(6)..(38): Xaa is C or S
IPKAXXVPTELSSLSMLFFDENEKVVLKVYPDMVVEGX

SEQ ID NO: 73763 - protein, 31 aa, Artificial Sequence
  Cyclic GFR-binding peptide
  MOD_RES (4)..(4): Xaa is C or S
GLEXVPTEESSLSMLFFRIKPHQGQHLKVYP

SEQ ID NO: 73764 - protein, 23 aa, Artificial Sequence
  Cyclic GFR-binding peptide
VKTSSLSMLFFDNGRVLLLKVYP

SEQ ID NO: 73765 - protein, 33 aa, Artificial Sequence; identical to SEQ ID NO: 25248
  Cyclic GFR-binding peptide
  MOD_RES (33)..(33): Xaa is C or S

SEQ ID NO: 73766 - protein, 29 aa, Artificial Sequence
  Cyclic GFR-binding peptide
  MOD_RES (29)..(29): Xaa is C or S
KMSSLSMLFFNDKQQIILKVYPGMVVDRX

SEQ ID NO: 73767 - protein, 28 aa, Artificial Sequence
  Cyclic GFR-binding peptide
PSRVHHSSLSVLFFEYVRKKPKLLKVYP

SEQ ID NO: 73768 - protein, 31 aa, Artificial Sequence
  Cyclic GFR-binding peptide
  MOD_RES (4)..(5): Xaa is C or S
PKAXXAPTKLSSLSVLFFDSSNNVILKVYPN

SEQ ID NO: 73769 - protein, 39 aa, Artificial Sequence; identical to SEQ ID NO: 25249
  Cyclic GFR-binding peptide
  MOD_RES (4)..(4): Xaa is C or S

SEQ ID NO: 73770 - protein, 32 aa, Artificial Sequence
  Cyclic GFR-binding peptide
  MOD_RES (31)..(31): Xaa is C or S
PTKLSSLSVLFFDSSNNVILKVYPNMVVKAXG

SEQ ID NO: 73771 - protein, 36 aa, Artificial Sequence; identical to SEQ ID NO: 25251
  Cyclic GFR-binding peptide
  MOD_RES (5)..(6): Xaa is C or S

SEQ ID NO: 73772 - protein, 34 aa, Artificial Sequence
  Cyclic GFR-binding peptide
  MOD_RES (5)..(5): Xaa is C or S
TKPTXAPTKLSSLSVLFFDDSSNVILKVYPNMVV

SEQ ID NO: 73773 - protein, 25 aa, Artificial Sequence
  Cyclic GFR-binding peptide
SQDLSSLSILFFIGKTPKILKVYPM

SEQ ID NO: 73774 - protein, 32 aa, Artificial Sequence; identical to SEQ ID NO: 25254
  Cyclic GFR-binding peptide
  MOD_RES (1)..(2): Xaa is C or S

SEQ ID NO: 73775 - protein, 34 aa, Artificial Sequence; identical to SEQ ID NO: 25253
  Cyclic GFR-binding peptide
  MOD_RES (32)..(34): Xaa is C or S

SEQ ID NO: 73776 - protein, 28 aa, Artificial Sequence
  Cyclic GFR-binding peptide
ARLSSLSILFFDAANNVVLKVYPDMVVE

SEQ ID NO: 73777 - protein, 24 aa, Artificial Sequence
  Cyclic GFR-binding peptide
QLSSLSVLFFDDSSNVILKVYPNM

SEQ ID NO: 73778 - protein, 27 aa, Artificial Sequence
  Cyclic GFR-binding peptide
  MOD_RES (1)..(2): Xaa is C or S
XXVPTELSSLSMLFFDENEKVVLKVYP

SEQ ID NO: 73779 - protein, 39 aa, Artificial Sequence; identical to SEQ ID NO: 25256
  Cyclic GFR-binding peptide
  MOD_RES (6)..(7)..(39): Xaa is C or S

SEQ ID NO: 73780 - protein, 31 aa, Artificial Sequence
  Cyclic GFR-binding peptide
  MOD_RES (30)..(30): Xaa is C or S
SSLSVLFFEYVRKKPKLLKVYPRLEEHLEXA

SEQ ID NO: 73781 - protein, 33 aa, Artificial Sequence
  Cyclic GFR-binding peptide
  MOD_RES (4)..(5): Xaa is C or S
PKAXXAPTKLSSLSVLFFDSSNNVILKVYPNMV

SEQ ID NO: 73782 - protein, 35 aa, Artificial Sequence; identical to SEQ ID NO: 25260
  Cyclic GFR-binding peptide
  MOD_RES (5)..(5): Xaa is C or S

SEQ ID NO: 73783 - protein, 25 aa, Artificial Sequence
  Cyclic GFR-binding peptide
LSSLSVLFFDSSNNVILKVYPNMVV

SEQ ID NO: 73784 - protein, 32 aa, Artificial Sequence
  Cyclic GFR-binding peptide
  MOD_RES (3)..(4): Xaa is C or S
PTXXVPTRLSSLSILFFDSANNVVLKVYPDMV

SEQ ID NO: 73785 - protein, 35 aa, Artificial Sequence
  Cyclic GFR-binding peptide
  MOD_RES (5)..(6): Xaa is C or S
VPKPXXAPTKLSSLSVLFFDDSSNVILKVYPNMVV

SEQ ID NO: 73786 - protein, 33 aa, Artificial Sequence
  Cyclic GFR-binding peptide
  MOD_RES (2)..(2): Xaa is C or S
EXVPTEESSLSMLFFRIKPHQGQHLKVYPFLQH

SEQ ID NO: 73787 - protein, 32 aa, Artificial Sequence
  Cyclic GFR-binding peptide
  MOD_RES (4)..(4): Xaa is C or S
KPTXAPTKLSSLSVLFFDDSSNVILKVYPNMV

SEQ ID NO: 73788 - protein, 32 aa, Artificial Sequence
  Cyclic GFR-binding peptide
  MOD_RES (5)..(6): Xaa is C or S
TPPTXXVPTRLSSLSILFFDSANNVVLKVYPD

SEQ ID NO: 73789 - protein, 40 aa, Artificial Sequence; identical to SEQ ID NO: 25265
  Cyclic GFR-binding peptide
  MOD_RES (6)..(38)..(40): Xaa is C or S

SEQ ID NO: 73790 - protein, 24 aa, Artificial Sequence
  Cyclic GFR-binding peptide
HSSLSVLFFEYVRKKPKLLKVYPR

SEQ ID NO: 73791 - protein, 40 aa, Artificial Sequence; identical to SEQ ID NO: 25267
  Cyclic GFR-binding peptide
  MOD_RES (6)..(7)..(38)..(40): Xaa is C or S

SEQ ID NO: 73792 - protein, 28 aa, Artificial Sequence
  Cyclic GFR-binding peptide
PVKTSSLSMLFFDNGRVLLLKVYPMIVE

SEQ ID NO: 73793 - protein, 29 aa, Artificial Sequence
  Cyclic GFR-binding peptide
  MOD_RES (2)..(3): Xaa is C or S
AXXVPTKLSSLSVLFFDDMGVPTLKVYPE

SEQ ID NO: 73794 - protein, 24 aa, Artificial Sequence
  Cyclic GFR-binding peptide
SSLSILFFDKGVVTYLKVYPGMAV

SEQ ID NO: 73795 - protein, 28 aa, Artificial Sequence
  Cyclic GFR-binding peptide
  MOD_RES (1)..(1): Xaa is C or S
XVPQDLSSLSILFFVGRTPKVLKVYPMV

SEQ ID NO: 73796 - protein, 22 aa, Artificial Sequence
  Cyclic GFR-binding peptide
SSLSMLFFDENEKVVLKVYPDM

SEQ ID NO: 73797 - protein, 38 aa, Artificial Sequence; identical to SEQ ID NO: 25272
  Cyclic GFR-binding peptide
  MOD_RES (3)..(4)..(35)..(37): Xaa is C or S

SEQ ID NO: 73798 - protein, 35 aa, Artificial Sequence; identical to SEQ ID NO: 25273
  Cyclic GFR-binding peptide
  MOD_RES (1)..(2)..(34): Xaa is C or S

SEQ ID NO: 73799 - protein, 28 aa, Artificial Sequence
  Cyclic GFR-binding peptide
  MOD_RES (28)..(28): Xaa is C or S
LSSLSILFFDSANNVVLKVYPDMVVESX

SEQ ID NO: 73800 - protein, 24 aa, Artificial Sequence
  Cyclic GFR-binding peptide
SSLSVLFFDDSSNVILKVYPNMVV

SEQ ID NO: 73801 - protein, 28 aa, Artificial Sequence
  Cyclic GFR-binding peptide
  MOD_RES (1)..(1): Xaa is C or S
XVPTKLSSLSILFFDKGVVTYLKVYPGM

SEQ ID NO: 73802 - protein, 38 aa, Artificial Sequence; identical to SEQ ID NO: 25275
  Cyclic GFR-binding peptide
  MOD_RES (3)..(4)..(36)..(38): Xaa is C or S

SEQ ID NO: 73803 - protein, 30 aa, Artificial Sequence
  Cyclic GFR-binding peptide
  MOD_RES (3)..(4): Xaa is C or S
KAXXVPTKLSSLSVLFFDDMGVPTLKVYPE

SEQ ID NO: 73804 - protein, 29 aa, Artificial Sequence
  Cyclic GFR-binding peptide
PVKTSSLSMLFFDNGRVLLLKVYPMIVEE

SEQ ID NO: 73805 - protein, 33 aa, Artificial Sequence
  Cyclic GFR-binding peptide
  MOD_RES (3)..(4): Xaa is C or S
APXXVPQALSSLSILFFVGRKPKVLKVYPMIVR

SEQ ID NO: 73806 - protein, 22 aa, Artificial Sequence
  Cyclic GFR-binding peptide
KLSSLSVLFFDSSNNVILKVYP

SEQ ID NO: 73807 - protein, 22 aa, Artificial Sequence
  Cyclic GFR-binding peptide
LSSLSILFFVGRKPKVLKVYPM

SEQ ID NO: 73808 - protein, 33 aa, Artificial Sequence
  Cyclic GFR-binding peptide
  MOD_RES (31)..(33): Xaa is C or S
TKLSSLSVLFFDDMGVPTLKVYPEGMSVAEXGX

SEQ ID NO: 73809 - protein, 34 aa, Artificial Sequence
  Cyclic GFR-binding peptide
  MOD_RES (31)..(33): Xaa is C or S
PTKMSSLSMLFFNDKQQIILKVYPGMVVDRXGXS

SEQ ID NO: 73810 - protein, 33 aa, Artificial Sequence; identical to SEQ ID NO: 25278
  Cyclic GFR-binding peptide
  MOD_RES (1)..(2): Xaa is C or S

SEQ ID NO: 73811 - protein, 30 aa, Artificial Sequence
  Cyclic GFR-binding peptide
QPSRVHHSSLSVLFFEYVRKKPKLLKVYPR

SEQ ID NO: 73812 - protein, 31 aa, Artificial Sequence
  Cyclic GFR-binding peptide
  MOD_RES (5)..(6): Xaa is C or S
APASXXVPARLSSLSILFFDAANNVVLKVYP

SEQ ID NO: 73813 - protein, 39 aa, Artificial Sequence; identical to SEQ ID NO: 25280
  Cyclic GFR-binding peptide
  MOD_RES (6)..(6): Xaa is C or S

SEQ ID NO: 73814 - protein, 38 aa, Artificial Sequence; identical to SEQ ID NO: 25281
  Cyclic GFR-binding peptide
  MOD_RES (35)..(37): Xaa is C or S

SEQ ID NO: 73815 - protein, 27 aa, Artificial Sequence
  Cyclic GFR-binding peptide
SSLSVLFFEYVRKKPKLLKVYPRLEEH

SEQ ID NO: 73816 - protein, 30 aa, Artificial Sequence
  Cyclic GFR-binding peptide
  MOD_RES (27)..(29): Xaa is C or S
SSLSVLFFDDSSNVILKVYPNMVVRSXGXH

SEQ ID NO: 73817 - protein, 36 aa, Artificial Sequence; identical to SEQ ID NO: 25282
  Cyclic GFR-binding peptide
  MOD_RES (4)..(5): Xaa is C or S

SEQ ID NO: 73818 - protein, 37 aa, Artificial Sequence
  Cyclic GFR-binding peptide
  MOD_RES (1)..(2)..(34)..(36): Xaa is C or S
XXVPTELSSLSMLFFDENEKVVLKVYPDMVVEGXGXR

SEQ ID NO: 73819 - protein, 33 aa, Artificial Sequence
  Cyclic GFR-binding peptide
  MOD_RES (4)..(5): Xaa is C or S
PSTXXAPVKTSSLSMLFFDNGRVLLLKVYPMIV

SEQ ID NO: 73820 - protein, 28 aa, Artificial Sequence
  Cyclic GFR-binding peptide
TELSSLSMLFFDEYDKVVLKVYPEMVVE

SEQ ID NO: 73821 - protein, 26 aa, Artificial Sequence
  Cyclic GFR-binding peptide
  MOD_RES (1)..(1): Xaa is C or S
XVSQDLSSLSILFFIGKTPKILKVYP

SEQ ID NO: 73822 - protein, 32 aa, Artificial Sequence
  Cyclic GFR-binding peptide
  MOD_RES (2)..(3): Xaa is C or S
AXXAPTKLSSLSVLFFDSSNNVILKVYPNMVV

SEQ ID NO: 73823 - protein, 33 aa, Artificial Sequence
  Cyclic GFR-binding peptide
  MOD_RES (3)..(4): Xaa is C or S
GPXXTPTKMSSLSMLFFNDKQQIILKVYPGMVV

SEQ ID NO: 73824 - protein, 41 aa, Artificial Sequence; identical to SEQ ID NO: 25285
  Cyclic GFR-binding peptide
  MOD_RES (6)..(7)..(39)..(41): Xaa is C or S

SEQ ID NO: 73825 - protein, 30 aa, Artificial Sequence
  Cyclic GFR-binding peptide
  MOD_RES (29)..(29): Xaa is C or S
KMSSLSMLFFNDKQQIILKVYPGMVVDRXG

SEQ ID NO: 73826 - protein, 36 aa, Artificial Sequence; identical to SEQ ID NO: 25286
  Cyclic GFR-binding peptide
  MOD_RES (3)..(4)..(36): Xaa is C or S

SEQ ID NO: 73827 - protein, 32 aa, Artificial Sequence
  Cyclic GFR-binding peptide
  MOD_RES (29)..(31): Xaa is C or S
KLSSLSILFFDKGVVTYLKVYPGMAVSEXGXR

SEQ ID NO: 73828 - protein, 38 aa, Artificial Sequence
  Cyclic GFR-binding peptide
  MOD_RES (6)..(7): Xaa is C or S
KVGKAXXVPTKLSSLSVLFFDDMGVPTLKVYPEGMSVA

SEQ ID NO: 73829 - protein, 41 aa, Artificial Sequence; identical to SEQ ID NO: 25288
  Cyclic GFR-binding peptide
  MOD_RES (6)..(7)..(38)..(40): Xaa is C or S

SEQ ID NO: 73830 - protein, 38 aa, Artificial Sequence; identical to SEQ ID NO: 25289
  Cyclic GFR-binding peptide
  MOD_RES (5)..(6)..(37): Xaa is C or S

SEQ ID NO: 73831 - protein, 30 aa, Artificial Sequence
  Cyclic GFR-binding peptide
TKLSSLSVLFFDDMGVPTLKVYPEGMSVAE

SEQ ID NO: 73832 - protein, 35 aa, Artificial Sequence; identical to SEQ ID NO: 25292
  Cyclic GFR-binding peptide
  MOD_RES (4)..(5): Xaa is C or S

SEQ ID NO: 73833 - protein, 30 aa, Artificial Sequence
  Cyclic GFR-binding peptide
  MOD_RES (29)..(29): Xaa is C or S
VKTSSLSMLFFDNGRVLLLKVYPMIVEEXG

SEQ ID NO: 73834 - protein, 28 aa, Artificial Sequence
  Cyclic GFR-binding peptide
  MOD_RES (27)..(27): Xaa is C or S
SSLSMLFFDEYDKVVLKVYPEMVVEGXG

SEQ ID NO: 73835 - protein, 33 aa, Artificial Sequence
  Cyclic GFR-binding peptide
  MOD_RES (5)..(6): Xaa is C or S
VPKPXXAPTKLSSLSVLFFDDSSNVILKVYPNM

SEQ ID NO: 73836 - protein, 30 aa, Artificial Sequence
  Cyclic GFR-binding peptide
  MOD_RES (2)..(2): Xaa is C or S
EXVPTEESSLSMLFFRIKPHQGQHLKVYPF

SEQ ID NO: 73837 - protein, 23 aa, Artificial Sequence
  Cyclic GFR-binding peptide
SSLSMLFFDENEKVVLKVYPDMV

SEQ ID NO: 73838 - protein, 33 aa, Artificial Sequence
  Cyclic GFR-binding peptide
  MOD_RES (33)..(33): Xaa is C or S
VHHSSLSVLFFEYVRKKPKLLKVYPRLEEHLEX

SEQ ID NO: 73839 - protein, 36 aa, Artificial Sequence; identical to SEQ ID NO: 25294
  Cyclic GFR-binding peptide
  MOD_RES (4)..(4): Xaa is C or S

SEQ ID NO: 73840 - protein, 34 aa, Artificial Sequence; identical to SEQ ID NO: 25296
  Cyclic GFR-binding peptide
  MOD_RES (1)..(2)..(34): Xaa is C or S

SEQ ID NO: 73841 - protein, 25 aa, Artificial Sequence
  Cyclic GFR-binding peptide
VKTSSLSMLFFDNGRVLLLKVYPMI

SEQ ID NO: 73842 - protein, 35 aa, Artificial Sequence; identical to SEQ ID NO: 25297
  Cyclic GFR-binding peptide
  MOD_RES (2)..(3)..(35): Xaa is C or S

SEQ ID NO: 73843 - protein, 37 aa, Artificial Sequence; identical to SEQ ID NO: 25299
  Cyclic GFR-binding peptide
  MOD_RES (35)..(37): Xaa is C or S

SEQ ID NO: 73844 - protein, 25 aa, Artificial Sequence
  Cyclic GFR-binding peptide
VPTELSSLSMLFFDEYDKVVLKVYP

SEQ ID NO: 73845 - protein, 27 aa, Artificial Sequence
  Cyclic GFR-binding peptide
QLSSLSVLFFDDSSNVILKVYPNMVVR

SEQ ID NO: 73846 - protein, 35 aa, Artificial Sequence
  Cyclic GFR-binding peptide
  MOD_RES (5)..(5): Xaa is C or S
EGLEXVPTEESSLSMLFFRIKPHQGQHLKVYPFLQ

SEQ ID NO: 73847 - protein, 34 aa, Artificial Sequence
  Cyclic GFR-binding peptide
  MOD_RES (4)..(5): Xaa is C or S
PKAXXVPTELSSLSMLFFDEYDKVVLKVYPEMVV

SEQ ID NO: 73848 - protein, 26 aa, Artificial Sequence
  Cyclic GFR-binding peptide
ARLSSLSILFFDAANNVVLKVYPDMV

SEQ ID NO: 73849 - protein, 40 aa, Artificial Sequence; identical to SEQ ID NO: 25303
  Cyclic GFR-binding peptide
  MOD_RES (5)..(6)..(38)..(40): Xaa is C or S

SEQ ID NO: 73850 - protein, 25 aa, Artificial Sequence
  Cyclic GFR-binding peptide
TELSSLSMLFFDEYDKVVLKVYPEM

SEQ ID NO: 73851 - protein, 28 aa, Artificial Sequence
  Cyclic GFR-binding peptide
  MOD_RES (27)..(27): Xaa is C or S
SSLSVLFFDDSSNVILKVYPNMVVRSXG

SEQ ID NO: 73852 - protein, 25 aa, Artificial Sequence
  Cyclic GFR-binding peptide
SSLSVLFFDDSSNVILKVYPNMVVR

SEQ ID NO: 73853 - protein, 27 aa, Artificial Sequence
  Cyclic GFR-binding peptide
VSQDLSSLSILFFIGKTPKILKVYPMI

SEQ ID NO: 73854 - protein, 29 aa, Artificial Sequence
  Cyclic GFR-binding peptide
  MOD_RES (28)..(28): Xaa is C or S
LSSLSVLFFDDSSNVILKVYPNMVVRSXG

SEQ ID NO: 73855 - protein, 30 aa, Artificial Sequence
  Cyclic GFR-binding peptide
  MOD_RES (27)..(29): Xaa is C or S
SSLSILFFDKGVVTYLKVYPGMAVSEXGXR

SEQ ID NO: 73856 - protein, 36 aa, Artificial Sequence; identical to SEQ ID NO: 25306
  Cyclic GFR-binding peptide
  MOD_RES (2)..(34)..(36): Xaa is C or S

SEQ ID NO: 73857 - protein, 21 aa, Artificial Sequence
  Cyclic GFR-binding peptide
SSLSVLFFDDSSNVILKVYPN

SEQ ID NO: 73858 - protein, 34 aa, Artificial Sequence; identical to SEQ ID NO: 25307
  Cyclic GFR-binding peptide
  MOD_RES (31)..(33): Xaa is C or S

SEQ ID NO: 73859 - protein, 36 aa, Artificial Sequence; identical to SEQ ID NO: 25308
  Cyclic GFR-binding peptide
  MOD_RES (3)..(4)..(36): Xaa is C or S

SEQ ID NO: 73860 - protein, 33 aa, Artificial Sequence
  Cyclic GFR-binding peptide
  MOD_RES (30)..(32): Xaa is C or S
PQALSSLSILFFVGRKPKVLKVYPMIVRSXKXS

SEQ ID NO: 73861 - protein, 35 aa, Artificial Sequence; identical to SEQ ID NO: 25310
  Cyclic GFR-binding peptide
  MOD_RES (3)..(4): Xaa is C or S

SEQ ID NO: 73862 - protein, 29 aa, Artificial Sequence
  Cyclic GFR-binding peptide
  MOD_RES (29)..(29): Xaa is C or S
KLSSLSILFFDKGVVTYLKVYPGMAVSEX

SEQ ID NO: 73863 - protein, 36 aa, Artificial Sequence; identical to SEQ ID NO: 25312
  Cyclic GFR-binding peptide
  MOD_RES (2)..(3)..(34)..(36): Xaa is C or S

SEQ ID NO: 73864 - protein, 27 aa, Artificial Sequence
  Cyclic GFR-binding peptide
ALSSLSILFFVGRKPKVLKVYPMIVRS

SEQ ID NO: 73865 - protein, 42 aa, Artificial Sequence; identical to SEQ ID NO: 25313
  Cyclic GFR-binding peptide
  MOD_RES (7)..(39)..(41): Xaa is C or S

SEQ ID NO: 73866 - protein, 27 aa, Artificial Sequence
  Cyclic GFR-binding peptide
VPTKLSSLSVLFFDDMGVPTLKVYPEG

SEQ ID NO: 73867 - protein, 34 aa, Artificial Sequence
  Cyclic GFR-binding peptide
  MOD_RES (6)..(7): Xaa is C or S
TVPKPXXAPTQLSSLSVLFFDDSSNVILKVYPNM

SEQ ID NO: 73868 - protein, 38 aa, Artificial Sequence; identical to SEQ ID NO: 25315
  Cyclic GFR-binding peptide
  MOD_RES (5)..(6)..(38): Xaa is C or S

SEQ ID NO: 73869 - protein, 35 aa, Artificial Sequence; identical to SEQ ID NO: 25316
  Cyclic GFR-binding peptide

SEQ ID NO: 73870 - protein, 35 aa, Artificial Sequence; identical to SEQ ID NO: 25317
  Cyclic GFR-binding peptide
  MOD_RES (4)..(5): Xaa is C or S

SEQ ID NO: 73871 - protein, 31 aa, Artificial Sequence
  Cyclic GFR-binding peptide
  MOD_RES (30)..(30): Xaa is C or S
TELSSLSMLFFDEYDKVVLKVYPEMVVEGXG

SEQ ID NO: 73872 - protein, 21 aa, Artificial Sequence
  Cyclic GFR-binding peptide
LSSLSILFFDKGVVTYLKVYP

SEQ ID NO: 73873 - protein, 26 aa, Artificial Sequence
  Cyclic GFR-binding peptide
LSSLSMLFFDENEKVVLKVYPDMVVE

SEQ ID NO: 73874 - protein, 32 aa, Artificial Sequence
  Cyclic GFR-binding peptide
  MOD_RES (5)..(6): Xaa is C or S
IPKAXXVPTELSSLSMLFFDENEKVVLKVYPD

SEQ ID NO: 73875 - protein, 29 aa, Artificial Sequence
  Cyclic GFR-binding peptide
  MOD_RES (27)..(29): Xaa is C or S
LSSLSILFFVGRKPKVLKVYPMIVRSXKX

SEQ ID NO: 73876 - protein, 36 aa, Artificial Sequence; identical to SEQ ID NO: 25320
  Cyclic GFR-binding peptide
  MOD_RES (1)..(1): Xaa is C or S

SEQ ID NO: 73877 - protein, 26 aa, Artificial Sequence
  Cyclic GFR-binding peptide
  MOD_RES (1)..(1): Xaa is C or S
XVPQDLSSLSILFFVGRTPKVLKVYP

SEQ ID NO: 73878 - protein, 27 aa, Artificial Sequence
  Cyclic GFR-binding peptide
TKLSSLSVLFFDSSNNVILKVYPNMVV

SEQ ID NO: 73879 - protein, 25 aa, Artificial Sequence
  Cyclic GFR-binding peptide
QDLSSLSILFFVGRTPKVLKVYPMV

SEQ ID NO: 73880 - protein, 38 aa, Artificial Sequence; identical to SEQ ID NO: 25322
  Cyclic GFR-binding peptide
  MOD_RES (2)..(3)..(35)..(37): Xaa is C or S

SEQ ID NO: 73881 - protein, 26 aa, Artificial Sequence
  Cyclic GFR-binding peptide
PTKLSSLSVLFFDDMGVPTLKVYPEG

SEQ ID NO: 73882 - protein, 22 aa, Artificial Sequence
  Cyclic GFR-binding peptide
DLSSLSILFFVGRTPKVLKVYP

SEQ ID NO: 73883 - protein, 32 aa, Artificial Sequence
  Cyclic GFR-binding peptide
  MOD_RES (30)..(32): Xaa is C or S
KLSSLSVLFFDDMGVPTLKVYPEGMSVAEXGX

SEQ ID NO: 73884 - protein, 42 aa, Artificial Sequence; identical to SEQ ID NO: 25325
  Cyclic GFR-binding peptide
  MOD_RES (5)..(6)..(39)..(41): Xaa is C or S

SEQ ID NO: 73885 - protein, 39 aa, Artificial Sequence
  Cyclic GFR-binding peptide
  MOD_RES (3)..(4)..(36)..(38): Xaa is C or S
KAXXVPTELSSLSMLFFDENEKVVLKVYPDMVVEGXGXR

SEQ ID NO: 73886 - protein, 25 aa, Artificial Sequence
  Cyclic GFR-binding peptide
TKLSSLSILFFDKGVVTYLKVYPGM

SEQ ID NO: 73887 - protein, 21 aa, Artificial Sequence
  Cyclic GFR-binding peptide
SSLSMLFFNDKQQIILKVYPG

SEQ ID NO: 73888 - protein, 22 aa, Artificial Sequence
  Cyclic GFR-binding peptide
ELSSLSMLFFDENEKVVLKVYP

SEQ ID NO: 73889 - protein, 27 aa, Artificial Sequence
  Cyclic GFR-binding peptide
LSSLSILFFDAANNVVLKVYPDMVVEA

SEQ ID NO: 73890 - protein, 30 aa, Artificial Sequence
  Cyclic GFR-binding peptide
  MOD_RES (2)..(2): Xaa is C or S
TXAPTKLSSLSVLFFDDSSNVILKVYPNMV

SEQ ID NO: 73891 - protein, 34 aa, Artificial Sequence; identical to SEQ ID NO: 25327
  Cyclic GFR-binding peptide
  MOD_RES (3)..(4): Xaa is C or S

SEQ ID NO: 73892 - protein, 34 aa, Artificial Sequence
  Cyclic GFR-binding peptide
  MOD_RES (7)..(7): Xaa is C or S
NDEGLEXVPTEESSLSMLFFRIKPHQGQHLKVYP

SEQ ID NO: 73893 - protein, 36 aa, Artificial Sequence
  Cyclic GFR-binding peptide
  MOD_RES (1)..(2)..(34)..(36): Xaa is C or S
XXVPTELSSLSMLFFDENEKVVLKVYPDMVVEGXGX

SEQ ID NO: 73894 - protein, 33 aa, Artificial Sequence
  Cyclic GFR-binding peptide
  MOD_RES (2)..(2): Xaa is C or S
KXQPSRVHHSSLSVLFFEYVRKKPKLLKVYPRL

SEQ ID NO: 73895 - protein, 32 aa, Artificial Sequence
  Cyclic GFR-binding peptide
  MOD_RES (4)..(5): Xaa is C or S
AAPXXVPQALSSLSILFFVGRKPKVLKVYPMI

SEQ ID NO: 73896 - protein, 29 aa, Artificial Sequence
  Cyclic GFR-binding peptide
  MOD_RES (2)..(3): Xaa is C or S
SXXVPARLSSLSILFFDAANNVVLKVYPD

SEQ ID NO: 73897 - protein, 35 aa, Artificial Sequence; identical to SEQ ID NO: 25328
  Cyclic GFR-binding peptide
  MOD_RES (1)..(32)..(34): Xaa is C or S

SEQ ID NO: 73898 - protein, 22 aa, Artificial Sequence
  Cyclic GFR-binding peptide
ELSSLSMLFFDEYDKVVLKVYP

SEQ ID NO: 73899 - protein, 31 aa, Artificial Sequence
  Cyclic GFR-binding peptide
  MOD_RES (30)..(30): Xaa is C or S
PQDLSSLSILFFVGRTPKVLKVYPMVVKSXK

SEQ ID NO: 73900 - protein, 28 aa, Artificial Sequence
  Cyclic GFR-binding peptide
EESSLSMLFFRIKPHQGQHLKVYPFLQH

SEQ ID NO: 73901 - protein, 35 aa, Artificial Sequence
  Cyclic GFR-binding peptide
  MOD_RES (5)..(6): Xaa is C or S
APASXXVPARLSSLSILFFDAANNVVLKVYPDMVV

SEQ ID NO: 73902 - protein, 39 aa, Artificial Sequence; identical to SEQ ID NO: 25331
  Cyclic GFR-binding peptide
  MOD_RES (3)..(4)..(36)..(38): Xaa is C or S

SEQ ID NO: 73903 - protein, 30 aa, Artificial Sequence
  Cyclic GFR-binding peptide
  MOD_RES (30)..(30): Xaa is C or S
ESSLSMLFFRIKPHQGQHLKVYPFLQHNKX

SEQ ID NO: 73904 - protein, 36 aa, Artificial Sequence
  Cyclic GFR-binding peptide
  MOD_RES (6)..(7): Xaa is C or S
SIPKAXXVPTELSSLSMLFFDEYDKVVLKVYPEMVV

SEQ ID NO: 73905 - protein, 26 aa, Artificial Sequence
  Cyclic GFR-binding peptide
APTQLSSLSVLFFDDSSNVILKVYPN

SEQ ID NO: 73906 - protein, 30 aa, Artificial Sequence
  Cyclic GFR-binding peptide
  MOD_RES (28)..(30): Xaa is C or S
DLSSLSILFFVGRTPKVLKVYPMVVKSXKX

SEQ ID NO: 73907 - protein, 35 aa, Artificial Sequence; identical to SEQ ID NO: 25332
  Cyclic GFR-binding peptide
  MOD_RES (4)..(5): Xaa is C or S

SEQ ID NO: 73908 - protein, 39 aa, Artificial Sequence; identical to SEQ ID NO: 25333
  Cyclic GFR-binding peptide
  MOD_RES (4)..(38): Xaa is C or S

SEQ ID NO: 73909 - protein, 24 aa, Artificial Sequence
  Cyclic GFR-binding peptide
HHSSLSVLFFEYVRKKPKLLKVYP

SEQ ID NO: 73910 - protein, 30 aa, Artificial Sequence
  Cyclic GFR-binding peptide
  MOD_RES (3)..(4): Xaa is C or S
KAXXVPTELSSLSMLFFDEYDKVVLKVYPE

SEQ ID NO: 73911 - protein, 25 aa, Artificial Sequence
  Cyclic GFR-binding peptide
SSLSMLFFDENEKVVLKVYPDMVVE

SEQ ID NO: 73912 - protein, 28 aa, Artificial Sequence
  Cyclic GFR-binding peptide
TKMSSLSMLFFNDKQQIILKVYPGMVVD

SEQ ID NO: 73913 - protein, 22 aa, Artificial Sequence
  Cyclic GFR-binding peptide
SSLSVLFFDDSSNVILKVYPNM

SEQ ID NO: 73914 - protein, 33 aa, Artificial Sequence; identical to SEQ ID NO: 25336
  Cyclic GFR-binding peptide
  MOD_RES (1)..(2): Xaa is C or S

SEQ ID NO: 73915 - protein, 36 aa, Artificial Sequence
  Cyclic GFR-binding peptide
  MOD_RES (1)..(33)..(35): Xaa is C or S
XVPTELSSLSMLFFDENEKVVLKVYPDMVVEGXGXR

SEQ ID NO: 73916 - protein, 23 aa, Artificial Sequence
  Cyclic GFR-binding peptide
TKLSSLSVLFFDSSNNVILKVYP

SEQ ID NO: 73917 - protein, 35 aa, Artificial Sequence; identical to SEQ ID NO: 25337
  Cyclic GFR-binding peptide
  MOD_RES (1)..(2)..(34): Xaa is C or S

SEQ ID NO: 73918 - protein, 39 aa, Artificial Sequence; identical to SEQ ID NO: 25338
  Cyclic GFR-binding peptide
  MOD_RES (3)..(37)..(39): Xaa is C or S

SEQ ID NO: 73919 - protein, 39 aa, Artificial Sequence; identical to SEQ ID NO: 25340
  Cyclic GFR-binding peptide
  MOD_RES (7)..(39): Xaa is C or S

SEQ ID NO: 73920 - protein, 32 aa, Artificial Sequence
  Cyclic GFR-binding peptide
  MOD_RES (3)..(4): Xaa is C or S
ASXXVPARLSSLSILFFDAANNVVLKVYPDMV

SEQ ID NO: 73921 - protein, 31 aa, Artificial Sequence
  Cyclic GFR-binding peptide
  MOD_RES (1)..(2): Xaa is C or S
XXVPQALSSLSILFFVGRKPKVLKVYPMIVR

SEQ ID NO: 73922 - protein, 34 aa, Artificial Sequence
  Cyclic GFR-binding peptide
  MOD_RES (6)..(7): Xaa is C or S
ASASPXXVPQDLSSLSILFFVGRTPKVLKVYPMV

SEQ ID NO: 73923 - protein, 28 aa, Artificial Sequence
  Cyclic GFR-binding peptide
PARLSSLSILFFDAANNVVLKVYPDMVV

SEQ ID NO: 73924 - protein, 29 aa, Artificial Sequence
  Cyclic GFR-binding peptide
  MOD_RES (1)..(1): Xaa is C or S
XVPTELSSLSMLFFDEYDKVVLKVYPEMV

SEQ ID NO: 73925 - protein, 35 aa, Artificial Sequence; identical to SEQ ID NO: 25344
  Cyclic GFR-binding peptide
  MOD_RES (32)..(34): Xaa is C or S

SEQ ID NO: 73926 - protein, 34 aa, Artificial Sequence
  Cyclic GFR-binding peptide
  MOD_RES (31)..(33): Xaa is C or S
PTQLSSLSVLFFDDSSNVILKVYPNMVVRAXGXH

SEQ ID NO: 73927 - protein, 30 aa, Artificial Sequence
  Cyclic GFR-binding peptide
  MOD_RES (28)..(30): Xaa is C or S
LSSLSVLFFDDSSNVILKVYPNMVVRSXGX

SEQ ID NO: 73928 - protein, 40 aa, Artificial Sequence; identical to SEQ ID NO: 25348
  Cyclic GFR-binding peptide
  MOD_RES (6)..(7)..(39): Xaa is C or S

SEQ ID NO: 73929 - protein, 26 aa, Artificial Sequence
  Cyclic GFR-binding peptide
LSSLSVLFFDDSSNVILKVYPNMVVR

SEQ ID NO: 73930 - protein, 27 aa, Artificial Sequence
  Cyclic GFR-binding peptide
LSSLSILFFDSANNVVLKVYPDMVVES

SEQ ID NO: 73931 - protein, 37 aa, Artificial Sequence; identical to SEQ ID NO: 25351
  Cyclic GFR-binding peptide
  MOD_RES (3)..(4)..(36): Xaa is C or S

SEQ ID NO: 73932 - protein, 27 aa, Artificial Sequence
  Cyclic GFR-binding peptide
KTSSLSMLFFDNGRVLLLKVYPMIVEE

SEQ ID NO: 73933 - protein, 25 aa, Artificial Sequence
  Cyclic GFR-binding peptide
SSLSILFFDSANNVVLKVYPDMVVE

SEQ ID NO: 73934 - protein, 29 aa, Artificial Sequence
  Cyclic GFR-binding peptide
  MOD_RES (1)..(2): Xaa is C or S
XXVPTKLSSLSILFFDKGVVTYLKVYPGM

SEQ ID NO: 73935 - protein, 26 aa, Artificial Sequence
  Cyclic GFR-binding peptide
  MOD_RES (1)..(1): Xaa is C or S
XVPARLSSLSILFFDAANNVVLKVYP

SEQ ID NO: 73936 - protein, 31 aa, Artificial Sequence
  Cyclic GFR-binding peptide
  MOD_RES (4)..(5): Xaa is C or S
ASPXXVPQDLSSLSILFFVGRTPKVLKVYPM

SEQ ID NO: 73937 - protein, 36 aa, Artificial Sequence; identical to SEQ ID NO: 25353
  Cyclic GFR-binding peptide
  MOD_RES (1)..(33)..(35): Xaa is C or S

SEQ ID NO: 73938 - protein, 32 aa, Artificial Sequence
  Cyclic GFR-binding peptide
  MOD_RES (2)..(3): Xaa is C or S
PXXVSQDLSSLSILFFIGKTPKILKVYPMIVK

SEQ ID NO: 73939 - protein, 38 aa, Artificial Sequence
  Cyclic GFR-binding peptide
  MOD_RES (4)..(5)..(37): Xaa is C or S
PKAXXVPTELSSLSMLFFDENEKVVLKVYPDMVVEGXG

SEQ ID NO: 73940 - protein, 30 aa, Artificial Sequence
  Cyclic GFR-binding peptide
  MOD_RES (28)..(30): Xaa is C or S
MSSLSMLFFNDKQQIILKVYPGMVVDRXGX

SEQ ID NO: 73941 - protein, 29 aa, Artificial Sequence
  Cyclic GFR-binding peptide
  MOD_RES (1)..(2): Xaa is C or S
XXVPQDLSSLSILFFVGRTPKVLKVYPMV

SEQ ID NO: 73942 - protein, 24 aa, Artificial Sequence
  Cyclic GFR-binding peptide
MSSLSMLFFNDKQQIILKVYPGMV

SEQ ID NO: 73943 - protein, 27 aa, Artificial Sequence
  Cyclic GFR-binding peptide
VPTELSSLSMLFFDEYDKVVLKVYPEM

SEQ ID NO: 73944 - protein, 30 aa, Artificial Sequence
  Cyclic GFR-binding peptide
  MOD_RES (28)..(30): Xaa is C or S
KTSSLSMLFFDNGRVLLLKVYPMIVEEXGX

SEQ ID NO: 73945 - protein, 39 aa, Artificial Sequence; identical to SEQ ID NO: 25357
  Cyclic GFR-binding peptide
  MOD_RES (6)..(7)..(39): Xaa is C or S

SEQ ID NO: 73946 - protein, 37 aa, Artificial Sequence; identical to SEQ ID NO: 25358
  Cyclic GFR-binding peptide
  MOD_RES (4)..(5)..(37): Xaa is C or S

SEQ ID NO: 73947 - protein, 27 aa, Artificial Sequence
  Cyclic GFR-binding peptide
  MOD_RES (26)..(26): Xaa is C or S
SSLSMLFFDNGRVLLLKVYPMIVEEXG

SEQ ID NO: 73948 - protein, 30 aa, Artificial Sequence
  Cyclic GFR-binding peptide
  MOD_RES (29)..(29): Xaa is C or S
SSLSMLFFRIKPHQGQHLKVYPFLQHNKXE

SEQ ID NO: 73949 - protein, 31 aa, Artificial Sequence
  Cyclic GFR-binding peptide
  MOD_RES (31)..(31): Xaa is C or S
PTKLSSLSILFFDKGVVTYLKVYPGMAVSEX

SEQ ID NO: 73950 - protein, 31 aa, Artificial Sequence
  Cyclic GFR-binding peptide
  MOD_RES (29)..(31): Xaa is C or S
QALSSLSILFFVGRKPKVLKVYPMIVRSXKX

SEQ ID NO: 73951 - protein, 26 aa, Artificial Sequence
  Cyclic GFR-binding peptide
PQALSSLSILFFVGRKPKVLKVYPMI

SEQ ID NO: 73952 - protein, 36 aa, Artificial Sequence
  Cyclic GFR-binding peptide
  MOD_RES (6)..(7): Xaa is C or S
TVPKPXXAPTQLSSLSVLFFDDSSNVILKVYPNMVV

SEQ ID NO: 73953 - protein, 32 aa, Artificial Sequence
  Cyclic GFR-binding peptide
  MOD_RES (1)..(1): Xaa is C or S
XVPTEESSLSMLFFRIKPHQGQHLKVYPFLQH

SEQ ID NO: 73954 - protein, 30 aa, Artificial Sequence
  Cyclic GFR-binding peptide
  MOD_RES (3)..(4): Xaa is C or S
KPXXAPTQLSSLSVLFFDDSSNVILKVYPN

SEQ ID NO: 73955 - protein, 24 aa, Artificial Sequence
  Cyclic GFR-binding peptide
RLSSLSILFFDSANNVVLKVYPDM

SEQ ID NO: 73956 - protein, 37 aa, Artificial Sequence; identical to SEQ ID NO: 25363
  Cyclic GFR-binding peptide
  MOD_RES (2)..(3)..(35)..(37): Xaa is C or S

SEQ ID NO: 73957 - protein, 29 aa, Artificial Sequence
  Cyclic GFR-binding peptide
TEESSLSMLFFRIKPHQGQHLKVYPFLQH

SEQ ID NO: 73958 - protein, 26 aa, Artificial Sequence
  Cyclic GFR-binding peptide
ELSSLSMLFFDEYDKVVLKVYPEMVV

SEQ ID NO: 73959 - protein, 29 aa, Artificial Sequence
  Cyclic GFR-binding peptide
TKLSSLSVLFFDSSNNVILKVYPNMVVKA

SEQ ID NO: 73960 - protein, 32 aa, Artificial Sequence
  Cyclic GFR-binding peptide
  MOD_RES (29)..(31): Xaa is C or S
KLSSLSVLFFDDSSNVILKVYPNMVVRSXGXH

SEQ ID NO: 73961 - protein, 37 aa, Artificial Sequence; identical to SEQ ID NO: 25365
  Cyclic GFR-binding peptide
  MOD_RES (4)..(4): Xaa is C or S

SEQ ID NO: 73962 - protein, 39 aa, Artificial Sequence; identical to SEQ ID NO: 25366
  Cyclic GFR-binding peptide
  MOD_RES (5)..(6)..(38): Xaa is C or S

SEQ ID NO: 73963 - protein, 32 aa, Artificial Sequence
  Cyclic GFR-binding peptide
PSRVHHSSLSVLFFEYVRKKPKLLKVYPRLEE

SEQ ID NO: 73964 - protein, 38 aa, Artificial Sequence; identical to SEQ ID NO: 25369
  Cyclic GFR-binding peptide
  MOD_RES (4)..(5)..(36)..(38): Xaa is C or S

SEQ ID NO: 73965 - protein, 34 aa, Artificial Sequence
  Cyclic GFR-binding peptide
  MOD_RES (31)..(33): Xaa is C or S
TKLSSLSVLFFDDMGVPTLKVYPEGMSVAEXGXR

SEQ ID NO: 73966 - protein, 30 aa, Artificial Sequence
  Cyclic GFR-binding peptide
  MOD_RES (3)..(4): Xaa is C or S
STXXAPVKTSSLSMLFFDNGRVLLLKVYPM

SEQ ID NO: 73967 - protein, 37 aa, Artificial Sequence; identical to SEQ ID NO: 25373
  Cyclic GFR-binding peptide
  MOD_RES (6)..(7): Xaa is C or S

SEQ ID NO: 73968 - protein, 33 aa, Artificial Sequence
  Cyclic GFR-binding peptide
  MOD_RES (30)..(32): Xaa is C or S
TQLSSLSVLFFDDSSNVILKVYPNMVVRAXGXH

SEQ ID NO: 73969 - protein, 35 aa, Artificial Sequence
  Cyclic GFR-binding peptide
  MOD_RES (4)..(5): Xaa is C or S
GKAXXVPTKLSSLSVLFFDDMGVPTLKVYPEGMSV

SEQ ID NO: 73970 - protein, 33 aa, Artificial Sequence
  Cyclic GFR-binding peptide
  MOD_RES (32)..(32): Xaa is C or S
HHSSLSVLFFEYVRKKPKLLKVYPRLEEHLEXA

SEQ ID NO: 73971 - protein, 30 aa, Artificial Sequence; identical to SEQ ID NO: 762
  Cyclic GFR-binding peptide

SEQ ID NO: 73972 - protein, 28 aa, Artificial Sequence
  Cyclic GFR-binding peptide
  MOD_RES (27)..(27): Xaa is C or S
SSLSMLFFNDKQQIILKVYPGMVVDRXG

SEQ ID NO: 73973 - protein, 37 aa, Artificial Sequence; identical to SEQ ID NO: 25376
  Cyclic GFR-binding peptide
  MOD_RES (2)..(3)..(35)..(37): Xaa is C or S

SEQ ID NO: 73974 - protein, 37 aa, Artificial Sequence; identical to SEQ ID NO: 25377
  Cyclic GFR-binding peptide
  MOD_RES (4)..(5)..(37): Xaa is C or S

SEQ ID NO: 73975 - protein, 33 aa, Artificial Sequence; identical to SEQ ID NO: 25378
  Cyclic GFR-binding peptide
  MOD_RES (31)..(33): Xaa is C or S

SEQ ID NO: 73976 - protein, 35 aa, Artificial Sequence; identical to SEQ ID NO: 25379
  Cyclic GFR-binding peptide
  MOD_RES (34)..(34): Xaa is C or S

SEQ ID NO: 73977 - protein, 35 aa, Artificial Sequence; identical to SEQ ID NO: 25380
  Cyclic GFR-binding peptide
  MOD_RES (2)..(3)..(34): Xaa is C or S

SEQ ID NO: 73978 - protein, 28 aa, Artificial Sequence
  Cyclic GFR-binding peptide
  MOD_RES (28)..(28): Xaa is C or S
LSSLSVLFFDDSSNVILKVYPNMVVRAX

SEQ ID NO: 73979 - protein, 33 aa, Artificial Sequence; identical to SEQ ID NO: 25382
  Cyclic GFR-binding peptide
  MOD_RES (32)..(32): Xaa is C or S

SEQ ID NO: 73980 - protein, 36 aa, Artificial Sequence; identical to SEQ ID NO: 25383
  Cyclic GFR-binding peptide
  MOD_RES (5)..(6): Xaa is C or S

SEQ ID NO: 73981 - protein, 33 aa, Artificial Sequence
  Cyclic GFR-binding peptide
  MOD_RES (3)..(4): Xaa is C or S
KAXXVPTKLSSLSILFFDKGVVTYLKVYPGMAV

SEQ ID NO: 73982 - protein, 41 aa, Artificial Sequence; identical to SEQ ID NO: 25384
  Cyclic GFR-binding peptide
  MOD_RES (5)..(6)..(38)..(40): Xaa is C or S

SEQ ID NO: 73983 - protein, 31 aa, Artificial Sequence
  Cyclic GFR-binding peptide
  MOD_RES (31)..(31): Xaa is C or S
PTKMSSLSMLFFNDKQQIILKVYPGMVVDRX

SEQ ID NO: 73984 - protein, 37 aa, Artificial Sequence; identical to SEQ ID NO: 25385
  Cyclic GFR-binding peptide
  MOD_RES (36)..(36): Xaa is C or S

SEQ ID NO: 73985 - protein, 30 aa, Artificial Sequence
  Cyclic GFR-binding peptide
  MOD_RES (27)..(29): Xaa is C or S
SSLSMLFFDEYDKVVLKVYPEMVVEGXGXR

SEQ ID NO: 73986 - protein, 23 aa, Artificial Sequence
  Cyclic GFR-binding peptide
RLSSLSILFFDAANNVVLKVYPD

SEQ ID NO: 73987 - protein, 30 aa, Artificial Sequence
  Cyclic GFR-binding peptide
  MOD_RES (4)..(5): Xaa is C or S
ASPXXVPQDLSSLSILFFVGRTPKVLKVYP

SEQ ID NO: 73988 - protein, 22 aa, Artificial Sequence
  Cyclic GFR-binding peptide
SSLSILFFVGRKPKVLKVYPMI

SEQ ID NO: 73989 - protein, 28 aa, Artificial Sequence
  Cyclic GFR-binding peptide
  MOD_RES (1)..(1): Xaa is C or S
XVSQDLSSLSILFFIGKTPKILKVYPMI

SEQ ID NO: 73990 - protein, 34 aa, Artificial Sequence
  Cyclic GFR-binding peptide
  MOD_RES (4)..(5): Xaa is C or S
ASPXXVSQDLSSLSILFFIGKTPKILKVYPMIVK

SEQ ID NO: 73991 - protein, 35 aa, Artificial Sequence; identical to SEQ ID NO: 25387
  Cyclic GFR-binding peptide
  MOD_RES (1)..(2)..(34): Xaa is C or S

SEQ ID NO: 73992 - protein, 31 aa, Artificial Sequence
  Cyclic GFR-binding peptide
  MOD_RES (3)..(4): Xaa is C or S
KAXXVPTELSSLSMLFFDENEKVVLKVYPDM

SEQ ID NO: 73993 - protein, 38 aa, Artificial Sequence; identical to SEQ ID NO: 25390
  Cyclic GFR-binding peptide
  MOD_RES (3)..(4)..(36)..(38): Xaa is C or S

SEQ ID NO: 73994 - protein, 36 aa, Artificial Sequence; identical to SEQ ID NO: 25391
  Cyclic GFR-binding peptide
  MOD_RES (5)..(6): Xaa is C or S

SEQ ID NO: 73995 - protein, 29 aa, Artificial Sequence
  Cyclic GFR-binding peptide
  MOD_RES (29)..(29): Xaa is C or S
RLSSLSILFFDAANNVVLKVYPDMVVEAX

SEQ ID NO: 73996 - protein, 31 aa, Artificial Sequence
  Cyclic GFR-binding peptide
  MOD_RES (30)..(30): Xaa is C or S
TKLSSLSVLFFDDSSNVILKVYPNMVVRSXG

SEQ ID NO: 73997 - protein, 29 aa, Artificial Sequence
  Cyclic GFR-binding peptide
  MOD_RES (2)..(3): Xaa is C or S
PXXTPTKMSSLSMLFFNDKQQIILKVYPG

SEQ ID NO: 73998 - protein, 33 aa, Artificial Sequence; identical to SEQ ID NO: 25392
  Cyclic GFR-binding peptide
  MOD_RES (1)..(2): Xaa is C or S

SEQ ID NO: 73999 - protein, 34 aa, Artificial Sequence
  Cyclic GFR-binding peptide
  MOD_RES (33)..(33): Xaa is C or S
VHHSSLSVLFFEYVRKKPKLLKVYPRLEEHLEXA

SEQ ID NO: 74000 - protein, 31 aa, Artificial Sequence
  Cyclic GFR-binding peptide
  MOD_RES (28)..(30): Xaa is C or S
LSSLSVLFFDSSNNVILKVYPNMVVKAXGXH

SEQ ID NO: 74001 - protein, 39 aa, Artificial Sequence; identical to SEQ ID NO: 25393
  Cyclic GFR-binding peptide
  MOD_RES (5)..(6)..(39): Xaa is C or S

SEQ ID NO: 74002 - protein, 43 aa, Artificial Sequence; identical to SEQ ID NO: 25394
  Cyclic GFR-binding peptide
  MOD_RES (4)..(41)..(43): Xaa is C or S

SEQ ID NO: 74003 - protein, 37 aa, Artificial Sequence; identical to SEQ ID NO: 25395
  Cyclic GFR-binding peptide
  MOD_RES (5)..(6)..(37): Xaa is C or S

SEQ ID NO: 74004 - protein, 30 aa, Artificial Sequence
  Cyclic GFR-binding peptide
SRVHHSSLSVLFFEYVRKKPKLLKVYPRLE

SEQ ID NO: 74005 - protein, 33 aa, Artificial Sequence
  Cyclic GFR-binding peptide
  MOD_RES (1)..(2): Xaa is C or S
XXVPTELSSLSMLFFDENEKVVLKVYPDMVVEG

SEQ ID NO: 74006 - protein, 21 aa, Artificial Sequence
  Cyclic GFR-binding peptide
SSLSVLFFDSSNNVILKVYPN

SEQ ID NO: 74007 - protein, 20 aa, Artificial Sequence
  Cyclic GFR-binding peptide
SSLSMLFFDNGRVLLLKVYP

SEQ ID NO: 74008 - protein, 27 aa, Artificial Sequence
  Cyclic GFR-binding peptide
ELSSLSMLFFDENEKVVLKVYPDMVVE

SEQ ID NO: 74009 - protein, 36 aa, Artificial Sequence; identical to SEQ ID NO: 25399
  Cyclic GFR-binding peptide
  MOD_RES (4)..(5): Xaa is C or S

SEQ ID NO: 74010 - protein, 35 aa, Artificial Sequence
  Cyclic GFR-binding peptide
  MOD_RES (6)..(7): Xaa is C or S
TVPKPXXAPTQLSSLSVLFFDDSSNVILKVYPNMV

SEQ ID NO: 74011 - protein, 23 aa, Artificial Sequence
  Cyclic GFR-binding peptide
KLSSLSVLFFDDSSNVILKVYPN

SEQ ID NO: 74012 - protein, 34 aa, Artificial Sequence; identical to SEQ ID NO: 25400
  Cyclic GFR-binding peptide
  MOD_RES (32)..(34): Xaa is C or S

SEQ ID NO: 74013 - protein, 28 aa, Artificial Sequence
  Cyclic GFR-binding peptide
APTKLSSLSVLFFDDSSNVILKVYPNMV

SEQ ID NO: 74014 - protein, 34 aa, Artificial Sequence; identical to SEQ ID NO: 25402
  Cyclic GFR-binding peptide
  MOD_RES (1)..(32)..(34): Xaa is C or S

SEQ ID NO: 74015 - protein, 39 aa, Artificial Sequence; identical to SEQ ID NO: 25404
  Cyclic GFR-binding peptide
  MOD_RES (4)..(5)..(36)..(38): Xaa is C or S

SEQ ID NO: 74016 - protein, 40 aa, Artificial Sequence; identical to SEQ ID NO: 25405
  Cyclic GFR-binding peptide
  MOD_RES (6)..(40): Xaa is C or S

SEQ ID NO: 74017 - protein, 32 aa, Artificial Sequence
  Cyclic GFR-binding peptide
  MOD_RES (4)..(5): Xaa is C or S
ASPXXVPQDLSSLSILFFVGRTPKVLKVYPMV

SEQ ID NO: 74018 - protein, 36 aa, Artificial Sequence; identical to SEQ ID NO: 25406
  Cyclic GFR-binding peptide
  MOD_RES (2)..(3)..(35): Xaa is C or S

SEQ ID NO: 74019 - protein, 27 aa, Artificial Sequence
  Cyclic GFR-binding peptide
ARLSSLSILFFDAANNVVLKVYPDMVV

SEQ ID NO: 74020 - protein, 41 aa, Artificial Sequence; identical to SEQ ID NO: 25407
  Cyclic GFR-binding peptide
  MOD_RES (5)..(6)..(39)..(41): Xaa is C or S

SEQ ID NO: 74021 - protein, 34 aa, Artificial Sequence; identical to SEQ ID NO: 25408
  Cyclic GFR-binding peptide
  MOD_RES (1)..(32)..(34): Xaa is C or S

SEQ ID NO: 74022 - protein, 29 aa, Artificial Sequence
  Cyclic GFR-binding peptide
  MOD_RES (27)..(29): Xaa is C or S
SSLSILFFDKGVVTYLKVYPGMAVSEXGX

SEQ ID NO: 74023 - protein, 42 aa, Artificial Sequence; identical to SEQ ID NO: 25409
  Cyclic GFR-binding peptide
  MOD_RES (7)..(41): Xaa is C or S

SEQ ID NO: 74024 - protein, 29 aa, Artificial Sequence
  Cyclic GFR-binding peptide
  MOD_RES (2)..(3): Xaa is C or S
PXXVPQALSSLSILFFVGRKPKVLKVYPM

SEQ ID NO: 74025 - protein, 35 aa, Artificial Sequence
  Cyclic GFR-binding peptide
  MOD_RES (6)..(6): Xaa is C or S
DEGLEXVPTEESSLSMLFFRIKPHQGQHLKVYPFL

SEQ ID NO: 74026 - protein, 32 aa, Artificial Sequence
  Cyclic GFR-binding peptide
  MOD_RES (3)..(4): Xaa is C or S
KAXXVPTELSSLSMLFFDEYDKVVLKVYPEMV

SEQ ID NO: 74027 - protein, 25 aa, Artificial Sequence
  Cyclic GFR-binding peptide
HHSSLSVLFFEYVRKKPKLLKVYPR

SEQ ID NO: 74028 - protein, 31 aa, Artificial Sequence
  Cyclic GFR-binding peptide
  MOD_RES (31)..(31): Xaa is C or S
PTRLSSLSILFFDSANNVVLKVYPDMVVESX

SEQ ID NO: 74029 - protein, 34 aa, Artificial Sequence; identical to SEQ ID NO: 25414
  Cyclic GFR-binding peptide
  MOD_RES (32)..(34): Xaa is C or S

SEQ ID NO: 74030 - protein, 39 aa, Artificial Sequence; identical to SEQ ID NO: 25416
  Cyclic GFR-binding peptide
  MOD_RES (6)..(7)..(39): Xaa is C or S

SEQ ID NO: 74031 - protein, 26 aa, Artificial Sequence
  Cyclic GFR-binding peptide
PTQLSSLSVLFFDDSSNVILKVYPNM

SEQ ID NO: 74032 - protein, 35 aa, Artificial Sequence; identical to SEQ ID NO: 25417
  Cyclic GFR-binding peptide
  MOD_RES (1)..(2)..(34): Xaa is C or S

SEQ ID NO: 74033 - protein, 30 aa, Artificial Sequence
  Cyclic GFR-binding peptide
  MOD_RES (27)..(29): Xaa is C or S
SSLSMLFFDENEKVVLKVYPDMVVEGXGXR

SEQ ID NO: 74034 - protein, 40 aa, Artificial Sequence; identical to SEQ ID NO: 25424
  Cyclic GFR-binding peptide
  MOD_RES (5)..(6)..(37)..(39): Xaa is C or S

SEQ ID NO: 74035 - protein, 28 aa, Artificial Sequence
  Cyclic GFR-binding peptide
KLSSLSVLFFDSSNNVILKVYPNMVVKA

SEQ ID NO: 74036 - protein, 24 aa, Artificial Sequence
  Cyclic GFR-binding peptide
PTKMSSLSMLFFNDKQQIILKVYP

SEQ ID NO: 74037 - protein, 29 aa, Artificial Sequence
  Cyclic GFR-binding peptide
PTKLSSLSVLFFDDMGVPTLKVYPEGMSV

SEQ ID NO: 74038 - protein, 22 aa, Artificial Sequence
  Cyclic GFR-binding peptide
LSSLSILFFDSANNVVLKVYPD

SEQ ID NO: 74039 - protein, 30 aa, Artificial Sequence
  Cyclic GFR-binding peptide
  MOD_RES (2)..(3): Xaa is C or S
AXXAPTKLSSLSVLFFDSSNNVILKVYPNM

SEQ ID NO: 74040 - protein, 40 aa, Artificial Sequence; identical to SEQ ID NO: 25430
  Cyclic GFR-binding peptide
  MOD_RES (5)..(6)..(37)..(39): Xaa is C or S

SEQ ID NO: 74041 - protein, 26 aa, Artificial Sequence
  Cyclic GFR-binding peptide
SSLSILFFDKGVVTYLKVYPGMAVSE

SEQ ID NO: 74042 - protein, 33 aa, Artificial Sequence
  Cyclic GFR-binding peptide
  MOD_RES (6)..(7): Xaa is C or S
ASAAPXXVPQALSSLSILFFVGRKPKVLKVYPM

SEQ ID NO: 74043 - protein, 33 aa, Artificial Sequence; identical to SEQ ID NO: 25432
  Cyclic GFR-binding peptide
  MOD_RES (32)..(32): Xaa is C or S

SEQ ID NO: 74044 - protein, 36 aa, Artificial Sequence; identical to SEQ ID NO: 25433
  Cyclic GFR-binding peptide
  MOD_RES (2)..(3)..(34)..(36): Xaa is C or S

SEQ ID NO: 74045 - protein, 28 aa, Artificial Sequence
  Cyclic GFR-binding peptide
  MOD_RES (28)..(28): Xaa is C or S
LSSLSILFFDAANNVVLKVYPDMVVEAX

SEQ ID NO: 74046 - protein, 31 aa, Artificial Sequence; identical to SEQ ID NO: 25434
  Cyclic GFR-binding peptide

SEQ ID NO: 74047 - protein, 34 aa, Artificial Sequence
  Cyclic GFR-binding peptide
  MOD_RES (4)..(5): Xaa is C or S
PKPXXAPTKLSSLSVLFFDDSSNVILKVYPNMVV

SEQ ID NO: 74048 - protein, 34 aa, Artificial Sequence; identical to SEQ ID NO: 25435
  Cyclic GFR-binding peptide
  MOD_RES (1)..(2)..(33): Xaa is C or S

SEQ ID NO: 74049 - protein, 29 aa, Artificial Sequence
  Cyclic GFR-binding peptide
  MOD_RES (27)..(29): Xaa is C or S
SSLSILFFDAANNVVLKVYPDMVVEAXGX

SEQ ID NO: 74050 - protein, 32 aa, Artificial Sequence; identical to SEQ ID NO: 25436
  Cyclic GFR-binding peptide
  MOD_RES (1)..(2): Xaa is C or S

SEQ ID NO: 74051 - protein, 37 aa, Artificial Sequence; identical to SEQ ID NO: 25437
  Cyclic GFR-binding peptide
  MOD_RES (2)..(3)..(36): Xaa is C or S

SEQ ID NO: 74052 - protein, 25 aa, Artificial Sequence
  Cyclic GFR-binding peptide
APTQLSSLSVLFFDDSSNVILKVYP

SEQ ID NO: 74053 - protein, 24 aa, Artificial Sequence
  Cyclic GFR-binding peptide
DLSSLSILFFIGKTPKILKVYPMI

SEQ ID NO: 74054 - protein, 30 aa, Artificial Sequence
  Cyclic GFR-binding peptide
  MOD_RES (2)..(3): Xaa is C or S
PXXVPQALSSLSILFFVGRKPKVLKVYPMI

SEQ ID NO: 74055 - protein, 35 aa, Artificial Sequence
  Cyclic GFR-binding peptide
  MOD_RES (4)..(4): Xaa is C or S
SVKXQPSRVHHSSLSVLFFEYVRKKPKLLKVYPRL

SEQ ID NO: 74056 - protein, 34 aa, Artificial Sequence
  Cyclic GFR-binding peptide
  MOD_RES (6)..(7): Xaa is C or S
ASASPXXVSQDLSSLSILFFIGKTPKILKVYPMI

SEQ ID NO: 74057 - protein, 29 aa, Artificial Sequence
  Cyclic GFR-binding peptide
  MOD_RES (28)..(28): Xaa is C or S
LSSLSMLFFDEYDKVVLKVYPEMVVEGXG

SEQ ID NO: 74058 - protein, 26 aa, Artificial Sequence
  Cyclic GFR-binding peptide
SSLSVLFFEYVRKKPKLLKVYPRLEE

SEQ ID NO: 74059 - protein, 27 aa, Artificial Sequence
  Cyclic GFR-binding peptide
  MOD_RES (27)..(27): Xaa is C or S
SSLSMLFFNDKQQIILKVYPGMVVDRX

SEQ ID NO: 74060 - protein, 30 aa, Artificial Sequence
  Cyclic GFR-binding peptide
  MOD_RES (30)..(30): Xaa is C or S
TKLSSLSVLFFDDSSNVILKVYPNMVVRSX

SEQ ID NO: 74061 - protein, 31 aa, Artificial Sequence; identical to SEQ ID NO: 25442
  Cyclic GFR-binding peptide
  MOD_RES (1)..(1): Xaa is C or S

SEQ ID NO: 74062 - protein, 28 aa, Artificial Sequence
  Cyclic GFR-binding peptide
VKTSSLSMLFFDNGRVLLLKVYPMIVEE

SEQ ID NO: 74063 - protein, 35 aa, Artificial Sequence; identical to SEQ ID NO: 25444
  Cyclic GFR-binding peptide
  MOD_RES (4)..(5): Xaa is C or S

SEQ ID NO: 74064 - protein, 41 aa, Artificial Sequence; identical to SEQ ID NO: 25445
  Cyclic GFR-binding peptide
  MOD_RES (6)..(7)..(38)..(40): Xaa is C or S

SEQ ID NO: 74065 - protein, 26 aa, Artificial Sequence
  Cyclic GFR-binding peptide
SSLSVLFFDDMGVPTLKVYPEGMSVA

SEQ ID NO: 74066 - protein, 34 aa, Artificial Sequence; identical to SEQ ID NO: 25446
  Cyclic GFR-binding peptide
  MOD_RES (1)..(1): Xaa is C or S

SEQ ID NO: 74067 - protein, 36 aa, Artificial Sequence; identical to SEQ ID NO: 25447
  Cyclic GFR-binding peptide
  MOD_RES (2)..(3)..(35): Xaa is C or S

SEQ ID NO: 74068 - protein, 31 aa, Artificial Sequence
  Cyclic GFR-binding peptide
  MOD_RES (30)..(30): Xaa is C or S
TQLSSLSVLFFDDSSNVILKVYPNMVVRAXG

SEQ ID NO: 74069 - protein, 21 aa, Artificial Sequence
  Cyclic GFR-binding peptide
LSSLSILFFVGRTPKVLKVYP

SEQ ID NO: 74070 - protein, 29 aa, Artificial Sequence
  Cyclic GFR-binding peptide
VSQDLSSLSILFFIGKTPKILKVYPMIVK

SEQ ID NO: 74071 - protein, 39 aa, Artificial Sequence; identical to SEQ ID NO: 25448
  Cyclic GFR-binding peptide
  MOD_RES (4)..(5)..(37)..(39): Xaa is C or S

SEQ ID NO: 74072 - protein, 28 aa, Artificial Sequence
  Cyclic GFR-binding peptide
TRLSSLSILFFDSANNVVLKVYPDMVVE

SEQ ID NO: 74073 - protein, 35 aa, Artificial Sequence
  Cyclic GFR-binding peptide
  MOD_RES (6)..(7): Xaa is C or S
ASASPXXVSQDLSSLSILFFIGKTPKILKVYPMIV

SEQ ID NO: 74074 - protein, 37 aa, Artificial Sequence; identical to SEQ ID NO: 25450
  Cyclic GFR-binding peptide
  MOD_RES (4)..(5)..(37): Xaa is C or S

SEQ ID NO: 74075 - protein, 30 aa, Artificial Sequence
  Cyclic GFR-binding peptide
  MOD_RES (30)..(30): Xaa is C or S
PQDLSSLSILFFVGRTPKVLKVYPMVVKSX

SEQ ID NO: 74076 - protein, 35 aa, Artificial Sequence
  Cyclic GFR-binding peptide
  MOD_RES (5)..(6): Xaa is C or S
SASPXXVSQDLSSLSILFFIGKTPKILKVYPMIVK

SEQ ID NO: 74077 - protein, 30 aa, Artificial Sequence
  Cyclic GFR-binding peptide
  MOD_RES (30)..(30): Xaa is C or S
ARLSSLSILFFDAANNVVLKVYPDMVVEAX

SEQ ID NO: 74078 - protein, 27 aa, Artificial Sequence
  Cyclic GFR-binding peptide
VPQDLSSLSILFFVGRTPKVLKVYPMV

SEQ ID NO: 74079 - protein, 28 aa, Artificial Sequence
  Cyclic GFR-binding peptide
KLSSLSVLFFDDSSNVILKVYPNMVVRS

SEQ ID NO: 74080 - protein, 25 aa, Artificial Sequence
  Cyclic GFR-binding peptide
LSSLSILFFDKGVVTYLKVYPGMAV

SEQ ID NO: 74081 - protein, 39 aa, Artificial Sequence; identical to SEQ ID NO: 25455
  Cyclic GFR-binding peptide
  MOD_RES (5)..(6)..(38): Xaa is C or S

SEQ ID NO: 74082 - protein, 32 aa, Artificial Sequence; identical to SEQ ID NO: 25457
  Cyclic GFR-binding peptide
  MOD_RES (2)..(2): Xaa is C or S

SEQ ID NO: 74083 - protein, 34 aa, Artificial Sequence
  Cyclic GFR-binding peptide
  MOD_RES (3)..(3): Xaa is C or S
VKXQPSRVHHSSLSVLFFEYVRKKPKLLKVYPRL

SEQ ID NO: 74084 - protein, 32 aa, Artificial Sequence; identical to SEQ ID NO: 25458
  Cyclic GFR-binding peptide
  MOD_RES (1)..(1): Xaa is C or S

SEQ ID NO: 74085 - protein, 39 aa, Artificial Sequence; identical to SEQ ID NO: 25459
  Cyclic GFR-binding peptide
  MOD_RES (7)..(7): Xaa is C or S

SEQ ID NO: 74086 - protein, 42 aa, Artificial Sequence
  Cyclic GFR-binding peptide
  MOD_RES (4)..(41): Xaa is C or S
SVKXQPSRVHHSSLSVLFFEYVRKKPKLLKVYPRLEEHLEXA

SEQ ID NO: 74087 - protein, 38 aa, Artificial Sequence; identical to SEQ ID NO: 25460
  Cyclic GFR-binding peptide
  MOD_RES (2)..(3)..(35)..(37): Xaa is C or S

SEQ ID NO: 74088 - protein, 38 aa, Artificial Sequence; identical to SEQ ID NO: 25461
  Cyclic GFR-binding peptide
  MOD_RES (3)..(4)..(36)..(38): Xaa is C or S

SEQ ID NO: 74089 - protein, 42 aa, Artificial Sequence; identical to SEQ ID NO: 25462
  Cyclic GFR-binding peptide
  MOD_RES (5)..(42): Xaa is C or S

SEQ ID NO: 74090 - protein, 24 aa, Artificial Sequence
  Cyclic GFR-binding peptide
PTRLSSLSILFFDSANNVVLKVYP

SEQ ID NO: 74091 - protein, 23 aa, Artificial Sequence
  Cyclic GFR-binding peptide
SSLSMLFFRIKPHQGQHLKVYPF

SEQ ID NO: 74092 - protein, 30 aa, Artificial Sequence
  Cyclic GFR-binding peptide
  MOD_RES (27)..(29): Xaa is C or S
SSLSVLFFDDSSNVILKVYPNMVVRAXGXH

SEQ ID NO: 74093 - protein, 40 aa, Artificial Sequence; identical to SEQ ID NO: 25464
  Cyclic GFR-binding peptide
  MOD_RES (6)..(7)..(39): Xaa is C or S

SEQ ID NO: 74094 - protein, 30 aa, Artificial Sequence
  Cyclic GFR-binding peptide
PTKLSSLSVLFFDDSSNVILKVYPNMVVRS

SEQ ID NO: 74095 - protein, 37 aa, Artificial Sequence; identical to SEQ ID NO: 25465
  Cyclic GFR-binding peptide
  MOD_RES (4)..(5)..(37): Xaa is C or S

SEQ ID NO: 74096 - protein, 35 aa, Artificial Sequence; identical to SEQ ID NO: 25466
  Cyclic GFR-binding peptide
  MOD_RES (1)..(32)..(34): Xaa is C or S

SEQ ID NO: 74097 - protein, 31 aa, Artificial Sequence
  Cyclic GFR-binding peptide
  MOD_RES (30)..(30): Xaa is C or S
TRLSSLSILFFDSANNVVLKVYPDMVVESXG

SEQ ID NO: 74098 - protein, 29 aa, Artificial Sequence
  Cyclic GFR-binding peptide
  MOD_RES (29)..(29): Xaa is C or S
QDLSSLSILFFIGKTPKILKVYPMIVKSX

SEQ ID NO: 74099 - protein, 35 aa, Artificial Sequence; identical to SEQ ID NO: 25469
  Cyclic GFR-binding peptide
  MOD_RES (1)..(1): Xaa is C or S

SEQ ID NO: 74100 - protein, 31 aa, Artificial Sequence
  Cyclic GFR-binding peptide
  MOD_RES (3)..(4): Xaa is C or S
KPXXAPTKLSSLSVLFFDDSSNVILKVYPNM

SEQ ID NO: 74101 - protein, 34 aa, Artificial Sequence
  Cyclic GFR-binding peptide
  MOD_RES (34)..(34): Xaa is C or S
RVHHSSLSVLFFEYVRKKPKLLKVYPRLEEHLEX

SEQ ID NO: 74102 - protein, 32 aa, Artificial Sequence; identical to SEQ ID NO: 25471
  Cyclic GFR-binding peptide
  MOD_RES (1)..(2): Xaa is C or S

SEQ ID NO: 74103 - protein, 30 aa, Artificial Sequence
  Cyclic GFR-binding peptide
  MOD_RES (1)..(2): Xaa is C or S
XXTPTKMSSLSMLFFNDKQQIILKVYPGMV

SEQ ID NO: 74104 - protein, 24 aa, Artificial Sequence
  Cyclic GFR-binding peptide
SSLSVLFFDDMGVPTLKVYPEGMS

SEQ ID NO: 74105 - protein, 36 aa, Artificial Sequence
  Cyclic GFR-binding peptide
  MOD_RES (4)..(4): Xaa is C or S
SVKXQPSRVHHSSLSVLFFEYVRKKPKLLKVYPRLE

SEQ ID NO: 74106 - protein, 37 aa, Artificial Sequence; identical to SEQ ID NO: 25472
  Cyclic GFR-binding peptide
  MOD_RES (6)..(7): Xaa is C or S

SEQ ID NO: 74107 - protein, 38 aa, Artificial Sequence; identical to SEQ ID NO: 25474
  Cyclic GFR-binding peptide
  MOD_RES (6)..(7): Xaa is C or S

SEQ ID NO: 74108 - protein, 22 aa, Artificial Sequence
  Cyclic GFR-binding peptide
RLSSLSILFFDAANNVVLKVYP

SEQ ID NO: 74109 - protein, 32 aa, Artificial Sequence
  Cyclic GFR-binding peptide
  MOD_RES (1)..(1): Xaa is C or S
XVPTELSSLSMLFFDENEKVVLKVYPDMVVEG

SEQ ID NO: 74110 - protein, 34 aa, Artificial Sequence; identical to SEQ ID NO: 25476
  Cyclic GFR-binding peptide
  MOD_RES (3)..(4): Xaa is C or S

SEQ ID NO: 74111 - protein, 30 aa, Artificial Sequence
  Cyclic GFR-binding peptide
  MOD_RES (2)..(3): Xaa is C or S
AXXVPTKLSSLSILFFDKGVVTYLKVYPGM

SEQ ID NO: 74112 - protein, 23 aa, Artificial Sequence
  Cyclic GFR-binding peptide
KLSSLSVLFFDDMGVPTLKVYPE

SEQ ID NO: 74113 - protein, 28 aa, Artificial Sequence
  Cyclic GFR-binding peptide
  MOD_RES (2)..(3): Xaa is C or S
PXXTPTKMSSLSMLFFNDKQQIILKVYP

SEQ ID NO: 74114 - protein, 29 aa, Artificial Sequence
  Cyclic GFR-binding peptide
EESSLSMLFFRIKPHQGQHLKVYPFLQHN

SEQ ID NO: 74115 - protein, 39 aa, Artificial Sequence; identical to SEQ ID NO: 25479
  Cyclic GFR-binding peptide
  MOD_RES (4)..(5)..(37)..(39): Xaa is C or S

SEQ ID NO: 74116 - protein, 34 aa, Artificial Sequence; identical to SEQ ID NO: 25480
  Cyclic GFR-binding peptide
  MOD_RES (2)..(3): Xaa is C or S

SEQ ID NO: 74117 - protein, 31 aa, Artificial Sequence
  Cyclic GFR-binding peptide
  MOD_RES (3)..(4): Xaa is C or S
GPXXTPTKMSSLSMLFFNDKQQIILKVYPGM

SEQ ID NO: 74118 - protein, 37 aa, Artificial Sequence; identical to SEQ ID NO: 25482
  Cyclic GFR-binding peptide
  MOD_RES (1)..(35)..(37): Xaa is C or S

SEQ ID NO: 74119 - protein, 39 aa, Artificial Sequence; identical to SEQ ID NO: 25483
  Cyclic GFR-binding peptide
  MOD_RES (3)..(4)..(36)..(38): Xaa is C or S

SEQ ID NO: 74120 - protein, 29 aa, Artificial Sequence
  Cyclic GFR-binding peptide
TKMSSLSMLFFNDKQQIILKVYPGMVVDR

SEQ ID NO: 74121 - protein, 34 aa, Artificial Sequence
  Cyclic GFR-binding peptide
  MOD_RES (6)..(7): Xaa is C or S
RVPSTXXAPVKTSSLSMLFFDNGRVLLLKVYPMI

SEQ ID NO: 74122 - protein, 37 aa, Artificial Sequence; identical to SEQ ID NO: 25485
  Cyclic GFR-binding peptide
  MOD_RES (6)..(7): Xaa is C or S

SEQ ID NO: 74123 - protein, 27 aa, Artificial Sequence
  Cyclic GFR-binding peptide
  MOD_RES (27)..(27): Xaa is C or S
SSLSVLFFDDSSNVILKVYPNMVVRAX

SEQ ID NO: 74124 - protein, 35 aa, Artificial Sequence; identical to SEQ ID NO: 25487
  Cyclic GFR-binding peptide
  MOD_RES (2)..(3)..(34): Xaa is C or S

SEQ ID NO: 74125 - protein, 33 aa, Artificial Sequence; identical to SEQ ID NO: 25488
  Cyclic GFR-binding peptide
  MOD_RES (3)..(3): Xaa is C or S

SEQ ID NO: 74126 - protein, 30 aa, Artificial Sequence
  Cyclic GFR-binding peptide
  MOD_RES (4)..(5): Xaa is C or S
PKPXXAPTQLSSLSVLFFDDSSNVILKVYP

SEQ ID NO: 74127 - protein, 31 aa, Artificial Sequence
  Cyclic GFR-binding peptide
  MOD_RES (31)..(31): Xaa is C or S
HSSLSVLFFEYVRKKPKLLKVYPRLEEHLEX

SEQ ID NO: 74128 - protein, 28 aa, Artificial Sequence
  Cyclic GFR-binding peptide
TKLSSLSILFFDKGVVTYLKVYPGMAVS

SEQ ID NO: 74129 - protein, 30 aa, Artificial Sequence
  Cyclic GFR-binding peptide
  MOD_RES (28)..(30): Xaa is C or S
LSSLSILFFDAANNVVLKVYPDMVVEAXGX

SEQ ID NO: 74130 - protein, 40 aa, Artificial Sequence; identical to SEQ ID NO: 25490
  Cyclic GFR-binding peptide
  MOD_RES (5)..(6)..(38)..(40): Xaa is C or S

SEQ ID NO: 74131 - protein, 31 aa, Artificial Sequence
  Cyclic GFR-binding peptide
  MOD_RES (4)..(4): Xaa is C or S
KPTXAPTKLSSLSVLFFDDSSNVILKVYPNM

SEQ ID NO: 74132 - protein, 28 aa, Artificial Sequence
  Cyclic GFR-binding peptide
PTELSSLSMLFFDENEKVVLKVYPDMVV

SEQ ID NO: 74133 - protein, 37 aa, Artificial Sequence; identical to SEQ ID NO: 25492
  Cyclic GFR-binding peptide
  MOD_RES (1)..(34)..(36): Xaa is C or S

SEQ ID NO: 74134 - protein, 36 aa, Artificial Sequence
  Cyclic GFR-binding peptide
  MOD_RES (6)..(7): Xaa is C or S
ASASPXXVPQDLSSLSILFFVGRTPKVLKVYPMVVK

SEQ ID NO: 74135 - protein, 39 aa, Artificial Sequence; identical to SEQ ID NO: 25493
  Cyclic GFR-binding peptide
  MOD_RES (3)..(4)..(36)..(38): Xaa is C or S

SEQ ID NO: 74136 - protein, 33 aa, Artificial Sequence; identical to SEQ ID NO: 25494
  Cyclic GFR-binding peptide
  MOD_RES (2)..(3): Xaa is C or S

SEQ ID NO: 74137 - protein, 26 aa, Artificial Sequence
  Cyclic GFR-binding peptide
PQDLSSLSILFFVGRTPKVLKVYPMV

SEQ ID NO: 74138 - protein, 29 aa, Artificial Sequence
  Cyclic GFR-binding peptide
  MOD_RES (28)..(28): Xaa is C or S
LSSLSILFFDSANNVVLKVYPDMVVESXG

SEQ ID NO: 74139 - protein, 26 aa, Artificial Sequence
  Cyclic GFR-binding peptide
TKLSSLSVLFFDSSNNVILKVYPNMV

SEQ ID NO: 74140 - protein, 33 aa, Artificial Sequence
  Cyclic GFR-binding peptide
  MOD_RES (30)..(32): Xaa is C or S
ESSLSMLFFRIKPHQGQHLKVYPFLQHNKXEXR

SEQ ID NO: 74141 - protein, 35 aa, Artificial Sequence; identical to SEQ ID NO: 25496
  Cyclic GFR-binding peptide
  MOD_RES (3)..(35): Xaa is C or S

SEQ ID NO: 74142 - protein, 34 aa, Artificial Sequence; identical to SEQ ID NO: 25497
  Cyclic GFR-binding peptide

SEQ ID NO: 74143 - protein, 37 aa, Artificial Sequence
  Cyclic GFR-binding peptide
  MOD_RES (2)..(3)..(35)..(37): Xaa is C or S
AXXVPTELSSLSMLFFDENEKVVLKVYPDMVVEGXGX

SEQ ID NO: 74144 - protein, 35 aa, Artificial Sequence
  Cyclic GFR-binding peptide
  MOD_RES (33)..(35): Xaa is C or S
PTEESSLSMLFFRIKPHQGQHLKVYPFLQHNKXEX

SEQ ID NO: 74145 - protein, 28 aa, Artificial Sequence
  Cyclic GFR-binding peptide
  MOD_RES (26)..(28): Xaa is C or S
SSLSILFFVGRTPKVLKVYPMVVKSXKX

SEQ ID NO: 74146 - protein, 34 aa, Artificial Sequence; identical to SEQ ID NO: 25501
  Cyclic GFR-binding peptide
  MOD_RES (1)..(2)..(34): Xaa is C or S

SEQ ID NO: 74147 - protein, 27 aa, Artificial Sequence
  Cyclic GFR-binding peptide
PTQLSSLSVLFFDDSSNVILKVYPNMV

SEQ ID NO: 74148 - protein, 29 aa, Artificial Sequence
  Cyclic GFR-binding peptide
TRLSSLSILFFDSANNVVLKVYPDMVVES

SEQ ID NO: 74149 - protein, 35 aa, Artificial Sequence; identical to SEQ ID NO: 25503
  Cyclic GFR-binding peptide
  MOD_RES (32)..(34): Xaa is C or S

SEQ ID NO: 74150 - protein, 29 aa, Artificial Sequence
  Cyclic GFR-binding peptide
  MOD_RES (3)..(4): Xaa is C or S
KPXXAPTKLSSLSVLFFDDSSNVILKVYP

SEQ ID NO: 74151 - protein, 23 aa, Artificial Sequence
  Cyclic GFR-binding peptide
SSLSILFFVGRKPKVLKVYPMIV

SEQ ID NO: 74152 - protein, 32 aa, Artificial Sequence
  Cyclic GFR-binding peptide
  MOD_RES (31)..(31): Xaa is C or S
PTKMSSLSMLFFNDKQQIILKVYPGMVVDRXG

SEQ ID NO: 74153 - protein, 31 aa, Artificial Sequence
  Cyclic GFR-binding peptide
  MOD_RES (2)..(3): Xaa is C or S
AXXVPTKLSSLSILFFDKGVVTYLKVYPGMA

SEQ ID NO: 74154 - protein, 34 aa, Artificial Sequence; identical to SEQ ID NO: 25506
  Cyclic GFR-binding peptide
  MOD_RES (1)..(2)..(34): Xaa is C or S

SEQ ID NO: 74155 - protein, 27 aa, Artificial Sequence
  Cyclic GFR-binding peptide
  MOD_RES (27)..(27): Xaa is C or S
LSSLSILFFIGKTPKILKVYPMIVKSX

SEQ ID NO: 74156 - protein, 33 aa, Artificial Sequence; identical to SEQ ID NO: 25508
  Cyclic GFR-binding peptide
  MOD_RES (2)..(3): Xaa is C or S

SEQ ID NO: 74157 - protein, 33 aa, Artificial Sequence; identical to SEQ ID NO: 25507
  Cyclic GFR-binding peptide
  MOD_RES (31)..(33): Xaa is C or S

SEQ ID NO: 74158 - protein, 35 aa, Artificial Sequence
  Cyclic GFR-binding peptide
  MOD_RES (3)..(4): Xaa is C or S
KAXXVPTELSSLSMLFFDENEKVVLKVYPDMVVEG

SEQ ID NO: 74159 - protein, 39 aa, Artificial Sequence; identical to SEQ ID NO: 25510
  Cyclic GFR-binding peptide
  MOD_RES (5)..(5): Xaa is C or S

SEQ ID NO: 74160 - protein, 33 aa, Artificial Sequence; identical to SEQ ID NO: 25511
  Cyclic GFR-binding peptide
  MOD_RES (2)..(3): Xaa is C or S

SEQ ID NO: 74161 - protein, 21 aa, Artificial Sequence
  Cyclic GFR-binding peptide
SSLSVLFFDDMGVPTLKVYPE

SEQ ID NO: 74162 - protein, 26 aa, Artificial Sequence
  Cyclic GFR-binding peptide
RVHHSSLSVLFFEYVRKKPKLLKVYP

SEQ ID NO: 74163 - protein, 28 aa, Artificial Sequence
  Cyclic GFR-binding peptide
  MOD_RES (27)..(27): Xaa is C or S
SSLSILFFDKGVVTYLKVYPGMAVSEXG

SEQ ID NO: 74164 - protein, 37 aa, Artificial Sequence; identical to SEQ ID NO: 25512
  Cyclic GFR-binding peptide
  MOD_RES (4)..(5): Xaa is C or S

SEQ ID NO: 74165 - protein, 22 aa, Artificial Sequence
  Cyclic GFR-binding peptide
KLSSLSVLFFDDMGVPTLKVYP

SEQ ID NO: 74166 - protein, 33 aa, Artificial Sequence; identical to SEQ ID NO: 25513
  Cyclic GFR-binding peptide
  MOD_RES (1)..(2): Xaa is C or S

SEQ ID NO: 74167 - protein, 27 aa, Artificial Sequence
  Cyclic GFR-binding peptide
TKLSSLSILFFDKGVVTYLKVYPGMAV

SEQ ID NO: 74168 - protein, 37 aa, Artificial Sequence; identical to SEQ ID NO: 25516
  Cyclic GFR-binding peptide
  MOD_RES (3)..(4)..(35)..(37): Xaa is C or S

SEQ ID NO: 74169 - protein, 31 aa, Artificial Sequence
  Cyclic GFR-binding peptide
  MOD_RES (30)..(30): Xaa is C or S
TELSSLSMLFFDENEKVVLKVYPDMVVEGXG

SEQ ID NO: 74170 - protein, 34 aa, Artificial Sequence
  Cyclic GFR-binding peptide
  MOD_RES (6)..(7): Xaa is C or S
ASAAPXXVPQALSSLSILFFVGRKPKVLKVYPMI

SEQ ID NO: 74171 - protein, 37 aa, Artificial Sequence; identical to SEQ ID NO: 25518
  Cyclic GFR-binding peptide
  MOD_RES (6)..(7): Xaa is C or S

SEQ ID NO: 74172 - protein, 27 aa, Artificial Sequence
  Cyclic GFR-binding peptide
  MOD_RES (1)..(1): Xaa is C or S
XVPTELSSLSMLFFDENEKVVLKVYPD

SEQ ID NO: 74173 - protein, 31 aa, Artificial Sequence
  Cyclic GFR-binding peptide
VPTKLSSLSVLFFDDMGVPTLKVYPEGMSVA

SEQ ID NO: 74174 - protein, 22 aa, Artificial Sequence
  Cyclic GFR-binding peptide
MSSLSMLFFNDKQQIILKVYPG

SEQ ID NO: 74175 - protein, 30 aa, Artificial Sequence
  Cyclic GFR-binding peptide
PTKLSSLSVLFFDDMGVPTLKVYPEGMSVA

SEQ ID NO: 74176 - protein, 38 aa, Artificial Sequence; identical to SEQ ID NO: 25521
  Cyclic GFR-binding peptide
  MOD_RES (3)..(35)..(37): Xaa is C or S

SEQ ID NO: 74177 - protein, 33 aa, Artificial Sequence
  Cyclic GFR-binding peptide
  MOD_RES (2)..(3): Xaa is C or S
AXXVPTKLSSLSVLFFDDMGVPTLKVYPEGMSV

SEQ ID NO: 74178 - protein, 26 aa, Artificial Sequence
  Cyclic GFR-binding peptide
  MOD_RES (1)..(1): Xaa is C or S
XAPTKLSSLSVLFFDDSSNVILKVYP

SEQ ID NO: 74179 - protein, 37 aa, Artificial Sequence; identical to SEQ ID NO: 25522
  Cyclic GFR-binding peptide
  MOD_RES (2)..(3)..(34)..(36): Xaa is C or S

SEQ ID NO: 74180 - protein, 30 aa, Artificial Sequence; identical to SEQ ID NO: 25523
  Cyclic GFR-binding peptide

SEQ ID NO: 74181 - protein, 37 aa, Artificial Sequence; identical to SEQ ID NO: 25524
  Cyclic GFR-binding peptide
  MOD_RES (6)..(7): Xaa is C or S

SEQ ID NO: 74182 - protein, 36 aa, Artificial Sequence; identical to SEQ ID NO: 25525
  Cyclic GFR-binding peptide
  MOD_RES (1)..(33)..(35): Xaa is C or S

SEQ ID NO: 74183 - protein, 36 aa, Artificial Sequence; identical to SEQ ID NO: 25526
  Cyclic GFR-binding peptide
  MOD_RES (4)..(5): Xaa is C or S

SEQ ID NO: 74184 - protein, 26 aa, Artificial Sequence
  Cyclic GFR-binding peptide
  MOD_RES (26)..(26): Xaa is C or S
SSLSILFFVGRKPKVLKVYPMIVRSX

SEQ ID NO: 74185 - protein, 35 aa, Artificial Sequence
  Cyclic GFR-binding peptide
  MOD_RES (6)..(7): Xaa is C or S
KASKAXXVPTKLSSLSILFFDKGVVTYLKVYPGMA

SEQ ID NO: 74186 - protein, 27 aa, Artificial Sequence
  Cyclic GFR-binding peptide
RVHHSSLSVLFFEYVRKKPKLLKVYPR

SEQ ID NO: 74187 - protein, 31 aa, Artificial Sequence
  Cyclic GFR-binding peptide
  MOD_RES (6)..(6): Xaa is C or S
VTKPTXAPTKLSSLSVLFFDDSSNVILKVYP

SEQ ID NO: 74188 - protein, 30 aa, Artificial Sequence
  Cyclic GFR-binding peptide
  MOD_RES (27)..(29): Xaa is C or S
TSSLSMLFFDNGRVLLLKVYPMIVEEXGXL

SEQ ID NO: 74189 - protein, 32 aa, Artificial Sequence
  Cyclic GFR-binding peptide
  MOD_RES (4)..(5): Xaa is C or S
PSTXXAPVKTSSLSMLFFDNGRVLLLKVYPMI

SEQ ID NO: 74190 - protein, 29 aa, Artificial Sequence
  Cyclic GFR-binding peptide
  MOD_RES (2)..(3): Xaa is C or S
PXXAPTQLSSLSVLFFDDSSNVILKVYPN

SEQ ID NO: 74191 - protein, 22 aa, Artificial Sequence
  Cyclic GFR-binding peptide
LSSLSILFFDAANNVVLKVYPD

SEQ ID NO: 74192 - protein, 26 aa, Artificial Sequence
  Cyclic GFR-binding peptide
LSSLSVLFFDSSNNVILKVYPNMVVK

SEQ ID NO: 74193 - protein, 32 aa, Artificial Sequence; identical to SEQ ID NO: 25529
  Cyclic GFR-binding peptide
  MOD_RES (1)..(1): Xaa is C or S

SEQ ID NO: 74194 - protein, 24 aa, Artificial Sequence
  Cyclic GFR-binding peptide
PARLSSLSILFFDAANNVVLKVYP

SEQ ID NO: 74195 - protein, 38 aa, Artificial Sequence; identical to SEQ ID NO: 25530
  Cyclic GFR-binding peptide
  MOD_RES (3)..(4)..(35)..(37): Xaa is C or S

SEQ ID NO: 74196 - protein, 31 aa, Artificial Sequence
  Cyclic GFR-binding peptide
  MOD_RES (2)..(3): Xaa is C or S
TXXAPVKTSSLSMLFFDNGRVLLLKVYPMIV

SEQ ID NO: 74197 - protein, 21 aa, Artificial Sequence
  Cyclic GFR-binding peptide
LSSLSILFFDAANNVVLKVYP

SEQ ID NO: 74198 - protein, 35 aa, Artificial Sequence
  Cyclic GFR-binding peptide
  MOD_RES (2)..(3)..(35): Xaa is C or S
AXXVPTELSSLSMLFFDENEKVVLKVYPDMVVEGX

SEQ ID NO: 74199 - protein, 34 aa, Artificial Sequence
  Cyclic GFR-binding peptide
  MOD_RES (5)..(6): Xaa is C or S
SAGPXXTPTKMSSLSMLFFNDKQQIILKVYPGMV

SEQ ID NO: 74200 - protein, 28 aa, Artificial Sequence
  Cyclic GFR-binding peptide
  MOD_RES (1)..(1): Xaa is C or S
XVPTELSSLSMLFFDEYDKVVLKVYPEM

SEQ ID NO: 74201 - protein, 34 aa, Artificial Sequence
  Cyclic GFR-binding peptide
  MOD_RES (5)..(6): Xaa is C or S
VPSTXXAPVKTSSLSMLFFDNGRVLLLKVYPMIV

SEQ ID NO: 74202 - protein, 33 aa, Artificial Sequence
  Cyclic GFR-binding peptide
  MOD_RES (33)..(33): Xaa is C or S
PTEESSLSMLFFRIKPHQGQHLKVYPFLQHNKX

SEQ ID NO: 74203 - protein, 24 aa, Artificial Sequence
  Cyclic GFR-binding peptide
SSLSMLFFDEYDKVVLKVYPEMVV

SEQ ID NO: 74204 - protein, 27 aa, Artificial Sequence
  Cyclic GFR-binding peptide
HSSLSVLFFEYVRKKPKLLKVYPRLEE

SEQ ID NO: 74205 - protein, 36 aa, Artificial Sequence; identical to SEQ ID NO: 25537
  Cyclic GFR-binding peptide
  MOD_RES (1)..(2)..(34)..(36): Xaa is C or S

SEQ ID NO: 74206 - protein, 44 aa, Artificial Sequence; identical to SEQ ID NO: 25538
  Cyclic GFR-binding peptide
  MOD_RES (5)..(42)..(44): Xaa is C or S

SEQ ID NO: 74207 - protein, 38 aa, Artificial Sequence; identical to SEQ ID NO: 25539
  Cyclic GFR-binding peptide
  MOD_RES (5)..(6)..(37): Xaa is C or S

SEQ ID NO: 74208 - protein, 34 aa, Artificial Sequence; identical to SEQ ID NO: 25540
  Cyclic GFR-binding peptide
  MOD_RES (1)..(2)..(34): Xaa is C or S

SEQ ID NO: 74209 - protein, 32 aa, Artificial Sequence
  Cyclic GFR-binding peptide
  MOD_RES (4)..(5): Xaa is C or S
AGPXXTPTKMSSLSMLFFNDKQQIILKVYPGM

SEQ ID NO: 74210 - protein, 39 aa, Artificial Sequence; identical to SEQ ID NO: 25542
  Cyclic GFR-binding peptide
  MOD_RES (5)..(39): Xaa is C or S

SEQ ID NO: 74211 - protein, 30 aa, Artificial Sequence
  Cyclic GFR-binding peptide
PTQLSSLSVLFFDDSSNVILKVYPNMVVRA

SEQ ID NO: 74212 - protein, 25 aa, Artificial Sequence
  Cyclic GFR-binding peptide
PARLSSLSILFFDAANNVVLKVYPD

SEQ ID NO: 74213 - protein, 28 aa, Artificial Sequence
  Cyclic GFR-binding peptide
HHSSLSVLFFEYVRKKPKLLKVYPRLEE

SEQ ID NO: 74214 - protein, 30 aa, Artificial Sequence
  Cyclic GFR-binding peptide
  MOD_RES (4)..(5): Xaa is C or S
PKAXXVPTELSSLSMLFFDENEKVVLKVYP

SEQ ID NO: 74215 - protein, 29 aa, Artificial Sequence
  Cyclic GFR-binding peptide
  MOD_RES (1)..(1): Xaa is C or S
XVSQDLSSLSILFFIGKTPKILKVYPMIV

SEQ ID NO: 74216 - protein, 31 aa, Artificial Sequence; identical to SEQ ID NO: 25543
  Cyclic GFR-binding peptide
  MOD_RES (1)..(1): Xaa is C or S

SEQ ID NO: 74217 - protein, 24 aa, Artificial Sequence
  Cyclic GFR-binding peptide
TKLSSLSVLFFDDMGVPTLKVYPE

SEQ ID NO: 74218 - protein, 23 aa, Artificial Sequence
  Cyclic GFR-binding peptide
ALSSLSILFFVGRKPKVLKVYPM

SEQ ID NO: 74219 - protein, 38 aa, Artificial Sequence; identical to SEQ ID NO: 25544
  Cyclic GFR-binding peptide
  MOD_RES (4)..(38): Xaa is C or S

SEQ ID NO: 74220 - protein, 34 aa, Artificial Sequence; identical to SEQ ID NO: 25545
  Cyclic GFR-binding peptide
  MOD_RES (1)..(33): Xaa is C or S

SEQ ID NO: 74221 - protein, 31 aa, Artificial Sequence
  Cyclic GFR-binding peptide
  MOD_RES (29)..(31): Xaa is C or S
KLSSLSVLFFDDSSNVILKVYPNMVVRSXGX

SEQ ID NO: 74222 - protein, 33 aa, Artificial Sequence
  Cyclic GFR-binding peptide
  MOD_RES (5)..(6): Xaa is C or S
VPKPXXAPTQLSSLSVLFFDDSSNVILKVYPNM

SEQ ID NO: 74223 - protein, 27 aa, Artificial Sequence
  Cyclic GFR-binding peptide
KLSSLSILFFDKGVVTYLKVYPGMAVS

SEQ ID NO: 74224 - protein, 34 aa, Artificial Sequence
  Cyclic GFR-binding peptide
  MOD_RES (6)..(7): Xaa is C or S
AVPKAXXAPTKLSSLSVLFFDSSNNVILKVYPNM

SEQ ID NO: 74225 - protein, 32 aa, Artificial Sequence
  Cyclic GFR-binding peptide
  MOD_RES (6)..(7): Xaa is C or S
AAPASXXVPARLSSLSILFFDAANNVVLKVYP

SEQ ID NO: 74226 - protein, 33 aa, Artificial Sequence
  Cyclic GFR-binding peptide
  MOD_RES (6)..(6): Xaa is C or S
VTKPTXAPTKLSSLSVLFFDDSSNVILKVYPNM

SEQ ID NO: 74227 - protein, 29 aa, Artificial Sequence
  Cyclic GFR-binding peptide
  MOD_RES (3)..(4): Xaa is C or S
SPXXVSQDLSSLSILFFIGKTPKILKVYP

SEQ ID NO: 74228 - protein, 35 aa, Artificial Sequence; identical to SEQ ID NO: 25550
  Cyclic GFR-binding peptide
  MOD_RES (32)..(34): Xaa is C or S

SEQ ID NO: 74229 - protein, 29 aa, Artificial Sequence
  Cyclic GFR-binding peptide
  MOD_RES (1)..(1): Xaa is C or S
XVPTELSSLSMLFFDENEKVVLKVYPDMV

SEQ ID NO: 74230 - protein, 36 aa, Artificial Sequence; identical to SEQ ID NO: 25552
  Cyclic GFR-binding peptide
  MOD_RES (1)..(2)..(33)..(35): Xaa is C or S

SEQ ID NO: 74231 - protein, 33 aa, Artificial Sequence
  Cyclic GFR-binding peptide
  MOD_RES (31)..(33): Xaa is C or S
EESSLSMLFFRIKPHQGQHLKVYPFLQHNKXEX

SEQ ID NO: 74232 - protein, 38 aa, Artificial Sequence; identical to SEQ ID NO: 25553
  Cyclic GFR-binding peptide
  MOD_RES (5)..(6)..(38): Xaa is C or S

SEQ ID NO: 74233 - protein, 29 aa, Artificial Sequence
  Cyclic GFR-binding peptide
  MOD_RES (2)..(3): Xaa is C or S
PXXVPQDLSSLSILFFVGRTPKVLKVYPM

SEQ ID NO: 74234 - protein, 20 aa, Artificial Sequence
  Cyclic GFR-binding peptide
SSLSMLFFDEYDKVVLKVYP

SEQ ID NO: 74235 - protein, 28 aa, Artificial Sequence
  Cyclic GFR-binding peptide
  MOD_RES (1)..(2): Xaa is C or S
XXAPTKLSSLSVLFFDDSSNVILKVYPN

SEQ ID NO: 74236 - protein, 32 aa, Artificial Sequence
  Cyclic GFR-binding peptide
  MOD_RES (2)..(3): Xaa is C or S
PXXTPTKMSSLSMLFFNDKQQIILKVYPGMVV

SEQ ID NO: 74237 - protein, 27 aa, Artificial Sequence
  Cyclic GFR-binding peptide
LSSLSILFFDKGVVTYLKVYPGMAVSE

SEQ ID NO: 74238 - protein, 32 aa, Artificial Sequence
  Cyclic GFR-binding peptide
  MOD_RES (6)..(7): Xaa is C or S
GSAGPXXTPTKMSSLSMLFFNDKQQIILKVYP

SEQ ID NO: 74239 - protein, 26 aa, Artificial Sequence
  Cyclic GFR-binding peptide
PVKTSSLSMLFFDNGRVLLLKVYPMI

SEQ ID NO: 74240 - protein, 23 aa, Artificial Sequence
  Cyclic GFR-binding peptide
TKLSSLSVLFFDDSSNVILKVYP

SEQ ID NO: 74241 - protein, 28 aa, Artificial Sequence
  Cyclic GFR-binding peptide
QLSSLSVLFFDDSSNVILKVYPNMVVRA

SEQ ID NO: 74242 - protein, 30 aa, Artificial Sequence
  Cyclic GFR-binding peptide
  MOD_RES (30)..(30): Xaa is C or S
TELSSLSMLFFDENEKVVLKVYPDMVVEGX

SEQ ID NO: 74243 - protein, 27 aa, Artificial Sequence
  Cyclic GFR-binding peptide
PTRLSSLSILFFDSANNVVLKVYPDMV

SEQ ID NO: 74244 - protein, 29 aa, Artificial Sequence
  Cyclic GFR-binding peptide
  MOD_RES (3)..(3): Xaa is C or S
PTXAPTKLSSLSVLFFDDSSNVILKVYPN

SEQ ID NO: 74245 - protein, 29 aa, Artificial Sequence
  Cyclic GFR-binding peptide
  MOD_RES (1)..(1): Xaa is C or S
XAPTQLSSLSVLFFDDSSNVILKVYPNMV

SEQ ID NO: 74246 - protein, 29 aa, Artificial Sequence
  Cyclic GFR-binding peptide
  MOD_RES (2)..(3): Xaa is C or S
AXXVPTKLSSLSILFFDKGVVTYLKVYPG

SEQ ID NO: 74247 - protein, 30 aa, Artificial Sequence
  Cyclic GFR-binding peptide
  MOD_RES (4)..(5): Xaa is C or S
GKAXXVPTKLSSLSVLFFDDMGVPTLKVYP

SEQ ID NO: 74248 - protein, 31 aa, Artificial Sequence
  Cyclic GFR-binding peptide
  MOD_RES (5)..(6): Xaa is C or S
VGKAXXVPTKLSSLSVLFFDDMGVPTLKVYP

SEQ ID NO: 74249 - protein, 35 aa, Artificial Sequence
  Cyclic GFR-binding peptide
  MOD_RES (32)..(34): Xaa is C or S
TEESSLSMLFFRIKPHQGQHLKVYPFLQHNKXEXR

SEQ ID NO: 74250 - protein, 24 aa, Artificial Sequence
  Cyclic GFR-binding peptide
DLSSLSILFFVGRTPKVLKVYPMV

SEQ ID NO: 74251 - protein, 31 aa, Artificial Sequence
  Cyclic GFR-binding peptide
  MOD_RES (2)..(2): Xaa is C or S
KXQPSRVHHSSLSVLFFEYVRKKPKLLKVYP

SEQ ID NO: 74252 - protein, 22 aa, Artificial Sequence
  Cyclic GFR-binding peptide
SSLSVLFFEYVRKKPKLLKVYP

SEQ ID NO: 74253 - protein, 31 aa, Artificial Sequence
  Cyclic GFR-binding peptide
  MOD_RES (3)..(4): Xaa is C or S
KAXXAPTKLSSLSVLFFDSSNNVILKVYPNM

SEQ ID NO: 74254 - protein, 37 aa, Artificial Sequence; identical to SEQ ID NO: 25557
  Cyclic GFR-binding peptide
  MOD_RES (6)..(7): Xaa is C or S

SEQ ID NO: 74255 - protein, 22 aa, Artificial Sequence
  Cyclic GFR-binding peptide
SSLSILFFDSANNVVLKVYPDM

SEQ ID NO: 74256 - protein, 32 aa, Artificial Sequence
  Cyclic GFR-binding peptide
  MOD_RES (5)..(6): Xaa is C or S
IPKAXXVPTELSSLSMLFFDEYDKVVLKVYPE

SEQ ID NO: 74257 - protein, 31 aa, Artificial Sequence
  Cyclic GFR-binding peptide
RVHHSSLSVLFFEYVRKKPKLLKVYPRLEEH

SEQ ID NO: 74258 - protein, 28 aa, Artificial Sequence
  Cyclic GFR-binding peptide
VPTELSSLSMLFFDEYDKVVLKVYPEMV

SEQ ID NO: 74259 - protein, 35 aa, Artificial Sequence; identical to SEQ ID NO: 25559
  Cyclic GFR-binding peptide
  MOD_RES (2)..(3)..(35): Xaa is C or S

SEQ ID NO: 74260 - protein, 32 aa, Artificial Sequence
  Cyclic GFR-binding peptide
  MOD_RES (6)..(7): Xaa is C or S
KASKAXXVPTKLSSLSILFFDKGVVTYLKVYP

SEQ ID NO: 74261 - protein, 30 aa, Artificial Sequence
  Cyclic GFR-binding peptide
  MOD_RES (28)..(30): Xaa is C or S
LSSLSVLFFDDSSNVILKVYPNMVVRAXGX

SEQ ID NO: 74262 - protein, 35 aa, Artificial Sequence; identical to SEQ ID NO: 25561
  Cyclic GFR-binding peptide
  MOD_RES (3)..(4)..(35): Xaa is C or S

SEQ ID NO: 74263 - protein, 35 aa, Artificial Sequence
  Cyclic GFR-binding peptide
  MOD_RES (1)..(2)..(34): Xaa is C or S
XXVPTELSSLSMLFFDENEKVVLKVYPDMVVEGXG

SEQ ID NO: 74264 - protein, 35 aa, Artificial Sequence
  Cyclic GFR-binding peptide
  MOD_RES (6)..(7): Xaa is C or S
ASAAPXXVPQALSSLSILFFVGRKPKVLKVYPMIV

SEQ ID NO: 74265 - protein, 26 aa, Artificial Sequence
  Cyclic GFR-binding peptide
TEESSLSMLFFRIKPHQGQHLKVYPF

SEQ ID NO: 74266 - protein, 30 aa, Artificial Sequence
  Cyclic GFR-binding peptide
VPTEESSLSMLFFRIKPHQGQHLKVYPFLQ

SEQ ID NO: 74267 - protein, 37 aa, Artificial Sequence; identical to SEQ ID NO: 25563
  Cyclic GFR-binding peptide
  MOD_RES (5)..(6): Xaa is C or S

SEQ ID NO: 74268 - protein, 24 aa, Artificial Sequence
  Cyclic GFR-binding peptide
PTQLSSLSVLFFDDSSNVILKVYP

SEQ ID NO: 74269 - protein, 27 aa, Artificial Sequence
  Cyclic GFR-binding peptide
MSSLSMLFFNDKQQIILKVYPGMVVDR

SEQ ID NO: 74270 - protein, 29 aa, Artificial Sequence
  Cyclic GFR-binding peptide
  MOD_RES (2)..(3): Xaa is C or S
AXXAPTKLSSLSVLFFDSSNNVILKVYPN

SEQ ID NO: 74271 - protein, 30 aa, Artificial Sequence
  Cyclic GFR-binding peptide
  MOD_RES (3)..(4): Xaa is C or S
KAXXVPTKLSSLSILFFDKGVVTYLKVYPG

SEQ ID NO: 74272 - protein, 35 aa, Artificial Sequence; identical to SEQ ID NO: 25567
  Cyclic GFR-binding peptide
  MOD_RES (4)..(4): Xaa is C or S

SEQ ID NO: 74273 - protein, 36 aa, Artificial Sequence; identical to SEQ ID NO: 25568
  Cyclic GFR-binding peptide
  MOD_RES (1)..(2)..(34)..(36): Xaa is C or S

SEQ ID NO: 74274 - protein, 21 aa, Artificial Sequence
  Cyclic GFR-binding peptide
MSSLSMLFFNDKQQIILKVYP

SEQ ID NO: 74275 - protein, 32 aa, Artificial Sequence
  Cyclic GFR-binding peptide
  MOD_RES (5)..(6): Xaa is C or S
VPSTXXAPVKTSSLSMLFFDNGRVLLLKVYPM

SEQ ID NO: 74276 - protein, 32 aa, Artificial Sequence
  Cyclic GFR-binding peptide
  MOD_RES (3)..(4): Xaa is C or S
KAXXAPTKLSSLSVLFFDSSNNVILKVYPNMV

SEQ ID NO: 74277 - protein, 37 aa, Artificial Sequence; identical to SEQ ID NO: 25571
  Cyclic GFR-binding peptide
  MOD_RES (2)..(3)..(35)..(37): Xaa is C or S

SEQ ID NO: 74278 - protein, 38 aa, Artificial Sequence; identical to SEQ ID NO: 25572
  Cyclic GFR-binding peptide
  MOD_RES (5)..(6)..(38): Xaa is C or S

SEQ ID NO: 74279 - protein, 27 aa, Artificial Sequence
  Cyclic GFR-binding peptide
LSSLSVLFFDSSNNVILKVYPNMVVKA

SEQ ID NO: 74280 - protein, 34 aa, Artificial Sequence; identical to SEQ ID NO: 25573
  Cyclic GFR-binding peptide
  MOD_RES (1)..(33): Xaa is C or S

SEQ ID NO: 74281 - protein, 34 aa, Artificial Sequence
  Cyclic GFR-binding peptide
  MOD_RES (31)..(33): Xaa is C or S
PTELSSLSMLFFDENEKVVLKVYPDMVVEGXGXR

SEQ ID NO: 74282 - protein, 24 aa, Artificial Sequence
  Cyclic GFR-binding peptide
LSSLSVLFFDSSNNVILKVYPNMV

SEQ ID NO: 74283 - protein, 26 aa, Artificial Sequence
  Cyclic GFR-binding peptide
TKLSSLSILFFDKGVVTYLKVYPGMA

SEQ ID NO: 74284 - protein, 36 aa, Artificial Sequence; identical to SEQ ID NO: 25574
  Cyclic GFR-binding peptide
  MOD_RES (1)..(2)..(33)..(35): Xaa is C or S

SEQ ID NO: 74285 - protein, 35 aa, Artificial Sequence; identical to SEQ ID NO: 25575
  Cyclic GFR-binding peptide
  MOD_RES (1)..(33)..(35): Xaa is C or S

SEQ ID NO: 74286 - protein, 37 aa, Artificial Sequence; identical to SEQ ID NO: 25576
  Cyclic GFR-binding peptide
  MOD_RES (2)..(3)..(35)..(37): Xaa is C or S

SEQ ID NO: 74287 - protein, 24 aa, Artificial Sequence
  Cyclic GFR-binding peptide
KLSSLSVLFFDSSNNVILKVYPNM

SEQ ID NO: 74288 - protein, 26 aa, Artificial Sequence
  Cyclic GFR-binding peptide
TKLSSLSVLFFDDSSNVILKVYPNMV

SEQ ID NO: 74289 - protein, 28 aa, Artificial Sequence
  Cyclic GFR-binding peptide
HSSLSVLFFEYVRKKPKLLKVYPRLEEH

SEQ ID NO: 74290 - protein, 36 aa, Artificial Sequence; identical to SEQ ID NO: 25578
  Cyclic GFR-binding peptide
  MOD_RES (3)..(4)..(35): Xaa is C or S

SEQ ID NO: 74291 - protein, 36 aa, Artificial Sequence
  Cyclic GFR-binding peptide
  MOD_RES (2)..(3)..(35): Xaa is C or S
AXXVPTELSSLSMLFFDENEKVVLKVYPDMVVEGXG

SEQ ID NO: 74292 - protein, 34 aa, Artificial Sequence
  Cyclic GFR-binding peptide
  MOD_RES (31)..(33): Xaa is C or S
PTRLSSLSILFFDSANNVVLKVYPDMVVESXGXR

SEQ ID NO: 74293 - protein, 35 aa, Artificial Sequence; identical to SEQ ID NO: 25579
  Cyclic GFR-binding peptide
  MOD_RES (1)..(33)..(35): Xaa is C or S

SEQ ID NO: 74294 - protein, 27 aa, Artificial Sequence
  Cyclic GFR-binding peptide
PQALSSLSILFFVGRKPKVLKVYPMIV

SEQ ID NO: 74295 - protein, 35 aa, Artificial Sequence; identical to SEQ ID NO: 25581
  Cyclic GFR-binding peptide
  MOD_RES (4)..(5): Xaa is C or S

SEQ ID NO: 74296 - protein, 35 aa, Artificial Sequence; identical to SEQ ID NO: 25582
  Cyclic GFR-binding peptide
  MOD_RES (4)..(5): Xaa is C or S

SEQ ID NO: 74297 - protein, 23 aa, Artificial Sequence
  Cyclic GFR-binding peptide
LSSLSMLFFDENEKVVLKVYPDM

SEQ ID NO: 74298 - protein, 36 aa, Artificial Sequence; identical to SEQ ID NO: 25584
  Cyclic GFR-binding peptide
  MOD_RES (4)..(5): Xaa is C or S

SEQ ID NO: 74299 - protein, 37 aa, Artificial Sequence; identical to SEQ ID NO: 25586
  Cyclic GFR-binding peptide
  MOD_RES (1)..(2)..(34)..(36): Xaa is C or S

SEQ ID NO: 74300 - protein, 30 aa, Artificial Sequence
  Cyclic GFR-binding peptide
HHSSLSVLFFEYVRKKPKLLKVYPRLEEHL

SEQ ID NO: 74301 - protein, 27 aa, Artificial Sequence
  Cyclic GFR-binding peptide
VHHSSLSVLFFEYVRKKPKLLKVYPRL

SEQ ID NO: 74302 - protein, 32 aa, Artificial Sequence
  Cyclic GFR-binding peptide
QPSRVHHSSLSVLFFEYVRKKPKLLKVYPRLE

SEQ ID NO: 74303 - protein, 32 aa, Artificial Sequence
  Cyclic GFR-binding peptide
PTEESSLSMLFFRIKPHQGQHLKVYPFLQHNK

SEQ ID NO: 74304 - protein, 27 aa, Artificial Sequence
  Cyclic GFR-binding peptide
  MOD_RES (1)..(1): Xaa is C or S
XAPTKLSSLSVLFFDDSSNVILKVYPN

SEQ ID NO: 74305 - protein, 30 aa, Artificial Sequence
  Cyclic GFR-binding peptide
  MOD_RES (3)..(3): Xaa is C or S
LEXVPTEESSLSMLFFRIKPHQGQHLKVYP

SEQ ID NO: 74306 - protein, 24 aa, Artificial Sequence
  Cyclic GFR-binding peptide
TKLSSLSVLFFDDSSNVILKVYPN

SEQ ID NO: 74307 - protein, 33 aa, Artificial Sequence
  Cyclic GFR-binding peptide
  MOD_RES (6)..(7): Xaa is C or S
KIPKAXXVPTELSSLSMLFFDENEKVVLKVYPD

SEQ ID NO: 74308 - protein, 37 aa, Artificial Sequence; identical to SEQ ID NO: 25598
  Cyclic GFR-binding peptide
  MOD_RES (5)..(6)..(37): Xaa is C or S

SEQ ID NO: 74309 - protein, 34 aa, Artificial Sequence
  Cyclic GFR-binding peptide
  MOD_RES (4)..(5): Xaa is C or S
PKAXXAPTKLSSLSVLFFDSSNNVILKVYPNMVV

SEQ ID NO: 74310 - protein, 29 aa, Artificial Sequence
  Cyclic GFR-binding peptide
  MOD_RES (27)..(29): Xaa is C or S
SSLSVLFFDDSSNVILKVYPNMVVRAXGX

SEQ ID NO: 74311 - protein, 37 aa, Artificial Sequence; identical to SEQ ID NO: 25601
  Cyclic GFR-binding peptide
  MOD_RES (1)..(2)..(34)..(36): Xaa is C or S

SEQ ID NO: 74312 - protein, 29 aa, Artificial Sequence
  Cyclic GFR-binding peptide
  MOD_RES (1)..(2): Xaa is C or S
XXVPTELSSLSMLFFDEYDKVVLKVYPEM

SEQ ID NO: 74313 - protein, 28 aa, Artificial Sequence
  Cyclic GFR-binding peptide
VSQDLSSLSILFFIGKTPKILKVYPMIV

SEQ ID NO: 74314 - protein, 35 aa, Artificial Sequence
  Cyclic GFR-binding peptide
  MOD_RES (2)..(2): Xaa is C or S
KXQPSRVHHSSLSVLFFEYVRKKPKLLKVYPRLEE

SEQ ID NO: 74315 - protein, 36 aa, Artificial Sequence; identical to SEQ ID NO: 25603
  Cyclic GFR-binding peptide
  MOD_RES (3)..(4)..(35): Xaa is C or S

SEQ ID NO: 74316 - protein, 35 aa, Artificial Sequence; identical to SEQ ID NO: 25604
  Cyclic GFR-binding peptide
  MOD_RES (4)..(5): Xaa is C or S

SEQ ID NO: 74317 - protein, 26 aa, Artificial Sequence
  Cyclic GFR-binding peptide
PTELSSLSMLFFDENEKVVLKVYPDM

SEQ ID NO: 74318 - protein, 41 aa, Artificial Sequence; identical to SEQ ID NO: 25605
  Cyclic GFR-binding peptide
  MOD_RES (5)..(6)..(38)..(40): Xaa is C or S

SEQ ID NO: 74319 - protein, 31 aa, Artificial Sequence
  Cyclic GFR-binding peptide
  MOD_RES (28)..(30): Xaa is C or S
MSSLSMLFFNDKQQIILKVYPGMVVDRXGXS

SEQ ID NO: 74320 - protein, 27 aa, Artificial Sequence
  Cyclic GFR-binding peptide
ESSLSMLFFRIKPHQGQHLKVYPFLQH
